United States Patent Application Publication US 2004/0031072 A1 - sequence listing, part 36

SEQ ID NO: 199002 - protein, 48 aa, Glycine max
  Clone ID: PAT_MRT3847_21723C.1.pep
STLFIRPKFMSSAVSCNLKWEPIIFMIKPLNIMKVHVSPKKNYKRKPG

SEQ ID NO: 199003 - protein, 77 aa, Glycine max
  unsure (1)..(77): unsure at all Xaa locations
  Clone ID: PAT_MRT3847_21724C.1.pep
FQVAPAELEAMLSAQQGISDAAVVRMREXSARESQVSFDVXSNGSDIADDHIMNYISQPXVFFTSRICKVFFTDSIP

SEQ ID NO: 199004 - protein, 78 aa, Glycine max
  Clone ID: PAT_MRT3847_21725C.1.pep
WSSPRWSAISLCSSRPATVFLCLENNYSTDTCLRHTCPHVDCGPVPWSAALMCRAHVMQHLRLATRCTSSGIAGAHYS

SEQ ID NO: 199005 - protein, 87 aa, Glycine max
  unsure (1)..(87): unsure at all Xaa locations
  Clone ID: PAT_MRT3847_21726C.1.pep
EASLHKTNIGHNLGDFLENFYICPVFGNEKGKGLRGGIKFVTDKKKKTPAKAETTALPERFRXLGILFGKGGLHGKVFRNKPPMGFT

SEQ ID NO: 199006 - protein, 196 aa, Glycine max
  unsure (1)..(196): unsure at all Xaa locations
  Clone ID: PAT_MRT3847_21727C.1.pep
MNTNILGDCKSGNSDIGCPPNGTVSVIKNSVPATTNTSSDATLGRHLARRLVQVGVKDVFSVPGDFNLTLLDHLIAEPQLKNVGCCNELNAGYAADGYARCRGVGACVVTFSVGGLSVINAIAGAYSENLPLICIVGGPNTNDFGTNRILHHTIXGSPDFSQELRCFQTVTCYXAXVVNNIEDAHXMIDLAISTCL

SEQ ID NO: 199007 - protein, 78 aa, Glycine max
  Clone ID: PAT_MRT3847_21728C.1.pep
NCLDFSRLQETRKRGPLLYKKHGLFWGKPAHLGGGPGDLRKTQSTGGGQKPHDNGEQSALFIDRGPGEKNHPGGPGLF

SEQ ID NO: 199008 - protein, 187 aa, Glycine max
  unsure (1)..(187): unsure at all Xaa locations
  Clone ID: PAT_MRT3847_21729C.1.pep
PSFMHIGLFANGIGCSQSSTVTNELVAVKMIAIAFNDLMDTQSTRHERKQHKHLHHXYDKGWRDVYGTDLCIXYNDDCIGAELMDTDLQRIIRWNQNLLQEHCLYFLHQILRWLNYIHGSNVRHXDLKSSYLRANCVRDLKIIDIGLAIPTLESDFMTXYGVTRWNITRELXWNHLDYTSDIDNWLV

SEQ ID NO: 199009 - protein, 37 aa, Glycine max
  Clone ID: PAT_MRT3847_2172C.1.pep
FPGSENTTRFRSPRNTPLNITAYSPTAQKATGSNLLL

SEQ ID NO: 199010 - protein, 160 aa, Glycine max
  unsure (1)..(160): unsure at all Xaa locations
  Clone ID: PAT_MRT3847_21730C.1.pep
ECPLSSSLLFFTRRLFHLKPHLATLLHPHPPLFFLLLSLGGGGGGGGGVRGGGGRLSEQASPNRRLFRKILLASQICCGSGLSSETISENGHHWIGLDISAXVXXEREVEGDLLLGXMGQGLGICPGVLDGAISISAVQVSIRKRLKSAWEIQTPIPILF

SEQ ID NO: 199011 - protein, 47 aa, Glycine max
  Clone ID: PAT_MRT3847_21731C.1.pep
LHSSVVNLFMQQILDGHWDESIVTLNKIGLADENVVQAASFLILEQK

SEQ ID NO: 199012 - protein, 62 aa, Glycine max
  Clone ID: PAT_MRT3847_21732C.1.pep
YSLSCFEDKTIRQVVENQARKVEKFIYIECSLLYSILLQMKSLDKVVKRRILSTYTLSPQYS

SEQ ID NO: 199013 - protein, 71 aa, Glycine max
  Clone ID: PAT_MRT3847_21733C.1.pep
NQICAQFGETLELTWDGHEREIVTLLRNAVWPSQAVGLSVRRLPKDTLQCELFGGSTMSRTSSRIRNLTKS

SEQ ID NO: 199014 - protein, 266 aa, Glycine max
  Clone ID: PAT_MRT3847_21734C.1.pep
EGWLDDEPEEIDDPEATKPEDWDDEEDGEWEAPKIENPKCEAAPGCGEWKRPMKRNPAYKGKWSAPYIDNPNYKGIWKPREIPNPEYFELEKPDFKPIAALGIEIWTMQDGILFDNILIANDDKVAESYRETTWKPKFTIEKEKQKAEDEAATGSDGIAGFQKKVFDLLYKIADIPFLSDHKSKIYDLIEKAEKQPNLTIGILVAVVVVFVSIFFRLIFGGKKPAKVEKKPERTEASNNQGGAENEENKEKEEASNAPRRRPRRED

SEQ ID NO: 199015 - protein, 167 aa, Glycine max
  unsure (1)..(167): unsure at all Xaa locations
  Clone ID: PAT_MRT3847_21735C.1.pep
MGERKGIPMALGLLAMILFFIASSSSHLVRASDDADDAIFYESFDEDFDGRWIVSDKEDYNGVWKHAKSDGHDDYGLLVSEQARKYAIVKELAESVSLKDGTVVLQFETRLQNGLECGGAYIKYLRPQESGWKPKEFDNESPYSIMXWSXDKCGATNKVHFIFKHKN

SEQ ID NO: 199016 - protein, 551 aa, Glycine max
  unsure (1)..(551): unsure at all Xaa locations
  Clone ID: PAT_MRT3847_21736C.1.pep
MGERKGIPMALGLLAMILFFIASSSSHLVRASDDADDAIFYESFDEDFDGRWIVSDKEDYNGVWKHAKSDGHDDYGLLVSEQARKYAIVKELDESVSLKDGTVVLQFETRLQNGLECGGAYIKYLRPQESGWKPKEFDNESPYSIMFGPDKCGATNKVHFIFKHKNPKSGEYVEHHLKYPPSVPSDKLTHVYTAILKPDNELQILIDGXEEKKKANFLXSAEDFEPPLIPSKTIPDPDDKKPEDWDERAKIPDPSAVKPDDXDEDAPMEILXDKKQTKPEGWLDDEPEEIDDPEATKPEDWDDEEDGEWEAPKIENPKCEAAPGCGEWKRPTKRNPAYKGKXSAPYIDNPSYKGIWKPREIPNPEYFELAKPDFEPIAAIGIEIWTMQDGIVFNNFLIAXDYKVAESYEGTTXKPNFTVEKDELEGGKIALLGXSDGISGFQKDEFDLLYKIADIPFLSEHKSKIFDLIEKAEXKQPNLTIGILVAVVVVFVSIFFRLIFGGKKPAKVEKKPERTEASNNQGSGENEENKEKEKQKEEASNAARRRPRRET

SEQ ID NO: 199017 - protein, 206 aa, Glycine max
  Clone ID: PAT_MRT3847_21737C.1.pep
MGETKDTHIVEIPVDQEHHNNHHKNVLCSMTSNMIEAIEDHPLTEISESPGHLLLLKLWQREEELFAKRIAHKETRMDTIKAELFQLSSFFFIFHAFFLTLLFTSWTKAQQQAQPHHSVCHKWWLPSMVSLCTSLVFVVLVQVKVHRYWKVWGHLQRERNDGRAVTRCIQELRMKGASFDLSKEPNSSSSVKKMKSSSVEIKWRPL

SEQ ID NO: 199018 - protein, 84 aa, Glycine max
  Clone ID: PAT_MRT3847_21738C.1.pep
RSYRVMLVLFSLFMFVIPSMLSNDSCGSGFVPLTPIRCPGRSHAWLPHPRLPHPRFPPEISASSFEVARPVPPSFNRPRNIHYP

SEQ ID NO: 199019 - protein, 66 aa, Glycine max
  Clone ID: PAT_MRT3847_21739C.1.pep
LILHVLWPWSNYCPYRITTESQRTTSCSSAEPATSFAKLRSWARRVVFPVAGQSLKIVPCAFLSVV

SEQ ID NO: 199020 - protein, 79 aa, Glycine max
  unsure (1)..(79): unsure at all Xaa locations
  Clone ID: PAT_MRT3847_2173C.1.pep
NLIERWQLENLGAVLNGLGSSCLXSARKSGSTNRFCATAIGGKVGAAVTVNPRRLIVVTAAAPKKSWLPGVRRGGNLVD

SEQ ID NO: 199021 - protein, 59 aa, Glycine max
  Clone ID: PAT_MRT3847_21740C.1.pep
QQHIFVMGIKYKRFSKLTLIIVFKKLISILDFLKCGGISFYCHTAALPLRHANMWSSCD

SEQ ID NO: 199022 - protein, 69 aa, Glycine max
  Clone ID: PAT_MRT3847_21741C.1.pep
IPKCCISILIHPVREPLNYRPASMRVPQVYKEDSVVAVSNLLAVILQGYEMLSEAHARRPACILGANTV

SEQ ID NO: 199023 - protein, 101 aa, Glycine max
  Clone ID: PAT_MRT3847_21742C.1.pep
YLFNFLKPFMADAASSRFSHQKDRWIGRALGLHHSPTHLHLHVNLDDATSANNDCQSVHATIAADKERYIYTYAHIYLEACIITKLSETYIGVKRLIGYSE

SEQ ID NO: 199024 - protein, 195 aa, Glycine max
  Clone ID: PAT_MRT3847_21743C.1.pep
FFCNSKDCLRRLQNLLTLLQIKPIPLHAAMEQKRRLSNLERFSTNPQSVLLASDVAARGLDISYVDHVIHYQVPRTAELYIHRSGRTARMSNKGISLLLCEPKESYMYNKLCVAINDSKDLDTFPVDEVKLNKLRERVGVAKQLDVLTHRQKKTKSSDDFFREMAKKCEIDLEDRDDLFLKDENAPKEGKKIKNL

SEQ ID NO: 199025 - protein, 64 aa, Glycine max
  Clone ID: PAT_MRT3847_21744C.1.pep
ANQISKVFVNFLLHLSHCPSPTSNPYHTNIFLTEASDVALTLFSCWLRTKTSGFSCASHSNSFL

SEQ ID NO: 199026 - protein, 68 aa, Glycine max
  Clone ID: PAT_MRT3847_21745C.1.pep
DLDWFLTDRWAGQALFGTLTPDIIVLTLLYSIAGLGIAIVNDFKSVEGDRALGLQVYSIVLCLSITVL

SEQ ID NO: 199027 - protein, 46 aa, Glycine max
  Clone ID: PAT_MRT3847_21746C.1.pep
GEVNQHQMPKEGESTGIALCNPATSLHCRQHQRAEHHVASATSPTV

SEQ ID NO: 199028 - protein, 49 aa, Glycine max
  Clone ID: PAT_MRT3847_21747C.1.pep
MAPKGGFHFYEIGVSPCSLRNFWGVNERPRLIVPETLLNKLDLPSLLVP

SEQ ID NO: 199029 - protein, 45 aa, Glycine max
  Clone ID: PAT_MRT3847_21748C.1.pep
FSFSYKATHVTGFRELLLHSETLLKRKGLFVILELGIPMLLPHNV

SEQ ID NO: 199030 - protein, 43 aa, Glycine max
  Clone ID: PAT_MRT3847_21749C.1.pep
NSLVSRLSYKLPKRKENANPYTYFMCLNNHITPSTNLKKKISD

SEQ ID NO: 199031 - protein, 130 aa, Glycine max
  unsure (1)..(130): unsure at all Xaa locations
  Clone ID: PAT_MRT3847_2174C.1.pep
TCSAHAFADAALKMIIYLRVDDGNTITAATDETATLPDDDSPSQDIAEGKPVSFRDTSLARDVYSAITAGSHGKSPYLTHPSFNTCQTEHDLLRDLCRLSSSHLSLCRQWIPLGSXTMKLNATSDMMPET

SEQ ID NO: 199032 - protein, 130 aa, Glycine max
  unsure (1)..(130): unsure at all Xaa locations
  Clone ID: PAT_MRT3847_21750C.1.pep
MLFQTTTVNDEKLVLANTQDFFDGNFPADSWLPIGVNGLYTVRELPSEAGEVTVTCVGGQRGLSTTGWIIHEGNNRYSNVNKGIRADLGTGXKLIVCTRVDPFAIALLAVLFGAXNEFLSSNATYPMLTR

SEQ ID NO: 199033 - protein, 90 aa, Glycine max
  Clone ID: PAT_MRT3847_21751C.1.pep
LAHSELRVHRYDSPVSGLYALAGLGLTCLLAVSQNDSSNKLHDQVACARDLVHQNLILHLIGHAILTGQCDLEGPFVIEAVSQGELHVGA

SEQ ID NO: 199034 - protein, 56 aa, Glycine max
  Clone ID: PAT_MRT3847_21752C.1.pep
TNNESVRHVQPINSDSKIRVCSMSLYSVLFKYNSECMMHCAFEHYLSQTHMNISQF

SEQ ID NO: 199035 - protein, 66 aa, Glycine max
  Clone ID: PAT_MRT3847_21753C.1.pep
GDVRAHVWVLHIKLFVVKIALDCGNLTELAFFRNEVFGAEISKSDLASVLSKSRSISLNCASSVYI

SEQ ID NO: 199036 - protein, 191 aa, Glycine max
  Clone ID: PAT_MRT3847_21754C.1.pep
RSLLSIVLYTRSQTTAKNTKPLYNPLFHAMLAEAIANAIERTGERPCSIPYSIARYLKEMPADYTTLDLIHVLNYVANGEVADEIDYVKLSPTIPATNTAAATDRCSKAATKAASKPNADTTTTTAVAKADAKAEATTADTTAKPAYDPAKDAADKAAAKTTPMKTAVKAVSDPKSPMSETSPAKTTAAKA

SEQ ID NO: 199037 - protein, 95 aa, Glycine max
  Clone ID: PAT_MRT3847_21755C.1.pep
GGENVHQKFPASLLWTLFRNFSLHAVFFLYFMHITRKYNTYISVLKILGGHGSPRLFNAPPQGTPLGHFSETQVVGSSGLEIIKKRGVKLIINVS

SEQ ID NO: 199038 - protein, 76 aa, Glycine max
  unsure (1)..(76): unsure at all Xaa locations
  Clone ID: PAT_MRT3847_21756C.1.pep
TKPAPPSQTVRDARGGGSXSRGGFGRGERGRGRCGRXYGQNRGFSGDNGNDFQGGYGGRGYGDGAATGGSERERER

SEQ ID NO: 199039 - protein, 47 aa, Glycine max
  Clone ID: PAT_MRT3847_21757C.1.pep
RVHGPILASNFEHSPTPILSKSYHPTPHAVQRLVQLKAGAFSADKIK

SEQ ID NO: 199040 - protein, 54 aa, Glycine max
  unsure (1)..(54): unsure at all Xaa locations
  Clone ID: PAT_MRT3847_21758C.1.pep
IIFIXRAPLVRLLSSPLLRSPEPSXXXXEXKXDXYMLXSRTXRXXXXSXXXXXF

SEQ ID NO: 199041 - protein, 105 aa, Glycine max
  unsure (1)..(105): unsure at all Xaa locations
  Clone ID: PAT_MRT3847_21759C.1.pep
TXXPKXGKPTXAREXQIQNVIWXRKXXWXHSFKALSXIXPXXXXVDVXXLKXQVELAEGKTASGXTLGFXSWQILGGWLEEIGFNSPFPLADXKXXPIGFQFFHS

SEQ ID NO: 199042 - protein, 249 aa, Glycine max
  Clone ID: PAT_MRT3847_2175C.1.pep
MGEENKEEERKEETTEEKKEEEKKDEEPPEIVLKVDMHCEACARKVAKALKGFEGVEEVSADSKASKVVVKGKAADPIKVCERLQKKSGKKVELISPLPKPPEEKKEETKEEPPKEEKKDEPPPVVTVVLKVRMHCEPCAQVIQKRIRKIKGVESVETDLANDQVIVKGVVDPAKLVDHVYKRTKKQASIVKDEEKKEEEKKEEEEEVDTKTDIKRSEYWPLRSHVDYVDYPYASQIFSDENPNACTVM

SEQ ID NO: 199043 - protein, 115 aa, Glycine max
  Clone ID: PAT_MRT3847_21760C.1.pep
IVITLNLNMIRNIMVKESMTMNLRMVVVGTTNLGMGIAMQIPTMILITRSIIEEGGNMMREMTMVPITTNILIVVGKKMTTILNMQNLNHVTGREIVIWTMNIVTQISHSQEYDY

SEQ ID NO: 199044 - protein, 48 aa, Glycine max
  Clone ID: PAT_MRT3847_21761C.1.pep
EIGSQNSRWKQWEVHHPKNEYLGLCGSGCVGRITSVAGRLTCGIEEGV

SEQ ID NO: 199045 - protein, 123 aa, Glycine max
  unsure (1)..(123): unsure at all Xaa locations
  Clone ID: PAT_MRT3847_21762C.1.pep
WFPRDSSAPXISYAPFSCDSQLVFASFLDATICVFSASNLRLRCRINPSSYLPASVSSNIQPLVIAAHPQEPNQFALGLSDGGVHVFEPLESEGKWGVPPPIENGSASNVAATSVGPSDQAQR

SEQ ID NO: 199046 - protein, 407 aa, Glycine max
  unsure (1)..(407): unsure at all Xaa locations
  Clone ID: PAT_MRT3847_21763C.1.pep
MSNTRNLGDVKPRISEESNDKSKIWKLTEINEQSQCRSLKLPENVRVTKISRLIYTNSGNAILALASNAIHLLWKWQRNERNSSGKATATLQPQLWQPSSGILMTNDIADSNPEDAVPCFALSKNDSYVMSASGGKISLFNMMTFKTMTTFMPPPPAATFLAFHPQDNNIIAIGMDDSSIQIYNVRVDEVKSKLKGHNTRITGLALSHVLNVLDSSGADAQICVWNTDGREKQKSRFLQLPSGRTPPAQSETRVQFHQDQLQFLVVHEXQLAIYEATKLEXLKQWFPRDSXAPISYATFSCDSQLVYASFLDATICVFSASNLRLRCRINPSSYLPASVSSNXNPLVIAAHPQEPNQFAVGLSDGGVHVFEPLESEGKWGVPPPIENGSASNVAAASVGPSPDQAQR

SEQ ID NO: 199047 - protein, 59 aa, Glycine max
  Clone ID: PAT_MRT3847_21764C.1.pep
NKKLILINMGESGYVHISLMLNQQPTPIVLSLPQHFCLCQHKNPFPLYLISQPSTAVNI

SEQ ID NO: 199048 - protein, 74 aa, Glycine max
  unsure (1)..(74): unsure at all Xaa locations
  Clone ID: PAT_MRT3847_21765C.1.pep
MFALRKSALNRVLCGSIXRTMSMQSRQKRTPNSDDRYGDADLPTGDTVYIETWTFVSSLVELDSDLSPVGSGTP

SEQ ID NO: 199049 - protein, 70 aa, Glycine max
  Clone ID: PAT_MRT3847_21766C.1.pep
LHQCVLRRVRDDYKRGQRGCVVLTAKMCIEHSKNQAKVVSQVKEHTQKSYQTRKNTTQQNRKEISSDLSS

SEQ ID NO: 199050 - protein, 40 aa, Glycine max
  Clone ID: PAT_MRT3847_21767C.1.pep
TFNLTGTQLYSLLNDKAQDKNSDSYHAKYEYDKWSREVAT

SEQ ID NO: 199051 - protein, 55 aa, Glycine max
  Clone ID: PAT_MRT3847_21768C.1.pep
RNSRVDPHARPHCCTAPKIQLKGTSTFRKGVVQKFAIVDRSMIALLDHDDTYAQE

SEQ ID NO: 199052 - protein, 105 aa, Glycine max
  unsure (1)..(105): unsure at all Xaa locations
  Clone ID: PAT_MRT3847_21769C.1.pep
ARGVSASEACEDIKDRGGLETEEADPYTAKDGECKXELKLLPYETLTETLSPXGAENESEHARALDRXATVAYQVVHGLHLYETGAYTSDTCGNTHHDANHAALA

SEQ ID NO: 199053 - protein, 127 aa, Glycine max
  Clone ID: PAT_MRT3847_2176C.1.pep
IALTLRAYLICRRTYINLRPHTNRHGIIIRVRCLPRQPKILRFNNKFLLSTRSGVINTTSTSNNITLTSNFRNMLSLRRVTIEKRRNSYSIMPDRDSYSLYFFLLLDFSSGLSLSLSLIGPFIFALL

SEQ ID NO: 199054 - protein, 40 aa, Glycine max
  Clone ID: PAT_MRT3847_21770C.1.pep
LVAETRLDSTLAPPFKVALLIIILALISRTLIGLTENLEP

SEQ ID NO: 199055 - protein, 33 aa, Glycine max
  Clone ID: PAT_MRT3847_21771C.1.pep
NKYFLLYIGMEIIFLIKYFKKQYYLLTVSYYTG

SEQ ID NO: 199056 - protein, 36 aa, Glycine max
  Clone ID: PAT_MRT3847_21772C.1.pep
QKIFFQGELLPAIYSQYINIILNICGPYKFINISSS

SEQ ID NO: 199057 - protein, 90 aa, Glycine max
  Clone ID: PAT_MRT3847_21773C.1.pep
SSRSMLGNKKILGLALFPTKGAVVLDTVSLFGLMFFFFIWCVKMDIATLMKTEKLISEQEFALMVASIIVVNCILVPLIRYIYDPSELYQ

SEQ ID NO: 199058 - protein, 114 aa, Glycine max
  Clone ID: PAT_MRT3847_21774C.1.pep
PPPPVVLWCYQFFFRKGVKEKKKKWSSPFWGNQGSFPRGVSHKMDTKCCHGEKGNMCPALLGEIGFFSTVVQIKRARFLCFLKSSLILEARKKKKFFSYLTIEKKKRSHNFFFF

SEQ ID NO: 199059 - protein, 38 aa, Glycine max
  Clone ID: PAT_MRT3847_21775C.1.pep
CRGHLRMFPTVINCQYIYFGRFCETYCEPSIKWNCGKM

SEQ ID NO: 199060 - protein, 262 aa, Glycine max
  unsure (1)..(262): unsure at all Xaa locations
  Clone ID: PAT_MRT3847_21776C.1.pep
RSGFPGRPTRPKNTKHSRRGAFDISDSLKGRSMLVAAIMDIVTSSCENAEEVSFKPSLPENAETRDIAAALEVIEEGGLHLDEPPEGEDDGGGSGRKGIGIKILDGKPVLGLSRTSNDACHEELKHQSPKTLIYQNKYDNSLEQKNVSAAVVPGLWDDLHCEHVAVPFATWALANWATASQLNRSHIQELDRDGNAIMSALIAPERSVKWHASLVVRLLLEDRNTPLNESVSDWASSLSSTISQACKHEDISLAXVALVCLS

SEQ ID NO: 199061 - protein, 109 aa, Glycine max
  Clone ID: PAT_MRT3847_21777C.1.pep
ILIVLISFSVMLARFSIVCVLCFVSPIFVFNSAHYDAVWWIDSVFEIRCMQISLFVLLFCGVSRDYDEFASICIGKIMINVIISSGNVRLHQELNKNIGSLSFLRRIYC

SEQ ID NO: 199062 - protein, 212 aa, Glycine max
  unsure (1)..(212): unsure at all Xaa locations
  Clone ID: PAT_MRT3847_21778C.1.pep
XXXXXXXXKEHQSSNRKGTNKEQMHLEMNLHNHDAHLMSALEVSCYLVNPWTRFSDLIRHPTDHRLPLSEAILTSMFTQTSQVAGNPFPHHKSKKICAPSLRRGQGRWGPWQELDDGLLPNNGGRLSIPRSETAHPHMALTNTTHCNSITLYKIMKMSTPSGLSCVDSPTCYFGGAATTMNLIFVISERKIESERVEGEVGAQGQAGKRKKK

SEQ ID NO: 199063 - protein, 93 aa, Glycine max
  Clone ID: PAT_MRT3847_21779C.1.pep
GRRLKGDREEEKLGYLALCPSRDCGGCQWDHNDEHGDMELDDDLLAADVSMVLALLIMDEDEDPLATCTPDSIQALSEAIDPAPQTAFVSEHA

SEQ ID NO: 199064 - protein, 259 aa, Glycine max
  Clone ID: PAT_MRT3847_2177C.1.pep
MGEEEEKKEETTEEKKEKEPPEIVLKVDMHCEACARKVAKALKGFEGVEEVTADSKASKVVVKGKAADPIKVCERLQKKSGKKVELISPLPKPPEEKKEEEIKEEPQPEEKKEELPPVVTVVLKVRMHCEACAQVIQKRIRKIQGVESVETSLGNDQVIVKGVIDPAKLVDYVYKRTKKQASIVKEEEKEKKGEEEKKEEEKKEEKEEEKKGEDGEEVDTKTDIKRSEYWPLRSHVDYVDYPYASQIFSDENPNACTVM

SEQ ID NO: 199065 - protein, 111 aa, Glycine max
  Clone ID: PAT_MRT3847_21780C.1.pep
MWVEPGSSSSSMEMEVDAVQVNDLNCIDEQSLSPEYSGVYDAFGEPDIFPRVGDQYQVEIPSLISKSDYYWLLRNPHEAESTASRTLHKFRVGLPIPIIWIKDVENNRHDH

SEQ ID NO: 199066 - protein, 76 aa, Glycine max
  Clone ID: PAT_MRT3847_21781C.1.pep
MVSSPLLVSLTFFLSLPLLLFLSPHILSPPDADDLALFRRAAAPHTTSHLSATPKIAFLFLTNSNLTFSPFWEKIF

SEQ ID NO: 199067 - protein, 85 aa, Glycine max
  Clone ID: PAT_MRT3847_21782C.1.pep
LFIFCGMRERKRGKKKNGREKIYICIYQIDVFVFDFLKADTAHVGRWSSVVVAIRIEVAIEGEIKMVVGAVPYGVLYICNIVGMA

SEQ ID NO: 199068 - protein, 151 aa, Glycine max
  unsure (1)..(151): unsure at all Xaa locations
  Clone ID: PAT_MRT3847_21783C.1.pep
LEPNRLEVRNQNSFDSNQDRPTGPHNVSSPSNRWNDPNAFLSVPNSRSRGNSLDSQPESGQPSVSGTTETYVNGSPTQGNKQQLGHDEILNDRDALKPDPGTEHTFEVEDNKFAFSPGQLXKLYNPKSLGAFHALGGLDGLVKGLRTDRRS

SEQ ID NO: 199069 - protein, 288 aa, Glycine max
  Clone ID: PAT_MRT3847_21784C.1.pep
MDLKAEAEAEANVGDVEYQARKTPRQGGYRATYFIFAMMLLDNIGFVANMVSLVLYFMNVMHFDYSGSATTTTNLLGTAFLLTIVGGFISDTYMNRLNTCILFGIIQLLGYSLLVIQSHDKTLQPDPCLKSTCVHGTKALLFYASIYLLALGGGGIRGCVPALGADQFDEKKPKEHAQLASFFNWFLFSITIGASLGVTFVVYVSTESQWYKGFIISMSCSAVGLIFIASGKRFYHARVPGESSLLMVLQVLVVTVRNWRVEVPLDSDEFVEIQSHESSLKRKLMPDT

SEQ ID NO: 199070 - protein, 55 aa, Glycine max
  Clone ID: PAT_MRT3847_21785C.1.pep
RLSPVHPSAIRTAPGRPRRSRRKRIMSHKTGTSCLGKNYLLFANLWKSWTQQTNL

SEQ ID NO: 199071 - protein, 66 aa, Glycine max
  unsure (1)..(66): unsure at all Xaa locations
  Clone ID: PAT_MRT3847_21786C.1.pep
FLSPFPFFNPVRNPFPFLSPFPFFSPFPPPFLFFXPIPKPVPFXNPFLFPFFNPSLNPFPFFNLSL

SEQ ID NO: 199072 - protein, 83 aa, Glycine max
  unsure (1)..(83): unsure at all Xaa locations
  Clone ID: PAT_MRT3847_21787C.1.pep
NKINVAHSCQNHQDPAKIQSVFGNTLXCTQGGFLKYQIVAXGLISVRFSSECGFSMCYQTLSQPTLNQHSLPLKYFINKSQKD

SEQ ID NO: 199073 - protein, 65 aa, Glycine max
  Clone ID: PAT_MRT3847_21788C.1.pep
NKRLKGLKNLKKLAKKTSQLIQTFASPHCPSDFLLLYIQRVIFYASKCNVDPQIVLRIKIYGVPK

SEQ ID NO: 199074 - protein, 239 aa, Glycine max
  unsure (1)..(239): unsure at all Xaa locations
  Clone ID: PAT_MRT3847_21789C.1.pep
WRFGAKRETQQDLFNAMGSMYSAILFIGITNGTAVQPVVSVERFVSYRERAAGMYSALSFAFAQVVIEFPYVFAQAIIYSSIFYSMASFLWTFDRFIWYLXFFMYFTMLYFTFYGMMTTAVTPNHNVAAIIAAPFYMLWNLFSGFMIPHKRIPIWWRWYYWANPVAWSLYGLLTSQYGGDTHLVKLSDGNSMTIREVLKHVFGYRHDFLCVTAVMVAGFCIFFGVIFSFAIKSFNFQRR

SEQ ID NO: 199075 - protein, 175 aa, Glycine max
  Clone ID: PAT_MRT3847_2178C.1.pep
HASGAGAHLPLSPLLALSTQATASALRSGSGRRRHRLLLPPLSSRLAPSPPVLRTPAGDPAHTDVEASKENRGACSLNNDRADALEEEANVSTARIGHVESADPGGSVGVEKEIFMAVNEESEGEQAGATLEDLFFFNGEEDDDSDWEPASRLVVNRWFCLNCTMPNVDKITYCM

SEQ ID NO: 199076 - protein, 426 aa, Glycine max
  Clone ID: PAT_MRT3847_21790C.1.pep
TRPFSGNPGLCGEIVHKECDPRSHFFGPATSSSTTPLSQSEQSQGIVVVPSSTTTTKHDKKTGLVVGFVVAVVLVAAFTLTMVSLVRKKQNGKAFRAKGVVLESPEVEGGGPTRPVEGEREVKMRKMEEAHRSGKLVFCCGEVQSYTLEMLMRASAEFLGRGSVGTTYKAVMDSRLIVTVKRLDGEKSAAAGSDGEVFERHMEVVGRLRHPNLVPLRAYFQAKGERLVIYDYQPNGSLFNLVHGSRSARAKPLHWTSCLKIAEDVAQGLAYIHQVSSLIHGNLKSSNVLLGVDFEACITDYCLALFADSSFSEDPDSAAYKAPEARSSSHKCTAKSDVYAFGVLLIELLTGKHPSQHPFLAPADLQDWVRAMRDDDGSEDNRLEMLTEVASICSATSPEQRPVMWQVLKMIQGIKDSATMEDTALT

SEQ ID NO: 199077 - protein, 59 aa, Glycine max
  unsure (1)..(59): unsure at all Xaa locations
  Clone ID: PAT_MRT3847_21791C.1.pep
ARAGSAXGLLALSYSLVNHLWNRKMIGARYYMSGRETXKRSNRKVSFRSARDSSSHGSH

SEQ ID NO: 199078 - protein, 70 aa, Glycine max
  unsure (1)..(70): unsure at all Xaa locations
  Clone ID: PAT_MRT3847_21792C.1.pep
APADLQDWXRAMRDDDGSEDNXGLEMLTEVASICSATSPEQRPAMWQVLKMIQGIKDSVTMEDTALTGLS

SEQ ID NO: 199079 - protein, 19 aa, Glycine max
  Clone ID: PAT_MRT3847_21793C.1.pep
ESQHNSLFGRRLLVNYRTH

SEQ ID NO: 199080 - protein, 87 aa, Glycine max
  Clone ID: PAT_MRT3847_21794C.1.pep
RDLFLLLADRRVFARLLRCLCSPDLMNLNLSDTTEKVIAEYIWIGGSGMDLRRQARNLPGPVSDPSELPKWNYDGSSTGQAPGEDSE

SEQ ID NO: 199081 - protein, 90 aa, Glycine max
  unsure (1)..(90): unsure at all Xaa locations
  Clone ID: PAT_MRT3847_21795C.1.pep
MIPIYQTEISTXVQGTFCYLDPKYMPSNQLTDKSDVYSFWVILLELLTREKPYSFCKPXKKKYLTNHFFSCLKKDRLSNVFQHSIMNEQN

SEQ ID NO: 199082 - protein, 42 aa, Glycine max
  Clone ID: PAT_MRT3847_21796C.1.pep
VIANFYFQERVEKRSNGVLRTSQRVRNVHVKEKKFHTQCHVS

SEQ ID NO: 199083 - protein, 51 aa, Glycine max
  Clone ID: PAT_MRT3847_21797C.1.pep
ARAKILSYLIKCLILLSDFLPGAGDGVKAVFSYSIQNNSVYTCHITHLVSC

SEQ ID NO: 199084 - protein, 59 aa, Glycine max
  Clone ID: PAT_MRT3847_21798C.1.pep
WYQEIQSQPCELDKRKHFTHFERLKLETFPFVFEASFEDPLPSLSKFLDSSSLGIHWFS

SEQ ID NO: 199085 - protein, 44 aa, Glycine max
  Clone ID: PAT_MRT3847_21799C.1.pep
KHKKYKVTLLANCKCAILKSYSKTKLPTMPPCMYLQSPRCTSSS

SEQ ID NO: 199086 - protein, 147 aa, Glycine max
  Clone ID: PAT_MRT3847_2179C.1.pep
MSSMGESQQRSLFGSTKASSLPVSTSRSDSEGGLRRRLSSLSLKIQLESPNSSSWSFPRSKSLSSMGDYARTWWDWSWAWILSRKLIFATDLEMNDQETKLLASHNRGTWRHVFYKLRSEIRRFINTSDHTTLPKTYHHKSTPQVFS

SEQ ID NO: 199087 - protein, 184 aa, Glycine max
  Clone ID: PAT_MRT3847_217C.1.pep
FILIIIIIFFHTFVRFCRRRRRRLFSRSLPTNSSAAASLDDPCLDPSVIKSLPTFTFSAATHRSLQDCAVCLSEFADGDEGRVLPNCKHAFHAHCIDTWFGSHSKCPLCRTPVLPATGSADTEPGSVSEAGEGCSSSSLPPPIGCPRKPLDINIIIEIPEVERGSDSVTGDQGFRWSLKRFCNV

SEQ ID NO: 199088 - protein, 69 aa, Glycine max
  Clone ID: PAT_MRT3847_21800C.1.pep
SKNHPGKERSKYISSILQIIIQRTGCITNDQMPAFDHNIPPTFNIQFPGFIFNDHMPSFDVSLAINFYI

SEQ ID NO: 199089 - protein, 530 aa, Glycine max
  unsure (1)..(530): unsure at all Xaa locations
  Clone ID: PAT_MRT3847_21801C.1.pep
SLRSFSMANSKLNIILIHILFLSFSSFAEALDSQLKQQNQDEEERVPFVGVNIGTDVSNLPAASDLVAFLQLQKITHVRVYDANQDILKALSETKIRVIISVPNNQLLAIGSSNSTAASWXIDRNVVAYYPQTLVSGISVGDEVLTSVPSSAPLILPALESLYNALVASNLHQQIKVSTPHAASIILDPFPPSQAYFNQSLVSVILPLLQFLSRTGSPLMMNLYPYYVFMQNKGVVPLDNALFKPLTPNKEMVDPNTLLHYTNVLDAMVDAAYFSMKNLNITDVVVLVTETGWPAKGDSKEPYATKDNADTYNSNLIRHVFDRSGTPLHPETTSSVFIYELFNEDLRSPPLSEANWGLFYGNTTPAYLLHVSGIGTFLANDTTNQTYCIAMDGFDSKTLQAALDWACGPGRANCSEIQPGETCFQPNNVKNHASYAFDSYYQKEGKAQGTCDFKGVAMITTTDPSHGSCIFPGSKKVSNKTKEVVNSTISSNAGEKLRFKTFNSIKISAIGNILHILLAAYLPTLLLVLL

SEQ ID NO: 199090 - protein, 48 aa, Glycine max
  Clone ID: PAT_MRT3847_21802C.1.pep
LAYGNLACIWWLSAHAFGGLSAYAFGDLVHNHLYQLDFACTLSAHVQT

SEQ ID NO: 199091 - protein, 44 aa, Glycine max
  Clone ID: PAT_MRT3847_21803C.1.pep
QDLTTCRVKLARPLVKTVSAATGSMGGSINQGYNSYPTNPDLHL

SEQ ID NO: 199092 - protein, 76 aa, Glycine max
  Clone ID: PAT_MRT3847_21804C.1.pep
SSSTLKKSVPSTSKKRSFTNSSRYFSFSWPWPSPPASNAAPDTYFGKFKRNWALHFGFLILIYAFMISSSVVFLCF

SEQ ID NO: 199093 - protein, 64 aa, Glycine max
  Clone ID: PAT_MRT3847_21805C.1.pep
TGLPRQYTQSRWSLEITLLHRGYYSRCWRMSIPAWNSTSALHFQHLYSMVLSPASELYHTDSFH

SEQ ID NO: 199094 - protein, 65 aa, Glycine max
  Clone ID: PAT_MRT3847_21806C.1.pep
MEALSRSVEDLFEDFQGRRAGIIKALTTDVEDFYSQCDPEQENLCVYGCPNEQWQVNLPAEEGPP

SEQ ID NO: 199095 - protein, 85 aa, Glycine max
  Clone ID: PAT_MRT3847_21807C.1.pep
MKFCKKYQEYMQGQEKKLPCVGFKKLKKILKKCRRNSSSLKPLNASLAAKTCPDHCPGNQNAFSFFRCFKVSIFTLYRVQSINRR

SEQ ID NO: 199096 - protein, 51 aa, Glycine max
  Clone ID: PAT_MRT3847_21808C.1.pep
FHLFKDRLITIYIFVLVLSLNKYMVINLIWKPKKIPLSEDMAYCTIQSAQS

SEQ ID NO: 199097 - protein, 107 aa, Glycine max
  Clone ID: PAT_MRT3847_21809C.1.pep
MMVFEDVEVEMEVFYWVESQIFGKGKCNVQPFESNHHSKNSLTPFFYVSLDTSTQINRKKKAYRLNVLHGTGYEIIKHLKQSLICFAYLANESANSKILVFLLAEIF

SEQ ID NO: 199098 - protein, 76 aa, Glycine max
  unsure (1)..(76): unsure at all Xaa locations
  Clone ID: PAT_MRT3847_2180C.1.pep
MSDLKASVVETKNGFHVEGYEKIEYDFTFLDGVFNXCQNNLAKCYERWGRCLAVMDLNIYNVYGDEMQKYFDHYNL

SEQ ID NO: 199099 - protein, 129 aa, Glycine max
  unsure (1)..(129): unsure at all Xaa locations
  Clone ID: PAT_MRT3847_21810C.1.pep
THANEARARDERYRFVDGIFINSFLELETGPITALQDEEREYPPLYPVGPLVQTGQHXSANGLDLECLAWLDKQQVASVLYVSFGSGGTLSQEQITELAFGLELSNHKFLLAVRAPSNVAHASYIGVQK

SEQ ID NO: 199100 - protein, 71 aa, Glycine max
  Clone ID: PAT_MRT3847_21811C.1.pep
FLCPPFFLAGCINQASSNLWPPEILSSAMFKVSLSSFPFGFKIHKGEIPLSPYSADSFSKIYIVGQKVDLL

SEQ ID NO: 199101 - protein, 136 aa, Glycine max
  unsure (1)..(136): unsure at all Xaa locations
  Clone ID: PAT_MRT3847_21812C.1.pep
NTLTGRPHRCSPGSPRRSPPFFLLFSWPLNPPAVPPFLPPADRPSPRVLPPLWPLPPSLFLPFFSLTXVGPYSPPPPQLFSAPWGGGLPPCSPPFXPTGAGCPPLASPSSPFPAPLPPGFPRLFPPSLFPPFLPPF

SEQ ID NO: 199102 - protein, 54 aa, Glycine max
  Clone ID: PAT_MRT3847_21813C.1.pep
VPKIIGTKLCCIKYLSGIRAPIWNCGNYLKENFIVDNSFIRFDKIVFNREYVRS

SEQ ID NO: 199103 - protein, 317 aa, Glycine max
  Clone ID: PAT_MRT3847_21814C.1.pep
KLVVGDVFRAPSNPALLCIMVGDGVQILGMAVVTILFAALGFMSPASRGTLIIGMLFFYMILGVAAGYVAVRLWRTIGCGDQKGWISVAWKAACFFPGIAFLILTTLNFLLWGSHSTGAIPFSLFVILILLWFCISVPLTLIGGLFGARAPHVEYPVRTNQIPREIPQQKYPSWLLVLGAGTLPFGTLFIELFFIMSSIWMGRVYYVFGFLLVVMILLVVVCAEVSLVLTYMHLCVEDWRWWWKSFFASGSVAIYIFLYSINYLVFDLKNLSGPVSATLYLGYSLFMVLAIMLATGTVGFLSSFWFVYYLFSSVKLD

SEQ ID NO: 199104 - protein, 69 aa, Glycine max
  Clone ID: PAT_MRT3847_21815C.1.pep
MHRSKACCQSAQHTSIIDLSRRVLSVIIGTRAWGSKDAPVDAVYGEADYVVGKPKTNTDFLSYNGVGIK

SEQ ID NO: 199105 - protein, 78 aa, Glycine max
  unsure (1)..(78): unsure at all Xaa locations
  Clone ID: PAT_MRT3847_21816C.1.pep
LDMVCHPHTLIPISHTHHLILNSPAPNPNPILSPSLWTLPISLXLRPFQVFLSLLSHLSGFLAPIEHFPLQRHFLFRL

SEQ ID NO: 199106 - protein, 146 aa, Glycine max
  unsure (1)..(146): unsure at all Xaa locations
  Clone ID: PAT_MRT3847_21817C.1.pep
GGPGRTTPFRTNVTGTIFFLKEDGTLPPWAVELSKQHPKVENYGPVSKIYLLASKGVKAIFGLLAKVIVVGNDXCSHKIISHWLSTNPMVEPFVIAPNRQLRGVNLINKLWFPNYRDTMNFNXFARKALVNANGLLEKQFLGGRYF

SEQ ID NO: 199107 - protein, 326 aa, Glycine max
  Clone ID: PAT_MRT3847_21818C.1.pep
MAHSLIRKCIKPATLNFLTPLAVPEIRRRLASVAAAADEDPPQSPSSFTFSSEGEKVYVKPPAGKWKPSPSSTVTMPMSFMTGSIVGKRFYKEVKTREADDGNGWTVMLDYRTLKTPSKRPLKLPSLPLAKAIAAEWEYQQTDGIRPFTMPLMRLACTALERVPLTRSKVIENLMKKFNQDLVFCRAPDDDELTSYVHARQVEKIDPLLRWVESEFGFKPVLYTSFFGGKQEDGLVMAIENLLKKTDDCELAAIDAIAASAHSLIIAIGMVQGKLQIEEAIELIRLEEDSQVDRWGLVEGGHDVDIADLRVQVSSAIVFLGLSRCI

SEQ ID NO: 199108 - protein, 211 aa, Glycine max
  Clone ID: PAT_MRT3847_21819C.1.pep
IRLEIERAKDHLSFCFKSSRSSFTINMWEIDSTVKKGRRKTPGTAGNKKSLEVNLPESSRKFITCIRKYLLFYLKLLEETGDRCILERSYVALRADKRTTASGSVSSSNNVLERMFALFMEQGSLWPEICSLPEIEGSDMSETIIYGYLHEHIVLLEKNGKLETLEATNEKIRKRSKNPKFSDSNCAKVGKHASVAWCRSLGYNLAQITPL

SEQ ID NO: 199109 - protein, 72 aa, Glycine max
  Clone ID: PAT_MRT3847_2181C.1.pep
ATFYYLNLPVFLGCTLPISFQLLFSRFFCFFTNLVPYSRVSVSTFLYVIPYALLCFMLPPPPPPPPPPPPPP

SEQ ID NO: 199110 - protein, 438 aa, Glycine max
  unsure (1)..(438): unsure at all Xaa locations
  Clone ID: PAT_MRT3847_21820C.1.pep
KFITSSRGYWPSFLLLLVETGDRCILERSYVALRADKRFSLCIEDLIPVAIGRYLKALISTMCHSQTTCLXGSVSSSNNVLERMFALFVQLGSLWPEICSLPEIEGSDMSETIIRLELHEHIVLLEKNGKLETLEATNEKIRKRSKNPKFSDSNCAKVGKHASVAWCRSLVYNLAQITPLSCEFSNGIQVLSLTDGGMDNSQLLCIDLQPKELWSTAFEDPTHLEKIETKWSTILSKVKNIIIKKASDENLETANTLLRACYNFYRESSSVVLTSGLNFYLIPSQSVTQTPFNPSTAGIEALDLSIPRKLLLWAYVLSHGRCANISIVVKHCEEMSKSKMKRGSGTSPALSNTSPAPSLPGSGKNGPNSAGGIDVDSAHVTTVGSGSVSSGNTTNFVNSLPSYDIQKNLFASPQLHQCTSNDAERSNLVALEGDTEGD

SEQ ID NO: 199111 - protein, 60 aa, Glycine max
  Clone ID: PAT_MRT3847_21821C.1.pep
SRRIFGENVRACCESVILLEFKVSEGPDVGVASKEEEPYYTLKSLVGGVRTRVRTSGPTR

SEQ ID NO: 199112 - protein, 98 aa, Glycine max
  Clone ID: PAT_MRT3847_21822C.1.pep
PRRTCKYSKYHYSRGQSPSVHLPSLNIFFSIEKLSRNVKQSNLYTGSISIAHVQVIGTSISRIGEPGRPAQEGSHRRRQEGRESRPRRPALRRGKRNP

SEQ ID NO: 199113 - protein, 99 aa, Glycine max
  unsure (1)..(99): unsure at all Xaa locations
  Clone ID: PAT_MRT3847_21823C.1.pep
MVGKTISYYVLFSVASFTLDSRVYIIHRYCKTLPRYKYSCLKPNFEFLSVECCYHCKLIFPSNSAFQTIIGPSLKDIRLANHLACFXACNKLHQYCSLN

SEQ ID NO: 199114 - protein, 108 aa, Glycine max
  Clone ID: PAT_MRT3847_21824C.1.pep
MAPRNSRGKPKGEKKKKEEKVLPVVIDITVKLLDETHVLKGISTDRIIDVRRLLSVNTETCYITNFSLSHEVRGPRLKDTVDVSALKPCLLTLVEEDYDEDRAVAHVR

SEQ ID NO: 199115 - protein, 83 aa, Glycine max
  unsure (1)..(83): unsure at all Xaa locations
  Clone ID: PAT_MRT3847_21825C.1.pep
MSPDDTPPPKPATAKDQETQSSGGGRKSSSTRPQEQGLKCPRCDSPNTKFCYYNNYSLTQPRHFCKTCRRYWTKGGAXRNVPI

SEQ ID NO: 199116 - protein, 43 aa, Glycine max
  Clone ID: PAT_MRT3847_21826C.1.pep
KPGIRLEQKYSFKLTLLFSKRIFLPTRRVNLNYSIILPTFALV

SEQ ID NO: 199117 - protein, 369 aa, Glycine max
  Clone ID: PAT_MRT3847_21827C.1.pep
METVLFNDSPPLEFKGMSKEEEDSLLGQVEIWRYMTCFTDSVALKSVIELRIADIIDRYGKPLSLSQIVENIDDAPSPDASLLQRVMRVMVRRKIFSAEQSETGETLYGLTRASKWILRDTKMTLAPMLLLENHPIHLNPAHYISEIIREGTKNGTAFFKCHGHEQFEMTGLDPEYNRLFNEGMVCTARVVSKAVITGYKDGFNQIKSLVDVGGGIGGSLSEIVRAYPHINAINFDLPHVVATAPKYDGITHVGGDMFVSIPDADAIYMKWILHDWSDEHCVKILKNCRKAIPEKTGKVIIVDHVLRPEGNELFTDVGIAFDMMLLAHNAGGKERTEENWKWLFKETGFARYNIIKINALPSIIEAFPI

SEQ ID NO: 199118 - protein, 369 aa, Glycine max
  Clone ID: PAT_MRT3847_21828C.1.pep
METVLFNHSPPLEFKGLSKEEEDSLLGQVEIWRYMTCFTDSVALKAVIELRIADILDRYGKPLSLSQIVENIEDAPSPDASLLQRVLRVMVRRKIFSAQESETGETLFGLTRASKWILRDTKMTLAPMLLLENHPIHLNPAHYISEIIREGTKNGTAFFKCHGHEQFEMTGLDPEYNRLFNEGMVCTARVVSKAVITGYKDGFNQIKSLVDVGGGIGGSLSEIVRAYPHINAINFDLPHVVATAPKFDGITHVGGDMFVSIPSADAIYMKWILHDWSDEHCIKILKNCRKAIPEKTGKVIIVDHVLRPEGNELFTDVGIAFDMMLLAHNAGGKERTEENWKWLFKETGFARYNIIKINALPSIIEAFPI

SEQ ID NO: 199119 - protein, 119 aa, Glycine max
  unsure (1)..(119): unsure at all Xaa locations
  Clone ID: PAT_MRT3847_21829C.1.pep
MMEAEPEGMAHHANLHYAQKQLQPYMMMPTQTQPAYMWATSVQPSIQSAASSQRSSSDEVRTLWIGDLQYCMDKNYLYTCLAHTGEVTSCKDIRNILTXQSEGYRFIEFTSRAKAERVL

SEQ ID NO: 199120 - protein, 63 aa, Glycine max
  unsure (1)..(63): unsure at all Xaa locations
  Clone ID: PAT_MRT3847_2182C.1.pep
LLTWKECIIECVIVXERRRYXNKRLFKXFKFKKKKGKGWDGYSKCPKILLFFQTALFTSEKRL

SEQ ID NO: 199121 - protein, 325 aa, Glycine max
  Clone ID: PAT_MRT3847_21830C.1.pep
MIGYVFNTKAPMASYYFLLLVLVGATTASGAELCADFYSCTCPNLLPIVKKGVAKAIQKEPRMGASLLRLHFHDCFVNGCDASILLDDTSNFIGEQTAAANNQSARGFNVINDIKASVEKECPRVVSCADILALSARDSVVYLGGPSWEVGLGRRDSTTASRSDANNSIPGPFLSLTALINNFANQGLSVTDLVALSGAHTIGLAECKNFRAHIYNDSNVDPSYRKFLQSKCPRSGNDKTLEPLDHQTPIHFDNLYFQNLVSKKALLHSDQELFNGSSTDNLVRKYATNAAAFFEDFAKGMLKMSNIKPLTGSQGQIRINCGKVN

SEQ ID NO: 199122 - protein, 58 aa, Glycine max
  Clone ID: PAT_MRT3847_21831C.1.pep
FERWRVTRLLRTLMMMMMMMMMWRWHYPITRSLNQDLPLFLPPLAKLPRFTFTTLLRN

SEQ ID NO: 199123 - protein, 461 aa, Glycine max
  Clone ID: PAT_MRT3847_21832C.1.pep
MASYEAIKNFDDDDDDDDDVEMALPHSQISESRSATVSSPIGQTTPLHIHNIIEEQRIISRHQPQPKSPRLVSLDVFRGLTVALMILVDDAGGLIPALNHSPWNGLTLADYVMPFFLFIVGVSLALSYKKLSCGVDASRKASLRALKLLALGLFLQGGYFHRVNDLTFGVDIKQIRWMGILQRIAVAYLVVALCEIWLKSDDTVNSGPSLLRKYRYQWAVALILSFLYLCLLYGLYVPDWVYQIQTEPSAEPKTFSVKCGVRGNTGPACNVVGMIDRMILGIQHLYKRPIYARMPECSINSPNYGPLPPDAPAWCQAPFDPEGLLSSVMAIVTCLIGLHYGHIIVHFKDHRVRIIYWMIPTSCLLVFGLALDLFGMHINKVLYSLSYTCVTAGAAGVLFVGIYLMVDVCGCRRMTLVMEWMGMHALMIYILAACNVFPIFLQGFYWGSPHNNILKLIGVGT

SEQ ID NO: 199124 - protein, 76 aa, Glycine max
  Clone ID: PAT_MRT3847_21833C.1.pep
FERWRVTRLLRTLMMMMMMMMMWRWHSPIARSLNQDLPLFLPPLAKLPRFTFTTLLRNNAFISGTNLNPNLRVWFL

SEQ ID NO: 199125 - protein, 63 aa, Glycine max
  Clone ID: PAT_MRT3847_21834C.1.pep
FCDEFFRPLSCFEGMIKCGSSNCSYVRGWSQYFVRKKIWFFSYILNIMSWKMKKKKTKKKKKK

SEQ ID NO: 199126 - protein, 194 aa, Glycine max
  Clone ID: PAT_MRT3847_21835C.1.pep
RAGYSGTAIISRIKPLSVRYGLGIPDHDSEGRLVTAEFDTFYLICGYVPNSGDGLKRLSYRVTEWDPSLSNYLKELEKSKPVILTGDLNCAHEEIDIYNPAGNKRSAGFTDEERKSFAKNFLSRGFVDTFRRQHPGVIGYTYWGYRHGGRKFNRGWRLDYFLVSESIADKVHDSYILPDVTGSDHCPIGLVVKL

SEQ ID NO: 199127 - protein, 43 aa, Glycine max
  Clone ID: PAT_MRT3847_21836C.1.pep
HASDDALLRVGGDNFMRRRDGPLVECSIGRTWTVAAMAGFHDA

SEQ ID NO: 199128 - protein, 96 aa, Glycine max
  unsure (1)..(96): unsure at all Xaa locations
  Clone ID: PAT_MRT3847_21837C.1.pep
MGNPADDPVYVEAFARTLVQFNESHEXMTLEMSXDDYLTTCTTHVLAATTLEAGGSPXKYAMEHDGRASSIPQDYVLGDTTTTIFYRGAYGQNTGR

SEQ ID NO: 199129 - protein, 30 aa, Glycine max
  Clone ID: PAT_MRT3847_21838C.1.pep
ILNNSSFILSFLQTTGYIKTGTNRTSFIEQ

SEQ ID NO: 199130 - protein, 93 aa, Glycine max
  Clone ID: PAT_MRT3847_21839C.1.pep
SGAFFFFFLQTSRPRDNKKGGHCFPPNSRLSNFEALLKKRAGAITKRGIRLLWGGLGLAPPGLRGLKNRLAHWRMFMEKTGGDPSPRILLFRH

SEQ ID NO: 199131 - protein, 48 aa, Glycine max
  Clone ID: PAT_MRT3847_2183C.1.pep
WEKVVDFLSYFTIHFPPYLVYYWNSLCYFLLINILNLRFTEMINDSHV

SEQ ID NO: 199132 - protein, 184 aa, Glycine max
  Clone ID: PAT_MRT3847_21840C.1.pep
NPPSPAEDSAAAAPSSGEAKPSLFPLFPLTASSSLQTTTTSSTPQWLSNTSFTTDISVINDAVASQLNREITQSPPQDDEDENRAQANPLPSSRYEILESSESDGGGRDRERKKRKKRKKRKRDSSVERGGFHGFGSRKSRVRAWADSEAKVAKDYYIDSHGDRDNLAFGCIYRCFGWNNLKLN

SEQ ID NO: 199133 - protein, 173 aa, Glycine max
  unsure (1)..(173): unsure at all Xaa locations
  Clone ID: PAT_MRT3847_21841C.1.pep
VKFLDVMVXYTGIEPRVDHYAGMVDLLGRWGFLKEAEEFIDKLEVEPNAMIWANLLGACKIHGDEKRGQRAANKLIELEPQSSSPYVLLSNMYAASGNWDEARSLRRTMIKKDIQKIPGCSWIVVGQETNLFVAGDISHSSYDEISKALKHLTALIKDNNRFQDIVISWVGQI

SEQ ID NO: 199134 - protein, 170 aa, Glycine max
  Clone ID: PAT_MRT3847_21842C.1.pep
MQLTTLLLAGLSAVSVSAVPSMGASWVPNQVTVKEEYKVPGDNPLYFCADPADYILQIEKVDLDPNPPKPGEKLAIKASGDFKEEVGEGSKMHLQVKYGLITLINQERDACDTIEQADLKCPLKKGELSLTKDVELPREIPPGTYTVLADVYTEDGDKITCLTAKIAFHR

SEQ ID NO: 199135 - protein, 78 aa, Glycine max
  unsure (1)..(78): unsure at all Xaa locations
  Clone ID: PAT_MRT3847_21843C.1.pep
LACNTLQLMWKNDGDHNLAVDPKAIKCLERVGSLNAEADSIXELHKEPSPIIEFVSIWNDMVLPPSRQSFQIELSEII

SEQ ID NO: 199136 - protein, 68 aa, Glycine max
  Clone ID: PAT_MRT3847_21844C.1.pep
APLAFRWVLPARRLWGVVSGWLCSRGRQLCPWLGRAVVRLRRGKAGGLEEAGGKKREEKRERKKDRKD

SEQ ID NO: 199137 - protein, 42 aa, Glycine max
  Clone ID: PAT_MRT3847_21845C.1.pep
MMINKKKKKKKKKKKKKKKKKKKKKKKKKKKKKKKKKRGGPF

SEQ ID NO: 199138 - protein, 80 aa, Glycine max
  Clone ID: PAT_MRT3847_21846C.1.pep
VWQISNLNKLSLISMRISHPLVKLIRNLAHQQWSISFRHVLREGNSSADRLTRYDSTYEDSFYVWNNCPIILPLWSWLIR

SEQ ID NO: 199139 - protein, 72 aa, Glycine max
  Clone ID: PAT_MRT3847_21847C.1.pep
KEGQKLGALLSDFCSYCSQKMQFLSDFCSYCSQKMHFLSDYFCRYCRQKSSAVELNTIQNLRCVIVFSQHCL

SEQ ID NO: 199140 - protein, 107 aa, Glycine max
  unsure (1)..(107): unsure at all Xaa locations
  Clone ID: PAT_MRT3847_21848C.1.pep
AFCCGFPRASLLCPGSLSGFLRPFSPRLLPLGALCXXFSARXFLPGSVGCRPPRVFLSFAVWAVXCXPPGRVFPGLVASFLLLVPLAGGLDALVAQNSPRVRGRVGG

SEQ ID NO: 199141 - protein, 101 aa, Glycine max
  Clone ID: PAT_MRT3847_21849C.1.pep
TQSLISALSPLIPASHATHNSQPHSYRSNNHRPPNITQSHFFVPFQSFSLSSLLPPLHRLSHRLILRTECPSKRAVVHSDTLLALHIPMNRQRIFRTSVLS

SEQ ID NO: 199142 - protein, 64 aa, Glycine max
  Clone ID: PAT_MRT3847_2184C.1.pep
LLQQCSRWPADFKRQYLFPAQCHDHCFQNRLLPVSPKGKWQHSTRDNCISLEDYWKNAGENDIK

SEQ ID NO: 199143 - protein, 77 aa, Glycine max
  Clone ID: PAT_MRT3847_21850C.1.pep
DDGVDGSWMCSGNSHRVRGIVCRGACGLAANMRPCAQGLHNTFELPLALLFSYHSLLQNHYSMSLQNLLWFYQELIK

SEQ ID NO: 199144 - protein, 60 aa, Glycine max
  Clone ID: PAT_MRT3847_21851C.1.pep
YCHNHQGLKDIHSLMRDSTLVAELEQPPHAVTTATGSPLPIEKPLVPGGKQRPGGRLAMT

SEQ ID NO: 199145 - protein, 145 aa, Glycine max
  unsure (1)..(145): unsure at all Xaa locations
  Clone ID: PAT_MRT3847_21852C.1.pep
WDISANLSVGDSVFNRANDQRKLDENSTIDSCMHLVQEFPKAGNRLDSTTTIESPCVASDGSADTTQTRTGIDNVQINGLNDSNRCDESLNQPGIPERCHPVGDCSLTSSSLDVGRKINLRSVGSSITXSMDNKDTSEVPRGIDY

SEQ ID NO: 199146 - protein, 62 aa, Glycine max
  Clone ID: PAT_MRT3847_21853C.1.pep
CRRPALFIPFELSLPPSPSTLLLFEEVFIICPLPSTCPVPNVTTFRCFIVLLINSVVWYQNL

SEQ ID NO: 199147 - protein, 318 aa, Glycine max
  Clone ID: PAT_MRT3847_21854C.1.pep
MSDQEGGKGSPKSSSLGPYEEAMEALSSLITRRTRADDSNVGDQFSLLYDYLKMLDLEEPIANMKIIHVAGTKGKGSTCTFTESILRNCGFRTGLFTSPHLIDIRERFRLDGMEICEEKFLAYFWWCYDRLKEKTDDNIPMPTYFRFLALVAFKIFAAEQVDVAIMEVGLGGKYDATNVVQSPIVCGITSLGYDHMEILGNTLGEIAGEKAGIFKNRIPAFTVPQPDEAMHVLEEKASLLNVPLQVVTPLHAKLLNGLRLGLEGEHQYLNAGLAIALCYTWLERTAHVGDIYMEHTDTLPEQFVKGLTSASLQGRAQI

SEQ ID NO: 199148 - protein, 449 aa, Glycine max
  unsure (1)..(449): unsure at all Xaa locations
  Clone ID: PAT_MRT3847_21855C.1.pep
MAQGDNGSSKSSSVTPYEEALDALSSLITKRTRVGDVNMEERFNVLYKYLKMLDLEEAISNMKIIHVAGTKGXSTCTFTESILRNCGFRTGLFTSPHLIDIRERFRLDGVEISEEKFLVYFWWCYDRLKENTDDNVPMPTFFHFLALLAFKIFAAEQVDVAIMEVGLGGKYDATNVVQSPIVCGITSLGYDHMEILGNTLGEIAGEKAGIFKNRIPAFTVPQPDEAMHVLEEKASLLNVPLQVVTPLDAKLLNGLRLGLEGEHQYLNAGLAIALCFTWLKRTGHVGDIYMEQTDTLPEQFVKGLTSASLQGRARVVPDQHIKSERSNELVFFLDGAHSPESMEVCARWFSLAIKEYNPDQTLFHQQLNNSKLSHEVVKSTHHGERGSQRKSTPILLFNCLTVRDPQLLLPQLMKTCADHGVYFKKALFVPSLSVFNKXGPQALHPLIQS

SEQ ID NO: 199149 - protein, 81 aa, Glycine max
  unsure (1)..(81): unsure at all Xaa locations
  Clone ID: PAT_MRT3847_21856C.1.pep
XXXXSXPXXRXWXCLXVXAXRDXXXLVXHAXXXSXXXXTXCXAXXVLAXXXSLSXVXXTXRXGXXVXSLAXPDXQXHARHX

SEQ ID NO: 199150 - protein, 37 aa, Glycine max
  Clone ID: PAT_MRT3847_21857C.1.pep
SYNGPTSPLFGNSLPMHRRSSCRLEYLHVISYNLFLD

SEQ ID NO: 199151 - protein, 42 aa, Glycine max
  unsure (1)..(42): unsure at all Xaa locations
  Clone ID: PAT_MRT3847_21858C.1.pep
HLSDICQERRALXYICQQDTSLSYRECNISIHRANEHALKHN

SEQ ID NO: 199152 - protein, 90 aa, Glycine max
  Clone ID: PAT_MRT3847_21859C.1.pep
DRLLKAERACGCLNLSNRSLTEDTEEVYRNLKGLSSRDDKCWEAPRAKKLIVGHNSIASWNEHLRDLAYLARVNRNENSLFQRPHDIGGL

SEQ ID NO: 199153 - protein, 75 aa, Glycine max
  Clone ID: PAT_MRT3847_2185C.1.pep
VYYNMRVLIWTKIFLWNIDDGSLCKFLNRRHKYRSSKLEHFLLLCSLVSLRDILTRRANSFRGSAQLDSLRRRCE

SEQ ID NO: 199154 - protein, 42 aa, Glycine max
  Clone ID: PAT_MRT3847_21860C.1.pep
MGKEKVHISIVVIGHVDSGKSTTTGHLIYKLGGIDKRVIERF

SEQ ID NO: 199155 - protein, 194 aa, Glycine max
  unsure (1)..(194): unsure at all Xaa locations
  Clone ID: PAT_MRT3847_21861C.1.pep
MDKAQTEPWRPDPFHSGIFRPPETPREPMEFLSRSWSVSAHEVSKALSPALSKVTLSNGTAAVVAIPEDIAGEAEESSATVSGNPFSFASSETSQMVMERIMSQSQEVSPRTSGRLSHSSGPLNGTQSCGSLTDSPPVSPSEIDDIKYTRANNIASSLSLNFRTTATAAAPGGGKXVGRWLKDRKEKKKEETRA

SEQ ID NO: 199156 - protein, 68 aa, Glycine max
  Clone ID: PAT_MRT3847_21862C.1.pep
YPMFFKSQCFKNTASEFNFGFPIKKLLIFMAGLVKFCSLKGAPQLFFFFFYLFFCYFNIFNKIFIPPL

SEQ ID NO: 199157 - protein, 156 aa, Glycine max
  unsure (1)..(156): unsure at all Xaa locations
  Clone ID: PAT_MRT3847_21863C.1.pep
MGVMSRQVVPVCGNLCCVCPALRASSRQPVKRYKKLLADIFPRNQEAELNDRKIGKLCDYASKNPLRIPKITDNLEQICYKDLRYETFGSVEVVLCIYRKFLSSCKEQMPLFAGSLLEIIRTLLEQTQTDEIMILGCNTLXDFLDSQTDGTYMFNL

SEQ ID NO: 199158 - protein, 97 aa, Glycine max
  unsure (1)..(97): unsure at all Xaa locations
  Clone ID: PAT_MRT3847_21864C.1.pep
ILTIIFGSNSFQFKITNLCIACCTQNLATIEAXCFSKTLFTLKICSYVQYICQKILSIKARKPERHKKVIRNKIENTHLYFKQKELLRTLKIKSFTG

SEQ ID NO: 199159 - protein, 104 aa, Glycine max
  unsure (1)..(104): unsure at all Xaa locations
  Clone ID: PAT_MRT3847_21865C.1.pep
MGVMSRQVVPVCGNLCCVCPALRASFRQPVKRYKKLLADXFPRNQEAELINRKIGKLCDYASKNPLRIPKITDNLEQICYKDLRYETFXSVKVVLCIYRKFLSS

SEQ ID NO: 199160 - protein, 157 aa, Glycine max
  Clone ID: PAT_MRT3847_21866C.1.pep
MEMCGATALTWSHTICPSLHLPRSVSTREARRSFSVWCVSDQDPKGNKMIISVTGATGFIGRRLVQRLHADNHSVHVLTRSKSNAETIFPAKDFPGIKIAEEPEWKDSIQGSTGVVNLAGLPISTRWSPEIKKEIKQSRIRVTSKVVELINSAPDDI

SEQ ID NO: 199161 - protein, 47 aa, Glycine max
  unsure (1)..(47): unsure at all Xaa locations
  Clone ID: PAT_MRT3847_21867C.1.pep
TFALKAVLXKGATVVLEGHRVLPIQAKKLGFPFRYPYVKDALQAILS

SEQ ID NO: 199162 - protein, 206 aa, Glycine max
  Clone ID: PAT_MRT3847_21868C.1.pep
MGFSSKEEKSKRILRGLKTLFFLITMVISLLLFSAPVLLVIADALVPSALLSTLSPSSFSLETLASHFHNYDFRYSLIDIPLVSIIRSFIIFCVYSLCDGPRLSRGPYLGITTMCSVLSLMFVSFKAVYIFSVSGIDRSGGYVRATEIALFVCSCALAVGHVVVAYRTSCRERRKLLVYKIDIEAISACKNGYPRYLKIPQEERIK

SEQ ID NO: 199163 - protein, 408 aa, Glycine max
  unsure (1)..(408): unsure at all Xaa locations
  Clone ID: PAT_MRT3847_21869C.1.pep
SSAESLKDYEEDFENPVKKPKRNKYAFACAILASMTYILLGYDIGVMSGAALYIKRDLKVSDEQIDILNGIINCYXLIGSCIAGRTSDWIGRRYTIVFAGAIFFVGAILMGFSPNYSFLMFGRFVAGIGIGYALVIAPVYTSDMLPSCPHNLRLDMPAVFLNLGILLGYISNYGFSKLTLKFGWRMMLGVGAIPSSLIAVAGLAMPESPRWLVAKGRLGEAKRVLYKISESEEEARLRLADIKDTAGIPQDCDDDVVLVSKQTHGHGVWRELFLHPTPAVRHIFIASLGIHFFAQATGIDAVVLYSPRIFEKAGIKSDNYRLLATVAVGFVKTVSILVATFFLDRAGRLVLPLCIASGLILSLLTPGLNLTVLDQSQSTPKWAVGMRIAAMLSXVSTFSLASGSLTWG

SEQ ID NO: 199164 - protein, 336 aa, Glycine max
  Clone ID: PAT_MRT3847_2186C.1.pep
MEEEEEAEKQKKHLAMLERLSKRTQSRSQNPDSSSSESSTSSILSRFTHLKSSIESQLAQSQSISSDPSNLKLHFNQISESISDLEKFVAENSYSLPSYDVRTSLKTVSDLKHSLDDLTSQLLPKKKFSFKNKPTTKKEYKDSAIPLPTQPPQLSTRLAPRDSPGFRNKTAELLISDFRGSEVGEFTVSDLDSCQVRIIGSVRALFVHRLKNSRVYVGPVTGSVLIEEAEGCVFVLASHQIRIHGAKRSDFYLRVRSRPIIEDCNGVRFAPYCLNYEGIEEDLRGAGLDAETGNWSNVDDFRWLRAVQSPNWSVLPENERVGTVEISNLKNEDKEI

SEQ ID NO: 199165 - protein, 62 aa, Glycine max
  Clone ID: PAT_MRT3847_21870C.1.pep
VIEVQCSLQSIISINLQGPVAINSSSIFYKVLMCLFRLVIRPIFPFLSSFSKIIIKVGVRAA

SEQ ID NO: 199166 - protein, 50 aa, Glycine max
  Clone ID: PAT_MRT3847_21871C.1.pep
LYHPYFPPFPPSYSLLDSSINSTISPPDLPSFHICLYINPLQIPIISSSS

SEQ ID NO: 199167 - protein, 72 aa, Glycine max
  Clone ID: PAT_MRT3847_21872C.1.pep
KLIQILMPLMLRSLVELATALVCEPTSTLTTILYYGNLLPRNLNLGRLVRREFLHQENHFFHFLTTMLRCVW

SEQ ID NO: 199168 - protein, 58 aa, Glycine max
  Clone ID: PAT_MRT3847_21873C.1.pep
ISPPISKLIKGSHISQQKLIIQANLKLHMLFLLFITFVSHTLSVISSYSNMHPIQIDI

SEQ ID NO: 199169 - protein, 238 aa, Glycine max
  Clone ID: PAT_MRT3847_21874C.1.pep
TVCPTTLKRICRQHGISRWPSRKINKVNRSLKKIQTVLDSVQGVEGGLKFDPYTGGFIAGGSIMQETEAHKYLVFPEKSSVKDPKPATQKKVSVAPAPASTIENSTIKLNDDEGVCLVGNKLVHSRSIPNSNSGEGELKKDNVSSDDSKSMTMNDGSCHKACHWKKTKDCPEQTCSMSLVTDEVEVGVDRVEGADEHNHPTSSSTTNSSNGSGSMMHGSSSCSHENHKYSKVKSNCVD

SEQ ID NO: 199170 - protein, 64 aa, Glycine max
  Clone ID: PAT_MRT3847_21875C.1.pep
IINFLFFFLFFFFSKESKLCKWVILWVPKVFFHFSLNESRRLIRFPTDSYWLEFFLTQIFFLYP

SEQ ID NO: 199171 - protein, 112 aa, Glycine max
  Clone ID: PAT_MRT3847_21876C.1.pep
PFPQWGALAPKFKGQKWRKIVPFKGFPPSFPPPKLAFGDIDVRKNLDGPLNRNVDSAKNVFQKLRTPIPPQIFFFSRLVCGTYVGPKMLFLPGVNGSPPLFPRSFVDKNGFS

SEQ ID NO: 199172 - protein, 86 aa, Glycine max
  Clone ID: PAT_MRT3847_21877C.1.pep
TNSIGRFFFFCLYLFFGPLLLVTSINLDTYLIILQTFKLFLPTPFLQFFPQTNPPYLSYPNPNDLKHYSNTLIDNPKPSFTFTPTL

SEQ ID NO: 199173 - protein, 124 aa, Glycine max
  Clone ID: PAT_MRT3847_21878C.1.pep
LSEFYACEQYEVPSFDGVLIPLTIVFARNNKIEAKKPGILHGHGAYGELLDKRWLSELKSLLDRGWVVAYADVRGGSGFGKKWHNDGRRTKKHNSINDYISCAKFLIEKDIVHENKLACWGYSA

SEQ ID NO: 199174 - protein, 49 aa, Glycine max
  Clone ID: PAT_MRT3847_21879C.1.pep
TSKTSAENSLKIIRLSPKESLFFNELSSRCLAQFVSGVMSITIRKMKHC

SEQ ID NO: 199175 - protein, 307 aa, Glycine max
  unsure (1)..(307): unsure at all Xaa locations
  Clone ID: PAT_MRT3847_2187C.1.pep
QNPESSSILSRFSHLKTSIESQLAQSQSISSDPSNLKLHINQISQSISDLEKLVAENSYSLPSYDVRTSLKTVSDLKHSLDDLTSQLLPKKKFSFKNKPPTTTTKKDDKDKDCAIPLPKQPPQLSTLLAPRDSPGFRNKTGELLIADFSDSEVGEFTVSDLDSCQVRIIGSVRALFVHGLKNSRVYVGPVTGSVLIEEAVGCVFALASHQIRIHGAKRSDFYXLRVRSRPIIEDCSGVRFAPYCLRYEGIEEDLRGTGLDAETGNWSNVDDFRWLRAVQSPNWSVLPENERVGTVEISDLKNGDEEI

SEQ ID NO: 199176 - protein, 64 aa, Glycine max
  Clone ID: PAT_MRT3847_21880C.1.pep
SGEHGFPSWLKKQSNIFVECALEPLTKFFVFHLRYHFRFHSFQFMCLCSKCLKPIFTYSFNSFV

SEQ ID NO: 199177 - protein, 81 aa, Glycine max
  Clone ID: PAT_MRT3847_21881C.1.pep
YLLHLLSHTFDLHSPTQDWNTKVCMHRAMTPTAALSLWTTETSLCVSRYDTPVDHNTAPQAALMVRTEISMCEVIHINCAS

SEQ ID NO: 199178 - protein, 168 aa, Glycine max
  Clone ID: PAT_MRT3847_21882C.1.pep
MACEREFQMAVLLTLVMIWTPMFVLSDCPLQDFLDHSVSILQFNHINAIQISISTSPPYTLFFHFGAIMIDSNPPLMQHYGALVRNSGEAKEATSFNDQNHPLVDACDLPLIDLSGLKSSNERERRACTAAICKAASEWGFFQVVNHGIRHDLLRKMREEQVKLFEVP

SEQ ID NO: 199179 - protein, 47 aa, Glycine max
  Clone ID: PAT_MRT3847_21883C.1.pep
TFEHPVLFCEVLTRMVIKMPSFSFLCNLELVLIVLYFSMNLLHYLQS

SEQ ID NO: 199180 - protein, 67 aa, Glycine max
  Clone ID: PAT_MRT3847_21884C.1.pep
VIGPRVCLIFFGPWLKGGLAPFFIGNTMRGGGPFLFKKINQKLFIFLVNRTFNHLFWKVKLQVMKRS

SEQ ID NO: 199181 - protein, 46 aa, Glycine max
  Clone ID: PAT_MRT3847_21885C.1.pep
SNTQAQHARNHETLNQKLHIWVQKLNQMKLAFCVGQQHQVSHGDTF

SEQ ID NO: 199182 - protein, 71 aa, Glycine max
  Clone ID: PAT_MRT3847_21886C.1.pep
RSATSCKVSSTRECCTMHPHSSYTESTTTETLVMAVAPGKAQQAGAHMGAPPQNQGCKWGPNCSCYPCASK

SEQ ID NO: 199183 - protein, 96 aa, Glycine max
  unsure (1)..(96): unsure at all Xaa locations
  Clone ID: PAT_MRT3847_21887C.1.pep
KXQQXXLFTFPXLLXXFXSHXLSSIIPSFFXYXYYXLXFNLYXXPQPNXXXXLFIXXXXXXXPNTQTXSPXXFXNSLIHLXLHFSXLXXXPPPQXN

SEQ ID NO: 199184 - protein, 228 aa, Glycine max
  unsure (1)..(228): unsure at all Xaa locations
  Clone ID: PAT_MRT3847_21888C.1.pep
NLGATEEQLDFPVLYASAKEGWASTTFTKDPPADARNMSQLLDAVVRHVPPPNANIDAPFQMLVSMMEKDFYLGRILTGRIFSGVVRVGDKVHGLRNKDSGAEKIEDGKVVKLMKKKGTNMVLTDCAGAGDIISIAGLSSPAIGHTVATVEIMSALPTVELDPPTISMTFGVNDSPLAGRDGTHLTGGRIGDRLMAEAETNLAINVLXGLSESFEVQGRGELQLGILI

SEQ ID NO: 199185 - protein, 217 aa, Glycine max
  Clone ID: PAT_MRT3847_21889C.1.pep
MAAEHDSCCSRCVTFLITIGLTALFLWLSLRVDEPKCYLDYIYVPALNKTLNSNSTHNKNTTILFALKLTNGNKDKGIQYDDVLLSFRVFESVNLTRPLGNATVQRFYQGHQKKATKHGNFSGGGGNLTAAVAGRMWYRVDYATAVKYKILFWYTKRHRLWGGANVEIGDSGMKVYRKAVRLGGKNPVVIESGASKLSGRYRALLLSLLLPFCGLWV

SEQ ID NO: 199186 - protein, 58 aa, Glycine max
  Clone ID: PAT_MRT3847_2188C.1.pep
SSFNHFLYILVVKLEGVLRAPEWIVTDKIDLYQQQPQLPITSFIYSFFEAVFLRKRGR

SEQ ID NO: 199187 - protein, 162 aa, Glycine max
  Clone ID: PAT_MRT3847_21890C.1.pep
NLRKEKSQITIHNTNYKKSMSPEPIRTEIQDHLQKLNKKHDLIKYNNNTHKNERSKKWVKLKVKSTKPTSQEISKREKKRRTIASTELRCAGLDHHGVLPSKSNGFTIHLRSQFTNFHICPSPQTVPFRVPENNLVLHRSSIVHTVPHFPIQRRREVSAATS

SEQ ID NO: 199188 - protein, 66 aa, Glycine max
  Clone ID: PAT_MRT3847_21891C.1.pep
GEAKGVELLPVEQATPTIGPPPPPAPPTTREEATGRLRCPLQLRQDSRCYSRPSSSLSPSSPNSIL

SEQ ID NO: 199189 - protein, 60 aa, Glycine max
  unsure (1)..(60): unsure at all Xaa locations
  Clone ID: PAT_MRT3847_21892C.1.pep
AHSILVQHCLMLNLCLTSRITHLFLFYSNNNRVKKIIYHKXXXXXXXXXXXXXXXXXXXX

SEQ ID NO: 199190 - protein, 76 aa, Glycine max
  unsure (1)..(76): unsure at all Xaa locations
  Clone ID: PAT_MRT3847_21893C.1.pep
XXVXHXWKVHXXGVSSVLWPXEXLTGXTWXDAXLDIXXXFYCXXXXXDLXFXIXFXXVCFXSSRIPSLRTRXCDXX

SEQ ID NO: 199191 - protein, 56 aa, Glycine max
  Clone ID: PAT_MRT3847_21894C.1.pep
KPLSTMFLCFCGCAPEDKGEFIGHNFHYVSGLKFRKCKKAYLCQSSHNVIPEIVFA

SEQ ID NO: 199192 - protein, 45 aa, Glycine max
  Clone ID: PAT_MRT3847_21895C.1.pep
SGMSCCAQRYRSQEVPVEIANLFNSEYTIQGTPEYRLSIKAILVL

SEQ ID NO: 199193 - protein, 89 aa, Glycine max
  Clone ID: PAT_MRT3847_21896C.1.pep
NVELEFPEEFRYHFPWRQDRPNKETNNSHSYMDLFASLVLENVELEFPEEFRSQFLWLQDRPNKETNYSHSNMPTFASLFLENEEMEFP

SEQ ID NO: 199194 - protein, 344 aa, Glycine max
  Clone ID: PAT_MRT3847_21897C.1.pep
MRGVFLPWNPPCFHDALHLPSVSLLPTRPFFFTLSASSTPSAPVESASQLSARERRRARSERRETRSGAKNWREVVEERLMEKPKKQKGSWMDELNLDNLAKLGPQWWVIRVSRVKGNDIAQLLARSLAKNYPDMEFKIYAPSVNVKRRLKNGSYSVKPKQLFPGCVFLRCVMNKELHDFIKEYDGVGGFLGSKVGNTKRQINRPKPVSAEDMEAIFRQAKEEEEKTDQAFEQEEKKASLDSGIRNTELEPDDILNAIVDYKSKRGSRKASNQVKATDASSTRINYKLLVPGSTVRVLSGTFSGFTGTLKKLNRKTKLATVHFTLFGKENIADIDVNEIAIETN

SEQ ID NO: 199195 - protein, 56 aa, Glycine max
  unsure (1)..(56): unsure at all Xaa locations
  Clone ID: PAT_MRT3847_21898C.1.pep
SXVXGSXARGRXXXXLXLSPXXPXXGXXVSVCSCSGLXQAFPLRXLRXNKTNSSXR

SEQ ID NO: 199196 - protein, 140 aa, Glycine max
  Clone ID: PAT_MRT3847_21899C.1.pep
PKPVSAEDMEAIFRQAKEEQEKTDQAFEQEEKKASLDSGIRNTELEPDDILNAIVDYKSKRGSRKASNQVKATDASSTRINYKLLVPGSTVRVLSGTFSGFTGTLKKLNRKTKLATVHFTLFGKENIADIDVNEIAIETN

SEQ ID NO: 199197 - protein, 101 aa, Glycine max
  unsure (1)..(101): unsure at all Xaa locations
  Clone ID: PAT_MRT3847_2189C.1.pep
DLALCYHRPRRRRSLIRFSAPAPIPAEVPPPRWRSLVGXAGLFFPXVLVRETAGRELEERRAAWSYSKSGVALDRTWNMGFVVVWWGMLACSTSEHRTSPT

SEQ ID NO: 199198 - protein, 234 aa, Glycine max
  unsure (1)..(234): unsure at all Xaa locations
  Clone ID: PAT_MRT3847_218C.1.pep
MKRFMLPRNPLSDAAELPSSPSPTPTTSFAKLRPSSHKHKPSKENDLPSDPNLVTPSPAKLKSPLPPRPPSSNPLKRKLTIVDALTDNSXDFGIKVIVRMRPLSSDKDEGDPTVQKVFNDSLSINGYNFTFDSVADMAATQLDIFEHVRVPLVEHCLVGFNSSGLAYALWGPAFPLSRLFALRGLPPRLFRRRFARCRGEQTYQSENQLSYQCHCSFLEIYNEPIMDLLDPNQK

SEQ ID NO: 199199 - protein, 65 aa, Glycine max
  Clone ID: PAT_MRT3847_21900C.1.pep
IISYRKHPHTKGDENSRSQLRGKQLRLLTVLGVNNALISDLTLWAKERVVLREQRLGSREPPVEI

SEQ ID NO: 199200 - protein, 204 aa, Glycine max
  unsure (1)..(204): unsure at all Xaa locations
  Clone ID: PAT_MRT3847_21901C.1.pep
MDTTSSPMSLQTQKTNFQELPEASPKPYKKGIVATLMGGAGSFKEDNYFVSLLRSSEKKALQELKEKLKSSFEDSPSDASMWGIPLLGGDDKADVILLKFLRARDFRIGDAHHMLLKCLSWRKEFGADTILEEDXLGFNKELEGVVAYMQGYDKEGHPVCYNAYGVFKDKEMYERVFGDDEKLKKFLRWRVQVLERGIKVLHFS

SEQ ID NO: 199201 - protein, 46 aa, Glycine max
  Clone ID: PAT_MRT3847_21902C.1.pep
GISRGQGSKPSCETSTCCCPSSPAPHKTGGSSTHHDPPRPSGPARA

SEQ ID NO: 199202 - protein, 53 aa, Glycine max
  Clone ID: PAT_MRT3847_21903C.1.pep
LDRKLPFSLAFSKLFTFSDNLHQVSSRKKKTNYTKTTTNEKKPCMLKIGGFPI

SEQ ID NO: 199203 - protein, 277 aa, Glycine max
  Clone ID: PAT_MRT3847_21904C.1.pep
LAYMQGYDKEGHPVCYNAYGVFKDKEMYERVFGDEEKLKKFLRWRVQVLERGIKVLHFKPGGVNSLIQVTDLKDMPKRELRVASNQILSLFQDNYPEMVARKIFINVPWYFSMLYSMFSPFLTQRTKSKFVISKEGNAAETLYKFMRPEDIPVQYGGLNRPSDLQNGPPKPVSEFRIKGGEKVNIQIEGIEAGATITWDIVVGGWDLEYSAEFVPNAEGSYTIAVEKPRKMGASEEAIHNSFTSKESGKMVLSVDNTASRRKKVAAYRYVVRKSSTI

SEQ ID NO: 199204 - protein, 110 aa, Glycine max
  unsure (1)..(110): unsure at all Xaa locations
  Clone ID: PAT_MRT3847_21905C.1.pep
VAGFYGGYIGGISDGAHNVDHPEEKDQEKGKLAGDINSDSKSDYGSDTEAHTDARKACGNAFIGAVTHAGEHSPEKXDREGPQEIPARMGPRLRPQFNAEYAEVEAHMET

SEQ ID NO: 199205 - protein, 106 aa, Glycine max
  Clone ID: PAT_MRT3847_21906C.1.pep
VRIPISMDNRVLQASVSLRLPMHAPGLLTTSTRLRFDRDAVFVLKGLAAALQEGGVVAMSQGFVEVLVYVGIDSRSQIQKQVPRKRVALSFGCPPCSSAAKTRNQE

SEQ ID NO: 199206 - protein, 118 aa, Glycine max
  Clone ID: PAT_MRT3847_21907C.1.pep
MPASDGHLKQEETNAPSSVHAKAEEHKALSKSEAKPLSLDHEGGDIEDGDDNDNDDELPNFSDVEEMILEMDLSPMDQETNASREVLRYQLDESKRTIMRLEQSAQSSMGRAISSQGA

SEQ ID NO: 199207 - protein, 133 aa, Glycine max
  Clone ID: PAT_MRT3847_21908C.1.pep
MEFPHSLQWQYGIPSHLLFPYNFIPENHVHWTETPDSHIFSADIPGVKKEELRVEVEDSKYLIIRTQAVDKSTEPARKFERKFRLPGRVDLDGISAGYEDGVLTITVPRSLSRGFYIDPSDVPENLEVLARAA

SEQ ID NO: 199208 - protein, 79 aa, Glycine max
  Clone ID: PAT_MRT3847_21909C.1.pep
ILPFISPPTPRGTKGALHGVGPKPHKRGANQQPKPTKGQTQKPNGEGPNGHTDPKGGEGATTNTQAQRGDRNPPPRREN

SEQ ID NO: 199209 - protein, 46 aa, Glycine max
  Clone ID: PAT_MRT3847_2190C.1.pep
YGCLVCLPLSPIIFHFLYFPFPQFSKSIKILLKLGSSFPYLYKFFN

SEQ ID NO: 199210 - protein, 51 aa, Glycine max
  Clone ID: PAT_MRT3847_21910C.1.pep
KPRITTTTTISSDPYLLPPPTVPVPTHPFHTPNSYTLLASPRGRPSMSYPT

SEQ ID NO: 199211 - protein, 87 aa, Glycine max
  Clone ID: PAT_MRT3847_21911C.1.pep
HTYGEPVRRGTDIGYHLKETAVAYSQESKLNELLKRYSEFINSTIYIWASKEDDVQVPADEYDSSDEHYLSVSSFKEESEDQDADKN

SEQ ID NO: 199212 - protein, 59 aa, Glycine max
  Clone ID: PAT_MRT3847_21912C.1.pep
KEDISTTNLKYFLVPFFLSSAQNKMAGDFFLHTLILYLLFLSEFMSYIHLHSSSLNHII

SEQ ID NO: 199213 - protein, 59 aa, Glycine max
  Clone ID: PAT_MRT3847_21913C.1.pep
SRSWCGLCCLVIWHLVVYGGKSEVNAGTQVQASQGIEELDSPIGLDHCPKSAVLAENSL

SEQ ID NO: 199214 - protein, 73 aa, Glycine max
  unsure (1)..(73): unsure at all Xaa locations
  Clone ID: PAT_MRT3847_21914C.1.pep
FAXSXSXXVSLSXASXLPFXXSXXXXLXTXXXSRXXXXXXMXXXXFXXTXPXSTFLQSHXXRXEFRAYVRVPA

SEQ ID NO: 199215 - protein, 39 aa, Glycine max
  Clone ID: PAT_MRT3847_21915C.1.pep
SHQYATVMESFCLSRNLKIYLVLMHKCINHITLSATPVM

SEQ ID NO: 199216 - protein, 72 aa, Glycine max
  unsure (1)..(72): unsure at all Xaa locations
  Clone ID: PAT_MRT3847_21916C.1.pep
QVSDAVGVPEPLSVFAPTXGTGKYLDKGSLQIVNVSFDFRPVVITINLDLKKGGHRFLTTPVYGYFGRDDPD

SEQ ID NO: 199217 - protein, 78 aa, Glycine max
  Clone ID: PAT_MRT3847_21917C.1.pep
GERALLPAIFSQNKKIILNICGPYKIINIPSSKKKKMWFDGFLKTSTLERHLKFGTDTFKTLNPMGNASIRNNWNSQI

SEQ ID NO: 199218 - protein, 44 aa, Glycine max
  Clone ID: PAT_MRT3847_21918C.1.pep
KKKKKKKKKKKKKKKKKKKKKKKGKNDKKRNKIKNACKQIITIL

SEQ ID NO: 199219 - protein, 48 aa, Glycine max
  Clone ID: PAT_MRT3847_21919C.1.pep
YATPSLSPSTACSRNAMDMHVQSLWKWQSFPLNSWTCFQGLGLETPVA

SEQ ID NO: 199220 - protein, 57 aa, Glycine max
  Clone ID: PAT_MRT3847_2191C.1.pep
NMLFYYPSIFFIGGCTKYTVPSFTKYLLKRYLLTHISLTFSHHILSSLLILYNKLYM

SEQ ID NO: 199221 - protein, 177 aa, Glycine max
  Clone ID: PAT_MRT3847_21920C.1.pep
METFSITGNSSSFIILTRPSTRHKPIFLPQRHTFNPIRCTNTDNNNNSSSSSSSNTTNDDANSVQVQAPTTTPTTPVEISFRRRSRRQAKRLRENENSGMQKARVETPPKKWEDMSLSEKAVELYVGEKGALFWLNKFAYASIFIMIGGWIAFRFVGPAFNLYQLDGPLLSPSDVFK

SEQ ID NO: 199222 - protein, 82 aa, Glycine max
  Clone ID: PAT_MRT3847_21921C.1.pep
MAWFSMFMKIMLLLVVTEVANIITYYVFFKPSGRNFFPAVSLLLPNLDRERASYGLKESVLATSLIDALGISRDSPDDKGAE

SEQ ID NO: 199223 - protein, 132 aa, Glycine max
  Clone ID: PAT_MRT3847_21922C.1.pep
MALSLSYAITKPFLRVQDRSSMNCELQRPKNGVVALIRCESKESSSELPEKHSKLEIGSPIIFIEAPKMIKTAATMPCLRVNSGLVKPGDVGRIVSRKPKDVWAVRVRIGTYLVDGKYFKPLELGEFRLIKT

SEQ ID NO: 199224 - protein, 96 aa, Glycine max
  unsure (1)..(96): unsure at all Xaa locations
  Clone ID: PAT_MRT3847_21923C.1.pep
SYSWPTGVVPATAFICGTSGCSVLVSHGFSCAATISDLSVSQGHDAYGVSCSRSLPCGLFLVLGGVAAGKLRFSPLQCQKLRLRLYKKYVIXDAWV

SEQ ID NO: 199225 - protein, 66 aa, Glycine max
  Clone ID: PAT_MRT3847_21924C.1.pep
SNRLLTRTSYFKLRQVLLIRGLSMLMLWPIEMTSWLHDTSCLTIWWWTITRFTILVDGGQTDYICK

SEQ ID NO: 199226 - protein, 54 aa, Glycine max
  unsure (1)..(54): unsure at all Xaa locations
  Clone ID: PAT_MRT3847_21925C.1.pep
IAHXFXGSRTILGPNLDXKHHYLIPNLGXTXRXXFXXXFXTMLPKGXKEXFPKL

SEQ ID NO: 199227 - protein, 59 aa, Glycine max
  Clone ID: PAT_MRT3847_21926C.1.pep
LDIGFIGSWTPSQHRRKTSNTLSSLLPNIVTSTSYHQRKLMRTLHLRFQPELTWHLHLH

SEQ ID NO: 199228 - protein, 117 aa, Glycine max
  unsure (1)..(117): unsure at all Xaa locations
  Clone ID: PAT_MRT3847_21927C.1.pep
MPKAKSDAKAADSRLKRKGAGAGRKQSKKAAKDPNKPKRPPSAFFVFMSEFREQFKKEHPNNKSVAVVGKAGGDKWKSLSDAFAFIXMFQEKAPFVATAEKKKQEYEKTILAYNKKL

SEQ ID NO: 199229 - protein, 141 aa, Glycine max
  Clone ID: PAT_MRT3847_21928C.1.pep
MPKAKSDAKAADSRLKRKGAGAGRKQSRKAAKDPNKPKRPPSAFFVFMSEFREQFKKEHPNNKSVAVVGKAGGEKWKSLSDAEKAPFVATAEKKKQEYEKTISAYNKQLEGKNSEEDESDKSKSEVNDDEEDEEEDDDDDE

SEQ ID NO: 199230 - protein, 172 aa, Glycine max
  unsure (1)..(172): unsure at all Xaa locations
  Clone ID: PAT_MRT3847_21929C.1.pep
IPSQYNLTHFLSLSLFLSDSYIVCALAPNNHKICTVAEIGLNDACRRESATLWLKRKGTGAAGRKQSKKAAKVPNKRKRPPSAFFIFMSEFREQFKKEHPNLLMISTFXNLVCINLMFHEKXPFVAMAKKKKPEXXKTILAYXXKWXGKNPEEYESDKSKFEVHDDEAIEDC

SEQ ID NO: 199231 - protein, 80 aa, Glycine max
  Clone ID: PAT_MRT3847_2192C.1.pep
MDSSSWYGRRSLFPCSYRPSLFLSATRDVRGTLTYALVLDSASIEHITFLKGGRKVQSSIEEGRALSLSFSLARSRSLFL

SEQ ID NO: 199232 - protein, 135 aa, Glycine max
  Clone ID: PAT_MRT3847_21930C.1.pep
MPSGISNFVSFRLKRKGAGAGRKQSKKAAKDPNKPKRPPSAFFVFMSEFREQFKKEHPNNKSVAVVGKAGGDKWKSLSDAEKAPFVATAEKKKQEYEKTILAYNKKLEGKNSEEDESDKSKSEVNDDEEDEVDGD

SEQ ID NO: 199233 - protein, 64 aa, Glycine max
  Clone ID: PAT_MRT3847_21931C.1.pep
ITTFQNSLFPFLGHCYREAEMREVSETTNARVAWFSIFSLGICILVSGLQLWYLKRFFRKKKLI

SEQ ID NO: 199234 - protein, 82 aa, Glycine max
  Clone ID: PAT_MRT3847_21932C.1.pep
KCNDETGAKGPNNFTEMGGLTSILIFSHFIVILLGFYPHNLYLFTSILLLPNVLKIPGKNWLSMNLFPLPQNGGTTKLYENR

SEQ ID NO: 199235 - protein, 215 aa, Glycine max
  Clone ID: PAT_MRT3847_21933C.1.pep
MAKDINLSSRTPLLLLLCFTTLTEAVWLTIPSKGTKCMSEEIQTHVVVLADYYVVADDVQGHQLQTISAKVTSPYGNNLHQNENVTHGQFAFTTTESGNYVACFWVNNKHQEGGGETTISLEWKTGIHAKDWDSVARKEKIEGVELELRKLEGAVEAIRDNLIYLKNREAEMREVSETTNARVAWFSIFSLGICILVSGLQLWFLKRFFRKKKLI

SEQ ID NO: 199236 - protein, 74 aa, Glycine max
  Clone ID: PAT_MRT3847_21934C.1.pep
HTPCLKQAKHETPMGGPQTNGGELQSRKTKRCDPKRGFGIFTDKDAPDGAKPAEPLNPATTPTRESQEPSLGPA

SEQ ID NO: 199237 - protein, 90 aa, Glycine max
  unsure (1)..(90): unsure at all Xaa locations
  Clone ID: PAT_MRT3847_21935C.1.pep
MKMEETFLCNTESVYDGHTDRLCVQISDAVLDACLEQDSDSRVACDTCTXPSLVMVFGDLTTNANVDYXKILHDTCTNICVVSNGVGSAH

SEQ ID NO: 199238 - protein, 63 aa, Glycine max
  unsure (1)..(63): unsure at all Xaa locations
  Clone ID: PAT_MRT3847_21936C.1.pep
DIICLSATLNKAWNIHMPAQEHAAXIIEELDPEDTGIINGNDLHMLLLDEPTHSTRGDRLYLT

SEQ ID NO: 199239 - protein, 285 aa, Glycine max
  unsure (1)..(285): unsure at all Xaa locations
  Clone ID: PAT_MRT3847_21937C.1.pep
VPVRNPPCARAYDCSLKTQKQESPTTQLKSEDSAQNNNSLVRSQGLPAASVSMQYRGNESDFNHYNKVGGSDSMFLDVETGNVHSLQLNHPNITTEKRWSGVPGSIPSAMFGMAPSMQAMSPFAKMEGGRSIAHTNEGRMIQQGPGREPVMMQHPQFTNAKQNSMMSLNSFPSGAAGWHVNSIPGADNVRPNGKLLQTQSIRSVSPNHLEQFGQTPYKEYSHFLGPADYSSAGVGGYCKPMGASSSPPPTIPPCIXGHGAQARLHLXSRCHFLGLFSGHQNAARH

SEQ ID NO: 199240 - protein, 120 aa, Glycine max
  unsure (1)..(120): unsure at all Xaa locations
  Clone ID: PAT_MRT3847_21938C.1.pep
VQLNGESTATWFCVXFDVEFGPSPMPLSIRYPTSSVDDHPPVDSQTRRDPTLLLSTAPNVLPTHWQQTLIYFFDPKDLKQDQLIEGRVTLSQNQASSRLLDVKIAYDTGGQSHVKYSFLR

SEQ ID NO: 199241 - protein, 76 aa, Glycine max
  Clone ID: PAT_MRT3847_21939C.1.pep
WFLYSGRFAFFFFFFFFAPGARYFIRCGGFGLIRLAFWVKGDIPFYICATASQSGKRGHRKRGGRLMGVGTTIEVF

SEQ ID NO: 199242 - protein, 39 aa, Glycine max
  Clone ID: PAT_MRT3847_2193C.1.pep
KNFLCFSNTPFKFGRSFEQKKFFLKILGKKKIFFSYRKK

SEQ ID NO: 199243 - protein, 101 aa, Glycine max
  unsure (1)..(101): unsure at all Xaa locations
  Clone ID: PAT_MRT3847_21940C.1.pep
DGDIFWWDNAKTLTTDVSVQXLCCELGTEAGQHYPECAQSHSGVHLHTIHITXERAYARKQDVSIECDARTIANARKTLVDSNVGNYTQIAGFHVAGRRGR

SEQ ID NO: 199244 - protein, 50 aa, Glycine max
  Clone ID: PAT_MRT3847_21941C.1.pep
RQVSSHIQFLLTLFGMTAIPVSFVGIALLNTDTAKLFYFRSRLLNIINLM

SEQ ID NO: 199245 - protein, 140 aa, Glycine max
  Clone ID: PAT_MRT3847_21942C.1.pep
LVCSTYNWTVDTTPPTSYVTASSSFTSSLNVSVNISFTEPCIGGGGFGCKSVNACNLLVYGAGQVIPSSFRIIQPNLTYSLLVSLSSTVQYGRAILVMDRNFCTDRAVNNFMKMPNSTVYIHFDRIKVYVNIRTHLPNNY

SEQ ID NO: 199246 - protein, 114 aa, Glycine max
  Clone ID: PAT_MRT3847_21943C.1.pep
HLYIKSDVYGFGVVLLEMLTGRAALDTNQPTGMQNLVECTMSSLHAKKRLKEVMDPNMEEQYSLRAAFQIAQLILKCLESMPKKRPSMEEVLETLEKVEAIKYKPKVKKRSAVR

SEQ ID NO: 199247 - protein, 64 aa, Glycine max
  unsure (1)..(64): unsure at all Xaa locations
  Clone ID: PAT_MRT3847_21944C.1.pep
SRSCPNAXRRRSIRCRSMMRTNLVTGTAMIFYSTCVRFSHSIQFTPLALPFLCSVLCSFLCLCL

SEQ ID NO: 199248 - protein, 116 aa, Glycine max
  Clone ID: PAT_MRT3847_21945C.1.pep
MKHLEMFNMVNTHHATTGYKCLKLKWRKFGHLAGQVGGAKGIFCGLFGLEAENTFWLDSSSTEKGRARFSFMGGKGGSLWKQLVFRLSHQSDGSSKGGGYLSTEDSQGSAETIFLE

SEQ ID NO: 199249 - protein, 49 aa, Glycine max
  Clone ID: PAT_MRT3847_21946C.1.pep
LQEARTIFPKKKEKRKCKKKKKAKKKKTKKKKKEKKKKKKKKKKKMKKN

SEQ ID NO: 199250 - protein, 119 aa, Glycine max
  Clone ID: PAT_MRT3847_21947C.1.pep
QSTIYTTTYFSVNRFCSYFSAIAKNSSISAFGGVFTFSTAAEDFAGIIADSSESPENSLNKLNDLKLRLVESSTVSKPLVCRSDGTEWRSLTWLELQQERSEQNSPETTVQAELNETSG

SEQ ID NO: 199251 - protein, 88 aa, Glycine max
  unsure (1)..(88): unsure at all Xaa locations
  Clone ID: PAT_MRT3847_21948C.1.pep
HKTSKGHPHFLCQAAASFAVKADSVEDPAPIVNFQTSLSFPGGXNPLPWLGPGSREKVLAILGAKAYAAGWFLDQSFALDWNAGKGHS

SEQ ID NO: 199252 - protein, 278 aa, Glycine max
  Clone ID: PAT_MRT3847_21949C.1.pep
MKENYSYQSYPDSGESSPRSREIDFESPPPWDHQNYKAKFICSYGGKIHPRSHDNQLSYVGGDTKILAVDRSIKFPAMLAKLSALCDAQDNNITFKYQLPGEDLDALISVTNDDDLDHMMHEYDRLYRASARPSRMRLFLFPSDTPPSPPPASAPPDTVIKPNNVDFLFALEKNVAVPAPPPPQPPPVSVKFNDPLPEPVAPQPEYRSRLNFNPAVSDPSAIQRQLHQLQIAENEKASYWRKNEDNYPAGDYYVQKMPEKFPPANFPASAPGYWPEKH

SEQ ID NO: 199253 - protein, 142 aa, Glycine max
  Clone ID: PAT_MRT3847_2194C.1.pep
PVGGSRLEGPSTNASAHASAHASAGCCCSGGEDRGTAMAESSESFTMASSPAQRRRGNDPLTSSPGRSSRRTDALTSSPGRDLPPFEDESEGLLGTEGPLEEEEDGEELIGDGMERDYRAIPELDAYEARGLALDDEDVEEL

SEQ ID NO: 199254 - protein, 77 aa, Glycine max
  unsure (1)..(77): unsure at all Xaa locations
  Clone ID: PAT_MRT3847_21950C.1.pep
XXXXSIXXGXRKIPXVANEATSXMLXSKXXXCALGDKVSXGLFXXXSYXXGXLEPEXQTPXXXXRVXLNXTLRXEQT

SEQ ID NO: 199255 - protein, 61 aa, Glycine max
  Clone ID: PAT_MRT3847_21951C.1.pep
MSGSYPLIICVISAFFMARTFNCVWGGCSRFIDVFPMHTLANSFVKYYALLLPSIVIMDSS

SEQ ID NO: 199256 - protein, 244 aa, Glycine max
  Clone ID: PAT_MRT3847_21952C.1.pep
MWTSSSIYSECSMLRRLLCTSLPRLPLKPQSSSLTILNSSLTQNQKQKQKPLSSHTIKSFSTSKMGDAPRPLSVPIPTLEKAERSDLLRALEASMGSPFSSEPLSPNPNSLIIVISGPSGVGKDALIARLRDNSRLALHFVVTVTTRPRRPAEVDGKDYIFVSKEEFLGMVEREELLEYALVYGDYKGVPKQQIRECLAKGCDVVLRVDIQGAATLKKVLGKSAVFVFVAAESEMALVERLVDR

SEQ ID NO: 199257 - protein, 62 aa, Glycine max
  Clone ID: PAT_MRT3847_21953C.1.pep
TRTLLSLNQFKTIEILLGRGKILKSLKFIARDKIFNHDDQNSWGKIYMIVGVSRSEQGCKAE

SEQ ID NO: 199258 - protein, 235 aa, Glycine max
  Clone ID: PAT_MRT3847_21954C.1.pep
TQIARVQYPSSQTLWDGINSNLGSSGKRRSLKLDLPCITEENENVDEIPGTFQRGIGSEGMAGSNIREPLAEIVDNANPSTSVLQDDILTGGRKDILSTEFNLSGTCDKVKNKLDKQDGNRKRFTRKGKENHNISLGANGVKRTAGSVCKRPKLSGKDSMKQGPINNIVSNVSSFIPLVQQKQAAAVVTGKRDVKVKALEAAEAAKRMAEKKENERKMKKEVLRLERERLELELQ

SEQ ID NO: 199259 - protein, 159 aa, Glycine max
  unsure (1)..(159): unsure at all Xaa locations
  Clone ID: PAT_MRT3847_21955C.1.pep
TNETATFVTWTILIRALLSRSCAPHPDEHSHMITKSISRRTAHGYHSILSHVIRRXVRSSXTTYTRVCYTVPIHDAPQLFLTQTAYNRADLNDDEICDRYHIDNTGLGCNWPSEDVLAHYWWSHADIFRSKKSIELGSGYGWVDLLLQLLRMHQSCNLR

SEQ ID NO: 199260 - protein, 41 aa, Glycine max
  Clone ID: PAT_MRT3847_21956C.1.pep
IFLFFVGHLFFYGGGKKLPYLFKRHTNTLARMNFQEFFLKK

SEQ ID NO: 199261 - protein, 56 aa, Glycine max
  Clone ID: PAT_MRT3847_21957C.1.pep
AFCSIQTCSTYQMKPRFLIFLTAFAIPSSSFSYELYAGGVLICLYWSCPWSFLAPF

SEQ ID NO: 199262 - protein, 53 aa, Glycine max
  Clone ID: PAT_MRT3847_21958C.1.pep
QSSGISGSMMIIIKSHSSLSSQLQAPLWLLQLLGSSLFLMYHAPVYFYNGFSR

SEQ ID NO: 199263 - protein, 279 aa, Glycine max
  unsure (1)..(279): unsure at all Xaa locations
  Clone ID: PAT_MRT3847_21959C.1.pep
MATVSYAVSGSACQSHRGASRTEAKVNYSAQVSLNCQGLRSLNKLHVRTTRAAKTKTLLSAKSNKSGREGVLGRIECGMNLIFVGTEVAPWSKTGGLGDVLGGLPPALAGNGHRVMTVSPRYDQYKDAWDTSVTVEVKIGDRIETVRFFHCYKRGVDRVFVDHPCFLEKVWGKTGSKLYGPSAGVDYEDNQLRFSLLCQAALEAPRVLNLNSSKYFSGPYGEDVIXIANDWHTALLPCYLKSMYQTKGIYKNAKVAYCIHNIAYQGRHSFADFSLLNLP

SEQ ID NO: 199264 - protein, 64 aa, Glycine max
  Clone ID: PAT_MRT3847_2195C.1.pep
WFEQVRSALCTIELSVQGPWHQALCAIFPTIAIVIASYTDILTCWYYSAHQYYLFSRIKKKEWS

SEQ ID NO: 199265 - protein, 371 aa, Glycine max
  Clone ID: PAT_MRT3847_21960C.1.pep
MATVTASSYAVSGSACHSHRGASRREAKVNSLAQVSLNYDGLRSLNKLHVRTTRAAKTKTLLSAKSNKSGHDGVLGRIKCGMNMIFVGTEVAPWSKTGGLGDVLGGLPPALAGNGHRVMTVSPRYDQYKDAWDTSVTVEVKIGDRIETVRFFHCYKRGVDRVFVDHPCFLEKVWGKTRSKLYGPSAGVDYEDNQLRFSLLCQAALEAPRVLNLNSNKYFSGPYGDDVIFIANDWHTALLPCYLKSMYQTRGIYQNAKVAFCLHNIAYQGRHAFADFSLLNLPREFKGSFDFTDGHVKPVKGRKLNWMKAAILESDRVLTVSPYYAQELVSGEERGVEMDNIIRSCGITGIVNGMDNREWSPITDEFNDLHY

SEQ ID NO: 199266 - protein, 410 aa, Glycine max
  unsure (1)..(410): unsure at all Xaa locations
  Clone ID: PAT_MRT3847_21961C.1.pep
MDSKSSKFYGLSGSIARRVFFRALFLASAVSLVALIRFLPAVDLESLTPKTYVDCVIDDSDSLSENTTLTAGSYLFQSRILNTFWGSFDSMNCKNDTSLASTIITILKGKRLLNFGAKSLCVGEGSNVIVSAMQRLGFSSVIGLHKHPFFSLNKKKIACRFEYDDSTFDFVFSKDVVDKVSVPALLVLEVERILKPGGIGALLVGSSSSSSSVSSLLRSSNVVHVGHVNELSLVVFKKRSIFYTVLPEDCASVQFTKPLVKLMEPLVEERVRDVKYETAXMKNSEGVTFVYHPGLAGKIAHKNGVDGEMEPFFGEEEFDFLVWFKETVQHADFVVLKMHAGEVEMKFLADIFESGAICSVDELFLSCSESGDGKRETMSSREHCMDTYKGLRSNGVYVHQWWDAKLHQGA

SEQ ID NO: 199267 - protein, 52 aa, Glycine max
  Clone ID: PAT_MRT3847_21962C.1.pep
RINVNIDFPRTDVNVNSLTSGFRKLMLTNTHYLQLCHRVYFNIDFCQKPMLI

SEQ ID NO: 199268 - protein, 78 aa, Glycine max
  unsure (1)..(78): unsure at all Xaa locations
  Clone ID: PAT_MRT3847_21963C.1.pep
SNLMGHLGLRRVGLTVRSGQYYGLVDQQTTRQRFEKRYYCWWPWGQKRHYYNCWLWXLRRRPRWWWCWWPPLHRRDTW

SEQ ID NO: 199269 - protein, 194 aa, Glycine max
  Clone ID: PAT_MRT3847_21964C.1.pep
MDSKSFKFYALSGSIARRVFFRALLLSSAVSLVALIRFLPTVDLGSLTPKTYFDCVDDDSDSLSENATLTAGSYLFQSRILNTFWGSFDSMNCKNDTSLASTVITILTGKRLLNFGARSLCVGEGSNVIVSSMQRLGFSSVVGLHKHPFLSLHKKKTVCHFEYDDSTFDFVFSKDVVDQVSVPAALLVLEVERI

SEQ ID NO: 199270 - protein, 79 aa, Glycine max
  unsure (1)..(79): unsure at all Xaa locations
  Clone ID: PAT_MRT3847_21965C.1.pep
MRRFYYLKALQLHAWNLNFFKRDQSLSTEDDEYIKPCCDLYMCTRSKPDPCSCEDIXLHSCHLEXNSCMCTTSQTRQRH

SEQ ID NO: 199271 - protein, 55 aa, Glycine max
  Clone ID: PAT_MRT3847_21966C.1.pep
WFWPSLKITHLFPYSNKSKPFQGDIFVKSPLLRSATHCFKKVYGRPRSMMDFVQP

SEQ ID NO: 199272 - protein, 301 aa, Glycine max
  Clone ID: PAT_MRT3847_21967C.1.pep
MDSTNVPSRNTHPLRSNSSKEFRRNDRVSFFDWFYQFRILLQRSLKERKHESFNTLRVCQVIAAALLAGLMWWHSDYRNIQDRLGLLFFISIFWGVFPSFNLVFAFPQERTIFMKERASGMYTLSSYFMARIVGDLPMELILPTIFLIVTYWMGGLKPDLWAFLLTLLVVLGYVMVSQGLGLALGAAIMDAKQASTVAAVTMLAFVLTGGYYVHKVPSCMAWIKYISTTFYCYRLLTRIQYEDGKKISYLLGCYHGDKGGCRFVEEDVVGQIGTLGCIGVLLFMFVFYRLLAYLALRRIKS

SEQ ID NO: 199273 - protein, 62 aa, Glycine max
  Clone ID: PAT_MRT3847_21968C.1.pep
CVSHIFFLSFIFHNHDTMNSSQFGIAIKGMLASSNTISNTLVVVSFQFIYNFVTNVYSKTIL

SEQ ID NO: 199274 - protein, 82 aa, Glycine max
  Clone ID: PAT_MRT3847_21969C.1.pep
LCDVVLPRFLLIGIRDFLHVSQLQMSGAGGEADIAVFVYESKTNQRVSAEPTHVHIGAVECGGMLGFICKVRNSSLTLEVRG

SEQ ID NO: 199275 - protein, 296 aa, Glycine max
  Clone ID: PAT_MRT3847_2196C.1.pep
MSMAIINTFGNVDVYILLLSSWFLVSAVCVWGRPATFLQDFEITWSKTHIRQIDQGRSIQLILDQNSGCGFASKSKYMFGRVSMKIKLIPGDSAGTVTAFYMNSDTDTVRDELDFEFLGNRSGQPYTVQTNIYAHGKGDREQRVNLWFDPSADFHTYTIMWNHHHIVFYVDDFPIRVYKNSEGKGIPYPTMQPMGVYSTLWEADNWATRGGLEKIDWSKAPFYAYYKDFDIEGCPVPGPANCASNQSNWWEGAAYQALNAIEARRYRWVRLNHIIYDYCQDKSRFPVIPPECLAGI

SEQ ID NO: 199276 - protein, 38 aa, Glycine max
  unsure (1)..(38): unsure at all Xaa locations
  Clone ID: PAT_MRT3847_21970C.1.pep
PIVNCSHQGSXWHXXNXXWYSRSMMSGFKPSXFRLHXF

SEQ ID NO: 199277 - protein, 204 aa, Glycine max
  Clone ID: PAT_MRT3847_21971C.1.pep
HACAHASAQVLNVWKEQGHRVLLFTQTQQMLNIFENFLTTSGHIYRRMDGLTPVKQRMALIDEFNDSSEIFIFILTTKVGGLGTNLTGANRVIIFDPDWNPSTDMQARERAWRIGQKRDVTVYRLITRGTIEEKVYHRQIYKHFLTNKILKNPQHKRFFKARDMKDLFTLNVDGETGSTETSNIFSQISEEVNVIGTYKENKDK

SEQ ID NO: 199278 - protein, 64 aa, Glycine max
  Clone ID: PAT_MRT3847_21972C.1.pep
RRMRAYVGLDALERALFFFFLFFFFLSKRKLILGSKQNPSIYYPPEMASRGENKTVAQLTQKHL

SEQ ID NO: 199279 - protein, 115 aa, Glycine max
  unsure (1)..(115): unsure at all Xaa locations
  Clone ID: PAT_MRT3847_21973C.1.pep
NIRAQVEEAAAAKEIXEEENQLIDAAQGTSNSITASDKVDSYRFYPPGKIMHIVSTPSSDDFSSSSIEEHVKLYETPRQLYSKLRLSRTMINDHYMPTYRKMIQLLIRQLEKDIM

SEQ ID NO: 199280 - protein, 128 aa, Glycine max
  unsure (1)..(128): unsure at all Xaa locations
  Clone ID: PAT_MRT3847_21974C.1.pep
QKRFFGVSSPVFGLPPMGKVGKISCSLEEKPFFVKENRSSLLGMGAFFMGRGRAPTMLGPTLALGXKDLALXGTGVPFGLSNNLFGWVLFGVFGLIWAFFFVYPSPFEKDEKSGPSPLKILGCREKKK

SEQ ID NO: 199281 - protein, 73 aa, Glycine max
  unsure (1)..(73): unsure at all Xaa locations
  Clone ID: PAT_MRT3847_21975C.1.pep
KGEGKRGARGKAGSRSSNEGKENTRPPHNEESCXLXXXLXXXXXXXXLXXXXXLLLXXXXXXXXXXXXXXXXX

SEQ ID NO: 199282 - protein, 72 aa, Glycine max
  Clone ID: PAT_MRT3847_21976C.1.pep
TKDGISCCTTPLAVVRFRDAIRCESHVLASARIATAINCAPCLSTTLVYIYFTLWQMLSMAIPFYYHGVGEQ

SEQ ID NO: 199283 - protein, 122 aa, Glycine max
  Clone ID: PAT_MRT3847_21977C.1.pep
EFKSLTHIYIYNMVGRSNLIKFYLPIYISFLSPGFPCSRSPPLLVPGLPCVPSVPHSLSWLSGGSISCEACLLCPLVVFLASWDFSRDRDCRWIVGCLDCCSLNEDGVLKFNVFSIFNLMYL

SEQ ID NO: 199284 - protein, 59 aa, Glycine max
  Clone ID: PAT_MRT3847_21978C.1.pep
DLRVLSTLARQGSCNTVGLNKVDVETAYYMDDGLHKSTTTSHTAVASIFTLIYRRTVCD

SEQ ID NO: 199285 - protein, 56 aa, Glycine max
  Clone ID: PAT_MRT3847_21979C.1.pep
LNGFFNLGLDTTMVGHTVAEILVLFLIKFTLDQVGFKLDSLCLLALCLIFCLPLTN

SEQ ID NO: 199286 - protein, 64 aa, Glycine max
  unsure (1)..(64): unsure at all Xaa locations
  Clone ID: PAT_MRT3847_2197C.1.pep
LSTAFQDSQFHPCGLLCILIPYEIEGEERQLNRIPAPMGNIFFMVKEKHXQGGSWVFSRAEFRA

SEQ ID NO: 199287 - protein, 40 aa, Glycine max
  Clone ID: PAT_MRT3847_21980C.1.pep
MLDSDHLYTHIGRHYGYDNHDHAAEPFNTEHDDTPNSTCD

SEQ ID NO: 199288 - protein, 64 aa, Glycine max
  Clone ID: PAT_MRT3847_21981C.1.pep
GNPNLNILTEKGSMEGAQFRVTIGFHKGLKIHDLIFNNKKISLQIPTWDGTPGVMGNITGQKCP

SEQ ID NO: 199289 - protein, 56 aa, Glycine max
  Clone ID: PAT_MRT3847_21982C.1.pep
LYHLKGDIPQMPLYSLNLRPASRSWPALYTCFITLHSSSFLRTNFDDDIILVLIRS

SEQ ID NO: 199290 - protein, 336 aa, Glycine max
  Clone ID: PAT_MRT3847_21983C.1.pep
MQGLIRKLVAQVQAQHPLRNTNSHHRIFNTHSAFSSVPKPSQPQLHQVNHIHSPFLTHPLHHFHSCRSFSTKFRAFLSQPMISRHFAFNPLLRVSARSLQIGCRPSLHYFIRHNFNFSHNHDFSRRSWRSWLRGLTANDMVLGLIIANVAIFLLWRIADQNFMIKNFTISLDNFKSGRLHTLITNAFSHVDTWHIVSNMIGLYFFGMNIGRNFGPEFLLKLYLAGAVGGSVFYLIHQAYKAQTSKDWRTMIVSKELALGASGAVNAVMLLDIFLFPKATLYLDFFIPVPAVLLGIFLIGKDMLRILEGNSQISGSAHLGGAAVAAIAWAGVRKGRF

SEQ ID NO: 199291 - protein, 40 aa, Glycine max
  Clone ID: PAT_MRT3847_21984C.1.pep
KNVKTPLTPRSKVTPANPLPVDRGKNSGPIKEDVYLGSNP

SEQ ID NO: 199292 - protein, 107 aa, Glycine max
  Clone ID: PAT_MRT3847_21985C.1.pep
GIPKGLAKQKRSRGSPFPAPLGFFLRETTPPPPLGGPEWGGGGPLNSPGSYPPPSPPFSNAPMVSKNLFFFGVFNTTCSFPNPKCNKKLDLKITSHKIAPNPLNDGF

SEQ ID NO: 199293 - protein, 83 aa, Glycine max
  Clone ID: PAT_MRT3847_21986C.1.pep
EREKLLGMKFFPWRQCITRNGRSSLNESCIKLLSLIACGARFNTAFSVWEHNALHCIGRHQFSSSKIKSLFSKVLILHTNGEK

SEQ ID NO: 199294 - protein, 341 aa, Glycine max
  Clone ID: PAT_MRT3847_21987C.1.pep
STSPPPHPNLKTLSFLSPPMASPSSPTDSNPPSALPLPIPPPPSTSSRRLPPPCWTPEETSALIDAYRDKWYSLGRTNLKATHWQEVADSVTAQCPNASPTAKTPVQCRHKMEKLRKRYRTEIQRLRNLPLPRLNNASTNSPSSWLHFKSMDSMEKGPNHKPHADNNLNINNNFHDDDVDDDDLYEEFKNAPGSNTRSLNKLYKNNNGFNSAGSGSGSGFRIRIPAGVPQQQHHTASSNKIFNSHPPPGMGPRGGGVKRERERDAVAEMVGAIKVLRDGFVRMEQMKMEMAREIESMRMEMEMKRTEMILDSQQRIVEAFARAVSQKRTKGKSTPSPSSQP

SEQ ID NO: 199295 - protein, 144 aa, Glycine max
  Clone ID: PAT_MRT3847_21988C.1.pep
YKRKQTAVAAPAKAAATDKTVEVKGGKNGSKRTVPAQKASRFYPAEDVPQPKAGRKAAPKTSLRSTITPGTVAILLAGRHSGKRVVVLKQLDSGLLLVTGPFKINGVPLRRVNQAYVISTSTKVDISGVKDDEKINNANFEKAA

SEQ ID NO: 199296 - protein, 331 aa, Glycine max
  unsure (1)..(331): unsure at all Xaa locations
  Clone ID: PAT_MRT3847_21989C.1.pep
KPNLFLSPPPTMASPSSPTDSNPPSAVPLPLPAPPATSSRRLPPPCWTPEETAALIDAYRDKWYSLGRTNLKATHWQEVADAVTAQCPNASPTAKTAVQCRHKMEKLRKRYRTEIQRLRNLPFPRLNNANTNSPSWWVHLKSMDSMEKGPNHKPHSYHQXNLNFHEDDDDDYLYEEFATDPGSNTNTRSLVNEDGANEDGDGXGRSRGCGLRGXKAAGEQQQQHTASSNKIFNSHLPPGIVPRGGGVKRERERDAVAEMVEAIKVLRDGFVRMEQMKMEMAREIESMRMEMEMKRTEMILDSQQRIVEAFAMAVSQKRSKGKSTPSPSSQP

SEQ ID NO: 199297 - protein, 37 aa, Glycine max
  Clone ID: PAT_MRT3847_2198C.1.pep
PTRSLKKKKKKKKKKKKKKKNKKKIKKKKKKKKKKKN

SEQ ID NO: 199298 - protein, 47 aa, Glycine max
  Clone ID: PAT_MRT3847_21990C.1.pep
NGPKYAVEPLFSQSMGSVMMQSLSQVYPCSVECCITFNHVVSRHCCK

SEQ ID NO: 199299 - protein, 53 aa, Glycine max
  Clone ID: PAT_MRT3847_21991C.1.pep
MHPSFSFYKSLAQNAELQLSLQDTIWTKQNLECINVRHLRLGETIITQSLSRI

SEQ ID NO: 199300 - protein, 89 aa, Glycine max
  unsure (1)..(89): unsure at all Xaa locations
  Clone ID: PAT_MRT3847_21992C.1.pep
MVMHINGTPCALGLHMPVEWETHSQWWMGXPERAYNWGDSVVDSQRVYDRDALAIIRFEAVTGCVSYAQRENARSXLPEHMMVGEMNMN

SEQ ID NO: 199301 - protein, 188 aa, Glycine max
  Clone ID: PAT_MRT3847_21993C.1.pep
TGFPRLFDDHWVKVAMADDSLVVDLLLRLHRSPPPPPCLNLHWTVRRRRSRSAHNKAEASPTTPLSWSGATSASGGNLDGYEEYSRPSKPTQTSRSKVANPSETTSPGRTRGQQTLAELKAEEDLLLKERRNLKKELAFLRLTVEKHRATNESIKRRKIDFESRQNSSAAATALEVSGKAVNGPFQFV

SEQ ID NO: 199302 - protein, 37 aa, Glycine max
  Clone ID: PAT_MRT3847_21994C.1.pep
QGLKVMEGPGGLHVKDLGFHRPKFSRRSANVQSQTEP

SEQ ID NO: 199303 - protein, 77 aa, Glycine max
  Clone ID: PAT_MRT3847_21995C.1.pep
RSQFQGHIRCLGQLLISLTGWVSGLTVLEAQTRFRSLFLTRMHKHVLRRRFHDLAIYRSIDSDFLLTCLQIYVATFY

SEQ ID NO: 199304 - protein, 56 aa, Glycine max
  Clone ID: PAT_MRT3847_21996C.1.pep
RLREDDRRGPFMYASTSFAWTNNEETNWSEIVNFSCNDFNHYKGIRVLTWSQLIYL

SEQ ID NO: 199305 - protein, 149 aa, Glycine max
  unsure (1)..(149): unsure at all Xaa locations
  Clone ID: PAT_MRT3847_21997C.1.pep
LMVFGFVTDMIGIHSVFGAFVFGITVPKGAFAERLIERVEDFVVGLLLPLYFASSGLKTNVATISGAKGWGILALVIATACAGKIVXTFLTAVACKIPMRDAMTLSXLMNTNGLVELIVLNIGKERPVTNDEMFAILVLMLYYHLITTP

SEQ ID NO: 199306 - protein, 159 aa, Glycine max
  unsure (1)..(159): unsure at all Xaa locations
  Clone ID: PAT_MRT3847_21998C.1.pep
LEVKSNGFSYAIVVVGEHPYAEMHGDNMNLTIPDHGPETITNVCGAIKCVVIIISGRPVVIEPYVGSIDALVAAWLPGSEGQGVADVLFGDYGFTGKLPRTWFKTVDQLPMNVEDPHYDPLXPFGFGLSTKPTKGFYLSYHLHLSLSLSLYIYIYLMYK

SEQ ID NO: 199307 - protein, 439 aa, Glycine max
  Clone ID: PAT_MRT3847_21999C.1.pep
NLISYLYFSINKHIFYIREKKKKKKKKAINFNPLFEDFTSGHSSDHASVRLRETTEGRDGLMKIHMPGYFSSISKGVATIMASYSSWNGVKMHAHHDLITGFLKNTLHFKGFVISDFEGLDRITSPPRANITYSIEAGVSAGIDMFMVPKHYTEFIDVLTMLVKNKHIPMSRIDDAVGRILWVKLMMGIFENPFADYSLVKYLGIQEHRNLAREAVRKSMVLLKNGESADKPLLPLPKKSPKILVAGSHADNLGYQCGGWTIDWQGVSGNKLLKGTTILTAVKNTVDPETTVVYKENPDVEFVKSNGFSYAIVIVGEHPYAEMYGDSMNLTIPEPGPKIITNVCGAIKCVVIIISGRPVVIEPYVGLIDALVAAWLPGSEGQGVADVLYGGYGFTGKLPRTWFKTVDQLPMNVGDPHYDPLFPFGFGLSTKPSKALYSS

SEQ ID NO: 199308 - protein, 42 aa, Glycine max
  Clone ID: PAT_MRT3847_2199C.1.pep
KLLKYTEFFKLEKDDQTPILSEKTMIKHFFYERQNRPRGLTP

SEQ ID NO: 199309 - protein, 216 aa, Glycine max
  unsure (1)..(216): unsure at all Xaa locations
  Clone ID: PAT_MRT3847_219C.1.pep
MAAITAPQHRSSKTESYVDNKRKDDIRHANIVAARSVANAVRTSLGPKGMDKMISTSSDEVIITNDGATILNKMQVLQPAAKMLVELSKSQDSAAGDGTTTVVVIAGALLEQCLLLLSHGIHPTVVSDALHKAAVKAVDVLTAMAVPVELSDRDSLVKSASTSLNSKVVSQYSTLLAPLAVDAVLSVVDAPKPDMVDLRDVKIVKKLGGTXYDTEL

SEQ ID NO: 199310 - protein, 294 aa, Glycine max
  unsure (1)..(294): unsure at all Xaa locations
  Clone ID: PAT_MRT3847_21C.1.pep
MGSRGQKRPEMVDELPADKRACSSLDFRPSTSNSSVQTQMNSTVEAHDHDMDTSSSASASSQSEGEPEKDSAYGSCDSDDMEQHHSTLHEYHRQRLSSDHGKFKTIISSLSGLTEPSLQLAVLTELCEVLSFCTEGSISSMTSDLLSPLLVKLAQHESNPDIMLFSIRAITYICDLYPRSAAFLVRHDAVTTLCQRLLAIEYQDVAEQCLQALEKISREQPLACLQAGTIMAVLNYIDFFSTSTQRVALATVVNICKKLXSESPSPFMEAVPILCNLLQYEDRQLXENVATCFI

SEQ ID NO: 199311 - protein, 186 aa, Glycine max
  Clone ID: PAT_MRT3847_22000C.1.pep
GYQCGGWTIEWQGVSGNNLLKGTTILAAVKDTVDPETTVVYKENPDVEFVKSNEFSYAIVVVGEHPYAEMHGDSMNLTIPEPGPEIITNVCGAIKCVVIIISGRPVVIEPYVGSIDALVAAWLPGSEGQGVADVLFGDYGFTGKLPRTWFKTVDQLPMNAGDPHYDPLFPFGFGLSTEPSKALFSS

SEQ ID NO: 199312 - protein, 130 aa, Glycine max
  unsure (1)..(130): unsure at all Xaa locations
  Clone ID: PAT_MRT3847_22001C.1.pep
LRVVYEIILGRWENICFSNGLDKQSIEFLHFLHDRIDDHLSHSAILFADTEIIVRCTVHPMMPHETLSDQSDLXECRXAEFIPPPKAKTMRMVXIPDALKMIRIQMGXRICLSGQLTSGVRWNCCDTIKE

SEQ ID NO: 199313 - protein, 75 aa, Glycine max
  Clone ID: PAT_MRT3847_22002C.1.pep
PSAYSWPFPKIKKGGTAPNPKSASNPMDWYIVPFWPHCHTHKKGGKKKLPLCQTLPFILSSKSYLLKMTPSCKKC

SEQ ID NO: 199314 - protein, 133 aa, Glycine max
  unsure (1)..(133): unsure at all Xaa locations
  Clone ID: PAT_MRT3847_22003C.1.pep
REPVERNFHFSRTLSVGRLRDRVLRRSTLSDLTFFPLQQETELRDASLPSQDMDRQAVEGNSRVSPSDHSTINSSTNRYPPSSMSNSMFSIQDYEGETSGLREGRYQDLLEHRSNFXERRRRIRSQVRALQRL

SEQ ID NO: 199315 - protein, 91 aa, Glycine max
  unsure (1)..(91): unsure at all Xaa locations
  Clone ID: PAT_MRT3847_22004C.1.pep
YGWARARSKEEWACVGTSNSTKDNRWATILCLGQSVVGDLNLFTVGKNCEGIHVGVCYIMGXENARFNIPLMAYEENIKTIGGNPKTHLGR

SEQ ID NO: 199316 - protein, 251 aa, Glycine max
  Clone ID: PAT_MRT3847_22005C.1.pep
MSTFATRSLVSVESTTTIEGTEADNVDSDSLFRGCVLEGRWDFVLTAYRNDSNYHKIKINESRGTALHVAVNDGKVELVNTLVVAILNHEGREVLRDDSALKTTNERGDTPLHLASSRGFIGMCKCIIGELKERKDLIRVRNNKGETPLFRAVLTCHTKTFVYLHHVSKDIDVPLRNYDGDTILHHAIWREFLDLAIIIIHCYPGLVEMRNKDGATPLKVLACKPSAFRSGINLPWWKKILYYGKCCVRGG

SEQ ID NO: 199317 - protein, 46 aa, Glycine max
  Clone ID: PAT_MRT3847_22006C.1.pep
WGNAHPYSQNSYWCGGQNCFLKIINYALVHLESFWENLSKNKGVFF

SEQ ID NO: 199318 - protein, 131 aa, Glycine max
  Clone ID: PAT_MRT3847_22007C.1.pep
DSSKGSSILPILHRNLLLLSQVLLLFTHFPLMGLNLLMFGKFTNTREVKNDFDKYHVKGLSRCLNWTSRSNANSQASCYVVNRHFASDCNDICSKEFSSKVQLILSISFFLFAMYFNSNMLLSKEDNACLT

SEQ ID NO: 199319 - protein, 27 aa, Glycine max
  unsure (1)..(27): unsure at all Xaa locations
  Clone ID: PAT_MRT3847_22008C.1.pep
XGSVXTSISIXLXLHLLVSGXVXXNMV

SEQ ID NO: 199320 - protein, 57 aa, Glycine max
  Clone ID: PAT_MRT3847_22009C.1.pep
QFSLFLWDTGDIQLPCRIGSAAWPSPPRTNTNNSLPRRRLISVHYSIPKITLLFFKV

SEQ ID NO: 199321 - protein, 57 aa, Glycine max
  Clone ID: PAT_MRT3847_2200C.1.pep
IGSQNNFVTFRSGFTNPSFNSPSPPCNPTHITCIQFLRYFLSQISVVINYHINYQYS

SEQ ID NO: 199322 - protein, 67 aa, Glycine max
  Clone ID: PAT_MRT3847_22010C.1.pep
VVSSIRSRGRDELGGHGTPHLDVGSTTSIVLNGREAEMREGWLPSPCRKGFHLPADWLPLQATVLGP

SEQ ID NO: 199323 - protein, 323 aa, Glycine max
  Clone ID: PAT_MRT3847_22011C.1.pep
MKRQMLHDLIENAGGCAVTDGGFATQLEKHGASINDPLWSAIYLIKDPHLIKQVHLEYLEAGADILVTSSYQATLPGFSSKGLSIEEGESLLEKSVKLAVEARDGFWNSAIINPGNKYRRALVAASIGSYGSYLADGSKYSGCYGPDVNLKKLKDFHRRRLQVLVEAGPDLLAFETIPNKLEAQACVELLEEESVKIPSWICFTTVDGENAPSGESFKDCLEALNKSNKVDAVGINCAPPHLMENLICKFKQLTKKAIIVYPNSGEVWDGKAKKWLPSKCFHDDEFGFNATRWRDLGAKIIGGCCRTTPSTIQIISNALREKS

SEQ ID NO: 199324 - protein, 110 aa, Glycine max
  Clone ID: PAT_MRT3847_22012C.1.pep
WNAAQAQLNGTVHCNYPQWIEILCHDINVHVPHHISPRIPSYNLRAAYDSIKQNWGKYVNEANWNWRLMKTILTRCHVYDKERYYVPFDELAPQESQPIKFLRKFMPDYA

SEQ ID NO: 199325 - protein, 33 aa, Glycine max
  Clone ID: PAT_MRT3847_22013C.1.pep
LMFLGRASTIIAFFTASSSLAIQTERIDEVREE

SEQ ID NO: 199326 - protein, 59 aa, Glycine max
  Clone ID: PAT_MRT3847_22014C.1.pep
TFMSFLVPNTLSCFQLLQSKTHTSSTCERSYKGHKCPEAGIFNAGGDMTIAMILRLQMR

SEQ ID NO: 199327 - protein, 93 aa, Glycine max
  unsure (1)..(93): unsure at all Xaa locations
  Clone ID: PAT_MRT3847_22015C.1.pep
IFLEEGFLDFLNKELQSYRYDKNEYEGLPFDFHGGYIGYIGYNLKVECGVKSNRHKSTNSXMACFFFADNLELLDHKNDDVYILGIHEESSSI

SEQ ID NO: 199328 - protein, 380 aa, Glycine max
  Clone ID: PAT_MRT3847_22016C.1.pep
VAFVCSSRRTSRSRSTIPFCFCDLQQQTFREIYGQRALVPGFIIIDGNSGYCKFGWSKYAYPSGRSATFLEFGNIESPMYTRLRHFFATIYNRMQVKPNKQPVIVSVPICHYDDTESAKASRQQLKEAIYASLFDMNVPAVCAVNQATLALYAAKRTSGIVVNIGFQVTSIVPILNGKVMRKVGVEVMGLGALKLTGFLREKMQLNNLRFQSLYTVRTLKENLCYVALDSEAELLKDTKASFEAAGEGWFTLSKGRFQTAEILFQPHLAGVQAMGLHQAIALCVEHCHSADLACDSDWYKTIVLSGGTACLPGLAERIEKELHALLPPYVSNGIRVIPPPYGADTPWFGAKIVGNLSTFPGHWCVTKKQFRQKPRLNLIW

SEQ ID NO: 199329 - protein, 63 aa, Glycine max
  Clone ID: PAT_MRT3847_22017C.1.pep
VSPKFGRKSQATVHLSCIKGYFIRSPAYLVGSTLKVSSWSFMVINSQPNVISEPLYVGGMYHS

SEQ ID NO: 199330 - protein, 72 aa, Glycine max
  Clone ID: PAT_MRT3847_22018C.1.pep
IVSTSFSHLLFPFLSAFSSLSIFPPLYIFCSFAFSSSHYSFYSLLLMAPSTGDVQLNSPVSGEYSDDLEDVR

SEQ ID NO: 199331 - protein, 176 aa, Glycine max
  unsure (1)..(176): unsure at all Xaa locations
  Clone ID: PAT_MRT3847_22019C.1.pep
MVGKRAKGPYLKKXIGCVSGHVWAEEEKNQGVKIKEXITKCVKEKLGTFCKVLNIPINKTSRKKEELSAKLLQFLESPHATTDVLLADKEKKGKKRARKQTPSKSSGEGSKTSAKKQKQNSQVGKNQKQSSDIEDSDAAEPSDAKVDSQEDDDSSQKSESDNRESISEKEKELFRP

SEQ ID NO: 199332 - protein, 130 aa, Glycine max
  Clone ID: PAT_MRT3847_2201C.1.pep
PFSVALKERMLQEFEDDNVRVEEFTKLNTQGQLGKIMVAGYQALNFIRYFTCGPQEVRAWTIREGTKAPQAAGVIHTDFEKHFICGDIMNFDDLKEYGSETAVKAAGKLQQKGKPYEMVDGDIAHWKHNA

SEQ ID NO: 199333 - protein, 311 aa, Glycine max
  Clone ID: PAT_MRT3847_22020C.1.pep
HASVREDDRRGVKEKLVDFCNVLNIPITKTSMKKEELSAKLLEFLESPHATTDVLLADKEKKGKKRARKQTPSKSPAKKQKQNSQVGKKQKQSSDIEDSDAAEPSDAKVDSREDDDSSQKSEGGNKESISEKEEDKEKVHKRSSKKILKEDQTTPVKKTTGVKTAKSNENTSKKSTSKRAVTDSTSKSKKQKSVKENLNSKRKDANKKQTDKSLKALLKDQGKDKSSEKAKAEPSKEELHRVAVDILKEVDFNKATLSDILRQLGTHFDVDLMPRKAEVKDIITDVINNMSDDDREEAENVGDDDADEDDA

SEQ ID NO: 199334 - protein, 256 aa, Glycine max
  Clone ID: PAT_MRT3847_22021C.1.pep
IRLECQLARTLIDGWKQMVDEWVKDTTAIAGSEGTPDSVNPSVVDDEEGLPSPPMDEGALFAAPTGSMELSQFFDGMDDDGNPQHSGEFIKNHEHGRRPSLNSQNTAKRKPQASNEANIIAKDSKGQQAKKNEAAVRPNKSVIADSGPSRPPKSTMQKKGNIEPKMQQNIVKSAIPRNPHIHQLDKPKCSDDAAVHVKLEATKRKLQERYQQAEKAKRQRTVQVMELHDLPKQGIGHRNPHVKPGNHKRQWGHGRR

SEQ ID NO: 199335 - protein, 34 aa, Glycine max
  Clone ID: PAT_MRT3847_22022C.1.pep
TQKNTITQTQICKLKQTLTLTLKGPFYNYICPYK

SEQ ID NO: 199336 - protein, 55 aa, Glycine max
  unsure (1)..(55): unsure at all Xaa locations
  Clone ID: PAT_MRT3847_22023C.1.pep
MNSYAKGHVSNRSRTNAHATFYGERHASGTIDGASQHXKLASTXYGTNTAALITD

SEQ ID NO: 199337 - protein, 51 aa, Glycine max
  Clone ID: PAT_MRT3847_22024C.1.pep
NYFTQQLHKHSIQIFITHCYTHKEHVRNIYFTLKCDKTMHACKTLDRVFVM

SEQ ID NO: 199338 - protein, 89 aa, Glycine max
  Clone ID: PAT_MRT3847_22025C.1.pep
LASEFFSARQSFLHFPSGPPLFRIRIQRAPVQWGPGFLLLVQARNQTYNWLDDWLANSEKLWWVDFYATWGGPGQLMVPILKEVSTRFK

SEQ ID NO: 199339 - protein, 55 aa, Glycine max
  Clone ID: PAT_MRT3847_22026C.1.pep
DSTPVNNIMVRSSKSSLVRALVILMNSLDIRLSLCKPVPIQQEILQSHRALLEEL

SEQ ID NO: 199340 - protein, 91 aa, Glycine max
  unsure (1)..(91): unsure at all Xaa locations
  Clone ID: PAT_MRT3847_22027C.1.pep
EXSFFCLSPSXSVXNXXXTXLYCXWHXMRLTXQXLXXKLPNSILHLXXINLTTXFIXLXXKXXXLTXKPLLFQHXXSHYLXXXXXXXXSRX

SEQ ID NO: 199341 - protein, 220 aa, Glycine max
  Clone ID: PAT_MRT3847_22028C.1.pep
LTARRRIQCSNVSCKQRIYPRLDPVVIMLVIDRENDRALLSKQSRFVPRMWSCLAGFIEPGESLEEAVRRETWEETGIEVGEVVYHSSQPWPVGPNSMPCQLMVGFFAYAKSLEINVDKEELEDAQWHSREYVRKALTFAEYKKAQQTAVAKVEQMCKGVEKAHSLSTDFNVESGELAPMFVPGPFAIAHHLISSWAFPDQNVNGSECHSKQASGSMSNL

SEQ ID NO: 199342 - protein, 698 aa, Glycine max
  Clone ID: PAT_MRT3847_22029C.1.pep
MASTLKSGGIHTGAINDDLYKELWHACAGPLVTLPREGERVYYFPQGHMEQLEASMYEGLEQQMPSFNLPSKILCKVVNVHLRAEPETDEVYAQITLLPEADQSEVTSPDDPLPESPRVKIHSFCKTLTASDTSTHGGFSVLRRHADDCLPPLDMSQQPPWQELVATDLHGNEWHFRHIFRGQPKRHLLTTGWSVFVSSKKLAAGDAFIFLRGENGELRVGVRRVMRQQSNVPSSVISSHSMHLGVLATASHAIATGTLFSVFYKPRTSRSEFIVSVNKYLEVQSHKLSVGMRFKMRFEGDEIPERRFSGTIVGVGDNKSSSVWPDSEWRSLKVQWDEPSSILRPDRVSSWELEPLVSTTLANSQPTQRNKRARPLILPSTMPDSSLQGGFAGLVVQNFFVILLPILFFYIIIFLCAPGIWKSSVESTSFSYCDPQQGRGLYPSPKFNSSATNFIGFSGNSSVGSPSNKSIYWSNRMENNLESISAIALKEAGEKRQGTGNGCRLFGIQLLENSNAEGNLQTVTLSGRVGDDRSVPSLDAESDQHSEPSNANRSDIPSVSCDAEKSCLQSPQESQSKQVHMQGMAVGRAVDLTRFDGYEDLLRKLEDMFNIKTELCGSLKKWQVVYTDNEDDMMMVGDDPWDEFCSVVRKIFIYTAEEVKKLSPKIRLPMNEKVNPSKQDSEAIVNPEDQSSNMGPSC

SEQ ID NO: 199343 - protein, 129 aa, Glycine max
  unsure (1)..(129): unsure at all Xaa locations
  Clone ID: PAT_MRT3847_2202C.1.pep
LSVTCQCYVMVEVGVLSLSLDAQLDSSFFRHTSTKVHSIVREMARIVSNKDTRMLVNLIRLRFHDCXVQGCDASFILNNTCTIXSDQQALPNNNSLXGMDVLSDIKTAVEQACSRDDSCADINLLTSEI

SEQ ID NO: 199344 - protein, 102 aa, Glycine max
  Clone ID: PAT_MRT3847_22030C.1.pep
MLCFLGAINDDLYKELWHACAGPLVTLPREGERVYYFPQGHMEQLEASMYEGLEQQMPSFNLPSKILCKVVNVHLRAEPETDEVYAQITLLPEADHSEVTQP

SEQ ID NO: 199345 - protein, 124 aa, Glycine max
  unsure (1)..(124): unsure at all Xaa locations
  Clone ID: PAT_MRT3847_22031C.1.pep
RIKQSPGVKNEGNGTNSDVFASCSFSSLGLESNLCEQLRERLGFEVPTLVQAQAIPVILSGRHALVNAATGTGKTVAYLAPIIHHLXGYENRIQRSDGTFGVFCFRFERYLVALCNYFFTKWHG

SEQ ID NO: 199346 - protein, 359 aa, Glycine max
  Clone ID: PAT_MRT3847_22032C.1.pep
MAITATISVPFTSPSRRTLASVNSLSPRSTRSTLPTPQRTFKYPNSRLVVSSMSTETAVKTSSASFLNRKESGFLHFAKYHGLGNDFVLIDNRDSSEPKISAEKAVQLCDRNFGVGADGVIFVLPGISGTDYTMRIFNSDGSEPEMCGNGVRCFAKFVSQLENLHGRHSFTIHTGAGLIIPEVLEDGNVRVDMGEPILKASDVPTKLHANKDNAVVKSELVVDGVIWHVTCVSMGNPHCVTFSREGSQNLLVDELKLAEIGPKFEHHEVFPARTNTEFVQVLSNSHLKMCVWERGAGATLACGTGACATVVAAVLEGRAGRNCTVDLPGGPLQIEWREEDNHVYMTGSADVVYYGSLPL

SEQ ID NO: 199347 - protein, 662 aa, Glycine max
  unsure (1)..(662): unsure at all Xaa locations
  Clone ID: PAT_MRT3847_22033C.1.pep
MASAAPGATNDALYKELWHACAGPLVTLPREGERVYYFPQGHMEQASMNQGLEQQMPSFNLPSKILCKVVNVHLRAEPETDEVYAQITLLPEADQSEVTSPDDPLPESPRCTVHSFCKTLTASDTSTHGGFSVLRRHALRTPPLDMTQXPPWQELVATDLYGNEWHFRHIFRGQXPRRHLLTTXWSVFVSYKKLVAVDAFIFLRGENGELRVGGRRLMRQHSNMPSSVISTHNMHLGALTTASPAKETGTVLSRFYKPRXAGLSLLVVASPVVEDACGNILAXSSGMRFKRRFEGGSRFRGTIAGVGXEVGMINRAFEWRSLKVEWDEPSSILRPVSISARDLEPPVTTPHKDSQPSQCNXKSGPLILPSTMPDSSLQGVWKSPVESAPFSYCDHQHGRDVYPSTNFNSTATGFLGFGGNCYASNKSIYWSSRMENSTESFSPVALKEFGEKRQGTGNGCRLFGIQLHDNSNANEENLPMVTLSGRVGDDGSVPSLDAESDQHSEPSNANRSDIPSVSCDAEKSCLQSPQESQSRQIRSCTKVHMQGMAVGRAVDLTRFDGYEDLLRKLEEMFDITGELCGSTKKWQVVYTDNEDDMMMVGDDPWLEFCSIVRKIFIYTAEEVRKLSPKIGLPISEEVKPSKMDSEAVANPEDQSSIVGPGC

SEQ ID NO: 199348 - protein, 93 aa, Glycine max
  unsure (1)..(93): unsure at all Xaa locations
  Clone ID: PAT_MRT3847_22034C.1.pep
DAKRKDGNLSTYKGEDLLVCNVAXKSAFTNCICNHLSEVCSKYKDIGPWILVFICLQNMKQRPLSFSQEHEFDCTENKAENPNFGKVCVIGSY

SEQ ID NO: 199349 - protein, 667 aa, Glycine max
  unsure (1)..(667): unsure at all Xaa locations
  Clone ID: PAT_MRT3847_22035C.1.pep
MASAAPGATNDALYKELWHACAGPLVTLPREGERVYYFPQGHMEQLEASMNQGLEQQMPSFNLPSKILCKVVNVHLRAEPETDEVYAQITLLPEADQSEVTSPDDPLPESPRCTVHSFCKTLTASDTSTHGGLSVLRRHAXIDCLPPLDMTQQPPWQELVATDLHGNEWHFRHIFRGQPKRHLLTTGWSVFVSSKKLVAGDAFIFLRGENGELRVGVRRLMRQQSNVPSSVISSHSMHLGVLATASHAIATGTLFSVFYKPRTSRSEFIVSVNKYLEARSHKLSVGMRFKMRFEGDEIPERRFSGTIVGVGDNKSSSVWADSEWRSLKVQWDEPSSILRPDRVSSWELEPLVSTPPTNPQPSQRNKRSRPPILPSTMPDSSLQGVWKSPVESAPFSYCDHQHGRDVYPSTNFNSTATGFLGFGGNCYASNKSIYWSSRMENSTESFSPVALKEFGEKRQGTANGCRLFRIQLHDNSNSNEESLPMVTLSGRMGDDGPLPSLDAESDQHSEPSNVNRSDIPSVSCDAEKSCLRSPQESQSRQIRSCTKVHMQGMAVGRAVDLTRFDGYEDLLRKLEEMFDITGELCGSTKKWQVVYTDNEDDMMMVGDDPWLEFCSIVRKIFIYTAEEVRKLSPKIGLPISEEVKPSKMDSEAVANPEDQSSIVGPGC

SEQ ID NO: 199350 - protein, 54 aa, Glycine max
  Clone ID: PAT_MRT3847_22036C.1.pep
SRSLPFTNPPNIANSSRNRHGPHFNIYFLYVTSNPQTYDIPPSYLMYYFTTLSQ

SEQ ID NO: 199351 - protein, 50 aa, Glycine max
  Clone ID: PAT_MRT3847_22037C.1.pep
VLELVNPRLGNIFEGIPISMSSRPLPCRTVNGFRNIRVDYSNETGFLAVV

SEQ ID NO: 199352 - protein, 185 aa, Glycine max
  unsure (1)..(185): unsure at all Xaa locations
  Clone ID: PAT_MRT3847_22038C.1.pep
LWLSQCHRDSTGFCTNSLSDAGFPGAAALGDIACGMTSARITSKDIVFWFRSHTAAEIRCDGAKHEPGERDDGRRMHPRSXSFKAFLEVVKNRSLLWKVYETNAIHSLHLIPRDAFKETESMKIATYALNSRLGCLNIEETQGLEAVTNEMVRLIETATVPVLAVDVKGMYHVNGARSKIKIYWY

SEQ ID NO: 199353 - protein, 63 aa, Glycine max
  Clone ID: PAT_MRT3847_22039C.1.pep
IVPLHNSTRALHIQMHKIKVIRKKDTLVFTSFILGIFILEFPSFSFASKFEISNQIPQNLNKF

SEQ ID NO: 199354 - protein, 73 aa, Glycine max
  Clone ID: PAT_MRT3847_2203C.1.pep
AHGNYCGLGLSLGSPGCPFYVPACFWWLWEGFHFPRARLWPLIAPAANGLSIGNAPRLRSVRVAGKTKNRLVR

SEQ ID NO: 199355 - protein, 110 aa, Glycine max
  unsure (1)..(110): unsure at all Xaa locations
  Clone ID: PAT_MRT3847_22040C.1.pep
MIMGRGSQMPEDPVVESMLVFNDDDVMEPNLHKYVTVNRGGSLGGADMDDQESSGSNSFTVSSGHSIGVXSSSSWEPSSVESKDCWTSRSNYSKEECQRSPLGLEGTVAS

SEQ ID NO: 199356 - protein, 141 aa, Glycine max
  Clone ID: PAT_MRT3847_22041C.1.pep
VEAAAASSSLSLLSLASVKTRSKVAQNCHVTQQRQRCNHVCVKNARRTRVTAVPVNVDDVTTVLDPAPVEVTWQIVVGAIAGVTPFVVAGIEFSKRIIAQKRCEVCGGSGLVLREKEKDYLRCPECGGFLPWQSWKRFFSG

SEQ ID NO: 199357 - protein, 112 aa, Glycine max
  unsure (1)..(112): unsure at all Xaa locations
  Clone ID: PAT_MRT3847_22042C.1.pep
PLKLFLDLPNHYAQTYIAFTPYXQLYLTGTSVERDSITLLLLYFFYRIKFXLYLKVCILPTLFFVHCSCHTKLYHIFSTTGYKILICTYILYYPYLKLNINLCINFSFTHLK

SEQ ID NO: 199358 - protein, 85 aa, Glycine max
  Clone ID: PAT_MRT3847_22043C.1.pep
FAYLFVVDSNLLCPLSRCCYIRHAVLEPIRPTPPSNVPILRQVPLFFFAQFCTFCLPRPSLFVFLLLLACPPPPPPPSRRYCTHV

SEQ ID NO: 199359 - protein, 61 aa, Glycine max
  Clone ID: PAT_MRT3847_22044C.1.pep
CCHGYPPACFMDSSHPSSSKKEVLATTLEAETYDYPNGYPHHPSHDDEQAKSGGPRMRCIL

SEQ ID NO: 199360 - protein, 330 aa, Glycine max
  unsure (1)..(330): unsure at all Xaa locations
  Clone ID: PAT_MRT3847_22045C.1.pep
MKRPFSSSGYHFCLMNMFLLLLAVRSQLTTDFYKSSCPNVSKIVRREVQKALMNEIRMAASLLRLHFHDCFVNGCDGSILLDGGDDGEKSAAPNLNSARGYEVVDTIKSSVESACSGVVSCADILAIAARDSVFLSGGPFWKVPLGRRDGTVSNGTLATEVLPAPFDPLNTIISKFTNMGLNLTDVVSLSGAHTIGRARCTLFSNRLFNFSGTGAPDSTLETGMLSDLQSLCPXNGDGNVTTVLDRNSSDLFDSHYFKNLLSGMGLLSSDQILFSSDEANSTTKPLVQSYSNDSGLFFGDFANSMIKMGNINIKTGTNGEIRKNCRVINS

SEQ ID NO: 199361 - protein, 60 aa, Glycine max
  Clone ID: PAT_MRT3847_22046C.1.pep
VTPKYVKCWCIYHNMAGYIIELLLHMKHILSLSLYACRIYVVSYILLLYHLVTFCVFRHC

SEQ ID NO: 199362 - protein, 117 aa, Glycine max
  Clone ID: PAT_MRT3847_22047C.1.pep
NFWIRSVHCRSTTKVMGQFFAAQYVSDRDKEVENWVEEVLCEGFSKVQKRGTPPASFIVKLFTCPEQNVGGHLPPRKILDWLQPTKVVFFVRREKLAGAKNETNLALHPNILLGLFV

SEQ ID NO: 199363 - protein, 88 aa, Glycine max
  Clone ID: PAT_MRT3847_22048C.1.pep
FRTRCQFIYLFIYFCILRRHHCRILSFSWSIVGVPFNLSSFFMRLIQNFDVISRFSQIYTHFSDGEAMQAIPSFLWCEHYFPVKGSRK

SEQ ID NO: 199364 - protein, 38 aa, Glycine max
  Clone ID: PAT_MRT3847_22049C.1.pep
ITKISKWIMLPTIQTNILSARIAIFIKSTPKGSYLSST

SEQ ID NO: 199365 - protein, 495 aa, Glycine max
  Clone ID: PAT_MRT3847_2204C.1.pep
TPPPTPTATEHNQGSEVVQATIVDQQNAREEPAKQSSTTSVFVNSQLMREEQIQNAVKFLSHPKVRGSPVMYRRSFLEKKGLTKEEIDEAFQRVPDSAPTVQTGGVNQDGQLKSSSNIQQQAQQQTLQPGLPASTGVNTSSGTLSRSRFHWSHALIAVGLLAASGAGTAIIIKNSVLPRLKSWIRKVVLDNDDEQLKKTDNKPTLMEEAAQAAKSAAAAAADVAKASQEMLASKGEERRYFVEVVSLLDKQVQEMKSMTNAIRRLEGQEDLQISQTSSKQLIVNGKADYDMSSVRSSSPPTSVEPSSGLHPKAYAEIMAMVQRGEKSSNIKHREVSQVQSTSTQMLQSQVNGEDLNTKALDAPLLNGDDPLPWWQRKNVRIREIDNENESNGVPNGAASSQQPIQQPVQRVWVPPQPPPIAMPEAAEAIRRPKPAAQKEQMSDNQSVAHSLDGSDDVHMDPKLLESEGAVEGSSVSSVPTSSEIQEEHEVKYDEK

SEQ ID NO: 199366 - protein, 111 aa, Glycine max
  Clone ID: PAT_MRT3847_22050C.1.pep
MSFTFTTMTLNLVLLMAMVATNILSLYHLSSTLQSPKSPKPPPPVPDQLLHQLHTIRATINHLTLLQNTNNPTKKSTIPSDLLLYSHLSPIASSCHNHPELLHMYMTYTPF

SEQ ID NO: 199367 - protein, 162 aa, Glycine max
  unsure (1)..(162): unsure at all Xaa locations
  Clone ID: PAT_MRT3847_22051C.1.pep
FSSSEKVETEKNGNLKRHESSTIDLRREYGKANKEREAFAKSENHRKRRDASSCSSYYSLSSGDFGSELEVQDEIGLEESSLEYEKDEANHLEEQVKEEFNRQGDDSKKLQAVSNKRRIAFGVDIDWNLRNKSEKKLTEGTLRNTESTREQQDMHSREXKNT

SEQ ID NO: 199368 - protein, 78 aa, Glycine max
  Clone ID: PAT_MRT3847_22052C.1.pep
ETFEKILLIIIFIHQGQIHLLLRNLLVLQFVTISLNQRVNFYILCLNFKKGDASLKNKSLICLNSQEIQTQKVRDPKV

SEQ ID NO: 199369 - protein, 40 aa, Glycine max
  Clone ID: PAT_MRT3847_22053C.1.pep
ASAHATKNSCTRIYPTTNKPKIPGCTTTANNPPLTVNNAP

SEQ ID NO: 199370 - protein, 82 aa, Glycine max
  unsure (1)..(82): unsure at all Xaa locations
  Clone ID: PAT_MRT3847_22054C.1.pep
QSSFFASPTLHPRYYYQSPPPPETLSLFYRYGSPPPPSLSPPPPYQDESXPPPSACPAPNDIYKSPPPPVYXYASPPPPIYK

SEQ ID NO: 199371 - protein, 195 aa, Glycine max
  Clone ID: PAT_MRT3847_22055C.1.pep
MANFSSHYGMLVSLLLTLIQIQAKVFCYQYKVGDLDAWGIPSSANPQVYTKWSKYHNLTIGDSLLFLYPPSQDSVIQVTEESYKRCNIKDPILYMNNGNSLFNITSKGQFFFTSGEPGHCQKNQKLHISVGEGIIETMDTAPGPSSSLPASAPSYPTVFGNIPVAPSTSTSPQLTSTFQLLIIGFMICAHFASLM

SEQ ID NO: 199372 - protein, 69 aa, Glycine max
  Clone ID: PAT_MRT3847_22056C.1.pep
GRPTRTHACEQMREGTLGSAYIHSYGELWGANDDTAHVYTYLLEKVVDNSITVRHHEVAQYQRANGLLC

SEQ ID NO: 199373 - protein, 42 aa, Glycine max
  Clone ID: PAT_MRT3847_22057C.1.pep
SMSLIFMFKDIYTQNQSEITHKTDVPELLLVSFSNHNFTLIN

SEQ ID NO: 199374 - protein, 46 aa, Glycine max
  Clone ID: PAT_MRT3847_22058C.1.pep
LLLQRLHRRDRLTPSSSNYLFIIRMSDSVIELGHGVREEYHVTDAT

SEQ ID NO: 199375 - protein, 854 aa, Glycine max
  unsure (1)..(854): unsure at all Xaa locations
  Clone ID: PAT_MRT3847_22059C.1.pep
AEDVISEHLLTFKDINGLVEQNVQLRSLVRSISGHIENQEVEFKEKLEMELKKHTEESASKVAAVLQRAEEQGHMIEALHASVAMYKRLYEEEHNLHLSHTHSSEALAAVAAVGRNNIKTSIESSQEAAKKSLEKAAERVRCLEDDLAKSRSEIIVLRSERDKSALEANFAREKLNDIMKEFEHQKTEAKGILERNIEFSQLVVDYQRKLRESTESLIAAEELSRKLSMELSVLKQEKEVISNAEKRASDEVHSLSARVQRLQASLSTIQSTEEVREEARAAERVKQEEYIKKLEREWAEAKQELNEERENVRRFTSDRDQTLKNSLRQVEDMSKELANALRAVASAESRAAVAEAKLSGLQRKMGSTDDKLVEIGGVSGSSTLSSDEVVAELQKAKDEIEKWKEEAHANKAHMLQYKSIAEVNEDALKKIEKAHEKFKTEADNGKKVLESELNSLREKMLEIENESSLKYEEVASETVGKEEALTSAMAEITNLKEEILTKSSQISAMEIQISGLKENLDREHQKWRATQTNYERQVVLQSETIQELTKTSEALALLQEEASELRKLANTQKIENNELKTKWEDEKAQLEKSRNDAEKKYNEINEQNKILHSQLEAFHIQWAEKERNAAGISSGSSSADAFGDAGPARVINYLRRSKEIAETEVSLLKQEKLRLQSQHESALKAAESAHASLETERAKSRSFLFTEEEFKALQLQVREMNLLRESNMQLREENKHNFEECQKLRELAQKVRAETENLENLLKEREIKLDGHTKEIETLKMEKDHLNKKVTELLERSKNVDVEDYDRVKKLAKEIQDXLRERDARIEEIGKSLSEKQDSGFILEKDLSTADWSL

SEQ ID NO: 199376 - protein, 62 aa, Glycine max
  Clone ID: PAT_MRT3847_2205C.1.pep
IEFILYMKYQTFFFFFFIKFVDIIYSIKTSNIMIGSLKFNINRIIKLTNFTKLLLKSLVSIF

SEQ ID NO: 199377 - protein, 485 aa, Glycine max
  Clone ID: PAT_MRT3847_22060C.1.pep
MPSTTLQWLSLVGIIWLQAIIGTNTNFPTYSSQLKQLLSISQVQLNNLAFASDAGKLFGWFSGLASIYLPLWLVLLIGSTLGLVGYGVQYLYITNQISSLSYWHVFLLTFLAGNSICWINTVCYVVTIRNFFSDREVAVGMTTSYQGLSAKIYANIVDAVSPHKKASAFIFLNSLLPVIVGLIAAPLVREIDEEVTSPKHTRVGFGVMFVITISTGIYAVLSSLQFVTSKVSSLGTLVGILVTLLLPLLVPLSVKIKELQENTEKVRIYHFTMEENTTSEERVENEVKEGEVQEEVVGLVYLNNLGQIAESRGCSNISSLVSLSSSFGFFGRLMPSLMYYFYRGKCRISRPASMLAAMVPMSGAFFLLLNKTDIVLYTSTAVIGVCTGAITSIAVSTTTELFGTNHFSVNHNVVVANIPIGSLIFGYSAALIYRKEGHEHDEHVKCMGMECYRNTFIMWGSFCFLGTLLALILHARTRKFFSQKQ

SEQ ID NO: 199378 - protein, 352 aa, Glycine max
  Clone ID: PAT_MRT3847_22061C.1.pep
LEPNRLERLESIFTSIAQVLVAAYRKRKVELPREKHVDGVFYDPPLIGTNVLSKLPLTNQFRGLNKAAVIMEGELNPDRSRANKWKLVSIQQVEEVKCLARIFPIWAAGILGFTSMAQQGTFTVSQALKMDRHLGPKFQIPAGSLGVISFITIGGWVPFYDRIMVPTLRRVTKHEGGITLLQRIGIGMVFSILSMVVAALVEKVRRDLANANPSPLGIAPMSVLWLVPQLVLMGLCEAFNVIGQIEFFNRQFPDHMRSIANALFSCSFAGASYVSSALVTTVHHVTRTHSHPDWLTNDINAGRLDYFYYLVAGTGVLNLVYFLIVAQRYHYKGSGDLQDNAQDVELASKGKS

SEQ ID NO: 199379 - protein, 514 aa, Glycine max
  Clone ID: PAT_MRT3847_22062C.1.pep
MPSTTLQWLSLVGIIWLQAIIGTNTNFPTYSSQLKQLLSISQVQLNNLAFASDAGKLFGWFSGLASIYLPLWLVLLIGSTLGLVGYGVQYLYITNQISSLSYWHVFLLTFLAGNSICWINTVCYVVTIRNFFSDREVAVGMTTSYQGLSAKIYANIVDAVSPHKKASAFIFLNSLLPVIVGLIAAPLVREIDEEVTSPKHTRVGFGVMFVITISTGIYAVLSSLQFVTSKVSSLGTLVGILVTLLLPLLVPLSVKIKELQENTEKVRIYHFTMEENTTSEERVENEVKEGEVQEEVGIIEEVGVKLMLRRINFWLYFFVYFFGATVGLVYLNNLGQIAESRGCSNISSLVSLSSSFGFFGRLMPSLMYYFYRGKCRISRPASMLAAMVPMSGAFFLLLNKTDIVLYTSTAVIGVCTGAITSIAVSTTTELFGTNHFSVNHNVVVANIPIGSLIFGYSAALIYRKEGHEHDEHVKCMGMECYRNTFIMWGSFCFLGTLLALILHARTRKFFSQKQ

SEQ ID NO: 199380 - protein, 39 aa, Glycine max
  Clone ID: PAT_MRT3847_22063C.1.pep
PVYPFKTQVQFLNVKYSQNTAIKRTMSFGRSEFGQMVKF

SEQ ID NO: 199381 - protein, 130 aa, Glycine max
  Clone ID: PAT_MRT3847_22064C.1.pep
PIPPFSIFLGLRAVKPYIGTPKGGPPFKLFGGNPGTWPKKKGKKPKGRGLWGLPILPFPLGVPPPPPGFICRFRGGSLFPLSGPIFGKGIGWGLFSFSPPGEKGIFFQAIYFGYPRVFPVPAFFNPGPLI

SEQ ID NO: 199382 - protein, 67 aa, Glycine max
  Clone ID: PAT_MRT3847_22065C.1.pep
VGSRYGTWGRQDKRDHTLHCLSFGLFGKLMSFWRLRLLVLACLYLERDVELFHPTLIAATTADSADQ

SEQ ID NO: 199383 - protein, 56 aa, Glycine max
  Clone ID: PAT_MRT3847_22066C.1.pep
ERNQLSYIIYGGTYDLGRLPKIDSLTLKKDMCGVFLFKTKPSFPKCHGKYLSRSLT

SEQ ID NO: 199384 - protein, 98 aa, Glycine max
  Clone ID: PAT_MRT3847_22067C.1.pep
KRFLTLRNPPRSPSPYVLTQSHIDTDLLRPAKKHPRTRSIAKVLIRPVLLLRTYSGSRPKVSSRLTNFCVLLPSFPGKTRRTVEAIPNLGANTPHYII

SEQ ID NO: 199385 - protein, 110 aa, Glycine max
  Clone ID: PAT_MRT3847_22068C.1.pep
KNGKPRLVPRAYIAYEIILMVMKQEIPLKTRFLEFYTKASLLKPIYSSMLHWLQDKLTPLMPYGGWLYGWGSLYQHHDHSSWIFIYMKRDIKVLRILPAWKAGLLMSQGS

SEQ ID NO: 199386 - protein, 47 aa, Glycine max
  Clone ID: PAT_MRT3847_22069C.1.pep
ISLAIGLNHRKYRLNWPGYKISTKTNNFKVYAISLPLKLEGLGGLFF

SEQ ID NO: 199387 - protein, 54 aa, Glycine max
  Clone ID: PAT_MRT3847_2206C.1.pep
FRYINVLKVVVVEEATEQSVDDQNEDHRERNLQSTICFICLKSLFFPFGGLLEP

SEQ ID NO: 199388 - protein, 102 aa, Glycine max
  Clone ID: PAT_MRT3847_22070C.1.pep
KPPGKKKKKNRPQKGLQLWAHHPRKKKTSVCGFGETTGFGIHIFFKKNSPGGSPRNMGPEPGGAPFFPIGRPIKGWRKMGQNCFLGENVFPLKFAKKIQPET

SEQ ID NO: 199389 - protein, 59 aa, Glycine max
  Clone ID: PAT_MRT3847_22071C.1.pep
FSCKCLSRNSSKFQTRSNATMPASDSPNTYLIHIQSHFHSYQTQLGIQTFNSELEDSNI

SEQ ID NO: 199390 - protein, 43 aa, Glycine max
  Clone ID: PAT_MRT3847_22072C.1.pep
DAHLYPFLLSQTHILSERYGILSKSSMDLKTTLTEEVETMALS

SEQ ID NO: 199391 - protein, 61 aa, Glycine max
  Clone ID: PAT_MRT3847_22073C.1.pep
YRAWIPGGPPGSAPGSGWLQKKIKKGRAQKNPKTGFSPPSLGFPLDWLRNRQLFFGLDWDS

SEQ ID NO: 199392 - protein, 112 aa, Glycine max
  unsure (1)..(112): unsure at all Xaa locations
  Clone ID: PAT_MRT3847_22074C.1.pep
XXXLGXTXXAXXXPXCPXVLXPPXXXXPXXXXXXXSXVXGXPNTXAXKXXHXXXXSXLXXXXXXEXXIWXRXXXXXRLQRXLFLEPXXXXTYAXVXXXFXGXXSXXVXXXXR

SEQ ID NO: 199393 - protein, 45 aa, Glycine max
  Clone ID: PAT_MRT3847_22075C.1.pep
LELDLKSYTAIVPGKLSFDVWDVRGEEVRGALRILATAKVPAKAT

SEQ ID NO: 199394 - protein, 73 aa, Glycine max
  Clone ID: PAT_MRT3847_22076C.1.pep
KKSLGASIGFQTKTPTLSSRECAKGFPRGLLKRGPPSPSFFGGEGGQLSGYVFVGKLGIQTPGGGRGTPIIKA

SEQ ID NO: 199395 - protein, 53 aa, Glycine max
  Clone ID: PAT_MRT3847_22077C.1.pep
FHQRLSQLFSFVASNTKRTVRAYYNLKINTIIFTLFRIKSFQSFHSTFSELST

SEQ ID NO: 199396 - protein, 339 aa, Glycine max
  Clone ID: PAT_MRT3847_22078C.1.pep
GSRFWADARSRTSYSHFGDAVTLDTTYRINQYGVPFAPFTGVNHHGQMILFGCALLLDDSEASFVWLFKTFLTAMNDRYPVSITTDQDRAIQTAVSQVFPQTRHCISKWHVLREGHEKVAHVCNMHPNFQIELYNCINLTETIEEFDSSWNFIINKYELTKNDWLQSLYSARAQWVPAYFRDSFFAAISPNQGFDGSFFYGFVNHQTTLPLFFRQYEQALECWFEKELESDYDTICTTPVLKTPSPMEKQAANLYTRKIFSKFQEELVETFAYTANRIEEDGENSIFRVAKFEDDQKAYVVTLNLSELRANCSCQMFEYSGILCRHVLTVFTVTNVLTL

SEQ ID NO: 199397 - protein, 271 aa, Glycine max
  unsure (1)..(271): unsure at all Xaa locations
  Clone ID: PAT_MRT3847_22079C.1.pep
PRVRAGEDRVHVVLSEXQGGCYWDYDGFSGPDAPDFLMSHLYKFIDKELEGLLWDYEDNPVDPLKPEVLENGNDVVALECDREEMSDAHSISNEESSCCLENSCPIMVKDQSSNSEIVEVNAEVKVNIEQKNCGSPSIVHTVPASVPIGQLSGQGRRSVRLYELLQMESWNEQVSEQGKDSVVPAEIAQERQMRFCSPDGKEDRSRHPDEGPTTSGENGGAGFNSTYQEPIASFSVLGQRQNSRKPFIGTKITKMFRKQKFLRKKLFPWSY

SEQ ID NO: 199398 - protein, 198 aa, Glycine max
  unsure (1)..(198): unsure at all Xaa locations
  Clone ID: PAT_MRT3847_2207C.1.pep
PLCSICQHKAPVFGKPPRWFSYAELELATGXYGCEKTTEGGGFGSVHRGLLPDGQVIAVKQHKLASSQGDLEFCSEVEVLSCAQHRNVVMLIGFCIEDKRRLLVYEYICNGSLDSHLYGRQPEPLEWSARQKIAVGAARGLRYLHEECRVGCIIHRDMRPNNILITHDFEPLXGGFGLATWQPDGDTRVEAKSIGPWG

SEQ ID NO: 199399 - protein, 132 aa, Glycine max
  Clone ID: PAT_MRT3847_22080C.1.pep
LGIKLCTLLKQKCAWRPRRRGTAQIGRRARQDGSPKVGNQTRHRTGEGKASQRRRPNGAEREAGKGRQKPKTGEWELGRPEGPGWTRSPPRNASSAKGDQLGNGGRRAEGGWTRRTDQSSCRKGTAQRTPQQ

SEQ ID NO: 199400 - protein, 52 aa, Glycine max
  unsure (1)..(52): unsure at all Xaa locations
  Clone ID: PAT_MRT3847_22081C.1.pep
YLKRPRKKITNNIIXIAIRKYYLNTIRSNSIWTQYLKTFALSFNYHSTTMTN

SEQ ID NO: 199401 - protein, 72 aa, Glycine max
  Clone ID: PAT_MRT3847_22082C.1.pep
LASLTESVTINITISPRQIQMNESPRNFIQTHYHCFPVSQQTMISKALTEENIRKFNSKINKASFSKYNNTT

SEQ ID NO: 199402 - protein, 114 aa, Glycine max
  Clone ID: PAT_MRT3847_22083C.1.pep
CKRRRTGSKKWREDSRKSRSRQPIDAITERKRNKERGAKQRTDAQTPKITNSLPIGPLNEFKPKFEELINQNSLVRPIKTRLQIDQVMNQNNKRHPEILLVTENLQRNLCVKEL

SEQ ID NO: 199403 - protein, 133 aa, Glycine max
  Clone ID: PAT_MRT3847_22084C.1.pep
QSRFSTGCSNQRCPSNYLNVIIIYQGVEGKEKHVLCTCNEGILFEIQSQVSCVRQCVEHMKGKHSRKKCNRLVIFFENDLMLTVNKERKKESIMMDAERDKKGPPSARLESKRRRQMNLQRFMSNPVGGTGAG

SEQ ID NO: 199404 - protein, 61 aa, Glycine max
  unsure (1)..(61): unsure at all Xaa locations
  Clone ID: PAT_MRT3847_22085C.1.pep
PKTILRKTSIKSXGNFGDRTIIPDEGIPYLSIRVSPQSTMIYRHRSTEPSNDTTPNKLYVN

SEQ ID NO: 199405 - protein, 35 aa, Glycine max
  unsure (1)..(35): unsure at all Xaa locations
  Clone ID: PAT_MRT3847_22086C.1.pep
YIDECQENMACQCPXCCFNNTFSFYDCTSNLHLHL

SEQ ID NO: 199406 - protein, 50 aa, Glycine max
  Clone ID: PAT_MRT3847_22088C.1.pep
DFRTYELCKTCIRFSENYYSAMLLKMDYINSSLEALEDEFIDDFLSDEYE

SEQ ID NO: 199407 - protein, 105 aa, Glycine max
  Clone ID: PAT_MRT3847_22089C.1.pep
LTRGVLKTNHRVAPKAKEAKGQKQKAQPTRSARNILIHQQLLEREGLYHSTSFNHCHTLPQRRKPREEDPSLLGEIKAPRTDIGTRNRQKAAPEQPPTGPGYHTN

SEQ ID NO: 199408 - protein, 72 aa, Glycine max
  Clone ID: PAT_MRT3847_2208C.1.pep
SARSYARKHYHMLLTTAHEYLGGVPYEARYLNDELNSHDNAYNRHHRDIGVRDLESIHLLWILLDVHELYAL

SEQ ID NO: 199409 - protein, 76 aa, Glycine max
  unsure (1)..(76): unsure at all Xaa locations
  Clone ID: PAT_MRT3847_22090C.1.pep
IVGIIYRSWLDFLVGCFSRLRYINLNTRKNIVIWVSEFLWLRMRSQYVLKFSXXXXFGCLYFXKKLIKKKKRPLSG

SEQ ID NO: 199410 - protein, 74 aa, Glycine max
  Clone ID: PAT_MRT3847_22091C.1.pep
MGGGRPMVTREWPNLKKGMGINPLSLNSKKTLAQGGDMGLAKAGEILTCAEFGDGCRFLKLPLAIEIARGYPFV

SEQ ID NO: 199411 - protein, 133 aa, Glycine max
  unsure (1)..(133): unsure at all Xaa locations
  Clone ID: PAT_MRT3847_22092C.1.pep
SQLYYVSCNNLEMQDAYLVNLVNVLLELFLHSSVEARQLRRKALFLIEWLXKADVPTIAHIEEFHSMQRMINAPDSNDNIDLLXLSIDLLGLHGAWXAFPNKIVLDDXFVLGNTHEFFDGNFPVVFLVPIFVN

SEQ ID NO: 199412 - protein, 107 aa, Glycine max
  Clone ID: PAT_MRT3847_22093C.1.pep
IRLEMDVWSWICELSNIGGVDRGRLATHEGLTRETRRRMNYNFESSSTVEELEADTLRAHDSGELPVILYLYAPQGISRIQRPQALVGLRKVPPGIREAHPACSTAA

SEQ ID NO: 199413 - protein, 229 aa, Glycine max
  Clone ID: PAT_MRT3847_22094C.1.pep
MEEEQTHIMKDSDDMESQEEEEEEREEALSLCDLPLNRNSRTPSLDDMSFKKILRPSSLPDHAGEIFNGFSSSSSSDMCPADDIIFCGKLVPFKAEQPLKNLIAAEEEKSPARRRRSESLSSVTRSNSVSTFTGSRHLMMRNSKSLDYSRLRESAAPEVDRNSSSRSVVPPEAAVKKATKPRWYSLMFGTMKIPPEMELSDMKNRQVRRNPSSTMFLTADSGGKMAVNR

SEQ ID NO: 199414 - protein, 118 aa, Glycine max
  Clone ID: PAT_MRT3847_22095C.1.pep
RADNRHPNNEGAGLFFNQSKPKSEQPTPPEIPGFFFGWTVDGFPLGHGSVVGQPMGRAPGNSSICACLGQTDHFCRSDFEVGFFGRGAPWVLFGSNVEGLDIVLGTFANHCLPYFGRI

SEQ ID NO: 199415 - protein, 221 aa, Glycine max
  Clone ID: PAT_MRT3847_22096C.1.pep
RFCLIIYLRSLGRVSFGHTVYISGLTCTMSKQKCLEVLWFENDIGASFINLSCLPALINSSCLHILSRLTDIFYQTSYAQVCRVWLDPSEYFYVNTIFSHSLCGHFVNKISDRWVECSFCRTISDAGVVRTFHLKITLADKDTGTKVLAWCTGQTAMDLLQISPEEFNELPEDEQVMYPSSLENERFMVALVNCKRNGCVIDGLSPDDSISWEITRAYKCE

SEQ ID NO: 199416 - protein, 263 aa, Glycine max
  Clone ID: PAT_MRT3847_22097C.1.pep
MDEDQIEGCVSGYLKQKGFTQNDDQLQLTNTDSSLQPDTLNRAQLERGSARYHDGYGRLRSWAYRSLDSYKHELLRVLFPLFIHCFMDLVAKGNLQEAWNFFNTFREDHEMMHSRDLQKLELVLSPTHFKEMEFAHSLRQSKFNIKICGYSYELLMQHLHSMQSTTIIGIINEHISFQVTAGQPSSTSDDPEAVSLIGNIKDEANQINQKEILWGMFKDSAEDCVDKTGSLLSDTEKGEGEGKEGENDEIKKRSIDGGKQGSS

SEQ ID NO: 199417 - protein, 38 aa, Glycine max
  Clone ID: PAT_MRT3847_22098C.1.pep
LKHSTCVNPILNQKWGNNKNMGNFQKWGGNKRGGNKPS

SEQ ID NO: 199418 - protein, 94 aa, Glycine max
  Clone ID: PAT_MRT3847_22099C.1.pep
VVRTFNLKITHADKDTGTKVLAWCTGQTAMDLLQISPEEFYELPEDEQVMYPSSLENERFMVALVNCKRDGCVIDGLSPDDSISWEITRACKCE

SEQ ID NO: 199419 - protein, 47 aa, Glycine max
  Clone ID: PAT_MRT3847_2209C.1.pep
NLPPPKGLNGLTFFHPKFLVHTIWLWNLTPITKNQKVFASPWKKWKF

SEQ ID NO: 199420 - protein, 482 aa, Glycine max
  Clone ID: PAT_MRT3847_220C.1.pep
MISTSSDEVIITNDGATILNKMQVLQPAAKMLVELSKSGGGAAAGDGTTTVVVIAGGPSSSNGILLSHGIHPTVVSDALHKAAVKAVDVLTAMAVPVELSDRDSLVKSASTSLNSKVVSQYSTLLAPLAVDAVLSVVDAPKPDMVDLRDVKIVKKLGGTVDDTELVKGLVFDKKVSHAAGGPTRMENAKIAVIQFQISPPKTDIEQSIVVSDYSQMDRILKEERSYILSMIKKIKATGCNVLLIQKSILRDAVTDLSLHYLAKAKILVIKDVERDEIEFITKTLNCLPIANIEHFRTEKLGYADLVEEFSLGDGKIVKITGIKEMGKTTTVLVRGSNQLVLDEAERSLHDALCVVRCLVAKRFLIAGGGAPEIELSRQLGAWAKVLHGMEGYCVRAFAEALEVIPYTLAENAGLNPIAIVTELRNRHAQGEINAGINVRKGQITNILEENVVQPLLVSTSAITLATECVRMILKIDDIVTVR

SEQ ID NO: 199421 - protein, 121 aa, Glycine max
  unsure (1)..(121): unsure at all Xaa locations
  Clone ID: PAT_MRT3847_22100C.1.pep
DLPXXNRTXTPXXIGLMPSPXXFLFXXHXXVGGTXXVMFXPXXVXSXGXVXSAGHVHAYERSERVPNVXYXIXNXLXPPXXGXSAPXXLTIXXXXNLXSLXPPCXTXXXVSAFXEASFGPA

SEQ ID NO: 199422 - protein, 56 aa, Glycine max
  Clone ID: PAT_MRT3847_22101C.1.pep
LTERPRRGPHLAMTMTAGEHPRRRPRLYTTGLYLSIQFSAHVRAVFVPTPLLSSYR

SEQ ID NO: 199423 - protein, 112 aa, Glycine max
  Clone ID: PAT_MRT3847_22102C.1.pep
IQKAFGTAGSQYVQWAAKMAVGLNTGVPWVMCKQTDAPDPVINTCNGMRCGETFTGPNSPNKPALWTENWTSFYQVYGGLPYIRSAEDIAFHVTLFIARNGSYVNYYMVLLL

SEQ ID NO: 199424 - protein, 240 aa, Glycine max
  Clone ID: PAT_MRT3847_22103C.1.pep
LKQLPEPVTCRSHDEASTSSSMTEKETRNSQEDDDLSPRQQTGSSDVSPQSRAGKSDSLSLPLTEYQIYKNDGLADASTQTEENVNKPETQKTCTRGVSTEDDGSLEPECHEIGETQVLQLKDNSEICRDTVSPPPSTSSPSSSGGKTETLESLIRADVSKMNSFRIMEEERIRMQTNARLKASNLLMQLISCGSISVKNHSVGLIPSYKDRFSHSKFPSPVFSTSGMFGDFDCIAEKTN

SEQ ID NO: 199425 - protein, 99 aa, Glycine max
  Clone ID: PAT_MRT3847_22104C.1.pep
QIISRAHVFGFSYDSIDGTYVVKMVQFKGKKNKIKCACLNPRFIMPQANQPPLYYYVITKSIIGNPVSSKQLQPMSSPSKQFDKVINMFNKVINMFILI

SEQ ID NO: 199426 - protein, 325 aa, Glycine max
  unsure (1)..(325): unsure at all Xaa locations
  Clone ID: PAT_MRT3847_22105C.1.pep
MNNIESYPPVLRHLDHHQLPPPPNPDPDKDPTQQDSDPIPIIDFSCLNHDKSKLDEACKDWGFFRLVNHGIPMTLLKKLQEVAKELFSLSFEAKEGACSGSPVSYFWGTPALTPSGTTTRGPQNMNWVEGFDVPLSQLPHFNPHQLPTLESIRLPIKDYKNHLSRIATTFFEAMAKILNLFLKALARYLDLNLKPSKPYLAENTGMVRXVYRYPNCSDANVXDTNSHYYSLSIGHXLTNMYEFSGLQVLKDDQWLTVKPISNTLIVNLGDMMQAISDDRYKSDTHRVYKKKHKERLXICFFFSPGKDFEIERSKYKPFSYIGLRT

SEQ ID NO: 199427 - protein, 55 aa, Glycine max
  Clone ID: PAT_MRT3847_22106C.1.pep
LASWNHLVQNKIYKLFVQVLRSNFSLSFSLNCSSSFSLSSTLMFLFIAQISLFFH

SEQ ID NO: 199428 - protein, 52 aa, Glycine max
  Clone ID: PAT_MRT3847_22107C.1.pep
DFIIVLKKNCLVDLTVKSITKSVSISTRQGKKVWTENKVTIYSLNYLVIIYY

SEQ ID NO: 199429 - protein, 204 aa, Glycine max
  unsure (1)..(204): unsure at all Xaa locations
  Clone ID: PAT_MRT3847_22108C.1.pep
MAGGGFTTSGGEFEAKITPIVILSCMMAATGGLMFGYDIGVSGGVTSMPAFLKEFFPEVYRKTVEEEELDSNYCKYDNEKLQLFTSCLYLAGLMATFLASHITRRQGRRATMLISGFIFIAGVAFNAAAQNLAMLIIVXRVLLGSGVGFANQAVPVFLSEIAPSRIRGALNILFQLNITLGILFSXLVNYATNKIKGGWGLEAI

SEQ ID NO: 199430 - protein, 43 aa, Glycine max
  Clone ID: PAT_MRT3847_22109C.1.pep
NSDSLRSIYIKLNAKGLRTIIHVPHVKSLTRENGSPHVTDTDH

SEQ ID NO: 199431 - protein, 62 aa, Glycine max
  Clone ID: PAT_MRT3847_2210C.1.pep
VFVACAAVGLTSSYTPTSLLESGLQNDRGLIVEYFCEGLFTVAYNINQSQEKDFAGREYSFL

SEQ ID NO: 199432 - protein, 90 aa, Glycine max
  unsure (1)..(90): unsure at all Xaa locations
  Clone ID: PAT_MRT3847_22110C.1.pep
DRSKEKKKEEKAKENXEHXNREQQNKLKESTKAGPLGSNSFTQVSRHIYENXAVGENLKKRKDXESNGIMHANDXWPSKLPTPSPSXSHL

SEQ ID NO: 199433 - protein, 54 aa, Glycine max
  Clone ID: PAT_MRT3847_22111C.1.pep
KKKNNLRDQNFLVNRTPISVSGIAIFPPGFCCRKSVTAELPLLSYYSQPVRTQL

SEQ ID NO: 199434 - protein, 41 aa, Glycine max
  Clone ID: PAT_MRT3847_22112C.1.pep
YGCKKTTEGELATGRAKHLKDQPAAHNNGSKCKSSEKFHQS

SEQ ID NO: 199435 - protein, 35 aa, Glycine max
  Clone ID: PAT_MRT3847_22113C.1.pep
RFFLRLCYGGRIQFQLFLLTVVTPSREYRDYGRID

SEQ ID NO: 199436 - protein, 53 aa, Glycine max
  Clone ID: PAT_MRT3847_22114C.1.pep
RVLPIQSSERRHHGGALKLVLNQNSAHARCICLQMASNSSKVGFLYIWKALFK

SEQ ID NO: 199437 - protein, 196 aa, Glycine max
  Clone ID: PAT_MRT3847_22115C.1.pep
NQLTVLVSVPVIRITRIWKLNQRFYALRAVVPNVSKMDKASLLGDAILYINELKSKLNVLDSEKTELEKQLDSTKKELELATKNPPPPPPPPPPPGPPPSNSVEPKKTTSKLADLELEVKIIGWDAMVRIQCSKKNHPAARLMAALKDLDLEVHHASVSVVNDLMIQQATVNMGNKFYTQEQLLSALSSKVGDELR

SEQ ID NO: 199438 - protein, 647 aa, Glycine max
  Clone ID: PAT_MRT3847_22116C.1.pep
MTEYRMNLWTDDNSSVMEAFMSSSDLSSLWLPTPQSAASTTTPGLETTRAPPPQSHSLLNQETLQQRLQTLIEGARESWTYAIFWQSCYDYSSGTSLLGWGDGYYKGEEDKDKVKTKAPKTRSSAEQDHRKKVLRELNSLISGPSASADDIDEEVTDTEWFFLVSMTQSFVNGSGLPGQAFFNSSPVWVAGPERLSESVCERAHQGQMFGLQTLVCIPSANGVVELASAEVIFQNPDLMNKVRDLFNFNNNNNNNNPETCSWALNCVATTDQGENDPSSLWLNPEIKDSSTVSPPNSTVNKTMHFETPGSSTLTETPSAAAAVHVPNSKSQGFFPRELNFSNSLKPESGEILSFGESKKSSYNGAFFPGVVAVEENNNNNKNKKKRSPVVSRSSIDDGMLSFTSLPAANIKSVNGACVGAGDSDHSDLEASVAKQVVEPEKRPRKRGRKPANGREEPLNHVEAERQRREKLNQRFYALRAVVPNVSKMDKASLLGDAILYINELKSKLNVLDSEKTELEKQLDSTKKELELATKNPPPPPPPPPPPGPPPSNSVEPKKTTSKLADLELEVKIIGWDAMVRIQCSKKNHPAARLMAALKDLDLEVHHASVSVVNDLMIQQATVNMGNKFYTQEQLLSALSSKVGDELR

SEQ ID NO: 199439 - protein, 301 aa, Glycine max
  Clone ID: PAT_MRT3847_22117C.1.pep
MTEYRMNLWTDDNSSVMEAFMSSSDLSSLWPTRPQSATSTTTPGTAKAPPPPPPPPPPPAQSQSLLNQETLQQRLQTLIEGACESWTYAIFWQSSYDYSSGTSLLGWGDGYYKGEEDKDKVKTKAPKTRSSAEQDHRKKVLRELNSLISGPSASADDIDEEVTDTEWFFLVSMTQSFVNGSGLPGQAFFNSSPVWVAGPDRLSESVCERAHQGQMFGLQTLVCIPSANASLSSPHTEVIFQNPDLMNKVRDLFNFNNNPETGSWALNCVATTDQGENDPSSLWLNPEIRDSSTVAPPNSAV

SEQ ID NO: 199440 - protein, 68 aa, Glycine max
  unsure (1)..(68): unsure at all Xaa locations
  Clone ID: PAT_MRT3847_22118C.1.pep
DRVFSVPLRRRLSESALSVASNMCKFSRLSLACPWIQQQLERLTYIGNLRMYAYFKFPYAFCRLDXKT

SEQ ID NO: 199441 - protein, 68 aa, Glycine max
  Clone ID: PAT_MRT3847_22119C.1.pep
LGGKKVHAAAVWPPRNLRGPLCGGGPGYLKRRGDFKPFFKGGGNGCGQLIFFGPPGWGIGGGGSASPR

SEQ ID NO: 199442 - protein, 70 aa, Glycine max
  Clone ID: PAT_MRT3847_2211C.1.pep
NCIVYFVVIYFFISLLLYAFCCCRTPEYNYCCAQHSPSGCQIVLMEIEFTLLQYKKYTENRIKCKSFLKF

SEQ ID NO: 199443 - protein, 64 aa, Glycine max
  unsure (1)..(64): unsure at all Xaa locations
  Clone ID: PAT_MRT3847_22120C.1.pep
XHCNCVNQYFDCQKIPYSPTLYNLMCLNEIIKIINPNRNNSLQLYNQLSQFXYHILIAFERILL

SEQ ID NO: 199444 - protein, 67 aa, Glycine max
  Clone ID: PAT_MRT3847_22121C.1.pep
WGEIQGEKRNMIICKICLSCCLNSHEVPQPQALYSYQCKVEAQPSQPSLLPPFHSLDVNKSNRTLCP

SEQ ID NO: 199445 - protein, 150 aa, Glycine max
  Clone ID: PAT_MRT3847_22122C.1.pep
EFPGRPTRPALPGDNVGFNVKNVSVKDVRRGNVAGDSKNDPPMEAAGFTAQVIILNHPGQISAGYAPVLDCHTAHIACKFAELKEKIDRRSGKKLEDGPKFLKSGDAAIVDMVPGKPMCVESFSDYPPLGRFAVRDMRQTVAVGVIKAVD

SEQ ID NO: 199446 - protein, 90 aa, Glycine max
  Clone ID: PAT_MRT3847_22123C.1.pep
FAFDHAFGGLNHSPNLFLNARALKGASDRAPVFLVKRSFCLCGRKGLTTKMIYCGLYPKMALICCEEMRLVYGVCPMPKRSVPGGPLNLG

SEQ ID NO: 199447 - protein, 100 aa, Glycine max
  unsure (1)..(100): unsure at all Xaa locations
  Clone ID: PAT_MRT3847_22124C.1.pep
RXHAYVSSEFGSRSXXECEXHXGXXRXIFRXXXWCLXVFLXIXLXTXXXIWAILRXIKXTFXLXDVXVYAFXXTVXNXXTSXXXVXXIXRXXDXRXXVTX

SEQ ID NO: 199448 - protein, 215 aa, Glycine max
  Clone ID: PAT_MRT3847_22125C.1.pep
SLSSQTRKPCLPPQLPSHSQPSLSEPDLKLFVGNLPFNVDSAQLAELFESAGNVEVVEVIYDKTTGRSRGFGFVTMSSVEEAEAAAQQFNGYELDGRALRVNSGPPPARNESAPRFRGGSSFAGGGPSDSENRVHVSNRAWGVDNVALKSLFREQGNVLEARVIYDRESGRSRGFGFVTFSSPDEVNSAIQSLNGVDLNGRAIRVSLADSKPKQF

SEQ ID NO: 199449 - protein, 58 aa, Glycine max
  Clone ID: PAT_MRT3847_22126C.1.pep
VTVITSVNTVNLCTPMELRIQPTGRILHLKLEVLNAANLYMLHQHQVWTSLSKAKQLG

SEQ ID NO: 199450 - protein, 275 aa, Glycine max
  Clone ID: PAT_MRT3847_22127C.1.pep
MSTSAASLALPTLTLRTRQPLCSPQCFSSSLSLTPNNKPISISAVFLKPTTLSSSRFVPHVVVSSDLGQEEDTFSDGDGPSFSPDLKLFVGNLPFNVDSAQLAELFESAGNVEVVEVIYDKTTGRSRGFGFVTMSSVEEAEAAAQQFNGYELDGRALRVNSGPPPARNESAPRFRGGSSFGSRGGGPSDSENRVHVSNLAWGVDNVALKSLFREQGNVLEARVIYDRESGRSRGFGFVTFSSPDEVNSAIQSLNGVDLNGRAIRVSLADSKPKQF

SEQ ID NO: 199451 - protein, 318 aa, Glycine max
  Clone ID: PAT_MRT3847_22128C.1.pep
SCAQARPARARAESLINPKPYFYFPLFSNLIPYPPKTKPCLPPQLLSHSQPSLSELDNLSVLPNASPRPSPSPLTPNPFPFTAVFLKTTLSSSSPLSLSSRFVPHVSVLEQEEDTFGDGDGPSFSRDLKLFVGNLPFSVDSARLAELFESAGNVEVVEVIYDKTTGRSRGFGFVTMSSVEEAEAAAKQFNGYELDGRSLRVNSGPPPARNESAPRFRGGSSFGSRGGGPSDSENRVHVGNLAWGVDDVALESLFREQGKKVLEARVIYDRESGRSRGFGFVTFGSPDEVKSAIQSLDGVDLNGRAIRVSLADSKPKRF

SEQ ID NO: 199452 - protein, 58 aa, Glycine max
  Clone ID: PAT_MRT3847_22129C.1.pep
MGTFKFHQYHFVCRALPTEADHHPKIYLMKLWATNQVLAKSKFWYFLRKLKKVKNSHV

SEQ ID NO: 199453 - protein, 72 aa, Glycine max
  unsure (1)..(72): unsure at all Xaa locations
  Clone ID: PAT_MRT3847_2212C.1.pep
GKGLAWEDKERGPSQRGGDLGAIVAPQRKGEPNQFSLGIKILGRGPALGILDGYYXYHPSNPWWFIFFLNLG

SEQ ID NO: 199454 - protein, 65 aa, Glycine max
  Clone ID: PAT_MRT3847_22130C.1.pep
CICKPSSSAFCNLLLMANRHISSSFLTASRATLCVPLSYKWNKVYTRCDVNEIEEYIGLVLTWFA

SEQ ID NO: 199455 - protein, 37 aa, Glycine max
  Clone ID: PAT_MRT3847_22131C.1.pep
VYSIRPTIQDINNCLNECSSFLNEKIANGPGSPFQPP

SEQ ID NO: 199456 - protein, 113 aa, Glycine max
  Clone ID: PAT_MRT3847_22132C.1.pep
LVHPILALFRFFSAHPLTGGFGPCPSHGFGLKARTCCHMWGGTRGLHIQRGLALQAPPNTGFSVVFFHPPPFFSKSPWVIKVFGVLKKTTVGFFPPKEKQKTTIITLNNNSTN

SEQ ID NO: 199457 - protein, 87 aa, Glycine max
  Clone ID: PAT_MRT3847_22133C.1.pep
GFVWQIFPHSFSSPFPFLTNHFPSSIPNQIPSQFDSLRPCLLTGFCPVPLPSFLEASPFSLFHEIPNLSPPPCPITSIPSFTHLPTR

SEQ ID NO: 199458 - protein, 45 aa, Glycine max
  Clone ID: PAT_MRT3847_22134C.1.pep
SNGYYDRAIVLNVYKASSLQAYLAMDAGLHCRFEKGGWNVTWLSQ

SEQ ID NO: 199459 - protein, 223 aa, Glycine max
  unsure (1)..(223): unsure at all Xaa locations
  Clone ID: PAT_MRT3847_22135C.1.pep
AVXXANAXXXXXXAXAAQXVWTPIDVVSQRLMVQGSGGSKTVLANLNSENYRNGFDAFRKILCADGAIGFYRGFGISILTYAPSNAVWWTSYSMVHRLIWGAFGSYMGNNNLGGGFRPDSKAMVAVQGLSAVMASGVSAIVTMPLDTIKTRLQVLDLEENGRRRPLTFVQTVRNLVKEGGLVACYRGLGPRWASMSMSATTMITTYEFLKRMSTKSQEDFTSS

SEQ ID NO: 199460 - protein, 58 aa, Glycine max
  Clone ID: PAT_MRT3847_22136C.1.pep
FYFSFGRGRSKIEGPFGSSPKKRWGMFICRYSRVQQGVVLNVTVSLLYKGIGSRVLIF

SEQ ID NO: 199461 - protein, 61 aa, Glycine max
  Clone ID: PAT_MRT3847_22137C.1.pep
KIEVGTLPQLIIWGPRNFIQEKLFSIEGSKHEAYFLYGGGGTQLLRHTGTGHFGVESGATF

SEQ ID NO: 199462 - protein, 54 aa, Glycine max
  Clone ID: PAT_MRT3847_22138C.1.pep
LIILLNFGIAIIEVFHFYFIPASFLNIFLSSKLTSAIVVALIAYSQFMLVKYHN

SEQ ID NO: 199463 - protein, 138 aa, Glycine max
  Clone ID: PAT_MRT3847_22139C.1.pep
KKRGEKKPPLYSINTTLGGKQNFYWKKTLWGPQIKVRQDFFFIKHKPPKRGGVQTHIPLPGPPLFFGPGPPHKKEKILWVNTYLFQDINRRLFSTHGGERLSCPPKNCVPHATILCVRHGPSIFLGGEKKKKKKKKIP

SEQ ID NO: 199464 - protein, 89 aa, Glycine max
  Clone ID: PAT_MRT3847_2213C.1.pep
MGRIWATAEDLGRNRARVLSLYRQILRGLNSPELRLGFAARLAKKAEARAMFWVGSDERSLHNIADLIDAAEYSLSFLRKGQLPPRHIN

SEQ ID NO: 199465 - protein, 43 aa, Glycine max
  Clone ID: PAT_MRT3847_22140C.1.pep
PNFFNQYHSPPTTGQSPFLISIEPKQLATYTKQFLQGMKLIIQ

SEQ ID NO: 199466 - protein, 57 aa, Glycine max
  unsure (1)..(57): unsure at all Xaa locations
  Clone ID: PAT_MRT3847_22141C.1.pep
AXXNXTQXTXXTYXYAKLLXRXHYRXSWYXCRXRSGXXXRXEEFXSRXERXXSXXXT

SEQ ID NO: 199467 - protein, 193 aa, Glycine max
  Clone ID: PAT_MRT3847_22142C.1.pep
EIDFIGINFYYSFYVKNSPGSLQKEDRDYIADLSVEIERFVPNDTSTYEVPITTKIFLGLLESLKNTYGNIPIYIHENGQQTPHNSSLDDWPRVNYLHEYIGSLVDALRSGLNVKGYFVWSFLDAFELLLGYESSYGLYYVDMNDPSLRRIPKLSAEWYSNFLKRKPMDPKITKEIEKNATLLSHNLSLHNAT

SEQ ID NO: 199468 - protein, 123 aa, Glycine max
  unsure (1)..(123): unsure at all Xaa locations
  Clone ID: PAT_MRT3847_22143C.1.pep
MSGVLLWVSCGPKENINSLVSFSCRSSSGGERTQKRFSGISFASGTSAFSSAVAATETSRSSEERVYEVVLKQAALVKEHKRGTKIALDLDKDVEADLTMWXLLNAAYDRCGEVCAEYAKTFY

SEQ ID NO: 199469 - protein, 93 aa, Glycine max
  unsure (1)..(93): unsure at all Xaa locations
  Clone ID: PAT_MRT3847_22144C.1.pep
PPSPKNKLLFEEKFGGTSPLTTIGPIGGNFGSPLFNLPKVPLIPVGKIQKVPRFFXNGNLYPPPPVNFNIGPNPKFLDGPPLSNFFPEWNPFF

SEQ ID NO: 199470 - protein, 56 aa, Glycine max
  Clone ID: PAT_MRT3847_22145C.1.pep
EIKIDIIEIDFHSHENIKYPTFNKASDNSTLYSYESTIPKNIFSKLVQNMKNVHFF

SEQ ID NO: 199471 - protein, 104 aa, Glycine max
  Clone ID: PAT_MRT3847_22146C.1.pep
MNRGESYGAIETQYIRWHHMHEPRENQCTYALGKHIRAPVHLVCTLVRRFDQPHKYKPSVSKCITQGDLVIGSCREANVKCGHSATTSTVWYEQLDYEEHLFYI

SEQ ID NO: 199472 - protein, 185 aa, Glycine max
  unsure (1)..(185): unsure at all Xaa locations
  Clone ID: PAT_MRT3847_22147C.1.pep
MVGSVDALNEGLRINGAVEPLPEDFDATAVIIDPVPSAVVDNGILKEEAQINKGKEKREIVLGRNVHTTCLEVTEPEADDEITGDREAHMASVLARYKRALTERTKHHLGYPYNLDFDYGALTQLQHFSINNLGDPFIESNYGVHSRQFEVGVLXDWFARLWELEKXEYWGYITTCGTEGNLHGI

SEQ ID NO: 199473 - protein, 538 aa, Glycine max
  unsure (1)..(538): unsure at all Xaa locations
  Clone ID: PAT_MRT3847_22148C.1.pep
MGILSTIASFFGFGVGTSIGLVIGYYLFIYFQATDVKDPVIQPLVEQDAKTLQLLLPEIPTWIKNPDYDRLDWLNKFILYMWPYLDKAICKTARSIAKPIIAEQIPKYKIDSVEFEELSLGSLPPTFQGMKVYVTDEKELIMEPSVKWAGNPNIIVAIKAFGLRATVQVVDLQVFAAPRITLKPLVPSFPCFANIYMSLMEKPHVDFGLKLLGADAMSIPGLYRIVQEIIKDQVANMYLWPKALEVQIMDPTKAMKVPVGILHVKVVRAEKLKKKDLLGASDPYVKLKLTEEKLPSKKTTVKYKNLNPEWNEEFNVVVKDPESQVLELTVYDWEQIGKHDKMGMNVIPLKEITPDEPKAVTLNLLKTMDPNDPENEKLRGQLTVEVLYKPFKEDELPTRSGDSQXSRKAPEGTPASGGLLVIIVHEAEDVEGKHHTNPYVRLLFKGEERKTKHVKKNRXPRWGESFQFMLEEPPTNERLYVEVQSASSKLGLLHPKESLGYVDIKLSDVVTNKRINEKYHLIDSRNGRIQIELQWRTP

SEQ ID NO: 199474 - protein, 58 aa, Glycine max
  Clone ID: PAT_MRT3847_2214C.1.pep
KNRRAKSAIRRIIDVLILLKGAHDVFFIPVITNCINSLYEPHLTHHMILILKRKGEGF

SEQ ID NO: 199475 - protein, 203 aa, Glycine max
  Clone ID: PAT_MRT3847_22150C.1.pep
IGKHDKMGMNVIPLKEITPDEPKVVTLNLLKTMDPNDPENEKLRGQLTVEVLYKPFKEDELPQSTEDSNAIEKAPEGTPASGGLLVIIVHEAEDVEGKHHTNPYVRLLFKGEERKTKHVKKNRDPRWGESFQFMLEEPPTNERLYVEVQSASSKLGLLHPKESLGYVDIKLSDVVTNKRINEKYHLIDSRNGRIQIELQWRTP

SEQ ID NO: 199476 - protein, 87 aa, Glycine max
  Clone ID: PAT_MRT3847_22151C.1.pep
HFLRNIGGAFNIWIPWQLQLLKKSPGVISNGGFRGGNSRRFGAKVKFGVFNFIRKKEKIGASGVPRLWENPLVKFWEKEKKQNFFLP

SEQ ID NO: 199477 - protein, 175 aa, Glycine max
  unsure (1)..(175): unsure at all Xaa locations
  Clone ID: PAT_MRT3847_22152C.1.pep
MGILSTIASFFGFGVGTSIGLVIGYYLFIYFQPTDVKHFGTRKRSCSSFWFIIFXEPRVFQLSYMVFQXDPVIQPLVEQDAKTLQLLLPEIPTWIKNPDYDRLDWLNKFILYMWPYLDKAICKTARSIAKPIIAEQIPKYKIDSVEFEELSLGSLPPTFQADLPIHDMITELFEL

SEQ ID NO: 199478 - protein, 168 aa, Glycine max
  unsure (1)..(168): unsure at all Xaa locations
  Clone ID: PAT_MRT3847_22153C.1.pep
KKKKKKKKKKKKKKKKKKKKRAANIKRNQTYGGGLSRGFNFIYGRLQPINFSFVPPNLNSVAPFLPHLNWKNPGLPPLNCLGKNPLFPIWPYKKEAPLNAFSQPLXTLNLKGAPPFLPPLPPGCVGFTLRVTPFFSFPLSPALWVFFPFFLPNVGLFSRVIYKWGPPF

SEQ ID NO: 199479 - protein, 44 aa, Glycine max
  Clone ID: PAT_MRT3847_22154C.1.pep
GVGLFLTQKPKQGPHAYPYPKHGAKPFSVTSSLGIFFVWNMQAS

SEQ ID NO: 199480 - protein, 151 aa, Glycine max
  unsure (1)..(151): unsure at all Xaa locations
  Clone ID: PAT_MRT3847_22155C.1.pep
XNXXKXXTXKXTXDTXXTNTXNQQHHAHXRPRYXTXNNIXGXXHSTXHTQEHXQHXYXXXTXTHXXQHKNNXXTXXXXSTXNTNLXTXHXXXXPXTXSXXDXXXHARXXXXXXTXXPAPTSNEXXXRXSXQXAXXXXXXNDXTXTNTXPSX

SEQ ID NO: 199481 - protein, 295 aa, Glycine max
  Clone ID: PAT_MRT3847_22156C.1.pep
KRPLLNRAVAVFQFADKHRGAYSNSLHRAVCPFYCDVNGYQDELLWAAAWLHKASRRRQYREYIVRNEVVLRAGDTINEFGWDNKHAGINVLISKEVLMGRADYFASFKQNADGFICSTLPGISHPQVQYSPGGLIFKAGGSNMQHVTSLSFLLLAYSNYLSHANKVVPCGETSATPALLKHLAKRQVDYILGDNPLGMSYMVGYGARYPQRIHHRASSLPSVAAHPAHIGCKAGSRYYFSPNPNPNVLVGAVVGGPTNNTDSFPDSRPFFQQFEPTTYINAPLVGLLSFFSAHC

SEQ ID NO: 199482 - protein, 52 aa, Glycine max
  Clone ID: PAT_MRT3847_22157C.1.pep
FAAFSMKSSPLHDLSQLYIDFAVCLFVIKIGLIPFMISTKFFLYCQWICFIV

SEQ ID NO: 199483 - protein, 47 aa, Glycine max
  Clone ID: PAT_MRT3847_22158C.1.pep
NFPPKPILRLPIPSNITLGIITWSFNNCIQYATGRVYYKWFVKINYQ

SEQ ID NO: 199484 - protein, 63 aa, Glycine max
  Clone ID: PAT_MRT3847_22159C.1.pep
VVSMASSSAWTTKQNKKFENALAIYDRDTPDRWQNLARAVGGKTVEEVKRHYEMLVDDLKRTR

SEQ ID NO: 199485 - protein, 35 aa, Glycine max
  Clone ID: PAT_MRT3847_2215C.1.pep
VHTTFQYAGTEGNAPRLREAMVFRDPPEYYNPPGG

SEQ ID NO: 199486 - protein, 35 aa, Glycine max
  Clone ID: PAT_MRT3847_22160C.1.pep
KHCSLSHSNHSISSSHQPVSQTANDCRFTVPGSEL

SEQ ID NO: 199487 - protein, 157 aa, Glycine max
  Clone ID: PAT_MRT3847_22161C.1.pep
MSSMGPPADENLETKEIDLRSMSSSSLGQAPQAHKVAIPPRQNLFKEFQSTIKETFFSDDPLRPFKDQPRSRKIRLGIEAIFPILSWGRSYNLKKFRGDIISGLTIASLCIPQDIGYAKLAHLAPQYGLYSSFVPPLIYAVMGSSRDIAIGPVAVVS

SEQ ID NO: 199488 - protein, 48 aa, Glycine max
  Clone ID: PAT_MRT3847_22162C.1.pep
SSHMSYEPVLHILVINYCHSKSMSATVERILESPCRTALIVTSVSPVT

SEQ ID NO: 199489 - protein, 101 aa, Glycine max
  unsure (1)..(101): unsure at all Xaa locations
  Clone ID: PAT_MRT3847_22163C.1.pep
XXXXXPRPLDLXRXHXPXXXPLRXXXXXXXXXAXXXLXLXXLCXXSXAIXXLLVXXXXXQXCXSXXXXCXXXXXXXXRXXCXSXXVKXXRAXXPSXXXXYX

SEQ ID NO: 199490 - protein, 51 aa, Glycine max
  Clone ID: PAT_MRT3847_22164C.1.pep
THLFSSYKHFKNISHPFFLTYKSNNPLYNHFFYYLKLLFSSILNYSITNKF

SEQ ID NO: 199491 - protein, 47 aa, Glycine max
  Clone ID: PAT_MRT3847_22165C.1.pep
GSHTGLFCHCLGNDGFDNLLQLCDMNRPRIEGRANLYRLRTVTYGEQ

SEQ ID NO: 199492 - protein, 127 aa, Glycine max
  unsure (1)..(127): unsure at all Xaa locations
  Clone ID: PAT_MRT3847_22166C.1.pep
QEEFLGGCSTQEGAATTLSADGCPYFNAMGHDSLGQQYHFFVLLADILTTINNMCAYGLNPGILGARVLGTIFKLILQLTDWNEKVTVQTPXNLDYSSHCFIXYSIDLAGRXILVDKTGDWITLIQN

SEQ ID NO: 199493 - protein, 68 aa, Glycine max
  Clone ID: PAT_MRT3847_22167C.1.pep
YNFTPPRHNMPTVILLIKPQMVNNNLTINNLMTILLFIPRPGFCPYKFKPSLVAQKNLPLLMCFAGGG

SEQ ID NO: 199494 - protein, 170 aa, Glycine max
  unsure (1)..(170): unsure at all Xaa locations
  Clone ID: PAT_MRT3847_22168C.1.pep
ATNNNSTSSLANGALLRLPSTDTIEPSIEPHLKPINLGETLSELYHRMECCTQSNKALMCAEQYSLLRGLGDQKILRRCLRTACQNAEDVLSKVVLSAWLRFERRDDELVGVCSMDCAGYVVECPKKNLEHGFSXCSVNDHXQCQKEPNQETCTDSVCLPDEESDVLFCV

SEQ ID NO: 199495 - protein, 34 aa, Glycine max
  Clone ID: PAT_MRT3847_22169C.1.pep
AFDDNQESKVKIMYVDARLTCYNVQDIVCRACLI

SEQ ID NO: 199496 - protein, 274 aa, Glycine max
  Clone ID: PAT_MRT3847_2216C.1.pep
IEARVKDLLSRMTLREKIGQMTQIERTVATSSAIRDLSIGSILSSGGSAPFENALSSDWADMVDGFQKSALQSRLGIPLIYGIDAVHGNNSVYGTTIFPHNIGLGATRDSDLVQRIGAATALEVKACGIHYNFAPCVAVLNDPRWGRCYECYSEDTEIVRKMTSIVSGLQGQPPQGHEHGYPFVAGRNNVIACAKHFVGDGGTYKGVNEGNTILSYEDLEIIHMAPYLDCISQGVSTIMASYSSWNGRQLHADHFLITEILKDKLSFKGFVISD

SEQ ID NO: 199497 - protein, 76 aa, Glycine max
  unsure (1)..(76): unsure at all Xaa locations
  Clone ID: PAT_MRT3847_22170C.1.pep
SXTPGWISDITAMMPAQAHSSAVEERLLEGMSQYQNVVGFHGSTYGNVLDMEGGIQLTITGQCADHEMITHLPLVH

SEQ ID NO: 199498 - protein, 76 aa, Glycine max
  Clone ID: PAT_MRT3847_22171C.1.pep
NSPGKDCSEKSCSRFRLISYHVNHVIVQFCPLPLLEGHLGVTGRVTQPRGVFVDPNFSIHLRAWLLNPVRNPFFDP

SEQ ID NO: 199499 - protein, 105 aa, Glycine max
  unsure (1)..(105): unsure at all Xaa locations
  Clone ID: PAT_MRT3847_22172C.1.pep
MVTRRRDKFRMSLGLPVAATENCPENTWAKNLYIISVKRIIGHLNRLTLACVGHMVCVLREQGTTSIRXMIVLPAVILSPRMSWHTMDRVFMYFDYNAVDIANPI

SEQ ID NO: 199500 - protein, 71 aa, Glycine max
  Clone ID: PAT_MRT3847_22173C.1.pep
PHFLALILIHLFGTQTQCPCSLHHSSHPSSITLNPVPHCDYISPPPSSISSNSITPYQCQYPCATEFKPKP

SEQ ID NO: 199501 - protein, 98 aa, Glycine max
  Clone ID: PAT_MRT3847_22174C.1.pep
EPAKFREERYGPGLFSISINCERRKCFPPIQMGNAGVFPLSSVVKRRPTVNLFRCRYKKYHIGARRTHNKRRKRREIFFFFFFFFFFFFFFFTSSRSR

SEQ ID NO: 199502 - protein, 231 aa, Glycine max
  Clone ID: PAT_MRT3847_22175C.1.pep
IYVLISEIERTAPNLKALDQYEALLEKERAVTEEFEAVRKEEREKTQRFNEVKQRRYHLFMDAFTHISGNIDKIYKQLTKSNTHPLGGTAYLNLENDDDPFLHGIKYTAMPPTKRFRDMEQLSGGEKTVAALALLFSIHSYKPSPFFILDEVDAALDNLNVAKVAGFIRSKSCEGARISQDVDGGNGFQSIVISLKDTFYDKAEALVGVYRDSERGCSRTLTFDLTKYREF

SEQ ID NO: 199503 - protein, 181 aa, Glycine max
  Clone ID: PAT_MRT3847_22176C.1.pep
GVPAFQKVPSCVIHFIFTRTGRHLFPTDDDEGKPPLLERMVQESGDLYFMSALCAFKPRFAYSNVAYDHIVGWRTSSIRRQSELANWKDTINAKYPHVVYEEHCKACSDAEQCDSTEDSSYAKIEEGLVTGLSRVSWEKVDVSFRNSKNRFASHTIIQVKDQITQIEGADVIQHMIDYFLV

SEQ ID NO: 199504 - protein, 82 aa, Glycine max
  Clone ID: PAT_MRT3847_22177C.1.pep
FLVFPKRKTQWDSYFPLNRLLFLYPGEIDPYSTHKLKHFIQPPTLAETTCSIVNKRTFVKANLQTPTQQKKSFLQKREAAGK

SEQ ID NO: 199505 - protein, 75 aa, Glycine max
  unsure (1)..(75): unsure at all Xaa locations
  Clone ID: PAT_MRT3847_22178C.1.pep
FYSAHGHWEHHDVTVNDQNTLLFGDKPVTIFGHRNPEEIPWWSPGADIIAESTGVFTDMDKASXHLKGGAKKLLC

SEQ ID NO: 199506 - protein, 107 aa, Glycine max
  Clone ID: PAT_MRT3847_22179C.1.pep
TSSIRRQSELANWKDTNNEKYPHVVYEEHCKACSDAEQCDSTEGNSYDKIEEELVTGLSRVSWEKVDVSFRNSKHRFSSHTIIQVKDQITQIEGADVIQHMIDHFLL

SEQ ID NO: 199507 - protein, 182 aa, Glycine max
  Clone ID: PAT_MRT3847_2217C.1.pep
MGFKSLFNMKKKKLLKTMSSSSSLPHAPPVSLHSSRASVMEDLEYVFKKFDANGDGKISASELGSMMKSLGQPATEEELKKLIREVDSDGDGHINLEEFTELNTKDVDPDEVLENLKDAFSIFDLDGNGSITAEELKMVMASLGDACSIEECRKMIAGVDGNGDGMINFDEFQIMMTGNMNK

SEQ ID NO: 199508 - protein, 150 aa, Glycine max
  unsure (1)..(150): unsure at all Xaa locations
  Clone ID: PAT_MRT3847_22180C.1.pep
LFNDNQWDRPFGNINNIQFENVENNMISEFFVHTCHSDAKERISFMYPTIHSLCHKMMEGIFHLFSSSMLFRIFHCPIGAANHIDSXSFGLSNVVVNRAKGVDKELISLDILXHAIRLSKEETKPQHLTRTNDPFLSGRVREQIKNGWCP

SEQ ID NO: 199509 - protein, 116 aa, Glycine max
  Clone ID: PAT_MRT3847_22181C.1.pep
NFLLNLKPLLSKLNPSIRKTGFLVIASVPQKVHMPPKYGSDSSPINLGPSHSAILTPAIYHGFFQNSPGPKFCKSKAKIHKPFVKIQLNGKVPFFIVSKSANSLVPQKGYCLGSMS

SEQ ID NO: 199510 - protein, 243 aa, Glycine max
  Clone ID: PAT_MRT3847_22182C.1.pep
MMSNIFSLCLSFSLLFYVAQGATVTFTNNCQYTVWPGTLTGDQNPQLSTTGFELAPGGTNSVNIPSPWSGRFWARTGCSNNGGFTCDTGDCASGQVECNGAGAIPPATLVEITVAPNGGQDFYDVSNVDGFNVPGSITPQGGSGECKTSSCPNNINDVNVCPSELQVKGSDGNVIACNSACVAFNEDQYCCRGDYDTEETCPPTNYSQIVEEQCPDAYSYAYDDKSSTFTCFNGPDYAIIFCP

SEQ ID NO: 199511 - protein, 47 aa, Glycine max
  Clone ID: PAT_MRT3847_22183C.1.pep
LRPPILSAESERHPAKYIFTVFFIVNGHPLQIKDKISSKKKQGTISC

SEQ ID NO: 199512 - protein, 57 aa, Glycine max
  Clone ID: PAT_MRT3847_22184C.1.pep
MGATAILLVAMCDLPLMVEAIHPAMNPFCVKARVYWDPCRADFATSLPTYIALANIM

SEQ ID NO: 199513 - protein, 69 aa, Glycine max
  Clone ID: PAT_MRT3847_22185C.1.pep
PLMISAHLTTTLLKSNALHHTFYLKGIKGLNRVDPIHSFNCSSLSFKVPQYLSPLLGISKQPNSFFALT

SEQ ID NO: 199514 - protein, 282 aa, Glycine max
  Clone ID: PAT_MRT3847_22186C.1.pep
FLPDKSRHSKSKAAPCSTHQPQLPLPQGNKEVHRQRQPLNLLSPDSGSSSGGVADKDSFSSKFGWRSTKQLFGTPIKKLLAEEMSPRAESKRRSPGVIAKLMGLDGLPFQQPTNKQHNKGLSVNQQKTAQLEKTRSKGVLYSGQSSRGCSKDHQEFKDVFEVSEIPKVESHRYPSQGCADLMSTDAEISFIEQKFMDAKRLATHQDLQSSKDFCDTLEVLDSNKDLLLKYFKRPDSLFKKHLNDLQAAPVQSHYGHVKPMDIEKYEHDFNLDGKMGGGKPRG

SEQ ID NO: 199515 - protein, 139 aa, Glycine max
  unsure (1)..(139): unsure at all Xaa locations
  Clone ID: PAT_MRT3847_22187C.1.pep
MTAQAPPRARSARALQTAEITVTLDCDGCERRVRNSVSNMSGVKQVEGYREQNKGTGSGSVDXKHGVLERVQRTKKXAEYWPYIQYNLVAYPYVVQAYDKKAPSGYVKNTEQALPNPNAPDEKLTSLFSDDNPNACSIM

SEQ ID NO: 199516 - protein, 93 aa, Glycine max
  unsure (1)..(93): unsure at all Xaa locations
  Clone ID: PAT_MRT3847_22188C.1.pep
HNFVGPASYLIIVVNSCRSDRYCGGAAPIRDGHVCSGAVSGRSWSGAGCGAVFCAATSKRTLLFQMPTGKIKVPTTQHSHNKQHQXRSLDRIR

SEQ ID NO: 199517 - protein, 72 aa, Glycine max
  Clone ID: PAT_MRT3847_22189C.1.pep
VQFTYEHMCLLMCSNCGVELHRGSPILLSFGFRIGLLRKQINPIHKWSVLPPKLKQMWPWASPRGPAKVRVH

SEQ ID NO: 199518 - protein, 103 aa, Glycine max
  Clone ID: PAT_MRT3847_2218C.1.pep
MCQSLPFGGVKNSGFGRFGGVEGLRACCLVKSVVEDRWWPFIKTVIPKPIQYPVAENGFEFQESLVEALYGLSVWDRLQALVNVLKMLTEQNSTSGSRKKKND

SEQ ID NO: 199519 - protein, 70 aa, Glycine max
  Clone ID: PAT_MRT3847_22190C.1.pep
YIANGTLWCNLCLNLYLNSRGSNECPYTKFSENYNVTRKNANTNYFTHGSRSYTEERQEVCSVNKAKGDC

SEQ ID NO: 199520 - protein, 66 aa, Glycine max
  Clone ID: PAT_MRT3847_22191C.1.pep
PGGPPAPSLALYDPSRTAEPPLPLGQSGSNQSQRHAREPPLFIETERDNPTVPRKDTSLRLIATAD

SEQ ID NO: 199521 - protein, 46 aa, Glycine max
  Clone ID: PAT_MRT3847_22192C.1.pep
KVKAPFPHNLDINLWRKHFFLIHFLGASLAFLLFSCIFILRFTTPQ

SEQ ID NO: 199522 - protein, 100 aa, Glycine max
  unsure (1)..(100): unsure at all Xaa locations
  Clone ID: PAT_MRT3847_22193C.1.pep
LDDRDEHLVLRGDGTIRSQHLARTRIHGLTDHTAXLYGRPRTWHVAESHTLADHEPASGCVVDSGPCLYHTHSLLLPCYDALYTPCVYFHCMELSGEAPI

SEQ ID NO: 199523 - protein, 65 aa, Glycine max
  unsure (1)..(65): unsure at all Xaa locations
  Clone ID: PAT_MRT3847_22194C.1.pep
MEFQVKHALVVKIMGRTGSKGQVTQVKMKFLDDQNRHIIRNVXGPVKKGDILPPLEFEKETKRLR

SEQ ID NO: 199524 - protein, 76 aa, Glycine max
  Clone ID: PAT_MRT3847_22195C.1.pep
CSMCIVITIVYFECGHGLHPKVHTTRCWMNQIAVCLIIITMRALILDMDMITIVILTSIRADYMDAYGLVHVHNEW

SEQ ID NO: 199525 - protein, 98 aa, Glycine max
  Clone ID: PAT_MRT3847_22196C.1.pep
THSPISLFPLIITFSYQSHSKKTLIPLIITLYLFKLLKTKQLLQFSSILLFLNITSISHFSSYSPKLHFNNSTPQFSIFSQIPIFFQLKIKTTFLFNN

SEQ ID NO: 199526 - protein, 123 aa, Glycine max
  unsure (1)..(123): unsure at all Xaa locations
  Clone ID: PAT_MRT3847_22197C.1.pep
XNLIQNYNVHSVQGTQDSTIGIILNKIDLPEAKDKLQSLAQEIMRIGNNGAASDPKPSSEVLDPLSDETDRKEKRLEDYPRPLSVVGVSVLKGIRINEMLKEIRSALRKCSDSKEALAFSVPP

SEQ ID NO: 199527 - protein, 44 aa, Glycine max
  Clone ID: PAT_MRT3847_22198C.1.pep
GELAIVVVNTYTHSCFYCTNMDGSVHLCVIKNMITVTSQADCAG

SEQ ID NO: 199528 - protein, 62 aa, Glycine max
  Clone ID: PAT_MRT3847_22199C.1.pep
TIIKHTKYGASLQQCTIKLLEPIFLSISRNLMLHLNQIPRKEPSLVFFNQFPLIYCYHNISN

SEQ ID NO: 199529 - protein, 79 aa, Glycine max
  Clone ID: PAT_MRT3847_2219C.1.pep
ENVEEGSFYEYYYGKRKGGWKRFFSYGNSDSCAWIWLQMGWRILVSFGIALLVFYIATKPPSPNVSVEIARFPEFKLAE

SEQ ID NO: 199530 - protein, 212 aa, Glycine max
  Clone ID: PAT_MRT3847_221C.1.pep
MSAIAAPQHRSSKTESYVDNKRKEDIRHANIVAARSVANAVRTSLGPKGMDKMISTSSDEVIITNDGATILNKMQVLQPAAKMLVELSKSQDSAAGDGTTTVVVIAGALLEQCLLLLSHGIHPTVVSDALHKAAVKAVDVLTAMAVPVELSDRDSLVKSASTSLNSKVVSQYSTLLAPLAVDAVLSVVDAPKPDMVDLRDVKIVKKLGGTVD

SEQ ID NO: 199531 - protein, 56 aa, Glycine max
  Clone ID: PAT_MRT3847_22200C.1.pep
LAQGRFNTRLRKLQAPKCNNFQNYIACFKFVKKEYTLSERMQIIVTNFIMLFCISP

SEQ ID NO: 199532 - protein, 131 aa, Glycine max
  Clone ID: PAT_MRT3847_22201C.1.pep
SHQYSPVPMTLSLTSFTTFLFHAVTFRETHPPLATNPFKKKCAHESESNSTFLYTLHLLIERWSDTTLLPNTCSYAPTRHYGMPNAEPPTSTAMFHAERITEPSPADPGTWDFRAKKPMPILIPWPRTATH

SEQ ID NO: 199533 - protein, 165 aa, Glycine max
  unsure (1)..(165): unsure at all Xaa locations
  Clone ID: PAT_MRT3847_22202C.1.pep
FSRLVNSYFLARTSWWCPCLEVGDGVFEVLSTSGDTHLGGDDFDKRIVDWLASNFKRDEGIDLLKDKQALQRLTETAEKAKMELSTLTQTNISLPFITATADGPKHIETTITRAKFEELCSDLFDRLMTPVENSLMDAKLSFKDXDRIILXGGSTRIPPVQDACQ

SEQ ID NO: 199534 - protein, 363 aa, Glycine max
  unsure (1)..(363): unsure at all Xaa locations
  Clone ID: PAT_MRT3847_22203C.1.pep
MACSSAQIHGLGTPSSRTLFLGQRLNTKAAFIKLKSTPRRLRPLRVVNEKVVGIDLGTTNSAVAAMEGGKPTIITNAEGQRTTPSVVAYTKNGDRLVGQIAKRQAVVNPENTFFSVKRFIGRKMSEVDEESKQVSYRVIRDDNGNVKLDCPAIGKQFAAEEISAQVLRKLVDDASKFLNDKVTKAVVTVPAYFNDSQRTATKDAGRIAGLEVLRIINEPTAASLAYGFEKKNNETILVFDLGGGTFDVSVLEVGDGVFEVLSTSGDTHLGGDDFDKRIVDWLASNFKRDEGIDLLKDKQALQRLTETAEKAKMELSTLTKXNISFLFIRFTADGTKNIEQNKESLKTPFLGVQPNLSRIPWLH

SEQ ID NO: 199535 - protein, 290 aa, Glycine max
  Clone ID: PAT_MRT3847_22204C.1.pep
MTSSRSLNESFASLNEFSTGVLSLSRRSEHNSSNLALVMVVSICLGLETLGGVMTKIIPRNTTLPTSKSEVFSTAADGQTSVEINVLQGEREFVRDNKSLGSFRLDGIPPAPRGVPQIEVKFDIDANGILSVAAIDKGTGKKQDITITGASTLPSDEVERMVNEAEKFSKEDKEKRDALDTKNHADSVVYPTEKQLKELGDKVPGPVKEKVEAKLGELKDAISGGSTQAIKDAMAALNQEVMQLGQSLYNQPGAAGAGGPTPPGADSGPSESSGKGPDGDVIDADFTDSK

SEQ ID NO: 199536 - protein, 140 aa, Glycine max
  Clone ID: PAT_MRT3847_22205C.1.pep
CLYNYTYNILIHCCSGLTQTNYKELNVLYEKYKNQGFEILAFPCNQFAGQEPGNNEEIQEVVCTRFKAEFPIFDKVEVNGKNAVPLYKFLKEKKGGIFGDGIKWNFTKFLVNKEGKVVDRYAPTTSPLKIEKDIEKLLQS

SEQ ID NO: 199537 - protein, 192 aa, Glycine max
  unsure (1)..(192): unsure at all Xaa locations
  Clone ID: PAT_MRT3847_22206C.1.pep
LYSNRVYSSIFLPVIRILLVEFGIDAFGMLFVTAIAKGTGKKQDITHLXGASTLPSDEVERMVNEAEKFSKEDKEKRDAIDTKNQADSVVYQTEKQLKELGDKVPGPVKEKVEAKLGELKDAISGGSTQAIKDAMAALNQEVMQLGQSLYNQPGAAGAGGPTPPPGADSGPSESSGKGPDGDVIDADFTDSK

SEQ ID NO: 199538 - protein, 57 aa, Glycine max
  Clone ID: PAT_MRT3847_22207C.1.pep
LHSRWVRQSINSNDDMDPIKCRVHLSSCESVFWTNCFRYMIYPFRNIGQVKVCVILK

SEQ ID NO: 199539 - protein, 227 aa, Glycine max
  Clone ID: PAT_MRT3847_22208C.1.pep
MASLTPGILLKMLQAMNTNTRVTGDHRSPLLQVIGIVPALAGSDLWSNQGFYLNLSDSVNSTYVLLSHPDTDLILSNRLQLGQFVHVDRFHFDSPLPSVSNLRPLAGRHPFLGTPEPLIARISPSTRHFLIQPLSDSELDPLSLLSLNNNNKSPIPNPNPNPNHNHEEHKQHHKDSSKERISRDPLAPRDNNLPPQRFSSPATAKRSQSAGRNKIVSTTAEKGSITG

SEQ ID NO: 199540 - protein, 153 aa, Glycine max
  Clone ID: PAT_MRT3847_22209C.1.pep
MSVSASQTEEQVSTRKPTTLCEECKSNPSKYTCPGCSLHSCSLPCVKSHKDRTGCSGKRNQTQFLPLSKFDDNVLLSDYKLLEEVKRVAESAQRMRNKLGIYAYFRLPRYLRSLKNAAGSRRTKLLFLPNGMSRREKNRSQYDQRVPSHLSRS

SEQ ID NO: 199541 - protein, 116 aa, Glycine max
  Clone ID: PAT_MRT3847_2220C.1.pep
MAEWLKNIYWADIAQACLDTLSMLAAALGFTVLLGLPLGVLLFLTGKRQLHETLLVYRSLSVLVNILRSLPFIILLIVLIPLTTLLVGTSLGVPGTIPPLVVGCTPFFARLVETAL

SEQ ID NO: 199542 - protein, 418 aa, Glycine max
  Clone ID: PAT_MRT3847_22210C.1.pep
MSVSASQTEEQVSTRKPTTLCEECKSNPSKYTCPGCSLHSCSLPCVKSHKDRTGCSGKRNQTQFLPLSKFDDNVLLSDYKLLEEVKRVAESAQRMRNKLGIYAYFRLPRYLRSLKNAAGSRRTKLLFLPNGMSRREKNRSQYDQRKKFISWTIELHFHSTDIVLLDHEVDENTSFYSILEKHLKPGPWKNQLRQFCEVQLDCLKLFIRKYPKGPKSSFKELDIKAPIRQQLANIVILEFPVVFVFLPSHRINFEVIKDVNTSKHKSLQKDCEDNQFPQGLSFREEVIEDDNNSADPQVFDLMKQVESSLSHEVMTQNMSSEKAPNDSPEKSLFEGATGGNLSHSLTETNELKFSEDMTFDFDQDLMDFYTDILDQTNPGDLFDFDGEFSKKTENEIDLIGTSDLFPMPEELEEGEILE

SEQ ID NO: 199543 - protein, 85 aa, Glycine max
  Clone ID: PAT_MRT3847_22211C.1.pep
PTVTSAHKTPTFSSHKHGAVDNTQESSNSDASTELDDTEKEARENTTMPERSTYLAKEDPSATVKWPLLVGLTLLVYARTAGLFE

SEQ ID NO: 199544 - protein, 450 aa, Glycine max
  Clone ID: PAT_MRT3847_22212C.1.pep
MAMASTLPAGDEETPLVPDDNSAIEARKSHHSTDIHILSLAFLLVFLAFGAAQNLQSTLNTEDDLGTTTLGILYLSFTFFSVVASLVVRVLGSKNALLIGTTGYVLYVAANLKPNWYTLVPASVYLGFCASIIWVGEGTYLTSAARSHSTDNNLHEGAVIGDFNGEFWAVYALHQFIGNLITFALLSDDQQEGSTKGTTLLFIVFLFIMTFGAILMCFLRKRGANSKGQQELSGADAGACASLKSLSKSLASALSDVKMLLIIPLIAYSGLQQAFVWAEFTKYVVTPAIGISGVGSSMAAYGAFDGIFSLLAGRLTSGLTSITTIVSAGLFAQAVVLVLLLLNFSISSGLLGTVYILFLAGLLGIGDGVLMTQLNALIGILFKHDTEGAFAQLKIWQCATIAIVFFFAPLISFKAVLVIMLALLCFSFCIFLLLALKVGKTSSPSTSQRI

SEQ ID NO: 199545 - protein, 199 aa, Glycine max
  unsure (1)..(199): unsure at all Xaa locations
  Clone ID: PAT_MRT3847_22213C.1.pep
MTSEGSKFGNINSQPSCNRELQSMASALPGDEETPLVGDISGLEGRKSHHTRDVHILSLAFLLVFLAFGAAQNLQSTLNTEDDLGTTSLGILYLSFTFFSVVASLVVRVLGSKNALLIGTTGYVLYVAANLKPNWYTXVPASVYLGFXASIIWXGEGTYLTSAARSHSTDNNLHEIAVIGDFNGXFWAVYALHQFIGNL

SEQ ID NO: 199546 - protein, 28 aa, Glycine max
  Clone ID: PAT_MRT3847_22214C.1.pep
LCIVHTAQLPSQCMLCKIFRLNSCHFRL

SEQ ID NO: 199547 - protein, 42 aa, Glycine max
  Clone ID: PAT_MRT3847_22215C.1.pep
MASGATCVQRLDGSRDSAIHTKYRISLRSSSMQEPRYPFRDH

SEQ ID NO: 199548 - protein, 82 aa, Glycine max
  unsure (1)..(82): unsure at all Xaa locations
  Clone ID: PAT_MRT3847_22216C.1.pep
TVVVGSLAFAVFWVLADLPAVPSLLIGRTVGSLLGAMRMVMFKVLSPDRAYAAIDLPXLSLLYGTMAVATLLDISNVFKYLG

SEQ ID NO: 199549 - protein, 85 aa, Glycine max
  unsure (1)..(85): unsure at all Xaa locations
  Clone ID: PAT_MRT3847_22217C.1.pep
EASLNLISINQYSINKRVRRPFYYFTPSQASVIKAWADNTDNVNVGQQXLFKIAKVNSLASLGQYTAISPVLSYGESVFHSYHTY

SEQ ID NO: 199550 - protein, 151 aa, Glycine max
  Clone ID: PAT_MRT3847_22218C.1.pep
MATTLIPSDLTEFVMLQGNGVKGLSEMGLKSLPSQYIQPLEEIMINVLPQESIPIIDMSNWDDPKVQDSICDAAEKWGFFQIINHGVPPQVLDNVKDATYRFYGLPPEEKVKYTKENSSTKHVRYGSSFSPEAEKALEWKDYLSLFYVSED

SEQ ID NO: 199551 - protein, 226 aa, Glycine max
  unsure (1)..(226): unsure at all Xaa locations
  Clone ID: PAT_MRT3847_22219C.1.pep
DSSNAYWLLLQVLSLIPLWHYLLLAAFILFSILYNFLELYFLQDLFSGFSGSPVLLSYNTSSSILNAVVSKCKILHGRYFATPWLCSPHLQTLFLNYFGRPPPLKYTKQLFSTADGETIALDWLSTSHVSGDVASEDESVPIVVVIPGLTSDSSSQYIKHLAYHTAKRGWKVVICNHRGFXGVSITSGFSYNAGWTEDIRAVVNYLHKEKSMAPLFVVGTSIGANI

SEQ ID NO: 199552 - protein, 99 aa, Glycine max
  Clone ID: PAT_MRT3847_2221C.1.pep
SLCNVDGSKVCASKRESRCCLGNVNWEPHHLNFIHVLRSHSHSKALDCPTSLIRSRFPIPLLASDNDVSWFWTWSSAYLMTSYHRDQVLNSNEFIVPFL

SEQ ID NO: 199553 - protein, 250 aa, Glycine max
  unsure (1)..(250): unsure at all Xaa locations
  Clone ID: PAT_MRT3847_22220C.1.pep
ISHFVLSTLLTSMAGSPSASAKKAIVETSTKSCKKVIDEIHIKFGGVIDDLCTNIHGQIREAEAEAKANEIALAILEERLKKVVIPKEVPTKLMTSEVLEKLESVAKDAKNLNKMVVAMDQSKEVWDIVAYFSLFPQHGELDAERLIDLWMAEKFCNSPKGGRRCLSQLDGNSMFQDVKKDEFGQVRSFKLHLLMHEIAELVEKHHHSIRENITIPNENQVHSKVQRASIDLSDSRXXXKQLXXXXKQXR

SEQ ID NO: 199554 - protein, 123 aa, Glycine max
  Clone ID: PAT_MRT3847_22221C.1.pep
AREEGRRKILAVHLRGVPLEEDTSIICHLIASLTTGLVGADLANVVNEAALLAARRGSETVAREDIMEAIERAKFGINDEQLRSSKISKELSKLFPWMPSLMGKSERRQDDQQGPLGYQSLSS

SEQ ID NO: 199555 - protein, 152 aa, Glycine max
  unsure (1)..(152): unsure at all Xaa locations
  Clone ID: PAT_MRT3847_22222C.1.pep
FGSRKTTEGLTDIVSKEGGYVTFGYNNKGRIMGEGNIXISTRHXIKNVLYVNGLKHNLLSISQLCDKCLKIEFNKSCCLICEAISGKVVHIGKILGNIYMLNIEHASFHELSYLVCKIDDSWLCHHWAAHINMHHLNQLSNKELTILFQKLV

SEQ ID NO: 199556 - protein, 232 aa, Glycine max
  Clone ID: PAT_MRT3847_22223C.1.pep
MALFITVVVVLFLLQLSSSVRVNSEPTQDKQALLSFLSQTPHSNRLQWNASESACDWVGVKCDASRSFVYSLRLPAVDLVGRVPPGTLGRLTQLRILSLRSNALTGEIPSDFSNLIFLRSLYLQKNQFSGEFPPSLTRLTRLARLDLSSNNFTGQIPFSVNNLTHLTGLFLERNHFSGKIPSITLRLVNFNVSYNNLNGSIPETLSAFPETSFVGNIDLCGPPLKDLTPFFP

SEQ ID NO: 199557 - protein, 70 aa, Glycine max
  unsure (1)..(70): unsure at all Xaa locations
  Clone ID: PAT_MRT3847_22224C.1.pep
KQNNTPRGTXQMIVISSFYLTLKHSFEKCSATAWGFPQGQLLNIIYCPPSEYNIPEAKSLLVLLYNRLGW

SEQ ID NO: 199558 - protein, 48 aa, Glycine max
  unsure (1)..(48): unsure at all Xaa locations
  Clone ID: PAT_MRT3847_22225C.1.pep
VVWKEAWRDXVXLXXVVXFLRFLCCVXLRESMDGREVKTMGIGMDWIG

SEQ ID NO: 199559 - protein, 524 aa, Glycine max
  Clone ID: PAT_MRT3847_22226C.1.pep
MEAPWATTSSSIVFVIVILALTSWAWRMLNWLWIRPKRLERLLREQGLQGNPYRILVGDLKEIVKLQMEARSKPMNLSHDIVPRVFAHLHQSVLKHGKNSFIWFGPKPRVTLTDPELIKDVLNKISDFRKPEANPLAKLLATGLVNYDGEKWNKHRRLINPAFSLEKLKIMLPIFFKSCNDLIIKWEGMLSYDGSCEMDVWPFLQNLASDVIARTAFGSSFEEGKRIFQLQKELAELTMKVIMKVYIPGWRFVPTATNRRMKEIDRYIKASLTDMIKKREKAPKTGEATRDDLLGILLESNHKEIQEHRNNENVGMNLNDVIEECKLFYFAGQETTSVLLVWTMVLLSRYPDWQSRAREEVLQVFGKQAPNFDGLSHLKIVTMIFLKVVLRLYPPAVGLNRNVDRDMKLGNLSLPAGVQVSLPTTMVPHDRELWGDDVNEFKPERFSEGVLKATNGRVSFFPFGWGPRICIGQNFSLLEAKMALSTILQHFSFELSPAYAHAPVTVFTLQPQYGAHVILRKVEI

SEQ ID NO: 199560 - protein, 225 aa, Glycine max
  Clone ID: PAT_MRT3847_22227C.1.pep
WYVGKNSFIWFGPKPRVTLTDPELIKDVLNKISDFRKPEAMDDDSLVDSDLGWLASVAELELGLEDSSFLKLCSSKHPYKLCSTKVPMEDVILFLPYIRTQVKAYFLCGYLFDEAKYNRELEKLIIEIRHAQGLHAVGQSEKIEASRKYELLSLLVFLFLSDEDMTKSKGKDPLEGLGGPMTRARARKAKEALQQVLSILFEYKPKFQGEKSKVVSCIMAQMEED

SEQ ID NO: 199561 - protein, 124 aa, Glycine max
  Clone ID: PAT_MRT3847_22228C.1.pep
MSKGGSLQKDVPWRASSSSAKPIPKIHHSPLLRVSQTPVSDYGISVMRHPDPIGGGLGHEAIVEPAGPDCLVPGQKMPIQLLGLQVWPIHVDLKFLEPVGRELKMLGKFMDDAVELMNKSFIER

SEQ ID NO: 199562 - protein, 74 aa, Glycine max
  Clone ID: PAT_MRT3847_22229C.1.pep
NYIPCHRVFILSKMRFLVSTENTENEILLFSVFGSAEKIFSLKMFSKIQPNTFPSPFSISSENENRKQSNQTPP

SEQ ID NO: 199563 - protein, 82 aa, Glycine max
  Clone ID: PAT_MRT3847_2222C.1.pep
LCHIGLLQIIERSLPKKQKVKKDPALIEKEEMERCGKVWANIVRRDIPKHHRNFTIFHRKQLIDAKRVSETCQREALPYFPP

SEQ ID NO: 199564 - protein, 63 aa, Glycine max
  Clone ID: PAT_MRT3847_22230C.1.pep
MRTATKNSINTNNVLRKWLSNNTVLSFLTFSLEAPRPRMLGIPLVINKSGAFIAFFHGELSSN

SEQ ID NO: 199565 - protein, 127 aa, Glycine max
  Clone ID: PAT_MRT3847_22231C.1.pep
GPEFRVDPRVREGGSLQKDVPWRASSSSAKPIPRIHHSPLLRVSRTPVSDYGISVMRHPDPIGGGLGDEATVEPAGPDCLVPGQKMPIQLLGLQVWPIHVDLKFLEPVGRELKMLGKRESGTEQFCY

SEQ ID NO: 199566 - protein, 56 aa, Glycine max
  unsure (1)..(56): unsure at all Xaa locations
  Clone ID: PAT_MRT3847_22232C.1.pep
PLARRLCQNVGSPGSKKASFLNMHVYKFGRGDSRCLCQLLSACXXWVXXPAFPXXX

SEQ ID NO: 199567 - protein, 55 aa, Glycine max
  Clone ID: PAT_MRT3847_22233C.1.pep
GLLMYGPGPQKCGAESGISVPHWCSNQPGNLVNLEMIHLMRRWPVVAASRHNQHL

SEQ ID NO: 199568 - protein, 89 aa, Glycine max
  Clone ID: PAT_MRT3847_22234C.1.pep
SSLKVVKAAAQVLNTLWQYRDLRTIYKKDGWNQNHFITPVSTLERDRFKSHPSLSTTNQQMSPIIQSGSSKPSPIYISSYSSPAREQDR

SEQ ID NO: 199569 - protein, 77 aa, Glycine max
  Clone ID: PAT_MRT3847_22235C.1.pep
QRETQTLQRITEIQKNNPINPQCPISHFFFLNWVGGNHKNTHLQRTNRSLQKKEGNIFMKGIDKKNQVEYGPNGSLR

SEQ ID NO: 199570 - protein, 403 aa, Glycine max
  Clone ID: PAT_MRT3847_22236C.1.pep
ANLEGLNVRGYQFADKIKEGCERRQKGGDGTAGWLLGVVCDLKLSHPPPIATVPLGTGNNLPFAFGWGKKNPATDQRSIEAFLDQVMKATKMKIDNWHILMRMRAPKQGPCDPIPPLELPHSLHAFHRVSESDEFNMEGFHTFRGGFWNYFSMGMDAQVSYAFHSERKLHPEKFKNQLVNQSTYAKLGCTQGWFFAPLFHPPSSNIAHLAKVKVMKTHGGWEDLQIPSSIRSIVCLNLPSFSGGLNPWGTPNKMKRRDRDLTPPYVDDGLIEVVGFRDAWHGLVLLAPNGHGTRLAQAHRIRFEFHKGAAEYTFMRIDGEPWKQPLPVDDDTVLVEISHHGQVNMLATHDSKSKSENDPSSPHHNDVEEDDSDDEEAKADEYRKFGAADTFKIPDEVDLAHLS

SEQ ID NO: 199571 - protein, 54 aa, Glycine max
  unsure (1)..(54): unsure at all Xaa locations
  Clone ID: PAT_MRT3847_22237C.1.pep
SRCWMSIAHWLTWHSXSKKSRPXEVPRXXISLAXVXALXXGCXIMFYKTGIQXI

SEQ ID NO: 199572 - protein, 134 aa, Glycine max
  unsure (1)..(134): unsure at all Xaa locations
  Clone ID: PAT_MRT3847_22238C.1.pep
DEWRRGLKALRADTVSKLKKALPDLEKEVRRPSNFTDFYSYAFQYCLTGKLXMYDMSICVVNFNLLFSFLHSCQLVWSIFXAQNDYKVINMDQWMGFFRFCNEISFPTVHDYDPELAWPLILDNFVEWLREKQK

SEQ ID NO: 199573 - protein, 62 aa, Glycine max
  unsure (1)..(62): unsure at all Xaa locations
  Clone ID: PAT_MRT3847_22239C.1.pep
DEWRRGLKALRADTVSKLKKALPDLEKELLTFLIXSTVKVRRPSNFTDFYSYAFQYCLTGKL

SEQ ID NO: 199574 - protein, 95 aa, Glycine max
  Clone ID: PAT_MRT3847_2223C.1.pep
QHIGIDRHTEQRSRVSLTKYRKNRENRQGNRLNNRRKTRKQRMILNQLFTAESVTRFGRSVQSKRSHSSQGFEFAKDVRTLVVTTFKEHSMQGNS

SEQ ID NO: 199575 - protein, 117 aa, Glycine max
  unsure (1)..(117): unsure at all Xaa locations
  Clone ID: PAT_MRT3847_22240C.1.pep
CXXFXPXXSIXXLLXXXXXXXXXYLLXXXXLXXXXXXXXTLXFXVXXXFXXSXIXXXXIXXXLXXXLHXFXXXXXXXLXICXXXXXVXXXSXXXXXXXFXXXYFXLXLXCXXXXXXX

SEQ ID NO: 199576 - protein, 88 aa, Glycine max
  unsure (1)..(88): unsure at all Xaa locations
  Clone ID: PAT_MRT3847_22241C.1.pep
TTLLHSNFKDPLKTSVFIYNTSNNXLFIFYYLFITSFSLITTSPSNHYLLNSIPNFSIKYPTTFYFLFLIQNIFYPTYCSYSNSIQTH

SEQ ID NO: 199577 - protein, 326 aa, Glycine max
  Clone ID: PAT_MRT3847_22242C.1.pep
MGSNGGSSNNNKVMEKPGQNQLVQQQQHPETLKCPRCDSSNTKFCYYNNYSLSQPRHFCKACKRYWTRGGTLRNVPVGGGCRRNKRVKRPITSPCSAAIDTASNSSNSSSAPTAAASLQPQIDTASTSNHINPLFYGLPSSSSDVNLPLFSRFGSRISSSGFDLQLNNALGLGFSSGVLSNEASDNNGYRSGFGSNNMLLSSYTSTTTTTPAMSSLLLQQKFISGGLKNDADSSNTFQHGLSLTSLEQLQIASDHSSEAGMVALKDVKVELGQNNNRLEWNGGAFQSQIQHVGLYDPLLYWNNSATALGVWNDQAANIGSSVTSLI

SEQ ID NO: 199578 - protein, 348 aa, Glycine max
  Clone ID: PAT_MRT3847_22243C.1.pep
FFLPCSYFHHQLDDHKVFLGSNGGSSNNNNNKVLEKPGQDQLVQQQQQQQEAPKCPRCDSSNTKFCYYNNYSLSQPRHFCKACKRYWTRGGTLRNVPVGGGCRRNKRVKRPLITTNPSSAAIDTAASNNSSNSSSAPLQPPIDTASTSNHINPLFYGLPSSSSDVNLPLFSRFGSRISSSGFDLQLNNALGLGFSSGVLSNEASDNNGYRNWFGSNNTLLSSYTSTTSTTTPAMSSLLSSSLLQQKFMTDGVDSTNTFQHGLGLTPLEQLQMASDHSSEAGMVALKDVKVELGQNNRLEWNNGAACQSQIQHVGLYDPSLYWNNSAATALGVWNDQAANIGSSVTSLI

SEQ ID NO: 199579 - protein, 56 aa, Glycine max
  unsure (1)..(56): unsure at all Xaa locations
  Clone ID: PAT_MRT3847_22244C.1.pep
XXXFFFFFFFFFFFFFFFFFFLKTYNPRVIFQKICRNDSPDQHFTRIHLIRHTHYQ

SEQ ID NO: 199580 - protein, 99 aa, Glycine max
  unsure (1)..(99): unsure at all Xaa locations
  Clone ID: PAT_MRT3847_22245C.1.pep
TCTHMKCTFRGIWNGGGGDGHKNLFVASLFFDRSSEACSTDPNLPVVIYHPANIYDTLTHACQTXLRTPNXTLPLVHDLNLIYHRIDLIYHHTLLQDPY

SEQ ID NO: 199581 - protein, 145 aa, Glycine max
  Clone ID: PAT_MRT3847_22246C.1.pep
GGGSSSSRIASIPLELKKELSGVCRACFSADAVNKHVDFVREYKQDFERDLDPESITTFPSTLSQLTERLKHWKNVLQSNVEDRFPAVLKLEEESKVLRDFHVIDVEVPGQYFTDQEIAPDHTVKLDRVAADIPIVRRHGSSFRR

SEQ ID NO: 199582 - protein, 185 aa, Glycine max
  unsure (1)..(185): unsure at all Xaa locations
  Clone ID: PAT_MRT3847_22247C.1.pep
LAYYIYPIQLNSESCARPLHVNCPNRTLVAETDKIYCYHTIPAYCVETADDCLHGDHYTSYIVAADVHHAFGAEYLHVLPNDIFVICVDGAVLSNISYYKIHGYGVDTFNTTLYDACVNDGNAXALSETLKNHNELWYLGCTSICLSRLTLYNMPLLNHXLNXAGYHTWEKLILKDPQDPCSAYA

SEQ ID NO: 199583 - protein, 165 aa, Glycine max
  unsure (1)..(165): unsure at all Xaa locations
  Clone ID: PAT_MRT3847_22248C.1.pep
PRVRPRRTAARRRQKGTPDCSCTIKCTYDLIKSIQKKQEIEQVICFLKGLGEVYGTAKSNILMMDPLPSINKAYALVLQQEGQLQGNGTSDSKVFFTSSNQGRGNGILGRGDENAGRERGHKYTSKQCTYCDKFGHTVDPRYSXHGFPLGFKPRNNSIINNFVAP

SEQ ID NO: 199584 - protein, 45 aa, Glycine max
  Clone ID: PAT_MRT3847_22249C.1.pep
EDFLTYQIHIRLLGTSSSQNHDQQSRYKNFQFTVIPRLAIRALFL

SEQ ID NO: 199585 - protein, 65 aa, Glycine max
  Clone ID: PAT_MRT3847_2224C.1.pep
HSYKASISIEAETYLRPAGGNKHPVPQGRQVKNCLPKRDRHNSPPSRFVNYDTLGSSGCPEMHTE

SEQ ID NO: 199586 - protein, 55 aa, Glycine max
  Clone ID: PAT_MRT3847_22250C.1.pep
LKSVLAPNQIALIKSLVLEESIKLLLNFDYTKRAHTLLSFIFPPLINRHISYGFF

SEQ ID NO: 199587 - protein, 84 aa, Glycine max
  Clone ID: PAT_MRT3847_22251C.1.pep
LKYDTYRFSINICYYYLYIIGFVLSMYLCYDSVCSYTRVYFVYIIVVVVIITIVVVVFAVVVIFFIILYYIWCYRSIRLTSYSY

SEQ ID NO: 199588 - protein, 87 aa, Glycine max
  Clone ID: PAT_MRT3847_22252C.1.pep
THPFRGYITTEGETGGILCMEHGVLPLTEPRNRNIVTKHSPHHLSILLPYEYYHGSCFDIANTTPVPKPNTPLYPITHRKLTSLINC

SEQ ID NO: 199589 - protein, 53 aa, Glycine max
  Clone ID: PAT_MRT3847_22253C.1.pep
RMHKSLRCSSSMIIQNRKKVSMKVPSSMTVMNRVMQDLLDSGPRGKQAQVHKV

SEQ ID NO: 199590 - protein, 259 aa, Glycine max
  unsure (1)..(259): unsure at all Xaa locations
  Clone ID: PAT_MRT3847_22254C.1.pep
GVEVTNEVNSWAEKETNGLVKDLLPPGSVDNSTRLIFANALWCKGAWFYKFDASITKDYDLHLLNGSSVKVPFMTSKKKQFIMAXNSFKVLGLSYKQGKDKRQFTMYFFLPETKDGLLALAEKLASXPGFLERKLPNQKVEVGDFRIPRFKISFGFEVSNVLKELGVVLPFSVGGLTEMVDSPVGQNLCVSNIFHKSFIEVNEEGTEAAAATSATIRLRSAMLPTKIDFVADHPFLFLIREDLTGTVLFIGQVLDPRAG

SEQ ID NO: 199591 - protein, 389 aa, Glycine max
  Clone ID: PAT_MRT3847_22255C.1.pep
MDLRESISNQTDVALSITKLLLSKEARDSNLVYSPLSLHVVLSIIASGSKGPTLDQLLSFLRSKSTDHLNSFASQLVAVVLSDAAPAGGPRLSFADGVWVEQSLSLHPSFKQLVSAQYKATLASVDFQTKAVEVTNEVNSWAEKETNGLVKDLLPPGSVDNSTRLIFANALYFKGAWNEKFDSSITKDYDFHLLDGRSIRVPFMTSRKNQFIRAFDGFKVLGLPYKQGEDKRQFTMYFFLPETKDGLLALAEKLASESGFLERKLPNNKLEVGDFRIPRFKISFGFEASNVLKELGVVLPFSVGGLTEMVDSAVGQNLFVSDIFHKSFIEVNEEGTEAAAATAATIQFGCAMFPTEIDFVADHPFLFLIREDLTGTVLFIGQVLNPQAE

SEQ ID NO: 199592 - protein, 480 aa, Glycine max
  unsure (1)..(480): unsure at all Xaa locations
  Clone ID: PAT_MRT3847_22256C.1.pep
EVTKGYEHLMPLPQRAPAVSRGVGPPLVDAPGPAIIMGPGGVRAEAGSWVEEQLSERISKKGQVNLFETTIRVLGGLLSAYHLSGGEKGTNLTHAGPKPAVYLEIAKDLADRLLSAFTASPTAIPFSDVILHEKSAHPAPGGLSSTSEVSTLQLEFNYLSQISXGDQKYSLEAMKVMEHMKTLPKIEGLVPIYISPHSGEFSGENIRLGSRGDSYYEYLIKVWLQSGASSNTNTSFLYEMYKEAMNGVRHLLVRKSIPNGLVFVGELPYGSNSGFSPKMDHLVCFLPGTLAIGATKGLTKKQAMENNMLNFEDLENLKLAEDLTKTCFEMYAVTSTGLAPEIAYFHTEEFSEEGHDGGNKSSEFVNDIIIKPADRHNLLRPETVESLFVLYRITEDPKYREWGWQIFEAFENHTKVDTGGYCSLDDVTSVPPHRRDKMETFFLGETLKYFYLLFADSSLIPLDKFVFNTEAHPIPINLKK

SEQ ID NO: 199593 - protein, 91 aa, Glycine max
  Clone ID: PAT_MRT3847_22257C.1.pep
SYIPIFKNLLTNICKSKELYKNMNSLEAPFFRAAIKGAITSCIQYPLSNLNLITIQTTPFPIHIQPHLNKFVPVIPIHTTIPALKELSFTT

SEQ ID NO: 199594 - protein, 112 aa, Glycine max
  unsure (1)..(112): unsure at all Xaa locations
  Clone ID: PAT_MRT3847_22258C.1.pep
MPPFSPFLKDEHEMLTRKLDNLDSLKMRGPPYESNHLIXAQNVDPPKTITVPDGFDYKLXIKDDFNRIXLGGKTTAYKFVDFECRWLGYRGXKKKDIYLIEDNCSAAGETSG

SEQ ID NO: 199595 - protein, 93 aa, Glycine max
  Clone ID: PAT_MRT3847_22259C.1.pep
TVFQRAMQGFTEKIVGMMKSERLFESQGGPIILSQIENEYGAQSKLQGAAGQNYVNWAAKMAVEMGTGVPWVMCKEDDAPDPVVSILTLPRAE

SEQ ID NO: 199596 - protein, 55 aa, Glycine max
  unsure (1)..(55): unsure at all Xaa locations
  Clone ID: PAT_MRT3847_2225C.1.pep
RKQASILSTALFFFFFFFFFXGTKRRPFFYQALNNTTIKGPIILYTKTHMFSQLQ

SEQ ID NO: 199597 - protein, 86 aa, Glycine max
  Clone ID: PAT_MRT3847_22260C.1.pep
RHGGHSNLVIFRHNLGTEAPICFIDDHNMNGIIIVIFCSQCLFTFFMVRIICSPNCKYKGYSKPIHKIRQLFSETYNQCLLVTPNC

SEQ ID NO: 199598 - protein, 80 aa, Glycine max
  Clone ID: PAT_MRT3847_22261C.1.pep
CGPPPIDGVYTPPPPHKINFPYPLMFHISFYSPPGLGSVSLSLGPTLTTLVASIWSSTFLICSCFDHWLSFGSKHHTTFF

SEQ ID NO: 199599 - protein, 286 aa, Glycine max
  unsure (1)..(286): unsure at all Xaa locations
  Clone ID: PAT_MRT3847_22262C.1.pep
MTAPTSSSLWLAPNPSKRWGELFFLLYTPFWLTLCLGIVIPFNLYEKFTELEYLLIGLVSAVPAFVVPLLLVGKVDRSISWKDRYWVKASLWIIIFSYVGNYFWTHYFFTVLGASYTFPSWKMNNVPHTTFLLTHVCFLFYHVSSNMTLRRLRHFIADLPEKLKWATEAAWILALAYFIAYLETLAISNFPYYQFVDRDSMYKVGSLFYAIYFIVSFPMFLRIDEKPGNKWYLPRVAVDALGAAMLVTIILDLXWRIFLGPIVPIADTKQCPQVGLPWFTGHANLT

SEQ ID NO: 199600 - protein, 120 aa, Glycine max
  unsure (1)..(120): unsure at all Xaa locations
  Clone ID: PAT_MRT3847_22263C.1.pep
WWVVPAKVAFDQXTAWSALWXSIYYTVVALLRLDPPMSILNELKATFFPMLTAGWKLWPFAHLITYGVIPVEQRLLWVDTIELIWVTILSTFSNEKSEARNSQSMVPSEVKSTSVYPPEE

SEQ ID NO: 199601 - protein, 51 aa, Glycine max
  Clone ID: PAT_MRT3847_22264C.1.pep
RVAVDALGAAMLVTIILDLWRIFLGPIVPIADTKQCPQVGLPWFTGHANLT

SEQ ID NO: 199602 - protein, 60 aa, Glycine max
  Clone ID: PAT_MRT3847_22265C.1.pep
CHLIHSRCATSNSNCHWCCLNHQFAALSSNLAPPFPLCFKLMSTSLKSNDKCFKLMNTLA

SEQ ID NO: 199603 - protein, 58 aa, Glycine max
  Clone ID: PAT_MRT3847_22266C.1.pep
LKQKSQKLERVISYSTKILALQINQNPYLEIYTPPPSVMYNITDQNRGQKRQKMLYIP

SEQ ID NO: 199604 - protein, 73 aa, Glycine max
  Clone ID: PAT_MRT3847_22267C.1.pep
VHENHMIKMKKKKIQWKRQIVNTPIANNEGDSFCTGFLKFSLFNYEFNNKSLAFAHLFRKKKIKKNDFTRRGM

SEQ ID NO: 199605 - protein, 191 aa, Glycine max
  Clone ID: PAT_MRT3847_22268C.1.pep
MDVGAGDDHSPEAAISRWKFAVSRQYQHMLDKTTPHVLRRWIGCLVVAAVYVLRVYLVQGFYIVSYALGIYILNLLIGFLSPQVDPEISDGPTLPTRGSDEFRPFVRRLPEFKFWYSITKAFCIAFVMTFFSAFDVPVFWPILLFYWVVLFTLTMRRQISHMIKYKYVPFSFGKQRYAGKRAAEGTSPTLD

SEQ ID NO: 199606 - protein, 44 aa, Glycine max
  Clone ID: PAT_MRT3847_22269C.1.pep
HDNLFSKTRGSKEKGHILCKDLRTQGPLTWCNSFSFKGRNYFYT

SEQ ID NO: 199607 - protein, 61 aa, Glycine max
  Clone ID: PAT_MRT3847_2226C.1.pep
MLSRRHRWHALRILFKAAVFKNSEGTWHKVGRSWGPTFGNWLCTTLGIYQTHTISDPAKRS

SEQ ID NO: 199608 - protein, 36 aa, Glycine max
  Clone ID: PAT_MRT3847_22270C.1.pep
TIPNRSGKGLRPRSTKIAMNGLHSPSVRRDEGSLEP

SEQ ID NO: 199609 - protein, 235 aa, Glycine max
  Clone ID: PAT_MRT3847_22271C.1.pep
MEYLGIDLSCAVGSLRHGQFPEKDCLLPLISKLLGYAIVAASTTVKLPQIMKILKHQSVRGLSMISFELEVIGYTIALAYCLHKGLPFSAYGELLFLLIQALVLVAIIYYYSRPLHAITWIRALLYCAVAPTILAGQIPRVRFEALYASQHAIFLFARIPQIWQNFSNKSTGELSFITSFMNFGGSMVRVFTTIQESAPKSVLLGYAIGVATNFTILSQIIAYQKPQVGKEKKTK

SEQ ID NO: 199610 - protein, 235 aa, Glycine max
  Clone ID: PAT_MRT3847_22272C.1.pep
MEYLGIDLSCAVGSLRHGQLPEKDCLLPLISKLLGYAIVAASTTVKLPQIMKILKHQSVRGLSMISFELEVIGYTIALAYCLHKGLPFSAYGELLFLLIQALVLVAIIYYYSRPLHAITWIRALYCAVAAPTVLAGHIDPLLFEALYASQHAIFLFARIPQIWQNFSNKSTGELSFITSFMNFGGSMVRVFTTIQENAPKSVLLGYAIGVATNFTILSQIIAYQKPQVGKEKKTK

SEQ ID NO: 199611 - protein, 71 aa, Glycine max
  Clone ID: PAT_MRT3847_22273C.1.pep
QRNFATSGRSPSFFWVSKQRCARKKKKNWLKKKKGGGEVDPYLRSPAQTLALPPPADADEAPAGPPYTSDG

SEQ ID NO: 199612 - protein, 77 aa, Glycine max
  Clone ID: PAT_MRT3847_22274C.1.pep
KKYSHCLASRNYVPKCQLYSEAHHFHFPQTENFGKFPCSYFERCGLLVMKFQGQEHQHSPFIGVLALASQCKKQFFQ

SEQ ID NO: 199613 - protein, 61 aa, Glycine max
  Clone ID: PAT_MRT3847_22275C.1.pep
TLAIENLRLSHGYYVLSMLWDHTIYEPCTTSLTNLLSPSYDYINAESLISCTETFYGQSFF

SEQ ID NO: 199614 - protein, 46 aa, Glycine max
  Clone ID: PAT_MRT3847_22276C.1.pep
QTTLVSDLPESLNISLSFISRALHTTRTVPAILVTLLSVQKPLCDL

SEQ ID NO: 199615 - protein, 97 aa, Glycine max
  Clone ID: PAT_MRT3847_22277C.1.pep
EAMEKENEEMERKRREEELIHEREWEERMNCKRLDWNKMVDEMLSQHLAEMGQMQTHYLHEQQTLTNQLIAIFSHWPAQPYGLYDHASASNHYLSQM

SEQ ID NO: 199616 - protein, 124 aa, Glycine max
  unsure (1)..(124): unsure at all Xaa locations
  Clone ID: PAT_MRT3847_22278C.1.pep
CVPRTPTSTGSIRLGIKYLPPGGSAIYIPAATKGEGPLVLPLHRFHDPLDSWSHQTVSLXKLGTAANAPHLRGYGDTEAPPAVPNDSCFHIVGDRVARIDSMRDQQVLLVAHDWGATLGEDVCM

SEQ ID NO: 199617 - protein, 110 aa, Glycine max
  Clone ID: PAT_MRT3847_22279C.1.pep
KHGFSPLVCPFGLSPLKFLFFCSGGYLQCLTKNVFFFAFKIDLAPNHWFFFMPLEPSFWAFNIIKFLKLLISFPNSSFAVVRTNADKVRIPSFLFPLVGKKKKKKKKKKK

SEQ ID NO: 199618 - protein, 79 aa, Glycine max
  Clone ID: PAT_MRT3847_2227C.1.pep
ADVTQNTYVCSDVGVKDRREWDLHGIVVVVRDFSYPHEDVIGIEFHDVSVSDQGGLQYRLFDTLQRSVSRSCSSVDVLA

SEQ ID NO: 199619 - protein, 41 aa, Glycine max
  Clone ID: PAT_MRT3847_22280C.1.pep
KQQKNNRRCNINSYLTYKLDFSPKTIIPTLTSFLCIPNLEV

SEQ ID NO: 199620 - protein, 87 aa, Glycine max
  Clone ID: PAT_MRT3847_22281C.1.pep
LTLIRASYNVQALSNGVYKSIKHRVVAAEKVERFSMAYFYSRSEEAMIQSQIKPPIYRRFTLREYRQRTEKDVKQTGDKVGLSRFLL

SEQ ID NO: 199621 - protein, 261 aa, Glycine max
  unsure (1)..(261): unsure at all Xaa locations
  Clone ID: PAT_MRT3847_22282C.1.pep
MAPKKGVKGSVVAAKKKVQEKVTNPLFEKRPKQFGIGGALPPKRDLTRFVKWPKNVQIQRKKRILKQRLKVPPALNQFTKTLDKNLATNLFKMLLKYRPEDKAEKKERLLKRAQAEADGKPVEAKKPIVVKYGLNHVTYLIEQNKAQLVVIAHDVDPIELVVWLPALCRKMEIPYCIVKGKARLGTIVHKKTASVLCLTTVKNEDKMEFSRILEAIKANFNDKYDEYRKKWGXGGIMGSKSQAKTRAKEKLLAKEAAQRMN

SEQ ID NO: 199622 - protein, 158 aa, Glycine max
  Clone ID: PAT_MRT3847_22283C.1.pep
NSHLQLSPPNRAPPPLRSAHYFIYLWRYIHTKRGGGVGSEQGKLFIGGGSWGTRGEKVKGHFGDYGEGLRTSVMREKNTGKARGFGFGGFAEPNILDRGLGDKHVIDGGTGEAKKGFSREEQQISVTSRGGNSNSGVSSGDGGDITTKKIFVGGVRPT

SEQ ID NO: 199623 - protein, 41 aa, Glycine max
  unsure (1)..(41): unsure at all Xaa locations
  Clone ID: PAT_MRT3847_22284C.1.pep
MXXSTEVEFXSQIHDHDLILGSSFXSYCFEXSQKGSKAPXK

SEQ ID NO: 199624 - protein, 69 aa, Glycine max
  Clone ID: PAT_MRT3847_22285C.1.pep
RTLSIDVIISLRRHAGHHERHRAYARVRRHRAYARAGPHRAFRRPCARVSHQQRACAQHQRECSLPSRR

SEQ ID NO: 199625 - protein, 116 aa, Glycine max
  Clone ID: PAT_MRT3847_22286C.1.pep
PTRPLKDLPGSSGIMQTMGRDQRLKYAASFESCYFFRLLYYAGTQYPIMGAIRMTYPYQYELYKRVDESPGKEKYAILSTFPERPTTDEINDAFEGKPSKDPRKTSGIWGFLNGIL

SEQ ID NO: 199626 - protein, 48 aa, Glycine max
  Clone ID: PAT_MRT3847_22287C.1.pep
QLLVIFKMKWLNFIIYSHLPKYEGLNSHHQCAVQKLGETMNLVKHPIM

SEQ ID NO: 199627 - protein, 47 aa, Glycine max
  Clone ID: PAT_MRT3847_22288C.1.pep
PFPNLGLLHWFFFYQVKMRTIIGPKDSSFVSGSLGKKGYINPPFCFL

SEQ ID NO: 199628 - protein, 115 aa, Glycine max
  Clone ID: PAT_MRT3847_22289C.1.pep
SYNFERHIITHHKLSYKNTRVEDVVKQRQFHILLLSMDQRANPFMNSNVLSDMYNVGCMSLFVVTLTKFLRGMDAGRLDAMVLHREQCTRRIHLPYCKFREVAVFPSVEYREVLS

SEQ ID NO: 199629 - protein, 89 aa, Glycine max
  Clone ID: PAT_MRT3847_2228C.1.pep
LLTTQVPIPFQYLVGKVAARTTQPSPAISVPAFSELFAQQRHPFLLKLRICSPQAVSSARLRRLATAVYHFCIFACHSPCMFVLHGYCL

SEQ ID NO: 199630 - protein, 49 aa, Glycine max
  Clone ID: PAT_MRT3847_22290C.1.pep
LELPSLNNPITRTEMHYQKPAALNGEPFPQRAIHREAVNYGGDHPRCIE

SEQ ID NO: 199631 - protein, 74 aa, Glycine max
  Clone ID: PAT_MRT3847_22291C.1.pep
QVLSAALEIGEDENVEVDPKFRALVAVGSLMLEGLVRKTALDFDVVNIAKAAKGSKEGKIAEIGSDIELLTKRG

SEQ ID NO: 199632 - protein, 100 aa, Glycine max
  Clone ID: PAT_MRT3847_22292C.1.pep
SHFNFLFFLFIKIIFSVLRFGKGWVLIQVWAMDKRRIGRGWGFTVTPQNQKQTHVLLLQQTSFVVVVSDSGIKVKTSSKRETPPCPGFPRRKNRKKKMKK

SEQ ID NO: 199633 - protein, 46 aa, Glycine max
  Clone ID: PAT_MRT3847_22293C.1.pep
LCTNLLSILKSIISKYYQILFKYLFSKLASHRNKRFLFSIITSETT

SEQ ID NO: 199634 - protein, 54 aa, Glycine max
  Clone ID: PAT_MRT3847_22294C.1.pep
VHGMAVIDGMEWNVIFNNALIDAYGKCREPNLWVSVFCWMPERNAVSSTLMVVA

SEQ ID NO: 199635 - protein, 163 aa, Glycine max
  Clone ID: PAT_MRT3847_22295C.1.pep
MNAKVAFELSERIPHLSLRMKEHCHRALVFATRLKKLGLKVIYPGLEDHPQHKLLKSIANREYGYGGLLCIDMGTVERANLLMAHLQNDAQFGFMAVSLGYYETLMSCSGSSTSSEMTEEEQKLAGISPGLVRMSIGYIGTLEQKWSQMEMALERFQEKEPLV

SEQ ID NO: 199636 - protein, 263 aa, Glycine max
  Clone ID: PAT_MRT3847_22296C.1.pep
MAESAVTNRKRSSGDDAVSENDRKRKNMVARNMDPAEALALTRHEFGEHGGVNMSIEASATFTVMEPETLGRMFAGELGPDRDFFIYSRHFNPTVVNLGRHMAALEGTEAAYCTASGMAAISSVLLQLCSTGGHVVASTTLYGGTHALLTHFLPGKCNITTTFVDIADLESVESAIVEGKTNVLYFESMANPSLKVADIPELCRVGHAKGVTVVVDNTFAPMVISPARLGADVVVHSISKFISGGADIIAGAVCGPASLVNSM

SEQ ID NO: 199637 - protein, 144 aa, Glycine max
  unsure (1)..(144): unsure at all Xaa locations
  Clone ID: PAT_MRT3847_22297C.1.pep
MDVDAQPTMDETILVGDDLMTGPPSPVVPPEIASHVLQGVDLCDGILRNLFLCLQINDIEPFCQDEIALYKQCAERRDKEIRKRLQDSEFKLGSSMPLDEAKGRASQLEAEVTSLERRLILANGVECVXGFRLTWSLHILLNVN

SEQ ID NO: 199638 - protein, 440 aa, Glycine max
  Clone ID: PAT_MRT3847_22298C.1.pep
MAESAVVNRKRSGTDDVVSENDGKRKNVVAPDMDPAAALALTRHEFGEHGGVNMSIEASATFTVMEPETLCRMFTGELGPDRDFFIYSRHFNPTVLNLGRHMAALEGTEAAYCTASGMAAISSVLLQLCSSGGHVVASTTLYGGTHALLTHFLPGKCNISTTFVDISDLESVESAIVEGKTNVLYFESMANPSLKVANIPELCRVGHAKGVTVVTDNTFAPMVISPARLGADVVVHSISKFISGGADIIAGAVCGPASLVNSMMDLHDGSLMLLGPTMNAKVAFELSERIPHLSLRMKEHCHRALVFATRLKKLGLKVIYPGLEDHPQHELLKSIANREYGYGGLLCIDMETVERANLLMAHLQNDAQFGFMAVSLGYYETLMSCSGSSTSSGMTEEEQKLAGISPGLVRMSIGYIGTLEQKWSQMEIALDRFQEKQPLV

SEQ ID NO: 199639 - protein, 76 aa, Glycine max
  Clone ID: PAT_MRT3847_22299C.1.pep
GHFGSYYYLAPILTSHPASCLYTLLFVLALCTPVASKQVSAPYCCYLLPAHRLRQSLVFANSFLFNRFSQLLLCNV

SEQ ID NO: 199640 - protein, 76 aa, Glycine max
  unsure (1)..(76): unsure at all Xaa locations
  Clone ID: PAT_MRT3847_2229C.1.pep
GFIXCLCLASISGVSLDGHFQHNLVRNVTQRLLYDIWRFPSLPKMCFSRGSFFQCRARSITKEKFPSVMSFSSGVD

SEQ ID NO: 199641 - protein, 91 aa, Glycine max
  Clone ID: PAT_MRT3847_222C.1.pep
LVPLVRTRPRAEFGTRPVPGPGILSMANAGPNTNGSQFFICTAKTQWLDGKHVVFGKVVEGYNIVEEMENSPTDRNDKPKNAIVIDDCGQL

SEQ ID NO: 199642 - protein, 60 aa, Glycine max
  Clone ID: PAT_MRT3847_22300C.1.pep
PKNTHPRLFEFFQGCGHQDPTQKPNFFEVIKIFQQIPKKVNVPKNKASHGFFSAFRGAPP

SEQ ID NO: 199643 - protein, 161 aa, Glycine max
  Clone ID: PAT_MRT3847_22301C.1.pep
MDVDAQPTMDETILVGDDLMTGPPSPVVPPEIASHVLQGVDLCDGILRNLFLCLQINDIEPFCQDEIALYKQCAERRDKEIRKRLQDSEFKLGSSMPLDEAKGRASQLEAEVTSLERRLILANGVEGIEGFRQRWSLHGRLTDSKNRLQFLKQGLESRKKG

SEQ ID NO: 199644 - protein, 138 aa, Glycine max
  unsure (1)..(138): unsure at all Xaa locations
  Clone ID: PAT_MRT3847_22302C.1.pep
TPPLPQSARYGNVSYRTWHEKMSNSAESLIQTLLPENFHPATVELAPYFADSFGNSSRIDYGTGHETNFAAWLYWLARLGVIGEEDFPAVGARGFVKYLDLMRKLQLQYWLEPGWAHGVWGPEDYXFLPFIFGGFQVD

SEQ ID NO: 199645 - protein, 79 aa, Glycine max
  unsure (1)..(79): unsure at all Xaa locations
  Clone ID: PAT_MRT3847_22303C.1.pep
AFFSSEWDQQLQGLSRXSXXXXCXWXPSSGAYVAAMAAASCVPTLLPQVCPXPXLPDLIPKGGAPXCLQNPTLMXTVXL

SEQ ID NO: 199646 - protein, 67 aa, Glycine max
  Clone ID: PAT_MRT3847_22304C.1.pep
KKQPFLKKFKWFNNRQQKERNPEQKEQANLFTCQPQRQPMLYFVVLLRIMVGSEFHFSFPIFFFVFW

SEQ ID NO: 199647 - protein, 132 aa, Glycine max
  Clone ID: PAT_MRT3847_22305C.1.pep
VTRTENRTNSRGNSVKKVGIVEGNEKDNQNASPHAATLIPWLKPCSSSNNTYITISNTLSSSSSSSPSSTHNQTHNETVQETIQLMPMITDKNAYKHEEDQANDEVKEQMAEHVTIALHNAWPGTTDDHADD

SEQ ID NO: 199648 - protein, 93 aa, Glycine max
  unsure (1)..(93): unsure at all Xaa locations
  Clone ID: PAT_MRT3847_22306C.1.pep
MGSALWTCLSLLTLASASFAAKPITXIKVPIARNKMPTCAFDYIRNRNGGTEMQRQLDTXPRTGIQSSRSYLVGQLSMYIQXVAGESAGTVIA

SEQ ID NO: 199649 - protein, 103 aa, Glycine max
  unsure (1)..(103): unsure at all Xaa locations
  Clone ID: PAT_MRT3847_22307C.1.pep
EHMAGTSRHSLPGLHYGNTRDVLTHNIVPPDPTCRSVKCSNDLFEYMGRKMXYLPFESRDFLMYPFIDALKALETRGSPLVIFPGTKLKPLAVREEDPFLLLP

SEQ ID NO: 199650 - protein, 168 aa, Glycine max
  Clone ID: PAT_MRT3847_22308C.1.pep
MPKYYCEYCGIYLTHSSPSGRKQHSKGRKHISSKVEYYSQFLSEANPMKNVNPFIRTDTLPLMMGMLNPGSIMPGGPLNMPSINVPGIMPSNINLPMPGMPGGMPGQGMPMGQPGMMMPGMMPGPMGFPPMGAGGPMPGMMPGMGPGGMPPMGAGGPGGPGPMPGMMP

SEQ ID NO: 199651 - protein, 33 aa, Glycine max
  Clone ID: PAT_MRT3847_22309C.1.pep
YLCGLRKKFFLGLCKKNSNRGFCIKLKDCLCKF

SEQ ID NO: 199652 - protein, 77 aa, Glycine max
  Clone ID: PAT_MRT3847_2230C.1.pep
ASNARIYFQLITKKRAFIKRLTMAESTRSKSNWDRLEEVIVKLASNQIHVIEKLDDLMHPITVLENTSPLVASPFSS

SEQ ID NO: 199653 - protein, 147 aa, Glycine max
  Clone ID: PAT_MRT3847_22310C.1.pep
QKEVLEGKLQSATDRIESLMNQLQESEKTIDSLRLEIQSFKESNGKLENEIRNQQLIISNPDAHHSEEELKEARNKVLALEVELEKKNSNCKELEAKCIELQFQLESMSKECSNHDIIEKDKPLHNVSSSLSSPFSCQLLVRLLVLM

SEQ ID NO: 199654 - protein, 204 aa, Glycine max
  Clone ID: PAT_MRT3847_22311C.1.pep
AEDIWMVGVIDEIRMPLTENDHNPILIDTKTRSRDTLPAEPQRRNGRLQLMCYKYLWDNLVADDFPSEKFFTYFGLNPQNNLCEDLKVIGADSGFSASTLDDAVRYYRNTCRMLAPAHDQLLLRYEYQKDHSLLGEVKFAYDPDWLKNQLRSCLEFWLGEQEATYTPEEERWKCQYCQFARVCPAYTNSKGTESPKRNYSNIKG

SEQ ID NO: 199655 - protein, 69 aa, Glycine max
  Clone ID: PAT_MRT3847_22312C.1.pep
LACYEQWLKPCWHQCLFTCSEQSIQLRLLNSLKLFHLFTLTLTLPHKHLFTHQQVLLTSIITTTTTLQY

SEQ ID NO: 199656 - protein, 100 aa, Glycine max
  Clone ID: PAT_MRT3847_22313C.1.pep
SRPTTFSSLPHSYPVIPIPRMAVTLFGGFMIPIPIPACRLSTKPPSSYPHGTAFYLLGTTSCPGSRILLLPIKSLAPLSSTALPLSQLPPPPPKKEDVIQ

SEQ ID NO: 199657 - protein, 81 aa, Glycine max
  unsure (1)..(81): unsure at all Xaa locations
  Clone ID: PAT_MRT3847_22314C.1.pep
YGGAHVENYNTCDQVEHQNSKHRILSWRKRKLHFRSSKVKGELLLKKNTXEEGGHDIDYDRRLLSSSTCSFSSILTSAFVF

SEQ ID NO: 199658 - protein, 106 aa, Glycine max
  unsure (1)..(106): unsure at all Xaa locations
  Clone ID: PAT_MRT3847_22315C.1.pep
QAQIKMYVLLEGSRSNVAHTAWALMGLIHVGQADRDPMPLLRAAKLLIYSQLXKGYLSQQGFTGVFMKHCMLHYPMYKDIYPMWALPKYRXRRVPFPFTQVSFSMV

SEQ ID NO: 199659 - protein, 77 aa, Glycine max
  Clone ID: PAT_MRT3847_22316C.1.pep
KAGHLFLYTTKVCQNKISLKANFSYPFWVNHSKTPKLSDNFILTLDCFTTKSGLHKYNCHKSYTLGGDLLIIRGNAH

SEQ ID NO: 199660 - protein, 48 aa, Glycine max
  Clone ID: PAT_MRT3847_22317C.1.pep
INPLIGTLTSFLWVAGPPSETMVFPLKSGRFRNSQIPCFGTRIWINFG

SEQ ID NO: 199661 - protein, 76 aa, Glycine max
  Clone ID: PAT_MRT3847_22318C.1.pep
FIHFIPYNTGSHSIIKRNDFRQAKNLFRSLTLGFYSLGERPRFYLPRGGDQGIKTAPLTVCSKTPPNARVHDRDQG

SEQ ID NO: 199662 - protein, 94 aa, Glycine max
  Clone ID: PAT_MRT3847_22319C.1.pep
VDFYIIQSIQLECLISFLVFSFLSQNQTCLTHALTVTVLTRLSSLMETAIVLLYRLILVTFILLSLIFQQLIIIASSSLSLISLSRTAPLFINE

SEQ ID NO: 199663 - protein, 51 aa, Glycine max
  Clone ID: PAT_MRT3847_2231C.1.pep
FSAATTVLPFTTGAAKPGPGSITRVLAAVLRSADNTRSSTVRINYVLDFRI

SEQ ID NO: 199664 - protein, 64 aa, Glycine max
  Clone ID: PAT_MRT3847_22320C.1.pep
TADRNKISKVTLKVSSDDTQKRAEHGSSMSTHNLSSSQNQVVTYKKKPALCAKILKTTSGTWPQ

SEQ ID NO: 199665 - protein, 34 aa, Glycine max
  Clone ID: PAT_MRT3847_22321C.1.pep
VCSSCQGGRWAHFCLRIYDQVSLSRLRDRLHSYA

SEQ ID NO: 199666 - protein, 65 aa, Glycine max
  unsure (1)..(65): unsure at all Xaa locations
  Clone ID: PAT_MRT3847_22322C.1.pep
XXXYXXXXKSLNXSFNLSXRVCXHXYXXCXFXNPIPLKXPXEXHXQFPXXGRSQXRXSSXVRRSC

SEQ ID NO: 199667 - protein, 318 aa, Glycine max
  unsure (1)..(318): unsure at all Xaa locations
  Clone ID: PAT_MRT3847_22323C.1.pep
QDDTDTHSSHLTSSGAVGHMFSSSPGYSTDLHHSSFSSHEKQPRNTHFISQSLSNMASLPLSYSSNSEPIPSTTSTPYSNGNSVSWHTDSLPSFLDFPANTSIGNSQVESSDCNIMATEEYSKRNDWQEWADQLISDVDPLTSNWNDLLADNIQDLEPKVAKSSSQLPIGHQSQSHQQLPASSGENRVGVAPTSSTNSAPAKPRMRWTPELHEAFVEAVNQLGGSERATPKGVLKLMKVDGLTIYHVKSHLQKYRTARYRPESSEGAMEKKPSPIEEMSSLDLKXGIEITEALRLQMEVQKRLHEQLESQSGVSSTHA

SEQ ID NO: 199668 - protein, 253 aa, Glycine max
  Clone ID: PAT_MRT3847_22324C.1.pep
MYRSSNIVARVFDRQICTPAPGTSVHHARRFYENLVPSHTVYEVECPDHSFRKFTDDGQYLISFSRNHQELIVYRPRWLSFSCKDEDCDKHDLPSRAKRFDSFFSQLYCVPLASCNELICKDFFLYMESNQFGLFATSTAQIHDAPAVGGAVHGVPSIEKITFHLLRLEDGEILDKKVFSNDFVNLTHNMGVFLYDDLLAIVSLRYQTIHILQIRDSGNLVDVRAIGEFCREDDELFLNSNAQVSKLLVLTLL

SEQ ID NO: 199669 - protein, 188 aa, Glycine max
  Clone ID: PAT_MRT3847_22325C.1.pep
RGKKDRNLVYLLVYVDDIIITGRSNYLIQSLVHHLNSNFSLKQLGQLDYFLGIEVHHTPTGSVLLTQSKYICDLLHKTDMAEAKPISSPMVTNLRLSKNGDDLLSDPTMYRSVVGALQYPTITRPEISFAANKVCQFMSKPLESHWTVVKQILRYLKGTLHFGFRFGPASLSQLLSLQAYCDADWAAD

SEQ ID NO: 199670 - protein, 44 aa, Glycine max
  Clone ID: PAT_MRT3847_22326C.1.pep
GSSMKLLYDCYAAISITGAPTGALVRTLNGPYRAGRTTIPRFIL

SEQ ID NO: 199671 - protein, 53 aa, Glycine max
  Clone ID: PAT_MRT3847_22327C.1.pep
ARHSARLVREKTLEEDQSQMPVFNAPQARPTSCLSLLALSAPSSLSENSLTHV

SEQ ID NO: 199672 - protein, 196 aa, Glycine max
  Clone ID: PAT_MRT3847_22328C.1.pep
GVKWAIARSATALGLPTISGKDGKVTIDAGPPMEFPAPFGREMSKEEAFIAEMDAKTGASLKLTILNASGRVWTLVAGGGASVVYADAIASAGFASELANYGEYSGAPTETQTFQYARTVLDLMLRAPTHPDGKVLFIGGGIANFTNVASTFKGVIRALREVAPVLNEHKVQIWVRRAGPNYQEGLRHKAVCVSSA

SEQ ID NO: 199673 - protein, 116 aa, Glycine max
  Clone ID: PAT_MRT3847_22329C.1.pep
LPPGGHPQEGQLQRRGVRHHGKKPSKVKGTMHIKGGAVSVARVKHNPPAPKGEGTQIGIRNSPTDYGGKREKKPPVRKLPKGTCNPSPNPRAGHAHVPDKWAKPPREFFFKSHKKK

SEQ ID NO: 199674 - protein, 62 aa, Glycine max
  Clone ID: PAT_MRT3847_2232C.1.pep
KSEYYSPLRKYSSSKRIYFLQNKNIVLTSFSLSPYERGQFTTKQTSYSQAYQNLPLLLLYES

SEQ ID NO: 199675 - protein, 151 aa, Glycine max
  unsure (1)..(151): unsure at all Xaa locations
  Clone ID: PAT_MRT3847_22330C.1.pep
RSSKYIFTWWGGSGGPPMLPPPGAPPGGGLPGAAPPRGEKKPPCVPIPDGPPPRVWPVPLVEGPPTFPPXPGPPLPRPIFFVFAPPWGPGAFPVKRPARVSPLIWVGSLFSPGTLFSFCFPPVFCAPLLGDPPPPPGPARFFRGHPRGRAF

SEQ ID NO: 199676 - protein, 53 aa, Glycine max
  Clone ID: PAT_MRT3847_22331C.1.pep
MTEGKPLSAESHFHLDLQIQFYNGLGATPRPTFTTCVSLPRREIETLTDQVSH

SEQ ID NO: 199677 - protein, 61 aa, Glycine max
  Clone ID: PAT_MRT3847_22332C.1.pep
NSVEDSCHIFISILSTNCFTKFFFCLDKDNGAQRHLQRFMLIPERGDRGRSLCMDKYTRSC

SEQ ID NO: 199678 - protein, 89 aa, Glycine max
  Clone ID: PAT_MRT3847_22333C.1.pep
NSAPDLITTEYTRSNILYKHQIPFIVNYNRIHKVHDLLIKPHLRVFTPRRNNINNHEQFHFCYQPMLWIVLRKCITIFCKRSHTSYYSS

SEQ ID NO: 199679 - protein, 36 aa, Glycine max
  Clone ID: PAT_MRT3847_22334C.1.pep
NGVKKWIPELPHFAPGIPVGVIGTQLDSPKKQHFLG

SEQ ID NO: 199680 - protein, 37 aa, Glycine max
  unsure (1)..(37): unsure at all Xaa locations
  Clone ID: PAT_MRT3847_22335C.1.pep
ARTGSPPREAHFTLXPNAHRDKGQLKTHAASPESTHY

SEQ ID NO: 199681 - protein, 60 aa, Glycine max
  unsure (1)..(60): unsure at all Xaa locations
  Clone ID: PAT_MRT3847_22336C.1.pep
WLLVSNIEVAYRSKVGDNIEDKISHGNKCPPCVYEYPSAMSYQTKKNVIMRAYIVXLFFL

SEQ ID NO: 199682 - protein, 77 aa, Glycine max
  Clone ID: PAT_MRT3847_22337C.1.pep
APFLGAPRFGLYLSISKVGKPSGARPYLIGGQPGSSIRDLLKRLAIGKDWRPSRSDPGFNFGASSPVSYRPHSTPSL

SEQ ID NO: 199683 - protein, 63 aa, Glycine max
  Clone ID: PAT_MRT3847_22338C.1.pep
DFQNGPKRPVFFQLDGSLSKTWNFNFFQIGKGGHQELKAQILAGDLWGGIKNHFSGGKPVLGF

SEQ ID NO: 199684 - protein, 78 aa, Glycine max
  Clone ID: PAT_MRT3847_22339C.1.pep
INLFKDNKKPSKGFGLKFSPPSSEDIVLLDEDDFQPLEEVWGHNLIGYVAGRFLGKKALLECFQKWGVKFSYSTHESG

SEQ ID NO: 199685 - protein, 66 aa, Glycine max
  unsure (1)..(66): unsure at all Xaa locations
  Clone ID: PAT_MRT3847_2233C.1.pep
LRQMTNAHLMNHLRDLKAELALLAKANVTFCAPNKLFXARGLRRHIAQALTLICQKQKAKFLYAYK

SEQ ID NO: 199686 - protein, 80 aa, Glycine max
  unsure (1)..(80): unsure at all Xaa locations
  Clone ID: PAT_MRT3847_22340C.1.pep
FXXXVXLLXLTYXLLVXPFLRNASLLXXKXXSDXVAAAXGFGXDXTKPKXXFVERWTRGMXXGSYLXMQQPXSSIHYSLX

SEQ ID NO: 199687 - protein, 62 aa, Glycine max
  Clone ID: PAT_MRT3847_22341C.1.pep
QRASTRTFPALTLYYFIHQGGKSYCASTWSLRLWVYSGYAIIFLPTSFLSLSPPPPPPPPPP

SEQ ID NO: 199688 - protein, 55 aa, Glycine max
  Clone ID: PAT_MRT3847_22342C.1.pep
LLLPLAPSVSILIHHKWQQEVGGTTGYAASTLSTISLSETLGGKGAVHTRGGALT

SEQ ID NO: 199689 - protein, 63 aa, Glycine max
  Clone ID: PAT_MRT3847_22343C.1.pep
FVLRDLHYHSTDGPLSRLIHSLSRIKTRLNRQKCYNRNTDHQPRDWPIAIDSGHPFESTLPCL

SEQ ID NO: 199690 - protein, 56 aa, Glycine max
  Clone ID: PAT_MRT3847_22344C.1.pep
HRKVATATGQYIPRACYNQQVFFDLQSASRLKINMYCAWRNTLPFLNIGLLINKCI

SEQ ID NO: 199691 - protein, 121 aa, Glycine max
  Clone ID: PAT_MRT3847_22345C.1.pep
GEEFIGNLETAFSFSLVFQGSISISMSLHQTSFCFICSHLTSGQKEGDELRGNSNVMEILKKTRFPRVQNMGDESSPQTILDHDRIIWLGDLNYRIALSYRAAKALVEMHNWKVLLENDQA

SEQ ID NO: 199692 - protein, 142 aa, Glycine max
  unsure (1)..(142): unsure at all Xaa locations
  Clone ID: PAT_MRT3847_22346C.1.pep
VKEAKNLLAVMTKEGVKPNVVSYNTLMDGYCLIGEVQNAKQMFHTMVQKGVNPNVYSYNIMIDRLCKSKRVDEAMNLLREVLHKNMVPNTVTYSSLIDGFCKLGRITSALDLLKEMYHRGQPADVVTYTFLLDAXCINQNLD

SEQ ID NO: 199693 - protein, 217 aa, Glycine max
  unsure (1)..(217): unsure at all Xaa locations
  Clone ID: PAT_MRT3847_22347C.1.pep
EHPFETEEATKSVTEIXIDLGTTYSCVGVNTRXVHVEIIASDQGNRITPSRIAFTDSERLIGEAVTNVAAVNAQRTIFDAKRLIGRKLEDKEVQRDMKLVPYKSGNKDGKPYIQVKINDGETKVFSPEEISAMILTKMKETAEALLVKKINDAVGTVPAYFNDAQRQATNDAGVIAGLNVARIINEPTAAAIAYGLXKIGGDEDILVYDLAGGTFDV

SEQ ID NO: 199694 - protein, 88 aa, Glycine max
  unsure (1)..(88): unsure at all Xaa locations
  Clone ID: PAT_MRT3847_22348C.1.pep
IFXPSEXRXXWSPSPXAGTVAVXAXXILLXLLLLTXRHAXXGAGXGAGSLPPVPAXPGXPVIGNLLQXKEKKPXKTFTHMTRTTWAHX

SEQ ID NO: 199695 - protein, 76 aa, Glycine max
  Clone ID: PAT_MRT3847_22349C.1.pep
LVSPSQRTLHCGLHFVLCIHFSFLSIETTTYVMLPYAKALIPNWGTEFILPQAIYDEIFCFNAHHDLDHDYFSKVH

SEQ ID NO: 199696 - protein, 144 aa, Glycine max
  Clone ID: PAT_MRT3847_2234C.1.pep
MVIDYKDWQIPLGRRFRSLKLWMVLRLYGLDGLRSHIRNHIELAANFEELVRQDTRFKVVAPRTFSLVCFRLLPPPNSADHGNKLNSDLLDSVNSTGNAFITHTVLSGEYILRFAVGAPLTERRHVNMAWQILQDKATALLESL

SEQ ID NO: 199697 - protein, 104 aa, Glycine max
  unsure (1)..(104): unsure at all Xaa locations
  Clone ID: PAT_MRT3847_22350C.1.pep
LISSVLSRAQVLLLMSTSLNXSIHESPSPVEVVSTLTTHIRSIQQRIAXITEIIHVASLFHHYLLDDAYSRRCIGSLNFLMGKKFASFGXNFLLSSAWVALASF

SEQ ID NO: 199698 - protein, 92 aa, Glycine max
  Clone ID: PAT_MRT3847_22351C.1.pep
SICTHYYLSTYYNFAINSLFSSKVLLIIKLIYIYIYIYIFWIWLVACRWTKSSWAFLNEPPVTEAASNKYASQFHVASMGSSKFNPRDGISA

SEQ ID NO: 199699 - protein, 42 aa, Glycine max
  Clone ID: PAT_MRT3847_22352C.1.pep
MCEHTFQTIFITHSADALIILMPHEALHFSDGKDHSKMRNTL

SEQ ID NO: 199700 - protein, 49 aa, Glycine max
  Clone ID: PAT_MRT3847_22353C.1.pep
QANQNKNRTSVISFFSFTNLIPEMISHKIILCNMMSDYYIQPSMDLRSN

SEQ ID NO: 199701 - protein, 123 aa, Glycine max
  unsure (1)..(123): unsure at all Xaa locations
  Clone ID: PAT_MRT3847_22354C.1.pep
YIFVLSVAAATNALPYNVSNVSAGCTISQFSEVNNVVKNCKSIVVKSLSVPAGKTLELALXSGTTLTFQGTTTFQYQQWDGPLIHIHGSNLRVYGSGATLDGLGGKYWDGQGDKGIKKPKFFR

SEQ ID NO: 199702 - protein, 126 aa, Glycine max
  unsure (1)..(126): unsure at all Xaa locations
  Clone ID: PAT_MRT3847_22355C.1.pep
LEKKKKKKNKIKKKKKKKKGEGVVKNIANIILCVDPLYNDSYAGALIHTGLLHDSTDRDCLQNXPKFMTLLSPHPYILQIFHVFEDDQCLSIVMDLCQPLTLFYTRVYSSIQYYQAAALMKNLLEA

SEQ ID NO: 199703 - protein, 85 aa, Glycine max
  unsure (1)..(85): unsure at all Xaa locations
  Clone ID: PAT_MRT3847_22356C.1.pep
MSSTSRARTGSLASRVEVGEALKDQRISKXNCVMRSAQLHAEHDVTCSNHANRAFFQSSGMGTSQLKDDKANQPKESLRTVMYLR

SEQ ID NO: 199704 - protein, 97 aa, Glycine max
  unsure (1)..(97): unsure at all Xaa locations
  Clone ID: PAT_MRT3847_22357C.1.pep
RFLDHKLALLDAGDKYDICDXREIIARDALEEMAQIKRRDKPAKKXXYQNNEKLEXSYIRYLEKLGKIYEIREDFNTFLQKANKDLIAEVFHKKLDS

SEQ ID NO: 199705 - protein, 54 aa, Glycine max
  unsure (1)..(54): unsure at all Xaa locations
  Clone ID: PAT_MRT3847_22358C.1.pep
ICXLYINSFHQNLSRFCLPSPPSISKLMVPFELINSRRKYFSSFFFFCGIRCMS

SEQ ID NO: 199706 - protein, 107 aa, Glycine max
  Clone ID: PAT_MRT3847_22359C.1.pep
FPEEISANMKTEHHRRPSPSLTPILVKRAKPAAYFILLLLTYTLGYLSHHPSSTSLPLSPSSSPSPSSLEPIIRFSINTTEVNPFRVTTRCADPIPPESVRRTLVLS

SEQ ID NO: 199707 - protein, 72 aa, Glycine max
  Clone ID: PAT_MRT3847_2235C.1.pep
LGYIYKYLLVQRSGNLIVYPVVMLLIISFGEIFLLKAIYVFCLQFIACIDIIQLLKLRCCQFRRDFLAFTIM

SEQ ID NO: 199708 - protein, 148 aa, Glycine max
  Clone ID: PAT_MRT3847_22360C.1.pep
VVKKVFRVLPPGPLLLWARLAITDTTIDGYNVPAGTTAMVNMWAIGRDPEVWLDPLDFKPERFMGLEAEFSVLGSDLRLAPFGSGRRTCPGKTLGLSTVTFWVARLLHEFEWLPSDEGKVDLTEVLRLSCEMANPLYVKVRPRRGLST

SEQ ID NO: 199709 - protein, 117 aa, Glycine max
  Clone ID: PAT_MRT3847_22361C.1.pep
MVSISDHELVLIFGLLGNIVSFMVFLAPLPTFYTIYKKKSSEGFQSIPYAVALLSALLLLYYGFIKTNATLIITINCIGCVIEVSYLTMYIIYAPRKQKISTLVMILIADTFPFCSR

SEQ ID NO: 199710 - protein, 108 aa, Glycine max
  Clone ID: PAT_MRT3847_22362C.1.pep
AKTTVALALILTTPPGRWGNNLLGGLPLWLKIKGRAFMAPPQHTNPDRLFFSDSRDLYTLLTLAELALPITRPFLPWGEGASPLSAPYNPSLAGKGRSKQPVGEVPYL

SEQ ID NO: 199711 - protein, 112 aa, Glycine max
  Clone ID: PAT_MRT3847_22363C.1.pep
ERISFPFDCQFQREKFCAALCAPTLYYIYRLLLAMKRKRSTVSHQPRANADTLFQSYFGQLSPVEPFGKQAENENVKEKMDASAGLETGNKLKKLKLKFRGVTHTIHAKSKT

SEQ ID NO: 199712 - protein, 84 aa, Glycine max
  Clone ID: PAT_MRT3847_22364C.1.pep
GSLIQFTTPKNVSIYVYTGLDFTFVTIFLFFYRAAIPLKFHTFAIDALTSKSLPFKMNRINKILDQDEGYRNFFFSSSLFVNCY

SEQ ID NO: 199713 - protein, 233 aa, Glycine max
  unsure (1)..(233): unsure at all Xaa locations
  Clone ID: PAT_MRT3847_22365C.1.pep
MSQDLKRDYVVSEEIGRGRFGTVFRCSSADSGHSYAVKSIDKVAITAAGDSLDAQCLLTEPKIVQLLSPHPHIVNLHDLYEDETNLHMVLDLCYESQFHHRVMSEPEAASVMWQLMQAVAHCHRLGVAHRDVKPDNILFDEENRLKLADFGSADTFKEGEPMSGVVGTPHYVAPEVLAGRDYNEKVDVWSAXGVVLYQMLAGFLPFRGDSPVEIFEAVLRXHLRFSTRVFCFV

SEQ ID NO: 199714 - protein, 65 aa, Glycine max
  unsure (1)..(65): unsure at all Xaa locations
  Clone ID: PAT_MRT3847_22366C.1.pep
AGLFLRSXEGFSCEIYMGGSFTCIRFYQPNLCYSIQAATIIVIQEHGEIITEATSSPMHALTRVI

SEQ ID NO: 199715 - protein, 72 aa, Glycine max
  Clone ID: PAT_MRT3847_22367C.1.pep
TNYIINILILNKIIKFNAKTLKFLLHYLLTFFLFFVIKIMDLKKTKNKKRYIISSFILHQLCGEIFWIPQQK

SEQ ID NO: 199716 - protein, 51 aa, Glycine max
  Clone ID: PAT_MRT3847_22368C.1.pep
SQVRHSSMIHSGNTIMLYIHSLIGKFRNLITAALICIYDTSLWCEVDVHPA

SEQ ID NO: 199717 - protein, 90 aa, Glycine max
  Clone ID: PAT_MRT3847_22369C.1.pep
MGVIGSKEYSFIGFQEPPFGEVFPLANTEPEYGRMNIGSPPSKPKPSGGIESFWANPLNFCWNSQQVKFPCRVGFWAHFYPFFKEGPKNS

SEQ ID NO: 199718 - protein, 99 aa, Glycine max
  Clone ID: PAT_MRT3847_2236C.1.pep
LWGSTGKTRTGPGRETRFPKREKKKSWEKAGKKRVPGGNGKRLKIPKKKQPESKRGKAGGAKGGKKPKKIGLSSRPPIEGENRGNPGDKKKEKTPEKGG

SEQ ID NO: 199719 - protein, 33 aa, Glycine max
  Clone ID: PAT_MRT3847_22370C.1.pep
GPMSASHIKVHDFGHQSDVILFDSSNRTSYRTR

SEQ ID NO: 199720 - protein, 67 aa, Glycine max
  Clone ID: PAT_MRT3847_22371C.1.pep
GPPVFVGLVSVLGRWNPSQVGLSHSGIALSSSVDLAGCTGGFFHNSPLASFGAPCRNKCLQLEPDSE

SEQ ID NO: 199721 - protein, 99 aa, Glycine max
  Clone ID: PAT_MRT3847_22372C.1.pep
PHECIFHSTDGELVLRFLCCKCASQHIVDTIIVVLDLYRYDHWDLPGLGLYGEKEWHFFTRRDRTYLNGLRANRSRGTGYWKATGADKPVGNRDRADQE

SEQ ID NO: 199722 - protein, 91 aa, Glycine max
  Clone ID: PAT_MRT3847_22373C.1.pep
TSYIHTGLYIPSGWENTHQQQKKILALGGELGARETHRSRQLLKHSSPGEKNPHKGIHTTISVRDCLTPITIFSIFILRMPRGPTFASVQV

SEQ ID NO: 199723 - protein, 114 aa, Glycine max
  unsure (1)..(114): unsure at all Xaa locations
  Clone ID: PAT_MRT3847_22374C.1.pep
LPVNFNLWLHVQDTPLSVLHIHHTTWPDHGVPNYTYAVREIFKRLYHLEPNLGPIVVHCSADIGRTGTYCTXIHNTIQRILAGDISAVNIADTVTTFRTQRLRMAQYNFCYIAI

SEQ ID NO: 199724 - protein, 101 aa, Glycine max
  Clone ID: PAT_MRT3847_22375C.1.pep
RQLISYYWAFFLQPLRLGGLVVLTNLFSWEPLPFSPFVFRGTRPDPGGFFYNGAAWKRTGLPLLKALLSTAVFALWGKMKDTLASALPPDCLAFFGFFVPP

SEQ ID NO: 199725 - protein, 36 aa, Glycine max
  Clone ID: PAT_MRT3847_22376C.1.pep
LGMRDFFAIIFLLKEISCKLQICKLGCQKVLTLVRC

SEQ ID NO: 199726 - protein, 49 aa, Glycine max
  Clone ID: PAT_MRT3847_22377C.1.pep
RHRLFVESTKVYPLFLTPTASSTANLLHLPTLLSLRPMLLSLADSILNM

SEQ ID NO: 199727 - protein, 120 aa, Glycine max
  Clone ID: PAT_MRT3847_22378C.1.pep
SSSSTNEKLSHSIPLNGPHVMKQKQCGVEDKKKGQNYGSNIALSCMLSITLLILILWGKILTILFTSMCLYLVPFGSRRPRNVGGYVEREFESVQSKKVVTIMEGVLGSERSSYGSMSKS

SEQ ID NO: 199728 - protein, 96 aa, Glycine max
  Clone ID: PAT_MRT3847_22379C.1.pep
LAPARLSPTIYMSTSPRFISFTQSYSGLCCLHFKTCGLLTYIYFYDSGGLVTNIISAKCYDRIGVSFFPKTKKVSAVFSIGNAPNCMYAPSLVQVS

SEQ ID NO: 199729 - protein, 62 aa, Glycine max
  unsure (1)..(62): unsure at all Xaa locations
  Clone ID: PAT_MRT3847_2237C.1.pep
KIKYLNALLKGSASDPVSQRSRNSISCPPXIKRARPPXCFFFISPLPPPLVIXSKKIAAXWV

SEQ ID NO: 199730 - protein, 68 aa, Glycine max
  Clone ID: PAT_MRT3847_22380C.1.pep
IFNYLQAGPRICLGKEFAYSQMKIFAPVLLGCFRFQLKDEKKNVPSKTMINLHIDEGLEIKAFNRYRD

SEQ ID NO: 199731 - protein, 95 aa, Glycine max
  Clone ID: PAT_MRT3847_22381C.1.pep
MGSSETINMPHAVCIPYPAQGHINPMLKLAKLLHFKGFHITFVNTEYNHKRILKARGPYSLNGLPSFRFETIPDGLPEPVVEATQDIPSLCDSTR

SEQ ID NO: 199732 - protein, 164 aa, Glycine max
  Clone ID: PAT_MRT3847_22382C.1.pep
FPVVIIGAGPIEAELKAHAERLGLTRVQFVGAVDDLDKAALLKLCYAVAFPSHLRSEAFGISLLEGAMYGKPMISSEIGTGTTYINVHGETGLVVPPSDHEALRAAMTRLWNDPQMALEMGQRAEARYWQLFTSAQMADNYARLYQELVARRAEVRLAAAPRLG

SEQ ID NO: 199733 - protein, 42 aa, Glycine max
  Clone ID: PAT_MRT3847_22383C.1.pep
LEGRDWTARFYITSIEFAVGTSCTRCWITCVGSVSCDIYSCN

SEQ ID NO: 199734 - protein, 256 aa, Glycine max
  Clone ID: PAT_MRT3847_22384C.1.pep
MFGKVKFHSGVLGNVHDVLSQGAKRTSYSGNLTIEKTLYVDTASTAKLSSSNISSLDINQRVDTVVADLDRSRGKGSNSSFGSSQVIKQVHAVEEKVTFDTDVLSSLDSIPPSLYSYLNLAAKENKDLGLTTDQNISQKPVSLQSVQGTFAEDSKTNTQQIVLANDSGKGSAESIVSSLPPPLPKSPSESWLWRALPLVSVKNSFLHSSQGTQSKAKRHDSNTSGNLKWETIVKTSNLHHDHVRYSQELPTRKSQH

SEQ ID NO: 199735 - protein, 130 aa, Glycine max
  unsure (1)..(130): unsure at all Xaa locations
  Clone ID: PAT_MRT3847_22385C.1.pep
CTRRSLHVSASGAKPFFFXXGGTKAGVLNSSEGLHKGTRPCTVGGAPPRILHTSVHCTLWRGYAVYSNPPGLTQAIKNTSKWSMSFVAQMHWPIYRFEGLVEDPKAIGGWAHNTDWWKYALRAGNVKGPT

SEQ ID NO: 199736 - protein, 126 aa, Glycine max
  Clone ID: PAT_MRT3847_22386C.1.pep
MNGHKKLNSPRGEVGEIDTRAPFQSVKAAVSLFGEVAITRDRFSVKRRSSENVFEKETQLILAQKELNKIKKQVDNAEAIKAKALSELENAKEILQSLTSKLANVRECKQSAMQAAELVRNQSKRF

SEQ ID NO: 199737 - protein, 62 aa, Glycine max
  Clone ID: PAT_MRT3847_22387C.1.pep
MNGHKKLNSPRGEVGEIDTKAPFQSVKACVSLFGEVAITRDRFSVKRRSSENVFEKETQLIL

SEQ ID NO: 199738 - protein, 98 aa, Glycine max
  unsure (1)..(98): unsure at all Xaa locations
  Clone ID: PAT_MRT3847_22388C.1.pep
XYLDAPKAQGRSXXXIAFETNPDTMXTPVAGNNSVLTDLPAADMTSSPAISMEEAAELKNGTKHELAVLTPADREPRTQQGQAGXAQQYAQPQSDLPE

SEQ ID NO: 199739 - protein, 46 aa, Glycine max
  Clone ID: PAT_MRT3847_22389C.1.pep
PVGVSLAMGRRLLILCTSTVRMLVGRIAVRASCSCWYAEKFVPSLL

SEQ ID NO: 199740 - protein, 223 aa, Glycine max
  Clone ID: PAT_MRT3847_2238C.1.pep
MPPCPLFLFNPSHSIFSLSLSKIRKNNLKQIEMESNTPVIAKKELSIIHVALFMLRKGISKGKLMMHLNNMMLKRPGKAIANLMFHHNHGFSGNSLHFSAAREYEFSCRSTLEDPRVAIASSNKRHRHIPFFTCAHAPPTLDDDVATVNAVKGVLEMLNNETVVEASPAALPGFGRSPMVRQLIRVTDSPVPLVESQDDKDNPVGKAAEESLRRFYKELRKQP

SEQ ID NO: 199741 - protein, 47 aa, Glycine max
  Clone ID: PAT_MRT3847_22390C.1.pep
DHELFLVIIKIVCVTLSLRVEVVDLVCSTLIISTPQTIIPSVVFSAV

SEQ ID NO: 199742 - protein, 88 aa, Glycine max
  unsure (1)..(88): unsure at all Xaa locations
  Clone ID: PAT_MRT3847_22391C.1.pep
FARWLRKRLRSIIVVGWSLWTPEEATTINELKKPVVEKEAPGRWQKRACSVLSRRGTRTLCXPSGLEPYCLRVVVGVLLALAVLWVRS

SEQ ID NO: 199743 - protein, 121 aa, Glycine max
  unsure (1)..(121): unsure at all Xaa locations
  Clone ID: PAT_MRT3847_22392C.1.pep
SXSXXXXKFLKKHTCVDMFLVQNVVEVPLSFHRQWMYRYPNYVLFNCDGTKHFIRVRRYGRRCFFVYGLKDFRRAYNVNKSVMVRFIAFDINTTLSVDVMGPIHRQVRVRSVVSTRRHFYN

SEQ ID NO: 199744 - protein, 165 aa, Glycine max
  Clone ID: PAT_MRT3847_22393C.1.pep
ENYHNASNSLFDVRTFGAIGDGITDDTESFKMAWDTACQSESPVKVILVPQGFSFVIQSTIFTGPCKGGLVLKVDGTLMPPDGPESWPKNNSKRQWLVFFRINGMSLEGSGLIDGRGAKWWDLPCKPHKGPNGTTSPGPCDSPVAIRFFMSSNLTVQGLRIKNSP

SEQ ID NO: 199745 - protein, 98 aa, Glycine max
  Clone ID: PAT_MRT3847_22394C.1.pep
VCLCKRIWRRTFTLAERLSFSGKDYQDPPPAPLIDADQLTMCSFYSPSIAVFTATSLFLYITSLTGIGFTPHSGHADPFVIVCFFLSPTFVPFKLLFF

SEQ ID NO: 199746 - protein, 143 aa, Glycine max
  Clone ID: PAT_MRT3847_22395C.1.pep
KYNVFCNYLNYGGAKGRSRIWKTPRKKKKRKKKTPPKSKKHEHRGGCPAGKNGKREKKTHAWGTNTKANMAAGGQSNIPTGAGAPASPHNGERKKKSGANRKKKTKASAVGGGDPTPPIHQKEGTTPAGGASRSGDPGGNKTP

SEQ ID NO: 199747 - protein, 75 aa, Glycine max
  unsure (1)..(75): unsure at all Xaa locations
  Clone ID: PAT_MRT3847_22396C.1.pep
XXXFLLIYKXKHPPKSCLIKHIPQNLKKNISTKYKFTQPPFYNNYSPSQKPFFNTFFHIHFFSPSFSISSSIILF

SEQ ID NO: 199748 - protein, 108 aa, Glycine max
  unsure (1)..(108): unsure at all Xaa locations
  Clone ID: PAT_MRT3847_22397C.1.pep
MSLLSDLMNLNLSDTTEKGIAYSMWFRWIMNGPEAXAWTIPRPXLAVPRELSKTYYYGTSTXQALGEDXHMIIYPQAIFRDPFRPSDNLLVIXDDYTAAREPISTNKR

SEQ ID NO: 199749 - protein, 85 aa, Glycine max
  unsure (1)..(85): unsure at all Xaa locations
  Clone ID: PAT_MRT3847_22398C.1.pep
FNXNXLSCXAIAAHXXDRXGLAAXLXDRPPVLXHHAIEXRXSWLPAIASXRRAPVXRXISXNXAXVVNTHTXSWXXHYLXXSXCG

SEQ ID NO: 199750 - protein, 63 aa, Glycine max
  Clone ID: PAT_MRT3847_22399C.1.pep
LGISVINSYIKKGLFLFFKKQKQPPSNREVKPSPGRNRRILYVCNSTRQDSQWWKLYVSPCLH

SEQ ID NO: 199751 - protein, 535 aa, Glycine max
  Clone ID: PAT_MRT3847_2239C.1.pep
MGEENGEGRSLAETPTYAVATVITVLVSLSFLFQGTLKKLVKWLDRTKRKSLLSALDKIKEELMLFGLLSLLMGHWIIFVAKICVKSSVLSSRFFPCAMEKNSVKRFVGMGSAYSNKTVLEGKVNNGLHNYCPEGHESLASYESLEQLHRFVFVLGVTHITYSFIAVALAMIKIYSWRTWENEAKTIAVQSIQDTSQGTSRLRRLNTFIFHHTSHPWSHHNILVWLLCFSRQFWSSIHRADYMALRLGFITNHGLPTTYDFHNYMLRSMDEEFRDIVGVSVLLWIYAICCIFLNFHGSNFYFWLSFVPAILILIIGTKLHRVVVKLAVEIINRCPNMKPHQFNLRDELFWFGKPRFLLRLIQLISFLNAFEMATFLWSLWEIKDPSCFMSNRRFIVIRLSFGVISQVWCSFITFPLYVIITQMGSRFKKTVVSENVRKSLSKWQRRVKDRQSSTCALLTTTSPTSLSSLMHGTDKSNSHVSISEEGSSSGTKDICLSYLDHHVPKTQGNAPFLSYENDHDQDHEVINDSSPPPLS

SEQ ID NO: 199752 - protein, 43 aa, Glycine max
  Clone ID: PAT_MRT3847_223C.1.pep
LETKVCQTHYDTETIVSSRVTIVEYAFAPLHYSASPMLLHGSH

SEQ ID NO: 199753 - protein, 199 aa, Glycine max
  Clone ID: PAT_MRT3847_22400C.1.pep
RESMGHRYIEVFKSHRTEMDWVLKHSGPNSADSANDGFVRLRGLPFGCTKEEIVQFFSGLEIVPNGITLPVDPEGKITGEAFVQFASQELAEKALGKHKERIGHRYIEVFKSSQEEVRSYSDPPLKFMSVQRPGPYDRPGTARRYIGIVKQAGLDRMRSGAYSAGYGGYEEYSGLSDGYGFTTDLFGRDLSYCLSGMYD

SEQ ID NO: 199754 - protein, 256 aa, Glycine max
  Clone ID: PAT_MRT3847_22401C.1.pep
MGDLEKKQERAMEEEVKERLVEGVAVLDFDMLCSTVALRAAHGKWGKLGAEEEEEEEEEEEEKEEGGEFGGVLRMWEGEVLDCFDDHRIAIESTCCPCYRFGKNMKRAGFGSCYIQAAIYFLLAVGAFLNFIAFAVTRRHCYLYLAVAFVVSVGAYLGFFRTRLRKKFNIMGSDSSMDDCVYHFACPCCTLCQESRTLEMNNVRDGTWHGRGDKICIGGFSQKSKGFFELNPPSIVSVNDESSLETKTNTNVSSPP

SEQ ID NO: 199755 - protein, 61 aa, Glycine max
  unsure (1)..(61): unsure at all Xaa locations
  Clone ID: PAT_MRT3847_22402C.1.pep
TMLMKAYAYXNYNNTTNYIATTHHAXLGNANFYDEKFNHNGTIGTAAVDRQTAAHLEKMPL

SEQ ID NO: 199756 - protein, 63 aa, Glycine max
  Clone ID: PAT_MRT3847_22403C.1.pep
MTEPSKVIHVRNVGHEISENDLLQLFQPFGVITKLVMLRAKNQALIQMQDVPSAVNALQFYAN

SEQ ID NO: 199757 - protein, 92 aa, Glycine max
  Clone ID: PAT_MRT3847_22404C.1.pep
ATRPLILGENVQKAKKGADIFKRQACVHGHAAAKRYYSVTLREETDPRWTTLAEVAPEDDPPESAGLTSRHCSGGVTAKKLSPMALHNTCAP

SEQ ID NO: 199758 - protein, 317 aa, Glycine max
  Clone ID: PAT_MRT3847_22405C.1.pep
MPATAGRVRMPANNRVHSSAALQTHGIWQSAIGYDPYAPNKEDKKDSSQNLPNAEPDAENAYASFQGLLQLAKITNAEVDVSRGACKKCGRVGHLKFQCKNYVKIKDENEKDPEAMQPVGLVGLDKKLKADKVDKRSNVESSEEEEDSESSDSEIDSEMERIIAERSGKKISGKRGSSRKKGDLDDDGSDKHSGKRRKRGRSKKRSAKREVSDSDDSGEERRRRKRRREPRRKRDNSSDEDDEYKRRHRKSRKEKRRRRSRLSDPDSSEDFIRRHKRKNKRASSSSDTDSSGYNDSRKGRDVNKSGKRRSRHHGDDE

SEQ ID NO: 199759 - protein, 74 aa, Glycine max
  Clone ID: PAT_MRT3847_22406C.1.pep
LPLLCAVPLASLISLTLTTATGAATATAAAISILLVIILRVLWARVILQLGLGSIITILAAAVAATFRASYFLY

SEQ ID NO: 199760 - protein, 75 aa, Glycine max
  unsure (1)..(75): unsure at all Xaa locations
  Clone ID: PAT_MRT3847_22407C.1.pep
RYIARTPYLTGRACAALLLTGFRALKARDVXTLIKNPNAAIYMHAYLRRLIAYPYYKTLQNAVDATQCVWRRRIA

SEQ ID NO: 199761 - protein, 58 aa, Glycine max
  Clone ID: PAT_MRT3847_22408C.1.pep
LKLGRPNFKGNFGLLLLLLLLLLLVEEPVFFFFLGGEWPFEVSFWFYLTENWKIPKEG

SEQ ID NO: 199762 - protein, 71 aa, Glycine max
  unsure (1)..(71): unsure at all Xaa locations
  Clone ID: PAT_MRT3847_22409C.1.pep
LREINYPQCNDVQTQKETNVNKLNVDQEXTSNSSKEALQLRKKDISLIESIHKAAMPTIAQIADFHSMHMF

SEQ ID NO: 199763 - protein, 132 aa, Glycine max
  Clone ID: PAT_MRT3847_2240C.1.pep
MASSASASSTPSPTVTSTVSSIQDFSNLYFIHSNENPSSKIVTAVLDGSNYHGWAQAMTMMFEMKNKLGFIDGTIQKPSDFDPNFAQWKRCTNLIQSWINHSVTPEIATSVIWLTQASDVWNALCNRFSQGG

SEQ ID NO: 199764 - protein, 129 aa, Glycine max
  unsure (1)..(129): unsure at all Xaa locations
  Clone ID: PAT_MRT3847_22410C.1.pep
EVSEVKGQDVVSLPVNTYSSSDTLSTLDASQTNTDYPTLTNKDKDVISTXGVKNTTNFMSLAYTPHAKDILQTGELAYIFGDLIQTQTLANIENTDALTHIDDILHEASGIIHSRGISPLSSTKDGAND

SEQ ID NO: 199765 - protein, 307 aa, Glycine max
  unsure (1)..(307): unsure at all Xaa locations
  Clone ID: PAT_MRT3847_22411C.1.pep
GILMTNDITDNNTEDAVPCFALSKNDSYVMSASGGKISLFNMMTFKTMTTFMPPPPAATFLAFHPQDNNIIAIGMDDSSIQIYNVRVDEVKSKLKGHTKRITGLAFSHVLNVLVSSGADAQICVWNTDGWEKQKSRFLQLPAGRTPPAQADTRVQFHQDQIRFLVVHETQLAIYEATKLECXKQWFPRDSSAPISHATFSCDSQLIYASFLDATVCVLSVSNLTRAESARASAYLSASVSSNVQPLVIAAHPQEPNQFAVGLSDGGVHVFEPHESEGKWGVPPPIENGSTSNMAATSVGASSDEAQR

SEQ ID NO: 199766 - protein, 52 aa, Glycine max
  Clone ID: PAT_MRT3847_22412C.1.pep
NQFAVELSDAEVHVFEPLESEGKWGVPPPIENGSTSNMAATSVGASSDEAQR

SEQ ID NO: 199767 - protein, 89 aa, Glycine max
  Clone ID: PAT_MRT3847_22413C.1.pep
QTPTTKMAFKMNLWSLTLLPGEKYPMYIRRDFVLTNAALGEELRSKDGRSVVKVTHQPLLPSQFGDDSDSEFDSDLDISDEEGDEDSTR

SEQ ID NO: 199768 - protein, 197 aa, Glycine max
  Clone ID: PAT_MRT3847_22414C.1.pep
MMKQSRDTHFPLPQHVTDITCMDPNRPPLVAEKVFKTVRFIGFFLQNGVSKSKVLHDVQDVMKRGKNIGKALNDIVARHHQALTCRPRDAHVAFVSPLEYQFSCSGSPPRTSHAGRRKLSPASAAVRRSPGHRAVRMCRGGGAADGTIERRVKITDSVASMFNDTAEKDFHVDEAAEEFIARFYRDLRLQKWLDHYC

SEQ ID NO: 199769 - protein, 55 aa, Glycine max
  Clone ID: PAT_MRT3847_22415C.1.pep
GPHYITCIKIYWPKQPTSFVLQTQQNNIVHLQKTSPLIPHQLPPHRASRPMHHHH

SEQ ID NO: 199770 - protein, 120 aa, Glycine max
  unsure (1)..(120): unsure at all Xaa locations
  Clone ID: PAT_MRT3847_22416C.1.pep
LSSAVRPSSGXSLFSPLLVLCPSSPARGSSSVVAPGPRLVFSLPFPCRVSWPFAFPFPALSACCAPSPPPGGGVCVSWWFCWSSTPXAKGQAGPXXCGXSPLSSSSSSNVLPLCAVCSPV

SEQ ID NO: 199771 - protein, 66 aa, Glycine max
  Clone ID: PAT_MRT3847_22417C.1.pep
HTKAGNTSPQPFLINPSITQTRRLLKNTRASYKSPPPNLLPPRTLQPPRTPTYTIPNTQTLLTNTL

SEQ ID NO: 199772 - protein, 87 aa, Glycine max
  unsure (1)..(87): unsure at all Xaa locations
  Clone ID: PAT_MRT3847_22418C.1.pep
RRRRSXXAAXRLXGGKEAMKQXLKLIXEWVQTSHLQNKRRKENNGSSIXSVLQAQFQDPSGXNTQSGSXFXPESNTCFNNQTPWLSS

SEQ ID NO: 199773 - protein, 153 aa, Glycine max
  unsure (1)..(153): unsure at all Xaa locations
  Clone ID: PAT_MRT3847_22419C.1.pep
CYSHHRALTTPARARXPMTSXILASTKPNQLVCXVTQPQTPQEDIDVIPLSCRLALSVLIGAAAVGSKVLPADAYYGESAAVFGMPTTDTDFLPYIVDGFMLSIVSTWNPCEEFEYTGQAARYDDNCDSCCNVVVTSSATDQMYISDCGSAEE

SEQ ID NO: 199774 - protein, 127 aa, Glycine max
  Clone ID: PAT_MRT3847_2241C.1.pep
NFSLHFLSMAVLLLAPPCTVFLAALPVFSLIWFRRLPSFVHGILVVSCLWDLPFAPLDVCAASFPVYDSIGPLFPYARPWAVFFGDYCVPCRGVIAGACGCLLCLWCVCSLPYAAFLWVTGGFSFET

SEQ ID NO: 199775 - protein, 267 aa, Glycine max
  Clone ID: PAT_MRT3847_22420C.1.pep
SSNSLASFGVEHKSIFIFSKIIMRSFSKNKFLLCFRPVVDIDCMIKSEVAPTCRFPRIPTSENHNVMKNSETKSVYFPHVSQKRRISRVIKAVFYETILNKRDHHKNRYIHDSFGPKYLTYGETKTLQSPLSTSSSSHGLASPSSSSRTSSQPKNVSSYYSTKEKRKEGTGHGGPLEKQKKFECLGIYLILISLAFTVFWGKLFGIILTSTLLYFFAVWDSSSPCQKRFPSCPRPRQSLQGKDNRNYFTGRNYHMAMVPINFHVTRN

SEQ ID NO: 199776 - protein, 97 aa, Glycine max
  unsure (1)..(97): unsure at all Xaa locations
  Clone ID: PAT_MRT3847_22421C.1.pep
SRRERLPDTLVQAQRDYLGAQTYERVGTEGSPHSEWCKLAKQXKKLDSCIXAKQNFPNKWKIFWSDCIVNSVGISPMWGSFNILFPPELLGSLFSSN

SEQ ID NO: 199777 - protein, 60 aa, Glycine max
  unsure (1)..(60): unsure at all Xaa locations
  Clone ID: PAT_MRT3847_22422C.1.pep
MRVTSFPYAAFCILRNFFEPNHRSQRGNIAHYXHDQLQKLTVMDILYYQTIICHYYVQYH

SEQ ID NO: 199778 - protein, 79 aa, Glycine max
  Clone ID: PAT_MRT3847_22423C.1.pep
VGSINLQFYTIYSPLMYEFKFFEHSCASCHAIVLIFIFHYEFILSLTWSPVWSPMLCVSNIALPFLLVFIRIRDIVPCS

SEQ ID NO: 199779 - protein, 64 aa, Glycine max
  Clone ID: PAT_MRT3847_22424C.1.pep
HTRRAKLHTMTYPHIKNAVTSPHWIDSTERVPWVQLWAPRARQQTITMNPTCQSLMTQTGLMDL

SEQ ID NO: 199780 - protein, 73 aa, Glycine max
  Clone ID: PAT_MRT3847_22425C.1.pep
MAKKQKLQSSDPEPSKLLDHKDQVHGGGGTAKVARRRVHARESTGCRHLHDFVKGDAVTVSSVSESHVRMRCF

SEQ ID NO: 199781 - protein, 49 aa, Glycine max
  Clone ID: PAT_MRT3847_22426C.1.pep
LLLTSNGNYHGLYVVMRVWEVEFLKSVFLSVWWAREFLKKTKKRSVSNF

SEQ ID NO: 199782 - protein, 49 aa, Glycine max
  unsure (1)..(49): unsure at all Xaa locations
  Clone ID: PAT_MRT3847_22427C.1.pep
KHSRPDQYWRYAQIFXSAQXLRTRSSXTDSHIXIDSNFPGXFLNQXKCR

SEQ ID NO: 199783 - protein, 112 aa, Glycine max
  Clone ID: PAT_MRT3847_22428C.1.pep
LFSSPKSKSSYAAFLPNVSYSVVVPKSVSDKNPSSKELLIESESELEQIKSSSERKLQTTGSTGCSINSSALNFSDTSLCAFSVKFLRFADITPLSQFSGFLFDKNPNPLLT

SEQ ID NO: 199784 - protein, 72 aa, Glycine max
  Clone ID: PAT_MRT3847_22429C.1.pep
RLTTTSWRLMYNAPRATSIPPTQCMSALKGNHTPDKLLTPKMIPFCHTYTTKKSRLPINVPLSIISWKLTYP

SEQ ID NO: 199785 - protein, 167 aa, Glycine max
  Clone ID: PAT_MRT3847_2242C.1.pep
MDANREQIVDVGSVVEAVSADDGDAPLYSLESLCMRCGENGTSRFLLTLIPNFRKILLSAFECPHCGERNNEVQFAGEIQPRGCCYSLEIPSCEQKMLNRQVVKAESATIKIPELDFEIPPEAQRGSLSTVEGILMRAADELQALQEECWTTALIINVLACLKLRPH

SEQ ID NO: 199786 - protein, 65 aa, Glycine max
  Clone ID: PAT_MRT3847_22430C.1.pep
NYHYLTCMIVFIFGLLPSISTFNKQMCIYLVTFLLTRSFFIPAFEPGSLWNGLPSTTIRTRNASF

SEQ ID NO: 199787 - protein, 65 aa, Glycine max
  Clone ID: PAT_MRT3847_22431C.1.pep
RLLLQGRRACYSLSTSKMSGEEGVIAVEPAAAAAAIPGEPMDIMTALQLVLRKSLGYGWLSRGLH

SEQ ID NO: 199788 - protein, 78 aa, Glycine max
  Clone ID: PAT_MRT3847_22432C.1.pep
QDPPQPPREGRPPQQASLQRPPPRPAKPAPRPGGAPPRPGKPRPPPWPGKPATGDGQGEAGTRQEPGGNPAGQKPTQP

SEQ ID NO: 199789 - protein, 58 aa, Glycine max
  Clone ID: PAT_MRT3847_22433C.1.pep
ILLITARDGPPAPTGPVLLGNPARQVLLVKGIQSSSFQSVSSDHSSECPANCKLVTDG

SEQ ID NO: 199790 - protein, 70 aa, Glycine max
  unsure (1)..(70): unsure at all Xaa locations
  Clone ID: PAT_MRT3847_22434C.1.pep
SPPRGGKAGGRRDPKGSPRQAQRPRARWHAGRGKEEGEFSEARGDXAALEKDYEEVGAESGRGQEEDEDY

SEQ ID NO: 199791 - protein, 51 aa, Glycine max
  Clone ID: PAT_MRT3847_22435C.1.pep
RYMTTSKMVKEKLLSVSVPQIGGCSLPPYHNRKPVKIETSLMTKGKKLLIY

SEQ ID NO: 199792 - protein, 318 aa, Glycine max
  unsure (1)..(318): unsure at all Xaa locations
  Clone ID: PAT_MRT3847_22436C.1.pep
MGHSAAVWDYRAATEITKDWNGIHQIVLRTPRGASAQVCLHGAQVTSWRNEHGEELLFTSSKAIFKAPKAIRGGIPICFPQFGNCGSLELHGFARNRMWAIDDNPPPLPANDSSGKSFIDLVLKSSEEDMKGWPYSFEFHLRVSLTSDGDLTLISRVRNINGGPFSFSFAYHTYIIXSADISEIRIEGLETLDYLDNLFQKERFTEQGDAITFESEVDRVYLSSPNIIAVLDHERKRTFVIRKDGLPDVAVWNPWEKKSKSMSDFGDEEYKQMLCVDGAVIEKPVNLKPGEEWTGRLQLSIVPSSFCSDHLGLDRSDL

SEQ ID NO: 199793 - protein, 73 aa, Glycine max
  Clone ID: PAT_MRT3847_22437C.1.pep
MICAAVWNPWEKKSKSMSDFGDEEYKQMLCVDGAVIEKPVNLKPGEEWTGRLQLSIVPSSFCSDHLGLDRSDL

SEQ ID NO: 199794 - protein, 358 aa, Glycine max
  Clone ID: PAT_MRT3847_22438C.1.pep
TRPENATQLLPGLVVTAPEFPDGEDEDGDASGQEINSSKDKGKQSIDDALSSALASFLSSLSLDSPKYTKSLSVKAPEFSNEDEDDNESNNSEIAKNYQVHLTDSEEFSLIQVLASSSTWENSEKINPDSNDKHSKKTAQEAEENDQLSSAEGDQDEVCVKTGFIDSFEEDKNGKVNYQKSDISDELVDNQTPFGHSITKEGPSSGTELTVAAEVPRKTFHENIIENVLGFALASSVVDFENPILDVKFISQRSPATERFLEDLLVGTQDQKTSSRDQPVKESNDDVTVKEQLKSNGDVSVEEQSNLISIEDGELVIPASDSHFAVDKDLCTSSIIAPVNNEDDNLPLPEDHKRKRDQ

SEQ ID NO: 199795 - protein, 53 aa, Glycine max
  Clone ID: PAT_MRT3847_22439C.1.pep
MGHSAAVWDYRAATEITKDWNGIHQIVLRTPRGASAQVSLHGAQVTCWRNEHG

SEQ ID NO: 199796 - protein, 132 aa, Glycine max
  unsure (1)..(132): unsure at all Xaa locations
  Clone ID: PAT_MRT3847_2243C.1.pep
GRARFLARKITSSATLPPSEERLESGLYSRFYLENQMAVALGGRAFEXMVVXEGXXTTKTXNDKKQPPRGGRGGAKRRGGSRKRGQXATGGPGGNPGGGQQKPAKKEDATATAEAGEAEGRERAXRGHARAT

SEQ ID NO: 199797 - protein, 67 aa, Glycine max
  Clone ID: PAT_MRT3847_22440C.1.pep
SQKTYVGHLFNTIFYNLNLTIILRTKFNYINHFIKLIYITRIYFLNLSTFDFNYNIFLSKKKHFISC

SEQ ID NO: 199798 - protein, 70 aa, Glycine max
  Clone ID: PAT_MRT3847_22441C.1.pep
KQVMRTGYKLNHFAFFFNFGTKSFCTSCDGLNHLLKLKLLVIFIFNTTLSTRTTSTIQSKKVDAPLAIAA

SEQ ID NO: 199799 - protein, 65 aa, Glycine max
  Clone ID: PAT_MRT3847_22442C.1.pep
PKQQLLILHEYLNMLNQKTTSLHTSTCFGNNRIQLRLNGPQKQWLTLLQLQECIELSFLQSLPWS

SEQ ID NO: 199800 - protein, 53 aa, Glycine max
  Clone ID: PAT_MRT3847_22443C.1.pep
WKKGCLMIKIVVSVNAAGKRSDCASLKPGVLTNSNIAHHYSNECITKFLPHSP

SEQ ID NO: 199801 - protein, 110 aa, Glycine max
  Clone ID: PAT_MRT3847_22444C.1.pep
FIVSCMKCLCLRTKNFFGSFFDWEPYKVAPIAYIEEAQIIYLQLPGTVVAYNFDTGTMESICNYSYPGLNFSCCSFFSSTTTLPHNAQRDNTDGELELNLPIAEMEKLTL

SEQ ID NO: 199802 - protein, 78 aa, Glycine max
  Clone ID: PAT_MRT3847_22445C.1.pep
LRKRSCMISYPHYENLTVLIAEILLSISLLNAIGQIKCCLRERCQAAHHTGVMHANSQLCLMGEIPLALTEIDEQCKS

SEQ ID NO: 199803 - protein, 166 aa, Glycine max
  unsure (1)..(166): unsure at all Xaa locations
  Clone ID: PAT_MRT3847_22446C.1.pep
PTRPYGCEKTTEGRRCVLCSSEDETIKHIFLDCRVAKKIWQQVCLWLDVPIVEGEDIQAHFMAFGKLIKGKKQKXVKHLIWMAVIWNIWLTRNKVIFKEEAATIPVMISGIKDCAWAWFKARQGRTCWVGWSGWIISHGMSTFIEPQVGGRTPNTVDSKGRFSFGE

SEQ ID NO: 199804 - protein, 55 aa, Glycine max
  Clone ID: PAT_MRT3847_22447C.1.pep
SRLPVYTYNLFSFFYDRQIYYLNFKGVLLTGEFLYHDAYVYFLNFIHYSFVIHSA

SEQ ID NO: 199805 - protein, 116 aa, Glycine max
  Clone ID: PAT_MRT3847_22448C.1.pep
PDFQLLQHLLGRAVIQRLHEPSVPRQHVVSAARALPIEPCNSFDLRPRDPCSRSRRTAQVRGIGRLRDFRLELSSITFSAFGWRRGRLTKDGPWTMAILYGLVNFFFSLTNEHSTQ

SEQ ID NO: 199806 - protein, 65 aa, Glycine max
  Clone ID: PAT_MRT3847_22449C.1.pep
LIGRFDSSWCGTERASHDARRTEKPPPVPPSHFLAPWNANSDRQGRKKERRERADAWVDPGIPAR

SEQ ID NO: 199807 - protein, 77 aa, Glycine max
  Clone ID: PAT_MRT3847_2244C.1.pep
CNSYYDNRQYEKYDFTSLGKKLSTANGNEREQQIHEDNDNSKLLKQENDPNSGEVTEEYHPFIDDREKRTTASLLFV

SEQ ID NO: 199808 - protein, 127 aa, Glycine max
  unsure (1)..(127): unsure at all Xaa locations
  Clone ID: PAT_MRT3847_22450C.1.pep
MRRLGSIRSYAKHLRIDGVKDTIAVASGKGGVGKSTTAVNLAVALARKCQLKVGLLDADVYGPSIPTMMNINTKPEVTHDKKMIPIENYGIKCMSIGLLVXEKDAPIGWRGPMVSNALEKMTRGVDW

SEQ ID NO: 199809 - protein, 203 aa, Glycine max
  Clone ID: PAT_MRT3847_22451C.1.pep
LEWNSLSGLIPETFSNLSKLSNLDLSHNKLSGSLRILGTLDNLFSLNVSYNSFSGSLPDTKFFRDLPPAAFVGNPDLCITKCPVSGHHRGIKSIRNIIIYTFLGVIFTSGFVTFGVMLALKIQGGTNFDSEMQWAFTPFQKLNFFINDIIHKLSDSNIVGKGCSGVCYRVETPMNQVVAVKKLWPPSMMRHPEETFLLQKLYP

SEQ ID NO: 199810 - protein, 48 aa, Glycine max
  Clone ID: PAT_MRT3847_22452C.1.pep
DNGANLIYNCSGLAFFFPLQRFSKVYKYVRELRWLEIFEFLSHISQGF

SEQ ID NO: 199811 - protein, 110 aa, Glycine max
  unsure (1)..(110): unsure at all Xaa locations
  Clone ID: PAT_MRT3847_22453C.1.pep
QLASHAHEPWVXETGRPRLLTEEKWHLSTRYSMYSTYGLETCSLALAYMLSCGTLRRLLLKLQDVIVGXELYILIRAMAAAIIAECCCFSRPRLLIXELXGLTPLAERVS

SEQ ID NO: 199812 - protein, 48 aa, Glycine max
  unsure (1)..(48): unsure at all Xaa locations
  Clone ID: PAT_MRT3847_22454C.1.pep
XLLXSPXLXYISXKXXQXKFXKXASXSXGRGFLXEGSGXRMKIIISPK

SEQ ID NO: 199813 - protein, 45 aa, Glycine max
  Clone ID: PAT_MRT3847_22455C.1.pep
ITGQMQYGFSHILFNGSSVRYVAQFFNKNKENEHGNKLRLGQLYC

SEQ ID NO: 199814 - protein, 80 aa, Glycine max
  Clone ID: PAT_MRT3847_22456C.1.pep
FVIKKDGLPDIPAWNPWDNNSKSISYFLDKDYKQMLHIDGSITHKPVNFNPCQECTFQLQLFIVPSNLFNNHLALYRNYL

SEQ ID NO: 199815 - protein, 143 aa, Glycine max
  unsure (1)..(143): unsure at all Xaa locations
  Clone ID: PAT_MRT3847_22457C.1.pep
ASNLNLHELLDLEKEPPTSCSAGPEAKDLFHWPITRTGPADNPXAGCVFPIPIPFPPDYPFQTPNVAIKTNEPHPNINSNGSIYLHNLKGQGGPALSNAQVLISSWSTVTDPNAEDPPETGIAHMYQTDQYKDHATARSSNQN

SEQ ID NO: 199816 - protein, 108 aa, Glycine max
  unsure (1)..(108): unsure at all Xaa locations
  Clone ID: PAT_MRT3847_22458C.1.pep
IINESVTEAGDSLKPFMRALGXGFMADEXATTVWLCSRKRASGFDYLLTHQAMEAVDNGTPIIRDLFSNFLSDPWHGAIYVCAELTPIVDIFVPPDSDFVRTDLRSST

SEQ ID NO: 199817 - protein, 62 aa, Glycine max
  Clone ID: PAT_MRT3847_22459C.1.pep
RGKWACPMSARKYLGGPTGSMRGSAQLSIGGIGWGLFPPNFPEASLQMGAPAAFLRCEFFGC

SEQ ID NO: 199818 - protein, 47 aa, Glycine max
  Clone ID: PAT_MRT3847_2245C.1.pep
SRCRTMSTLTRLPSLTLTAAQTSLLTLNHNRTCTTAHTRRPNCSILS

SEQ ID NO: 199819 - protein, 568 aa, Glycine max
  Clone ID: PAT_MRT3847_22460C.1.pep
MDLNQFLNFNVISSEGFPCTSSCTPISPISNQLLGSLKLDIGNSPNSALSSHFDSDTLSSALSDSQELHTSGEIHSGVNSCKSLQESNHYLHRPVSFVDHLQDGLHLSTRSFLPQDASYDHETRHALLELETALMAPDGEDQITTSSTSLGVGSRPTTSCQRNRSWSSEGQSSDVAHVEKHHKSVEEESLQGFPSCNLKQLLIVCAKALSENNMQHFDQLIEKARSAVSITGEPIQRLGAYLVEGLVARKEASGNNIYHALRCREPEGKDLLSYMQLLYEICPYLKFGYMAANGAIAEACRNEDQIHIIDFQIGQGTQWVTLLQALAARPGGAPHVRITGIDDPLSKYVRGDGLEAVGKRLAAISQTFNIRVEFHGVPVLAPDVTKDVLDVRPGEALAVNFPLQLHHTADESVDMSNPRDGLLRLVKSLSPKVTTLVEQESNTNTTPFFNRFIETLDYYLAMFESIDVSLPRKSKVQINMEQHCLARDIVNIIACEGKERVERHELLGKWKSRLTMAGFRQYPLSSYMNSVIRSLLRCYSKHYNLVEKDGAMLLGWKDRNLISTSAWY

SEQ ID NO: 199820 - protein, 61 aa, Glycine max
  unsure (1)..(61): unsure at all Xaa locations
  Clone ID: PAT_MRT3847_22461C.1.pep
YYKTPELILAATEYTTDIDIWSAGRELRELLLEQPILHVEREMXQLVDIINVLGTYTREEI

SEQ ID NO: 199821 - protein, 162 aa, Glycine max
  Clone ID: PAT_MRT3847_22462C.1.pep
RQTPEQGGRCLFSGNPFINHTQKDNSNPERRSPPPRGKERPGGDCPRTKEGPPHRAPPRFEKREPPPRYFSQRKKHPPPPGGFPPLGGRPPRAKRKLERAPPTKGTPKKKNPPPPPKKPPGISPPPKKKKPPPLFFSHQKKHPPPPQWCKRKKTNPPPKPPG

SEQ ID NO: 199822 - protein, 36 aa, Glycine max
  Clone ID: PAT_MRT3847_22463C.1.pep
VWSILLASIFSLLWVRIDPFTTRVTGPDVEECGINC

SEQ ID NO: 199823 - protein, 77 aa, Glycine max
  Clone ID: PAT_MRT3847_22464C.1.pep
RRREEERYRASDITHTTWAMIDDVGFIIPYASNKYGANCGAEAVWFKTGALLLDGGTLNYFGRPIPINLIEAVIAEI

SEQ ID NO: 199824 - protein, 62 aa, Glycine max
  Clone ID: PAT_MRT3847_22465C.1.pep
TKFVCPKYQKQNPIPPFFLKKNLKRKFNPPGWNSKSFSRFPPTKFIFNHLKKNFCKQIYRVL

SEQ ID NO: 199825 - protein, 72 aa, Glycine max
  Clone ID: PAT_MRT3847_22466C.1.pep
APGALNQLGFGRDERSWKDWRLREGKMGRWVLWPIWGYLVKALVTGVGHSQTFLDHWVDPGPNTFLPSLKFN

SEQ ID NO: 199826 - protein, 42 aa, Glycine max
  Clone ID: PAT_MRT3847_22467C.1.pep
LYMLEMRRRTQTHSREKMRGMVENLIDHTITCVLCVSHRYLY

SEQ ID NO: 199827 - protein, 157 aa, Glycine max
  Clone ID: PAT_MRT3847_22468C.1.pep
FWIWFPLLISSLPNWGERVMFVLASFAVCSIQHLQFCLNHFAADVYEGPPNGNDWFEKQTGGTLDISCSTWMDWFFGGLQFQLEHHLFPRLPRAQLRKISPLVIDLCKKHNLPYRSLTFVEANLWTLKTLRTAALQARNLSNPSSQNLLWEAFNTHG

SEQ ID NO: 199828 - protein, 448 aa, Glycine max
  Clone ID: PAT_MRT3847_22469C.1.pep
MEGENKKYITSEELKEHNKPGDLWISIQGKVYNVSDWAKDHPGGEVPLLNLAGQDVTDAFVAYHPGSAWKYLDPFFTGYHLRDFKVSEVSKDYRKLVSEFVKMGLFEKKEHVTLYTLSSVAVMFSIVVYGVIGCSSVWAHLGAALLLGLLWMQSTYVGHDSGHYEVMSSPGYNKLAQILCGNCMTGISIAWWKWTHNAHHISCNSLDYDPDLQHIPVFAVSTRFFNSIKSCFYGRKLVFDSLSRFLISYQHFTFYPVLCFARVNLYLQTLLLLFSRRKVPDRAFNIMGILVFWVWFPLLISSLPNWGERVMFVLASFAVCSIQHLQFCLNHFSADVYEGPPNGNDWFEKQTGGTLDISCSSWMDWFFGGLQFQLEHHLFPRLPRAQLRKISPLVIDLCKKHNLPYRSLTFVEANLWTLKTLRTAALQARNLSNPSSQNLLWEAFNTHG

SEQ ID NO: 199829 - protein, 102 aa, Glycine max
  Clone ID: PAT_MRT3847_2246C.1.pep
EHSSLDGALNGNMEKQNRDHNHYEKQGANNEKMGGGNFNLGKISFKWNIAHPCLKHFPPLVFKKKTHPPKLFLHFFHPRGLSLQLGEFLKGANSLCLHVQFF

SEQ ID NO: 199830 - protein, 34 aa, Glycine max
  Clone ID: PAT_MRT3847_22470C.1.pep
LISYYLIRVPRNCIQWGLELYLGCALLCVMGGKE

SEQ ID NO: 199831 - protein, 101 aa, Glycine max
  Clone ID: PAT_MRT3847_22471C.1.pep
GYLTLIVALYKLNNVTVKHIHSHASSSTFVGSIPVCSAVRQCFSHLELYFDRSVTLPHYASRVSFIEIVYTGQGKRYMNLECRLWMEVSKYELQVLYASKA

SEQ ID NO: 199832 - protein, 79 aa, Glycine max
  Clone ID: PAT_MRT3847_22472C.1.pep
ESYAIVIIVETLPASHECIFGDQSMWILTPWASGKNQVPCLLGRIPQGRVQHASPHKREQSKIADEKHRRSTVGRDVSR

SEQ ID NO: 199833 - protein, 102 aa, Glycine max
  unsure (1)..(102): unsure at all Xaa locations
  Clone ID: PAT_MRT3847_22473C.1.pep
GHYGVEIGRKKSXAANKYSSEQGQLAVQVLKESTHVQRVLHIRQKDRVLDSHIXEQFGGGPLLAGISSRPGQCGRAHGNILGGKEVXFPYSXLQRKKGKGAV

SEQ ID NO: 199834 - protein, 46 aa, Glycine max
  Clone ID: PAT_MRT3847_22474C.1.pep
MKSSSRLFTIGLLTSLYSCNIDVLMLNKDLLSNYGFKYPILLTMCH

SEQ ID NO: 199835 - protein, 30 aa, Glycine max
  Clone ID: PAT_MRT3847_22475C.1.pep
NLDVMHLVIHAVIYFEGFKSLVPPRAESAR

SEQ ID NO: 199836 - protein, 103 aa, Glycine max
  unsure (1)..(103): unsure at all Xaa locations
  Clone ID: PAT_MRT3847_22476C.1.pep
SGGXSSPRRERXHGRXEEEEREEEQXGGGGQKARSYRQVKSXLREGSVIVIPAGHPTALVAGEDKNLAVLCXXVNASFDDKCSRGTNSAXQKMDRPAXLLAFG

SEQ ID NO: 199837 - protein, 146 aa, Glycine max
  Clone ID: PAT_MRT3847_22477C.1.pep
MASVATKQQEGEKPAKRKPVFTKVDQLKPGTNGHTLVAKVLSSNTVLQKGRPSSSHNIRPTLIAECLIGDDTGTIIFTARNEQVDIMKTDNTVILRNAKIDMFKGSMRLAVDKWGRIEVTDPAKFIVKEDNNLSLVEYELVNVAEE

SEQ ID NO: 199838 - protein, 33 aa, Glycine max
  Clone ID: PAT_MRT3847_22478C.1.pep
GLNSLTWANVQRSLDSCYYSHMSMLLVLMNYLI

SEQ ID NO: 199839 - protein, 61 aa, Glycine max
  Clone ID: PAT_MRT3847_22479C.1.pep
DPLISLVRQFFYKGRGKHNSVQEMEGIIIYSPEKNEMTKFTKIFFLAQLLNNKVVISFGNI

SEQ ID NO: 199840 - protein, 52 aa, Glycine max
  Clone ID: PAT_MRT3847_2247C.1.pep
FLFWARKMRLTIAGETGGLGFLTPNEISGHSGAILQTQKQILYRLKREMGPG

SEQ ID NO: 199841 - protein, 188 aa, Glycine max
  unsure (1)..(188): unsure at all Xaa locations
  Clone ID: PAT_MRT3847_22480C.1.pep
MKSHAYQDNYTGRSQIFLGNCNILLPRQVITFVFGAKMDIXGGALLKGLSQXVQVEFPMLLESMNFFKFGQXIKMLKXPVHVIRSEFCYILLICTYTSALNGKELEERKSYIXAFDAKHKRGGGGFICVEGYHDVLRDQTFKLACIXKFEHLSGTCFIVWNEFWQEILKSKQLGKFEGRMTCDGMQNF

SEQ ID NO: 199842 - protein, 74 aa, Glycine max
  Clone ID: PAT_MRT3847_22481C.1.pep
CHVSWRHWLCSTQTPGCSVPQHERRSSQSGDGSYLCRPAHEFHKGFTVLPHLVHGLELKWKSYSPVFKGNIEVT

SEQ ID NO: 199843 - protein, 57 aa, Glycine max
  Clone ID: PAT_MRT3847_22482C.1.pep
SNSAFDYNHGSYLQDRGNSGKLLFRGTSPERGKNFFNTGLDKCVGTRAKFTCGEGGP

SEQ ID NO: 199844 - protein, 54 aa, Glycine max
  Clone ID: PAT_MRT3847_22483C.1.pep
SISESKRCASSMCPGPSSGGSSHEHCISLIAHPCLKSTVAIGLPFGTSALSEQE

SEQ ID NO: 199845 - protein, 75 aa, Glycine max
  Clone ID: PAT_MRT3847_22484C.1.pep
AVTSFQVCRSASLCDVCVPIHLRLEPASDNINTRSYVVTSFFKAFRCPCSCPSVVHPIDIEGGADRDHNHSSIVT

SEQ ID NO: 199846 - protein, 498 aa, Glycine max
  Clone ID: PAT_MRT3847_22485C.1.pep
PRVRRDPRETYVRYGEREDKLDGIAVARVERYEREHMCDAPANTSVGWRDPGFIHDAVLIGLKKGQRYYYKVGNDNGGWSATQSFVSRNSDSDETIAFLFGDMGTAVPYNTFLRTQDESISTMKWILRDVEALGDTPAFVSHIGDISYARGYSWLWDHFFAQIEPVASQVAYHVCIGNHEYDWPLQPWKPDWASYGKDGGGECGVPYSLRFNMPGNSSELTGNAAAPPTRNLYYSFDMGAVHFVYISTETNFVPGSKQYDFLKHDLESVNRSKTPFVVVQGHRPMYTTSHENRDAALRGKMLEHLEPLLVNNNVTLALWGHVHRYERFCPLNNFTCGVNAGHNAGDKKGYTVHIVIGMAGQDWQPVWEPRPDHPDDPIFPQPKWSLYRGGEFGYTRLVATKQKLVLSYVGNHDGEVHDQLEILASGEVVSGDGGCSIADANSKAGNVIVESTLSWYVKGGSVLLLGAFMGYVFGYVTSARKKSEVPESNWTPVKTEET

SEQ ID NO: 199847 - protein, 82 aa, Glycine max
  Clone ID: PAT_MRT3847_22486C.1.pep
TKKQKRGFPKQLLQMSTTNNLLLLNSSLILLHIGAVTTIRMKLISFKRQQTSTYDDKHYIKTILRSLHMHTLNTSLMKVTRY

SEQ ID NO: 199848 - protein, 111 aa, Glycine max
  unsure (1)..(111): unsure at all Xaa locations
  Clone ID: PAT_MRT3847_22487C.1.pep
SXXRLXKLEIXLDIXXXNXXXXXXXLISXXXLFXXLLLPXPXXMXNVQXHKXXLXIIXSXXSXHXXAXYXXRXXLXXILFXSLIXNEXXXXXPSXRPAXXSRXSPDXATDP

SEQ ID NO: 199849 - protein, 69 aa, Glycine max
  Clone ID: PAT_MRT3847_22488C.1.pep
GASATLRHKLYCSTRANAIVLKLREVLTSITGRFVRTNYQQSLHTNAHDHPTSESFSLTQYVNGRRVAT

SEQ ID NO: 199850 - protein, 88 aa, Glycine max
  unsure (1)..(88): unsure at all Xaa locations
  Clone ID: PAT_MRT3847_22489C.1.pep
MAGSPNIFGGRRSNVFDPFXLDMWDPYRDVPYPHSVSTSLPGSIRANLALVSTQLDXKETPEAHVFKAAIPGLPKEEALVQIEDDKAL

SEQ ID NO: 199851 - protein, 64 aa, Glycine max
  Clone ID: PAT_MRT3847_2248C.1.pep
NTAIDTTCMYVAANPRATTLRDDWFETPLLGQCVIGYYTTEIKDAIIRPNRITCYGAVVHSAVV

SEQ ID NO: 199852 - protein, 68 aa, Glycine max
  Clone ID: PAT_MRT3847_22490C.1.pep
NQIGTIIGFCSVLCLLGFLTLFCVPNTFGSHFFSDGVLLFEWFLGGLCCLLLWISMCVCVCLSLIVWI

SEQ ID NO: 199853 - protein, 116 aa, Glycine max
  Clone ID: PAT_MRT3847_22491C.1.pep
MSYFEHVDVIDDEGHLLVRMACIVAKLMLNCQKSVISSRQGSEHIKTSVCRAKIRYHAYLRKMTSNNHTRGGPFHLRAHCKILYNAFQGMNPQKTAHCADALERIKVLEGVSAPYD

SEQ ID NO: 199854 - protein, 198 aa, Glycine max
  Clone ID: PAT_MRT3847_22492C.1.pep
MASALSSLSSTSSSLLQHSFTGNSKAPPTTQFPNKNVRFSVFAQKKAKKLRKIILKEDVAYVGKQGQLLDVKAGFFRNYLLPMGKAQLVTPQLLKEMKIEEERIEAEKKRVKEEAQQLALIFETVGAFKVKRKGGKGKQIFGSVTAQDLVDIIKAQLQREVDKRIVDLPEIRETGEYIAELKLHPEVTARVRVNVFAN

SEQ ID NO: 199855 - protein, 74 aa, Glycine max
  Clone ID: PAT_MRT3847_22493C.1.pep
EEAECHRAYDSATDVYMSSFDRSTPPEEVALREAHEQAKQKSMAAFNAIAIRVGSARKTYEGLLLKFFKKAFED

SEQ ID NO: 199856 - protein, 76 aa, Glycine max
  unsure (1)..(76): unsure at all Xaa locations
  Clone ID: PAT_MRT3847_22494C.1.pep
TLFLPCLGXGXXQKQDLNSMLLFCMGPIYNRLKSLKESNNERGAKAVMLFYELKGYLNNSLGANFQIFQIQGKLVT

SEQ ID NO: 199857 - protein, 44 aa, Glycine max
  Clone ID: PAT_MRT3847_22495C.1.pep
KIFKYFSNSSYKISNMYRIITIVRIHKGVVGIECSKHNSTQTVI

SEQ ID NO: 199858 - protein, 174 aa, Glycine max
  unsure (1)..(174): unsure at all Xaa locations
  Clone ID: PAT_MRT3847_22496C.1.pep
MASSESLYVTSVDGNSALPSSHTSPRAYKALIYMRRIWCHPSLSDELNLQLHLNVRDESSDILVFEVSEITLQCIKWADSFCIAFGNLADDTINFEAFPHKLVQFGEIQEKVVLKFSQGEFLTAWSTHVRTXTTLSADGSTYLYAMVHDTSVSTIPRDFVIEVKLTTINNMCAY

SEQ ID NO: 199859 - protein, 54 aa, Glycine max
  Clone ID: PAT_MRT3847_22497C.1.pep
VFLHRPSNLLSSHLEPLCVPLVPIYFKSPRSSPSFFPRPVAVNDKSVLWSFTRF

SEQ ID NO: 199860 - protein, 53 aa, Glycine max
  Clone ID: PAT_MRT3847_22498C.1.pep
VSWVTQTSQQPRVIVLHLILSLFHIAVLGISDKIILAFNSWYWFLSLMQCKYG

SEQ ID NO: 199861 - protein, 35 aa, Glycine max
  Clone ID: PAT_MRT3847_22499C.1.pep
GSPPPPPPPPPPPPPPPPPPPPPPPPPPPPPPPRR

SEQ ID NO: 199862 - protein, 77 aa, Glycine max
  unsure (1)..(77): unsure at all Xaa locations
  Clone ID: PAT_MRT3847_224C.1.pep
LLXLAIWXXXXXXXXXXKXPXVXIPVNXANGVVLXXEXXEFXXKLXXIXXXXXXMXPXXCRHNXCXEXXXIFXXLST

SEQ ID NO: 199863 - protein, 385 aa, Glycine max
  unsure (1)..(385): unsure at all Xaa locations
  Clone ID: PAT_MRT3847_22500C.1.pep
MIPCLFGSFLNSSTNPFLPHASFSGHRPRRNAVTASIFPKRLRRPPVMDKVFNKLRNLDAYPKVNEDFYNRTLAGGVVTVVSAAVMLFLFFSELSLYLYTVTESKLLVDTSRGDTLHINFDVTFPAVRCSILSLDAMDISGEQHLDIRHNIVKKRIDANGNVIEERKDGIGAPKIERPLQKHGGRLGHDEKYCGSCFGAEESDEHCCNSCEEVREAYXKSAXPMTNMDLIDQCQREGYVQRVKDEEGEGCNLQGSLEVNKVAGNFHFATGKSFLQSAIFLADVLALQDNHYNISHRINKLSFGHHFPGLVNPLDGVRWVQGPTHGMYQYFIKVVPTIYTDIRGRVIHSNQYSVTEHFKSSELGVAVPGVFFFYDISPIKASILLM

SEQ ID NO: 199864 - protein, 114 aa, Glycine max
  Clone ID: PAT_MRT3847_22501C.1.pep
TFLVMVVPSPDPKKPPHFSTTFLATRILTGYCSSKIPFCILKGPMARSVSKCLQISALEIIRIRSFSSARQRRSSLNSGCSFRSQCSSHWSMSLSVKPLFEAIRSLMGPLAHFI

SEQ ID NO: 199865 - protein, 84 aa, Glycine max
  Clone ID: PAT_MRT3847_22502C.1.pep
TFLIPHIPNLNIAAVNLTFINEHSQKELLNILNNVRRKKCLVIDPNLRDSLSLIIQTSILQDHDIELLHLSGHPIKTYLLKVNL

SEQ ID NO: 199866 - protein, 42 aa, Glycine max
  unsure (1)..(42): unsure at all Xaa locations
  Clone ID: PAT_MRT3847_22503C.1.pep
PWVYNLFWFKLTFALCFAFFFXRSPVLGPFNILSXVLGVGEG

SEQ ID NO: 199867 - protein, 44 aa, Glycine max
  Clone ID: PAT_MRT3847_22504C.1.pep
LGIRLEKTLRVFRFQFCFSYLSSFLLIRVFVWDLDVVFLFFFNF

SEQ ID NO: 199868 - protein, 49 aa, Glycine max
  Clone ID: PAT_MRT3847_22505C.1.pep
KCSRSQLNKEISDDIKKKKKKKKKKKKKKKKKKKKKKKKKKKKKKKKKK

SEQ ID NO: 199869 - protein, 81 aa, Glycine max
  Clone ID: PAT_MRT3847_22506C.1.pep
LFGKRPLGASKDQTKIEKKQRHPALAVDEYLKNNSNGERINFFTPVVWRTLSPGIQKKSVISPMAGMLQNRCPILAPYCPM

SEQ ID NO: 199870 - protein, 222 aa, Glycine max
  Clone ID: PAT_MRT3847_22507C.1.pep
QPSVGNHDNIQGQFPHHMFPPWPVHSPQGSVPVFSPYPVQGIPYYPAYPGNSPFMQPNYSPMEDPRLTAGQNNGRRRHSMDSRHSNTEPETQDEVDMEREGLHTGDQRKKDRRSARQKSGMVVIRNINYITKAENSGSGSYSDSASETDEDNKESVKTSKRREPGKESLKKLDSSDMEETEHGKDADGGHWQAFQNCLLRDVDEDRHAIDKDQFDQEKVHDV

SEQ ID NO: 199871 - protein, 106 aa, Glycine max
  Clone ID: PAT_MRT3847_22508C.1.pep
QLVDLKNGETYNGHLVNCDTWMNIHLREVICTSKVIDKVQEETKSRADRKPPGVGRGRGRGREEGPGGRPTKGIGRGLDDGGARGAGGSRGRGGPSGKPGGNRGKS

SEQ ID NO: 199872 - protein, 52 aa, Glycine max
  Clone ID: PAT_MRT3847_22509C.1.pep
DSLVQTTLNNMVVPLLPNKIVTTMVKTFKRPHTDKKILSRQTGTDYRVPNPM

SEQ ID NO: 199873 - protein, 148 aa, Glycine max
  Clone ID: PAT_MRT3847_2250C.1.pep
EKSDVYSYGIVVLEVLTGKQPIDPTIPDGLHIVDWVRHKRGGVEVLDESLRARPESEIEEMLQTLGVALLCVNSSPDDRPTMKDVVAMMKEIRQEREECVKVDMLLNASSANEQQERNHLTEEPMSMISTSSTNLHLHYSPHRPQTPK

SEQ ID NO: 199874 - protein, 148 aa, Glycine max
  Clone ID: PAT_MRT3847_22510C.1.pep
MLPLSLLKTAQGHPMLVELKNGETYNGHLVNCDTWMNIHLREVICTSKDGDRFWRMPECYIRGNTIKYLRVPDEVIDKVQEETKSRADRKPPGVGRGRGRGREEGPGGRPTKGIGRGLDDGGARGAGGSRGRGGPSGKPGGNRGRGRG

SEQ ID NO: 199875 - protein, 424 aa, Glycine max
  Clone ID: PAT_MRT3847_22511C.1.pep
MAEGKTATQKSLQDFDPQKTPRRNKYAFACAILASMTSILLGYDVGVMSGAIIYIKRDLKLTDVQIEILLGIINLYSLIGSCLAGRTSDWIGRRYTIVFAGSIFFVGALLMGFSPNYSFLMFGRFVAGIGIGYALMIAPVYTAEVSPASSRGFLTSFPEVFINGGILLGYISNYAFSKLTLKVGWRMMLGVGAIPSVLLTVGVLAMPESPRWLVMRGRLGEARKVLNKTSDSKEEAQLRLAEIKQAAGIPESCNDDVVQVNKQSKGEGVWKELFLYPTPAIRHIVIAALGIHFFQQASGVDAVVLYSPRIFEKAGITNDTHKLLATVAVGFVKTVFILAATFTLDRVGRRPLLLSSVGGMVLSLLTLAISLTVIDHSERKLMWAVGSSIAMVLAYVATFSIGAGPITWVYSSEIFPLRLRAQGA

SEQ ID NO: 199876 - protein, 137 aa, Glycine max
  unsure (1)..(137): unsure at all Xaa locations
  Clone ID: PAT_MRT3847_22512C.1.pep
IINLYSLIGSCLAATSDWIGRXYTIVFAGAIFFVGALLMGFSPNYSFLMFGRFVAGIGIGYALMIAPVYTAEVSPASSRGFLTSFPEVFINGGILLGYISNYGFSKLTLKVGWRMMLGVGAIPSVVLTVGVLAMPES

SEQ ID NO: 199877 - protein, 47 aa, Glycine max
  Clone ID: PAT_MRT3847_22513C.1.pep
FEKSHDLGRGVDNQSLKVFREKFERPPEIFPNGPNPCFKLFEPYVPR

SEQ ID NO: 199878 - protein, 36 aa, Glycine max
  Clone ID: PAT_MRT3847_22515C.1.pep
EKVTVLHNRLMYSTILRNQVGRLDHEEHTADNLSIR

SEQ ID NO: 199879 - protein, 78 aa, Glycine max
  Clone ID: PAT_MRT3847_22516C.1.pep
PSSSGVRTVRIGPAAPYGSGCLLTRRRATPPPPPPSDTSYTLLELTTLLLMVLYLLDVYRAFIFKLLILNISLIHYLL

SEQ ID NO: 199880 - protein, 144 aa, Glycine max
  Clone ID: PAT_MRT3847_22517C.1.pep
EHMPDKAKFVGELARVAAPGATIIIVTWCHRELGPDEQSLHPWEQDLLKKICDAYYLPAWCSASDYVKLLQSLSLQDIKSEDWSRFVAPFWPAVIRSALTWNGLTSLLRSGLKAIKGALAMPLMIKGYKKNLIKFAIITCRKPE

SEQ ID NO: 199881 - protein, 64 aa, Glycine max
  unsure (1)..(64): unsure at all Xaa locations
  Clone ID: PAT_MRT3847_22519C.1.pep
VGRVRYLEVYGFRYNCFDHAVTFKFWCCCRFLVLVHMVVVIVFKVWXCRVVIICVVKMFSVVVT

SEQ ID NO: 199882 - protein, 82 aa, Glycine max
  Clone ID: PAT_MRT3847_2251C.1.pep
ISERKIIGRIYRFFSTILKFALISCTEVLNFKLLFYFLYYLNHIPTTTSVNSQIVFYSVKNLNPLSALLIHKSNQIGLLFPK

SEQ ID NO: 199883 - protein, 73 aa, Glycine max
  Clone ID: PAT_MRT3847_22520C.1.pep
DQVCERSDYGVPVLVCCVIRIHLGDHHNNVQMYDDVQLPKFLKRRTLELSMIQILYQQQLCERCVEMALVVYT

SEQ ID NO: 199884 - protein, 123 aa, Glycine max
  Clone ID: PAT_MRT3847_22521C.1.pep
PKLPISKTSFGFNKIFFYFSNSLFQQWDHEPYYKLFIKNSAHDWAPEKTPRDHLLEKPYIRRGDHRNTPTQPFIKKTTGPPPGEGWPLANTKRRPHPLGVLGGKHPPSLGLILLSDLYFFFTP

SEQ ID NO: 199885 - protein, 77 aa, Glycine max
  Clone ID: PAT_MRT3847_22522C.1.pep
MSAYDNVVGGKLKLKGKALDVAGGVKKKKKKNKRNQEQLLQVAEDEVSAGWLVYLFESNRLSCMHVLLFFSLTEICC

SEQ ID NO: 199886 - protein, 75 aa, Glycine max
  Clone ID: PAT_MRT3847_22523C.1.pep
NPVWNEHSEFIIEDASTQLSTVRIVDDEGVQASELIGCAQVSLKDLEPGIVKDVWLKLVKDLEVHRDIKYRGEVR

SEQ ID NO: 199887 - protein, 61 aa, Glycine max
  Clone ID: PAT_MRT3847_22524C.1.pep
RSTRNYTNDKPPNTKPCDKDDIYQRRSIIPSYDDTYKPLYNIQIYSKSNKSFILSTNYSIL

SEQ ID NO: 199888 - protein, 46 aa, Glycine max
  Clone ID: PAT_MRT3847_22525C.1.pep
VSSSLPAGVNSVLFYPPLVISATNPSSHSPFSLSRPRLIETIFNWP

SEQ ID NO: 199889 - protein, 148 aa, Glycine max
  unsure (1)..(148): unsure at all Xaa locations
  Clone ID: PAT_MRT3847_22526C.1.pep
KNISGLPNLXGIVMFXAFXAGEQYQHPLLGLFGSQCATXLSSRMPCHPHAQPTQHTXAVTPGIRHEGREKFTHMTSDASSVSITLEPPPSASRRALLTGEHPLQLRAFVGCHGGFSAQPHDWNRLYFHFCWVYHICSKLGSYDIHAPA

SEQ ID NO: 199890 - protein, 257 aa, Glycine max
  unsure (1)..(257): unsure at all Xaa locations
  Clone ID: PAT_MRT3847_22527C.1.pep
MGRTYIVEETVGQYLSSINLQGKPFVSGLLIGQCSSQKDYVILATRTPPKEEQNDKVKQPRAKLDNLDEEWATEHASQVSRMLPGGLVVLGIFIITTLELADDFQNALRRLIFSMEKSMSRKRLWDVTEDEVSERVTLHICSSTKKISCRTYDVQDPKSSARPADWKYQSRVSASWLSLDCTVHVNIHIPLSATSVSYTLEXNTKSGLTRWAKQIEXNGVYLINGQVKGNDCDLLEGQKKSRGNTQATAHSFEFRVL

SEQ ID NO: 199891 - protein, 77 aa, Glycine max
  Clone ID: PAT_MRT3847_22528C.1.pep
KLGTKLTYINIKASKIKKEIICSQAMQNTVFNRNLLIQQLFSHHLLRSNFFQLTLPGSTRTKTFAFTGLSGLIQPDF

SEQ ID NO: 199892 - protein, 57 aa, Glycine max
  unsure (1)..(57): unsure at all Xaa locations
  Clone ID: PAT_MRT3847_22529C.1.pep
DHSAMNDKMHINLKYTDPTDKSXAMTSEASDNVYCTLLIQSAVHGAQARYTVFTAGL

SEQ ID NO: 199893 - protein, 68 aa, Glycine max
  Clone ID: PAT_MRT3847_2252C.1.pep
RVEVAEQFTTCCYNTHITTRTLRLEKQIPIYSFHHLQSLMYLICPFSLYPRQSFAKSFNKLNFTNYIL

SEQ ID NO: 199894 - protein, 58 aa, Glycine max
  Clone ID: PAT_MRT3847_22530C.1.pep
RLRIYSIPQKAMSTRVILFDTGMPTLIVRFTRYLQSCVSPLGKHRLTSQECNTAQVHS

SEQ ID NO: 199895 - protein, 176 aa, Glycine max
  Clone ID: PAT_MRT3847_22531C.1.pep
QKRKWLKKLEEVKPHAVQEQLPGVQYCIKSPPPWREALLLGFQHYLLTLSITVLIPTILVPQMGGGDAEKARVIQTLLLASGISTFLQSLLGTRLPIVVVGSYTYIIPIISIIQANRYKSYTDPYERFTQTMRGIQGALITTSCFQMAVGFFRLWRNAVRFLKPLCVVPYVTSLDS

SEQ ID NO: 199896 - protein, 86 aa, Glycine max
  Clone ID: PAT_MRT3847_22532C.1.pep
LDMLETTLVALQDITLEKIFDDHGRKILFSEFPQIIQQGFACLQGGICLSSMGRPVSYERVVAWKVLNEEENAHCICFMFMNWSFV

SEQ ID NO: 199897 - protein, 30 aa, Glycine max
  Clone ID: PAT_MRT3847_22533C.1.pep
FNLLTEIKYESLRIHSIFAFYFILRYLPIY

SEQ ID NO: 199898 - protein, 133 aa, Glycine max
  Clone ID: PAT_MRT3847_22534C.1.pep
CYLGVELLKSNNEGNESLVKSLWHHSDAILCCTLKALPVFTFSNQAGLDMLETTLVALQDIPLEKIFDDHERKILFSEFPQIIQQGFVCLQGGICLSSMGRPVSYERVVAWKVLNEEENAHCMCFMFMNWSFV

SEQ ID NO: 199899 - protein, 846 aa, Glycine max
  Clone ID: PAT_MRT3847_22535C.1.pep
RFDLDVESMSCKDGSRNGIGMDNGKYVRYTPEQVEALERLYHDCPKPSSIRRQQLIRECPILSNIEPKQIKVWFQNRRCREKQRKESSRLQAVNRKLTAMNKLLMEENDRLQKQVSQLVYENGYFRQHTQITTQATKDTNCESVVTSGQQHNLITQHPPRDASPAGLLSIAEETLAEFLSKATGTAVEWVQMPGMKPGPDSIGIVAISHGCTGVAARACGLVGLEPTRVAEILKDRPLWFRDCRAVDVLNVLPTANGGTIELLYMQLYAPTTLAPARDFWLLRYTSVLEDGSLVICERSLKNTQNGPSMPPVQHFVRAEMLPSGYLIRPCEGGGSIIHIVDHMDLEPWSVPEVLRPLYESSTVLAQKTTMAALRHLRQISHEVSQSNVTGWGRRPAALRALSQRLSRGFNEALNGFTDEGWTTIGNDGVDDVTILVNSSPDKLMGLNLSFANGFPSVSNAVLCAKASMLLQNVPPAILLRFLREHRSEWADNNMDAYTAAAIKVGPCSLSGSRVGNYGGQVILPLAHTIEHEEFLEVIKLEGIAHSPEDTIMPREMFLLQLCSGMDENAVGTCAELISAPIDASFADDAPLLPSGFRIIPLESGKEASSPNRTLDLASALDVGPSGNRASNGCANSSCMRSVMTIAFEFAFESHMQEHVASMARQYVRSIISSVQRVALALSPSHLSSHAGLRSPLGTPEAQTLAHWICNSYRCYLGVELLKSNNEGNESLLKSLWHHSDAILCCTLKALPVFTFSNQAGLDMLETTLVALQDITLEKIFDDHGRKILFSEFPQIIQQGFACLQGGICLSSMGRPVSYERVVAWKVLNEEENAHCICFMFMNWSFV

SEQ ID NO: 199900 - protein, 76 aa, Glycine max
  Clone ID: PAT_MRT3847_22536C.1.pep
ILCVPPANAQLGYFTSRPWTPWPFDTQSVNTSYASNCDATTMMTRKKTRPHDFIILMLTMTLNILTTVSPSVVFWN

SEQ ID NO: 199901 - protein, 92 aa, Glycine max
  Clone ID: PAT_MRT3847_22537C.1.pep
LASATHWSAFALGFEAEIGGEEAIEIVHRWIWCVRVQGNGVVVRWKEHAKGNNGGWVAIPPSFCRIGEFAKTDSPCLNSSFSFFCSRTRGRP

SEQ ID NO: 199902 - protein, 144 aa, Glycine max
  unsure (1)..(144): unsure at all Xaa locations
  Clone ID: PAT_MRT3847_22538C.1.pep
ARAHSHGLGISFSASSYIRTPCGWLKIGLLDVXKKISCRACNKGATPAHIGVFRRDFHGIGQGNSGTGSNILPMLKAHRLAPEIPQDLYHLLNKADLLRKPLVRDLSDEGSLFQLLLGESIFHRLSRSYKMTTKLPPLWMYDST

SEQ ID NO: 199903 - protein, 62 aa, Glycine max
  Clone ID: PAT_MRT3847_22539C.1.pep
LVCDVDKYIFQYITHDFHDISQIILFFLFIKLFQGGIRSINKEGREQANKFGVEQVEMPHYS

SEQ ID NO: 199904 - protein, 78 aa, Glycine max
  Clone ID: PAT_MRT3847_2253C.1.pep
LPGLFFIKPTHGQRPGGSQQPSLCCLEFIVILNLFIYTHNCPLVSGQGFVIFRGWTSEGNKEWLSNMNSLLKAQEVGP

SEQ ID NO: 199905 - protein, 108 aa, Glycine max
  unsure (1)..(108): unsure at all Xaa locations
  Clone ID: PAT_MRT3847_22540C.1.pep
QXRXXNHHXGXXDIXXXPXTXXXXPXXLEXKWXAXXXXASXXXMEXGIXRXSGXRXXXWVKRIXXRXXXAAIAIXVIXXXXXLAKPXXELXSSXLXXXXXXRXXGXXC

SEQ ID NO: 199906 - protein, 51 aa, Glycine max
  unsure (1)..(51): unsure at all Xaa locations
  Clone ID: PAT_MRT3847_22541C.1.pep
KKTPVYPPENPPFKRKRPXYQSPPPKPMGPQGGPQNGKNFPPPFPTLAPPV

SEQ ID NO: 199907 - protein, 782 aa, Glycine max
  unsure (1)..(782): unsure at all Xaa locations
  Clone ID: PAT_MRT3847_22542C.1.pep
LFLNYHQLQLLLVIVISLVLQQHKIWLVFAQVLVVSGETGCGKTTQLPQFLLEEEISCLRGADCNIICTQPRRVSAISVAARISAERGESLGEAVGYQIRLESKRSAETRLLFCTTGVLLRQLVQDPDLTGVSHLLVDEIHERGMNEDFLIIILRDLLPRRPDLRLILMSATINADMFSKYFANAPTMHIPAAAYPVADHFLEDVLEKTRYSIKSDFDNFEGNSRRRRKQQDSKKDPLTEMFEDIDVDTNYKNYSLGVRKSLEAWSGSQIDLGLVEATIEYICRNEAGGAILVFLTGWDEISKLLDKLKGNNLVGDPSKFLILPLHGSMPTVNQCEIFERPPPNKRKIVLATNIAESSITIDDVVYVIDWGKAKETSYDALNKLACLLPSWISTASAHQRRGRAGRVQPGVCYRLYPKLIHDAMPQXQLAEILRTPLQELCLHIKSLQLGTVGSFLEKVMLVXSPGILKNLXNYNLGMGLYLNLAIVFFWNGYLQYLISLVKXGKSVLIGKIDKVMNQFHSGFFCLKEHCSLGLHINRFDSADAAKQSFAGDSCSDHLALLKAFEGWKEAKRSGNEKQFCWDNFLSPATLRLIDNMRMQFLNLLSDIGFVDKSRGANVYNQYSHDLEMVCAILCAGLYPNVVQCKRRGKRTAFYTKEVGKVDIHPASVNAGIYLFPLPYMVYSEKVKTTSIYIKDSTNISDYALLLFGGNLVPSKSGEGIDMLGGYLHFSASKSVIELIRKLRGELDKLLNRKIEEPGFDVSAEGKGVVAAAVELLHSQVMR

SEQ ID NO: 199908 - protein, 125 aa, Glycine max
  Clone ID: PAT_MRT3847_22543C.1.pep
AFYLSLGNPGLVLKGVKANQTSDNNNLHVQNMGGDDAVPVPGLKSWEVRNFQASHAHESKMIVPHVEENAGESGSIGSMAYGDLQSLSLSMSPSSQSSSVTSSHRASPAVVDSVAMDTKKRGPEK

SEQ ID NO: 199909 - protein, 302 aa, Glycine max
  Clone ID: PAT_MRT3847_22544C.1.pep
MNYLLGAFKPACNVLITFNDGKNRKQVPFKKENGQMVTVPLFQSQENIGGKITIEPMQGKKIDHNGVKVELLGQIEMYFDRGNFYDFTSLVRELDVPGEIYEIKTYAFEFSTVEMPYETYNGVNVRLRYVLKVTINRGYAGSIVEYQDFVVRNYSPPPQINNSIKMEVGIEDCLHIEFEYNKSKYHLKDVIIGKIYFLLVRIKIKNMDLEIRRRESTGSGTNTHVETETLAKFELMDGAPVRGESIPIRLFLSPYELTPTHRNINNKFSVKYFLNLVLVDEEDRRYFKQQEITMYRLQEETS

SEQ ID NO: 199910 - protein, 72 aa, Glycine max
  unsure (1)..(72): unsure at all Xaa locations
  Clone ID: PAT_MRT3847_22545C.1.pep
EKCGIEKENNFKEYGERXRYWESERXYRFNXRWGDDLYDEGVRHEIXSVWISYCPQDDRFLGQKIASRLRMK

SEQ ID NO: 199911 - protein, 130 aa, Glycine max
  Clone ID: PAT_MRT3847_22546C.1.pep
VNPVAEFDRLDDSNVIGYGVASTLYSVHWFAVKHNSILDRPSVFYLGGKTFKTCPVAHACWSPHVMEESLVLLENGQLFLFDLESHDTTGTAFKGTRLKVPWNGLGFSGNNMVWLSCEFSWHPRVFVVAH

SEQ ID NO: 199912 - protein, 71 aa, Glycine max
  Clone ID: PAT_MRT3847_22547C.1.pep
NYILEGNLFWEKKNLLSGEKNHKPIFCKGQKGLAKRKSSGVAGLVKASSKVQGGTEEAGKFNPALIGNGVG

SEQ ID NO: 199913 - protein, 150 aa, Glycine max
  unsure (1)..(150): unsure at all Xaa locations
  Clone ID: PAT_MRT3847_22548C.1.pep
ARSPGVNMLESGRXSGSGEVEPRRSGFDGVERRDFMFDNNNYESGSDLKGGVKKVVGLMHGVGDGGGFYGGVNRRVFSLRESDFKGMDESSFIDLKLDYSSESKHEFSAAKMSNNMGGDTFSSFRESDFTGMDESSFIDLKLDYSCFDSD

SEQ ID NO: 199914 - protein, 121 aa, Glycine max
  unsure (1)..(121): unsure at all Xaa locations
  Clone ID: PAT_MRT3847_22549C.1.pep
FASSFLFSCCRTILEKKLADADVSEEDQNNLLKFLEKKETEYMRLQRHKMGVDDFELLTMIGKGAFVEVRVCMEITSDHVYAMNKLNILYMLRIVQVVHVKAVRVFLAEVDXIALSKLYCS

SEQ ID NO: 199915 - protein, 82 aa, Glycine max
  unsure (1)..(82): unsure at all Xaa locations
  Clone ID: PAT_MRT3847_2254C.1.pep
YSRSTITXCXQRXQKXSXSFSISXXSFSKIXPETSDXXGXFKXPXWSPGATXWXDKFNIXFAXXQXVVADAXLXXFTFLFXP

SEQ ID NO: 199916 - protein, 75 aa, Glycine max
  Clone ID: PAT_MRT3847_22550C.1.pep
LSSLFSMYETYSIIHPTQLHIIIAFSLLCLSCKPRQRQKSAKPENLYLKKMQSYMLLKKVFQDPRRYCICVLVDF

SEQ ID NO: 199917 - protein, 66 aa, Glycine max
  unsure (1)..(66): unsure at all Xaa locations
  Clone ID: PAT_MRT3847_22551C.1.pep
MSNSKDFHYMFIVGQSAGRIXVMELYADVTLRIVENLRLLCTGDNVVGLFGKLRHYNGTSVHRESP

SEQ ID NO: 199918 - protein, 42 aa, Glycine max
  Clone ID: PAT_MRT3847_22552C.1.pep
SSQIVSLISLILEEPYILLIYSKYLWKHNLKKYIIQIGEKET

SEQ ID NO: 199919 - protein, 102 aa, Glycine max
  Clone ID: PAT_MRT3847_22553C.1.pep
DSWLGCNRTSPVRWGKGRAGIIINREGRGIGTKVGIQFSRLYGDGALQKVASPPPALFWYFSFLTSRVRLNAALPFYHLLTTMPFYHLPRPCKHINQPKGSK

SEQ ID NO: 199920 - protein, 31 aa, Glycine max
  Clone ID: PAT_MRT3847_22554C.1.pep
MRPQFVYSGPVTMGPGLPTWHLVCVCLVDPL

SEQ ID NO: 199921 - protein, 86 aa, Glycine max
  Clone ID: PAT_MRT3847_22555C.1.pep
FLSLPFFFSCVAFETLSSVNTSLLLPLKVIQRFNSVSLVSKACYIKFYWFQVNLPFSFELHNFFFPIRRHVSPDATRTRRVRVVYP

SEQ ID NO: 199922 - protein, 109 aa, Glycine max
  unsure (1)..(109): unsure at all Xaa locations
  Clone ID: PAT_MRT3847_22556C.1.pep
LRLKLPLDDVETAKGPMSDLTISQCKRALPINTXGGTILGLDLSGDSMTXGQYESTGQIGESTPRTNGMMKWGGTGGIPANTWIAWAWAMNRCFTGRARLEFTPSVLRL

SEQ ID NO: 199923 - protein, 123 aa, Glycine max
  Clone ID: PAT_MRT3847_22557C.1.pep
SSGSGPARCCNVASCAYNFALLQLLLLASDSHYHHDCCQHLRDLQCVHLLDKHLDSSLSHSRFCLSDPSRSHAMRLFADRFLLVGRSIALHHWGRFRWRRTVSILPQVSPSRHASSSCAAEDR

SEQ ID NO: 199924 - protein, 77 aa, Glycine max
  Clone ID: PAT_MRT3847_22558C.1.pep
PKPIVFGAKIRDLEGFSIPFFAKMSQGGAGPTMGGAGAGPPKKNKPAPSGGRGAGPKIEKGAKRGGGFPPFFCLKLI

SEQ ID NO: 199925 - protein, 85 aa, Glycine max
  Clone ID: PAT_MRT3847_22559C.1.pep
AWISSAVNNRSSDINSRIRSALAQRKKLVMLTRADPYPVAGLAVRFGVKNPILSSNATTPMLTRLRDNCNSPRYLADECPSASVT

SEQ ID NO: 199926 - protein, 98 aa, Glycine max
  unsure (1)..(98): unsure at all Xaa locations
  Clone ID: PAT_MRT3847_2255C.1.pep
LIFVILQFYPVKDWLTGSSLPSKFSPSVIQMVLDQLSPNNVRRIFWESKKFEGLTDKVEPWYGTAYSLEKITGSAIXGWVLSAPDENMHLTAANXFFQ

SEQ ID NO: 199927 - protein, 113 aa, Glycine max
  unsure (1)..(113): unsure at all Xaa locations
  Clone ID: PAT_MRT3847_22560C.1.pep
SLENATTDDVTPXLYCNTEDCPYELLHPPEDCNVNSSLSFTLQICRVEDILVEGLIKGSVVHFHRARTISVESSGTISASGMGCTGGLGRGNTLTNGIGSGGGHGGTGGDAFY

SEQ ID NO: 199928 - protein, 134 aa, Glycine max
  Clone ID: PAT_MRT3847_22561C.1.pep
MENDIEGVHWCNICSKMVNPMSDDENICPFCETEISEVMDNLRDQNDVFDLRSAWVFSLYAPIFLGLMGAFSPSLARIAPHGGSSSRGGVEEEVEQERENELVLGRRRRTLTYMMHLYRGLHIRMVSELETLKT

SEQ ID NO: 199929 - protein, 78 aa, Glycine max
  unsure (1)..(78): unsure at all Xaa locations
  Clone ID: PAT_MRT3847_22562C.1.pep
XXXXXXXXXXXXXFFFFFIFIFFFFFFFFSILTFSNDHIIKIDARTFPKKYCNENVISCKSYNTGKTKRYIEQSSINK

SEQ ID NO: 199930 - protein, 109 aa, Glycine max
  unsure (1)..(109): unsure at all Xaa locations
  Clone ID: PAT_MRT3847_22563C.1.pep
XXXXSLRATRLXXXXSPEXXXXFPVXFXXPTXXSXLXXXHCFHQMXAKDFRFXXFYXXXLTVNXHXPRXLTXXXVTXXTAVTLRQXPFLQXXXXXLEXEXPSXTLRCAR

SEQ ID NO: 199931 - protein, 414 aa, Glycine max
  Clone ID: PAT_MRT3847_22564C.1.pep
RREKTTEGVATSTSKNHATKCTGCGNCTSPAENGIEILSQIPSPRLVNLIGFSTDPNGNKLLVVEYMPNGSLHDLLHSVKKPPGWNRRVRFALQVAKAVRELHSSNPPVIHRDVKSSNVLIDQEWNARLGDFGLALRGHVEDVRVKCTPPAGTLGYLDPCYLAPEDLSAKSDVFSFGILLLEIISGRNAIDVNFSPPSVVDWAVPLIKIGDFAGICDRRIGPPPDPAVVRQLAVLAARCVRSTAEKRPSMAEVVECLNLARKRIRASPIWNSLRRRVARVESALPVFDGNDCDGSEEFVRMVNKGGSGSKRNGKVSSVSRVGYGSEASNNNKVMRSKSIGSGSLKGSWVKMQPHQTENEGFGRRKVKLKRSKSMGVLQGSLLIHYGSENDVVIRSGMAKLVVKDKLEKPLVKSR

SEQ ID NO: 199932 - protein, 43 aa, Glycine max
  unsure (1)..(43): unsure at all Xaa locations
  Clone ID: PAT_MRT3847_22565C.1.pep
MDHLLLRELSDILMMAVRAFTDXEGLLGRSWHKRMMYGPLRRI

SEQ ID NO: 199933 - protein, 402 aa, Glycine max
  unsure (1)..(402): unsure at all Xaa locations
  Clone ID: PAT_MRT3847_22566C.1.pep
SLEYLDLSANKYLGDIARTLSPCKSLVYLNVSSNQFSGPVPSLPSGSLQFVSLVWNHFHRQIPFSLADLCSTLRVRPRVRNNLTGALPGAFGACTSLQSLDISSNLFAGALPMSVLTQMTSLKELAVAFNGFLGALPESLSKLSALELLDLSSNNFSGSIPASLCGGGDAGINNNLKELYLQNNRFTGFIPPTLSNCSNLVALDLSFNFLTGTIPPSLGSLSNLKDFIIWLNQLHGEIPQELMYLKSLENLILDFNDLTGNIPSGLVNCTKLNWISLSNNRLSGEIPPWIGKLSNLAILKLSNNSFSGRIPPELGDCTSLIWLDLNTNMLTGPIPPELFKQSGKIAVNFISGKTYVYIKNDGSKECHGAGNLXEXAGISQQXLNRISTSNPXISLGFMEVCS

SEQ ID NO: 199934 - protein, 116 aa, Glycine max
  unsure (1)..(116): unsure at all Xaa locations
  Clone ID: PAT_MRT3847_22567C.1.pep
MEAGPGHTLMFLARVSIFIRALTLCAAHGSTTDHDIARKLKLSDNXLLLTEKKFKVFMENYRRCYSTXEEYLRHDRILAHNMVRAAEHHALDPTVEHGVTQYCHLTEDEFEKLYTG

SEQ ID NO: 199935 - protein, 69 aa, Glycine max
  Clone ID: PAT_MRT3847_22568C.1.pep
VFIIGYPFGKLKALVFRGFSPPGQKGSSIMLYMVWETVLTADTVFFKQGGFHFHYYYYGNWIMPWGPQK

SEQ ID NO: 199936 - protein, 201 aa, Glycine max
  unsure (1)..(201): unsure at all Xaa locations
  Clone ID: PAT_MRT3847_22569C.1.pep
VLNASKRLPPLTVPLHDALGKVLAQDVRAPDPLPPYPASVKDGYAVVSADGPGEYPVVAESRAGDDALGLTLSPGTVAYVTTGGPIPDGADAVVQVENTEIVNNASDGTKRVRILLQTTKGNDIRPVGXDIKKDAVVLTSGKRLGASXIGLLATVGVTMVXVYPTPTVAVLSTGNKLXEPTTGHLXSCQIXDSNRAMLXAA

SEQ ID NO: 199937 - protein, 111 aa, Glycine max
  unsure (1)..(111): unsure at all Xaa locations
  Clone ID: PAT_MRT3847_2256C.1.pep
MAPKGLMFFAALCLLSLPLSRSLAEDTGLGINLYDESYPHADDIICEHVKLLYKRHNNTDFSWLINILHDCAVQSRDTLLMLDSTXQSLSENETYRSSRLRNLRFIETIKQ

SEQ ID NO: 199938 - protein, 216 aa, Glycine max
  Clone ID: PAT_MRT3847_22570C.1.pep
MASRKRKATASRPREPYDTTRFTSEGAWERYEQNIHSRNILPERNVVLYISEYDEFRRELERRCWHKALTRQLDGHIDVALVKEFYSNLYDLEDKSSRQMDMDVGMARGVISDSLTFESLIPAINLAYIRKNCWNPDDPTITFSGTRKARARGPSDTSAPSSSAPAPSSSAPPASIPAPVPAPVPSGTSAQSTVLLVSMLQSLQHGLCLVMQSIHD

SEQ ID NO: 199939 - protein, 166 aa, Glycine max
  Clone ID: PAT_MRT3847_22571C.1.pep
MELEASNQPKQERSRTRWTASLDKIFADLVVKQIQLGNRPNNVFDKKTWNHIRDEFNRQTDLNFNNNQLRKHLDVLRTRHYNLKSAYDQNNDFVMDDSCCIGFEQWEDIGVQPRNENVKVKDSPIYEQLCTIFIDSAADGKYAKSSHYEELEKSIVADATGFTPCP

SEQ ID NO: 199940 - protein, 228 aa, Glycine max
  Clone ID: PAT_MRT3847_22572C.1.pep
MGSVSSEDGSDRCGSYSLSADVSESESCSSFSARRFDAEGASSSANLSPRPVAAHFNFPPAQVMLPVIGGKDVVVWDHKRDLDLSEQLHFAEVEMMKERFAKLLLGEDMSGGGKGVCTALAISNAITNLSATVFGELWRLEPLAPQKKTMWRREMEWLLCVSDSIVELVPSVQQFPGGGTYEVMATRPRSDLYINLPALKKLDGMLLNMLDGFHDTQFWYVDRGNIFG

SEQ ID NO: 199941 - protein, 48 aa, Glycine max
  Clone ID: PAT_MRT3847_22573C.1.pep
VTLGMFIYWVTHLFWQTFLSNRVGGFLENTLKLNIFLLKITIITIKLK

SEQ ID NO: 199942 - protein, 189 aa, Glycine max
  unsure (1)..(189): unsure at all Xaa locations
  Clone ID: PAT_MRT3847_22574C.1.pep
RHCVISINVVRSVWETVGSVSSEDASDHMSNRCGSYSLSADVSESESCSSFSARRFDAEGASSSANLSPRPVAAHFNFPPAQVLLPVIGGKDVFVWDHKRDLDLSEVEMMKERFAKLLLGEDMSGGGKGVCTALAISNAITNLSATVFGELWRLEPLAPQKIAMWRXEMEWLLCXEXDPLVELVPSVQQ

SEQ ID NO: 199943 - protein, 46 aa, Glycine max
  Clone ID: PAT_MRT3847_22575C.1.pep
FALVSELVIWEKHYSHSREIRASMKVTGGGVIIGMAVVGAPMMAQA

SEQ ID NO: 199944 - protein, 121 aa, Glycine max
  Clone ID: PAT_MRT3847_22576C.1.pep
MAIRNIGGGRTEEATHPDTLKAALAEMISSFIFALAGSGCGIAYNKLTDNGGATPAGLISASIAHAFALFVVASAGAKISGGHVYPAVTSSALVAAKITCLRGIVYAMARLIGSTGSSPPL

SEQ ID NO: 199945 - protein, 201 aa, Glycine max
  Clone ID: PAT_MRT3847_22577C.1.pep
MRHGEANSGQGPKVNLLQHANALENFSSQAKFLSSTFLFSVPPKKPHHEQPNPGFVFRRSETIQGSQRVQVEKALAAHSSLQNSSRNYVQPGKTQVTPQLHEDRRTTSFHGGYENGNHRCPDVAATPIVNNHNSRGLDGSVNNHTNYTGQINKSSNCMAVDIDDDDSLLANIDVDQIVEDYCTPKPSISKLITPTADKENF

SEQ ID NO: 199946 - protein, 125 aa, Glycine max
  unsure (1)..(125): unsure at all Xaa locations
  Clone ID: PAT_MRT3847_22578C.1.pep
LDYLERNGDFMGGTGWKMTEFGWDGMYACVQTLLALLLMHGRAMHHAXIAERYQQRAELPMCSYPVKGHRNGQKTTRGLIXYTRDXYNMPFVTSASFLVTGHSDYLGICGRNLRRSSRYVPPDVL

SEQ ID NO: 199947 - protein, 66 aa, Glycine max
  Clone ID: PAT_MRT3847_22579C.1.pep
LPPTPLFFSPPIKKSSPFSPPIGNYLYTPPYYQTQKLLLKIFQTPQKFFIRNSENPTKIENFSVRN

SEQ ID NO: 199948 - protein, 158 aa, Glycine max
  Clone ID: PAT_MRT3847_2257C.1.pep
MENNKKKVGGGSSSSSFTNFDHLFGPKDPSTTSSSSTSIFGSIFPPPSTVGGRDSTKQDTGCKNYGAPGNYSYKGESSASGVSNNNNTTSTNYHQNETVEPSYYSSSIHYGGQENYSPRTRTTESHHIFKKDKDDDDPNGNDSNSASRGNWWQGSLYY

SEQ ID NO: 199949 - protein, 165 aa, Glycine max
  unsure (1)..(165): unsure at all Xaa locations
  Clone ID: PAT_MRT3847_22580C.1.pep
GSSGVQELVNTFFSFLRRKTDFFIGGEEGMAXRARQEAERREKAERAARLAKEAKSETSGPQIKELTDEEAERLQLEIDQKKDAENHEAQLKNGSLDSPGKQDTEEDEEEDEKDKGXLKPNLCNGADLPNYRWTQTLSELDLAVPFCVNFRLKGKDMVVDIQRRH

SEQ ID NO: 199950 - protein, 187 aa, Glycine max
  Clone ID: PAT_MRT3847_22581C.1.pep
LASGLLSSPSSSQVFHSSSYPINPKLFLALEQIKTNKMCFNIEHNAKNITGLNSPEQMQRKLIFDVVNDILAQKIILESSTLWCQPNQQAGRKLRGQLLLDELCTEIDKLQHKNTNANLNDEDENLTSLLWEELMHCPTIYTNSYSEIPNVVLDIERLIFKDLITEVVRSGLANHSGKHCRQLLFSK

SEQ ID NO: 199951 - protein, 92 aa, Glycine max
  Clone ID: PAT_MRT3847_22582C.1.pep
KNPTLFPRVGLKRGGEKPTLMAQKGGGFFFKKGWVWAGLGFKRKGPSIPKKKRENSQGWGAWGGVQGAQPRKSLKGKKGGGPIWGQKENGPG

SEQ ID NO: 199952 - protein, 119 aa, Glycine max
  unsure (1)..(119): unsure at all Xaa locations
  Clone ID: PAT_MRT3847_22583C.1.pep
QGLDVTSSLRXDFKFHDYRAVIKCEDPNANLYSFVGSMEFGEQKYPLSAQQLLLRDSKLRNTDYVFGAVIFTGHDTKVIQNSTDPPSKRSKIEKKMDKIIYFLFCVLFLIAFVGSILFG

SEQ ID NO: 199953 - protein, 43 aa, Glycine max
  Clone ID: PAT_MRT3847_22584C.1.pep
FIMLSLDEILGSYPPKTGKPPPVRSLQVKFGLRSRAPFRAPLF

SEQ ID NO: 199954 - protein, 103 aa, Glycine max
  Clone ID: PAT_MRT3847_22585C.1.pep
MESESEVTMIPCFDFCKALEEGSEEWKEMSKKVREACESHGYFLLMCDEIIPESVREEMFDGMKELFDLPEETKQQHICQKPYRGYIGKNSIIPLCESFGSMM

SEQ ID NO: 199955 - protein, 65 aa, Glycine max
  Clone ID: PAT_MRT3847_22586C.1.pep
FQPKPTKFCRSLQILHLLELVCHQFRQNTNEKQKDKIIELGRSKPFKSRSDQRQKRESPEELTDE

SEQ ID NO: 199956 - protein, 71 aa, Glycine max
  Clone ID: PAT_MRT3847_22587C.1.pep
KKILSLVPTTEGSLLQINSFRFSISNPEKAIKISLIFVQEISLPPIFWCFIDQPHQKTLFFLQKKFPPQPA

SEQ ID NO: 199957 - protein, 68 aa, Glycine max
  Clone ID: PAT_MRT3847_22588C.1.pep
PRVREYMPSLTGRVMDESGATLELMDRNICSAAGGVGSCILLTERIVQLCNVLISRYYDLTAGDSYDR

SEQ ID NO: 199958 - protein, 38 aa, Glycine max
  Clone ID: PAT_MRT3847_22589C.1.pep
LRLPLVCLNCSLFGCLHFSLQHHHCVRSEGVCLIPHAK

SEQ ID NO: 199959 - protein, 48 aa, Glycine max
  unsure (1)..(48): unsure at all Xaa locations
  Clone ID: PAT_MRT3847_2258C.1.pep
AVXXWRXPHNHXISRHDFHEXXHTHVTTXHLRDXSSPWFTIHQNIFKK

SEQ ID NO: 199960 - protein, 63 aa, Glycine max
  Clone ID: PAT_MRT3847_22590C.1.pep
KKKAKRFFLGKIKQTFFSGKVTFKLLDKGLFKRGKATNLPYIRRKWREKLYNPTTVLVTSLSQ

SEQ ID NO: 199961 - protein, 49 aa, Glycine max
  Clone ID: PAT_MRT3847_22591C.1.pep
RIRCIRRRRRNYFIYQDGIWVHSCMSPIYVPLNWTLSNRTFVQSNHFNI

SEQ ID NO: 199962 - protein, 53 aa, Glycine max
  Clone ID: PAT_MRT3847_22592C.1.pep
RRKHKHYQHRHLITVIFIVLLINNCCHFQPLQFPKLSTAHNKLQLHYILIVPL

SEQ ID NO: 199963 - protein, 86 aa, Glycine max
  Clone ID: PAT_MRT3847_22593C.1.pep
CFMLVSGNTTAFGSSTHATFLSYHEVKLPSSYSWKELLPSSCGGYLCEKLFLEVYFFLHGQFKLVLWLIMSAMKMITSLVVKSEMV

SEQ ID NO: 199964 - protein, 89 aa, Glycine max
  Clone ID: PAT_MRT3847_22594C.1.pep
SPLIFIYICPRGNTPIGNFDCLILLLGIFVWVETPVGKNGGKITFFCLNGTGYRGGSTRINTLNDPCKKNISTFFWLKNFVNIHPLKLF

SEQ ID NO: 199965 - protein, 126 aa, Glycine max
  Clone ID: PAT_MRT3847_22595C.1.pep
KFFAPREYEFSCSNTPHNFFFPTGGKPPPPLFFACVHAPPTKDDDVVPVTPMKAVMEMFNNNKKNPVKVKASPALPGFGRTPMVRQFRVRDSPFPLGNPDKNNAPLVNKAPKNFIKRFSKELRKQD

SEQ ID NO: 199966 - protein, 125 aa, Glycine max
  unsure (1)..(125): unsure at all Xaa locations
  Clone ID: PAT_MRT3847_22596C.1.pep
IAMFGIAAVRRSDWAXLAQVVLTNRHRTEHVDACQWTXSEPHSWELIFPIEVCXPNNGFEMRRSEWANQTSWHWRMLIDNPKQSTVFDIRLGIIYDFEIAGNTLMPTFSGPQATARSSENAESSE

SEQ ID NO: 199967 - protein, 94 aa, Glycine max
  Clone ID: PAT_MRT3847_22597C.1.pep
VGCVAVCSVAVSRFSSCNSLCRINIFLFKNTLIIFSLFFEFIFFTLPILIFFIQIQNFKNKKNSIKEFKILSSKFSHRNPKHVVTYIFVKLTSQ

SEQ ID NO: 199968 - protein, 79 aa, Glycine max
  Clone ID: PAT_MRT3847_22598C.1.pep
RLREDDRRVPPMYSTVFHTSIVMAFALMLKGNFSILVILSISLFCFYSGYDYIYLWLQLSFLFNHLFYALRILIYTILW

SEQ ID NO: 199969 - protein, 376 aa, Glycine max
  Clone ID: PAT_MRT3847_22599C.1.pep
MQVFSNARRASWLLLFPHLRTSEAPHSTALSLFSGLAQRDSRQVNTDPVHCLSKAFFSSGMDTGEATPSEDVKELYDKMLDSVKVKRSMPPNAWLWSMIANCKQQHDIRLLFDILQNLRRFRLSNLRIHDNFNCNLCREVAKACVHAGALDFGMKALWKHNVYGLTPNIASVHHLLTYAKNHNDTKLLVEVMKLLKKNDLPLQPGTADIIFSICYNTDDWELINKYAKRFVMAGVKLRQTSFETGMEFAAKRGHTESLWKIEKLRSESMKQHTLITGFSCVKGLLLERKPSDAVAVIQVLNQTLSDTKKSGIKGELQKLVSEWPLEVIKHQKEEDRKALSASLKSDILVMVSELLSVGLDANVSLEDLDRKECIPR

SEQ ID NO: 199970 - protein, 93 aa, Glycine max
  Clone ID: PAT_MRT3847_2259C.1.pep
ALVDHPPIMSSKRVSWIILATAYQRLDQSIRTLTASVGELGPKASVGNCKFHPVRTYNRWSRHKVRTRGKRRGWSRQLWRGGTRRCSVLPYSE

SEQ ID NO: 199971 - protein, 42 aa, Glycine max
  Clone ID: PAT_MRT3847_225C.1.pep
LLHTLSSIPKHLNFIEHTSDIGWKEDQRAKPVIIDPTLYRGK

SEQ ID NO: 199972 - protein, 105 aa, Glycine max
  unsure (1)..(105): unsure at all Xaa locations
  Clone ID: PAT_MRT3847_22600C.1.pep
RQLPSEAVVVNVTCGSGRGGLPTSAWICYADYNRXXSVNKWIRTALGKGLKIVFLTRVDPFPVALLAVLLGVKNEILCSDLTNHMMSRLFENCTNLKYLDGERSF

SEQ ID NO: 199973 - protein, 46 aa, Glycine max
  Clone ID: PAT_MRT3847_22601C.1.pep
MKMGSPSMGGSKRRLSSRGLGGALREQRARLYIIRRCVVMLLCWHD

SEQ ID NO: 199974 - protein, 71 aa, Glycine max
  Clone ID: PAT_MRT3847_22602C.1.pep
YWPPSIFITARQKKYLFLKTHSPKNKIRKCSKPQTSMVQYFLFQRTRIKITIMLLVLYLIQQNHHIRTNCL

SEQ ID NO: 199975 - protein, 83 aa, Glycine max
  unsure (1)..(83): unsure at all Xaa locations
  Clone ID: PAT_MRT3847_22603C.1.pep
RQLPSEAVVVNVTCGSRRRGLPTTFTTTCNIXKAIRTALGKGKKIVFLTRVDPFPVALLAVLFGTXXEILSSNATXPMLTRFL

SEQ ID NO: 199976 - protein, 52 aa, Glycine max
  Clone ID: PAT_MRT3847_22604C.1.pep
QGPVLKGYAFKKQKKLWSPVKCETATFFFFGVCNKALCLLRLKPLKWLGNSF

SEQ ID NO: 199977 - protein, 49 aa, Glycine max
  unsure (1)..(49): unsure at all Xaa locations
  Clone ID: PAT_MRT3847_22605C.1.pep
CSEIXQIPFKVQNLCFCQSRFKVSPFIFIHFCVWIIGVVDFVIFFGSKI

SEQ ID NO: 199978 - protein, 56 aa, Glycine max
  Clone ID: PAT_MRT3847_22606C.1.pep
NYLSPRPQFLHYKPKSRMELCRERELDDSFISGSFSDTEVTEDSQSEVSQKESEDV

SEQ ID NO: 199979 - protein, 102 aa, Glycine max
  Clone ID: PAT_MRT3847_22607C.1.pep
RLCLKHQLGLACVALHLPALCSLQVSFTDSRATYYGSPDCYGNPRGACGFGEYGWTCDDGRVARVSRLWWNGSGCGASCHARCRKPQYCGAYATFVEVSDYC

SEQ ID NO: 199980 - protein, 47 aa, Glycine max
  Clone ID: PAT_MRT3847_22608C.1.pep
FHRGKAFIVYSHKAFLKSVAHCTILKAVISNLNKNVSFISSKNKNQH

SEQ ID NO: 199981 - protein, 130 aa, Glycine max
  Clone ID: PAT_MRT3847_22609C.1.pep
ALRRGRENPDRDFRAHHQNAGVAVAPGLESCHALVLNADFRPLSYFPLSIWSWQDAVKAVFLDRVSVISEYDRTIHSPSFEMRLPSVIALKEYIPAARRPAFTRFNAFLRDRFHCQYCAGDFATNELTFD

SEQ ID NO: 199982 - protein, 93 aa, Glycine max
  unsure (1)..(93): unsure at all Xaa locations
  Clone ID: PAT_MRT3847_2260C.1.pep
ARRLINLGLPRTMDFLGVNPNSFDGHGNYSLGLRDQGAFPXIADEVDRKKNGMDVSIVTSTKTGNIKTDVVIRKMKLKRDHFLSKGKGKGRRR

SEQ ID NO: 199983 - protein, 42 aa, Glycine max
  Clone ID: PAT_MRT3847_22610C.1.pep
GGFLTHSGWNYALERNVLGVTMVIWTLFTEQRMKDVLLIEGL

SEQ ID NO: 199984 - protein, 351 aa, Glycine max
  Clone ID: PAT_MRT3847_22611C.1.pep
MAGNIIASSVPKSVQEMSMDGDEPPSRYVVNGNSFGSKDSSVQFPIPIIDVRLLSSEDELEKLRSALSSAGCFQAIGHGMSSSYLDNIRETAKQFFALPEEEKQKYARAVNESEGYGNDRVVSDKQVLDWSYRLTLRVFPETKRRLSLWPKIPTDFSEKLEEFSTKVKSMMEYLLRCMAMSLNLEEGSFVDQFGEQPLMLARFNFYPLCSRPDLVLGVKPHTDRSGITVLLQDKEVEGLQVLIDDNWINVPTMPDALVVNLGDQMQIMSNGIFKSIMHRVVTNTEKLRMSVAMFNEPEAENEIGPVEGLIDESRPRLYRNVKNYGDINYKCYQEGKIALETVKIADNSNQR

SEQ ID NO: 199985 - protein, 45 aa, Glycine max
  unsure (1)..(45): unsure at all Xaa locations
  Clone ID: PAT_MRT3847_22612C.1.pep
YHXKNXLXPGEIYVXXTSXXYHAEVKPSNXRXLXDXIXRNFXGEK

SEQ ID NO: 199986 - protein, 64 aa, Glycine max
  Clone ID: PAT_MRT3847_22613C.1.pep
GTGFTTAALGLRCGWHHHKASTNIFNHDGHPKLIFSSWKGLHGVINKSGHNRQCTRPSPIKQKG

SEQ ID NO: 199987 - protein, 170 aa, Glycine max
  unsure (1)..(170): unsure at all Xaa locations
  Clone ID: PAT_MRT3847_22614C.1.pep
KAQVQMKAYADRSRRAVTLSVGDWVYLKLQPYRLKSLAKKRNEKLSPRFYGPYQIKKQIGLVAFELDLPPARKIHPVFHASLLKKAVAATANPQPLPLMLSXRFELRVFPAEVKAVHNNSNGIAEVLIQLEDLPDFEATWESVEVIKEQFPSFHLEDKVTLLGGVLLDLL

SEQ ID NO: 199988 - protein, 102 aa, Glycine max
  Clone ID: PAT_MRT3847_22615C.1.pep
MSSPFLGDILLRKTSTSMSSTRARSNGFISNLPDCKFAASNPKIRQFFCYEAPKKSGVLIGIFRFSTDYKNFYPKEKKVVPKRNDMKHEFLGLGRPGVFIRS

SEQ ID NO: 199989 - protein, 106 aa, Glycine max
  unsure (1)..(106): unsure at all Xaa locations
  Clone ID: PAT_MRT3847_22616C.1.pep
SFTSLMALSLTSNGVNEYQKCVVEEEDGSQSTNGLSNDSASAITNSPPLCGNEYVHKSTHYQLEEAESLINFKANDQYNNLMQGSESFLSFQQXLMFSKESICIEV

SEQ ID NO: 199990 - protein, 96 aa, Glycine max
  Clone ID: PAT_MRT3847_22617C.1.pep
LREEAKGITITFCDKMRNSAFGLSSTVNNVFHIGFGVGTDIRLRLLTQNLWSPLLISQSSLISLALSTTFALHSNSNLAINPYPITLTSSKSDLAL

SEQ ID NO: 199991 - protein, 197 aa, Glycine max
  unsure (1)..(197): unsure at all Xaa locations
  Clone ID: PAT_MRT3847_22618C.1.pep
MVDVDRRPTGPNPAHAAGLRRLLARAASVSAASTVRNRNSLHSFSALSEKVITHLRNSGIQLHASHAAEFARSDSDPILRKQRSVSENHSSAANKCPAPGFSRHSLDAAVERRRRSKWVEGYVGMMGSVLREGGWSESDISEMVSGSGSVSVLLDNEEVFDAERFSDSXKKSGWSSEEVKDVLGLXLRPEKKERKPP

SEQ ID NO: 199992 - protein, 29 aa, Glycine max
  Clone ID: PAT_MRT3847_22619C.1.pep
PYILLMAFEKVSLHSKHNCRKSEAISLKM

SEQ ID NO: 199993 - protein, 150 aa, Glycine max
  Clone ID: PAT_MRT3847_2261C.1.pep
GGTSDQNKIPWIRWETVCLPKVQGGLGVKDITSFNISLLEKWKWDLFQNQGETWTRVLESKYGGWRSLDGASRTSIESLWWRDLKTINHHSHQGQQLNRSTLRKVGCGDKFKFWEDKWIGGDTQLLEKYPRLYTTSAQQHQFIQQLGSFQ

SEQ ID NO: 199994 - protein, 93 aa, Glycine max
  unsure (1)..(93): unsure at all Xaa locations
  Clone ID: PAT_MRT3847_22620C.1.pep
AFYIKNLMXQVESILRRLTLETFPNHGTISLVCNSXVYNSKSYHFDRIFFANNTYISSETPGPLVKCREEELXECXGDGTRERNEWDMIYDYD

SEQ ID NO: 199995 - protein, 75 aa, Glycine max
  Clone ID: PAT_MRT3847_22621C.1.pep
VVTFKHLIQLKKHKKNYLKRCIYHQLRYFVMLFIFHLIRIFQFVCVCGVLVSYILDISCVEMSVSGVHVKVHLEP

SEQ ID NO: 199996 - protein, 50 aa, Glycine max
  Clone ID: PAT_MRT3847_22622C.1.pep
ENFYKVSLYITLMRHKFLQTKRCETKELKPQNSNNSPTWGLPFYRLLAAV

SEQ ID NO: 199997 - protein, 75 aa, Glycine max
  Clone ID: PAT_MRT3847_22623C.1.pep
NSARARISSSTRAARTSPPGSCPSSALLSPFLPRPRHPPPASAADSTFPCLIKVSATVIWTVTSMFFFSVCDYNY

SEQ ID NO: 199998 - protein, 327 aa, Glycine max
  Clone ID: PAT_MRT3847_22624C.1.pep
EPFYISRQREPSITSLQWRKIAREVEFNSKVEKKRRGLIPLRDMNLDDYKAYKEAKLAQMKLLDYSSSFPVDENVPEPQLNRGEKFEAEAELDGGERVAPKNPRWAVYGRGLEDVTEFFNSDNYDPTAKTPGGRRKLFNKEEKVLLNKRIPDLAAATSDKWLPLHTLAACGEFHLLDSLLKHNVDINAVDKDGLTALHRATIGKKQVIINYLLRNSANPFVQDNEGATLMHYAVLTASTQTIKILLLYNVDINLQDNYGWTPLHLAVQAQRTDLVRLLLIKGADKTLKNEDGLTPLDLCLYNGQSARTYELIKLFKQPQRRLSHVSV

SEQ ID NO: 199999 - protein, 75 aa, Glycine max
  Clone ID: PAT_MRT3847_22625C.1.pep
FWGAGGADLLGDFKITLVTVFDITNLLLSKGKRCLWAAQAHSRACTSPHFWWHHVGHARYGILSVCESLTACNLL

SEQ ID NO: 200000 - protein, 53 aa, Glycine max
  Clone ID: PAT_MRT3847_22626C.1.pep
KKHNIMPDLTWMIQNSKPASQSNYGFYYGIFNSIQIQVSLYPRFIMSCNLMFI

SEQ ID NO: 200001 - protein, 41 aa, Glycine max
  Clone ID: PAT_MRT3847_22627C.1.pep
FKVYKSQCMQLIYPKKLRIRSLLKQERCRNSERMRKRKSGS

SEQ ID NO: 200002 - protein, 132 aa, Glycine max
  Clone ID: PAT_MRT3847_22628C.1.pep
MCDDHWVKVAMADDSLVVDLLLRLHRSPPPPPCLNLHWTVRQRRSRSAHNKAESTRASPTTPLSWSGATSASGGNLDGYEESKPSQTSRSKVANPSETATTRKTRRKKVKYEPFTVLLDVHVLGSSNNWSVP

SEQ ID NO: 200003 - protein, 124 aa, Glycine max
  Clone ID: PAT_MRT3847_22629C.1.pep
EEVSDKIERNLILLGATAVEDKLQNGVPDCIDKLAQAKIKIWVLTGDKMETAINIGFSCRLLRQGMKQIIIHLEIPDIQALEKVGDKMAIAKASRESVHHQISEAAQLLSASRGTCQTSALIID

SEQ ID NO: 200004 - protein, 88 aa, Glycine max
  Clone ID: PAT_MRT3847_2262C.1.pep
IFGTLDSRNNNNKLERKLNSMQKRNGDEESCEAVWEQINYRSIKGIEMLKPNLSSKNEELKKRKGRDIGESEREKEKRSFKQGPGLVE

SEQ ID NO: 200005 - protein, 244 aa, Glycine max
  unsure (1)..(244): unsure at all Xaa locations
  Clone ID: PAT_MRT3847_22630C.1.pep
YSFWPSLLKVPSFMVEFTTPIIRAFHSNGTKLSFYSMPEYESWRESLGNNANGWKIKYYKGLGTSTPQEGREYFQDLDKHKKDFVWDDEQDGGAIEMAFSKKKAEDRKIWIRNFEPGTCRDHMAKYINYRDFVNKELILYSRADLQRSIPSMVDGLKPGQRKILFCSFKKKLFKEIKVGQFIGYVSEHSAYHHGXEQSLASTIINMAQDFXVGSNNINLLKPNGQFGTRNLGGKDQACARYIYT

SEQ ID NO: 200006 - protein, 56 aa, Glycine max
  Clone ID: PAT_MRT3847_22631C.1.pep
LSHFFFKLPDTYGSHFSKLGFQKQDWKVVQSLFYIMSSEAMTIIIFNLFLVNLSTA

SEQ ID NO: 200007 - protein, 76 aa, Glycine max
  Clone ID: PAT_MRT3847_22632C.1.pep
PPTPLKQVQGVSFPRDVIAEECIPASVNNRKTGISNMIDMERRKETGTVGCSFGENRESNHADSITCSVGSCSITS

SEQ ID NO: 200008 - protein, 43 aa, Glycine max
  Clone ID: PAT_MRT3847_22633C.1.pep
RVKLRLVIHCNHWISRKSLSNLIPPHIYIGNIMLLPFVSFYIN

SEQ ID NO: 200009 - protein, 96 aa, Glycine max
  Clone ID: PAT_MRT3847_22634C.1.pep
LLFLVVEVSPPHSSFSTCHCFLFVIAANEFRRFSCMIAPSTLFFFTMALLQVASPYHQLLLAFTTTASLFGVFHVTKNERRYSFYPLLVREDLKQR

SEQ ID NO: 200010 - protein, 102 aa, Glycine max
  Clone ID: PAT_MRT3847_22635C.1.pep
LCLLLFLVVEVAPPHSSFSTCHCFLFVIAANEVRRFSCMIAPSTLFFFTMALLQGFGAVEFVLVRILIKEFSFILSEKRLCCGGFLKFAKSFFLYYYPACGL

SEQ ID NO: 200011 - protein, 88 aa, Glycine max
  unsure (1)..(88): unsure at all Xaa locations
  Clone ID: PAT_MRT3847_22636C.1.pep
IFTRYXXIFXXSLKCXTTTVTLKEGYQSGKLVDPHXLARHRDKFYHVMQTGLLYRGDGSLKPRENKIENDELRSEDEVEMSDQLCESE

SEQ ID NO: 200012 - protein, 82 aa, Glycine max
  unsure (1)..(82): unsure at all Xaa locations
  Clone ID: PAT_MRT3847_22637C.1.pep
LISGTYYCGTANNAGAILLLGRDLGVVSKXIHPLPSAISSPDTLPXRHIXDTWMLEMNAHRPPTPTICRSLVTNDRRSLAWI

SEQ ID NO: 200013 - protein, 51 aa, Glycine max
  Clone ID: PAT_MRT3847_22638C.1.pep
GSSLLRTIHSKHNKVKSDEHHIRIRRHGAGSRPCITLCSSETDNHPLLLIL

SEQ ID NO: 200014 - protein, 59 aa, Glycine max
  Clone ID: PAT_MRT3847_22639C.1.pep
ETDALEMLVRMTHRGACGCEANTGDGAGIMVALPHQFYKEVVFYFIFLKFLWRTFDFLN

SEQ ID NO: 200015 - protein, 54 aa, Glycine max
  Clone ID: PAT_MRT3847_2263C.1.pep
PTHPHTHSPTQPISYLTLPIYKTDIIQSLAELSLSNTLTHIPYIKSIPSLKTHQ

SEQ ID NO: 200016 - protein, 53 aa, Glycine max
  Clone ID: PAT_MRT3847_22640C.1.pep
NTCKHTNTKHPFSTQHRIEINLRAVITCSNEHVRVRDLVLIAQTPYSLHEQHQ

SEQ ID NO: 200017 - protein, 85 aa, Glycine max
  Clone ID: PAT_MRT3847_22641C.1.pep
SLSHFPCIMSSHSFEFGATSVHSPTLGRKIHNSTIKQGNWGPPGWRPTTKSRSLKTRGGETKPKKVPLSRGITNTPPGGGQGEPP

SEQ ID NO: 200018 - protein, 72 aa, Glycine max
  Clone ID: PAT_MRT3847_22642C.1.pep
GKKKELLQAGRPFGEARKRWTRPQIRRRRRGVLPEKGAGGNKNTASQRKELTLQIQTQVMQLRGQGLFITKH

SEQ ID NO: 200019 - protein, 74 aa, Glycine max
  Clone ID: PAT_MRT3847_22643C.1.pep
QQKGAAAIIRQIGTVAIRRQIVIFFELKPRRDCCYIHHHHLMDGRDPQDLNQIPAYMTAFVQNLFQQMQNMFQT

SEQ ID NO: 200020 - protein, 89 aa, Glycine max
  Clone ID: PAT_MRT3847_22644C.1.pep
SEGLTSIKGYCHNFYTAISKDVTYKELKNLLNSKNIMLFDVREIWEILEYQKIPESINVPLDEVGAALQMNPRDFRETCTAVQPSKSDS

SEQ ID NO: 200021 - protein, 75 aa, Glycine max
  Clone ID: PAT_MRT3847_22645C.1.pep
CVLCLEVCIENIENNSFPLFLYKFEIENENKKCFSNQTALKYSKPNTMDTKSELLPLLSLYYNTIAVSLAAWHSM

SEQ ID NO: 200022 - protein, 80 aa, Glycine max
  Clone ID: PAT_MRT3847_22646C.1.pep
EGLEQNNFQNASQNLNSLLLDNSIRVKAERIPDASSQTNLFPEHYGQEDLMSALLKQQEGMGPSENEFDFDGYSLDNIPV

SEQ ID NO: 200023 - protein, 186 aa, Glycine max
  unsure (1)..(186): unsure at all Xaa locations
  Clone ID: PAT_MRT3847_22647C.1.pep
RDIPPASGTYHSRPHSCFLTLHSYLHLRQHVPINLRLNPSSHKEDPYPRPARPGLAPSTNNYPTPPHFSGPTQVQLNSARHGVHYSVPPCSTATTTTTTRSSIIPEPTNCHHPVSGLSFPIPYLGDSNLPKGIYQQDFSHSKSTSSLPALPRVLPXPPTRHRAKLPTFESSISLNQKTTDVRQNKT

SEQ ID NO: 200024 - protein, 97 aa, Glycine max
  Clone ID: PAT_MRT3847_22648C.1.pep
INSLYTSMPCISTVDGKLPTNHPLIRLSRPTPLPKTPFQVRLRRRHTLFVYVMPPTYAKSSFTPSVADPAPATPLDPTSSTRNNTSINNNNLMRLLI

SEQ ID NO: 200025 - protein, 78 aa, Glycine max
  unsure (1)..(78): unsure at all Xaa locations
  Clone ID: PAT_MRT3847_22649C.1.pep
XXHXQNKPRESKAPHRARGPGRLXPMESHLNDAVFPEEDLDDDDETPEDEEEEEDDDVLYDDETEPPPSVIAVAPXXS

SEQ ID NO: 200026 - protein, 54 aa, Glycine max
  Clone ID: PAT_MRT3847_2264C.1.pep
RLLIPYDFLFLNIINQTHITICEEINHLHSHFRVVTQLINCICSVPIPLMILRF

SEQ ID NO: 200027 - protein, 63 aa, Glycine max
  Clone ID: PAT_MRT3847_22650C.1.pep
TAPAATLRETYRQPTHMTERKDVIKPDGNVESDARTMANDCDPSTNGNARIDRQIKSCQEHGI

SEQ ID NO: 200028 - protein, 42 aa, Glycine max
  Clone ID: PAT_MRT3847_22651C.1.pep
GKKGQIFIIQGYLERLGHHPMIPRPMGSNKTGRKPQGVLFRN

SEQ ID NO: 200029 - protein, 65 aa, Glycine max
  Clone ID: PAT_MRT3847_22652C.1.pep
QMAAKELLISIDGGPAHVLKNTRWVKTNRDCCYQIPGEEYRHRWKFKGEKRIITNKRGATKSRII

SEQ ID NO: 200030 - protein, 328 aa, Glycine max
  Clone ID: PAT_MRT3847_22653C.1.pep
HAFAHACGLPAYRTFALDELKEATNNFDESSFISEGPHGQIYKGVLSDGMHIAIRGLKMRKKQGPQTYMHHVEIISKLRHSHLVSALGHAFECNQDDSSVNNVYLIFEFVQNKSLRSCVSGYGCEKPTETQRITAAIGGVKGIQFLHTGIVPGLYSNNLKITDILLDNNHNVKISSYNLPLSAENKRMISKGTSPGLKGKVQARIQDADKNDVYDIGVVLLETILGRPIMFHNEVGTLKDLLQVSIKTDDIARRSIVDPAVHKECSDESLMTTMEICVRCLSGDPTERPSVENILWNLQFAAQVQNSWRRDSSDHDHSYSPAPSSRET

SEQ ID NO: 200031 - protein, 118 aa, Glycine max
  unsure (1)..(118): unsure at all Xaa locations
  Clone ID: PAT_MRT3847_22654C.1.pep
ARGRSRGFGFVSFRNQQDAQSAINDLTGKWLESRQIRYNXATKRASASNKKQSSNSKIIIKLINKSSEESXETTNNNTPKKNPQYTTIYINNLTPXEITSINLHQHFHSLNTRIIKDI

SEQ ID NO: 200032 - protein, 124 aa, Glycine max
  Clone ID: PAT_MRT3847_22655C.1.pep
RLLVLPQAAPESALEADLEDELRDELHGPLGSAEGSHAVLLDLLLVMVPMEVPVEAHRQRRGLRPLEFFITAADGGVDAGGLPNSLHGNHTIGAVRFATQLSLALSQSAIGPRMISWINRTRRS

SEQ ID NO: 200033 - protein, 69 aa, Glycine max
  Clone ID: PAT_MRT3847_22656C.1.pep
ATSSLAQGRTVMFAISLSFPPFFLYQHPFDLPLVLADPNQHIFQCFFSHSTYVRAPLIIIENLRSSRFF

SEQ ID NO: 200034 - protein, 62 aa, Glycine max
  unsure (1)..(62): unsure at all Xaa locations
  Clone ID: PAT_MRT3847_22657C.1.pep
LYMISHAHGYVSNVTXTHAHATYHGGRHASGTTYVSRGHRNHDTQGSGPDTDAHITDLLSND

SEQ ID NO: 200035 - protein, 62 aa, Glycine max
  Clone ID: PAT_MRT3847_22658C.1.pep
WLSLMSSASIKLGYHGAPTPLLLCVGPPVTDELTARLGSLADLINPDDSLAFTIEVLALLTA

SEQ ID NO: 200036 - protein, 41 aa, Glycine max
  Clone ID: PAT_MRT3847_22659C.1.pep
NSGADHTRPIGSQIIRLIQEFKWIMNLGMKWFKAIWFVQFR

SEQ ID NO: 200037 - protein, 397 aa, Glycine max
  Clone ID: PAT_MRT3847_2265C.1.pep
MEISALASSATPRPSLTTPSTSPHTVVTTTFSKPQLRRSHVAVSLPTSTTISLLALFAPPSEAKAAVSIAKDQIVSSLTQVEKTLDQVQEVGSGVLDTAQRIAEVIGNALKPGIETALPIVQQAGEEALKIASPAISEASKKAQEALQSSGVDTEPVISAAKTVADAAQQTTKVIEVAKPIASSTVKTISSSDPTVIAGTAGALFVAYLLIPPIWSVISSNLRGYKGDLTPAQALDLISTQNYVLIDIRSEKDKDKAGIPRLPSNAKNRMVAIPLEELPSKLRGQVKNVKKLEAEIVALKISYLKKINKGTNVVILDSYSDVAKTVGRTLTSLGFKNTWIVADGFSGNKGWLQSRLGTDSYNFSFAEVLSPSRVIPAAVRSFGTTSQSSTKLLPGAE

SEQ ID NO: 200038 - protein, 145 aa, Glycine max
  Clone ID: PAT_MRT3847_22660C.1.pep
RMKKNGLHKDAGCSWIEIGGMVYRFLVSDGSLSESKKIQQTWIKLEKKISKIGYKPDTSCVLHELEEEGKIKILKSHSEKLAISFGLLNTAKGTTLRVSTRPRICVDCHNAIKLVSKVVKRDIIVRDNKRFHHFKNGLCTCGDFW

SEQ ID NO: 200039 - protein, 143 aa, Glycine max
  Clone ID: PAT_MRT3847_22661C.1.pep
MALLVYLVLFLALTDHSSALYCLCKDGVSDQTLQKAIDYACGSGADCTPILQNGACYQPNTVKDHCNYAVHSYYQRKGNAPGTCDFAGAATTNANPPTASSGCVYPSSPSNTGTTPSIGSPPGTTPSTGGTTPGTSTTPTTFE

SEQ ID NO: 200040 - protein, 106 aa, Glycine max
  Clone ID: PAT_MRT3847_22662C.1.pep
CPTGFKCGINYQPSTVVPGGDLARVQRAVCMISNSTSVAEVFSRIDHKFDLMYAKRAFVHWYVGEGMEEGEFSEAREDLAALEKDYEEVGAESGDGDDDGEGDDDY

SEQ ID NO: 200041 - protein, 408 aa, Glycine max
  Clone ID: PAT_MRT3847_22663C.1.pep
MADDDKAVGEGEMKETTGGTSPSGSGKKKNKGFLLRIWNGIFRLHGDDFEKRLQYISKEEAQVMTRMNRRSRSWRRISRNLIVFSVIFEVVAVVYAIMTTRSIDLNWKMRAIRVSPMFLLPALAAAAYTTFVSFTRMCDRRDKKILERLRAERQEKIDELKERTNYYTTQQLIQRYDPDPAAKAAAASVLASKLGADSGLKVYLGDESSPSAPLGRSNDIEIVQSSGLRNRRQLQSRSTSPGTTTPNFADQQLVGPGGIDQTQTFELNKPVVVEHHLPQSSTTQDGGWIARIAALLVGEDPTQSYALICGNCYMHNGLARKEDFPVITYYCPHCHALNKPKQSDEHISGLTSPNTGGTPNTDDGVTDAVKNARASAAESVITSSSPGSASSSEIEEVSERASVDEKID

SEQ ID NO: 200042 - protein, 53 aa, Glycine max
  Clone ID: PAT_MRT3847_22664C.1.pep
WRPLYITFLHTICGYVICTHYPHTLSNASDDLSPTDRVIFIHDVAPQGIKEKT

SEQ ID NO: 200043 - protein, 32 aa, Glycine max
  Clone ID: PAT_MRT3847_22665C.1.pep
KRTQAYNFTEIESTFHFQILAHNQIKFSSQQF

SEQ ID NO: 200044 - protein, 62 aa, Glycine max
  Clone ID: PAT_MRT3847_22666C.1.pep
KKVAIVDHGIAYLLLVPINSLGYAHRFYYEQLHGDFVTLTYFSWVKKEMNQRMDPSTSYCVF

SEQ ID NO: 200045 - protein, 53 aa, Glycine max
  Clone ID: PAT_MRT3847_22667C.1.pep
SVDPSTIYSIVFRFRLRTSADVVSIVGIDIGSTSAHIYVRWHRELRHSILSQM

SEQ ID NO: 200046 - protein, 256 aa, Glycine max
  unsure (1)..(256): unsure at all Xaa locations
  Clone ID: PAT_MRT3847_22668C.1.pep
MAHLLASNPNASQKLTFSNLGYYGVRRGSRTKGSCYRVGRKRRGGLVLQCSSTTDQDVRLQIESGSIGKLKQHFEYLVCEYGWRVRRLFENADEIKKASHVQAEAFHVPVSLFNELFFQFFQAEVLSGLLYKLKNSPPNRYACLVAEPAINDPDSPKQLVGVIDVTVXTRHIRAIAASKTFRRRKIATALLKACDMLSILWGFEFLALRAYEEDLGARKLYTNAGYQVVSRDPPWTSNWIGRKCRVLMIKRTSFSK

SEQ ID NO: 200047 - protein, 51 aa, Glycine max
  Clone ID: PAT_MRT3847_22669C.1.pep
THEGLVTGMTINTVTYFTSLTPFVPTTFLCITLPKMRDILYIHEHQFLNQN

SEQ ID NO: 200048 - protein, 167 aa, Glycine max
  unsure (1)..(167): unsure at all Xaa locations
  Clone ID: PAT_MRT3847_2266C.1.pep
AEGNLDSDSPSTSSSSPSPFATDQTVFVTGEDVPLEGVIQFEKPTSSPPFEKWGRVALLAGADVLALFVFATIGRYSHGLSVLDLETLRTADPFIAXGIVIRAAASGHLPNYGFVLVSLGSTAVLLITFRALLYAILPVDNSKKSDDYRRGSPFELFELLTSLVRRW

SEQ ID NO: 200049 - protein, 137 aa, Glycine max
  unsure (1)..(137): unsure at all Xaa locations
  Clone ID: PAT_MRT3847_22670C.1.pep
PRVRRRKEAYGVRFLPRVRCWEYHQQPSIVRLTRATLADKGGHSGFKGEQRYVIYRVRVLRGGXKRPAAQCVVYGTPSNQGVTQLEFXGGERSVGYERAVREFNGLTVLSSYXMNEDSTHKYFQVILVDVAHTGWSK

SEQ ID NO: 200050 - protein, 101 aa, Glycine max
  Clone ID: PAT_MRT3847_22671C.1.pep
FGSREYIDKVVLVFSSACNKAKLLKVKVLIADKEYESAIAESGFLLKEDENNLEALLLRGRAYYYLADHDVATRHFQKGLRLDPEHSELKKAYFGLKNLLT

SEQ ID NO: 200051 - protein, 87 aa, Glycine max
  unsure (1)..(87): unsure at all Xaa locations
  Clone ID: PAT_MRT3847_22672C.1.pep
EILAHAVGEDVIMNDSNVXDFVDHGDKVTVELENGXXYDGDXLVGADGIWSKVRKKLFGQTEATYSGYTCYTGIADFVPADIEXVGY

SEQ ID NO: 200052 - protein, 57 aa, Glycine max
  Clone ID: PAT_MRT3847_22673C.1.pep
TYPCCVQCAQRKGLLLVLPSIIFFPTPIYVLACPENPYGIKSFQNYLNLQCRMGWLL

SEQ ID NO: 200053 - protein, 65 aa, Glycine max
  Clone ID: PAT_MRT3847_22674C.1.pep
KSDTRRKMLVFFISFLMLPYGLAYHRVLLPEYVIQLLCCSCDLQIFCQVQVFLYINLMILMEKAF

SEQ ID NO: 200054 - protein, 70 aa, Glycine max
  unsure (1)..(70): unsure at all Xaa locations
  Clone ID: PAT_MRT3847_22675C.1.pep
SGAYHEAGHALEGAXMPQYDPGPKMXIIPWGRAGGLTCFGPNEERLKYGLYRPSYHANHTADALGGRVVE

SEQ ID NO: 200055 - protein, 101 aa, Glycine max
  unsure (1)..(101): unsure at all Xaa locations
  Clone ID: PAT_MRT3847_22676C.1.pep
RRXQAYXSSEXXSXAXVXXNXXATLXGKXRRRXKXXXPXXXXAPCKXVRTFKXXXXRXGSHFXFTAPDFTXXGXRRXXTRLPSSXXTTFPIXISVSVYEHX

SEQ ID NO: 200056 - protein, 126 aa, Glycine max
  Clone ID: PAT_MRT3847_22677C.1.pep
MALRPIDNALPTTTPERPKKQPKIAVATQKQQDRASVNGENVVPLPSSEDATVDYVSSDNLKPLADPEVKIQSLVEDLDSKNWIKVCESLNDVRRFSLLHSSLLFPILGKIVLVVAKTMRNPRSAL

SEQ ID NO: 200057 - protein, 176 aa, Glycine max
  Clone ID: PAT_MRT3847_22678C.1.pep
MHLLKFPRSPSSFGNAFFLVGHHVLDIRVFRKNQRCFRASISCSAVRNGSIEQLSDARLIYSVAPSMGHNQESHPESHFRVPAIVNALEEMQLTSKFRGPEVIELQHFEPASVDDIASVHARAYVSGLEKVMDQAVEKGLIFLDAATPTYATVTTFGESIAAVDSGLILVDSVVIS

SEQ ID NO: 200058 - protein, 86 aa, Glycine max
  unsure (1)..(86): unsure at all Xaa locations
  Clone ID: PAT_MRT3847_22679C.1.pep
AKSSVLPTSPSGGSTXSLGASVTTPSASGENTSNVASRNGYTCPQPAWLANDAPGPVLAQLASDLHSLLDLVTKHFVKENXRINEG

SEQ ID NO: 200059 - protein, 181 aa, Glycine max
  Clone ID: PAT_MRT3847_2267C.1.pep
PRAESARALPEFITVTNPPTFSNPAPKFIPRRRSSTRPFHLTLAKAEGNLDSDSPSTSSSSPSPFATDQTVFVTGEDVPLEGVIQFEKPTSSPPFEKWGRVALLAGADVLALFVFATIGRYSHGLSVLDLETLRTADPFIAGWFLGAYFLGGFGEDGRGMNGLYKGVVATTKSWAVGIPVS

SEQ ID NO: 200060 - protein, 49 aa, Glycine max
  Clone ID: PAT_MRT3847_22680C.1.pep
WFPIDVRFTGSRLDYLILCFVLLQLISAPGILATFKCENFISLIKMRLT

SEQ ID NO: 200061 - protein, 27 aa, Glycine max
  Clone ID: PAT_MRT3847_22681C.1.pep
FLELIYFFKKCTFYDILKLLNDSFKSI

SEQ ID NO: 200062 - protein, 138 aa, Glycine max
  Clone ID: PAT_MRT3847_22682C.1.pep
YPVAKHASIVRELRPGDFDPKEKFWTRFPPEGSKFTPQHHSVDFRWKDYCPMVFRHLRELFAIDPADYMLAICGSDTLREMSSPGKSGSIFYLTQDDRFIIKTVKKSEVKVLIRMLPSYYQHVCQYKTSLVTAFLGGH

SEQ ID NO: 200063 - protein, 161 aa, Glycine max
  Clone ID: PAT_MRT3847_22683C.1.pep
MSEAEELPRSIVRRVVKDKLSRCSEDGEISVSKDALLAFSESGRIFIHYLSATANDICKESKRQIINVEDVFKALEETEFPEFLRPLKASLEEFRKKNAGKKAAVSKGKDDEPRKKRKLEGESPDKGEGSDKAELSDKGEDPDKGESDKGESGDETNDLKE

SEQ ID NO: 200064 - protein, 211 aa, Glycine max
  Clone ID: PAT_MRT3847_22684C.1.pep
MREEDRRGGVIRTKMANLSSPGFNLFLVSLLVTLVQIQTKVQCYQYKVGDLDSWGIPISPSSHLYDKWSKYHNPRIGDSLLFLYPPSQDSVIQVTAESYKSCNLKDPILYMNNGNSLFNITSEGDFYFTSGEAGHCQKNQKLHITVGVGGNTNALAPTSLPENATSYPTVFGNIPMAPSSSRSTSSSPHRTSKFSLLIIGFFLCALLSSLM

SEQ ID NO: 200065 - protein, 77 aa, Glycine max
  Clone ID: PAT_MRT3847_22685C.1.pep
LFQKKKNLKKKKKKKKKKKKKKKKKKKKKKKKKKKKIKKKKKKKKKKKKGGGRFKESNFTSPVLKVKIFFMGPPNLI

SEQ ID NO: 200066 - protein, 49 aa, Glycine max
  Clone ID: PAT_MRT3847_22686C.1.pep
VLHCCMLSIKHRVVAKCDFIFPKMNFIIDYNLGGVLSNLLNANIYCKVY

SEQ ID NO: 200067 - protein, 102 aa, Glycine max
  Clone ID: PAT_MRT3847_22687C.1.pep
MKLTNYSPLCFSSFSGDTGNLETSLFSLSSFFISGGDHPRSSATTLHVTQIFIGNVEAVHGRNVGDIIIKGDFLGWLATCEVDIFTIRTLRGQSLCISLVCT

SEQ ID NO: 200068 - protein, 728 aa, Glycine max
  unsure (1)..(728): unsure at all Xaa locations
  Clone ID: PAT_MRT3847_22688C.1.pep
MSSLSRELVFLILQFLDEEKFKETVHKLEQESGFFFNMKYFEDEVHNGNWDEVEKYLSGFTKVDDNRYSMKIFFEIRKQKYLEALDKHDRSKAVEILVKDLKVFATFNEELFKEITQLLTLENFRENEQLSKYGDTKSARAIILVELKKLIEANPLFRDKLQFPNLKNSRLRTLINQSLNWQHQLCKNPRPNPDIKTLFVDHSCGQPNGARAPSPANNPLLGALPKAGGFPPLGAHGPFQPTPAPVPTPLAGWMSNPTTVAHAAVSGGGAIGLGAPSMPAALKHPRTPPTNPSVDYPSGDSDHVAKRXTRPMGISDEVNLPVNVLSATFPGHGQHSQAFNAPDDIPKTVVRTLNQGSSPMSMDFHPMQQSLLLVGTHVGDIALWEVGSRERLVSRNFKVWDLSACSMPFQAALVKDPGVSVNRVIWSPDGALFGVAYSRHIVQIYSYHGGDEIRQHLEIDAHVGGVNDLAFSHPNKQLCVITCGDDKTIKVWDAASGAKQYTFEGHEAPVYSVCPHYKENIQFIFSTALDGKIKAWLYDNLGSRVDYEAPGRWCTTMAYSADGTRLFSCGTSKDGESSIVEWNESEGAVKRTYQGFRKRSLGVVQFDTTKNRFLAAGDDFSIKFWDMDNVQLLTTVDADGGLPASPRIRFNKDGTLLAVSANENGIKILANGDGIRLLRTLENSLYEASRASEALTKPTINPIPAVAVXATSAALAERASSVVTIVLD

SEQ ID NO: 200069 - protein, 325 aa, Glycine max
  Clone ID: PAT_MRT3847_22689C.1.pep
VRSAGSPAPEIPRARPTRPANVGDIALWEVGSRERLVSRNFKVWDLSACSMPFQAALVKDPGVSVNRVIWSPDGALFGVAYSRHIVQIYSYHGGDEIRQHLEIDAHVGGVNDLAFSHPNKQLCVITCGDDKTIKVWDAASGAKQYTFEGHEAPVYSVCPHYKENIQFIFSTALDGKIKAWLYDNLGSRVDYEAPGRWCTTMAYSADGTRLFSCGTSKDGESSIVEWNESEGAVKRTYQGFRKRSLGVVQFDTTKNRFLAAGDDFSIKFWDMDNVQLLTTVDADGGLPASPRIRFNKDGTLLAVSANENGIKILANGDSLFPNSKG

SEQ ID NO: 200070 - protein, 268 aa, Glycine max
  Clone ID: PAT_MRT3847_2268C.1.pep
MILVSHIQAPCVGAMFSKCCSLLSLPKFITVTNPPTFSNPVPNFITRRISSTRPFHLTLAKAEGNLDSDSPSTSTSSPSPSPFATDQTVFVTGKDVPLEGVIQFEKPASSPPFEKWGRVALLAGADVLALFVFSTIGRYSHGLSVLDLETLRTADPFIAGWFLGAYFLGGFGEDGRGMNGLSKGVVATAKSWAVGIPIGIVIKAATSGHLPNYGFVFVSLGSTAVLLVTFRALLYTILPVDNSKKSDDYRRGSPFELFELLTSLVRRW

SEQ ID NO: 200071 - protein, 228 aa, Glycine max
  Clone ID: PAT_MRT3847_22690C.1.pep
STVEFLPWRSWEVISGGLDSMLMLWDFSKGRPYKVVDFATFDVSSGIAGRCVNPAFVHAIAIPEVDMLDKLDKICAVARGDGAIDVINIETEMAATKSKSSSNSRKGSHSRSKDGSSSSNTDADQNGKKRLHLDYTLGGHTAAVSSLAFSLFGERGKFLISGGNDKLVKVWNLSCYPDAGLSDDNNNNILHLNIEVPRKVNWLCTTSADTDNLVVCDTSKVVKVYSIT

SEQ ID NO: 200072 - protein, 178 aa, Glycine max
  unsure (1)..(178): unsure at all Xaa locations
  Clone ID: PAT_MRT3847_22691C.1.pep
MVAEAVIFLKRRFEDYPGGETWDRKMKRKRSVGTVVARSIDGEGELKKVMHIRLANESGSQGSDAQGLRSGYSGSNSKLDGASLPATSMHVRLAIMNKKRCQGVQXDGSNKERVVLKGNKLNVRNNNYXGGIHTLTKGKVSRPPRTGALMAGNSSSVPRSSEILDAXEQPSNVNKPHS

SEQ ID NO: 200073 - protein, 76 aa, Glycine max
  Clone ID: PAT_MRT3847_22692C.1.pep
LGLSHAPISTCTVALSHYLELLGGCNDFLVPRSSLNINPFCLGTSLMATSYLGSPALHQCVSAHRRVTASWTVRTT

SEQ ID NO: 200074 - protein, 760 aa, Glycine max
  unsure (1)..(760): unsure at all Xaa locations
  Clone ID: PAT_MRT3847_22693C.1.pep
GTHSPSGLGNQMEIESAKLSSCGFVLLDCPQSIMIESSNASLVGSASDYLLSLSNGWDLTSYLKSLSKALRGLKIGSCFSTNPGVXSNNSCLVIYVVCPFRDPTAILQTVIESSVAIGSVAQQSDRERRSSLHNRVVKALDGLTTVDEATASNILVLSGFSIPKLVLQIVTVDAIFRVTSPSVSELVILKETAFTVYSKARRISRGISSDFAQSAFPRSHSVLTQMPSPISGMWKDCVGPRMAGHSLPREGDIDASLRPGTWDNSWQPTRTGGLSCDPSRTGDNFLHDEIRYMFEPLFILAEPGSLENGISVIGSPTSESSKALADDSSGNYVQSTSTAGSVESASSTDASGSDPKTPPSLHCCYGWTEDWRWLVCIWTDSRGELLDCNIFPFGGISSRHDTKGLQCLFVQILQQGCLILQSCDPGLAKPRDFVIARIGGFYELEYLEWQKAIYSVGVSEMKRWPLQLRKSMSDGMSATSNGSSLQQSDMSLIPERTLPSSPSPLYSPHTKSPGFMKGSLGQPTARKQLIGGHSMVDNSRGLLHWAQSISFVAVSMDHTLQLVLPADSSTPGYIEGFTPVKSLGSTSSAYILIPSPSMRFLPTTVLQLPTCLTAESPPLAHLLHSKGSALPLSTGFVVSKAVPSMRKDYXXNQKEEWPSVLSVSLIDYYGGTNIPQEKVVRGINKQGGRSLSWEAKDFEIETPLVLESLAAELHALSWMTVSPTYLERRTALPFHCDMVLRLRRLFHFADKELSKQSEKS

SEQ ID NO: 200075 - protein, 190 aa, Glycine max
  Clone ID: PAT_MRT3847_22694C.1.pep
MYIISRSTIEAFASVVAPLAENLMQILAQKLNIKFNYFQENCSANTSFLRLNRYPPCPIFYSRVFGLLSHTDSSFLTIVNQDQIGGLQIMKDGNWVGVKPNPQALVVNIGDLFQALSNDIYISAKHRVVAAEKVERFSVAYFYNPSKDALIESHIMPPMYRKFTFGEYRGQIEKDVKETGDKVGLSRFLL

SEQ ID NO: 200076 - protein, 47 aa, Glycine max
  Clone ID: PAT_MRT3847_22695C.1.pep
SDGSGTIVIETSGCGLFCMGHELVICVKGLFEGCIIANMEPEPQGKN

SEQ ID NO: 200077 - protein, 52 aa, Glycine max
  Clone ID: PAT_MRT3847_22696C.1.pep
AITYFNKLSFLTSFWVQTQKTFQIFLSPFRKSHSPEGHLKNVNHPPFELNEP

SEQ ID NO: 200078 - protein, 85 aa, Glycine max
  Clone ID: PAT_MRT3847_22697C.1.pep
SSPKWTLHAKKVEPVNVYGFPTIIFNQRGNKRNTVIFDGVINKEAFNIRLKEIAPSAIALEGSLYTQYNMFKITSSYLCIDNSHA

SEQ ID NO: 200079 - protein, 87 aa, Glycine max
  Clone ID: PAT_MRT3847_22698C.1.pep
RLVEKPSHSVKTLRGCIFRWWLKWKWHNLNTTWWTFVKVVIKHFQPEYCLDQVVWALERNKNGCCHKSWNQRQPRMGKPRGSIQSPI

SEQ ID NO: 200080 - protein, 54 aa, Glycine max
  Clone ID: PAT_MRT3847_22699C.1.pep
MCCCGCWKYWLHISVIYKLNDFIIVEIILYVYKLYVYYLIKSFYNCLNFVTLCN

SEQ ID NO: 200081 - protein, 71 aa, Glycine max
  Clone ID: PAT_MRT3847_2269C.1.pep
TLPFEFQQLKKLLLTAMAYRNGVALAQRGSAVKFERPNHLRTTASPKPRLPHSPGSAVRRSPATARSGDGG

SEQ ID NO: 200082 - protein, 79 aa, Glycine max
  Clone ID: PAT_MRT3847_226C.1.pep
SLHNPCCIGAHLVCCKSQCLSGPNKANPECFVFIACTLINIIWLNQIAALKKLFVHQMQLVQHIHHSWQELRIHICYCL

SEQ ID NO: 200083 - protein, 155 aa, Glycine max
  unsure (1)..(155): unsure at all Xaa locations
  Clone ID: PAT_MRT3847_22700C.1.pep
MAATAPSSVPPDLRAPLRPPAPPPAKKPPTEKLCIDDMLRKHCGEFGRWQLKHFILTSLXWALEAFHTMVMIFADREPDWRCVSGSVCDDSGGGGVCGLSPESWEWVGGRGGSTVSDWSLICGNKFKVGLVQAVFFAGCMIGAGIFGHLSDSSLG

SEQ ID NO: 200084 - protein, 82 aa, Glycine max
  Clone ID: PAT_MRT3847_22701C.1.pep
MRTGELLLFFSFLVSLALWFQLCFAGDTLIAGQEITQNRTGNLVSSSRTFELGFFSLSGEKKYYLGIWYRELEKETQKAVWV

SEQ ID NO: 200085 - protein, 63 aa, Glycine max
  unsure (1)..(63): unsure at all Xaa locations
  Clone ID: PAT_MRT3847_22702C.1.pep
EGYGLXNGIKTQFNILLHRIKEFTIYYHHISVPRGCWWELSSSHHCLLHFAFPILICTSPLPL

SEQ ID NO: 200086 - protein, 49 aa, Glycine max
  Clone ID: PAT_MRT3847_22703C.1.pep
LNVGGEKHHCHSCAQNERFNPNMVAPQVGAAVSFRGRLRFALLHCRMYG

SEQ ID NO: 200087 - protein, 42 aa, Glycine max
  Clone ID: PAT_MRT3847_22704C.1.pep
LALAVIGVLIYSKPNECWDGFCCGSDHIPPTGTEIRARNIGL

SEQ ID NO: 200088 - protein, 224 aa, Glycine max
  Clone ID: PAT_MRT3847_22705C.1.pep
RGLSLERKTCFTVNHPNIIRLLHLFQDDGCVDLVLEFCAGGNLASYIQNHGRVQQQIARKFMQQLGSGLKVLHSHDIIHRDLKPENILLSSHGVEAVLKIADFGLSRTVCPGEYAETVCGSPLYMAPEVLQFQRYDDKADMWSVGAILFELLNGYPPFNGRNNVQVLRNIRSCTCLPFSQLILSGLDPDCLDICSRLLRLNPVERLSFDEFYWHSFLQRKLMGT

SEQ ID NO: 200089 - protein, 134 aa, Glycine max
  Clone ID: PAT_MRT3847_22706C.1.pep
MEMESSSTPPPKFRFRDHSEPESQNSLEPSSDVVSAASPSIGDPDADLEIESMTGRGIMHLCDELRELKEAANEDLQKNIFSKYSTFLRILEEVIGVENELVQLENHFVSHKRQVKDLIDRIYPKILSIDIAFD

SEQ ID NO: 200090 - protein, 139 aa, Glycine max
  Clone ID: PAT_MRT3847_22707C.1.pep
MSRCVSCGSGSALIHNKNLLISPIHNALKVRGNNRSCGLRVQVSMVDSSSADFTRRIERAWSISKQPRPIVCSSCDSKGHIECKWCAGTGFFILGDNMLCEVPSRNTTCIICTGKGSMCCSDCQGTGFRAKWLGEPPSS

SEQ ID NO: 200091 - protein, 87 aa, Glycine max
  unsure (1)..(87): unsure at all Xaa locations
  Clone ID: PAT_MRT3847_22708C.1.pep
LFWIXVGVGLSALFSVVASRLXKYXMQQAXXXMMXQMXSXXXQFGNXXFSPGSPXPFXMPXAAGXXAPASSXTTXSRAPSAXSASXS

SEQ ID NO: 200092 - protein, 95 aa, Glycine max
  Clone ID: PAT_MRT3847_22709C.1.pep
KMEGLIPFVYKAIMQYKGDKDGHPIGSWLCESPSYSYMRLPAGDSGRFQIQAPASSFSAASPSSTNPNSSSATQIIVSSGVQSPHQCLTHRRIAA

SEQ ID NO: 200093 - protein, 63 aa, Glycine max
  Clone ID: PAT_MRT3847_2270C.1.pep
MSSQTRHIFILYLGKKIVFCKMMTLSMIKPVTAISQIHYRLHFDYEKISMKCLLMHWFQSYEK

SEQ ID NO: 200094 - protein, 79 aa, Glycine max
  Clone ID: PAT_MRT3847_22710C.1.pep
METNNNLNLIVPNPQDSLWMMNLRTGETMDSGSYPERPGEPDCSYYIRTGLCRFGATCRFNHPPNRRLVQIALYSICIN

SEQ ID NO: 200095 - protein, 81 aa, Glycine max
  Clone ID: PAT_MRT3847_22711C.1.pep
FVIDIIYLNMEICGMTSFPILIFNSYSLSLAKIAMLIFCLTLSLAKILCFQCLSPKLNQNYIIRKNHAIKDNLLYVPGKHI

SEQ ID NO: 200096 - protein, 155 aa, Glycine max
  Clone ID: PAT_MRT3847_22712C.1.pep
SIFFHKLFLLLPILLLHLQQSQACFSRGNSGEPSDGNPEAQGLKSENDVRTVQLKKEKQTDETEEEKDEESSAEQKLPSELDPEFVKTYLREFGHLKHNENGLSHGVKHFQRFLGYRQTGNVDLGTLQKMFWKRCANFDEGFTAQDPLQLWERST

SEQ ID NO: 200097 - protein, 106 aa, Glycine max
  Clone ID: PAT_MRT3847_22713C.1.pep
FSSKAARFRLLRLIKNHCRQKKLRKMNHASSEFYNHHLEEKKKSRRSSNEIQGYGKGYLVSEELTLDRTDVLMLHIYSTSFRKLQFWPRIRMQCKKIILTIENYVL

SEQ ID NO: 200098 - protein, 42 aa, Glycine max
  unsure (1)..(42): unsure at all Xaa locations
  Clone ID: PAT_MRT3847_22714C.1.pep
PPMTLERNFSFVERFFNESPLAPFFLCFCKCLNAXLRINGSP

SEQ ID NO: 200099 - protein, 61 aa, Glycine max
  Clone ID: PAT_MRT3847_22715C.1.pep
LAKLILLIIRCLDPSSERRPAMSYVEMELDRILYKEMILSSVMGEGTPLVTLGSQLFKSTK

SEQ ID NO: 200100 - protein, 81 aa, Glycine max
  unsure (1)..(81): unsure at all Xaa locations
  Clone ID: PAT_MRT3847_22716C.1.pep
GSGSVWLRLSKPLNRLVVLSPAFQAPLVPQGPTLVPLLGIXVWEHAXLPQSKNVRPDYLTNLWKXVVNWPYASVVYEKESS

SEQ ID NO: 200101 - protein, 64 aa, Glycine max
  Clone ID: PAT_MRT3847_22717C.1.pep
GSIITCFLIRNLNERIKKNFNKIFYFNIKILLLMKILIYFFRRKDPKNLSLTKSFLGEKLILMF

SEQ ID NO: 200102 - protein, 198 aa, Glycine max
  Clone ID: PAT_MRT3847_22718C.1.pep
LKYLKEIHAFTPVQIVAMLFAHLKTIAEKDFGTAVSDCVIGVPSYFTNLQRQAYLDAAAIVGLNSLLLIHDCTATGLSYGVYKTDIPNAAHIYVAFVDIGHCDTQVSIAAFQAGQMKILSHAFDSSLGGRDFDEVLFSHFAARFKEQYSIDVYSNGRACRRLRVACEKLKKALSANAVADLSIERLMDEKDVKGFIKR

SEQ ID NO: 200103 - protein, 78 aa, Glycine max
  Clone ID: PAT_MRT3847_22719C.1.pep
GAKPPQFRENPEGFTQSWAGAPYCSLKAHSRRNFPWGFAGAPMLSQPLVSYFKGILRVFPWTVRLSSIIGKVKEIFWE

SEQ ID NO: 200104 - protein, 61 aa, Glycine max
  Clone ID: PAT_MRT3847_2271C.1.pep
IKFTKTNSTHDVQAAQHDSAGTLSDKHADNEWERSCCETPTWHDPACAAATWASLPGGDTV

SEQ ID NO: 200105 - protein, 69 aa, Glycine max
  Clone ID: PAT_MRT3847_22720C.1.pep
FTEQNNGTRKKFFFNSLSSLNPKFTIPGGKKKKRKKWALQKSLKSKGWNHFQGGVLGEPLLPMGLWCPQ

SEQ ID NO: 200106 - protein, 122 aa, Glycine max
  unsure (1)..(122): unsure at all Xaa locations
  Clone ID: PAT_MRT3847_22721C.1.pep
MKRERGVSSVISSAWLSLTNAPNPQRGLDLTDPKNLYILGGKGIXGRMNRIPLPCVGDMAMATVNNGXPDLTKKGTPAGTGRQPKPWXRKDRVYMHYQDNAGVIDNPKGEKQGSAITAPIVQ

SEQ ID NO: 200107 - protein, 53 aa, Glycine max
  Clone ID: PAT_MRT3847_22722C.1.pep
YLSDFYFFFGVVFCGLISVLTIFPIWHDFCSFCFGFILLGWGTVLSIKLKNPP

SEQ ID NO: 200108 - protein, 57 aa, Glycine max
  Clone ID: PAT_MRT3847_22723C.1.pep
QPGGMGLVANSGGGRGTFMGGLPGGFGGAAKPPRGGTLASTTLLRATPPVLCWEDSH

SEQ ID NO: 200109 - protein, 76 aa, Glycine max
  Clone ID: PAT_MRT3847_22724C.1.pep
KKKDPSATNVDLVLNGSPNEACAAEHQEEKPFTYLGRRSLLFVETAKPPLGEKVARWARVRNLQKKGFAVPNSVWG

SEQ ID NO: 200110 - protein, 141 aa, Glycine max
  Clone ID: PAT_MRT3847_22725C.1.pep
FMKGKPEEPKCGFSRKVVEILKQEEVQFESFDILSDDEVRQGLKVFSNWSSYPQLYIKGELIGGSDIVLEMQKSGELKSVLTEKGIVPKETLEDKLRKLISSEPVMLFMKGIPDAPRCGFSSKVVDALRKDGIGFGSFDIL

SEQ ID NO: 200111 - protein, 53 aa, Glycine max
  Clone ID: PAT_MRT3847_22726C.1.pep
MASDLNSGLSKETSVFGLKAWELMGIIVGLFIIIILVVISICLTSRKKSRRVN

SEQ ID NO: 200112 - protein, 183 aa, Glycine max
  Clone ID: PAT_MRT3847_22727C.1.pep
MKTLICAPNAAFNLSKLSPWKPNFQAYHHHPTHKLNYPFTTLKPRASAKGFSSTGPPTVASDNANTTKKPMRRKNNDDDDDELPQEVMYRLIGRILFSVGVPMGLGLALLGLFGELKEKHVWDAPLWLPFLTTLLTFGASSLGIAYGALSTSLDAEKEGSFLGVEQLQKNWVEMWQEKQEDEN

SEQ ID NO: 200113 - protein, 101 aa, Glycine max
  unsure (1)..(101): unsure at all Xaa locations
  Clone ID: PAT_MRT3847_22728C.1.pep
XFFEMRKKGQETASSCQISAPLEPRASHGGAKCEELLGMCALTPCTXXQTAHSKTPSDRXGIEGNGVHTXTSHRYAVILSLNTPGQPXLEPNSELTYACMR

SEQ ID NO: 200114 - protein, 67 aa, Glycine max
  Clone ID: PAT_MRT3847_22729C.1.pep
MASDLNSGLSQETSVFGLKAWELMGIIVGLVIIIILVVISIWLTSRKRSRRVNCMLSLNHMFSVPDE

SEQ ID NO: 200115 - protein, 99 aa, Glycine max
  Clone ID: PAT_MRT3847_2272C.1.pep
PGRPTRPGRECLLLMLQLQPTIPPLPPFLILIFKFPINQYQYSFFISDPSIDLCLFRVCVPHHPLLKFTSFFPLIFFLAMLTGDCPNFLHFSKPSAMNL

SEQ ID NO: 200116 - protein, 79 aa, Glycine max
  unsure (1)..(79): unsure at all Xaa locations
  Clone ID: PAT_MRT3847_22730C.1.pep
FPAICRGPIMASCKSPEFKSPKEGVVVFVTCDRVSVGFPTQSXKSFEVSYRPSDITKKIRQAFGKRNKKVFLTKVDPYP

SEQ ID NO: 200117 - protein, 313 aa, Glycine max
  unsure (1)..(313): unsure at all Xaa locations
  Clone ID: PAT_MRT3847_22731C.1.pep
MEEEGDIYDGVRAQFPLSFGKQSKPQTPLEAIHNATRRSNSNPKTANDLPSVSSSSRDWLNSLRPPKTPTPPPPLPPPDHDDGPMVGPPPPPPTAADEEEDDDDAEMIGPPPPPPIASESEDDSDQDEVGTRFRIPLSNEIVLKGHTKVVSALAVDHTGSRVLSGSYDYMVRMYDFQGMNARLESFRQLEPFEGHQVRNLSWSPTADRFLCVTGSAQAKIYDRDGLTLGEFVKGDMYIRDLKNTKGHISGLTCGEWHPKLKETILTSLDDGSLRIWDVNDFKSPKHVHXPKLARPARVSVTTCASDHDGQCIG

SEQ ID NO: 200118 - protein, 57 aa, Glycine max
  Clone ID: PAT_MRT3847_22732C.1.pep
VTQDGKYCLVLVFGAKALQLSDFEQRQVFSFLSWSIHFKLYKFYFISFLSHVHQDNG

SEQ ID NO: 200119 - protein, 58 aa, Glycine max
  Clone ID: PAT_MRT3847_22733C.1.pep
FTFPSPYAVNDIYTNSTIRHNHSISTGCGSHNLNFSKKESNKTLAMILLIDYLPPSFS

SEQ ID NO: 200120 - protein, 58 aa, Glycine max
  Clone ID: PAT_MRT3847_22734C.1.pep
YDTYGWVHQYALISSHPSSLPTIKTHQHRSFSPKLALLSALYLKVSEKLTHLPPIVSL

SEQ ID NO: 200121 - protein, 57 aa, Glycine max
  Clone ID: PAT_MRT3847_22735C.1.pep
YCGKTSVDISLRAPHPLALFLINILITPWNLEISRCSFTMITSRFSILSGLMFSFYV

SEQ ID NO: 200122 - protein, 336 aa, Glycine max
  unsure (1)..(336): unsure at all Xaa locations
  Clone ID: PAT_MRT3847_22736C.1.pep
IESYPPVLRHLDQQQPPPNPDPDYKDPTQEDPDTIPIIDLSCLDHDTNKLEEACKDWGLFRLVNHGVPLTLLNELQEMAKELFSLSFEVKEGACSGCPVTYFWGTPALTPSGRTLTTRSPQNINWVEGFDVALSQLPHFSVPQLPTLESIRLLLKDYENHLSRIATTLFEAMANNLDLNLKPSKPYLAENTGMVRVYRYPNCSDANVGWGMEAHTDSSVLSILNQDDEVSGLQVLKDDQWLTVKPIPNTLIVNLGDMMQAISDDRYKSVXTHRVSINKHKERISICYFVFPGEDVAIESYKYKPFTYNEFRAQVQQDIKALGYKVGLSRFQHHEEC

SEQ ID NO: 200123 - protein, 33 aa, Glycine max
  unsure (1)..(33): unsure at all Xaa locations
  Clone ID: PAT_MRT3847_22737C.1.pep
IEPNRLEYGCEKTTDXDTYIQLEKTIVINIISS

SEQ ID NO: 200124 - protein, 79 aa, Glycine max
  Clone ID: PAT_MRT3847_22738C.1.pep
PHHCLFKIFFSCANIPPQPQVLKNFKNLGHKNCEIFTYYHNFVQPLVFQENLLQGGERPQIPFYAPGKLVPTPSIYPDN

SEQ ID NO: 200125 - protein, 75 aa, Glycine max
  unsure (1)..(75): unsure at all Xaa locations
  Clone ID: PAT_MRT3847_22739C.1.pep
ALQXLYPAXXHDXLSPSPNMPLNDQDNSSNIMSFKIAPSYXDDFIISTGQMVNQIIPEHSASGMSKVEDXISEQS

SEQ ID NO: 200126 - protein, 53 aa, Glycine max
  Clone ID: PAT_MRT3847_2273C.1.pep
FSDNHLLSEEPPKAPALPSPSACEPYYYTSPQFYFFKQQHYQHHHLLQLTLSL

SEQ ID NO: 200127 - protein, 301 aa, Glycine max
  Clone ID: PAT_MRT3847_22740C.1.pep
MSMAKKPVKYSLVDAFTESVFKGNPAAVCFLEEKRDKKWLQGVAAEFNLSVTCYLTRITESHGTTSYPRFDLRWFTPVSEINLCGHATLAAAHTIFSSGLVDTDVVEFVAISGILTAKKIPAINITSASDLQKGEAQDGFYVELNFPADPVVEFNFDETSQISGALNGASIIDIKRTQDGGDLVVVVTSGRVVEELQPQLDAIVKCPGRGLIVTGIAPPGSEFDFCSRFFCPKLGVNEDPVCGGAHCALAPYWSKKLGKCDFKAYQASARGGVLNVHLDEQNQRVLLRGKAVKVMEGCVLV

SEQ ID NO: 200128 - protein, 155 aa, Glycine max
  unsure (1)..(155): unsure at all Xaa locations
  Clone ID: PAT_MRT3847_22741C.1.pep
VERTLNFWLEGLKKNEINMKKCAVELQRSIALLSHLAETXLPTSLETFADELCMSTTLTQSYIENSVSSMSRLLSLLQSKLPKAEEGDEEASFLFNKMEGFISQARSLKVATVKINRAVDDLRSRSLALSHDACGPYXQAENTAKDLASIIATSG

SEQ ID NO: 200129 - protein, 191 aa, Glycine max
  Clone ID: PAT_MRT3847_22742C.1.pep
MAKKPGPRSSKLSVYLYIPNIIGYIRVLLNCFAFSQCLSNKILFSILYFLSFVCDAVDGWCARKFNQVSTFGAVLDMVTDRISTACLLVVLSQLYKPGLSFLSLLALDIASHWLQMYSTFLTGKTSHKDVKDSSSWLFRAYYGNRMFMAYCCVSCEVLYLILFYLAENQTEKLVDVISSNLQKISFLSLLM

SEQ ID NO: 200130 - protein, 55 aa, Glycine max
  Clone ID: PAT_MRT3847_22743C.1.pep
GAFFIFKQFEKRGFFSRRFSLVSPGFFQCFRFNPRAGKFNLVPPKKNYFLLFPGT

SEQ ID NO: 200131 - protein, 227 aa, Glycine max
  Clone ID: PAT_MRT3847_22744C.1.pep
MAKKPGQRSSKLSVYLYIPNIIGYMRVLLNCFAFSQCLSNKILFSILYFLSFVCDAVDGWCARKFNQVSTFGAVLDMVTDRISTACLLVVLSQLYKPSLIFLSLLALDIASHWLQMYSTFLTGKTSHKDVKDSSSWLFRAYYGNRMFMAYCCVSCEVLYLILFYLVENQTQKLVDVISSNLQKISLLSLLMGSSLFGWAAKQIINVIQMKTASDACVLYDIEKKHKN

SEQ ID NO: 200132 - protein, 202 aa, Glycine max
  Clone ID: PAT_MRT3847_22745C.1.pep
MTSVKYEVGKFTGQNDFGLWRSKIRALLVHQGLEEALQGEITLDAKLDERDKKILMDKAHNAIILSLKDKVLRQVSKEKTTTEIWLKLEGLYMTKSLKDNHFEKKKSKPQSGNSENVPNIRCYHCKKEGHTRRFCPVRQNGCNSHTSNERGNATIVQDGYESTEALVVGSGKSDGEWIMDSRCFFHMTPNKPWFEKFTQLHG

SEQ ID NO: 200133 - protein, 52 aa, Glycine max
  Clone ID: PAT_MRT3847_22746C.1.pep
HLSLVLRYFKSIFSPHKAHPSLALVQAHINPAAINPVEKVPSDTQPLADKKL

SEQ ID NO: 200134 - protein, 130 aa, Glycine max
  Clone ID: PAT_MRT3847_22747C.1.pep
LANGQGEPPDWQNWIGIVLLLIVNSTIGFVEERNAGNAVKALMDSLAPKARVKRNGAWREVEASELVPGDLVAFKHGDICPADCRLVEAIDVSMDQAALTGESLPQGKKLGDECFSGSTCKQGECEGIVI

SEQ ID NO: 200135 - protein, 372 aa, Glycine max
  Clone ID: PAT_MRT3847_22748C.1.pep
MDRTLCLSLLFFTAAVAAETGGAEPNLTSGGLLWSTAAEESDLAPPPDDGGFSSLDGMLQWAISHSDPGKLKESAEAQQRLPPSELYKRQFEIKEIMEKMKMPSDAELMRIAISDLNNVSTSLEDRHRALQELLELVESIDNANDLSKLGGLLAVREELYCSDPGIRTIAAWVLGKASQNNAIVQQQILELGVLSRLMKMVNSNSMEEANKALYAVSALIRNDLASQGLFYAEAGGWMLQDILSNTSLDVRLRRKAVRLLADLAAYQLENVDREEQPFFNDQDLLKAVVDLTTSTDLDLQEKALVAIKSLLQLRTTEARVFKDFCALGDALNRMRQLLHDLMADEYQRDYVMDVENLRVEVEHTFQRKLKQS

SEQ ID NO: 200136 - protein, 193 aa, Glycine max
  unsure (1)..(193): unsure at all Xaa locations
  Clone ID: PAT_MRT3847_22749C.1.pep
TRATGENAECVMPEIEGLSEFKGDVIHACDYKSGERFRGKKVLVVGCGNSGMELSLDLCNHHSSPSMVVRSSVHVLPREVFGISIFELAVMLLQWLPLWLVDKILLILAWFVLGNIEKLGLKRPSKGPLEMKNRXGKTPVLDIGALERIRSGDIEVVPGIKRFNNGEGESINGEKLDIDAIVLATGYRSNGPS

SEQ ID NO: 200137 - protein, 105 aa, Glycine max
  unsure (1)..(105): unsure at all Xaa locations
  Clone ID: PAT_MRT3847_2274C.1.pep
SERYGYPQIYVTENGTSVLGENNMPLEQLLDYXFRVQDFRDYINAMGXANTLDGVNVRAYMAWSLMDNFEWAEGYETWFGVTYVEXENGQERIPKKSARRTSYNF

SEQ ID NO: 200138 - protein, 35 aa, Glycine max
  Clone ID: PAT_MRT3847_22750C.1.pep
AVQLAARGKGPINNWATLLSVPLHARIIDTLLSSS

SEQ ID NO: 200139 - protein, 118 aa, Glycine max
  Clone ID: PAT_MRT3847_22751C.1.pep
QITCSMDQSLRVVLLKRREAPTPFNQPSPSSSKNTPHTHSYTQTPTPLSFYSPSPTSSSSSTSRTPLLTQTTLSLPSSPSSQNTSSPCKPLFTTPTGAPFTSFPTPSSPLSSTSSSPT

SEQ ID NO: 200140 - protein, 345 aa, Glycine max
  unsure (1)..(345): unsure at all Xaa locations
  Clone ID: PAT_MRT3847_22752C.1.pep
MGMKSTGGAIFQVQGGHIVRSTGRKDRHSKVYTAKGPXRDRRVRLSAHTAIEFYDARERSRPDRPSKAVDWLIKKAKNAIDKLAELPPWHPNPNTTAADAENNNNNNAGSSDMAIAEQSESSGYNFQLQRQLGEDHDNHHHSAFIPSPIDTDAIAFFPTTTATSSINFQTYPPDIISRTNNSTEDLGLSLHSFQDPGLIHHGQSQAGANQTPSNDQTLFSGSTQVGFEANYPRIVTWNSDASIDMNRTGFMVNSPSALLGQGGSAAYSQRGTLQSSFSPSLRPWSDIPMASSEHHHKSQQASIFGSRFLSDALPGFCIPARIQGEDEGHGVGNDRPSSASPNSHH

SEQ ID NO: 200141 - protein, 262 aa, Glycine max
  Clone ID: PAT_MRT3847_22753C.1.pep
LEEISVASNSLFHHIYHLEEADEFADENVTRAPKNGCGIPWNWRRIHHRGKTFLDLAGRSLSCGLSDSRLKKGTFTANGRNISEMPVASERSSSCTKSDAEALPLLVEASGSHASTENACWDHDYSGELGLFGDNLFKHDVDSDLASEARSGDQRKLRGNRHSRHQSLTQKYMPQTFRDMIGQNLVAQALSNAVMKRKVGLLYVFYGPHGTGKTSCARIFARALNCNSSEHPKPCGFCNYCVAHDMGKSRNIREVGPVSNFD

SEQ ID NO: 200142 - protein, 59 aa, Glycine max
  Clone ID: PAT_MRT3847_22754C.1.pep
ELVTFFVIMPMHMNWVHECSITATWLAALLVKMQMIRHISNFRGSCSKTMYTLSASDLI

SEQ ID NO: 200143 - protein, 78 aa, Glycine max
  Clone ID: PAT_MRT3847_22755C.1.pep
QFRALKHSDAFLMCTTLMTTVFGAMVVHLLLRAGCFSPGQVDAIPGIIFLFFVGLLICPFDIFYRPTRFCFIRVIRNI

SEQ ID NO: 200144 - protein, 113 aa, Glycine max
  Clone ID: PAT_MRT3847_22756C.1.pep
MFPNLGGRMLTGSILKDFPQGVLKPPKGRVSFFPLGRGPKKTFGQNFSFLETKKAFSKFFHLFSFGLFPEKGHAPTRLVPNPPRRGGHIFSGNPPKGKKKGKSYWALKGPIKG

SEQ ID NO: 200145 - protein, 63 aa, Glycine max
  Clone ID: PAT_MRT3847_22757C.1.pep
SYVAPGCVDGKVRLWDSRSGKCVKTLKGHSDAIQSLSVSANHDYLVSASVDGTACAFEVENFR

SEQ ID NO: 200146 - protein, 667 aa, Glycine max
  unsure (1)..(667): unsure at all Xaa locations
  Clone ID: PAT_MRT3847_22758C.1.pep
LTSGFGVRALLISSRNSNPLSSPPLLSLFSPFSAVRSLHSPPPFSAAEAMPETETHDVEWPAKRVRDTFISFFQDKNHVNWKSSPVVPFNDPTLLFANAGMNQFKPIFLGTADPNTALSKLSRACNTQKCIRAGGKHNDLDDVGKDTYHHTFFEMLGNWSFGDYFKVEAISWAWELLTKVYKLPSDRIYATYFGGDDKSGLAPDLEARDIWLKFLPPGRVLPFDCKDNFWEMGDTGPCGPCTEIHFDRIGNRDAASLVNNDDPTCIETWNLVFIQFNREADGSLKPLPAKHVDTGMGFERLTSILQDKMSNYDTDVFLPIFDVIQRATGARPYSGKVGPDDADKVDMAYRVVADHIRTLSFAIADGSRPGNDGREYVLRRILRRAVRYGREVLKAKEGFFNGLVSVVVNVMGDVFPELKQQETHIRNIIEEEEESFGRTLIKGIEKFEAAVRQVQGNILSGEEAFVLWDTYGFPLDLTQLMAEEKGLVVDVKGFDSAMEAARERSRSAQTKQAGGAIVMDADATSALHKRGIVPTNDSFKYAWFKDHESVVKAIYTGSEFVDTVNTGDDIGVVLESTSFYAEQGGQIFDTGSLEGPHALFEVRNVQVYGGFVLHIGNGTGVSVGDKVVCKVDYGRRALIAPNHTCTHMLNFALREVLGDHVDQXGSI

SEQ ID NO: 200147 - protein, 81 aa, Glycine max
  unsure (1)..(81): unsure at all Xaa locations
  Clone ID: PAT_MRT3847_22759C.1.pep
VGIDGPVLVVRVCNPLDPGLIRLLAKXHEILIPVEEGSSGGFGSHESQFLSPPGILSGPVKERATMLRHKYPEHGSPQVQI

SEQ ID NO: 200148 - protein, 86 aa, Glycine max
  unsure (1)..(86): unsure at all Xaa locations
  Clone ID: PAT_MRT3847_2275C.1.pep
TAPFFGFLRTARCLVFSCMGAAYKTRKSTXRVASMGVYXPDLRMKSIVPDVMDGAMGIHRLIIEDMIKSCIDPKGKSYFPFDWYAH

SEQ ID NO: 200149 - protein, 76 aa, Glycine max
  Clone ID: PAT_MRT3847_22760C.1.pep
LETFFFFLRKIIMGAVCSAGMVEKNGELGGKSLGFSGKLKKENSFVNRREAFSDSRSNSGHDRKKKKHDTGFSREL

SEQ ID NO: 200150 - protein, 66 aa, Glycine max
  Clone ID: PAT_MRT3847_22761C.1.pep
GFFKFSNSKKKRGWFLNSHAQLPKKGIFFFFFLAFSQTPSLHVAGEKILNFYPIFHIQKEMGIVKN

SEQ ID NO: 200151 - protein, 74 aa, Glycine max
  Clone ID: PAT_MRT3847_22762C.1.pep
NSVTVSIHGFTCKPTHQTLVIHSHLSATLNPIYPRATVGDAIIQITVSFSVRLSITLPNCIHYYQYLNLIPNHT

SEQ ID NO: 200152 - protein, 86 aa, Glycine max
  Clone ID: PAT_MRT3847_22763C.1.pep
TAPDECKAFYAHPVHCSAFRCASPPPRPPSPPPPPPPRRWSTASASRRILAGLSLRSHETHKFVIVNGVFADEFVSLFFGDVKISL

SEQ ID NO: 200153 - protein, 88 aa, Glycine max
  Clone ID: PAT_MRT3847_22764C.1.pep
APHNSHNTIPFWYLKKQFFFVFVSVPLVELPCLFLLVLWISNICSCDIPIQVKQQICKVRNFRTKNKQKFLKRKEKKKVIGFERCQLL

SEQ ID NO: 200154 - protein, 102 aa, Glycine max
  Clone ID: PAT_MRT3847_22765C.1.pep
CCIRGSMPIYISFLISRKHKHNNNLSNNLISFSLKFSLPSIIKNLFMRARTLVFERFANPFVAHDRNQRVVVSWERSAIRFSYQCSGGIFSLRITFARFNPG

SEQ ID NO: 200155 - protein, 56 aa, Glycine max
  Clone ID: PAT_MRT3847_22766C.1.pep
TIKDFQKHLLLYFNYFRTRRVFIILFRVLSQINNYFSSYIYSSKFHFVLFKSNSGN

SEQ ID NO: 200156 - protein, 346 aa, Glycine max
  Clone ID: PAT_MRT3847_22767C.1.pep
MRLGFASWRFILCTLVVFLILQDSVARKIATTSGNEVQLKEVSYDLQKLATEGLVLDSIIQLEGADIKRKNKHVHKDEARVKKGIGFDIEEEEDKNDHKKIVGKDVHGYKPSHEDHKHMDLELNVFFTPNDLKVGKIMPIYFSKKNSSTSPKFLTREEADQIPFSSKHLPSLLKFFSIPQHSPQAKAMKYTLKQCEFEPMEGETKFCATSLESLFDFAHYLFGSNAQFKVLTTVHLTNSTALLQNYTISEVKVISVPNVIGCHPMPYPYAVFYCHSQHSDTNLYEVMVEGENGGRVQAAAICHMDTSKWDRDHVSFRVLKVEPGTSPVCHFFPPDNLVWVPLPLAP

SEQ ID NO: 200157 - protein, 52 aa, Glycine max
  Clone ID: PAT_MRT3847_22768C.1.pep
ICSNNHTWLLTLYLIFRIIKKTDIIYIFDTKWASSFLIVFSVVLQSILKFYF

SEQ ID NO: 200158 - protein, 80 aa, Glycine max
  unsure (1)..(80): unsure at all Xaa locations
  Clone ID: PAT_MRT3847_22769C.1.pep
IYILSVLQFLDDQFNQLQKLQDESSPYFVMEVMTMYSGDSETLLNRIALALXYIFSLIKGEQKPVDFKSVDSNVHQFEGS

SEQ ID NO: 200159 - protein, 112 aa, Glycine max
  unsure (1)..(112): unsure at all Xaa locations
  Clone ID: PAT_MRT3847_2276C.1.pep
MKITVVVFFVAKILVPWQCHAYDMFPHVMNNGNGARTPDVKCASWTPAVEAHKIIGFETIPEECVEASNEYIHGEQYRSDSSTVNQXAYLYARDLDVHPKDTCVFSIHGIVL

SEQ ID NO: 200160 - protein, 142 aa, Glycine max
  unsure (1)..(142): unsure at all Xaa locations
  Clone ID: PAT_MRT3847_22770C.1.pep
MRLMNRHGEPIDNSLDGYMRTDEISSWDLSYAVLTVMGRHLCETSTLMNHLLDTCLSEMEANMGRSGTTKGIGIATAVDIGPXTIAMDLHGTDGMQRGQDDTAXFEKQSALFAVAXSDMVLIYMKRPEIVGEHAASQPFLET

SEQ ID NO: 200161 - protein, 112 aa, Glycine max
  Clone ID: PAT_MRT3847_22771C.1.pep
MGGKKKDLEVGATRSGKRQPLGTVVQAKDYREPPWGLLFEPEEWTIGPFYRAGNNKFWATFLFLYITALTERGVFKSKSMFSTGGIQGFVGSWGGEIWALVYPSGEISGGHI

SEQ ID NO: 200162 - protein, 75 aa, Glycine max
  Clone ID: PAT_MRT3847_22772C.1.pep
DSYASFFCATELCHIFFKGGIIGSDLKNCVRLSRVCLFDTKKEIGLDPHVEYAPCIGTVPHIYIMVVYLVPSVRK

SEQ ID NO: 200163 - protein, 490 aa, Glycine max
  unsure (1)..(490): unsure at all Xaa locations
  Clone ID: PAT_MRT3847_22773C.1.pep
GIGVDEGQCDGCIKSGGRCGHNVSKDAFTCLCANQQSYDEVCSKSQTSSPLAAPTPKPTPEQELSPPFGPKFQEKSLTVADPRKLRLIIGVVSGVVGALGMGIIGFLCYRRKKNRYAISYIQSRSLSSDPSSKDTEKGVQSFTQSFVPGVPLFLYDELEEATNYFDSSKELGEGGFGTCILXGKLRDGRSVAVKRLYENNFKRVAQFMNEIKILAKLVHPNLVKLYGCTSRHSRELLLVYEYIPNGTVADHLHGQRSKPGKLPWHIRMKIAVETASALNFLHHKDVIHRDVKTNNILLDSDFCVKVADFGLSRLFPDHVTHVSTAPQGTPGYVDPEYHQCYQLTKQSDVYSFGVVLVELISSLPAVDITRHRHEINLSNMAINKIHNQALHELVDPTLGFESDFKVRKMINAVAELAFQCLQSSKEMRPSMEEVVETLKDIQSDGKHKSQPEVMDITSTADDVVLLKDDPPPPSPDSNAVSKSTTPNASG

SEQ ID NO: 200164 - protein, 297 aa, Glycine max
  Clone ID: PAT_MRT3847_22774C.1.pep
MPLSRFAAEAFGVVTICLVAILILLGLMCIAYSFYFRSRIHSQGLVQLKYFSGPWIIRITFILFSIWWGIGEIIRLTLLISTFHLKWPDTVCKCYIVSNMGFAEPCLCLTLVFLLRAPLQNLETGIMSRKWNVKTSGYILLYCLPMFVLQLFVILVGPQLDKNKGFGKMLPHYFSSAVVASGENDTTLCTYPLLSTILHGLFAIILTSYLFWLGSRILKLVINKGLQKRVYTLLFSVSCFLPLRVLFLGLSVLSGPEHVMFEALVFLAFLALVCCVGLCMCTLVYPPAADCLALGNL

SEQ ID NO: 200165 - protein, 209 aa, Glycine max
  unsure (1)..(209): unsure at all Xaa locations
  Clone ID: PAT_MRT3847_22775C.1.pep
GSRLTVAGKINWKVKLIIGVVSGVVGALAVGIIGYLCYRKKKNRYTMSYTQSRSLSSDPSSKDTEKGIQRFTQSFVPGVHLFTYDELEEATNYFDSSKXLGEGGFGTVYFGKSKNPLLYLCRFCAFDDHXQRFLSCDVSCLGKLRDGRSVAVKRLYENNFKRVAQFMNEIKILANLDHPNLVTLFGCTSRHTRELLLXYEYIPNGTIAD

SEQ ID NO: 200166 - protein, 112 aa, Glycine max
  Clone ID: PAT_MRT3847_22776C.1.pep
CIDKAWINFISDIGEGGFINWNICRTKPLLSQPQCNPSRIASSSRLAYAIPNPSYWAIEEGRKLNMLGEYQFCGKKGKKLIVKDLASIRRIFFLIFVMFANSRYNVFALELL

SEQ ID NO: 200167 - protein, 82 aa, Glycine max
  unsure (1)..(82): unsure at all Xaa locations
  Clone ID: PAT_MRT3847_22777C.1.pep
AQAAEIIAGKWLKIWIDFGAVLSAIGLFEAQLSSSAYQILGMAEIGILPKLFGVRSKWFHTXWLGILVSTIIPIGVSYMDFT

SEQ ID NO: 200168 - protein, 57 aa, Glycine max
  Clone ID: PAT_MRT3847_22778C.1.pep
SLRIDYSATSQINQVSPLHTLKIVTKRNTSTTEHIALRLIIQFKHLRYSNQTQGKIF

SEQ ID NO: 200169 - protein, 92 aa, Glycine max
  Clone ID: PAT_MRT3847_22779C.1.pep
IKKILIFLVGGLKKLMYLILHSYPHPTQTTFNLSIIINTLLLQVKSSLNNINSYNCFIGVQVGDIPREDIFVDANLNLRDEIRRLDMTRIHS

SEQ ID NO: 200170 - protein, 289 aa, Glycine max
  Clone ID: PAT_MRT3847_2277C.1.pep
YSLAVRWRQISEPCDPVVWVNKLSDEFNAGFGSHTPMILGQAKVVRYFPNYERTLEIAKTVMKERSFVRSKTDKIIHLSQAGIFEETMHAKSCSDLYKVIGEDFWLATWCNSTAFEGKQLEGTRINLVKMGEHGFDFAIKTPCTPARWEDFDEEMTVAWETLCNAYCGENYGSTDFDTLENVRDAILRMTYYWYNFMPLSRGSAGVGFIVMLGLLLAANMEFTGSIPQGLQVDWEAILNLDPNSFVDSVKTWLYPSLKVTTSWKDYPDIASTFATTGSAIAALNFSFDD

SEQ ID NO: 200171 - protein, 58 aa, Glycine max
  Clone ID: PAT_MRT3847_22780C.1.pep
GGGKFVKGRRSRRVRAWVFWSGSIGDGGFWRRFMGCLKVEQCSRSSGPEIVSVRKIGG

SEQ ID NO: 200172 - protein, 59 aa, Glycine max
  Clone ID: PAT_MRT3847_22781C.1.pep
WIVAPESVGPVFVRVIFLYSYLPRKVTLSGCVRLVTLSNVYKRSVNIEEPQDKWLGPRN

SEQ ID NO: 200173 - protein, 97 aa, Glycine max
  unsure (1)..(97): unsure at all Xaa locations
  Clone ID: PAT_MRT3847_22782C.1.pep
MSFKKNMVVLKVCMLLHFLVGVTAARMXLSFVKIDQSARYDDEEYSSPCSDLSMRTRTMPPQCSCEYHRLNSWHSDCHTRMSTGSHPGECHCLDTGD

SEQ ID NO: 200174 - protein, 104 aa, Glycine max
  Clone ID: PAT_MRT3847_22783C.1.pep
FLSSCSHFLGTMVLSKVVKKVTGRLEQMQPEAPKNTMQVVFMLAEAMRYGYTETLGTWNLFDLPTAIIHAVTDKDKKTVASECDERSDCVQLKAPGVLDELYEV

SEQ ID NO: 200175 - protein, 183 aa, Glycine max
  unsure (1)..(183): unsure at all Xaa locations
  Clone ID: PAT_MRT3847_22784C.1.pep
FHSFFFFGFFFFPAKLLRFLPAARWELPFKASRRANPPYEGPLRHLPLGGRGPLLLLELRTAGAHFLYCPDSDSXALNHNPTPGRFSPLAFXPSPMTHCGKQRLLWSXVEALLRHCDNAGIPNLSHHGLNPADVPYGWGYNATLGEFCFTPIGRALLIRYXFNICIYTCLTQATYPCWLFSDT

SEQ ID NO: 200176 - protein, 34 aa, Glycine max
  Clone ID: PAT_MRT3847_22785C.1.pep
PYQGVMLWQQYRGVVVCQQDQYVGMSQLYHNVVL

SEQ ID NO: 200177 - protein, 45 aa, Glycine max
  Clone ID: PAT_MRT3847_22787C.1.pep
SFFCFNKTPFSIQEDDFPYIILQRKWSLPNKPENNDNDTAGSRIN

SEQ ID NO: 200178 - protein, 50 aa, Glycine max
  Clone ID: PAT_MRT3847_22788C.1.pep
TAARRRQKGKYEVESIMSSTNLMARPRYNSYRKKKAIMLKKKKKKNITKL

SEQ ID NO: 200179 - protein, 63 aa, Glycine max
  Clone ID: PAT_MRT3847_22789C.1.pep
PSFSPREGEFFLTYMDFGLFSTHFAQIIQNCKKPFHSIKKLVPINSPKFESLPLLFCPGFKHS

SEQ ID NO: 200180 - protein, 293 aa, Glycine max
  Clone ID: PAT_MRT3847_2278C.1.pep
MAFFLFAILILMVPSSNAYWPPSPGYWPSSKFRSMSFYKGFRNLWGPQHQSLDQNALTIWLDRTSGSGFKSVRPFRSGYFGASIKVQPGYTAGVITAFYLSNNEAHPGFHDEVDIEFLGTTFGKPYTLQTNVYIRGSGDGRIIGREMKFHLWFDPTKDFHHYAILWSPKEIIFLVDDVPIRRYPRKSGATFPLRPMWLYGSIWDASSWATEDGKYKADYKYQPFVAKYTNFKASGCSAYAPRWCHPVSASPYRSGGLSRQQHSAMRWVQRYHMVYNYCQDPKRDHSLTPECWG

SEQ ID NO: 200181 - protein, 63 aa, Glycine max
  Clone ID: PAT_MRT3847_22790C.1.pep
GFNIGSKKGQGSNNFLQAHKIWPWLALQTTICSTGKQSAKVNTMALFFQGTYCKIPSETPQYK

SEQ ID NO: 200182 - protein, 67 aa, Glycine max
  Clone ID: PAT_MRT3847_22791C.1.pep
SRNSPSNLPKPTTPFCSSKLRLALRNFAVRSPLTPELITSSHSYSPHNPQSLAQSFSSPTSLMTILR

SEQ ID NO: 200183 - protein, 85 aa, Glycine max
  unsure (1)..(85): unsure at all Xaa locations
  Clone ID: PAT_MRT3847_22792C.1.pep
PTRPRMPLDDYRISFGAHALGDERVDTMDQEASCQEVSLXAKLKDVAGWNYTQRRPLATXXGFPHALTRRNGEKGTKRHASGDGE

SEQ ID NO: 200184 - protein, 74 aa, Glycine max
  unsure (1)..(74): unsure at all Xaa locations
  Clone ID: PAT_MRT3847_22793C.1.pep
PPPPPRPRPPPPRPPRXRASPSSTTKAPPGQLDTKSSTSSSSCFAGRSLRRGSSSLQEGEGGKQEQAVVVWSPP

SEQ ID NO: 200185 - protein, 88 aa, Glycine max
  Clone ID: PAT_MRT3847_22794C.1.pep
LQDISQPKTEYDLPAGVLSVSLLRHQKIALAWMLQKETKSLHCLGGILADDQGLGKTISMISLILAQRTLQSKSKIDDTCSHKTEALN

SEQ ID NO: 200186 - protein, 106 aa, Glycine max
  Clone ID: PAT_MRT3847_22795C.1.pep
LRWKIGHPTTGTGEFTPNLQDKKEAPSIPGTQNAVMGGHHQKPFFCFPSLTFSSHTRGAKPFSPLWLEGPLEKKTAGGASQKGLWTPPLAWVGEGPRKPIFRGHLR

SEQ ID NO: 200187 - protein, 254 aa, Glycine max
  Clone ID: PAT_MRT3847_22796C.1.pep
MFNMRFVSQDWVVSCALILLVSCTTYSSASLGKPENNIKTSVFKSPKIELGPGLVSNKFYFDVDFPRGHIALKSFNAELVDESEKSVPLQETYLHHWLIIKYHQPKNVTHNNQTDIVFVRNSGFCQDGTLIQYFGLGSETRGTATDIPDPFGIEVGNPSEIPYGYDEKWLINVHAIDTRGVEDRLGCIECRCDLYNITKDADGNPLSPDYKGGLDCCPDNTTCRLNKGFKGPKRTLYLKYTVKWFSWDNYVVPL

SEQ ID NO: 200188 - protein, 207 aa, Glycine max
  unsure (1)..(207): unsure at all Xaa locations
  Clone ID: PAT_MRT3847_22797C.1.pep
FIYGDLVNALVPNIKILKQCGVAQASISLLIPIALSAAYVKHSRFVQAVKTVKEIGFSPLKNNFVVAISVLVTMRKSVWDSRFQVYHRWGWNHEMSLRAFRKFPGFMIFSGETFTKKMSFLVKDMGWPSEAIAEYPQVVAYSLEKRIIPRFSVIKILKSKGVLTCTLXSIICITEEKFLEKFVVNFQNVLPFLPDVYRGVINPSNVL

SEQ ID NO: 200189 - protein, 76 aa, Glycine max
  unsure (1)..(76): unsure at all Xaa locations
  Clone ID: PAT_MRT3847_22798C.1.pep
XLTTLTFFFELNHSFFLXXXITXKMALGGVKSSARARXXQXPEDHHHPPHGGXXXAXPVSLTSILTSLTSPGPTGP

SEQ ID NO: 200190 - protein, 157 aa, Glycine max
  Clone ID: PAT_MRT3847_22799C.1.pep
NSARAIGCSGNLSIAIFAMDSLRQLSMKFLEREELANYNFQNEFMKPFVIVMRKSSAVEIRELIIRCVSQMVLSRVNNVKSGWKSMFMVFTTAAYDDHKNIVLLAFEIMEKIIRDYFPCITETETTTFTDCVNCLIAFTNSRFNKEISLNAIAFLRF

SEQ ID NO: 200191 - protein, 98 aa, Glycine max
  unsure (1)..(98): unsure at all Xaa locations
  Clone ID: PAT_MRT3847_2279C.1.pep
KNKKSYPLPFSIPLPVFIVHSIFQWFSYSYEKNLAITTKASFPILVFNFNTNISVETLNRQRLQHSLTYISLMLXXHXXQVGPVSXXTXSXXEYLSII

SEQ ID NO: 200192 - protein, 84 aa, Glycine max
  Clone ID: PAT_MRT3847_227C.1.pep
FPRFSNTWQNSYASFFCLTGLAPVFLQKSIPLHDMPIVFSFVGPFASSKEATFSDPPCRESPVYYTISPPLLIVAMRSQVCVFS

SEQ ID NO: 200193 - protein, 273 aa, Glycine max
  unsure (1)..(273): unsure at all Xaa locations
  Clone ID: PAT_MRT3847_22800C.1.pep
MKPNKLKCITTFFILYLFNQNAHSELQVGYYSYSCSMAEFIVKDEVRKGVTNNPGIAAGLVRMHFHDCFIRGCDASVLLDSTPLNTAEKDSPANKPSLRGYEVIDNAKAKLEAVCPGIVSCADIVAFAARDSVEFARGLGYDVPAGRRDGRISXNFSTTSSQDPSLDPSYAALLKRQCPQGSTNQNLVVPMDPSSPGIADVGYYVDXFTNRGLFTSDQTLLTNAETASQVKQNARDPYLWASQFADAMVKMGQIIVLKGNAGEIRTNCRVVNS

SEQ ID NO: 200194 - protein, 322 aa, Glycine max
  Clone ID: PAT_MRT3847_22801C.1.pep
NQNFSIICYHHISLTRNQKPQYAYGVFKSRCNHNASSHLIKIPPATGSDFPATLGVQFNDAHVLQLLKNVTSNSTTALAEMRRAATIPLAPTINPLKGTNTKSSSQVDLSCHGSSSDIVPVRIIRSQLLKSCSFHNISPLWQLHLARSLEVRRVSFDELMRRNVLHSSCSGHGCFWLRLMRTHTERRRVSLGKPAGNKGYYIEPTIFVNVKEDMLIAQEEIFGPVMTLSKFKTIEDAIKKANNSKYGLAAGIVTKNLDIANTVSRSIRAGIIWINCFFAFDIDCPFGGYKMSGFGRDYGLEALHKFLKVKSVATPIYDSPWL

SEQ ID NO: 200195 - protein, 69 aa, Glycine max
  Clone ID: PAT_MRT3847_22802C.1.pep
GVSYSLACFLFLNSLVFLQCISLLVLLTPPCLFYFLLFFLLNEECFSVLVFCRLWKLIMYIDPCSFNLQ

SEQ ID NO: 200196 - protein, 69 aa, Glycine max
  Clone ID: PAT_MRT3847_22803C.1.pep
SLSWAQGWFAAFSVESVCVVGVHIQNIHCLGLATFVYSVGFTAPSIGLFLTIFGSGDSSLAPAGPSTNA

SEQ ID NO: 200197 - protein, 143 aa, Glycine max
  Clone ID: PAT_MRT3847_22804C.1.pep
MATARTVKDVSPHEFVKAYSSHLKRSGKMELPEWTDIVKTARFKELAPYDPDWYYVRAASMARKIYLRGGLGVGAFQRIYGGSKRNGSRPPHFCKSSGAIARHILQQLQNMNIIELDTKGGRKITSSGRRDLDQVAGRIVVAP

SEQ ID NO: 200198 - protein, 56 aa, Glycine max
  Clone ID: PAT_MRT3847_22805C.1.pep
ARLIFYRSLVQTKVPISSLEAPHHLHIFILVLAVVYDSFSILTDDFGSATIRQWIH

SEQ ID NO: 200199 - protein, 81 aa, Glycine max
  unsure (1)..(81): unsure at all Xaa locations
  Clone ID: PAT_MRT3847_22806C.1.pep
SSIKDPYNANTPSKPLFEIMDQTATASNTLPSEDIAEHALSKDSAALWMTMYDAXKAPYVTNTEKKKVEHVKNMGVYNQNR

SEQ ID NO: 200200 - protein, 378 aa, Glycine max
  Clone ID: PAT_MRT3847_22807C.1.pep
MSSSESTNARTRTASWFSTPFFVIVLPVAVAALLYRLEPFKPVLLPVQLGRSTVAVPARNGHMQDGSERVGEGHLEGPEDLAYDAAARVVYTGCEDGWIKRVTVNDSVVDSAVEDWVNTGGRPLGLVLKPNGELIVADAEKGLLRVSSEKEIELLVDEFEGLKFKLTDGVDIADDGTIYFTDASHKYPVKDAVFDVLEGKPNGRFFSYNPATKKTTLLAQDLYFANGVAVSADQQFVVFCESVLMRCNKYFVLGPKTGTIEKFCDLPGMPDNIHYDGQGHYLIAMFTALSPELELAYRYPFIRKAFAMFTKYVGSLSISKNGGVLVVDLEGKPTAHYYDPKLALTSAIKIGNHIYAGSIFYPFVTRFDVEKYPALPTV

SEQ ID NO: 200201 - protein, 56 aa, Glycine max
  Clone ID: PAT_MRT3847_22808C.1.pep
VCVLWFVEASYYVKENANMYTSCIDLMYTICKVLSLFELYIHCFTCSNLQYSHFLI

SEQ ID NO: 200202 - protein, 83 aa, Glycine max
  Clone ID: PAT_MRT3847_22809C.1.pep
MGQALGCYQVDQSNVAIKEHFGKFDDVLEPGCHCLPWCLGYQIAGSLSLRVQQLDVRCETKTKVSYWFLFSTYFVSWNHGAII

SEQ ID NO: 200203 - protein, 88 aa, Glycine max
  Clone ID: PAT_MRT3847_2280C.1.pep
LTPGPIPIPVPSHTQTTLTLLHGSFTTNCAPCGYTPYHCYLENPDPSPPTAPCFPASMWNPNLPRSYNPPLESNPSYEQQQPYWSPYD

SEQ ID NO: 200204 - protein, 33 aa, Glycine max
  Clone ID: PAT_MRT3847_22810C.1.pep
LFHFLANSPYNFNRIHCTLHCHQVLASVKEDEW

SEQ ID NO: 200205 - protein, 68 aa, Glycine max
  Clone ID: PAT_MRT3847_22811C.1.pep
PTRQIGARQIEKGGLLSAKVEFDNLDSVQLWTYWKVYTALVPVPGNIVALTVTRLDYDDLRLPPSISP

SEQ ID NO: 200206 - protein, 89 aa, Glycine max
  Clone ID: PAT_MRT3847_22812C.1.pep
VFSDSLYPGPSKIGLWSPGAKFQHCLVFISTVFCFEGKKGWRKFLIFPNTPKGFKALFPGFPGGVLRGPSIKGKFYNPFLVLEKPKKKS

SEQ ID NO: 200207 - protein, 91 aa, Glycine max
  Clone ID: PAT_MRT3847_22813C.1.pep
YMCLFVHVSRPLFIIKACNHLYFKIKRPSVNIYEVCPCSQYISDGLKFRFMQRCLGCVNELSVANISRSYCMYPPMYVVFIQARKLYIYCI

SEQ ID NO: 200208 - protein, 59 aa, Glycine max
  Clone ID: PAT_MRT3847_22814C.1.pep
EELTYDYKFPIEDASNKLPCNCGAKRCRRFLNCGRGCPPRPLHTSCCRRCHLAPSLGAP

SEQ ID NO: 200209 - protein, 64 aa, Glycine max
  Clone ID: PAT_MRT3847_22815C.1.pep
PPLKKNLIIVGNGGTPPQKERRGNPYYQTKPFYLGIKKFFFPIMGFLQTHLRFKKRARQGKKPF

SEQ ID NO: 200210 - protein, 169 aa, Glycine max
  Clone ID: PAT_MRT3847_22816C.1.pep
GCMWGMLQILDYHRWRVKKVFPHKRRKHATYKRKPILYDQHEDQQHGVTEAESLLVGQHSEKLHAAGRSSPKNRKKEPCTEKKVNNENSKGGRTMDYSRKNQASNEYALHLEKEQTTTDYDPVQKQVGPHRENWHTAGRSSPKNRKKEPCTEKKVNNENSKGGRTMDYS

SEQ ID NO: 200211 - protein, 80 aa, Glycine max
  Clone ID: PAT_MRT3847_22817C.1.pep
KMVGSLSCNMNLDGGNPFCLLFNSRGTLKMLFSLVVFVFGILQSSFSRCVICSKMQTGCGVKVALSVAVHLLYFWEAVAT

SEQ ID NO: 200212 - protein, 77 aa, Glycine max
  Clone ID: PAT_MRT3847_22818C.1.pep
WMFHKVSTCNVAFWLGSAHLREKENVIRHTPRCISRSVVIAPETCVFCKIFSFFHIHVPVPFPIYIYIYIYIYIYLL

SEQ ID NO: 200213 - protein, 51 aa, Glycine max
  Clone ID: PAT_MRT3847_22819C.1.pep
PDPRDPSGLTCYNTTITTNGYTKNITYDFLTNILQRNPPNHIYLSTTLRAQ

SEQ ID NO: 200214 - protein, 58 aa, Glycine max
  Clone ID: PAT_MRT3847_2281C.1.pep
GSGKSGLFSINLFGFLIPRFLPRAFERYFQDKGEIYAKSAEDKRPVVVNKTQLSEKKD

SEQ ID NO: 200215 - protein, 47 aa, Glycine max
  Clone ID: PAT_MRT3847_22820C.1.pep
TKFFRLFGRFLKNIFFWGGPMNVKQRTRKLVLRSYQKKLLHVAWKKS

SEQ ID NO: 200216 - protein, 57 aa, Glycine max
  unsure (1)..(57): unsure at all Xaa locations
  Clone ID: PAT_MRT3847_22821C.1.pep
MIVYLNTGFTVEFSHSLIPDPDNASXATLTPKPAXQKTDIALDECDETTFYQFNMTD

SEQ ID NO: 200217 - protein, 49 aa, Glycine max
  Clone ID: PAT_MRT3847_22822C.1.pep
LDDKISQINMEACLDIEGKYASYLYRFYYCRTNLKMASIYIHLHVADAS

SEQ ID NO: 200218 - protein, 257 aa, Glycine max
  Clone ID: PAT_MRT3847_22823C.1.pep
LKRWVEEGAEVPEDSALPPPTTAAFQNGSTEYNSRFAICIETESSPPIEGSNIRTASPELSPGMPPIPPSSNQFSARGRLGVRSRYVDTFNQGGGTSANLFQSPSVPSVKPVLAANAKFFVPTPAPSSNERTIEAIVESKQEDNATNEYPSISTTNEWSYQSPKHVSSTTIQRFPSMGNISNQVAADGNNSHLPHSRRTASWSGSFNDSFTPRKMGNIKPLGEALGMPPSRFSPDESLMHTPVKSSSYGEDLQEVEL

SEQ ID NO: 200219 - protein, 73 aa, Glycine max
  unsure (1)..(73): unsure at all Xaa locations
  Clone ID: PAT_MRT3847_22824C.1.pep
IYLKNRHXKKGNEEEPMGSSSTVQSAQFPKRGNMKYLCYALGMPLSRFSPDESLMHKPVKSSSYGEDLHEVEF

SEQ ID NO: 200220 - protein, 158 aa, Glycine max
  Clone ID: PAT_MRT3847_22825C.1.pep
RISETTLFGVRVPARLYHERVVDHSENPRNVGSFNKNDPSVGTGLVGAPACGDVMKLQIKVDDKTGKIVDARFKTFGCGSAIASSSVATEWVKGRQMEEVLTIKNTEIAKHLSLPPVKLHCSMLAEDAIKAAVKDYEAKRAKATASGEAATEEKPATA

SEQ ID NO: 200221 - protein, 61 aa, Glycine max
  Clone ID: PAT_MRT3847_22826C.1.pep
KKKKSKKKIVIYFFKKKRKEKIAEPAARKFPLFMGRYVAHELSKPSLCNILLQGHCHFCMH

SEQ ID NO: 200222 - protein, 34 aa, Glycine max
  Clone ID: PAT_MRT3847_22827C.1.pep
LVSVVFPPTNLDLSSPSACFFAFPTPGFKSGRFA

SEQ ID NO: 200223 - protein, 135 aa, Glycine max
  Clone ID: PAT_MRT3847_22828C.1.pep
ESQMHKVMFDDKENISFIDGLLDKQPVFRFPCLQNVDENLKKNKAVKIAKPQKPTNASVRAGDWICLVCNNLNFSFRNECNRCRAQTRKQNYIQSLLLISDSPKTEASSPKRLALKDLTNQMAPPNNSNPLGMLV

SEQ ID NO: 200224 - protein, 101 aa, Glycine max
  unsure (1)..(101): unsure at all Xaa locations
  Clone ID: PAT_MRT3847_22829C.1.pep
AMHQHPAPPQIHKTSHSLKGYPIPSINHFKNLLPXFSPPPTIQTYYNKINYNPYLPSKPNVSTSPPSQNTYPNIFTTTHTLMHKTXFHXPTHSHLTRPPTG

SEQ ID NO: 200225 - protein, 132 aa, Glycine max
  unsure (1)..(132): unsure at all Xaa locations
  Clone ID: PAT_MRT3847_2282C.1.pep
RPSPCARSFVFLVPQGQSPSPFSIGCAVLRLFVSLYSVFRRVFRRLVGSGLVVVPVVFVIALVCWWCVSRVVALVSRGAFAVLFEGIPPLPLGVCSRCAGVVFAPCVCAIXRXRGNPRRFRSRSVLAFRLSL

SEQ ID NO: 200226 - protein, 143 aa, Glycine max
  unsure (1)..(143): unsure at all Xaa locations
  Clone ID: PAT_MRT3847_22830C.1.pep
MLRVGAKRLLGTTSLGVRVPARLYHERVVDHYDNSLNVGSLDKNDPSVGTGLVGAPACGDLIRLELRLREDDRXEWVKGRQMEGVLTIKNTEIAKHLSLSPVKLHCSMLAEDAIKAAVKDYEAKRAKATASGEAATEEKPATA

SEQ ID NO: 200227 - protein, 103 aa, Glycine max
  Clone ID: PAT_MRT3847_22831C.1.pep
SKLTVTEPENQPPPPSFSFSFSSLCFFYFLSFLSLPIYLFFHFCRVSFAHHHLLHIPSPTMDVGSWSSSPSKIKSRFSFQDRLFRRKNSQENLDRFIPNRSAM

SEQ ID NO: 200228 - protein, 69 aa, Glycine max
  Clone ID: PAT_MRT3847_22832C.1.pep
MMLNDPISKTETFYVEIAKRIEGKKISSKLTFLFPVSYGSCQKLKKESSERERSKESHELKSSSRIRAT

SEQ ID NO: 200229 - protein, 66 aa, Glycine max
  Clone ID: PAT_MRT3847_22833C.1.pep
LSGSKKVAQSQVSVGMGLLAGSTTLFLTIIWGLCVIVGKCDIKGSIPIDSRDTRGFSLTGMPFEIV

SEQ ID NO: 200230 - protein, 348 aa, Glycine max
  Clone ID: PAT_MRT3847_22834C.1.pep
IRLEFLNRTQIPMGTFVVTLQALEDKIRSCYAVRIKYNSDDFLKMILIDGCFIIELFLRLYRYNYWRGKDPVLLKDWMRMQIKSDLILLENQLPFFVLKQLYNLAGMNQEFPSFLHISFNCLKRVGCGTWCPTESPKHFTDLMRTSIISSSKFVLRKEEECKVIKHVYSAGQLREAGLKFKVSPNENECLLDLTYSSDGVLTMPILNIADDSEVFFRNILTFEECHLSYDTNIITQYRMILDFLINTEKDVNVLVDKKIIVNWMGDANAVATMVNSLGSNIGMPRFNPVYFSLCNSLNDFYESPCNKYKAIFIHDYFNTPWKIASTVAAIVLLLLTLIQTICSINSLF

SEQ ID NO: 200231 - protein, 839 aa, Glycine max
  Clone ID: PAT_MRT3847_22835C.1.pep
MGVMEISLLKMIVNGMSSFLHLSFSGNMNSEPVSKYYQKAEEIHKLLKPIIDAIVNPELASDEVLNKILEEIGFAVNELKEHVENWHLLSSKVYFVMQVEPLISRIRTSGLNIFQQLKDSQHCLPDELSSEYLQLCSQKLKLLGHEEISPVIKEAITEHLENVGPSSELLTKIADSLGLRSNQEVLIEAVALERLKENAEQTEKTAEAEFIDQMIAVVTRMHERLVMLKQAQSSSPVSIPADFCCPLSLELMTDPVIVASGQTYERAFIKNWIDLGLTVCPKTRQTLVHTHLIPNYTVKALIANWCESNNVQLVDPTKSTNLNQASVLHGYMESGTTRESPVFAHSRSNQPSSPESARSCSFSSPANNLTSGGTQREGTSPLHPRSTSEGSFRGMVNGQYMDLARISPEGLDDRSASSDESSVDSASHPSMSPSRRESSSAFSSEQSQTHIRAVSDSSALSNANFPQETQDDDNNAPQLSTSAGHSREASGELNPGTETGGTTAVPSVHREPEFPLRLETRSRSQAIWRRPSERHVPRIVSSPVVETRADLSAIETQVRNLVEGLRSSDVDTQREATAELRLLAKHNMDNRIAIANCGAINLLVDLLQSTDTTIQENAVTALLNLSINDNNKTAIANAGAIEPLIHVLETGSPEAKENSAATLFSLSVIEENKIFIGRSGAIGPLVELLGSGTPRGKRDAATALFNLSIFHENKNGSRQAGAVRHLVDLMDPAAGMVDKAVAVLANLATIPEGRNAIGDEGGIPVLVEVVELGSARGKENAAAALLHLCLHSPKFSSKVLQQGAVPPLVALSQSGTPRAKEKALLNQFKSQRHGSSGRG

SEQ ID NO: 200232 - protein, 776 aa, Glycine max
  Clone ID: PAT_MRT3847_22836C.1.pep
IRCWKKLVSAVNELKEHVENWHLLSSKVYFVMQVEPLISRIRTSGLNIFQQLKDSQHCLPDELSSEHLQLCSQKLKLLGHEEISPVIKEAITEHLENVGPSSELLTKIADSLGLRSNQEVLIEAVALERLKENAEQTEKTAEAEFIDQMIAVVTHMHERLVMLKQAQSISPVSIPADFCCPLSLELMTDPVIVASGQTYERAFIKNWIDLGLTVCPKTRQTLVHTHLIPNYTVKALIANWCESNNVQLVDPTKSTNLNQASVLHGYMESGTTRESPVFAHSRSNQPSSPESARSCSFSSPANNLTSGGTQREGTSPLHPRSTSEGSFRGMVNGQYMDLARISPEGLDDRSASSDESSVDSASHPSMSPSRRESSSAFSSEQSQTHIRAVSDSSALSNANFPQETQDDDNNAPQLSTSAGHSREASGELNPGTETGGTTSVASVHREPEFPLRLETRSRSQAIWRRPSERHVPRIVSSPVVETRADLSAIETQVRNLVEGLKSSDVDTQREATAELRLLAKHNMDNRIAIANCGAINVLVDLLQSTDTTIQENAVTALLNLSINDNNKTAIANAGAIEPLIHVLKTGSPEAKENSAATLFSLSVIEENKIFIGRSGAIGPLVELLGSGTPRGKRDAATALFNLSIFHENKNRIVQAGAVRHLVDLMDPAAGMVDKAVAVLANLATIPEGRNAIGDEGGIPVLVEVVELGSARGKENAAAALLHLCLHSPKFSSKVLQQGAVPPLVALSQSGTPRAKEKAQALLNQFKSQRHGSAGRG

SEQ ID NO: 200233 - protein, 86 aa, Glycine max
  unsure (1)..(86): unsure at all Xaa locations
  Clone ID: PAT_MRT3847_22837C.1.pep
KKKIKKKKKKKKKKKKKKKKKKKKKKKKKKNKXKKKNRLKKKINKKXSNKKNYIIVKPKKKAWRYQLYWLLALHIFLLWLMRGKCL

SEQ ID NO: 200234 - protein, 313 aa, Glycine max
  Clone ID: PAT_MRT3847_22838C.1.pep
MSDPSDQLLPYNSELVIVFLKFLYEQDPVKQLLEVSESEYEVEIDLETMQRVRELVQFGGFADTEYLRRTLAKEFQLMELSFKEAFEMPFTTISRKILCEDILPLFPLPSLPKSSSSMWIPTSVSYYEDPSRASVPPYSCQNQFIDYISFQVPDECFSDIVNCICIVRGFMHDSDCLKKGYSSLEAVLLCVPVDYQCVDLSLYKDSQIVLLLNKATNTSESAGDGCMMILQVSDLPYVSMSRSACIDVWRLPELKDSVAYLNIGDEKSRTIRHSVIAPLAVSASRGVACVFAATKRALVYILEEDEDEVSDVE

SEQ ID NO: 200235 - protein, 66 aa, Glycine max
  Clone ID: PAT_MRT3847_22839C.1.pep
PKIWLSTSIFVYDNGHPGGIGPIPVDGAVNHIWKKVHQKLSMIKEAIIRERRKPPGASVPRRCHCT

SEQ ID NO: 200236 - protein, 52 aa, Glycine max
  unsure (1)..(52): unsure at all Xaa locations
  Clone ID: PAT_MRT3847_2283C.1.pep
LQVRLCPKPVFDTAVCSITRVQNMIVISQLCTXNCTDQPVIDLSSTCLIFSK

SEQ ID NO: 200237 - protein, 63 aa, Glycine max
  Clone ID: PAT_MRT3847_22840C.1.pep
IRVHYKCLGFSQCRSSIVFNLSETTYCCCCCCCCCCCFMPCVLERESIEREGHCGRQVCIRSD

SEQ ID NO: 200238 - protein, 77 aa, Glycine max
  Clone ID: PAT_MRT3847_22841C.1.pep
IIQTQLTSQKLERGKIIVKSKPLRGAHAWQLSKKKGCPKKKGRPCPEFLIKANYQHRISSLLKAKGKNYVGIEPPAH

SEQ ID NO: 200239 - protein, 67 aa, Glycine max
  Clone ID: PAT_MRT3847_22842C.1.pep
GPLWVNCLSICRDWPGSIVHGLRDACFYAGYYTCTICRTNCGQPSYTWYHVPRSWLSSGGNSFAVLD

SEQ ID NO: 200240 - protein, 54 aa, Glycine max
  Clone ID: PAT_MRT3847_22843C.1.pep
PRVRFQIAHKPSIYVLDTAGVLVPSISDIETGLKLALAGTISIKIIHLKYFFGY

SEQ ID NO: 200241 - protein, 66 aa, Glycine max
  Clone ID: PAT_MRT3847_22844C.1.pep
ISWPFGYHPLPVFLPYTNPPGVLISLPCSRLMLYPSMRWPELVCIPPGFHCTIVPSNIFYSKVVHH

SEQ ID NO: 200242 - protein, 37 aa, Glycine max
  Clone ID: PAT_MRT3847_22845C.1.pep
SMHVESLQCYNAFSLSAVDCCIDHQAYIIIKLNLLCC

SEQ ID NO: 200243 - protein, 58 aa, Glycine max
  Clone ID: PAT_MRT3847_22846C.1.pep
KSIMNLLSGKNLGCYQLLYFPFSTDTILEHRVKGNNEMNRLLRKNITKFNKQIHELSD

SEQ ID NO: 200244 - protein, 150 aa, Glycine max
  Clone ID: PAT_MRT3847_22847C.1.pep
GIITMSGKSSFPVCFSLGTFFLLLLNHVSAENRTEPRKNANLSPFESWRSAYFCMNNTPIPPSCLGKHGYIMKLDGVLDVSASDISDFCNNGCKSHTLDVLSCIQDVKRDFYFGTKQNVSFVKDAIINACAASQRYALNTNVTKDPNSAT

SEQ ID NO: 200245 - protein, 80 aa, Glycine max
  unsure (1)..(80): unsure at all Xaa locations
  Clone ID: PAT_MRT3847_22848C.1.pep
FEVFCHSNADKIVGLPDQPIHRLLXLSKYVTVDGKKHEFLFYNFVESETNPTSNPLVLWLNGGLQSLDPKVEFFLRLGIK

SEQ ID NO: 200246 - protein, 99 aa, Glycine max
  unsure (1)..(99): unsure at all Xaa locations
  Clone ID: PAT_MRT3847_22849C.1.pep
FGIKEKHQGPICPCYTRTCRLKSLVXGLGAYQDQKSRVLINTQLLELQKPLNFRNKNRLLVDFQGSTSGVTSNTIKGFSFHPLAPMVEPGMNRWHASRA

SEQ ID NO: 200247 - protein, 527 aa, Glycine max
  unsure (1)..(527): unsure at all Xaa locations
  Clone ID: PAT_MRT3847_2284C.1.pep
TRPDEWSSHRQAWKLESAAIIEPPINFIVSSHSKAKKRPRWALIDKAFMARAWRSSQASYHLYRTSGNFCPSDHVTMLMDDLLSLSLHSYETVRLLAGKSLVKLIKRWPSMISKCVITLTHNLQDLNAKEYAVLGSCSVLASQTVLKHLTTDPKSFSSFILAILSSSHHESLKAQKAINELFVKYNIQFSGVSRSFFRISDKENHTGGLGFSDLVSQIGSMSFDSTGLHWRYNLMANRVLLLLALASQNHPNSSSKILSETAGHFLKNLKSQLPQTRILAISALNTLLKESPYKLSHGEKSAVLEDLQGHVKSSLEGTLTPTFQEEGFFNETLTSLSHVHIITDSETASRGGQGDSSFQSLADKSITRFYFEFSASWPRTPSWISFLGSDTFYSNFARIFKRLVQECGMPVVLALKGAVDEFTIAKERSKQCVAAEALAGVLHSDIDGLSGTWESWLMPQLKNIILAQSVESVSEWASCIRYAVTGKGKYGTRVPLLRQKILDSLMTPLXSTVATTITAKRYTFLAA

SEQ ID NO: 200248 - protein, 132 aa, Glycine max
  unsure (1)..(132): unsure at all Xaa locations
  Clone ID: PAT_MRT3847_22850C.1.pep
MSKLKSSPLTHYILSRRKNYHSELKMMLSSFVGKIEKGVSHFVHKNPPLRYLNEATTTSVVPDDVREGYFAVLTTNGGESKRFIVGLHYLNDPAFLGLLDQAXEEFGLRQKGALAIPCQSQELQKILECCRV

SEQ ID NO: 200249 - protein, 208 aa, Glycine max
  unsure (1)..(208): unsure at all Xaa locations
  Clone ID: PAT_MRT3847_22851C.1.pep
MANSRSWTQIWPCFVKLCVLNFVLVFKITALGDGSGSGPTVTAENTCKNTNYQSFLPPPYQNISQMICTPVWHTYELRYFQNGDTTTIILSAPYTIGWVGIGFSRDGMMVGSSAMVGWISKHGHAKIKQFYLRGRKQSEVIIDKGELLLNNIPAAVATNGAEIHIAFQVQMTTPLSKQPILLAFXSKYPQNHHLSKHEDKTAIVFDFS

SEQ ID NO: 200250 - protein, 228 aa, Glycine max
  Clone ID: PAT_MRT3847_22852C.1.pep
RAGRPNVDWCESHKTETIRTNVVGTLTMADVCREHGILMVNYATGCIFEYNATHPEGSGIGFKEEDKPNFIGSFYSKTKAMVEELLREYDNVCTLRVRMPISSDLSNPRNFITKISRYNKVVNIPNSMTILDELLPISIEMAKRNLRGIWNFTNPGVVSHNEILEMYRDYIDPNFKWANFTLEEQAKVIVAPRSNNEMDASKLKTEFPELLSIKESLIKYVFEPNKKT

SEQ ID NO: 200251 - protein, 176 aa, Glycine max
  Clone ID: PAT_MRT3847_22853C.1.pep
MARAGDNGGVYHQLDESQRLFLDAWTTQMQRLLNRNKEEPYRRIAKSSSFTLKPLSPRKVCDDQIRMREKREQEKENSEAPQRNMKKKSDTPEEKSDTQERESDNSNQLTIYVSPSVQPLLQEFKDVFPKEIPHGLPPSRSIEHQVDLLPEASLPNRPTYKSNPQETQRKDAQTKS

SEQ ID NO: 200252 - protein, 89 aa, Glycine max
  Clone ID: PAT_MRT3847_22854C.1.pep
LEFFFLHKETRDLLGEEKEFLLFYKGRIFKWPHFLLIKGKISLIWESFSIFIKGITQLGSWRGFSTWRVEILDRFLRVKGFGDCLCMGV

SEQ ID NO: 200253 - protein, 83 aa, Glycine max
  Clone ID: PAT_MRT3847_22855C.1.pep
VVEGVLDPRDRQRRAQLDSESFHSYKSEYILHGRNDAQTLKGNHAHNPPYPCSSAHDAQSAIEQMKKKGCKRRGAQKKCRIAI

SEQ ID NO: 200254 - protein, 53 aa, Glycine max
  Clone ID: PAT_MRT3847_22856C.1.pep
GVVLDHRAHEVDISNMSRLIKQLSLLFRLILSHCCYGATPSSCVGDVADIVPC

SEQ ID NO: 200255 - protein, 112 aa, Glycine max
  Clone ID: PAT_MRT3847_22857C.1.pep
FHRGISPQGPIQTSWGAGSSFWWCSWWRSGSGIETCVTQSYLESATDMSSLNLRRPYSLLRSSRVPTVFMRSSPILAANDLANCLFWEASLLTECRENIVKACSALCANEVC

SEQ ID NO: 200256 - protein, 85 aa, Glycine max
  unsure (1)..(85): unsure at all Xaa locations
  Clone ID: PAT_MRT3847_22858C.1.pep
MRCHGLPEGCIARILDRTTPTDVCKFSVVXYNVRSAAESDAAYKRTLPSXYHSIISESTSTLNYPYKKELYIAVSNRHIIIDQGK

SEQ ID NO: 200257 - protein, 35 aa, Glycine max
  Clone ID: PAT_MRT3847_22859C.1.pep
CGVVKVIGHSCTCNISKNDSSLAYMSSYQYRILNA

SEQ ID NO: 200258 - protein, 65 aa, Glycine max
  Clone ID: PAT_MRT3847_2285C.1.pep
MNLLSLKVVGGEPFYEILNPTSSMQNNFCFPHSPTRDFALPCSLGEIIILLLVQNNTANNTFIMQ

SEQ ID NO: 200259 - protein, 197 aa, Glycine max
  unsure (1)..(197): unsure at all Xaa locations
  Clone ID: PAT_MRT3847_22860C.1.pep
MASHSDANSLRDFWIPGHVLVPDSVVEGSNIDIEGPKCPVLVFVNSRSGGQLGGELLKTYRALLNENQVFDLGEEAPDKVLSRIYANLENLRLQGDHIAIQIMEKLRLIVAMGDGTAGWLLGVVCDLKLSHPPPXIATVPLGTGNNLXFAFGWGKXKNPGTDEQAVKSFLDQVMKAKEMKIDNWHILMRMXAPNKSL

SEQ ID NO: 200260 - protein, 138 aa, Glycine max
  unsure (1)..(138): unsure at all Xaa locations
  Clone ID: PAT_MRT3847_22861C.1.pep
MCTVDKRGSIFMLTLTGEGEHRVNPTXLVESILSSLRRVRQEDTVFSVLGTTEHGKFFLNGYDIAWGRSSDEDKERMILMDSLLRSVVFELLTLPMPTMRVVTGHAFTGGYTLALVHDHVSMRSDRGFLYMSELDINL

SEQ ID NO: 200261 - protein, 221 aa, Glycine max
  Clone ID: PAT_MRT3847_22862C.1.pep
TGCRLVVLLDDYCEAVVGDFGLAKLLDHADSHVTTAVRGTVGHIAPEYLSTGQSSEKTDVFGFGILLLELITGMTALEFGKTVNQKGAMLEWVRKILHEKRVAVLVDKELGDNYDRIEVGEMLQVALLCTQYLTAHRPKMSEVVRMLEGDGLAEKWASSHNYGNQDMNPSHGNNSNTSSRPTSASKHDDDVHDRSSMFGMTMDDDDEQSLESYAMELSGPR

SEQ ID NO: 200262 - protein, 67 aa, Glycine max
  unsure (1)..(67): unsure at all Xaa locations
  Clone ID: PAT_MRT3847_22863C.1.pep
YPXFFYIFYPLKNYALLELLKAILVQIYLLQIYIFNLYYYNLFLPSKKKYYHIIITYYPPSFNILHL

SEQ ID NO: 200263 - protein, 112 aa, Glycine max
  unsure (1)..(112): unsure at all Xaa locations
  Clone ID: PAT_MRT3847_22864C.1.pep
GLTTEVKSVEMHHESLTXAHLGDNMGXSNVXNXXCKGLKXXYVCXNSKGGPCKEXAVYFKAQSINMDXXGXXGNGYXPWLXCHTSPFVXQFVELLTKLRXRPXKDLRKSPSF

SEQ ID NO: 200264 - protein, 72 aa, Glycine max
  Clone ID: PAT_MRT3847_22865C.1.pep
MASRVSLKAKGKSSKGSKAAEDRSASECLKEWTTWAMRKAKVITHYGFIPLVIVIGMNSDPKPPLSQLLSPV

SEQ ID NO: 200265 - protein, 54 aa, Glycine max
  Clone ID: PAT_MRT3847_22866C.1.pep
ITLLYITYIITYSYTNILIVNTTSALLYFSYDLIKNPPVIMTIIKHSFIPNNKT

SEQ ID NO: 200266 - protein, 48 aa, Glycine max
  Clone ID: PAT_MRT3847_22867C.1.pep
LLCRKFIRGNLRGCMCSYSYKFESCIHSVSHTYHVRLNGYKIVPLSFT

SEQ ID NO: 200267 - protein, 47 aa, Glycine max
  Clone ID: PAT_MRT3847_22868C.1.pep
NHGYDCDFITCSAIRYIATEPEFSVEPTPWFFMQFKRYLKASILHGM

SEQ ID NO: 200268 - protein, 76 aa, Glycine max
  Clone ID: PAT_MRT3847_22869C.1.pep
IAMAMTRVMQGLVLCTLLLSAVLVQEVEARVISKEAMQRNTIPGCSKVHPNVAACHLPLVNINYRRGCEPGERCRQ

SEQ ID NO: 200269 - protein, 91 aa, Glycine max
  unsure (1)..(91): unsure at all Xaa locations
  Clone ID: PAT_MRT3847_2286C.1.pep
HFQSKFFSPPESQDRAGFLSSWEAQFTKKAAKKEAVKLEKLRRRQEIAAAFSVTANLFVDXEDPFGGNYGDVPFLELQSKTPSDRWLVDAR

SEQ ID NO: 200270 - protein, 341 aa, Glycine max
  Clone ID: PAT_MRT3847_22870C.1.pep
MLEIHSIGGGRFFGGGGDRRLRPHHQNHHQQPPIKCPRCDSLNTKFCYYNNYNLSQPRHFCKNCRRYWTKGGVLRNVPVGGGCRKSKRSNKPKTTTSAAATTSSNNNNNNPSSSSETAAATAPTPPQQPPPPLELEHNSHSHSSSESSTYTVAATEAMSAPTTNAVSNNNLLLDNNRESKMFANPNPYLEQSRSGGLFSDIESFSSLVNLNNQALGFGFGNNNSNISILDATSFRFGVSVTNPHGNDQVLAAPGGGHGQWQQQQQNHHEFGTASFLDHTVPLEFSSLQHKAGHQGGFGPLDWQPGGDQGLFDLPNTVDQPYWTHHTHWSDQDNPSSLFHLP

SEQ ID NO: 200271 - protein, 55 aa, Glycine max
  Clone ID: PAT_MRT3847_22871C.1.pep
SIAWVHHYNTYLNVTSGTTKTTYEPFSQVDFGDKPKNNSMLLAEIDNLKSINSGA

SEQ ID NO: 200272 - protein, 90 aa, Glycine max
  Clone ID: PAT_MRT3847_22872C.1.pep
LFIVMVLSLIVRIQRVSDSLCSWVVRSSNTCTVTSNRINNSIMKDVSNVRRVRYYAQIRSVIEALNRTCNRAALWSAIRSALSLSPLWWP

SEQ ID NO: 200273 - protein, 77 aa, Glycine max
  Clone ID: PAT_MRT3847_22873C.1.pep
FLTQGVGMRSEQRLHTTVLRGEDTAAVAEEDEEEEEEDGPARGWLVEEAQDRNGAFGSSIQWMRPKSFRPSKESTCP

SEQ ID NO: 200274 - protein, 172 aa, Glycine max
  Clone ID: PAT_MRT3847_22874C.1.pep
MQSLQQKASEWSGVSIADAFAIDEANLFHKLGLQTLVNLSTNFYNRVYDDDQEWFRSIFANSDKQNAIQNQIEFLVQRMGGPTLYSQRRGHPALIARHRPFPLTHEAANRWLHHMGQALDSTSAIDDDSKIKLINFFRHTAYFLVAGVEQKDQNFHVPCKDAALKQHPCKNF

SEQ ID NO: 200275 - protein, 456 aa, Glycine max
  unsure (1)..(456): unsure at all Xaa locations
  Clone ID: PAT_MRT3847_22875C.1.pep
MDRVSPNRRRSDGESSSASAGDTRQKRARVYFDFDGTHCIVKCSNAGNSSASVEEFVDYDNFQGWLELRSNDDDAGDSSRFDEGDGNDISKVDDLEVKMDLTDDLLHMVFSFLDHPNLCRAARVCKQWRTASAHEDFWKSLNFEDRNISVEQFEDICRRYPNITAIRMSGPASNQLVMKAISSLRNLEALTLGKTHIMDNFFHALADCSMLRRLSINDAILGSGLQEISINHDRLCHLQLTKCRVMRIAVRCPQLETMSLKRSNMAQVVLNCPLLHELDIGSCHKLPDAAIRAAATSCPHLVSLDMSNCSCVSDETLREIALSCANLSFLDASYCSNISLESVRLPMLTVLKLHSCEGITSASMAAIAHSYMLEVLELDNCSLLTSVSLDLPRLQTIXLVLCCKCADLNMRTIMLSFILVSICPALHRINITSISLQKCVLQKLNMFSMLDLQCHC

SEQ ID NO: 200276 - protein, 71 aa, Glycine max
  Clone ID: PAT_MRT3847_22876C.1.pep
CSTSPIYMPYRRQAYIATINIQKEKRLNKISFMNLIGHTILLRRFLREKRKKSVGNKATLVTRVTKLIIGS

SEQ ID NO: 200277 - protein, 214 aa, Glycine max
  Clone ID: PAT_MRT3847_22877C.1.pep
SVRKSGGLVSARTLAVFITVTLSTSVAAQQGPIPMAGHQICMQVWLSVSLLNDALALAGQALLARNYSLGNYEQARLVIYRVIQIGLGAGITLSIILFFGFGAFSSLFSTDSEVLDVAWSGIWFVAGSQPVNALAFVIDGIYYGVSDFGYAAYSMVLVGLVSSTFLLVAAPVGLPGVWTGLFIFMALRVLAGVWRLSSKSGPWDTIWYRDGAED

SEQ ID NO: 200278 - protein, 139 aa, Glycine max
  unsure (1)..(139): unsure at all Xaa locations
  Clone ID: PAT_MRT3847_22878C.1.pep
MTFLLQALLACNYSLGNYEQASLVIFRVMQIGLGAGITLSMILFFGFGAFSSLFSTDSEVLDVARSGIWFVAGSQPVNALAFVIDGIYYGVSDFGYAAYSMXGLVSSTFLLVVAPVGLPGVWTGLFIFMALRVLAGLWM

SEQ ID NO: 200279 - protein, 50 aa, Glycine max
  Clone ID: PAT_MRT3847_22879C.1.pep
ARIFLLYVRDRYQWRKYGKKVTRDNPSPRAYFKCSYAPSCPVNKFFCGSC

SEQ ID NO: 200280 - protein, 69 aa, Glycine max
  Clone ID: PAT_MRT3847_2287C.1.pep
FSLSSGCSPSPPKTASSGKSPPTLLGPESFSLRPRRHHGHFLHRVALDLKSPHASTELHESRGMCCCSY

SEQ ID NO: 200281 - protein, 88 aa, Glycine max
  Clone ID: PAT_MRT3847_22880C.1.pep
LKMGGGVLSLLIFFCFFFPNRGPSKISKYFPFYPTKPFLALNYKRVQLLAAFMIPGRALPLRRALRTPPTDNSMSCFPPTGDLPLDPP

SEQ ID NO: 200282 - protein, 85 aa, Glycine max
  Clone ID: PAT_MRT3847_22881C.1.pep
LEEVLDVAWSGICFVAGSQPVNALAFVIDGIYYGVSDFGYAAYSMVLVGLVSSTFLLVAAPVGLPGVWTGLFIFMALRVLAGVWR

SEQ ID NO: 200283 - protein, 294 aa, Glycine max
  Clone ID: PAT_MRT3847_22882C.1.pep
MEMEPTCVDTSLNLNVIPSPHIDHLAGEVLFEELRRLSSENKRLTETLNHLCESYVALQKHLSEFSQLRNANFDKEGTCAVPSLKRKPESENCVNLFGTECNTITEEETFKRPKHSTEPKVSKVLTRTDASDTGLYVRDGYQWRKYGQKVTRDNPSPRAYFKCSYAPSCPVKKKVQRSVEDPSVLVTTYEGEHNHGQQHQTAEISINSSSKSETPRPAVSPSAMNIRSSAAAGPIVTLDLVKSKVVDINAQKSSLQQFLVHQMATSLTRDPNFTAALASAISGRILDDTSVGKR

SEQ ID NO: 200284 - protein, 225 aa, Glycine max
  Clone ID: PAT_MRT3847_22883C.1.pep
MAMRSLCFLVFLAAAMQGTLAVDYTVTNNALSTSGGVRFRDAIGDDYAKQTLDSATQFIWGVLQQNAPADRKDVQKVNLFVDDMDGVAYTSNDEIHLSARYVNDYSGDLKTEITGVLYHEMVHVWQWNGNGQTPSGLIEGIADYVRLKANYAPSHWVKAGQGEKWDQGYDVTAHFLDYCDSLKSGFVAQLNQQMRDGYSDQLFVQLLGKTVDQLWQDYKAKYGTS

SEQ ID NO: 200285 - protein, 86 aa, Glycine max
  Clone ID: PAT_MRT3847_22884C.1.pep
QTLIGYRYDRLLRQAKAASMILQSSNYFVALGVYGDDNSLSVHDSDKPYYSGSQSKSFLCAHYYTITDGMDKTKRDLCTFMKSLAR

SEQ ID NO: 200286 - protein, 126 aa, Glycine max
  unsure (1)..(126): unsure at all Xaa locations
  Clone ID: PAT_MRT3847_22885C.1.pep
LVPVVSFVRCPLFSGWSPPFLFGVLPASVPAPVAVRPGSPFGWRWPVGALGLAVGLGRFGARAPAGXLSPPFGVALALVLAAAFLPSSPPPLGVFFLLSVLWGPPPLGEGFLNCFLRYRFSLHSPE

SEQ ID NO: 200287 - protein, 85 aa, Glycine max
  Clone ID: PAT_MRT3847_22886C.1.pep
LLLVDVESEVYDEFDMIYTSCRAGIRFDIESMGIGRDVLYDGWWVNVGGSNHNIYKFYKERFGVVWFGLVSIIKGRPLLLSSHSP

SEQ ID NO: 200288 - protein, 186 aa, Glycine max
  Clone ID: PAT_MRT3847_22887C.1.pep
IDIGVVTPKIKIALSRSRERRKRHSQNHAEPQMSIHSVGLLLEAVFLKAKSLQVLERFKEAAQSCKVILDIVESSLPEGMPDNFGAECKLQETLNKAVELLPELWKLADCPREAILSYRRALLHHWNLDAETIAKIQKEFVVFLLYSGGEATPPNLRSQMDGSFVPRNNIEEAILLLMILLRKVSL

SEQ ID NO: 200289 - protein, 246 aa, Glycine max
  unsure (1)..(246): unsure at all Xaa locations
  Clone ID: PAT_MRT3847_22888C.1.pep
MGVSFKVSKTGTRFRPKSIPQLQDGSSDNSKSQSDLVEAGENIAQIPQSSVSSETLSLADREASFTLNLFPDGYSIGKPSENEAASQSKYQDFPKSLHPYDRSSESLFLAIESGHLPGDILDDIPAKYVDGALICVVHDYRRCSSDKGSSVSAESSTVSKVCLKMSLENIVKDIPSITDKSWTYGDLMEVESKILKALQPKLHLDPTPKLDRLCESPLPTXLNLPRKRLKXMPEFAXTSTNKIHGK

SEQ ID NO: 200290 - protein, 212 aa, Glycine max
  Clone ID: PAT_MRT3847_22889C.1.pep
MDLMFPLKPHCVILKAPLSSSLLFPFPLRFRAVTAFKHANIQCELEGRPNGALSGDFDPRFIDRQKALEAAMNDINNNFGKGSVTRLGSAGGALVETFPSGCLTLDCALGGGLPKGRIIEIYGPESSGKTTLALHAIAEVQKLGGNAMLVDAEHAFDPAYSKALGVDVENLIVCQPDHGEMALEIADRMCRSGAIDLICVDSVSALTPRAEI

SEQ ID NO: 200291 - protein, 92 aa, Glycine max
  Clone ID: PAT_MRT3847_2288C.1.pep
RPTVSPTGTSTGGEGSPVRIGSNFVSQRRQFCLCGGSDVSAVWLSYPCEFRSAMHRSLEHEGYLPPSQGIPLPSHVRVGGHGSRLQLVCISR

SEQ ID NO: 200292 - protein, 143 aa, Glycine max
  Clone ID: PAT_MRT3847_22890C.1.pep
MEPVRLKTDYRCVPALQQFYTGGPFVVSSDSSFIACACGESIKIVDSATAAIRSTLDADSESFTALALSPDDRLLFSSGHSRQIRVWDLSTLKCVRSWKGHEGPVMCMTCHPSGGLLATGGADRKVLVWDVDGGYCTHYFKGH

SEQ ID NO: 200293 - protein, 80 aa, Glycine max
  Clone ID: PAT_MRT3847_22891C.1.pep
INPNYFMSGQEAREPCNNPPVEQHNITSDYFYNTGSGTFASSSPLNNRSPNSTSSYAAVIGNSRYLKPVQSLLEDLVDVG

SEQ ID NO: 200294 - protein, 285 aa, Glycine max
  Clone ID: PAT_MRT3847_22892C.1.pep
MASEGDHHHHHHHHQDHDHHHHDHDHHHHHDGEGETNSWVGKDGKVYHSHDGLAPHSHEPIYSPGYFTRRAPPLLNRNFNERAFTVGIGGPVGTGKTALMLALCELLRENYSLAAVTNDIFTKEDGEFLVKHKALPEERIRAVETGGCPHAAIREDISINLGPLEELSNLFKADILLCESGGDNLAANFSRELADYIIYIIDVSGGDKIPRKGGPGITQADLLVINKTDLAPAIGADLAVMQRDALRMRDGGPFVFAQVKHKIGVEEIGNLVLQAWEAATGNKRH

SEQ ID NO: 200295 - protein, 122 aa, Glycine max
  Clone ID: PAT_MRT3847_22893C.1.pep
MASEGDHHHHHHHHQDHDHHHHDHDHHHHHDGEGETNSWVGKDGKVYHSHDGLAPHSHEPIYSPGYFTRRAPPLLNRNFNERAFTVGIGGPVGTGKTALMLALCELLRENYSLAAVTNDIFT

SEQ ID NO: 200296 - protein, 94 aa, Glycine max
  Clone ID: PAT_MRT3847_22894C.1.pep
GGDNLAANFSRELADYIIYIIDVSGGDKIPRKGGPGITQADLLVINKTDLAPAIGADLAVMQRDALRMRDGGPFVFAQVKHKIGVEEIGNLVLS

SEQ ID NO: 200297 - protein, 90 aa, Glycine max
  unsure (1)..(90): unsure at all Xaa locations
  Clone ID: PAT_MRT3847_22895C.1.pep
MNHKDAGMCDNLKLDVAALILGYHDDCSYADQHRSHICVHDINRARFLCKPKPRXVTQSQPVVTAVWNSAQKLXSRNYAGVHEAIRAFNW

SEQ ID NO: 200298 - protein, 91 aa, Glycine max
  Clone ID: PAT_MRT3847_22896C.1.pep
QKRNVVITRFLKRRVVSAQTTLMPSSSGIASSIRSKGLDLLMEISEKVEMAGKARMPAFSVTKVRAGSWGNAVSYARSEGCDSFGVIECNI

SEQ ID NO: 200299 - protein, 533 aa, Glycine max
  Clone ID: PAT_MRT3847_22897C.1.pep
MGNCCRSPAAVAREDVKSSFSNADHGKRGGGGSASAAAKQKAPITVLAGVPKENIEDRYLVDRELGRGEFGVTYLCIDRDTRELLACKSISKRKLRTAVDVEDVRREVAIMRHLPESPSIVSLREACEDDNAVHLVMELCEGGELFERIVARGHYTERAAAAVTRTIVEVVQLCHKHGVIHRDLKPENFLFANKKENSPLKAIDFGLSIFFKPGERFSEIVGSPYYMAPEVLKRNYGPEIDIWSAGVILYILLCGVPPFWAESEQGVAQAILRGLIDFKREPWPSISESAKSLVRQMLEPDPKLRLTAKQVLEHPWIQNAKKAPNVPLGDVVKSRLKQFSMMNRFKRKALRVIADFLSNEEVEDIKDMFKKMDNDNDGIVSIEELKAGFRNFGSQLAESEVQLLIEAVDSNGKGTLDYGEFVAVSLHLRRMANDDHLHKAFSYFDKDGNGYIEPDELRNALMEDGADDCTDVANDIFLEVDTDKDGRISYDEFVAMMKTGTDWRKASRHYSRGRFNSLSLKLMKDGSLNLGNE

SEQ ID NO: 200300 - protein, 94 aa, Glycine max
  Clone ID: PAT_MRT3847_22898C.1.pep
LTNKKGYQKNRAIKSVASTSLFGILFSNPVPMLFLHAWEFCNRIIHPPAKGKQDSVMKPVSIRNIMCVPVYLRAFVALISELFTCCSIRIIILV

SEQ ID NO: 200301 - protein, 62 aa, Glycine max
  Clone ID: PAT_MRT3847_22899C.1.pep
MKKRPCSRCPSLCYCVEYYSYLPSSPLLHTFNYPIHINNLSAKELKQLSDELRSYFIFSVSR

SEQ ID NO: 200302 - protein, 42 aa, Glycine max
  Clone ID: PAT_MRT3847_2289C.1.pep
KKKKKKKKKLKKKKKKKKEKEKKKKKNKKKKKKKKKKKKEKK

SEQ ID NO: 200303 - protein, 111 aa, Glycine max
  Clone ID: PAT_MRT3847_228C.1.pep
LQGVVPFIREKKNNKVATPLPATLSMAYAGALFADACLKGLNGVPDVVECSFVQSTVTELPYFASKVRLGKNGVEEVLGLGPLSDFEQQGLESLKPELKSSIEKGIKFANQ

SEQ ID NO: 200304 - protein, 92 aa, Glycine max
  unsure (1)..(92): unsure at all Xaa locations
  Clone ID: PAT_MRT3847_22900C.1.pep
VALVPFGCFARRFLPGLRGPRLGVAAAGVVVLPGCLSPAFVAVRSRSRRASLCLFXLVVLLFRVGSVGRGVAFRLVSVRRSSVGFRCFAFPF

SEQ ID NO: 200305 - protein, 81 aa, Glycine max
  Clone ID: PAT_MRT3847_22901C.1.pep
LPLRFIFIIFHVDTPKNVKKSYLPFSVVQKILYNPLPYHPVFFYVMLPPKKFFFLLVLLLRRRITRELSLFLSIMYPFVVI

SEQ ID NO: 200306 - protein, 182 aa, Glycine max
  Clone ID: PAT_MRT3847_22902C.1.pep
MEKIKIKLLMKDETFLQHPFVLAVVLVLGLVMMDPFHLGPVSEHEFRPVKHSIAPYHQVMKNWPRDNMSRLALHGKSEFKNQVFGPESLEFDHMGRGPYTGLADGRVVRWMGEQLGWETFAVVTSNWTEKLCFRGNDSTTAKQWKHEKTCGRPLGLRFDKVNGDLYIADAYYGLLVVGPNGG

SEQ ID NO: 200307 - protein, 45 aa, Glycine max
  Clone ID: PAT_MRT3847_22903C.1.pep
DFVFSSHLFYFILIFSNCLREKNSLSSCIVFSAVVFCLSKCPPWI

SEQ ID NO: 200308 - protein, 55 aa, Glycine max
  Clone ID: PAT_MRT3847_22904C.1.pep
EKIGIERFYLIEMIEKYIQLCPRVSNILLLISMRAISLQHLMYERQKTITYSFIC

SEQ ID NO: 200309 - protein, 109 aa, Glycine max
  Clone ID: PAT_MRT3847_22905C.1.pep
MLRSLTKLRCFAAVQSRQVLSPPSSRRLLHHSPPPQPLHSASNFRISRPSFISSSWPLHASHPSPSLVQVRHASSKERKRKPVPPTVSKVKKTKMKSYSSFKSKWLTPK

SEQ ID NO: 200310 - protein, 60 aa, Glycine max
  Clone ID: PAT_MRT3847_22906C.1.pep
INYILVASTVNRKTFSSKYLTAFNSYSYKPASVLHLLKFNPISTNFIENHQIRSINAISR

SEQ ID NO: 200311 - protein, 127 aa, Glycine max
  unsure (1)..(127): unsure at all Xaa locations
  Clone ID: PAT_MRT3847_22907C.1.pep
SSRSSRFGSRRYDTQEHPLFSTLDTVHKDDFHQPNFPGASIKKGGPREPWHDIHCKLEGSVAWDVLYNFQQRWEKQVGNQLLFSSSKLXISTLVLQSTGGPPKENETWKVQLSKSIEGGAVFGFPPA

SEQ ID NO: 200312 - protein, 44 aa, Glycine max
  Clone ID: PAT_MRT3847_22908C.1.pep
SKEFLVVNVEGVYHALLCLVFRSVVTVFVLVILFHCVIVLSYVF

SEQ ID NO: 200313 - protein, 67 aa, Glycine max
  Clone ID: PAT_MRT3847_22909C.1.pep
INYGGSLMGIMDLYYSYDEYLNINFDDILNYWSRYVGLWSSPEVEPAEAENTRKQNRVQYHLKQKTH

SEQ ID NO: 200314 - protein, 87 aa, Glycine max
  Clone ID: PAT_MRT3847_2290C.1.pep
NKRNLNQGNQNAVYVNLRVIFKSAIQTQGNCRNGEKCFNNEIKNGLYFSTWSRNICICIVLSFISSAMGCLIHVITVVTDKTWLTNL

SEQ ID NO: 200315 - protein, 296 aa, Glycine max
  Clone ID: PAT_MRT3847_22910C.1.pep
MTVDEIGSRYQWRKEQDKAFENALAIHPEDASDRWEKIAADVPGKTLEEIKHHYELLVEDVSQIESGYVPLPSYNSSPEGSTSHASEEGAGKKGGHSWNSNNESNHGTKASRSDQERRKGIAWTEDEHRLFLLGLEKYGKGDWRSISRNFVVTRTPTQVASHAQKYFIRLNSMNKDRRRSSIHDITSVNNGDVSAPQGPITGQTNGSADNSAGKSTKPAPPAPTAALGVGIYAGPTIGQPIGGPLVSAVGTPVMNLPPPAHMAYGLGAPVPGAVVPGAPMNLGPVPYPMPHTSARR

SEQ ID NO: 200316 - protein, 50 aa, Glycine max
  Clone ID: PAT_MRT3847_22911C.1.pep
SYYFACTRAAASIAGGACVHGGYFAWAGCCAMSSGSDAWYLPPFPKKRNR

SEQ ID NO: 200317 - protein, 44 aa, Glycine max
  unsure (1)..(44): unsure at all Xaa locations
  Clone ID: PAT_MRT3847_22912C.1.pep
REFQKKDYKEGLGITRCKGNCFVIFFYIXVRECFWLQTISAYGT

SEQ ID NO: 200318 - protein, 132 aa, Glycine max
  Clone ID: PAT_MRT3847_22913C.1.pep
SKMASRVSPNLKCWQFRTPYYCDSWKTPRAVPSSILRHVTERNNVMPPCGLVHRSRNLRVQRGKRVYSSLFDDFHQEERMNLVQDGCWDENGHEIACAVSDNTPNKELKNDFSGGGCSSEEFGTMKPEVLEP

SEQ ID NO: 200319 - protein, 100 aa, Glycine max
  unsure (1)..(100): unsure at all Xaa locations
  Clone ID: PAT_MRT3847_22914C.1.pep
FFSFSVIHCFCDPWKNLLLKMASRVSPSLKCWQFRTPYYCDSWKTPRAVPSSILRHVTERNNVMPPCGLLVHRSRKNLRVQRGKRXYSXFFDDFXXXERM

SEQ ID NO: 200320 - protein, 207 aa, Glycine max
  Clone ID: PAT_MRT3847_22915C.1.pep
ILLDIFRMFPLGTPLDILQRLVSTLDRCASRTCSLPVETVELMPPHCSRFSLTCLQKLFSLCSYSNEVNWNMTRSEVSKISITVLMTRCEYILSRFLTDENGLGDCPLPKARLEEIIYVLQELAHLVIHPDAASSLPLHPLLRTELAREKEKHDNRPHLFALLPSFCELVTSRELRIRELVQVLLRLVTKELSLEKLSLASEKNTSR

SEQ ID NO: 200321 - protein, 59 aa, Glycine max
  Clone ID: PAT_MRT3847_22916C.1.pep
LPALKKNNEQLVKKIGKGQKKIKSSRTFLQILVLVVCFWWGLMSRCVPVPMGFYFVGMA

SEQ ID NO: 200322 - protein, 65 aa, Glycine max
  Clone ID: PAT_MRT3847_22917C.1.pep
VLMMAIGYKQHELFCYTNNDKKRYSVHYYTSIGRHFSPSDTGGSFGTPLSEFTQRLSQIMIDSTN

SEQ ID NO: 200323 - protein, 72 aa, Glycine max
  Clone ID: PAT_MRT3847_22918C.1.pep
RTHSSVSVSIDIIAFQSSLEIHPKARNWIPNRGVSVSLSMRLCTLGIGIHFVKDPGFRAIVGHRDPFDDICR

SEQ ID NO: 200324 - protein, 106 aa, Glycine max
  Clone ID: PAT_MRT3847_22919C.1.pep
RPSLFGILRGNRVLKPPPLILSQSFLQGGKKNPPPPPQFWLLKKLRPLFLENLTPGEVIHRSGGPSFSCGQRLLSNPRPKFCSFLKFKKIFKPSSKYFKLFVLSFS

SEQ ID NO: 200325 - protein, 145 aa, Glycine max
  Clone ID: PAT_MRT3847_2291C.1.pep
FGVGLAVKPVVLNQIQSSLVDVMTKVMTKIGLSPNLPFSQGAFPPSLQSAASTVNTNQSSAGSMMQLATKSVDQVSQGLPGSRPVQIGSDFENNPLRVTAVDSAFGSRTEKVISNFLQNPLLKGEGGGLDEAESSRHSMEMGQAG

SEQ ID NO: 200326 - protein, 46 aa, Glycine max
  Clone ID: PAT_MRT3847_22920C.1.pep
MTESPKLLSTANALRLVLLEHLIQAMTWSQPVYLRQSWDYLFHRLL

SEQ ID NO: 200327 - protein, 63 aa, Glycine max
  Clone ID: PAT_MRT3847_22921C.1.pep
TRRLRLPNASQPNQRVLELSTWCYLLVDDSPRPFNCRKHTRNRTLPTFNTPISCTRTIGATLT

SEQ ID NO: 200328 - protein, 490 aa, Glycine max
  Clone ID: PAT_MRT3847_22922C.1.pep
MQGGVKEKLLIKEKKTSEQEEEELSLVKRVWNESKVMWVVAAPGIFTRFSTFGINVISQAFIGHIGSRELAAYALVFTVLIRFANGILLGMASALSTLCGQAYGAKEYVMMGVHLQRSWIVMSITSLFLLPVFIFTRPILMLLGQDENIAEVAGNISLWSIPMIFAFIASFTCQNFLQSQSKNTIISFLAAFSIVIHLFLSWLLTIQFKLEIPGAMTSTNLAFWIPNIGQLIFITCGWCSDTWKGFSFLAFKDLWPVVKLSLSSGIMLCLELWYNTILVLLTGNMENAEVQIDALSICLNINGWEMMISLGFMAAASVRVANELGKGSSKAAKFSIVVTVLTSLAIGFVLFLFFLFLRGKLAYIFTSNKDVADAVGDLSPLLAISILLNNVQPVLSGVAIGAGWQSIVAYVNIGCYYIIGIPVGVVLGNVLNLQVKGIWIGMLFGTFIQTVVLTVITYKTDWDEQVTKARNRINKWSKVESDHETITSDD

SEQ ID NO: 200329 - protein, 45 aa, Glycine max
  Clone ID: PAT_MRT3847_22923C.1.pep
MVVKMMRWRPWPPLLSKKFQVRLLVRRLQGCDLLRNAARDGSKLV

SEQ ID NO: 200330 - protein, 87 aa, Glycine max
  Clone ID: PAT_MRT3847_22924C.1.pep
MVVKMMRWRPWPPLLSKKFQVRLHVRRLQGCDLLQNAALQGSRLVLEIRWKGPKLILGSLRWNSVARNFTKEADFELDGGGAAVVHW

SEQ ID NO: 200331 - protein, 136 aa, Glycine max
  Clone ID: PAT_MRT3847_22925C.1.pep
TLCECKHNSARALESNKLVLNGFDVEEKNDGCHRAKPTKKRKSFNKRECSDPERINIKMLDDFQKREQRNTRAHNFDNCYISQQDIQTVDLDSRASTLDVYYGAQRNVLGDGQLHSMPSRGSHYEMQHSIARPLKD

SEQ ID NO: 200332 - protein, 209 aa, Glycine max
  Clone ID: PAT_MRT3847_22926C.1.pep
LTFCKLQVTAWGGAVSALSPTHSPARSGHYQEVAKMNMPPKVSAPSPFTIVKGALDSHGPVLKRSYGNEEVSIYVMRLLTPEDEDSAIDQLFIHVDVSKPQQNESLIFLCGLYEDALGIHSVSMRPKVQDSGYLLIPSQYTGPVFAELDEKMRDAFHNSFSSNIEECGVNESLFKFLQAWLYVKEHRNLMRWFKTMGLFIDGKKPATGA

SEQ ID NO: 200333 - protein, 167 aa, Glycine max
  Clone ID: PAT_MRT3847_22927C.1.pep
MVVKMMRWRPWPPLLSKKFQVRLLVRRLQGCDLLRNAAREGSKLVLEIRWKGPKLTLGSLRRSSVARNFTKEAEFDVDGGGAAVVHWDEEFPTLCNLNGYKDNVFHPWEIAFTLFNGLNQRPKNKVPAIGTALLNIAEFASSTDQNDFDLNIPLTLTGGSGELFSFT

SEQ ID NO: 200334 - protein, 80 aa, Glycine max
  Clone ID: PAT_MRT3847_22928C.1.pep
FLVPGCSSPRFKMPFSDLGLSFGGNALGIRLAAFFVGFGIRSPATAIGVVVGIPLPKFPGMFVVWGIDRSISFNEPLGFL

SEQ ID NO: 200335 - protein, 154 aa, Glycine max
  unsure (1)..(154): unsure at all Xaa locations
  Clone ID: PAT_MRT3847_22929C.1.pep
KKKRQRNNIDVDDASRLRRRTRYLLIKMKLEQNLIDAYSGEGWKGQSREKIRPEKELLRAKKQILKCKLSIRDAIHQLDSLSSVGSMXDSAIAPDGSVYHENIFCANCKLHEAFPDNDIILCDGTCNRAFYQRCLNPPLDTENIPPGDQGLFCK

SEQ ID NO: 200336 - protein, 76 aa, Glycine max
  Clone ID: PAT_MRT3847_2292C.1.pep
YPHTLNGVFLSNSAHTPNFIQSFYLLYLSTISNQEISYNTFLITPYPTDQNSISYTNILTTFSLLFLSNTFPPFFN

SEQ ID NO: 200337 - protein, 267 aa, Glycine max
  Clone ID: PAT_MRT3847_22930C.1.pep
MVVKMMRWRPWPPLLSKKFQVRLHVRRLQGCDLLQNAALQGSRLVLEIRWKGPKLILGSLRWNSVARNFTKEADFELDGGGAAVVHWDEEFQTMCNLNGYRDNVFHPWEIAFTLFNGLNQRPKNKVPAIGTALLNIAEFASSTDQKDFDLNIPLTLTGGSGEPSPLLCISISLMELSVAQESLEPVQRSIVPVPSPSAKSGETALAEKDELSAIKAGLRKVMILTEFVSPKKAKKGCREEEGSEGRCSRSEDGEYNYPLDSESLDDS

SEQ ID NO: 200338 - protein, 58 aa, Glycine max
  Clone ID: PAT_MRT3847_22931C.1.pep
GIRSTLSGGVMAYREGIVWATTARIQRAKNFGSLTQASAIRVGVSRGGIVCLIKSLLP

SEQ ID NO: 200339 - protein, 76 aa, Glycine max
  Clone ID: PAT_MRT3847_22932C.1.pep
GRRDDRYNSGRAGPDVSSYAGDAYHSARDNCGTSGNPHGYGQQSNSRKAYGSSDSGNRSGMNSNFGRGGVGGWEHC

SEQ ID NO: 200340 - protein, 62 aa, Glycine max
  Clone ID: PAT_MRT3847_22933C.1.pep
MIFDQGSMQSKSNLDCFLRRTTPVVPSQFLPKHEIRNLNRLWHPWEREAVEYFTLGDLWDRP

SEQ ID NO: 200341 - protein, 53 aa, Glycine max
  Clone ID: PAT_MRT3847_22934C.1.pep
PTTTHFPKSNLLFLHNSIDCPFHSTLPRESSIATNAPTDLQSHPNSQPHTPPP

SEQ ID NO: 200342 - protein, 85 aa, Glycine max
  unsure (1)..(85): unsure at all Xaa locations
  Clone ID: PAT_MRT3847_22935C.1.pep
RLKATVSYVTMXSSLALSFDSSLCTRARYDGLTMLYGGARYQATGHAFADRHTKYSENYILYSSSHXVKGCRMHLLXTVYLAYGY

SEQ ID NO: 200343 - protein, 399 aa, Glycine max
  unsure (1)..(399): unsure at all Xaa locations
  Clone ID: PAT_MRT3847_22936C.1.pep
TFLIFPHYTDHVLFLNFLLSXLLLFSVTFCHVLGDKVFTGTYGVNYGRIADNLPSPESVVTLLKAAKIRNIRIYDADRQVLNAFKGSGISISVCVPNELLKEISVGEDRAMNWIKQNVEPYLPGTKIRGISIGNEILGGGDMELWEALVPASKNVYSALARLNLAHQIQVSTPHSEAVFANSYPPSACTFREDILPVMKPLLQFFSQIGTPFYINAYPFLAYKNDPQHIDINYALFKKNPGIYDAKTKLHYDNMFLAQVDAAYAALDKLGFDKMEVIVSETGWASKGDDNEAGATVKNARTYNKNLRKLLLKKKGTPYRPKMVVRAYIFALFNENLKPGPTSEXNFGLFKPDGSISYDIGFTGLVPSSATSPFLSFKGIGSLYAVVSTSCAAFLILVAL

SEQ ID NO: 200344 - protein, 231 aa, Glycine max
  Clone ID: PAT_MRT3847_22937C.1.pep
GSSFLPPFYPTSTIYTIEEFTQVNIGSNDYMGNYFLPPFYPTSTIYTIEEFTQVLIEELSLKTTEGHDLGARKYVLARLGRIGCTPSVMHSHGTNGSCVEEQNAATSDYNNKLKALVDQFNDRFSANSKFILIPNESNAIDIAHGFLVSDAACCPSGCNPDQKPCNNRSDYLFWDEVHPTEAWNLVNAISVYNSTIGPAFNYPMDIKQLVESEIKRELEFTNGSSQPSATE

SEQ ID NO: 200345 - protein, 88 aa, Glycine max
  Clone ID: PAT_MRT3847_22938C.1.pep
HNLSLYQCADSLANFAVSNRNSFCGMMLPYFAPLILPVILKGFLSIGLPYSSMGIGIVPPCCFLFHLFWIYKFRWGWGIGWDVSKVPT

SEQ ID NO: 200346 - protein, 123 aa, Glycine max
  unsure (1)..(123): unsure at all Xaa locations
  Clone ID: PAT_MRT3847_22939C.1.pep
APATSPTSTTPRRLPRPKEGANTXPSHQCFPLLDLKKLKMNFFWTGPTFPLFLGPVLLIHGRGHVKSQDIRHFLDGLYVKKKXFPPPXLXXXPSFLWCFLSVSWFPFCVPPFLWXFXLPVCVC

SEQ ID NO: 200347 - protein, 48 aa, Glycine max
  Clone ID: PAT_MRT3847_2293C.1.pep
GPLTESNFSQYTIHRLLNHTQNTILNAETDTPYALERDMHNCRKSTKH

SEQ ID NO: 200348 - protein, 68 aa, Glycine max
  Clone ID: PAT_MRT3847_22940C.1.pep
SSLISPWLCLSFAVAVSLSPQNPKSLYAMVMFACSEIGRSTKPKNPRATSIRKDGVMQVRTICPMYAV

SEQ ID NO: 200349 - protein, 99 aa, Glycine max
  unsure (1)..(99): unsure at all Xaa locations
  Clone ID: PAT_MRT3847_22941C.1.pep
TXXRVRKXXXXAXXXXXXXTXLDXXXXXKXXXRXXXCXDXXXQXPXVXVXTXYXXXXXXXXXXXSVXAVCHXXVTTDXXCRCPGXXXLXXXCQPXMCIA

SEQ ID NO: 200350 - protein, 79 aa, Glycine max
  Clone ID: PAT_MRT3847_22942C.1.pep
RPHGQWTMKSTVHFSDTKRRSSIDDSPEAVNDMLPEWPAKTTISGTRRSEKDGKSETLRCSSVKGKLEIMSRATKPALP

SEQ ID NO: 200351 - protein, 148 aa, Glycine max
  unsure (1)..(148): unsure at all Xaa locations
  Clone ID: PAT_MRT3847_22943C.1.pep
MEGNDQDVSGEANKFPERQPIVTVVHSQDNGKDYQEPAPAPLVDPTDFTSWYLYRAGIAEFEATFLFLYITVLTVIGVAGAKSKRTADGIQGIACAFGGMIFALIYCTAGISXGHINPAATFELFLATKLSVPSAIFYILMQWSGAIF

SEQ ID NO: 200352 - protein, 131 aa, Glycine max
  unsure (1)..(131): unsure at all Xaa locations
  Clone ID: PAT_MRT3847_22944C.1.pep
RIFPGSFPRDPFYAFWEKVLIQFEDFANHNAFDLLEKYRSTHLVFNDDIQGTGCVVLAGLVAALMLDGGKXLSHRFLFLGAGEAGTGIAYLSSLETSXQTNAPLAEARKNIRLEDSTGLNARCRIESVQHF

SEQ ID NO: 200353 - protein, 54 aa, Glycine max
  unsure (1)..(54): unsure at all Xaa locations
  Clone ID: PAT_MRT3847_22945C.1.pep
HAVRNKVSSILTLYXHFSSINFLSKSIFTVFYPFHVSKTLSESNSASLRYFCNK

SEQ ID NO: 200354 - protein, 46 aa, Glycine max
  Clone ID: PAT_MRT3847_22946C.1.pep
RLLSDLSAVGPSTTISGLSHIVLMADPGFGPLLFCCNRKKKLAANS

SEQ ID NO: 200355 - protein, 71 aa, Glycine max
  unsure (1)..(71): unsure at all Xaa locations
  Clone ID: PAT_MRT3847_22947C.1.pep
XIQTXHRFXXITDVGYDNXHRXLLITDXVXKYXXIYTFCFNSKPKIVPVKCIFRRPQFIANKHFILLFXSF

SEQ ID NO: 200356 - protein, 222 aa, Glycine max
  Clone ID: PAT_MRT3847_22948C.1.pep
MILALHPFGERALTVGRDECLAVVNLVRGRRNCCLRLGKEASLVKFDASGDQFFMAVKEKVSVHQTEDARILFELECPKPVLCATPAKNGLLYTGGEDRNITAWDIKTGKIAYCLEEAHTARVKGIVALTESDGATGDDDPYLVASASSDGIIRVWDVRMAAREKPLTEHNTRSRLTCLAGSSLKFKRQRPQDGKSKSKVVKQQRALSGKSKSKVEDQTIEV

SEQ ID NO: 200357 - protein, 66 aa, Glycine max
  Clone ID: PAT_MRT3847_22949C.1.pep
LGIQQALACGLNAYTLSIISADDCPVKCHIQSAFYHCPTCGGLVNATCGNVTLLIIAIFGLSNNKI

SEQ ID NO: 200358 - protein, 154 aa, Glycine max
  Clone ID: PAT_MRT3847_2294C.1.pep
MESNTAEATRNRMYEDFEPYCKWLTKDGQATLEINLKGFKKEQLKIQTYDWGILTIHGERLVDASNDKWSRFRKEIKISKGCNMNSIRAKFSHGVLFIAMPKEAVMEKHLIWGVETRKRISPTKVAIGVVFVVALGTYIARIVSSDAIRKLIKY

SEQ ID NO: 200359 - protein, 200 aa, Glycine max
  unsure (1)..(200): unsure at all Xaa locations
  Clone ID: PAT_MRT3847_22950C.1.pep
HLTFDGQVLGLLGGNQLNSAINSEKAVKTDSAAVAELPDLIDTGDLNDYHGTGDNTKSKNGQNIANLTPSTPPALADDLFENFMNSGVASDELKNDDPFADVSFHSNDNKEHADIFSSMTVGDDKLDHHVSHGLGNRNEPDSDDLLAGLSIDENTSSTKQKATSPAMQSESLFSGLNNHVSHLGPDNGLXSMLGTQAVGF

SEQ ID NO: 200360 - protein, 106 aa, Glycine max
  Clone ID: PAT_MRT3847_22951C.1.pep
MVRIPQFLTAALAITGASAASAVKDLLPSNFDDIVLNSGKPALVEFFAPWCGHCKTLAPIYEELAHAFEHSDKVTIAKVDADAHKDLGRKHGVQGFPTLKWFENGK

SEQ ID NO: 200361 - protein, 238 aa, Glycine max
  Clone ID: PAT_MRT3847_22952C.1.pep
MASSSVREDKYRPFMREDSEKNIKWRYGAPPNYDVVNKLFDEGRTKVWPPGSLEEKVQTLVKNWEMEMFHKEDFKDNRSVDPEKYTFSLNGRKPISLEEKRKLGGGYIPLLQTSIPEKLRPYNPYEETADSSHKAFTTTFPRGFALEILHVYSGPPVIVYKFRHWGYMEGPFKGHAPTGDKIEVYGMAIFTLDENSKIVKVEFFYDPAELLGGLLKGPKFDGSAEDAVASCPVLRNTG

SEQ ID NO: 200362 - protein, 126 aa, Glycine max
  unsure (1)..(126): unsure at all Xaa locations
  Clone ID: PAT_MRT3847_22953C.1.pep
YILLIEPLPSITKIFSMVIQCERQNCVPNLDDSKALVNASTSKSQGSANGRXNSGSKRYCTYCHKTNHFVENCFQKHGVPPHMMKNHSGSAHHSAVDGGERVESSTASQNTTSVTMTPSLTQEPNR

SEQ ID NO: 200363 - protein, 103 aa, Glycine max
  unsure (1)..(103): unsure at all Xaa locations
  Clone ID: PAT_MRT3847_22954C.1.pep
HPKFVRSWLPPQRWGGLTRSDNRAPPPCPLGSPLGPPPRPSIPAFGPVNPPAPXSRGWGAPPPFDPPEXPGGFFSAPSPLWGGTPIFSGRGLGGVPLLLTAFF

SEQ ID NO: 200364 - protein, 238 aa, Glycine max; identical to SEQ ID NO: 200361
  Clone ID: PAT_MRT3847_22955C.1.pep

SEQ ID NO: 200365 - protein, 191 aa, Glycine max
  Clone ID: PAT_MRT3847_22956C.1.pep
GVGSSAYGCLRSEQPLHQPHSGFRQPWEIKIPPAALSFAWRLLWDRLPSKDNLISRQIVLQNVLCPFCQSQVESASHLFFTCYKVMPLWWEFNSWVKEDRVLHSKPMDNFLQHCSLAGSRNSNRRRKIWWIAATRSIWSLRNDMVFNNQSFDISKLMDRTIYLTWSWLRGWEKDFTVPFHQWSSCMSLPFI

SEQ ID NO: 200366 - protein, 107 aa, Glycine max
  unsure (1)..(107): unsure at all Xaa locations
  Clone ID: PAT_MRT3847_22957C.1.pep
KCGASVIAKTFGIFIWGHKIXGTEVLMSNNVSDFNAISSIXKGGVIVTNTGLLCHRLILSXALIXTAIIFLGRNIFMPFISATDTERKGNGTVGSKVFEENFFRSCQ

SEQ ID NO: 200367 - protein, 92 aa, Glycine max
  Clone ID: PAT_MRT3847_22958C.1.pep
AMQRKILASTAAAEALEEANATECIIRNLSMFSDLCSVCQARNPLPTIDRFFTIYDDVLKSTAMVESVASRHNSETPDEGIPTKHSKSLSFW

SEQ ID NO: 200368 - protein, 44 aa, Glycine max
  unsure (1)..(44): unsure at all Xaa locations
  Clone ID: PAT_MRT3847_22959C.1.pep
GGLQXSALVKFIFETSAYPKEHEQLKLLIETTGHKCAGKLCIIL

SEQ ID NO: 200369 - protein, 227 aa, Glycine max
  unsure (1)..(227): unsure at all Xaa locations
  Clone ID: PAT_MRT3847_2295C.1.pep
MGCASSKRVDAAAVPYRPAPTSLAVFDINTIEEPWLKHLNNTTPLPQDNNKPSLPAPILHKLNLLDATDAPQSWDEISKTLQDLKSPSTSPQQQPQPPQKTKSFHTVVELLDATDPPQSWDEISKTLQDLKRYFTKAQPADQIINSSIVTEPVRGNKLKENMFIVRDRLERQKEEKELTFERLRRDPLSAFPEKCPPGGSEKVVLYTTXLXGVRKTFEDCNRARDVL

SEQ ID NO: 200370 - protein, 124 aa, Glycine max
  unsure (1)..(124): unsure at all Xaa locations
  Clone ID: PAT_MRT3847_22960C.1.pep
DSCFENCDFPPFHGLEPKHGRPGMRALLGKLEREXEELERNGEPAGPKVEEPAEKIVDRVSVVGGMIKHLKAVRDSRELRARIEDAQAEKVRVQLTQGQSAPIHNACRAIQEAPDGQTLSAAGK

SEQ ID NO: 200371 - protein, 67 aa, Glycine max
  Clone ID: PAT_MRT3847_22961C.1.pep
CRHEIDKVTAGQRLDLNLERGRIREELSNQNAETNNLTNKLDRVSNYGSVWVSSSKSGEENKKKKIK

SEQ ID NO: 200372 - protein, 112 aa, Glycine max
  Clone ID: PAT_MRT3847_22962C.1.pep
EHLIFLWESRIEKILSSFSPSQRLVQNPYKGFGLVMSLAIYWGNTPVKGKIGGDLLVVINTLDFIRLKGKKKKAFFWRNLSLFNWSPGGAPFRGEPVFGEGERFQNPASFKG

SEQ ID NO: 200373 - protein, 37 aa, Glycine max
  Clone ID: PAT_MRT3847_22963C.1.pep
WFELIRPGADNYSEGANSIEAKRYTPKLEKVYPKLFL

SEQ ID NO: 200374 - protein, 66 aa, Glycine max
  Clone ID: PAT_MRT3847_22964C.1.pep
HVLSIWSKLKIKRSCSTEVVFFFKEDCYFSDSMKVSPYKTKLNLSTEFNARYYWAALLSSSRSRAS

SEQ ID NO: 200375 - protein, 92 aa, Glycine max
  Clone ID: PAT_MRT3847_22965C.1.pep
APTLSPRAKVRVSSNPRERLGGPPPRPDSKRELSFPLSQKIGSFKWSKGFSNKVQRIPVKFQSLESIGNVSVDSPVSLPPRVLEKNPFPKLG

SEQ ID NO: 200376 - protein, 86 aa, Glycine max
  unsure (1)..(86): unsure at all Xaa locations
  Clone ID: PAT_MRT3847_22966C.1.pep
IVMTVLSTASQSSHVAVVTIVLGIHAKHIMLXMSKVRNQEGVANXDEILANADAVIAARGDLRLAMPVVSISLAQDVMIRKVDIDG

SEQ ID NO: 200377 - protein, 72 aa, Glycine max
  unsure (1)..(72): unsure at all Xaa locations
  Clone ID: PAT_MRT3847_22967C.1.pep
MIIYRNKLEKKKKKKKKKKKKKNKKKKKKKKKKKKKTKKKKKKNNKKKKKKKKXGGGPLKEPNFTTRGWEVF

SEQ ID NO: 200378 - protein, 65 aa, Glycine max
  Clone ID: PAT_MRT3847_22968C.1.pep
MEVLRVQVFVVSIVALALAYVAPSINAQVLPPAPAPAPTSDGISVDQGIAYVLMLLALVLTYIIH

SEQ ID NO: 200379 - protein, 48 aa, Glycine max
  Clone ID: PAT_MRT3847_22969C.1.pep
ILFYFFYIKSKFVISLRLYVSIHVEKQENTTIGISEVIYRLNKHASKH

SEQ ID NO: 200380 - protein, 68 aa, Glycine max
  Clone ID: PAT_MRT3847_2296C.1.pep
FLWSKKIFLPSRELDWGGGNAASLVLSIQSSVGPVLLFLCFGSFRKFSFNSNVICHILAFITSDRSCI

SEQ ID NO: 200381 - protein, 41 aa, Glycine max
  Clone ID: PAT_MRT3847_22970C.1.pep
HSNSEERYMGNTLDSYTQIMYNLLQLTKEPNWKRDISKPKN

SEQ ID NO: 200382 - protein, 89 aa, Glycine max
  Clone ID: PAT_MRT3847_22971C.1.pep
EKILKPGWGPSLRITSKKKGLGAFQHFYKRGRWQPPEFLCPAKKVNKNFFKNPPLEKGVQFFGPPNPFIQEGFFNKTPHFFFLKFFFPP

SEQ ID NO: 200383 - protein, 151 aa, Glycine max
  unsure (1)..(151): unsure at all Xaa locations
  Clone ID: PAT_MRT3847_22972C.1.pep
ARARAESARATLLGYREEQFTHLHFFLHDVXTGPKSSMAFIDVPNGKATDALATGTDEGQDDALTVASEQDSXLEGKALGVDTSIXHDEMGLMKGTTMACTDGDSNGSAINENLRNMITNEPVRETAIDGRTGAPRLARGYSQARFYYADF

SEQ ID NO: 200384 - protein, 67 aa, Glycine max
  Clone ID: PAT_MRT3847_22973C.1.pep
FSIFLKGLRKVRFFFPLGGGKLWNLVFFLLLWAKNWEKTVKFSLLRVGAPNYPMGFFDKKPPPRIWP

SEQ ID NO: 200385 - protein, 56 aa, Glycine max
  Clone ID: PAT_MRT3847_22974C.1.pep
PPPVRFEGWAPRSEGGARYLWLRVRPPFVISGGFMLIMVFWGQRVSQWPRREALVF

SEQ ID NO: 200386 - protein, 66 aa, Glycine max
  unsure (1)..(66): unsure at all Xaa locations
  Clone ID: PAT_MRT3847_22975C.1.pep
XFFSLSLILRDFFSHSSSLVLGRLMKKQGSXXXTFLYFYRNSSLHFLPFLFSISVIITFFFTPQFQ

SEQ ID NO: 200387 - protein, 269 aa, Glycine max
  Clone ID: PAT_MRT3847_22976C.1.pep
RFPRSTHARPVLGLQGSGGQQGQRSKIQLLSALDEDDLQTVVVENKLGCDIFVKKVEHDVDTVDKLQNGDCVSVWIPPPRFSNRLNVANESREARYYVAVQILEAKGLPIINDGNSHNFFCALRLVVDSQASEQQKLFPQSARTKCVKPVVSRTKDQVEGTVKWNELFIFEVPRKAPAKLEIEVTNLAAKAGKGEVVAALSFSVGHGANILKKVASVRMFHQPNDVPNIRSYPLNRLVSWYIIIILMGFVCLMNYLMSRIFLRFTLFTF

SEQ ID NO: 200388 - protein, 235 aa, Glycine max
  Clone ID: PAT_MRT3847_22977C.1.pep
ARVRSRGNADYGSRGPSSECPWVLKPDVVAPGSSILAAWIPDVPAARIGPNVVLNTEYNLMSGTSMACPHASGVVALLKNAHPEWSASAIRSALTTTANPLDNTGKPIEESGDWPQRASPLAMGAGLIDPNRALDPGLVYDASPQDYVNLLCAMNLTQAQIMAITRSKAYSNCSRASYDLNYPSFVAFYADKSVKVETKFRRIVTYVGDGPAVYTARVSSYNGTAISVSSHRLVF

SEQ ID NO: 200389 - protein, 85 aa, Glycine max
  Clone ID: PAT_MRT3847_22978C.1.pep
GGNKVLPLEFQRRKGKELPGCFHQKKLEDANRGPFFGFMGKNEITNGRWAMFGFAVGGAPEYAPGSGFVDQKKIPFPNFGKEDLE

SEQ ID NO: 200390 - protein, 104 aa, Glycine max
  unsure (1)..(104): unsure at all Xaa locations
  Clone ID: PAT_MRT3847_22979C.1.pep
XFFXXXXXXFXXXXIXXXSYXQXXXFLXXTXSLKXNXXXXXXXXQXXIFFPLXXXXXXNXXKFXNSXNQXXIXFXSXFXXXXPXIXXYQNXLXPNSXLXYXXXX

SEQ ID NO: 200391 - protein, 195 aa, Glycine max
  Clone ID: PAT_MRT3847_2297C.1.pep
TRPGCASSKRVDAAAVPYRPAPTSLAVFDINTIEEPWLKHLNNTIEEPWLKHLNNTTPLPQDNNKPSLPAPILHKLNLLDATDAPQSWDEISKTLQDLKSPSTSPQQQPQPPQKTKSFHTVEELDAKLNPKPEPKPNPELKKPADQIINSSIVTEPVRGNKLKENMFIVRDKLERQKEEKELTFERLRRDPLSAF

SEQ ID NO: 200392 - protein, 77 aa, Glycine max
  Clone ID: PAT_MRT3847_22980C.1.pep
MTHKMHHRNHAGCIPPYASVTLAPVLPMQCRRYLYSYIHSSHLNTVHTCPTVIQRSTLIHVAVMASSIIIPWSARAG

SEQ ID NO: 200393 - protein, 210 aa, Glycine max
  Clone ID: PAT_MRT3847_22981C.1.pep
MMAASWDGSSDPGSQSDDSFLERLHIEPLYDAFVCPLTKQVMRDPVTLENGQTFEREAIEKWFKECRESGRRLLCPLTLQELRSTELNPSMALRNTIEEWTARNEAAQLDMARRSLNMGSPENETLQALKYVQHICRRSRSNKYTVRNAGLIPMIVDMLKSSSRKVRCRALETLRVVVEEDDENKELLAEGDTVRTVVKFLSHELSKERE

SEQ ID NO: 200394 - protein, 113 aa, Glycine max
  Clone ID: PAT_MRT3847_22982C.1.pep
PPPRPLLHKNDHNNSKDVDGFVLPALVYLAREKRPQYFHNFKAGAMNSLLRVSSNISNGKIILNVDCDMYSNNSQSVRDALCFFMDEEKGQEIAYVQFPQTFENATKNDLYGG

SEQ ID NO: 200395 - protein, 214 aa, Glycine max
  unsure (1)..(214): unsure at all Xaa locations
  Clone ID: PAT_MRT3847_22983C.1.pep
MSRYDPNPFDEEPVEVNPFADGAAKGKGSGQSSYSGGAFYTTNTGSVPSSNSRLSPLPPEPYDRGATIDIPLNNAKDAKAKEKELQAKEAELKRREQELKRREDAIARAGIVIEEKNWPPFFPIIHHDIAKEIPVHLQRIQYIAFTTWLGLVLCLLWNIVAVTTAWIKGEGPTIWFLAIIYFISGAPRSYVLWYRPLYRAMRTDSALKXGWFFL

SEQ ID NO: 200396 - protein, 68 aa, Glycine max
  Clone ID: PAT_MRT3847_22984C.1.pep
KTKLPFFSVTTFKAAIPSNLIQHFKNFFYNSRTVGIRVTSNIYGRSQGKTLGDDCNTICFTKRWNMSI

SEQ ID NO: 200397 - protein, 56 aa, Glycine max
  Clone ID: PAT_MRT3847_22985C.1.pep
FKFLGKTITRDDSEYGHFTGLNLVCYVFRGSLCNEDSYFFVLNTLCIYILGISLYI

SEQ ID NO: 200398 - protein, 68 aa, Glycine max
  unsure (1)..(68): unsure at all Xaa locations
  Clone ID: PAT_MRT3847_22986C.1.pep
VRGSCCCAGSSCRCVGGGGVLLVXVVVLAPLFPGFLAVVLVVSXPLGPWLCFVETGALVVFCAVKYLT

SEQ ID NO: 200399 - protein, 119 aa, Glycine max
  unsure (1)..(119): unsure at all Xaa locations
  Clone ID: PAT_MRT3847_22987C.1.pep
TFVGRWDYLIDSPLLGDSAVLGTGGGGSGDAVAAAPPAASGGAHDGVVDGGVGGGGGSHPGDDRVDECETSFGGNRWPMXDTLALLXVRPDMDVAFLDACVLGPLWGEVSRSLAELGFH

SEQ ID NO: 200400 - protein, 98 aa, Glycine max
  unsure (1)..(98): unsure at all Xaa locations
  Clone ID: PAT_MRT3847_22988C.1.pep
TVIRRRRGTSIFLINSSGYTIWVEIHDGPYNVIKNXDYTGRIDXIHSGEGKCWNAKVLCXEELVEAVATVTGPKCDSLCFIDVIVHKDDTSKELLEWG

SEQ ID NO: 200401 - protein, 74 aa, Glycine max
  Clone ID: PAT_MRT3847_22989C.1.pep
QWSLTIQGIFKGRITTTPIRPYHKFPCPDQRGTNAISLDSHIPTLVHTYLSYVSLMLMSTPASHIRLTPIDVTD

SEQ ID NO: 200402 - protein, 354 aa, Glycine max
  unsure (1)..(354): unsure at all Xaa locations
  Clone ID: PAT_MRT3847_2298C.1.pep
MGCASSKRVDAAAVPYRPAPTSLAVFDINTIEEPWLKHLNNTIEEPWLKHLNNTTPLPQDNNKPSLPAPILHKLNLLDATDAPQSWDEISKTLQDLKSPSXLTPTTTTSPQQQPQPPQKTKSFHTVEELDAKLNPKPEPKPNPELKKPADQIINSSIVTEPVRGNKLKENMFIVRDRLERQKEEKELTFERLRRDPLSAFPEKCPPGGSEKVVLYTTSLGGVRKTFEDCNRARDVLEGHRVVFDERDVSLHGEFLREVKELVDGEGVALPRVFVKGRYVGGLEELVELNETGRLGRILNATRVERGIGRQTCGGCGGARFVPCFDCAGSCKLLHRERCPNCNENGLVHCPACIS

SEQ ID NO: 200403 - protein, 195 aa, Glycine max
  unsure (1)..(195): unsure at all Xaa locations
  Clone ID: PAT_MRT3847_22990C.1.pep
MRHVVIFSFNFLLLCVFISAITSTKSEVSSTNEEQSFSYHIKALEFIWKHLGYQHVWPEMEFSWRIVVGTLIGILGAAFGSVGGVGGGGIFVPMLILIIGFDPKSAVAISKCMVTGAAISAVFFCMKQRHPXTLDEPVIDYDLMLLIQPTLMLGISIGVILSVIFADWMVTILLIILCIGNYRRFALHFIFHSVI

SEQ ID NO: 200404 - protein, 77 aa, Glycine max
  unsure (1)..(77): unsure at all Xaa locations
  Clone ID: PAT_MRT3847_22991C.1.pep
CKEKVHISIVVIGHVGSGKSTTTGHLIYKLGGIDKRVIERFEKEAAEMNKRXFKXGWXXDKLKGERERGITIDIALW

SEQ ID NO: 200405 - protein, 45 aa, Glycine max
  Clone ID: PAT_MRT3847_22992C.1.pep
LTFGFVNLVSIPSYPIKMVDSYLRLGGGLGSYFPRAPPKSPPSFS

SEQ ID NO: 200406 - protein, 111 aa, Glycine max
  Clone ID: PAT_MRT3847_22993C.1.pep
HWARAHDPSVVPCFAGQDRKSQSMHPHANGYFVPGTVANILFNTKNYFSATVTAGETAVTQTARTLALPHIMGGDQITKHQYKGIDGLQAQGDSKGSAMEGARCIARNTLS

SEQ ID NO: 200407 - protein, 282 aa, Glycine max
  Clone ID: PAT_MRT3847_22994C.1.pep
KTAWQCNEAVSFPSYLMTSLAHHRIAAAGEACNATRLMAFSMGDTRAIVTCNPDVAKEILNSSTFADRPIKESAYSLMFNRAIGFAPYGVYWRTLRRIAATHLFCPKQIKASELQRAEIAAQMTNSFRNHRCSGGFGIRSVLKRASLNNMMWSVFGQKYNLDEINTAMDELSMLVEQGYDLLGTLNWGDHIPFLKDFDLQKIRFTCSKLVPQVNRFVGSIIADHQADTTQTNRDFVHVLLSLQGPDKLSHSDMIAVLWEMIFRGTDTVAGLIEWILARMVLH

SEQ ID NO: 200408 - protein, 95 aa, Glycine max
  Clone ID: PAT_MRT3847_22995C.1.pep
GCRRVILLDSGASHNFISQKLVHHMDWPIEQTQKMKVKLGNGVQIEAQGRCRELEMYIGSHKLRPNLQLFELRRIDVVLGMEWLKTLGDTIINWK

SEQ ID NO: 200409 - protein, 80 aa, Glycine max
  Clone ID: PAT_MRT3847_22996C.1.pep
RGIPESSFERKYISRHNESHRDLLWCPPPRLVEYSYLEWCAKRSLLLTHVFSYTIAISLLTIFSGFPFEGWESSNKGCLL

SEQ ID NO: 200410 - protein, 72 aa, Glycine max
  Clone ID: PAT_MRT3847_22997C.1.pep
HLPWLTCFLKKKKKKKKKKKKRKKKRKKKKKKKKGRRTKRNEARSAWRRRHKTSRARSKLNAAAANRESHEG

SEQ ID NO: 200411 - protein, 61 aa, Glycine max
  Clone ID: PAT_MRT3847_22998C.1.pep
GYMLLFINNVHAAINDISGSVEFKGCKMERSLLPNFKHNNLAFKSQGSFWLKIPRSLYSVI

SEQ ID NO: 200412 - protein, 61 aa, Glycine max
  Clone ID: PAT_MRT3847_22999C.1.pep
PMTVPPVVLPPIVKPVGFLPPMLNRPNAPTPSPVKGRNTPCPPPGSPARATVPINSAKLSA

SEQ ID NO: 200413 - protein, 133 aa, Glycine max
  unsure (1)..(133): unsure at all Xaa locations
  Clone ID: PAT_MRT3847_2299C.1.pep
PSRSESLTDQVPADDTLKTADGYKQAKIINLKQSDAGDLTLLTDGKLDDGETTNGSNIXARENHVNKIPLKAQEEKLSCSASDLTTAMLSENSKPEATAMHVGALEDIIDRCARPDCNKIRALLLADTYNTNS

SEQ ID NO: 200414 - protein, 56 aa, Glycine max
  Clone ID: PAT_MRT3847_229C.1.pep
FMLALFGQCHPSRIFGLNIPLLTPSMDAPQCFKKIKSSSIFSDTELCQSKYVICIT

SEQ ID NO: 200415 - protein, 115 aa, Glycine max
  Clone ID: PAT_MRT3847_22C.1.pep
TIFMAGESDDQNGAIANDNAGILTLKNRTVTTMLLAVSPTLNTGSLLLAYHDSAGCLLIRTRNPVGGNPVSIAGMRRRHTYPFSGAETGLVRMCTYTQAPPCEHEGSDVHLKLDV

SEQ ID NO: 200416 - protein, 33 aa, Glycine max
  Clone ID: PAT_MRT3847_23000C.1.pep
FLTLKTVLLTQTHSRKIITIMRNLTACHIHYTK

SEQ ID NO: 200417 - protein, 96 aa, Glycine max
  unsure (1)..(96): unsure at all Xaa locations
  Clone ID: PAT_MRT3847_23001C.1.pep
PDRWAGLAYDISDDQQDITRGKGLVDSLXQAPQDXGXXYAVMSSYAVXQHWIRQYXGXQNXWIXTLAPVLXDKLXGAHXXXXFMXRGPXXRXAXXV

SEQ ID NO: 200418 - protein, 91 aa, Glycine max
  Clone ID: PAT_MRT3847_23002C.1.pep
TSKQLSFHWHINVFSCKRVFFSFHSFDSKWCFFCQVVLWNLRSLLLLCMQKSSNYSLRKTEEERIQKPFLKVRRSSTNRIMSARVFSLMGF

SEQ ID NO: 200419 - protein, 33 aa, Glycine max
  Clone ID: PAT_MRT3847_23003C.1.pep
GAEWRDRGDKQQRVTSRNHSPAHSFNSRRLNNQ

SEQ ID NO: 200420 - protein, 135 aa, Glycine max
  unsure (1)..(135): unsure at all Xaa locations
  Clone ID: PAT_MRT3847_23004C.1.pep
NLITFSTMISCASVCSLPHKAVKWFEMMPSFGCEPDNNVCSSMIYAYTRTGNADMALRLYDRAKAGKWHVDTAVFSGLIKMHGMSGXYDGCLNVYNDLKVLGAKPNLVTYNALLYAMGRAKRARDAKAIYEEMIN

SEQ ID NO: 200421 - protein, 69 aa, Glycine max
  Clone ID: PAT_MRT3847_23005C.1.pep
GGGKPHLKAKPNLQKIFTPKGFLKQTDSFNNGGGNFPGQIPKLGPQKETLPLIKQRGEPIPIFYFPPGH

SEQ ID NO: 200422 - protein, 46 aa, Glycine max
  Clone ID: PAT_MRT3847_23006C.1.pep
VSLNKSGLAQQWYDELDDLAAPKPESEINVQDDNLDKKSVVEDEKV

SEQ ID NO: 200423 - protein, 86 aa, Glycine max
  Clone ID: PAT_MRT3847_23007C.1.pep
EGKNKTLPNFSFLGGGQNPDRFSHPKNPPFFFFFQIFLGWEEVFPAHPNFIFKTPKEGVWEGYLVSFFHLFLSQMCPPGRSLQKKT

SEQ ID NO: 200424 - protein, 40 aa, Glycine max
  Clone ID: PAT_MRT3847_23008C.1.pep
RLMFGIVVRIENIYIQGVSLNGSGTCWIYNVLVFSQVCCE

SEQ ID NO: 200425 - protein, 82 aa, Glycine max
  Clone ID: PAT_MRT3847_23009C.1.pep
RCEIHVCCGCQRQQTCCFVKDRFPTHHRQRLSIIINEPYEFNTELNLGLIMKLRALNFFSPQHAEHSHFRRLFVVRGFRYQS

SEQ ID NO: 200426 - protein, 65 aa, Glycine max
  Clone ID: PAT_MRT3847_2300C.1.pep
FGSSSSRFGSSGNYIVSCPLYVELSCKSGTIVDGGGGSKDNSITNQGGTLVFLLILLQKIQFKNH

SEQ ID NO: 200427 - protein, 104 aa, Glycine max
  unsure (1)..(104): unsure at all Xaa locations
  Clone ID: PAT_MRT3847_23010C.1.pep
MAVEIVPLVHAFMAFGHVTKFLINCVGYLQNXGTPPSGCSIGVKSLNAIVXIDVDRLTECCCLKSVASHISVLRANYVVSLTGICMFYIPCKISPSIYCATVCV

SEQ ID NO: 200428 - protein, 61 aa, Glycine max
  Clone ID: PAT_MRT3847_23011C.1.pep
CFTGTHHLTLTLHKFFKRYTPRFTGALHATSIPINDTSCKADSKHVYTNAKISLNLQLNRH

SEQ ID NO: 200429 - protein, 31 aa, Glycine max
  Clone ID: PAT_MRT3847_23012C.1.pep
QQKGLTLEGMHYLISFQNSSFISHGQDESFL

SEQ ID NO: 200430 - protein, 81 aa, Glycine max
  unsure (1)..(81): unsure at all Xaa locations
  Clone ID: PAT_MRT3847_23013C.1.pep
IITIMIYQSTKRSTXKLLKSHISFPLTCFEATVYKFKLIERERERTKLKSMKTADTMQFPPPNSPFFYFYTPQNHKPQKKV

SEQ ID NO: 200431 - protein, 49 aa, Glycine max
  Clone ID: PAT_MRT3847_23014C.1.pep
SHIIEYNTGIPLIVFASNVTCHGCKNSSITCTEIHKFRMLGHSLISKFN

SEQ ID NO: 200432 - protein, 90 aa, Glycine max
  Clone ID: PAT_MRT3847_23015C.1.pep
MMDRGVVKKKKKKKKKKKKKKKKKKKKKEKKKKKKKGGRKLMYLIDPEINTEPKLGGYPECSYENLVINLGPHKIVAASFLKKVCVPNSK

SEQ ID NO: 200433 - protein, 47 aa, Glycine max
  Clone ID: PAT_MRT3847_23016C.1.pep
EGFGCSRRRHKAGVRPDFPDHRGRGKFLVNGHLVRSRNVWPPNQGVG

SEQ ID NO: 200434 - protein, 84 aa, Glycine max
  Clone ID: PAT_MRT3847_23017C.1.pep
LPLIFFFCFLLGCSALLLSISLADLKFGDREVTLTKSWYCFFKISPMLLQLCFYTKLLDNISINLSEMKVEYCTGDPEGPRGVP

SEQ ID NO: 200435 - protein, 320 aa, Glycine max
  unsure (1)..(320): unsure at all Xaa locations
  Clone ID: PAT_MRT3847_23018C.1.pep
MDRLSSAATFESMHYGSASQMGLIWQQARAPLVVPLMKLLVVLCLAMSLMLFVERVYMGIVIIFVKLFRYKPEKKYKWEPLRDDLEFGNSAYPMVLVQIPMYNEKEVYQLSIGAACGLSWPSDRVIIQVLDDSTDPIIKNMVXEVECQRWASKGVNIKYXEIRENRNGYKAGALKEGMKHSYVNLCDYVAIFDADFQPDPNFLWRTIPFLAYNPEVALVQARWKFVNADECLMTRMQEMSLDYHFLVEQEVGSSTYAFFGFNGTAGVWRISALNEAGGWKDRTTVEDMDLAVRAGLKAXKFVYLSDLKVKSELPSTFKAY

SEQ ID NO: 200436 - protein, 202 aa, Glycine max
  unsure (1)..(202): unsure at all Xaa locations
  Clone ID: PAT_MRT3847_23019C.1.pep
TQPPISIVVTLHFDCYQVLTVFVLSTENWFRPKVEVDSLMKLFETTINSSIAXEGIQIYVIGDSSKLPESLRSTIANAEKSTKHNSRLQLIVAMNYGGKYDVVQACKSVAKKVKDGLLHLDNINEKIIEKELETKCTEFPYPDLLIRAGGELRLSNFLLWQLAYTEFYFNKTPWPDFGKEEFVDALRSFQQRQRHYGGERHS

SEQ ID NO: 200437 - protein, 97 aa, Glycine max
  Clone ID: PAT_MRT3847_2301C.1.pep
PWIFGIANSLARVPGSQCSCGRTIFQLVLTPFKFLEGFSGGTFFNGSFWFFPFPLFFFLVGFFLFLFYFNVFLLKFCFPGCLRMYPGLIQNLIMAIC

SEQ ID NO: 200438 - protein, 37 aa, Glycine max
  Clone ID: PAT_MRT3847_23020C.1.pep
ENKTRPSKHSDAKRESAWDTNYYKLYTLASMADMIKH

SEQ ID NO: 200439 - protein, 36 aa, Glycine max
  Clone ID: PAT_MRT3847_23021C.1.pep
WYYPAYQYKQKLFFPLSSQPRKLGFYSGHCLKPGPS

SEQ ID NO: 200440 - protein, 139 aa, Glycine max
  unsure (1)..(139): unsure at all Xaa locations
  Clone ID: PAT_MRT3847_23022C.1.pep
TLRRYGYPIDALLDVLSKHRDKYHELLLSDCRKQIAEAVVADKFEQMLMKKEYEYSMHVLSFQIQTSDIIPAFPYVAPFSSTVPDCCRIVRSFIEDSVSFMSYGGQLEFXKVXKKYLDRLLSEVLDEALVKLINTSING

SEQ ID NO: 200441 - protein, 59 aa, Glycine max
  Clone ID: PAT_MRT3847_23023C.1.pep
SPSLSIHQMILSFELPFALVPLLKFTSSKTKMGTHVNSTMVNFFGNMKFVVVHCNQIVN

SEQ ID NO: 200442 - protein, 73 aa, Glycine max
  Clone ID: PAT_MRT3847_23024C.1.pep
EIPSLRESQTYYIWEGFIKWEWLAYKFLLCLQTTTAFLSHYTVCISFYLNHTNLLTRYMDATVAIMCIIGLAI

SEQ ID NO: 200443 - protein, 63 aa, Glycine max
  Clone ID: PAT_MRT3847_23025C.1.pep
RRRETPDSPLHRPPSPRERLTQHRAEQEIAKLIQKMNSAAGKAVCVSGACGHTSYKGVRFLRN

SEQ ID NO: 200444 - protein, 60 aa, Glycine max
  Clone ID: PAT_MRT3847_23026C.1.pep
RVRDYLLKFPGIEDLTKVEKAKKLVPNLEVTFIPEGTHFVQEQFPQQVNQLILDFLAKHI

SEQ ID NO: 200445 - protein, 137 aa, Glycine max
  Clone ID: PAT_MRT3847_23027C.1.pep
EVVTKLLRACSAATAERCLRMLAVLATCAEGRAAMAEEPSCAAAVVERITKASKAAAADAVAVLWSLCCLCRNVKVRDEVAKRNGVVVVLLVMQRGWEEHVRSMCVDLIKVLKGACKNGLGLELGCYDTKTTHIKPC

SEQ ID NO: 200446 - protein, 153 aa, Glycine max
  unsure (1)..(153): unsure at all Xaa locations
  Clone ID: PAT_MRT3847_23028C.1.pep
GIFSGFPLTVICNSIFNEMLIRYSYEKLLRQAKAPSMLSQSFKNFVSLCAYGDDNLISVHEYVKPYFSGSKLKSYSSLAXLITHPSTRLVLAQILRATFVIYKVSQHCDXLKINFKQMFSVXWVAPVDKXLWSHLHYRSCKNLXEMQEAYFVN

SEQ ID NO: 200447 - protein, 35 aa, Glycine max
  Clone ID: PAT_MRT3847_23029C.1.pep
LYLPERHPQNLTTCEPPRFVSFTTPFSCDKTRRTT

SEQ ID NO: 200448 - protein, 98 aa, Glycine max
  Clone ID: PAT_MRT3847_2302C.1.pep
RVHILTVCVCLSLTSPFFAWQVVDYRSFKPEQAEDYNSMYCQRTIYVDEEDGELSWFNAGVRVGVGIGLGLCVGVGIGVSLLVRSYQATTRNFKRRFI

SEQ ID NO: 200449 - protein, 65 aa, Glycine max
  Clone ID: PAT_MRT3847_23030C.1.pep
SLSRPIMYSAHVYLWRRDKINYPFILGFKEGTELGYREPFLLSPGLAVLSSAVVLSNLDMEMDHR

SEQ ID NO: 200450 - protein, 88 aa, Glycine max
  Clone ID: PAT_MRT3847_23031C.1.pep
NPTRSSQGTIAFNRMCKHDFNFNVPFYVFISFCTFYIFIFLRSTRVYPFASMYFSIVIRKSDLRSSLRTKCLVKLLFYPFLQDVFLFE

SEQ ID NO: 200451 - protein, 89 aa, Glycine max
  Clone ID: PAT_MRT3847_23032C.1.pep
LKDSSSFWIKLRETNSVPFVEPDQTTTLSPPTSTQAPSTAASTQAPSTAASTQAPSTAAPSSCTRASSSMTVILLAVLGLMLALSRSSK

SEQ ID NO: 200452 - protein, 79 aa, Glycine max
  Clone ID: PAT_MRT3847_23033C.1.pep
KDIENDLDAQSQDCYIAVEALCEVLHHRQPLIVYFPDSSQCLHKAVPKSNRNEFFHKVEEMFDRLSGPIVFICGQNKVQ

SEQ ID NO: 200453 - protein, 70 aa, Glycine max
  Clone ID: PAT_MRT3847_23034C.1.pep
RGWPDVSPMCCLIHAGLSRVYMFEISICSRPVGLMFSLILLKILREGMMFNGANLTLPILRRGRSSRLRQ

SEQ ID NO: 200454 - protein, 32 aa, Glycine max
  Clone ID: PAT_MRT3847_23035C.1.pep
VYMLEYKMNQCIREMRINNYLGKDDSNASKMV

SEQ ID NO: 200455 - protein, 57 aa, Glycine max
  unsure (1)..(57): unsure at all Xaa locations
  Clone ID: PAT_MRT3847_23036C.1.pep
EIFGSMPDIVHFFLPFNQIIFSILHIISAALKKHYVFIFRLXYYIFLLSSHLVELLP

SEQ ID NO: 200456 - protein, 116 aa, Glycine max
  unsure (1)..(116): unsure at all Xaa locations
  Clone ID: PAT_MRT3847_23037C.1.pep
SYRGIGTKWVFRNKLDENGIVIRNKARLVAKGYNQEEGIDYEETYALVARLEAIRMLLAYASIMDFKIYQMDVKSAFLNGFTKEEVYVDQPPGFENSEQPNHVFRIXKALYGLKQA

SEQ ID NO: 200457 - protein, 232 aa, Glycine max
  Clone ID: PAT_MRT3847_23038C.1.pep
MNTQFCRTPPHHVHAPIIPTSHFPSLYTVSPSHPRFFFHANFSASPTPILEEEPSSNTPIIHVVDVNFDVQQQYSKPEPENLNEFLCGLFEDPKTKELAFDYYQRLKERPEFRPEKPTLKHVIRYLVSLKSWDSILSVSDDFKVYHVLPDRATCSRLVKFCIEHRKFRVAEALLDVFKSDSKVAFMAFSSAMRSYNKLHMFRNTVLVFERIRSSNVVLDSRGYLHIMEAYSK

SEQ ID NO: 200458 - protein, 171 aa, Glycine max
  Clone ID: PAT_MRT3847_23039C.1.pep
ETEGKQEAVLFPFMAQGHIIPFLALALELEQRKKYSITILNTSLNIKKLRSSIPPDSTISLVEIPFTPSDHGLPPNTENTDSIPYHLVIRLIQASTTLQPAFKTLIQNILFQNQKHQLLIISDIFFGWTTGPASSRLSGTGYYLPDFPEARVIHRTQLPNNIFEADGTDPR

SEQ ID NO: 200459 - protein, 47 aa, Glycine max
  Clone ID: PAT_MRT3847_2303C.1.pep
CAADRVSAQRKSATRAQHLRLWPRFDRMSAFACSLASSLCNRADFGA

SEQ ID NO: 200460 - protein, 157 aa, Glycine max
  Clone ID: PAT_MRT3847_23040C.1.pep
MSLSLNTTLVPSRSHQNLTSPDNYHPSQTGILHNPQFNKGSAFTEDERSLLGIRGLLPPHIETIDQQLKRAYRQFSAFNTPLEKYIYLSSLQDRNETLFFKLLVENPVETMPIVYTPTVGEACTKFDEVFRAPRGMYISLKDKGVIRQALDNWERTP

SEQ ID NO: 200461 - protein, 70 aa, Glycine max
  Clone ID: PAT_MRT3847_23041C.1.pep
IWLSKFPRYSPFRCACSKCTSSGICLSLIFALYNSIRLFRCKNVLLGHHNLFTVTQCYTHLVSLLVRRLL

SEQ ID NO: 200462 - protein, 97 aa, Glycine max
  Clone ID: PAT_MRT3847_23042C.1.pep
AYQYFTKNPLINKNGKPVAISNKVTWISSMSSFERYMKIRYVLPLMGLNVVSKVCCHCYDDFHMESQRKLQTLMKITRLYKPYLLFEGTFDDKNAEI

SEQ ID NO: 200463 - protein, 66 aa, Glycine max
  Clone ID: PAT_MRT3847_23043C.1.pep
CPSSPQIKQVFIQQYIQRLVYIVKKVATTKWDFETSVLMSSITEGSFCAVLPTPSFNNSPRATPQQ

SEQ ID NO: 200464 - protein, 56 aa, Glycine max
  Clone ID: PAT_MRT3847_23044C.1.pep
KYNSFSVGQQGIKIIFPHLFTFNFFFNFLFLGFIKVEIFFSVKSVSMMRELLLCTS

SEQ ID NO: 200465 - protein, 79 aa, Glycine max
  Clone ID: PAT_MRT3847_23045C.1.pep
LITLKMLSLISTSGTSRTFSLSAPSSNYNSLSSKLVASRGGPLSRPGRDLSPSIIFSRPCRHINKHINKHINQPKGSKP

SEQ ID NO: 200466 - protein, 105 aa, Glycine max
  Clone ID: PAT_MRT3847_23046C.1.pep
YSTNFFPQVSLSPLTPRHRPPTVAAAAATPPHSSILFSFSLRLTLTRKPVLVAAALSSVAAVAASVDVGGSFNTKLKVKGDSALCALKFNYPSTSGLNFPFFFPS

SEQ ID NO: 200467 - protein, 98 aa, Glycine max
  Clone ID: PAT_MRT3847_23047C.1.pep
RAESIRRILNDCTNFSMVYCPLPKKKGFFFHLLHLGCIVVYVICRDCKILPLMFICETCNQSINLFSDMKVGMLDFIGLNCLWVLLIDYFLVYVLLFK

SEQ ID NO: 200468 - protein, 48 aa, Glycine max
  Clone ID: PAT_MRT3847_23048C.1.pep
RVEARYRRDLSAQCFKRIAEIDRCTKGQKGRLRSCCREEHSQRCILLT

SEQ ID NO: 200469 - protein, 49 aa, Glycine max
  Clone ID: PAT_MRT3847_23049C.1.pep
MIAHRQASLRVGVLVDRNRIRMLCPAVFFFFEYSGIPQMLNNLSPQNTK

SEQ ID NO: 200470 - protein, 38 aa, Glycine max
  Clone ID: PAT_MRT3847_2304C.1.pep
CELCAHGRYRNGCRPSNTTAGPECIWIFTVLASLIGVL

SEQ ID NO: 200471 - protein, 45 aa, Glycine max
  unsure (1)..(45): unsure at all Xaa locations
  Clone ID: PAT_MRT3847_23050C.1.pep
TAARRRQKGTHITSIYCKTXRFTGSRRIGWPQVVLVLITLNFSLW

SEQ ID NO: 200472 - protein, 109 aa, Glycine max
  Clone ID: PAT_MRT3847_23051C.1.pep
VPALYLACGFPSPGSDLGASGGSLWSLACPPVPVGFLCPPLFGSCSYGPLPFPSVASGSGLLSLAAVPLAGKCRVFRPKSSPPFWAGASVGFYRGFSEFCSPNSSRIPR

SEQ ID NO: 200473 - protein, 68 aa, Glycine max
  Clone ID: PAT_MRT3847_23052C.1.pep
SISLYTFLFAICAHSDTPSAGSYSGIPDTKTLYCSLLSVSFSDRILVPPLREVYYDGLIFNITHRYVP

SEQ ID NO: 200474 - protein, 62 aa, Glycine max
  Clone ID: PAT_MRT3847_23053C.1.pep
FCMLYSRLKKNDFSSVTIKMPLYGYVYVDYWLILNRAVFIYIFNLFQKLFLFNFFFRVKGPI

SEQ ID NO: 200475 - protein, 69 aa, Glycine max
  Clone ID: PAT_MRT3847_23054C.1.pep
RNHLVPQLIRFFQSITFCIDSSTHATVNHLSTTLRFGQSQYGTVFRFLLLYKRCFYSCCFGNDELNLVL

SEQ ID NO: 200476 - protein, 42 aa, Glycine max
  Clone ID: PAT_MRT3847_23055C.1.pep
IIYAPWTQRVFHKVNQLGRLKYDYFIDGGETITRLKSACSQF

SEQ ID NO: 200477 - protein, 89 aa, Glycine max
  Clone ID: PAT_MRT3847_23056C.1.pep
HSLPQNTLRLLKRCMSLKQWLHAWFMRVSAAATWGWLCHSQWDENEKNKQNKVQGAWKVMRKVHEGEEWRASKSLMSAVPAFRECIYLR

SEQ ID NO: 200478 - protein, 59 aa, Glycine max
  Clone ID: PAT_MRT3847_23057C.1.pep
PVSNEHAIRKLNLVVVTKPLISTSSSRISELSFHGKITSIQDGPKKMNLIILTIITNTY

SEQ ID NO: 200479 - protein, 363 aa, Glycine max
  unsure (1)..(363): unsure at all Xaa locations
  Clone ID: PAT_MRT3847_23058C.1.pep
MEEKHAAAIESAHAESNGVSHGADHGWQKVTYAKKQKKKTVNAANGGPDSRANSSKLVPNGTLSGNDXVFRSLELQSEDRRRKIVEAKKLADAAYDDEDAPLRSKQRHRDDDDEYDYDDENVDRSAENGKAEKAKKXTPKKPQKPKETIAEDAGXFDAADLGVFIIEISGSFENQKNILMMRFVDYYGLAFSFLDXHLQLPWVKLLREXSSVDEINDTPVSHISDAVXKTSIDWINHRSPEALSTLLIWSLDSILADLCSQQNVAKGSKXAVQQTGSKSHAASFVVMAIVXLRWEPVALLFVSRSLSEAIRYLKQEMLLVISCMVVTAPIAANFLQSSTRASFLLRIMICTKFVPPSRSLLNS

SEQ ID NO: 200480 - protein, 44 aa, Glycine max
  Clone ID: PAT_MRT3847_23059C.1.pep
NTYSLSHLSLLEDKDTILLIILSSSQPVESKINNYYLLINYLIH

SEQ ID NO: 200481 - protein, 47 aa, Glycine max
  Clone ID: PAT_MRT3847_2305C.1.pep
MGKVTTSATQPVSQEASNYDEVFMQQSLLFDDSLKDLKNLRAHYIHS

SEQ ID NO: 200482 - protein, 83 aa, Glycine max
  Clone ID: PAT_MRT3847_23060C.1.pep
DKPIMHSPYLLGIYASEGWFMRLMEASKQFVTKDPKKAHLFYLPFSSRMLEETLYVPNSHSSRNLIQYLKNYVDMIAGKHRFW

SEQ ID NO: 200483 - protein, 74 aa, Glycine max
  Clone ID: PAT_MRT3847_23061C.1.pep
LIQEKMRKPKNERTNRILPLLFSGTHETPKKRLQVFNDGYEYDYLILLPISSNENPSLPLPKNTTSPFIPHKTL

SEQ ID NO: 200484 - protein, 627 aa, Glycine max
  Clone ID: PAT_MRT3847_23062C.1.pep
SLIKICVVGVWPESPSFRDEGMGPIPSRWKGTCQHDHTGFRCNRKLIGARYFNKGYMAHAGADAKFNRSLNTARDYEGHGSHTLSTIGGTFVPGANVFGLGNGTAEGGSPRARVATYKVCWPPIDGNECFDADIMAAFDMAIHDGVDVLSLSLGGNATDYFDDGLSIGAFHANMKGIPVICSAGNYGPTPATVFNVAPWILTVGASTLDRQFDSVVELHNGQRFMGASLSKAMPEDKLYPLINAADAKAANKPVENATLCMRGTIDPEKARGKILVCLRGVTARVEKSLVALEAGAAGMILCNDELSGNELIADPHLLPASQINYKDGLAVYAFMNSTKNPLGYIYPPKTKLQIKPAPAMAAFSSRGPNTVTPEILKPDVIAPGVNIIAAYSEGVSPTNLGFDKRRVPFITMSGTSMSCPHVAGVVGLLKTLHPDWSPAVIKSALMTTARTRDNTGKPMLDGGNDAKATPFAYGSGHIRPNRAMDPGLVYDLTNNDYLNFLCFSIYNQSQIEMFNGARYRCPDIINILDFNYPTITIPKLYGSVSVTRRVKNVGPPGTYTARLKVPARLSISVEPNVLKFDNIGEEKSFKLTVEVTRPGETTAFGGITWSDGKRQVRSPIVVGGVRG

SEQ ID NO: 200485 - protein, 198 aa, Glycine max
  unsure (1)..(198): unsure at all Xaa locations
  Clone ID: PAT_MRT3847_23063C.1.pep
LQNEEGRHNEIKVAGRLKGFMAGSGLPSLGRVKLTDLVPSDGLPSDSYKISVSILSQSLAQFSAVIIQFPASDGALLRSSLESARLYFHQRETYPPADIIHTSESREWCKTSGYYADPHLWQETYDYRPGLTPSEPNNSIEFPPAGLPDIFALFGKAARDILDAISYHLNLRSSPFVEILDNVPLRNREISSSXLSVC

SEQ ID NO: 200486 - protein, 320 aa, Glycine max
  unsure (1)..(320): unsure at all Xaa locations
  Clone ID: PAT_MRT3847_23064C.1.pep
PRVRRTGLDDDDAEMLHDRPKKKKRVIKIDPHDISNKRLDDGIGVNGSKEEKEKEKESEKEPKMSKNAQFRAIQPSPLILSFVEKNLLGRRRMIDLKRAGYNIDLSAPLDNIPFSSSSEREKIEENIFRNKLDFFAAAKVSSSFPPPNLPEIAFAGRSNVGKSSLLNALTHGCADISSPLPSINFFNLGTKHCLVDLXGYGFAYAKXEVKESWEELVKEYVSTRVGLRRVCLLIDQVGYEPRDLELIELMERSKXYQIVLTKTDVVFPIDVARRAMQIEESLFQNKSVVKPVMMVSSKSGAGIRSLRTALANITRFARRL

SEQ ID NO: 200487 - protein, 59 aa, Glycine max
  Clone ID: PAT_MRT3847_23065C.1.pep
SGKHTGEFFRRRDAWRKHPMLTNQLRHATPGLGIAVVAFGESRGSPLNVWTDALHSIIT

SEQ ID NO: 200488 - protein, 314 aa, Glycine max
  Clone ID: PAT_MRT3847_23066C.1.pep
MVAIGFGAPPSPLPFHLRLASSPSPLAFPIIHKFQNAGKSVITICSKKNAKSRVVTLCSAPVQVDMQEQEVSDITLRERSVSVVLLAGGQGKRMGASMPKQYLPLFGQPIALYSFHTFFHLVQVKEIIVVCDPSYKDIFEDAKGDYQAELKFALPGKERQDSVYNGFQAVDPNSELVCIHDSARPLVLSADVKKVLKDGLLNGAAVLGVPVKATIKEANRESFVVKTLDRKTLWEMQTPQVIKPELLRKGFELVNREGLEVTDDVSIVEHLKHPVYITQGSYTNIKVTTPDDMLLAERILNINDEDNIVLPVHL

SEQ ID NO: 200489 - protein, 177 aa, Glycine max
  unsure (1)..(177): unsure at all Xaa locations
  Clone ID: PAT_MRT3847_23067C.1.pep
GKPVDYASAAVGAIAYHRTAAVDDRIARIFNTYRPRMCFNDGPVVSNYDAQALRNEPVTALGDGKQTGSGQXNSALVEGLIRLMEGEHVRPFNREHPGQFTMLELAKVAQETLDPDAKIEYRPDTEDDPNTRTPDVPSAKDQLVWEPKDDLRWDLPLMLSDFLPLIVGDQKENATGD

SEQ ID NO: 200490 - protein, 138 aa, Glycine max
  Clone ID: PAT_MRT3847_23068C.1.pep
MVAIGFGAPPSPLPFHLRLASSPSPLAFPIIHKFQNAGKSVITICSKKNAKSRVVTLCSAPVQEVSDITLRERSVSVVLLAGGQGKRMGASMPKQYLPLFGQPIALYSFHTFFHLVQVKNITVGCDPSYKDIFEHAKG

SEQ ID NO: 200491 - protein, 98 aa, Glycine max
  Clone ID: PAT_MRT3847_23069C.1.pep
GKNLFFGFKKKKKRGRDKPRGGGPPRRGGKSPPAGVKNPGPKGPKKKGGGPERGQGSQKIGGKGRGPKAQNWGAKFSRGGGPKKKGNLGGKPPAPHGL

SEQ ID NO: 200492 - protein, 95 aa, Glycine max
  Clone ID: PAT_MRT3847_2306C.1.pep
NWTLISSITLTYLPSFFLAKCSDFFSYKSEFIMEESYLEAGDQAMLSMTDGRTQRKAEIPPYKHAITAYGSTIADLPSQIAYGSWQKNRHSTSCV

SEQ ID NO: 200493 - protein, 94 aa, Glycine max
  Clone ID: PAT_MRT3847_23070C.1.pep
YADAEEHVYQLQAHEEGVARSTPRRALQQARPQRLLTLRMSVRCRALSQLALMRLTASSLLHHLGSQSSPGSLSRSQNRSKWQRVVIVSMGLSY

SEQ ID NO: 200494 - protein, 40 aa, Glycine max
  Clone ID: PAT_MRT3847_23071C.1.pep
ATHPGKDRTLQFCDLEFEACTYHTSSILKLIVWNSQPMRE

SEQ ID NO: 200495 - protein, 73 aa, Glycine max
  unsure (1)..(73): unsure at all Xaa locations
  Clone ID: PAT_MRT3847_23072C.1.pep
CRENMISTPLMAQEAILXSSASDSRPAWXVKKASLKPTAYAVGAIEIIIDSFASPHCNIKGAKLLVDTYTTKP

SEQ ID NO: 200496 - protein, 44 aa, Glycine max
  unsure (1)..(44): unsure at all Xaa locations
  Clone ID: PAT_MRT3847_23073C.1.pep
LFQQLLVKSLILLIEYKIVXNFIKKNYRIDLMNNFKFNKCINKI

SEQ ID NO: 200497 - protein, 63 aa, Glycine max
  Clone ID: PAT_MRT3847_23074C.1.pep
QYNTRTTPPWSGPRSRIWGPSAGSFLGYGRGTWSWVPPHKTQGRSKRLVEGQIRERHSPQFNP

SEQ ID NO: 200498 - protein, 69 aa, Glycine max
  Clone ID: PAT_MRT3847_23075C.1.pep
HRQGRRKRSAPYPSEKHHGKKPSQQHRKEDEGKAPGGGRTPSGGGPDQQHPALGPPSDPRITGNQGASF

SEQ ID NO: 200499 - protein, 50 aa, Glycine max
  Clone ID: PAT_MRT3847_23076C.1.pep
RTSCLVLLIYYHNRVERILESCLLITDVVQLELSWNVAVASEKYEGGGMF

SEQ ID NO: 200500 - protein, 132 aa, Glycine max
  unsure (1)..(132): unsure at all Xaa locations
  Clone ID: PAT_MRT3847_23077C.1.pep
MLPFFFFFFSAFLPEVKMAQETFLLTSESVNEGHPDKLCDQRNQAVLDACLEQDPDSKVACETCTKTXVVMEIGEINNQANVDLGRXSACKLRNIGFASDDVGQDADNCKVLPXIDQQSPDLAQGVHRHLTK

SEQ ID NO: 200501 - protein, 116 aa, Glycine max
  unsure (1)..(116): unsure at all Xaa locations
  Clone ID: PAT_MRT3847_23078C.1.pep
PVDPAFVPRPTNLQPMXQELGKQNPHLMRLIRDHQADFLRLINEPAEGAEGNILGQMASAMPQAVTVTPEERQAIERLEAMGFDRAIVLEVYFACNKNEELAANYLLDHMHEFEEQ

SEQ ID NO: 200502 - protein, 225 aa, Glycine max
  Clone ID: PAT_MRT3847_23079C.1.pep
MKVFVKTLKGTHFEIEVTPQDTVSEVKKNIETVQGADVYPAAQQMLIHQGKVLRDASTLEENKVVENTFIVIMLSKSKSPSGEGSTTSTAPSTKAPQTSTVPASTPPASVVPQASAPAPAPAPAATGALPASVTAPISSPSPAPAPTPAPISSGTAVEGSDIYGQAASNLVAGSNLEGTIQQILDMGGGSWDRDTVVRALRAAYNNPERAVEYLYTGIGKLKLHA

SEQ ID NO: 200503 - protein, 166 aa, Glycine max
  unsure (1)..(166): unsure at all Xaa locations
  Clone ID: PAT_MRT3847_2307C.1.pep
MEALKASYGDGSSDSDSESAHSIPTSAPSAVFTPLPPPPISLLDPPSILDLQIGQTTRLRSFPHVDGNYALHVYIPKQDAHDLAFHSIWWSIYISSPSKKELVAFLKKISSREPRLNVVDXDVPLNILCQNDEKLEQVTLGREFHISLGRTVPIRVHQIXSXVSML

SEQ ID NO: 200504 - protein, 403 aa, Glycine max
  unsure (1)..(403): unsure at all Xaa locations
  Clone ID: PAT_MRT3847_23080C.1.pep
MKVFVKTLKGTHFEIEVTPQDTVSEVKKNIETVQGADVYPAAQQMLIHQGKVLRDASTLEENKVVENTFIXVIMLSKSKSPSGEGSTTSTAPSTKAPQTSTVPASTPPVSVAPQAPAPAATGALPASVTAPVSSPSPAPAPAPAPISSGTAVEGSDIYGQAASNLVAGSNLEGTIQQILDMGGGSWDRDTVVRALRAAYNNPERAVEYLYTGIPEQAEAPLVARAPVSAQPTNPPADAPQTAQPAAVTSAGPNANPLDLFPQGLPNVGSGAAGAGSLDFLRNSQQFQALRAMVQANPQILQPMLQELGKQNPHLMRLIRDHQADFLRLINEPAEGGEGNILGQMASGMPQAVTVTPEERQAIERLEAMGFDRAIVLEVYFACNKNEELAANYLLDHMHEFEEQ

SEQ ID NO: 200505 - protein, 94 aa, Glycine max
  Clone ID: PAT_MRT3847_23081C.1.pep
MSEVVHRYSYDHDYNPNHYYDHYHNHNHHHHHHHNHHHDFDDHDHNCGDDNQDHNDNHGYDHQIQNPHDGKHWPSTTQNEPSKVENKKPQEEHS

SEQ ID NO: 200506 - protein, 63 aa, Glycine max
  Clone ID: PAT_MRT3847_23082C.1.pep
TPPFGVFFPIFLFGESEIGKSQGLRFPKKGQIIIRFIYVQKPRNLVSPGPCLKRALIAAPFFS

SEQ ID NO: 200507 - protein, 73 aa, Glycine max
  Clone ID: PAT_MRT3847_23083C.1.pep
LRSTMHPLVVHTSHTDNLSNFVASQATPQCFLVTMNRSDLRIHSLYNLPGILKGNAVITVPQNLVDHVSGFFR

SEQ ID NO: 200508 - protein, 151 aa, Glycine max
  unsure (1)..(151): unsure at all Xaa locations
  Clone ID: PAT_MRT3847_23084C.1.pep
FEPHYNLXNAKRIIYALAGLALLQLVNDNGERVSDGELXEGRVLTVPQNXVLAARSQRDSLGSVSFXTNDTLMIGSLARAHXLLNALLEEVIYHTFNLKSQHARQIXTTALLSSLAPPQESHKTAAAYSPFCMCYRTFDFLALVLATTKSY

SEQ ID NO: 200509 - protein, 44 aa, Glycine max
  Clone ID: PAT_MRT3847_23085C.1.pep
LKRTQRTKISRDFMLDVLKDYQLMLYMGGPFLKNPILLPLACKE

SEQ ID NO: 200510 - protein, 83 aa, Glycine max
  Clone ID: PAT_MRT3847_23086C.1.pep
MKTAMRAIAVGRPEGANQVDTRMVAVDGYSSSEASLFAGSGSGIAYNKLTDNGDSTPAGLSSAAIAHAFALIVAVSVGANIAG

SEQ ID NO: 200511 - protein, 130 aa, Glycine max
  unsure (1)..(130): unsure at all Xaa locations
  Clone ID: PAT_MRT3847_23087C.1.pep
PLVDSASVLPRLQSELMATMMIGDSAISVLPEXDPIFLLXGTLSGTNDPVLDGTEYRLSLSFLYDYPFRPPYVECGTTCFHPIFDVHGIICSDILQHTWSSAHDVTTLLLSIHTLLAQPHSSSPPNARSA

SEQ ID NO: 200512 - protein, 56 aa, Glycine max
  unsure (1)..(56): unsure at all Xaa locations
  Clone ID: PAT_MRT3847_23088C.1.pep
LLLLPXHXXXXISVDGLDHRLCAXYXFSDSKKINFCDVSRWSCXFVSWVNPCDREK

SEQ ID NO: 200513 - protein, 35 aa, Glycine max
  Clone ID: PAT_MRT3847_23089C.1.pep
KRRYKITSAIGALVLSFRLVIMPQYKAILGFQKKN

SEQ ID NO: 200514 - protein, 299 aa, Glycine max
  unsure (1)..(299): unsure at all Xaa locations
  Clone ID: PAT_MRT3847_2308C.1.pep
QLQHLKALNLSGNRLSGEIPSLLKERSNNGSLLLSVDGNLDLCRAGPCEEDKMNIAPLVAGILSVVVFFIVLGIVLNIIWRRRCNRKPASKQAVRLNEEVVLKTNNTQFTYSQISTITNNFDKMIGKGGCGIVYLGSLQDGTQVAVKMLLPKCPQGSQQFQTEAQLLMRVHHKNLASFVGYCNEVGHTGIIYEYMAYGNLEEYLSDARREPLSWRQRIQIAVDAAQGIEYLHHGCKPPTIHRDIKTANIXLNEKMQAKVADFGFSKLFSAENESHVSTVVIGTLGYLDPGYYTSSRLTE

SEQ ID NO: 200515 - protein, 126 aa, Glycine max
  unsure (1)..(126): unsure at all Xaa locations
  Clone ID: PAT_MRT3847_23090C.1.pep
RVCVRRTYCVLNPHNPFVLNRRMGKLTFPQGTCRSVIRMPVYIGGGVGAXNAILMSMPNAVLSMRRYYVGDVFLVDSKMTCPYIKCTVYVFITLGNSDVDAINLAAFTHTLGQIVEIXENVVLKFS

SEQ ID NO: 200516 - protein, 247 aa, Glycine max
  unsure (1)..(247): unsure at all Xaa locations
  Clone ID: PAT_MRT3847_23091C.1.pep
DFGANPTIPGPKSQLARYPISQFKFSFWVPASCPQKPPPLPILPLPTTFQLQWQLGGMALFFHFGTNTFTDSEWGTGHSNPTKLNASQWIRVAKDSGFSLVILTVKHHDGFFLWPXDYTNYSVRSSNWRNGNGGVVAELASAAKDAGVGLGFYLSRWDRHEACYGDTLRYNEFYLAQMTELLTRYGEIKDIFLDGTKGDGETEMNYLFDSWISLIHQLQPGATNFSDLGPDTRWXIGNEYGAAGSTC

SEQ ID NO: 200517 - protein, 52 aa, Glycine max
  Clone ID: PAT_MRT3847_23092C.1.pep
LAILRAVFHCSDTPDIYRLKRQTSFIPTSVSYWQSTGSNQVFWQLCTSYDPS

SEQ ID NO: 200518 - protein, 58 aa, Glycine max
  Clone ID: PAT_MRT3847_23093C.1.pep
NAVCASLYFSEVIYLSVSSAKHNTDSTDEYSIHCSHQNIRCKKPHDTIYQFILFYPSR

SEQ ID NO: 200519 - protein, 93 aa, Glycine max
  Clone ID: PAT_MRT3847_23094C.1.pep
IATGIEDEATGFTLPPPPSTFFFLPDRGLFFDSVTVFLLLLSLDMFQLNTSASSNSKSPSVDLGSKSVLDDANMELTFERKPFLDAIECCSVF

SEQ ID NO: 200520 - protein, 111 aa, Glycine max
  Clone ID: PAT_MRT3847_23095C.1.pep
MKYLAAFLLLGLAGNSSPSAEDIKTVLSSVGIDADEERLSSLLKELEGKDINELISSGSEKLASVPSGGAGAASAGGAAAAGGAAEAAPEAEKAEEEKEESDDDMGFGLFD

SEQ ID NO: 200521 - protein, 34 aa, Glycine max
  Clone ID: PAT_MRT3847_23096C.1.pep
TSHLTFRSHIILVSQKSDFLKKMHLRCCFVQYDF

SEQ ID NO: 200522 - protein, 44 aa, Glycine max
  Clone ID: PAT_MRT3847_23097C.1.pep
PDFSSATKNLKNQSQNQNPNQSQSQNSQAPAKGAHDAKELHMFV

SEQ ID NO: 200523 - protein, 232 aa, Glycine max
  Clone ID: PAT_MRT3847_23098C.1.pep
ISIVVDFIQEPNKVRVILENGEQHDGDILIGADGIWSEVRSKLFGQQEANYSGFTCYSGLTSYVPPYIDTVGYRVFLGLNQYFVASDVGHGKMQWYAFHGEPPSSDPFPEGKKKRLLDLFGNWCDEVIALISETPEHMIIQRDIYDRDMINTWGIGRVTLLGDAAHPMQPNLGQGGCMAIEDCYQLILELDKVAKHGSDGSEVISALRRYEKKRIPRVRVLHTASRMASQIM

SEQ ID NO: 200524 - protein, 135 aa, Glycine max
  unsure (1)..(135): unsure at all Xaa locations
  Clone ID: PAT_MRT3847_23099C.1.pep
TLGELGKVILLGDAAHPMQQNFGQGGCMAIEDCYQLNTXELDKVVKHGSDGYKLFSALTIYKKKRIPRVRVLHTASRMASQMLVNYRPYIEFKFWPLSNVTTMQIKHPGIHVAQALFKFTFPQFVTWMIAGHGLW

SEQ ID NO: 200525 - protein, 260 aa, Glycine max
  unsure (1)..(260): unsure at all Xaa locations
  Clone ID: PAT_MRT3847_2309C.1.pep
MRPIFAGNLEYDTRQSELERLFAKYGRIDRVDMKSGFAFVYYEDERDAEEAIRALDNVPFXGHEKRRLSVEWARGERGRHHDGSKANQKPTKTLFVINFDPIRTRVRDIEKHFEPYGNVLHVRIRRNFAFVQFETQEDATKALECTNMSKILDRVVSVEYALRDDGERGDNYDSPRRRGGYERSPSPYHRRPSPDYGRPRSPVYDRYNGGGPDMRRSPDYGRHRSPDYGRRRSPDYGKPRSPEYGRYRSCSRSPVRRSRT

SEQ ID NO: 200526 - protein, 77 aa, Glycine max
  Clone ID: PAT_MRT3847_230C.1.pep
CMILDTYQIHNLIMHDINIPHSTFNLTAHSSGFSQRSHRHQKREDLERCGVLVKVVREEGTDGGNFDGAEEQRAMFG

SEQ ID NO: 200527 - protein, 60 aa, Glycine max
  Clone ID: PAT_MRT3847_23100C.1.pep
STSPSPRQRFVTFNLLTGSCHVTIYASGRRGYLPGSGTPSTGPLSWQCTFIGAPNSAQKL

SEQ ID NO: 200528 - protein, 45 aa, Glycine max
  Clone ID: PAT_MRT3847_23101C.1.pep
NRGYFAKLEVSQQGRKYVIFFSPNLASFYPKYSNFILLYSKKDCY

SEQ ID NO: 200529 - protein, 164 aa, Glycine max
  unsure (1)..(164): unsure at all Xaa locations
  Clone ID: PAT_MRT3847_23102C.1.pep
GKGARAEKEXXGRRRXAXXXKRGXXXXXXEXRXXXXEXXEKGSXGXXXXXEDKGEEQKNFFWRXAXXXXAXQGGAXXHPPXXXAXXHRDXKXXNXXKDQEKXPRXAEXXXAKTXQXEATQXXXXRXXGXXXXXXXEXXXTXKXXEKSXXXXXGXXXXEXXTGKR

SEQ ID NO: 200530 - protein, 71 aa, Glycine max
  unsure (1)..(71): unsure at all Xaa locations
  Clone ID: PAT_MRT3847_23103C.1.pep
ICLTNYAACCVKIYLFPSLFTDXLLMHILQKHLIAHILQMKIFWCKKNNTIKDCSGEEGSSLTFCLKSKDY

SEQ ID NO: 200531 - protein, 66 aa, Glycine max
  unsure (1)..(66): unsure at all Xaa locations
  Clone ID: PAT_MRT3847_23104C.1.pep
EFSAKEINPLSPKRNAKVWEKRVLKKISAKPXSCAFYXPQXKKKPGPKGIKNKVEREGIKVRVKTS

SEQ ID NO: 200532 - protein, 49 aa, Glycine max
  Clone ID: PAT_MRT3847_23105C.1.pep
NKQSLIPDFIIFIYSNQNQAPCVSSNAAASTTNTTSCIVPITYVSSYAS

SEQ ID NO: 200533 - protein, 93 aa, Glycine max
  unsure (1)..(93): unsure at all Xaa locations
  Clone ID: PAT_MRT3847_23106C.1.pep
SRMQCATGANNRIRLYIVTQLAAARINVVLTEQNEETAIQSLQTLKDXGLSHLALIHQNDVADATSETTVAEFIKSKSETLQIQINNTGIHDS

SEQ ID NO: 200534 - protein, 271 aa, Glycine max
  Clone ID: PAT_MRT3847_23107C.1.pep
MALIAARILGSNSRPAVALHRWQWLAYSSASAAVAEPETTEVKDYADYRRSLYGQITHKALLVDAVGTLVLPSQPMAQIYRKIGEKYGVEYSEDEILFRYRRAYGQPWGKSRLRYVNDGRPFWQYIVSYSTGCSDPQYFEELYNYYTTDKAWHLNDAGEEEGFRALRKSGVKLAVVSNFDTRLRPLLRALNCDNWFDAVAVSAEVAAEKPNPTIFLKACELLDVKPEDAVHVGDDRRNDIWGARDAGCDAWLWGSDVHSFKEVAQRIGVQV

SEQ ID NO: 200535 - protein, 53 aa, Glycine max
  Clone ID: PAT_MRT3847_23108C.1.pep
GRRSSVVDVRSVELHEPKETSEKKSKKQKSSKSQSSDKVKGLLKNVILQQSKK

SEQ ID NO: 200536 - protein, 131 aa, Glycine max
  unsure (1)..(131): unsure at all Xaa locations
  Clone ID: PAT_MRT3847_23109C.1.pep
MMMMEESEMEIESQVFVAHEIDLDYEFDAVRFFDFGAQETPAQARQAELWFHSAXSYPPSPFVAKLVAREDDVRECATTVHAANSNVPSGIGFFRTVFHHDGSKGGGGSGNISALLSGVPRDVNMQLLHVT

SEQ ID NO: 200537 - protein, 267 aa, Glycine max
  unsure (1)..(267): unsure at all Xaa locations
  Clone ID: PAT_MRT3847_2310C.1.pep
MHVSVGLKRCIMNEESSMLWHRRLGHISIERIKRLVNEGVLSTLDFADFETYVDCIKGKQTNKSKKGAKRSSNLLEIIHTDICCPDMDANSPKYFITFIDDYSRYMYLYLLHSKNEALDAFKVFKAEVEKQCGKQIKIVRSDRGGEYYGRYTEDGQAPGSFAKFLQEHEIVAQYTMPGSPDQNGXAERRNRTLLDMVRSMRSNVKLPQFLWIDALKTAAYILNRVPTKAVSKTPFELFKGWKPSLRHIRVWGCPSEVRIYNPQEKKL

SEQ ID NO: 200538 - protein, 327 aa, Glycine max
  unsure (1)..(327): unsure at all Xaa locations
  Clone ID: PAT_MRT3847_23110C.1.pep
KNELILLWMAEDLLKKSSKGRTLEEVGHEYFDDLVSRSXFFQRSNTSRSSWPYGKCFVMHDLMHDLATSLGGDFYFRSEELGKETKIKTKTRHLSFTKFNSSVLDNFDVVGRAKFLRTFLSIINFEAAPFNNEEARCIIVSKLMYLRVLSFCDFRSLDSLPDSIGKLIHLRYLDLSDSSVETLPKSLCNLYNLQTLKLRSCRKLTKLPSDMCNLVNLRHLEIFWTPIKEMPRGMSLSPSLTSLYLYDLSNLEMLDCTGFFHFASLQILPIANCLLLENMSGERLPVSLIKLTIMGCPLLEKRCRMKPPQIWPKICPIPGIKVADRWI

SEQ ID NO: 200539 - protein, 61 aa, Glycine max
  Clone ID: PAT_MRT3847_23111C.1.pep
IRPTENKRESILKQRNDQTLVKGLRKKKTVALLIPTGYITRENPPSAVSQPKEIRLGIVRS

SEQ ID NO: 200540 - protein, 43 aa, Glycine max
  Clone ID: PAT_MRT3847_23112C.1.pep
RDRYAIVVSNSTKRTLHHCHQFKPSLFRRILCLRTSNFEIRSI

SEQ ID NO: 200541 - protein, 43 aa, Glycine max
  Clone ID: PAT_MRT3847_23113C.1.pep
VYSHSERAALRSNTADHCSFADWMRARPELYSIICRLKNLISV

SEQ ID NO: 200542 - protein, 78 aa, Glycine max
  Clone ID: PAT_MRT3847_23114C.1.pep
MPPHSTGQNIYRSPISSGSDSQECWLAFLLRRQPCCDVMMIAYHADGDTLHFRYLLADPRWRAIVRSLRRGHYRLVGA

SEQ ID NO: 200543 - protein, 197 aa, Glycine max
  Clone ID: PAT_MRT3847_23115C.1.pep
HPGFSHYCYFCMIIFCLIAVTEGCTLFFAALAPDLLVAMGTATGAIVFMMVPSNIFRSLADLPKFFWRYPMSYISYITWSIQGQFKNDLIGLEFEPQVPGGTKIKGEEILHDMFGIRNDYSKWWDLGVLVLFLICYRLLFFLVLKHKERVTSLLHTKRTIPDILLRRSSLKNKYISSKQRQSLHPLSAQEGLYSPIS

SEQ ID NO: 200544 - protein, 207 aa, Glycine max
  unsure (1)..(207): unsure at all Xaa locations
  Clone ID: PAT_MRT3847_23116C.1.pep
MATKELFHSSDQEEAVNEESTLLQHEVDPYEEEETLSLSDLPIYSGASISARWGGDFSKEDGKNFVDDDDDNLFEFFSEEFTASSTNYATAENIIFCGKLIPFKDINPPRGDQSNINVQKGITKRSSKGSKSSFAASDYSSSVGKVSLVRSPTKSRWFLFMFGMSKLSITTEMELXDIRNRQSRRRRGPTATMMIPAAPKMKKSGCC

SEQ ID NO: 200545 - protein, 56 aa, Glycine max
  Clone ID: PAT_MRT3847_23117C.1.pep
GIKLFKLPLIPRGLIGDSSVPALSLVYGSHLVPIREIRYFLFGPTLCQVGTIMYSL

SEQ ID NO: 200546 - protein, 154 aa, Glycine max
  Clone ID: PAT_MRT3847_23118C.1.pep
MVSGSQQLVSLVKWINAVLPNFNLPLDTSEEELRAWLRDGSVLCSILDNLVPGSVKGSGSLNELIGVKRFLVALDELGLSGFELSDLEQGSMVPVLQCLETLKTHFAYNAARENIQSCSRKRWDQSNLTSFEESDSCLKDASKLQHAVDFCCIR

SEQ ID NO: 200547 - protein, 59 aa, Glycine max
  Clone ID: PAT_MRT3847_23119C.1.pep
QHKIYKVVRYMAQFDHARIIGNCLRFSSYIKKYSIPNTFLNIPKLSPFEIFQNIWICNP

SEQ ID NO: 200548 - protein, 279 aa, Glycine max
  Clone ID: PAT_MRT3847_2311C.1.pep
MRPIFAGNLEYDTRQSELERLFSKYGRIDRVDMKSGTSTKGKYAELLYVTGFAFVYYEDERDAEEAIRALDNVPFGHEKRRLSVEWARGERGRHRDGSKANQKPTKTLFVINFDPIRTRVRDIEKHFEPYGNVLHVRIRRNFAFVQFETQEDATKAIECTNMSKILDRVVSVEYALRDDGERGDNYDSPRRGGYERSPSPYHRRPSPDYGRPRSPVYDRYNGGGPDRRRSPDYGRHRSPDYGRRRSPDYGRRKSPDYGKPRSPEYGRYRSRSPVRRSRT

SEQ ID NO: 200549 - protein, 68 aa, Glycine max
  Clone ID: PAT_MRT3847_23120C.1.pep
YYANGFKAYWLMYASADPYQINEISSVFPQASNHELHIAKTLSFSDCLSQPLQYSTGSYNDLIISCLI

SEQ ID NO: 200550 - protein, 55 aa, Glycine max
  Clone ID: PAT_MRT3847_23121C.1.pep
DGVLKSCNKGPTLHYTYFDGIIKDCIQLMHSFSSPGVQWIRRIIANKLASLAFML

SEQ ID NO: 200551 - protein, 126 aa, Glycine max
  Clone ID: PAT_MRT3847_23122C.1.pep
SHGHRCYVKLWLLLGRPPSPPPPPPPPPPPPPPPPPPPPPPPPPPPPFLKKNFFPLFFFFFGGGISFYNWFGKLNLWVFFLKQQFGGGGGFKKFPFFSKKKGVFLPFFLKIFFKNYFFFCLTKFWG

SEQ ID NO: 200552 - protein, 73 aa, Glycine max
  Clone ID: PAT_MRT3847_23123C.1.pep
DHVNYDSKESGSLCADGEVHVQFQGGLESVSSTDDIPCNTDTQKPFEVGPESRNGTETVLMGKPFQKTKHKLV

SEQ ID NO: 200553 - protein, 65 aa, Glycine max
  Clone ID: PAT_MRT3847_23124C.1.pep
NGSENLKQAIGCHEKHYPLPQMKKIENQMKIEICKMEPEEAAVTFGEQNMMRCQKSSFMSTKRKR

SEQ ID NO: 200554 - protein, 76 aa, Glycine max
  Clone ID: PAT_MRT3847_23125C.1.pep
SLLFTNPLSLPKCGLILILKLSNWLTPTHLALAHVGWGQMGPIYKWSIGPKSPPNPVGLGWPMAIKICTIIFFQFP

SEQ ID NO: 200555 - protein, 94 aa, Glycine max
  unsure (1)..(94): unsure at all Xaa locations
  Clone ID: PAT_MRT3847_23126C.1.pep
TDTDSFTFNKFNPVQPNIMLQKDAIIXYYEVLQLTKVGSNSVPTSGSLGLALYAAQIQSWDNESGKVNSWATFFKFNIYAPNQSNSDDGLAFIL

SEQ ID NO: 200556 - protein, 154 aa, Glycine max
  unsure (1)..(154): unsure at all Xaa locations
  Clone ID: PAT_MRT3847_23127C.1.pep
RENGICRSPKKHCSPSFSCIIKSFNPSLWNQFHSLTDTRFPKRRPSETPRRKRASXDSSGPYAWVQYTPGQPILPNKPNEGSVKRRNEKKRMRQRRAFILAERKKRKAQLQEANRKKNIQRVERKMAAVARERDWAKRLAELQRLEEEKKRLMA

SEQ ID NO: 200557 - protein, 178 aa, Glycine max
  Clone ID: PAT_MRT3847_23128C.1.pep
MGFAGALRNIVRPLSVASSRALTPRISTNASMAPFCPAFPSPCKTPQWLHPLWNHFHSLTDTRFPKRRPSEKPRRKRASLRPSGPYAWVQYTPCQPILPNKPNEGSVKRRNEKKRMRQRRAFILAEKKKRKAQLQEANRKKNIQRVERKMAAVAREREWAERLAELQRLEEEKKKSMA

SEQ ID NO: 200558 - protein, 88 aa, Glycine max
  unsure (1)..(88): unsure at all Xaa locations
  Clone ID: PAT_MRT3847_23129C.1.pep
ATLLFLYITVLAIIGYRRQSDTKIPGNTECDGVGILGMAWAXGGMILILAYCTGGISGGHINPAVTLGMVLERKESLVRASVYMIAQG

SEQ ID NO: 200559 - protein, 157 aa, Glycine max
  Clone ID: PAT_MRT3847_2312C.1.pep
MVSNGDEESGTQVQLPETTTKNSPSPFFRYNSPLVQVILIGVICFCCPGMFNALSGMGGGGQVDHTASNNSLTALYTTFAIFGILGGGIYNILGPHLTLLAGCSSYVLYTSSFLYYNHHHHQAFVILAGALLGVGAGLLWAAQGAIMTSYPPTNRKG

SEQ ID NO: 200560 - protein, 108 aa, Glycine max
  Clone ID: PAT_MRT3847_23130C.1.pep
ISEARCDRFSRVSFPFLGSHPVLGRLAFLSSTQQSRLHSRIVSLHLLSACRVLKAIRIFSPPFPVRCWLDSTHRQLVQTAGSPVALLVPPALVHRILLTPNIPLDPAR

SEQ ID NO: 200561 - protein, 54 aa, Glycine max
  Clone ID: PAT_MRT3847_23131C.1.pep
MLGSRAPLWSIMLRDLCPASQFRASRSFLVFNRGSLLSIIRSGGVVQGSKSSLI

SEQ ID NO: 200562 - protein, 102 aa, Glycine max
  unsure (1)..(102): unsure at all Xaa locations
  Clone ID: PAT_MRT3847_23132C.1.pep
GISFEEVHQGHLLDYTLEDVTDDNSSAALLGNNSTLTVGSGKVVDSGPDEHIFVYYTGPCGXALLVMPGDAYLCADDLIVLSQKKLAFGPYTNLVCCMVACE

SEQ ID NO: 200563 - protein, 66 aa, Glycine max
  unsure (1)..(66): unsure at all Xaa locations
  Clone ID: PAT_MRT3847_23133C.1.pep
QRGFEESDISKQQGVGTYPNSFTHQHHRYKSLLDAHTAKHYPILLSTVSNPQLSQHRPTRXTKARS

SEQ ID NO: 200564 - protein, 71 aa, Glycine max
  unsure (1)..(71): unsure at all Xaa locations
  Clone ID: PAT_MRT3847_23134C.1.pep
EKANLLXQFKTVEEIRETNMKYQINIFTCRTLLQKSLAKIQNEIAQLLPQLTATVHKVNDCDDPIQDSGRK

SEQ ID NO: 200565 - protein, 46 aa, Glycine max
  Clone ID: PAT_MRT3847_23135C.1.pep
LRNINIYSVRIYNHDEHTTNNTILLVIFIINNIINYPYHIITLLII

SEQ ID NO: 200566 - protein, 128 aa, Glycine max
  unsure (1)..(128): unsure at all Xaa locations
  Clone ID: PAT_MRT3847_23136C.1.pep
MEASRIENLIRAKKSLKISLEKSKSVGLALEKAGPRLDEIRVRLPSLGSAVRPIRAEKDALAAVGGHINRAVGPAAAVLKGFDAVHGLEKSLLXDPXTDLAGYXVVLKRXQEALRFLGDNCGLAIQWL

SEQ ID NO: 200567 - protein, 51 aa, Glycine max
  Clone ID: PAT_MRT3847_23137C.1.pep
SFPPPEKMFGRASLVFWFFPPPRIGAGCLIYVDYGSHLTHELFEGPKVKRY

SEQ ID NO: 200568 - protein, 121 aa, Glycine max
  unsure (1)..(121): unsure at all Xaa locations
  Clone ID: PAT_MRT3847_23138C.1.pep
CQFSFARGXLPLRSRMXXSSSRTLXRKETITLXGGKRLTXIDERQXPSIQXPKEGIPPGSSNPSQSSXRKAAFEDRPRTLARLPNIQKGVXTLHLVPSSSVGGSARIFVKDFXXWQNPITX

SEQ ID NO: 200569 - protein, 768 aa, Glycine max
  unsure (1)..(768): unsure at all Xaa locations
  Clone ID: PAT_MRT3847_23139C.1.pep
MGCTASKLENEDTVRRCKERRRLMKEAVYARHHLAAAHSDYCRSLRLTGSALSTFSTGEPLSVSDHTPAVFLNNSQHLQHQHQHQHQHQPSPSPPPPKLDPILPRRRKPPPPKLPHILSDSSPSSTPRSHVSNFFPTAHSTYSSTPSQTSSVWNWENFYPPPPPPASGYFPEEQQQKFSHTKTQTPSHYSHKTQTPSHYSHKTQQHTNLQIHDTDSERSEYDYFDGKLETENENEKTDSHSHHLPEEYTETEREEVQCSEWGDHYSTTSSSDDGDDGVEGDVESRSEIGTRSNFGSRSEIGTRSNFGSSVRAESVVGVGGGGGANVFDWDXGRSWRLMKMVVRHRDLREIVDLTCFRSDNGGSAGDQVSEMLEISTALLDRSIXDLGETVYHWCSLFSNLSPSRTSKPPVXKSLCSTLERLLAWEKKLYEEIKAREGVKIEHEKKLSALQTQEYKGEDEAKIFKTKASINRLQSLISVTSQAVSTTSTAIIGLRDSDLVPQLVDLIHGFMYMWRSMHHYHEIQSNIVQQVRGLVNRSSRGDSTSELHRQATRDLESAVSAWHNSFCRLIKFQREFILSLHGWFKLSLVPVHNDNINGRETSETYQFFDEWKLALDRVPDTVASEAIKSFINVVHVISSKQVEELKIKKRTETASKELEKKASSLRNLERKFYSSYSMVGISLPDSAPDNGQVLDARDPLADKKLELATCQRRVEDEMLRHSKAVEVTRAMTLNNLQTGLPGVFQALTSFSSLFTEALESVCTRSYAIK

SEQ ID NO: 200570 - protein, 101 aa, Glycine max
  Clone ID: PAT_MRT3847_2313C.1.pep
MCGIFAYLNYDVNRDRRYILQVLFNGLSRLEYRGYDSAGIAIDDSNFSPLVFRQEGNIESLVKSVYQEVGETELNLGECFGTHAGIAHTRWATHGEPAPRN

SEQ ID NO: 200571 - protein, 78 aa, Glycine max
  Clone ID: PAT_MRT3847_23140C.1.pep
CLVKEFGCGKQNPRFIGSNSPVMVIQPTKPEPDFPTPALGPGKSFRNFRFDTASVFQPMETSFFFLKTGILPVKFPVT

SEQ ID NO: 200572 - protein, 51 aa, Glycine max
  unsure (1)..(51): unsure at all Xaa locations
  Clone ID: PAT_MRT3847_23141C.1.pep
GPVDGHEMDDLVSVLNGVKSSRSSXPVRQHEVSEKGHGYPYAVRTAAKIHG

SEQ ID NO: 200573 - protein, 545 aa, Glycine max
  Clone ID: PAT_MRT3847_23142C.1.pep
DFFDGKLETENEKTDSHHLPEEYTETEREEVQCSEWGDHYSTTSSSDDDGVEGDVESRSEIGTRSNFGSSVRAESVVGVGGGGGAKRFDAASSVAAAEMKMVVRHRDLREIVEAIKENFDNAASAGDQVSEMLEISRAQLDRSFKQLRKTVYHSSSILSNLSSSWTSKPPLAVKYRLDTGSLDEPGGPKSLCSTLERLLAWEKKLYEEVKAREGVKIEHEKKLSALQTQEYKGEDEAKIFKTKASINRLQSLIAVTSQAVSTTSTATIGLRDSDLVPQLVDLIHGFMYMWRSMHHYHEIQSNIVQQVRGLVNRSSRGDSTSELHRQATRDLESAVSAWHSSFCRLIKFQRDFILSLHGWFKLSLVPVHNDNINSRETSDTYQFFDEWKLALDRVPDTVASEAIKSFINVVHVISSKQVEELKIKKRTETASKELEKKASSLRNLERKFYSSYSMVGISLPDSAPDNGQVLDARDPLAEKKLELATCQRRVEDEMLRHSKAVEVTRAMTLNNLQTGLPGVFQALTSFSSLFTEALESVCTRSYAIK

SEQ ID NO: 200574 - protein, 60 aa, Glycine max
  unsure (1)..(60): unsure at all Xaa locations
  Clone ID: PAT_MRT3847_23143C.1.pep
DWIWYDLIIQAXRXXXVLIQNXIMAIGMXNRLTPFQIYLXNMFMSHAITPYWDXASSXQS

SEQ ID NO: 200575 - protein, 136 aa, Glycine max
  unsure (1)..(136): unsure at all Xaa locations
  Clone ID: PAT_MRT3847_23144C.1.pep
LEGQISLYINKLSGPLPSTIGNFTSTQXILLDGDATFRSITLTQIAXLQQVSKIDLRHNKCWGPIAPAISRCKLXTFIVLIGNEPSGEISNRITCMRILHHVNLPRNHLAGGIPGSIAYMQRLTSGDGAYNNRSGL

SEQ ID NO: 200576 - protein, 60 aa, Glycine max
  Clone ID: PAT_MRT3847_23145C.1.pep
LVLYIQIRRRLDYGCLLMEYKSKKKKGSIFEGKKKEYYLIPFFSPHWGGGNTSKKAQRNA

SEQ ID NO: 200577 - protein, 115 aa, Glycine max
  Clone ID: PAT_MRT3847_23146C.1.pep
LGRTLAKLKIPTVLRKKHNVLFLCIPCSSFSFLPQKKDGRDHMLQFQLIPHLTQNTDRFKYLRPDVNGLPNLWGFLIRANPKQTSKELLQILERDRDLWRLGWDNSHLSMTLTLT

SEQ ID NO: 200578 - protein, 53 aa, Glycine max
  Clone ID: PAT_MRT3847_23147C.1.pep
NKHLGETLYSACHIFNRIPYKNFEKIPYELWRKRESNLKYPLLSSSRSRTDAW

SEQ ID NO: 200579 - protein, 47 aa, Glycine max
  Clone ID: PAT_MRT3847_23148C.1.pep
GALAVSRGIGDRHLKQWLTSQPDTKGFIIPHQHDSLILAPHGLWDQD

SEQ ID NO: 200580 - protein, 50 aa, Glycine max
  Clone ID: PAT_MRT3847_23149C.1.pep
ADKKACYTFSNSLIEEVNRWGCWKPTTVTLMYMMEFRSKHTNKNVLISTQ

SEQ ID NO: 200581 - protein, 67 aa, Glycine max
  unsure (1)..(67): unsure at all Xaa locations
  Clone ID: PAT_MRT3847_2314C.1.pep
PGVFGFGFRGLLVWGLRFVPPSGFXGCVFLVVLALPGCRVGRPRKCKSRVGLPPRVPRVASLRGFPV

SEQ ID NO: 200582 - protein, 52 aa, Glycine max
  Clone ID: PAT_MRT3847_23150C.1.pep
YHQTTHVRPPMEAVASLVQEAKGVQSGGGIAQLAGLAQSLFKKLFLRHYVRP

SEQ ID NO: 200583 - protein, 159 aa, Glycine max
  Clone ID: PAT_MRT3847_23151C.1.pep
MVGLALMQHVGVALTSCPGQLKPVTCEFRVRIRCSSNVGVSRQQVLEKLDKELAKGDDRAALALVKDLQGKPDGLRCFGAARQVPQRLYTLDELRLNGIETLSLLSPVDTTLGSIERNLQIAAIVGGLAAWNAFAISPQQIFYISLGLLFLWTLDAVLT

SEQ ID NO: 200584 - protein, 51 aa, Glycine max
  unsure (1)..(51): unsure at all Xaa locations
  Clone ID: PAT_MRT3847_23152C.1.pep
RNLYSSISXSRCHCAXTYQPTCHRLSRRRXYIIXXFRVXQIXSFPXLXXSX

SEQ ID NO: 200585 - protein, 175 aa, Glycine max
  Clone ID: PAT_MRT3847_23154C.1.pep
MASKVALMALFSVALLFSPSQSAVFSVDLGSESVKVAVVNLKPGQSPISVAINEMSKRKSPALVSFHDGDRLLGEEAAGLAARYPQKVYSQMRDLIAKPYASAQRILDSMYLPFDAKEDSRGGVSFQSENDDAVYSPEELVAMVLGYAANLAEFHAKIPIKDAVIAVAPYMGQAE

SEQ ID NO: 200586 - protein, 115 aa, Glycine max
  unsure (1)..(115): unsure at all Xaa locations
  Clone ID: PAT_MRT3847_23155C.1.pep
MASATLSVAKPALTANGKGFSEFSGLRHSXASFPFLDGGGEDVHSVLAFQTYAPGSGGRYKNGVTEAXLNAAIHGFGRXGTNFLRCWHGRKDSPLDVIAINDTGGVKQACHLLKF

SEQ ID NO: 200587 - protein, 58 aa, Glycine max
  Clone ID: PAT_MRT3847_23156C.1.pep
MINKGHSFSNSLCDRLELPQSSAAFARLHKEAESTWCICHINSNNPLKLVLSCKNVSP

SEQ ID NO: 200588 - protein, 374 aa, Glycine max
  unsure (1)..(374): unsure at all Xaa locations
  Clone ID: PAT_MRT3847_23157C.1.pep
MMMSSGTSSYWCYXCSRFVRVWPHHTVVCPDCDGGFIEEIEHPPRSVHLDPRRHRHRFPAAAMYMIGQRPSSDPRPASSLRRTRRNGGDRSPFNPVIVLRGGAEDESRGFELFYDDGTGSGLRPLPPSMSEFLLGSGFDRPLEQLSQIEINGIGRYEHPPASKAAIDSLPTIEIDDTHLAMESHCAVCKEAFETSTAVREMPCKHIYHPECILPWLALHNSCPVCRHELPADTPNPNQNQNPSQNVALNEEENVGLTIWRLPGGGFAVGRFSGGRRGAERELPVVYTEMDGGFNNGGGEPRRISWSRGNRGRESGGLTRFFRNLFGCFRGSSTQRSASSRESMRASSSRSSTMDPSLRSRRTWSMDVNSGMRAW

SEQ ID NO: 200589 - protein, 42 aa, Glycine max
  Clone ID: PAT_MRT3847_23158C.1.pep
EETVSLFRLCYKFMSSKYNPFTSSFLLFFLSPLVDQCKLKFT

SEQ ID NO: 200590 - protein, 189 aa, Glycine max
  Clone ID: PAT_MRT3847_23159C.1.pep
MMMSSGTSSYWCYRCSRFVRVWPHHTIVCPDCDGGFIEEIEHPPRSVHLDPRRRQRFPAAAMYMIGQRPSSDHPSRPAALRRTRRNGGDRSPFNPVIVLRGGAATAEDESRGFELFYDDGAGSGLRPLPPSMSEFLLGSGFDRLLEQLSQIEINGIGRYEHPPASKAAIDSLPTIEIDDTHLAMESHCA

SEQ ID NO: 200591 - protein, 59 aa, Glycine max
  Clone ID: PAT_MRT3847_2315C.1.pep
SYDVCNCDRISISLSNQLSHDAVAKRPHYSECKLGTTEVCRSQAIGLQDRRNNSPTNSN

SEQ ID NO: 200592 - protein, 51 aa, Glycine max
  Clone ID: PAT_MRT3847_23160C.1.pep
MRLVGWKLVIKDFGIIRGNKGHKINGNLVIKPKNVLDINSITNVKGVNGNR

SEQ ID NO: 200593 - protein, 88 aa, Glycine max
  Clone ID: PAT_MRT3847_23161C.1.pep
PRVRPLVRSISIPLRIQFLSDSQLVRWPTTFQFPDSFGKKKLSFFAQQVNWKKMDHYKTWCQTSSERPILRINHSGFFGNSNIMNMCS

SEQ ID NO: 200594 - protein, 142 aa, Glycine max
  Clone ID: PAT_MRT3847_23162C.1.pep
MADKEPVVERPEAGEEEEDASAAAAAGEEEDTGAQVAPIVRLEEVAVTTGEEDEDVLLDMKAKLYRFDKDGNQWKERGTGAVKLLKHKQTGKVRLVMRQAKTLKICANHLVASTTKMQEHAGSDKSCVWHAADFADGELKEE

SEQ ID NO: 200595 - protein, 48 aa, Glycine max
  Clone ID: PAT_MRT3847_23163C.1.pep
TIIIQIKLFKSIDNNPDTPIITATCHVILDIYGQLRKYLPFCRLLAAV

SEQ ID NO: 200596 - protein, 53 aa, Glycine max
  Clone ID: PAT_MRT3847_23164C.1.pep
IANKTIPFSQSQHIRRRAIAYTYLKKIKTSPGRIIIISITISMLTLLYSLPTS

SEQ ID NO: 200597 - protein, 32 aa, Glycine max
  Clone ID: PAT_MRT3847_23165C.1.pep
NQNQLLINEINRNHDCKMPDNLSRNVGLNREL

SEQ ID NO: 200598 - protein, 394 aa, Glycine max
  Clone ID: PAT_MRT3847_23166C.1.pep
MLSRLMDFLTACWRRRSFSDGKGGSEVTGRKEGLLWYKDAGQHLFGEYSMAVVQANNLLEDQSQIESGPLSLLDTGPYGTFVGVYDGHGGPETSRYVCDHLFQHLKRFASEQKSMSEEVIRKAYQATEEGFLSVVTKQWPMNPQIAAVGSCCLVGVICGGILYIANLGDSRAVLGRVVRATGEVLAIQLSSEHNVARESVRQEMHSLHPDDSKIVVLKHNVWRVKGLIQISRSIGDVYLKKAEFNKEPLYAKFRVREGFKRPILSSDPSISVHEIQQHDQFLIFASDGLWEHLSNQDAVDIVQNNPHNGIARRLIKAALQEAAKKREMRYSDLKKIDRGVRRHFHDDITVVVVFLDSNLVSRASSVRGPPLSVRGGGIPLPSRTLAPCAAPMET

SEQ ID NO: 200599 - protein, 162 aa, Glycine max
  unsure (1)..(162): unsure at all Xaa locations
  Clone ID: PAT_MRT3847_23167C.1.pep
TEKDRCLSANLLPYVEGIILLDMCGDMDGHSGLQLIDTPTGYSASYVGGXLLEAVRRHTYTVXRICDIDNAHPAVFNMKLQILEEGRLSDSLRXSEDFTNTLLIMTSNAGGRVHEKRGRIIXFDLDYDEKDSMLYRIMSXVTDELKPHCMPESLNRENDMIV

SEQ ID NO: 200600 - protein, 135 aa, Glycine max
  Clone ID: PAT_MRT3847_23168C.1.pep
MQRFHLGLPHSPPMDTSTPFQDLPEASPKPFFKKTTLTSFIMSSTPSFKEDTYYISHLKSSEKKALQDLKNKLQSSYSSTPSMWGVPLLNNNNADNADVILLHPLHFLRARDFRVHDALSMLLKCLSWRTEFGAD

SEQ ID NO: 200601 - protein, 42 aa, Glycine max
  Clone ID: PAT_MRT3847_23169C.1.pep
IIKLSIHISNTFFLIYKHVAISKFLNEIIRPSIIKKLIFASL

SEQ ID NO: 200602 - protein, 78 aa, Glycine max
  Clone ID: PAT_MRT3847_2316C.1.pep
EPTLNPTHSCIREYHSLCTATTPQPFFVQCSTLTTSKYAASLSHHHLILPKHTSARNLCHAHQARGFLFKMYVTTDLK

SEQ ID NO: 200603 - protein, 161 aa, Glycine max
  Clone ID: PAT_MRT3847_23170C.1.pep
SQVFGIGHNTTDNGVEKKESRGKKYHKKKHRKMQEWWKEEHLAELSKKTSKLKNLHTKWKKGLKVPHFDLGRRFYLCRRKKFGQEGENKCDQNGEFSFRRGWKKKSTRSIGSDMWSGDLFSRELSSTTSMRGTLCYVAPEYGGCGFLMEKADIYSYGVLIL

SEQ ID NO: 200604 - protein, 103 aa, Glycine max
  unsure (1)..(103): unsure at all Xaa locations
  Clone ID: PAT_MRT3847_23171C.1.pep
GPPPSRHPSTRQGEKQGGPTQRKKXPEQARRGSDQIGRAQXEGQTTQENRPQLAEGKNPQCKNKNSRPTGGGPKDFIRPGRKKSRRRRKGCVWGGSRPSTNEG

SEQ ID NO: 200605 - protein, 34 aa, Glycine max
  Clone ID: PAT_MRT3847_23172C.1.pep
QLFCRLKLWSNIMHEEGHSKHKVFVKKGLLVVVW

SEQ ID NO: 200606 - protein, 118 aa, Glycine max
  Clone ID: PAT_MRT3847_23173C.1.pep
PRVRKKKKKKKKKKKKKKKKKKKKKKEKKKKKKKSKRTKTYKSKNHFLIVYIKIGGLGLFFVPLFRGRSPALSPFFFGGALNSLLRAGVFPPEGPGKPWVSPILFPWSAFSFSLWGVI

SEQ ID NO: 200607 - protein, 85 aa, Glycine max
  Clone ID: PAT_MRT3847_23174C.1.pep
KIKFYLFPPKKQGLLFKFKKKKDTPLLLVKGTPTPKTWVGFFWGAPTLLNRNGWMEPLGLEGNGPLSHPGGKGFKPPPNERAPPK

SEQ ID NO: 200608 - protein, 67 aa, Glycine max
  Clone ID: PAT_MRT3847_23175C.1.pep
SRSLCTQGSIHIMSKAYFYILHVTMTFNMDDKQQGSSNALLEAKKEKTFIPNVTNHGSLIIHMATCC

SEQ ID NO: 200609 - protein, 75 aa, Glycine max
  Clone ID: PAT_MRT3847_23176C.1.pep
IVSSNHGNGNPSLSLNPTPLRCSKPATAPPCHGSETPASPSPARGPSSSPEQSEQQRPNVTTEAPAKVECAPVGF

SEQ ID NO: 200610 - protein, 66 aa, Glycine max
  Clone ID: PAT_MRT3847_23177C.1.pep
KNNLLNIKFNFAFFLIKWKITKQQEGVRREKIGERKSEEKDNKARDQGKRKTPPQEAKKGELVYVA

SEQ ID NO: 200611 - protein, 132 aa, Glycine max
  Clone ID: PAT_MRT3847_23178C.1.pep
CVFRRVQLIVEPDVRLARLGRAFEWRHLRRKETGHLRREGRGARARRDGHAGLGRRRGTTRVAPRCCVDDGVQVLKAIVAADEGRRSADACAARRSCSAAGLGRRGPRRAVGALLATADGSAQSVDSTRRGS

SEQ ID NO: 200612 - protein, 127 aa, Glycine max
  Clone ID: PAT_MRT3847_23179C.1.pep
KKTRNFSYRRWAFILLAWKVILSFSTMSCRFWKLLYGGNHFIRTSKSAAFYLNSMFYHSSKEALNLQWYQNEFPKVKELTHLLANVDSVNGRLVDINSNSTVFCDDVEREMCTFKSLVREFGESPFG

SEQ ID NO: 200613 - protein, 69 aa, Glycine max
  Clone ID: PAT_MRT3847_2317C.1.pep
WDCSFDKMGSVSWSRLNNAMIAVLVPLPFILFYLSFQSVINTPSSWSSLWTWCYYQPSAICPLVFFFLN

SEQ ID NO: 200614 - protein, 66 aa, Glycine max
  Clone ID: PAT_MRT3847_23180C.1.pep
LHSQNHHHVKLAKLSSSSMFIVRCHVGRMRQHRQEPSLCPSRYDGYLSSLSYSEPHQSYSHCGKLQ

SEQ ID NO: 200615 - protein, 36 aa, Glycine max
  Clone ID: PAT_MRT3847_23181C.1.pep
SAGPLFIDRRSFTDSNIGRTFLAHWDYYTLHFTTYL

SEQ ID NO: 200616 - protein, 55 aa, Glycine max
  Clone ID: PAT_MRT3847_23182C.1.pep
KLYFCKKKNHVNFIKQQAIVKCIGRTWMYLIQHPSKHVLRCQSIKNCGGWVSVFG

SEQ ID NO: 200617 - protein, 219 aa, Glycine max
  Clone ID: PAT_MRT3847_23183C.1.pep
RETLLEYANAPTTLQRRRSYPFDSEKVFTRENLRMVLSLIPFVGAIADIADGNIGAGLKGLVIDFASFAFTGGLRGFFSGFKTVVPFGSRAFTMTALKGGSKMLRGLFNPLDGVFDVFRIGPKALGAARQVLRGELVCVGPGFFLTTTAFEKCRWGLGAYDALAPRQASGAYPGSQLGVSRSCPTYAVQIDTKWYAIDPVTQTPTGAPIEDFKPDAPVN

SEQ ID NO: 200618 - protein, 199 aa, Glycine max
  Clone ID: PAT_MRT3847_23184C.1.pep
MFTICNPSSLSRQPGIVAPIPVKPIKHSSNLSVTNSASSGERISSSTRRRTISPFESRISLIFALASQANSLSQRLLADVAAETAKYVFPKRFESRNLEEALMSVPDLETVDFKVLSRMDQYEIREVEPYFVAETTMPGKSGFDFNGASRSFNALAEYLFGKNTTKEKMEMTTPVFTSKNQSDGVKMDMTTPVLTTKMG

SEQ ID NO: 200619 - protein, 303 aa, Glycine max
  unsure (1)..(303): unsure at all Xaa locations
  Clone ID: PAT_MRT3847_23185C.1.pep
MWRHAAKHACRGSIRQSFHPSRLLSLSHGSIFSPKREAFLYSVARLNCIGRGDFQFQFGAKGYSGVAEAASSTDVEEDGVFVDEIQQLLLQEMNDEVESQLVEEEGAPIDEIQQLLLHEMNKEEKNELVEEQAAPVDGIRELLQGMKKEKQKKVVGYRWKNQGKGVGQSRYQELRRRQVKIETEMWEEAAKEYRELLMDMCEHKLAPNLPYMKSLFLGWFEPLRDAIVKEQEMYSEGKNRMAYAPYFVQLPADKMAVIAMHKLMGLLMTGNERVTIGTARVVQAAFGIGDAIXNEVRIPQFLE

SEQ ID NO: 200620 - protein, 49 aa, Glycine max
  Clone ID: PAT_MRT3847_23186C.1.pep
YSGIVLSYCSVLLPMIPKWQIGNSSKPMSFQAQHFQYGSFVLKFIHILS

SEQ ID NO: 200621 - protein, 70 aa, Glycine max
  Clone ID: PAT_MRT3847_23187C.1.pep
FQIIVIIASQKFRACITRSYMKLLTCIKQCKNGKKLACLRWLNDLSCAEHETLDFLSLTQIFVLLLHVQK

SEQ ID NO: 200622 - protein, 59 aa, Glycine max
  Clone ID: PAT_MRT3847_23188C.1.pep
IFASIFLENVEFDFPEEYLSHFLWLQDRPTTKTINSNSYMNIVASLNLENEELDFPEEF

SEQ ID NO: 200623 - protein, 154 aa, Glycine max
  Clone ID: PAT_MRT3847_23189C.1.pep
YFFFFFFSFFFFFISYGFLFLYNFFYIYFFFFFWNFKNHPHQKLTPNFNCPLKKKTQNQTVSPKTCFLKKKINMGRPPVTTRKLRTKPFGPTNFPNKETNKNYGEKRIKRLPCEKFYHPNNPQKNTLQKQKMKNLGPPINAPTQQNAVAPTAPF

SEQ ID NO: 200624 - protein, 595 aa, Glycine max
  Clone ID: PAT_MRT3847_2318C.1.pep
VERSLDESFPRLPSSKTTGVLPEVLKNLVDRRKMVKSWIKNEKNKNEKTDPIRVQQLDIQQQALKLTANSMYGCLGFSNSRFYAKPLAELITSQGREILQSTVDLVQNNLNLEVIYGDTDSIMIYSGLDEIEEANKIAVRVIQEVNKKYKCLEIDLDGLYKRMLLLKKKKYAAVKLLYKDGTPYEAIERKGLDIVRRDWSILAKELGDFCLTQILSGGSCEDVVESIHNSLMKVQEEMRNGQVALEKYVITKTLTKPPEAYPDAKNQPHVLVAQRLKQQGYSSGCSVGDTIPYIICYEQGGSPGSAAGIAQRAKHPDELKRNHGPLLIDIDYYLSQLIHPVVSRLCAPIKGTSPGRLADCLGLDSSKFHHKSSEALNDDSASPLSFVADDEERYRGCEPLVLSCPSCSGTFDCPPVFKSICLLGSERQRPTSVAPEEAEYNFWRKLCCPKCPDVKISPVMIANQVKRQAERFILMYYRGLLVCDDETCKHTTRSISLRLVGDSERGTVCPNYPRCNGRLVRKYTEADLYKQLSYFCHVFDTVSCIEKMEAKSRIPIEKELIKIRAVIKSAASTAQEIRDRCAFGWVKLENLVISV

SEQ ID NO: 200625 - protein, 35 aa, Glycine max
  Clone ID: PAT_MRT3847_23190C.1.pep
NNSSTIATPAKGLGYENNYLDYTPTITTFNSGNFS

SEQ ID NO: 200626 - protein, 59 aa, Glycine max
  Clone ID: PAT_MRT3847_23191C.1.pep
LSRESSIFVDWLQTIERKKATISDRLLFLFSDKPNAADCIPFVTSYKFNMQAGIFTHKT

SEQ ID NO: 200627 - protein, 75 aa, Glycine max
  unsure (1)..(75): unsure at all Xaa locations
  Clone ID: PAT_MRT3847_23192C.1.pep
RAIDPGTDGCLGSLQRVQVRGSLVEARPXSNPYEPQIEPIKSSPQPLTGGAEVQLKGAIQEQMDLFVRQGQVEKN

SEQ ID NO: 200628 - protein, 363 aa, Glycine max
  unsure (1)..(363): unsure at all Xaa locations
  Clone ID: PAT_MRT3847_23193C.1.pep
MGVVRTWESRRAELEAFRRSLVAAAGIQRRKDDEGGRTHKFVSSYEHDDGKGTLICVTCGVSYFGLALVNHLLLLGYSLRVTVDNPEDIEKLREMERRGEVRATEGNLEVIMAKLTDVDGLEKAFQGCRGVFHTSAFTDPAGLSGYTKSMAEIEVRAAENVMEACARTPSITRCVFTSSLSACVWQDNAQSELTPVINHGSWSTESFCTEKKLWYALGKMRAEKAAWRISDERGLKLTTICPALITGPEFCNRKSXTATIAYLKGAQEMYSRRLLATVDVTKLAEAHASVFKXMTSNASGTYICFDHVIDTHSEAEKLAKYIGMPEEKICGDASNNSIINRFELSNEKLCRLMSRRLRCYSEY

SEQ ID NO: 200629 - protein, 284 aa, Glycine max
  unsure (1)..(284): unsure at all Xaa locations
  Clone ID: PAT_MRT3847_23194C.1.pep
YRSNALVIAITLSLQSWPTRPSKWKQLGELAMSTGKLEMAEECLKHATDLSGLLLLYSSLGDAEGISKLATLAKEQGKNNVAFLCLFMLGKLEDCLQLLVESNRIPEAALMARSYLPSKVSEIVAIWRKDLSKVNPKAAESLADPEEYPNLFDDWQVALAVESKATEARGVYPPASEYVNQADKSHITLVEAFRNMQIEEGDQPLENGDSNHELTDQNVEEPYSEEHEEHEEQNGEEGSQEEAVVVDADSTDGAVLVNGNEADEEXGKSNEGAPSAEKYLVGAV

SEQ ID NO: 200630 - protein, 66 aa, Glycine max
  Clone ID: PAT_MRT3847_23195C.1.pep
HFSHQILCKIPKSIFRPLICYTFYPNQNQHNASKKNQCLDKYTLSHSLYPCTTSLLHSIIILPYHY

SEQ ID NO: 200631 - protein, 147 aa, Glycine max
  unsure (1)..(147): unsure at all Xaa locations
  Clone ID: PAT_MRT3847_23196C.1.pep
TSKVNPKAAESLADPEEYPNLFDDWQVALAVESKATETRGIYSPASEYVKQADKSHITLVEAFRNMQIEEGDQPLENGDSNHELTEQNGEEHYTEEQNGEGSQEEAVVVDADSTDGAVLVNGNEADEEXGKNNEGAPSAEKHLDGAV

SEQ ID NO: 200632 - protein, 106 aa, Glycine max
  Clone ID: PAT_MRT3847_23197C.1.pep
YTAGIHCPGIEHIPLSAENDASALFHFSRSRVSTFFVFRPPPYASVGCLPCPPLLSLLFWSCTSWLISRPTLPLTISLFFPPFFRFPVFFPFLLSPSPFSFFSPRF

SEQ ID NO: 200633 - protein, 107 aa, Glycine max
  unsure (1)..(107): unsure at all Xaa locations
  Clone ID: PAT_MRT3847_23198C.1.pep
SSLTCSPHQKHQPCQVPPGHKASPARQQATPPNTYNTVPTQQXPPPPTSPPSQSPHPQSHPLGSPGPHTRAPRPTSAHAPPATRHSPDPSHXTTKPPPHNPXTPKNA

SEQ ID NO: 200634 - protein, 117 aa, Glycine max
  unsure (1)..(117): unsure at all Xaa locations
  Clone ID: PAT_MRT3847_23199C.1.pep
TDIIYDCGXSIKKAVDLGQIEGSVIKGKGSLVVEEYETRIDGLILGDGKWKNKIDTKDFFFEKLRGKRVKRENEQQGDMREKDRGEGRVIRAASGNWGTRRAEKGAERELLIEEERR

SEQ ID NO: 200635 - protein, 94 aa, Glycine max
  Clone ID: PAT_MRT3847_2319C.1.pep
IWNFGCKNSTLFSNYCLTCFMHDCNAFQTYELDISERDIILHHSFLKFIFTDTPISMDDIDLELDEMELVAAAAGYHYYSCLTKQPLRGLSPCP

SEQ ID NO: 200636 - protein, 345 aa, Glycine max
  Clone ID: PAT_MRT3847_231C.1.pep
MMKPSMLRSLHSAATRGASHLFRRGYASEPVPERKVAVLGAAGGIGQPLSLLMKLNPLVSSLSLYDIAGTPGVAADISHINTRSEVVGYQGDEELGKALEGADVVIIPAGVPRKPGMTRDDLFNINAGIVKTLCTAIAKYCPHALVNMISNPVNSTVPIAAEVFKKAGTYDEKRLFGVTTLDVVRAKTFYAGKANVPVAGVNVPVVGGHAGITILPLFSQATPKANLDDDVIKALTKRTQDGGTEVVEAKAGKGSATLSMAYAGALFADACLKGLNGVPDVVECSFVQSTVTELPFFASKVRLGTVGVEEVLGLGHLSDFEQQGLESLKPELKSSIEKGIKFANQ

SEQ ID NO: 200637 - protein, 83 aa, Glycine max
  unsure (1)..(83): unsure at all Xaa locations
  Clone ID: PAT_MRT3847_23200C.1.pep
KKNTPLINKNHGIPISNXAYKKNNSDYPALEKKINIFDRKSLVTAFFFFHLISKFSKKLVSSLXFKPLFYFPNMAQLKKKKKK

SEQ ID NO: 200638 - protein, 88 aa, Glycine max
  Clone ID: PAT_MRT3847_23201C.1.pep
RLKSNRTLNPTLQVRYFFFSWVCFKVKQRRKNEEKHHQECCRRLDPETEKCRNGVFGVRRKSFQLETENRLSGESDRKFLAGVKKQRL

SEQ ID NO: 200639 - protein, 197 aa, Glycine max
  unsure (1)..(197): unsure at all Xaa locations
  Clone ID: PAT_MRT3847_23202C.1.pep
MAECTSTPTNSSLRLTAKVAIVTGGASGIGEATARVFAEQGARMVVIADIQDDLVNRVAASIGTHRCTYVHCDVADEEQVKYLVQTTVNAYGQIDIMFRNAGIASPSKQTVSELDMSQQLFAVNXIRGIAACVKHAARAILEGRVRGSIICTASVVGSHEVYRQFARLEGVVLTPKDVADTVLLSPMTPRLSLALIL

SEQ ID NO: 200640 - protein, 82 aa, Glycine max
  unsure (1)..(82): unsure at all Xaa locations
  Clone ID: PAT_MRT3847_23203C.1.pep
MRPSISPTTDKAINSSPRFQNHQGLESRRYSQRSPRNNNGSSTPRVCSDCNTSTTPLWRTGPXGPKSLCNACGIRQRKARKA

SEQ ID NO: 200641 - protein, 100 aa, Glycine max
  Clone ID: PAT_MRT3847_23204C.1.pep
HSSSHTTPHNCTCTKINFLLTHVLINTCIHFPHSFKIPTFIFLFIFSYQLIQLAKLISHSPYNLFSDTHNFLIHPIYTKQSLILLITHTSYHTSLIPPYK

SEQ ID NO: 200642 - protein, 144 aa, Glycine max
  Clone ID: PAT_MRT3847_23205C.1.pep
MMEPPNITNCCNSPEFEWWMLGNPSFPQPNLLSADELFVDGVLLPLHLLPNKPDPPQASNFITPIQEPDPEPEPEHSPSITESTSTTALSSSKRWKDIFKKSDKKNAENNNEEKEKVKKKERKSGSGSGASSAELNINIWPFSR

SEQ ID NO: 200643 - protein, 44 aa, Glycine max
  unsure (1)..(44): unsure at all Xaa locations
  Clone ID: PAT_MRT3847_23206C.1.pep
FSRVSLSXDYCFGAGYVDFLGIYKNLTKPCDTDWFSFSNKAFWY

SEQ ID NO: 200644 - protein, 102 aa, Glycine max
  unsure (1)..(102): unsure at all Xaa locations
  Clone ID: PAT_MRT3847_23207C.1.pep
KPSPPKPKKKHXTIFLKPQQENKPTSKKWKTEQNNGLVLNLDLRLHLTNIQYLDDSTTLKTVKSYNKVSRLATSHFFLHIKEQAVWILLLIQSWNLQKNLCP

SEQ ID NO: 200645 - protein, 42 aa, Glycine max
  Clone ID: PAT_MRT3847_23208C.1.pep
NQARWSGKSKKKKKWEVGPPFFETNRPNPIKWLPNPFPKLES

SEQ ID NO: 200646 - protein, 55 aa, Glycine max
  Clone ID: PAT_MRT3847_23209C.1.pep
YIIIFFGGSGSCYVIKFCTLIFCMCVFESMGSLSDCDWDGVYLILNINLFDCSME

SEQ ID NO: 200647 - protein, 50 aa, Glycine max
  unsure (1)..(50): unsure at all Xaa locations
  Clone ID: PAT_MRT3847_2320C.1.pep
NRWMKXFKESQIMLTMTRSSNRPLXAKLESYXVSTTKVYQGXQHPLPAXL

SEQ ID NO: 200648 - protein, 115 aa, Glycine max
  unsure (1)..(115): unsure at all Xaa locations
  Clone ID: PAT_MRT3847_23210C.1.pep
KPIVVLTRGGCTTKLVAKYRPAVPIISVVVPVLSPAPFHWTSREETPPRRSGISKGFIPKMGKGFSKASYSESPKDILXEAFKSPTKRALCKPGHPVEALHSIGNASVIKICIVK

SEQ ID NO: 200649 - protein, 56 aa, Glycine max
  Clone ID: PAT_MRT3847_23211C.1.pep
LVEKSSSASSFRRRVMQGNHSIAKDLRSDQACGPWNPLFCVLWLSLNRIALWETLI

SEQ ID NO: 200650 - protein, 125 aa, Glycine max
  Clone ID: PAT_MRT3847_23212C.1.pep
LRDAEGKDRRMEGSSPSIEEERTATFYVYHPCYFLQQALRALLKCVGIDESENTMCSQANKQEKSSLPQTPSADDPITNSPTHKSSPDAADPPSTTNQTIIIASLMATRGSRGSKISDGSGPQHN

SEQ ID NO: 200651 - protein, 156 aa, Glycine max
  unsure (1)..(156): unsure at all Xaa locations
  Clone ID: PAT_MRT3847_23213C.1.pep
LREDDRREKLKATLLQFNFKSRCDPSLFIYTDSNNXLVYMLLYVDDIIVTGNNFSIKSLVTKLNSEFSLKDLGSLDYFLGIEVRSQPNGALILTQSKYIRDLLSKTKMDEANLISSPMVSGCKLTKSGYESFPDPTHYRSVVGALQYSTITRPEIS

SEQ ID NO: 200652 - protein, 657 aa, Glycine max
  Clone ID: PAT_MRT3847_23214C.1.pep
MGAVRNIVLLLLCITVVAPIVLYTDRLGTFESPSNKQEFIEDVTAFAFSAADFSHLNLLPQETSTAVKEPVRVVYTEEDSTNKRNLPQGLQLVKSREHVFARMLSTTTEEDLAKKENPIKLVTDGIKQGNQGDASGENVNGEDAIDVDDNDGKLAKSISASTQEPEIKEQQLATETSSKINQKGSELSETNKQNDRTPSDARVKQIKDQLIQAKVYLSLPVVKSNPHLTRELRLRVKEVSRTLGEAIKDSDLPRNANERMRAMEQTLMKGKQAQDDCAAVVKKLRAMLHSSEEQLHVLKKQTLFLTQLTAKTLPKGLHCLPLRLTTEYHNMNSSHQQFPHQENLEDPHLYHYAIFSDNILATAVVVNSTVSNTKDASKHVFHIVTDRLNYAAMRMWFLGNPPGKATIQVQNIEDFTWLNASYSPVLKQLGSQSMIDYYFKAHRAASDSNLKFRNPKYLSILNHLRFYLPEIFPKLNKVLFLDDDIVVQKDLTDLWSIDLKGNVNGAVETCGESFHRFDRYLNFSNPLIAKNFDPHACGWAYGMNVFDLAEWKRQNITGVYHNWQNLNHDRQLWKLGTLPPGLITFWKRTFPLNRSWHILGLGYNPNVNQRDIEQSAVVHYNGNMKPWLEISIPKFRSYWTKYVDYDHVYLRECNINP

SEQ ID NO: 200653 - protein, 56 aa, Glycine max
  unsure (1)..(56): unsure at all Xaa locations
  Clone ID: PAT_MRT3847_23215C.1.pep
FXXRSKLMHFHSRNSNRGWRAIKNKIMELHLYIEFGICTTAWSFHLKYYCQLYFFL

SEQ ID NO: 200654 - protein, 90 aa, Glycine max
  Clone ID: PAT_MRT3847_23216C.1.pep
SHGLKSLFNLEDKVDFPAVGNDSNTSCNMSHNRPKRTTKKSIHLRDYVSHNSWRISHHISFCYYYISFYYCLLSIIHFRCNRFSVSLLVM

SEQ ID NO: 200655 - protein, 75 aa, Glycine max
  Clone ID: PAT_MRT3847_23217C.1.pep
NSDLSPSVLINKGFEFECHIHLKSMSSPYPMPQSPDLSALLHIQSIPKFKPWANDSSHSSTHHQLQTETLTLNKA

SEQ ID NO: 200656 - protein, 101 aa, Glycine max
  unsure (1)..(101): unsure at all Xaa locations
  Clone ID: PAT_MRT3847_23218C.1.pep
MALALSSTALSSLPNREIRQKGFPDRTPTCLSLTRRTVAYATKGVSAVCEPLPPDRPLWFPGSSPPEWLDGSLPGDFGFDPLGXLGSDPQLLKWIAQADLM

SEQ ID NO: 200657 - protein, 291 aa, Glycine max
  Clone ID: PAT_MRT3847_23219C.1.pep
MALALSSTALSSLPNREIRQKGFPDSTSTCFRSSALSSTAFSSLPNREIRQKGFPERTPTCLSLTRRTIANATKGVSAVCEPLPPDRPLWFPGSSPPEWLDGSLPGDFGFDPLGLGSDPELLKWFAQAELMHSRWAMLAVFGILVPELLERIGYIENFSWYDAGTREYFVDPTTLFVVQMGLMGWVEGRRWADIVNPGSVDIEPKVPHVTNPKPDVGYPGGLWFDPMMWGRGSPEPVMVLRTKEIKNGRLAMLAFVGFWFQAIYTGEGPIENLMAHLADPGHCNIFSAFTR

SEQ ID NO: 200658 - protein, 79 aa, Glycine max
  Clone ID: PAT_MRT3847_2321C.1.pep
ILFFKMRRYEKKSTKRNGLIVKTFGGNQPNISPRKMYSYIHTLSHLTFTSLVIFIIFFLYLIFCSYLSYFNPNPLQSIL

SEQ ID NO: 200659 - protein, 302 aa, Glycine max
  unsure (1)..(302): unsure at all Xaa locations
  Clone ID: PAT_MRT3847_23220C.1.pep
HTERDQDHQQWRKTLSKRRRPSSQPSSSQNSPQDSPQVPAFSNFMPFPGGYYQMIPGMYPALVPGLTLPQHEENGNRGAGIYAVPVNPYDRQITGLTYNTLIPLTYHTPSSRPSSEAAAASENQGQAGQLPQQQQPAPQTLIVVRRFQIAFQIDLFLMLKLAAVIFLFNQDGSRLSPSLLPGFPTHMXLNYILYLARFVXWHMLGMRPAAAPGPAPSPAARDEHIPAPAPEGDNASSAATILQPEIWYHPGVPVVQPVENENVAEPDNVNGGNQWWGIVKEIQMIVFGFITSLLPGFHNHMD

SEQ ID NO: 200660 - protein, 50 aa, Glycine max
  Clone ID: PAT_MRT3847_23221C.1.pep
QGHGVTYYHSEEFDRLGGDDTNKPTLINVQPFSFSYGTDFTYVCMCIVDT

SEQ ID NO: 200661 - protein, 60 aa, Glycine max
  unsure (1)..(60): unsure at all Xaa locations
  Clone ID: PAT_MRT3847_23222C.1.pep
SRSRGFYPPLDGNCASRRLVGLIRLTRVTNGTCLWGAAXPYCWLAHGRRPHASPFPWIPT

SEQ ID NO: 200662 - protein, 301 aa, Glycine max
  Clone ID: PAT_MRT3847_23223C.1.pep
MAENPSETVSSSSQPPPPPPPSSSSSSQKSPQDSPQVPALSNFMPFPSGYYYQMIPGMYPALVPGLTLPQHEEHGNRGAGIYAVPVNPYDRQVTGLPYNTLIPLTYRTPTRPSSEATVASENQGQAGQQPQQQQPAPQRQVVVRRFQIAFQIDLLLMLKLAAVIFLFNQDGSRQRLIVLVFFAALVYLYQTGALTPIIRWLSQGMQRAAAPPHPPRPAARDEHIPAPRPEGDNAAPAEGQPEAENGNQPANDADQAVENENVAEPDNVNGGNQWWGIVKEIQMIVFGFITSLLPGFHNHMD

SEQ ID NO: 200663 - protein, 127 aa, Glycine max
  unsure (1)..(127): unsure at all Xaa locations
  Clone ID: PAT_MRT3847_23224C.1.pep
RLMVLVFFAALVYLYQNXALTPIIRWLSRGMQRAAAPPHPPRPAARAENVPAPRPEGDNAAPGAGQPEAENGNQPANDADQAVENENVAEHGNVNGGNQWWGIVKEIQMIVFGFITSLLPGFHNHMD

SEQ ID NO: 200664 - protein, 790 aa, Glycine max
  Clone ID: PAT_MRT3847_23225C.1.pep
MWTTTGKRGRRLPPSSPRRAQLAQASSARPGEPGCFLQKQQLQEEYSGGPKWAWVLFAPPFLLKTYGLCINIFLVFRHVLEFHKLPNDGYQAPHKDQRKVACHQAKVPDEIRKMEIFIQSIDPDAWNSIVKGPFIPTKEMNGELVPKEWDDMKDDEKRKVQNDLKAKNILTSSLSSDEFFCTTRCKSAKEIWNMLKVTHEGIADVRRARKHTLVSEYEAFLMKNGETILELQTRKHTLEFNIQLGSTFQPAIQSPKLKFTIDTIIRKPKSSRKASMEVGSLSFNGDFPPWRCSGRQRRRGEGRHHPQGNKPWKKELHHQECALDKKLEEDALMEEKKERRGEHEIEGIKEGEKWKFEVCLIRFSFIKVTTSVTHASIYRLGLKPYTTRMAKIQGPKEEEKTYSNIYKEEWTQPWPMDSKSTLRFMRTLRPSLSALAQSSWSLLLMALSMDDSSTIEETELNFEFEEVLEALNEMHEEAQRLAMLNKKLKCDMKLHITKLASTQSELDKLKQENEKLVSKYKAIGCDSTSTSFNMDDYKSLQTEFETFKEDHYAERMKFQTEPCYLKDLFGKLNNGKSDLSHMLSVQKHTADKTGLGFDVPRGKCIWIPKDLFVKINPIEPNLNWVCLKARDSLWYLDSGCSRHMMGDKSKLTDFMSKEGGYVTFGDNNKGKIMGEGNIGNQYKTQIKNVLYVDELKHNLLSISQLCDKGFKIEFNKNFCLTSEAMLCDVVHIGKRIVCDETNSIVQDNSLEEEDAGFQEKDSALEDDIKPEELEQRKEISIRMPKEFPRE

SEQ ID NO: 200665 - protein, 112 aa, Glycine max
  unsure (1)..(112): unsure at all Xaa locations
  Clone ID: PAT_MRT3847_23226C.1.pep
LSPFXAVVFCCRFSRASAXVLSRPLSFCCPCXFLSXGPWGVXVGAPXLPSSWPXMCLPVSAVSPGSFLLSVXLAXLVSGAAACGVPSAGRGLRLFPALRSGPLCSRFVGITE

SEQ ID NO: 200666 - protein, 58 aa, Glycine max
  Clone ID: PAT_MRT3847_23227C.1.pep
SRKEKIHATFSPPQRLIHIPYKVFVLFMSLLIYGGNTLLNVKFVVILLLLISTLYLIG

SEQ ID NO: 200667 - protein, 85 aa, Glycine max
  Clone ID: PAT_MRT3847_23228C.1.pep
AWCFKPHWLSYFYHWPYHSRSVRLPTSHLRPHTGLHLYPFSRIRLSLIMGVEDTLFLGACPKLGPRSSMPPSASPPPHPPPPPPP

SEQ ID NO: 200668 - protein, 171 aa, Glycine max
  unsure (1)..(171): unsure at all Xaa locations
  Clone ID: PAT_MRT3847_23229C.1.pep
MSMLASPFQLLELNIISAQDLAPVSKSIKAYAVAWLNPERKLTTQIDPNGQNNPTWNEKFVFRVDDDFLTSDESLIIIEIYASAWLRDILIGTVTVLASNLLPRSINTRKSKIRFVALQVRRPSGRPQGILNIGVNLVDSTMRSMPMYSELSAXRCGYWDVMDPKKPKLQQ

SEQ ID NO: 200669 - protein, 240 aa, Glycine max
  Clone ID: PAT_MRT3847_2322C.1.pep
VEMISCMRPNIWATLADEVPAWVTDKRNKTSVDRTVRWLDDCLALNPVVGSVFGAIVGGTNLDERKRCAEEVAKRNVSGYWIGGFGLGEGIDERPALLSAIIDLLPDEKPRMISGLGLPEEILEGIDAGIDLFDSTYIYSLTLGGFALTFSLDKGGNQYNFQKSQIGSDLTKINLRAKVYRKDMSPILGNCICYTCQNHTKAYINHLFNVHEMLAQILLEIHNTHHYLTFFHVIRESIKD

SEQ ID NO: 200670 - protein, 77 aa, Glycine max
  Clone ID: PAT_MRT3847_23230C.1.pep
HSPRILIYTLYTQCSLTPLLLHGPQHSETHRDTDDGMLARHYAILLRAGQRSRSLLAMHYFARRACRIWSHSVWSIT

SEQ ID NO: 200671 - protein, 107 aa, Glycine max
  Clone ID: PAT_MRT3847_23231C.1.pep
RFNFPYSESINEYAKLLGELVHMAKRMVFESYGVDMQRCDSFIESNDYLLRCMKYRTPQMDENDLGLQPHSDLTITSIVHQLNNLNGLEIKLKDGEWKEIDASPSLF

SEQ ID NO: 200672 - protein, 31 aa, Glycine max
  Clone ID: PAT_MRT3847_23232C.1.pep
VFLRHQARPQIPQLFIGFVCLRQGFLLARFN

SEQ ID NO: 200673 - protein, 87 aa, Glycine max
  Clone ID: PAT_MRT3847_23233C.1.pep
FIFLSRPQVSFNNHILMSKLACDCIFLLFFFFMVVGVKLQFSKVNFSIEWFMGCEEHTIWDGLSSIKYVYVFISAAFALICGKLGRT

SEQ ID NO: 200674 - protein, 67 aa, Glycine max
  Clone ID: PAT_MRT3847_23234C.1.pep
PLERQRIIIDPDLQLYIIHLLRTHSRIRVLYYQKQIVPYKKDAEYYVLGSCLEGNWYSDMLPSISMF

SEQ ID NO: 200675 - protein, 50 aa, Glycine max
  Clone ID: PAT_MRT3847_23235C.1.pep
ITVKAAESVDSSCIFISFLRRNSNIQSRIKLYTVHHYYIHARASSSVNVY

SEQ ID NO: 200676 - protein, 61 aa, Glycine max
  unsure (1)..(61): unsure at all Xaa locations
  Clone ID: PAT_MRT3847_23236C.1.pep
SRADSARGESFFNFFTPPEVHEDDDDIAEDAVEELQNLMERXYDMXVSTIRDKIIPHAFMV

SEQ ID NO: 200677 - protein, 76 aa, Glycine max
  Clone ID: PAT_MRT3847_23237C.1.pep
MHAIRMLMTVHMILQYQFRKLTLLCQPPFHMPRAITVDIGFDQSVKHPTSHIPFACRLHPTHPNPLIRIEYMSLEF

SEQ ID NO: 200678 - protein, 49 aa, Glycine max
  Clone ID: PAT_MRT3847_23238C.1.pep
LGRLSGVVENCFSGGFKTERLGLLLTVKQRQSSHPRGHLHFTIFYNHRE

SEQ ID NO: 200679 - protein, 79 aa, Glycine max
  Clone ID: PAT_MRT3847_23239C.1.pep
YYLFSFLKSHTRSTKTTKVTSEYHRVSILKPKHITMQQHSQTLFATFTIIFFAFFFPSTFSFTLTQAKERNKNKTNKST

SEQ ID NO: 200680 - protein, 46 aa, Glycine max
  Clone ID: PAT_MRT3847_2323C.1.pep
LTYHYFTLFFGFQCSFGVTERRYFILTKTTVFYYSNDRWKFISFFD

SEQ ID NO: 200681 - protein, 86 aa, Glycine max
  Clone ID: PAT_MRT3847_23240C.1.pep
IIVLNVGMGDTDNPKAETFPATPAASVATAQLEIAAMRATSKLQFQTQTILTKLNLSTKPSVSQCMLCEPLCKQIWDMPLWSVLPP

SEQ ID NO: 200682 - protein, 51 aa, Glycine max
  Clone ID: PAT_MRT3847_23241C.1.pep
TAARRRQKGFLSRIKLNKEFNIRGQRVILPSFFWQKDYYMSQIRMLKFIDV

SEQ ID NO: 200683 - protein, 69 aa, Glycine max
  unsure (1)..(69): unsure at all Xaa locations
  Clone ID: PAT_MRT3847_23242C.1.pep
KQSFSYWDGSFPVDYGFDLLELSDPEGPGGFMDPNGLAXGGIFNGRYPRLVAVGAIALEFLARVGLFLK

SEQ ID NO: 200684 - protein, 72 aa, Glycine max
  Clone ID: PAT_MRT3847_23243C.1.pep
PNRKSDTYGSMKQGQYLYIMVDLKSRMLRWLVRGLSRCTSQSLKCVQSPLKMSAVIVTPPETNLSTVVTQYH

SEQ ID NO: 200685 - protein, 127 aa, Glycine max
  Clone ID: PAT_MRT3847_23244C.1.pep
ALVNEVFEILVDPRLGKNYDRNEMFRMIEAAAACVRHSSVKRPRMSQVVRALDSLDEFTDLNNGMKPGQSSVFDSAQQSAQIRMFRRMAFGSQDSSSFFNESQSSWRSRDHNSNTMFSQNKTGPWNV

SEQ ID NO: 200686 - protein, 38 aa, Glycine max
  Clone ID: PAT_MRT3847_23245C.1.pep
SKYLYNYLSELIKISYDRFINCFQLIFNNKLMIITRKK

SEQ ID NO: 200687 - protein, 40 aa, Glycine max
  Clone ID: PAT_MRT3847_23246C.1.pep
MPPLSIHMCFPYNLIAILSHLHPCPRTRRLTSYLCEGLWG

SEQ ID NO: 200688 - protein, 756 aa, Glycine max
  Clone ID: PAT_MRT3847_23247C.1.pep
MASANPSPNASPVAVPPALGAILSPPPSSSSPTNTSTPPSPPSSSQPNQTQTQTQTPNSPAPSSPSDPSAPPPSPPQAVPLTPPPSISLSPPPSSTPPPTLPPPSPPDSPPPLPPASPTPPVTTSPPSPPVTTSPPSPPATTSPPPAETPPSLPNLSPPSPPAGSPPPQSPPTTIPPPSRPISPSPPPPANFPRPPTTRTPPEKENPPKTTPSHASPPSVSETPPKPPSSDVPPPSTLPSTPPSDPSGSSPPASLPDPPTNKTVVGGPKVSLPSLPTEKPTARPTNDGTNSMSSNNTPSHSGGLSTGGSVAIGIVVGFIVLSLLVMAVWFAQKKKKKGTGSRGSYAAPSPFTSSHNSGTLFLRPQSPANFLGSGSGSDFVYSPSEPGGVSSSRSWFTYEELIQATNGFSAQNLLGEGGFGCVYKGLLIDGREVAVKQLKIGGGQGEREFRAEVEIISRVHHRHLVSLVGYCISEHQRLLVYDYVPNDTLHYHLHGENRPVLDWPTRVKVAAGAARGIAYLHEDCHPRIIHRDIKSSNILLDLNYEAQVSDFGLAKLALDSNTHVTTRVMGTFGYMAPEYATSGKLTEKSDVYSFGVVLLELITGRKPVDASQPIGDESLVEWARPLLTEALDNEDFEILVDPRLGKNYDRNEMFRMIEAAAACVRHSSVKRPRMSQVVRALDSLDEFTDLNNGMKPGQSSVFDSAQQSAQIRMFRRMAFGSQDSSGFFNESQSSWRSRDHDPTTVFSQNKTGHGNV

SEQ ID NO: 200689 - protein, 138 aa, Glycine max
  Clone ID: PAT_MRT3847_23248C.1.pep
MGYQPLEKGKPKHKKGLWSPEEDNKLRNHILKHGHGCWSSVPIKAGLQRNGKSCRLRWINYLRPGLKRGKFSKQEEETILTLHHMLGNKWARMSQPLPAWSVFESFTFWRSLLRKRVALALAVESLDQVLSASSSSDT

SEQ ID NO: 200690 - protein, 64 aa, Glycine max
  unsure (1)..(64): unsure at all Xaa locations
  Clone ID: PAT_MRT3847_23249C.1.pep
EMRWSGVGIDXWWRNEQFFVFCCFSSHLFAVFQGLLKVLAXIDTNFTFNLLVFYEDVVFVFLFM

SEQ ID NO: 200691 - protein, 89 aa, Glycine max
  unsure (1)..(89): unsure at all Xaa locations
  Clone ID: PAT_MRT3847_2324C.1.pep
RGSFSGKDYQDPPPAPLIDAEELTKWSFYRALIAEFIATLVFLXIMVSQVLGNSHKRVLVMRFVGVGILGIAWAFGGMIFILVYCTAGI

SEQ ID NO: 200692 - protein, 80 aa, Glycine max
  Clone ID: PAT_MRT3847_23250C.1.pep
VLKEIGDYRFSQLYQELLLDQSGGANSTVLHMKPSFADKPILLLLSLIVFTKETFLSPKNSQEKQHCRNAMPSTTPCDTQ

SEQ ID NO: 200693 - protein, 73 aa, Glycine max
  Clone ID: PAT_MRT3847_23251C.1.pep
CLPTTSSNDKRKINVLNAAISRTQSPPQILPSIPKHGVPNPIIGLLGPCPNTWWCLIHTYSWLHCQGPGKMHS

SEQ ID NO: 200694 - protein, 97 aa, Glycine max
  Clone ID: PAT_MRT3847_23252C.1.pep
HTTPHYTTLHCTYPVSESSCESRTPGIFGYLKLLHSIFSSPCPRVITPPPTTTSTTRLGNEVVPHLPLPLWSEDTVSREPFWLGRKKVKFSSSHVKD

SEQ ID NO: 200695 - protein, 170 aa, Glycine max
  Clone ID: PAT_MRT3847_23253C.1.pep
LARGELRCIGATTLDEYREHVEKDKAFERRFQQVLVNEPSVPDTVSILRGVKERYEAHHGVQIMDSALVAAAKLADRYIKGRFMPDKAIDIIDEACANVRVQLDSQPEAIDELERRQLQLQVEATALAKEKDELSKQRLQKVQEELNKIQDELSPLVLRHEAEKARVNEI

SEQ ID NO: 200696 - protein, 72 aa, Glycine max
  Clone ID: PAT_MRT3847_23254C.1.pep
NNKGLLCLMFENHGVKFVICIKTQRGHMCNYVIKGNSQFQLLKLNMTSIWVWVSQKVVSSKSKEFLCNLSKM

SEQ ID NO: 200697 - protein, 122 aa, Glycine max
  Clone ID: PAT_MRT3847_23255C.1.pep
IRLEDDENATQIRSENEAKAAAKKIFQNVARRGCRYIYPDDLMRFMREDEAAKTMNLFEGASEAERISKSALKNWMVNAFRERRALALTLNDTKTAVNKLHRMLNFIVAIVILLIWLLILEL

SEQ ID NO: 200698 - protein, 35 aa, Glycine max
  Clone ID: PAT_MRT3847_23256C.1.pep
KVGFRGRAINWGRFRCLRKFAATSLSLCVCVRLLL

SEQ ID NO: 200699 - protein, 172 aa, Glycine max
  Clone ID: PAT_MRT3847_23257C.1.pep
QTSAWLLLVEVEPIHLGKRSLQNSGSEGDRDIMEQRKRKRMLSNRESARRSRMRKQQHLEGLSAQLDQLKKENTQMNTNIGISTQLYLNVEAENAILRAQMEELSKRLNSLNEMISLINSTTTTNNCLMFDEAQETTTQLFNDCGFMDAWNYGIPLNQQIMAYADNDMLMMY

SEQ ID NO: 200700 - protein, 122 aa, Glycine max
  Clone ID: PAT_MRT3847_23258C.1.pep
MASPGGSGTYSSGSSSLQNSGSEGDRDIMEQRKRKRMLSNRESARRSRMRKQQHLEGLSAQLDQLKKENTQMNTNIGISTQLYLNVEAENAILRAQMGELSKRLNSLNEMISFINSPTTTTA

SEQ ID NO: 200701 - protein, 197 aa, Glycine max
  unsure (1)..(197): unsure at all Xaa locations
  Clone ID: PAT_MRT3847_23259C.1.pep
TLTGDSIALGVESCDTIDEVKVMILDKEGFPPDQLRLILCGXHLEDGRTLADYNIQKDSTLHLELQVRDGMQIYLNTLAGWTMTLEVESFDSVDSCEARIHDRDGIRPDQQRVIFSGKHLEDGRTLADYIIQKESTLHLVLRLRGGMHIFVKTLSRKTITLXVESSDTIDNVMAKIHDMEGILSDHEELIFAWKQLE

SEQ ID NO: 200702 - protein, 73 aa, Glycine max
  Clone ID: PAT_MRT3847_2325C.1.pep
GKNTSLGTVSAEPVQVSVLKPHLDTRTPTRIFPIAILPLSEASKHAVSFKKEKKEYSTLEHHVLFVTVPRFTY

SEQ ID NO: 200703 - protein, 185 aa, Glycine max
  unsure (1)..(185): unsure at all Xaa locations
  Clone ID: PAT_MRT3847_23260C.1.pep
PRVRSNSLIITTLFLLFNPFSFSFFGYHVLTSFTKLGFTLIANELKDVTKDPATYCSARAVAADMSHMTGNTHXPCESTYTVGVYIAARHSPTDDTLKHTKDALRXLKIXHPNMNRCASIWLDILDQQXIPNANSSVTSILSICXLTTDPNPDDTMVPEIAHMCKTDRANYKATXCSWTQNYAMG

SEQ ID NO: 200704 - protein, 56 aa, Glycine max
  Clone ID: PAT_MRT3847_23261C.1.pep
TLFKAISNNRRVSNGVFYSHVSYHFNTHTNTDPPWFAWNKGGLNILKENEKLKYIN

SEQ ID NO: 200705 - protein, 65 aa, Glycine max
  Clone ID: PAT_MRT3847_23262C.1.pep
NYLPQATTNTKHEMMIFTKSYNFKLTMKLRHFNKQRKFKSPSAYPNGAPSNSFPIGDSTLLHWLH

SEQ ID NO: 200706 - protein, 88 aa, Glycine max
  unsure (1)..(88): unsure at all Xaa locations
  Clone ID: PAT_MRT3847_23263C.1.pep
SNASCLKHIAIAFIILYCMADISLPLMLXLRHSLRTDRTLFDTANDLYVCFILATGCSHMLFYASNALIHPYLPAIPWSKFPFTGDFT

SEQ ID NO: 200707 - protein, 42 aa, Glycine max
  Clone ID: PAT_MRT3847_23264C.1.pep
ALWSYVLNVHAFIVRLSHFNGKYNIITAQLSTVVGTFRFHES

SEQ ID NO: 200708 - protein, 74 aa, Glycine max
  Clone ID: PAT_MRT3847_23265C.1.pep
NKYFREKKEFIFQPHTATRFVGGHVRPLFDFKNKWPIKRSQPFLFLTRPVFAQRHFLIIFKKTSPNRANSPQDI

SEQ ID NO: 200709 - protein, 39 aa, Glycine max
  Clone ID: PAT_MRT3847_23266C.1.pep
IHTSSHHLFYNKSAYQSIDAYFRIIGYRDDVGQMDSMVQ

SEQ ID NO: 200710 - protein, 42 aa, Glycine max
  Clone ID: PAT_MRT3847_23267C.1.pep
KPSDHEPVWTNCRAQPGISGKELQSEVHHVARDVKESRCQIQ

SEQ ID NO: 200711 - protein, 104 aa, Glycine max
  Clone ID: PAT_MRT3847_23268C.1.pep
GEFWVAIHCRRGLYARLMSRHVKLRKFLLSLPIPAKYHYLMQIGGRLHALIIKYSPEGQVLDILEDTKGEVVRAVSEVEEKDGKLWIGSVLMPFIAVFDLAKAS

SEQ ID NO: 200712 - protein, 64 aa, Glycine max
  unsure (1)..(64): unsure at all Xaa locations
  Clone ID: PAT_MRT3847_23269C.1.pep
KXDPFRAALFFFSLFVLTHAHKGKYEALFTSGKIFSRAQGATCKFHTFTLLGLHILIKTMVWPL

SEQ ID NO: 200713 - protein, 61 aa, Glycine max
  Clone ID: PAT_MRT3847_2326C.1.pep
ICKLKLCYREKFFQYLKSFNPISFKFSFNSQFFAPKSLTEYSFFPWEVKTCGTDRVYMDQT

SEQ ID NO: 200714 - protein, 57 aa, Glycine max
  Clone ID: PAT_MRT3847_23270C.1.pep
PDETKDILFVLNGDSTLVKQTRSPLSWHQAPLYIFIGNDRNKRNHLTMTPNVQIPPW

SEQ ID NO: 200715 - protein, 61 aa, Glycine max
  Clone ID: PAT_MRT3847_23271C.1.pep
GGGPDYIFICRGGETIYSPIFYPPFVNPAHLFFCPPRKWPFKFEKPKNNPWKRGGSLNFYF

SEQ ID NO: 200716 - protein, 69 aa, Glycine max
  Clone ID: PAT_MRT3847_23272C.1.pep
NQHPSFSSILQFYYHHNSIHYHIIPLQINTIYSPLLINKSQLIFLLTQHIFSLKHSLNFFYTTKYYIHC

SEQ ID NO: 200717 - protein, 87 aa, Glycine max
  Clone ID: PAT_MRT3847_23273C.1.pep
APRFSKQGTFLSLKDLLTFEKKHTHLSVLISNTNRYVTLSPESFNLLKKPPKNAFKIKMTSEKVVPMFRHVFHHPQCQFKCSPWVAR

SEQ ID NO: 200718 - protein, 78 aa, Glycine max
  Clone ID: PAT_MRT3847_23274C.1.pep
MFEGLCLKMEKRGNVLMEKYEFGKLLGQGNFAKVYHARDVRTGESVAVKVIDKEKILKIGLVDQTKREISIMRLVKHP

SEQ ID NO: 200719 - protein, 131 aa, Glycine max
  Clone ID: PAT_MRT3847_23275C.1.pep
ARNLSLSRICLPLKKNTPPAISVLISNTIDTLLFHLSPLISSRSHQKTHLRSKWLQRRWSQCSDTYFITPSVNSNALPFEGTRRALKRRDRTLDTDQNPQCCSKQQVSLVVIKEFLWYSYVVRYKDESSLS

SEQ ID NO: 200720 - protein, 45 aa, Glycine max
  Clone ID: PAT_MRT3847_23276C.1.pep
KLDKKTLHWLLYSPMKCLWELEQVREFQKKIDGMNSSVTEERQSS

SEQ ID NO: 200721 - protein, 123 aa, Glycine max
  unsure (1)..(123): unsure at all Xaa locations
  Clone ID: PAT_MRT3847_23277C.1.pep
GGAPLLGILYLIHAQRILFICATQGNQMDATIYDNIADKPLDDVTDPIYPRVSFDPLGLDDDPXTYAELXVKELQNXLSLMFSKYGCSVHGIVHGTVPLENLADHLAETVYNIICSYTNNFGP

SEQ ID NO: 200722 - protein, 107 aa, Glycine max
  unsure (1)..(107): unsure at all Xaa locations
  Clone ID: PAT_MRT3847_23278C.1.pep
IIQKKSIIDTNGIRXLGVHRQTLDFRSQVRSVHDHGILVYQTPRAASQNVLLMNCSIDPISIYMKKKSSDGGDSYLYKMVLPTLERVLKKITILLYPFEVVLAGSGR

SEQ ID NO: 200723 - protein, 35 aa, Glycine max
  Clone ID: PAT_MRT3847_23279C.1.pep
STILGTTFWKRFSLLRDAGNAGVPVGNVASAFISV

SEQ ID NO: 200724 - protein, 54 aa, Glycine max
  Clone ID: PAT_MRT3847_2327C.1.pep
SKEKIAIINCSSPTYIWFSVTLLGSFWERHWRMSRFILLVKDEGGKGFNIPVVG

SEQ ID NO: 200725 - protein, 132 aa, Glycine max
  Clone ID: PAT_MRT3847_23280C.1.pep
VPRSLPWPPQDSSKVTQNAIWVYYLQMEKQKMKRAREGDDETQNAKKRDACGMKDVKKEEGCSSEALGVFDFPWLKDGVTSKSEDYLLDFEDNFSSLLEQEDSSFQAATSSIHFSSEAKLENLAWQPFESEC

SEQ ID NO: 200726 - protein, 128 aa, Glycine max
  Clone ID: PAT_MRT3847_23281C.1.pep
CTERRMRRRMRIRKTRQAYGKNEDNEDWISEREVDGETEDDGDMISERKRNIREVDADVQDRVIKYALLHNVQKLKMNINSTTYRPNFKSLPLIFRSQSLTSLELSNKLSPSRLKLPKSLCLPALKSL

SEQ ID NO: 200727 - protein, 160 aa, Glycine max
  unsure (1)..(160): unsure at all Xaa locations
  Clone ID: PAT_MRT3847_23282C.1.pep
KKKKKKNKKYKKNKKKKKKXKKKKNKKNKKKKNIKKKKKKKNKKXKIKKKKTKINXKNKIKKKKKKKKKNKKIKKKIKKKKKYKKKKKKHKKKXKKIKKIKKYKKIKTNKTKKKKKKKKKKKKNKKXIKKKKKKKXNKYIKXKKKNNKNKXXXXXXXXKQ

SEQ ID NO: 200728 - protein, 54 aa, Glycine max
  Clone ID: PAT_MRT3847_23283C.1.pep
LIFVLFYVDVISPFGRRLRESRAKLLVYIWCVEMMIIIITLVSLIMFIGVEFSS

SEQ ID NO: 200729 - protein, 64 aa, Glycine max
  Clone ID: PAT_MRT3847_23284C.1.pep
PGAAVTLCHGDLLVMGPGPETAFCDLQGLGYMRHPFPIPSRSVEPMGNGVRRPSKYCTAQPSPH

SEQ ID NO: 200730 - protein, 261 aa, Glycine max
  unsure (1)..(261): unsure at all Xaa locations
  Clone ID: PAT_MRT3847_23285C.1.pep
MKVPSSVEFATTTISHLPLYITPQLLYLDAHNYTALENHQRIIIPIKMKPYLRPVFLLFLILLDQSISASAGNFFDSLKKLFGPALAKIPSKKEDLKKAEKAKEWIEKVKDGVELGIENAPPSPPNEPPKQINIKGLSVVKDYLSEYGYIESSRPFNNSFDQETMSAIKTYQKFSNLKVTGVPNKQLIQQMLSLRCGVPDVNFDYNFTDDNTSYPKTGHRXWFPNRNLTYRFLPENQIPDNMTKVVRDSFGEGXPQASGDF

SEQ ID NO: 200731 - protein, 191 aa, Glycine max
  unsure (1)..(191): unsure at all Xaa locations
  Clone ID: PAT_MRT3847_23286C.1.pep
ENQIPDNMTXVFRDSFARWAQVSGSLSLTETTYDNADIQVGLYNFTALRIEVEVYGGSLIFLQPDSSKKGVVLMDGNMGWLLPSENATLSKDDGVLDLETVAMHQIGHLLGLDHSHKEDSVMYPYILSSQQRKVQLSNSDKANIHLQFAKHDSDLTSLPNSHDSASHGGRLDVLLVTTFSLGFAYLLLLLY

SEQ ID NO: 200732 - protein, 97 aa, Glycine max
  Clone ID: PAT_MRT3847_23287C.1.pep
SENASLSKNDRVLDLETVAMHQIGHLLGLDHSPKKDSVMYPYILSSQSQQRKVQLSDSDKANIHLQFANSASHGGCLDVLLVTTFSLGFAYLLLLLY

SEQ ID NO: 200733 - protein, 70 aa, Glycine max
  Clone ID: PAT_MRT3847_23288C.1.pep
LHAVVVKVVKVYKAADFVEDSPKKYPLLRARAEVEERESGMGFPHRLKEDSPSWLGKSFLLFKENYSLGA

SEQ ID NO: 200734 - protein, 209 aa, Glycine max
  unsure (1)..(209): unsure at all Xaa locations
  Clone ID: PAT_MRT3847_23289C.1.pep
MKPYLRAIFLLFLILPSARWGEAKIDRKTITMFWGKVKDATIKNFPSRDERKKLREYYEKFREFMDRVEQKTTPPPPPMYRLQPKSPPPPPNAPPKQINIKGLSVVKDYLSDYGYIESSGPFNDSFDQEIISAIKTYQNFSNLNVTGDLNKQLIQQILSIRCGVPDVNFDYNFTDDNTSYPXAGHRWFPNRNLNYGFXLAVNQIPDNMT

SEQ ID NO: 200735 - protein, 54 aa, Glycine max
  Clone ID: PAT_MRT3847_2328C.1.pep
SGWTTPSVHLLRTKRGNFFYVYLSKEGGGYKHGVPLFKILSFRFNNLLSKVVLY

SEQ ID NO: 200736 - protein, 66 aa, Glycine max
  Clone ID: PAT_MRT3847_23290C.1.pep
HGVCFLWLLIVAFSSVGLAVAVPGQRQQHRILALPGRPRVAFSRFSGYVAVNDQRGRALFYWLTES

SEQ ID NO: 200737 - protein, 116 aa, Glycine max
  unsure (1)..(116): unsure at all Xaa locations
  Clone ID: PAT_MRT3847_23291C.1.pep
MYRLQLKSDPPPPMYRLQPKSPPPLPNAPPKQINIKGLSVVKDYLSDYGYIESSGPFNDSFDQEIISAIKTYQKFSNLQVTGGLNKQLIQQMLSIRCGVPDVNXDYNFHRRHISYP

SEQ ID NO: 200738 - protein, 39 aa, Glycine max
  Clone ID: PAT_MRT3847_23292C.1.pep
AHSDALATLSPTEPGSIKCSASHLRRLRSVVAAMSRASS

SEQ ID NO: 200739 - protein, 420 aa, Glycine max
  unsure (1)..(420): unsure at all Xaa locations
  Clone ID: PAT_MRT3847_23293C.1.pep
MKPYLRPIFLLFLILLDQSTSASASNSRFIEFFSKLKNSFNPKSEELKSKDIKKLPSVEFLKKKHDGVKDFSQEAILKLPIIHWPFPIPKIPKNFWKPKSQKPKHPPPPPDYRVQLKSDPPAPNAPPKQINIKGLSVVKNYLSDYGYIESSGPFNDSFDQEIISAIKTYQNFSNLNVTGDLNKQLIQQMLSIRCGVPDVNFDYNFTDDNISYPKAGHRWFPNRNLTYGFLPENQIPDNMTKVFRDSFARWAQASGTLSLTETTYDNADIQVGFDNFTNSRIEVYGGSLIFLQPDSSKKGVVLLNGNMGWLLPSENATLSKDDGVLDLETAAMHQIGHLLGLDHSHKEDSVMYPYILSSQQRKVQLSNSDKANIHLQFAKHDXGCSLLPNSHDSASHGGGLDVLLVTTFSLGFAYVLLLLY

SEQ ID NO: 200740 - protein, 103 aa, Glycine max
  unsure (1)..(103): unsure at all Xaa locations
  Clone ID: PAT_MRT3847_23294C.1.pep
AFPRKDPTTADSXGAYLVRHATMIVVALGLCRTCIVRVYYAIGXVPEPLSLYRGHLMGAXNIPVLEILHIREGELRLXPGLITSNSNLKRGEHSFLKTAAYGH

SEQ ID NO: 200741 - protein, 56 aa, Glycine max
  Clone ID: PAT_MRT3847_23295C.1.pep
EIHRYLGQRTSQYRGVTRHRWTGRYEAHLWDNSCKKEGQGRKGRQVYLGKIFQIQD

SEQ ID NO: 200742 - protein, 169 aa, Glycine max
  unsure (1)..(169): unsure at all Xaa locations
  Clone ID: PAT_MRT3847_23296C.1.pep
LLQNDLYLMAXLSRCKSKPRENPNSSSSMTRGTNTGKKGPQASTALPVLPPTAFAAQLTTLTQDIQLLAMHSSSKGPPRLIRSALLLLIILWELLGPLKLACASIGMNGQYSNFDQRQLWELPDFTLLQTFTDRDSKVPRSGTMRSVGSGPCAFLVLSLAPGPGSFSPR

SEQ ID NO: 200743 - protein, 76 aa, Glycine max
  Clone ID: PAT_MRT3847_23297C.1.pep
ESLVLISMNSDPPPSNSRSLPHKLTNGVIITSILINLYALFCAPPLPVQSLPSTPTFYHCPAPKETFSTIPLKKTK

SEQ ID NO: 200744 - protein, 51 aa, Glycine max
  Clone ID: PAT_MRT3847_23298C.1.pep
KCMVFERNFWSKNGNQEREGIDGLNSIAFDICDSFSNHFLNSMQPSFNSID

SEQ ID NO: 200745 - protein, 160 aa, Glycine max
  unsure (1)..(160): unsure at all Xaa locations
  Clone ID: PAT_MRT3847_23299C.1.pep
TILSVEVCRDAETNESKGCGYVTLGSIYSARNAVAALDGSDVGGRELRVRFSIEMNSKRRSXIIMNSSTTRISYYESPHKLYVGNLAKTVRPEQLRDLFSRFGNVVSARVLHDFKQGNSRVYAFLSFQSEAERDAAMSLNGTEYYGRTLIVKEGVERSED

SEQ ID NO: 200746 - protein, 55 aa, Glycine max
  Clone ID: PAT_MRT3847_2329C.1.pep
SNELGKDQCSLKMPKVVYSKEVTQLGSAEIIEAQFQPQIYMTSSGRESYMEASNL

SEQ ID NO: 200747 - protein, 62 aa, Glycine max
  Clone ID: PAT_MRT3847_232C.1.pep
ILKIEDLINRLGGISVDPSRRSYTNHLLSTLIYLFFCTRTVTVKKGTSEEWRQDLSRSSSEP

SEQ ID NO: 200748 - protein, 64 aa, Glycine max
  Clone ID: PAT_MRT3847_23300C.1.pep
ACCKWFKIVNSSGGHTSNSAIKILFSLNPKNCWGCVQSTLKVKLINLYQLDKHGGPFLRVTLKI

SEQ ID NO: 200749 - protein, 81 aa, Glycine max
  Clone ID: PAT_MRT3847_23301C.1.pep
ITLSLQRGEPPPQTILHTMETYRPQARGVPYRAGCKTTRNFLFTPWSQIEALSPQWFISPIEVIVLYLANHCFIFPAYTRT

SEQ ID NO: 200750 - protein, 61 aa, Glycine max
  Clone ID: PAT_MRT3847_23302C.1.pep
GTQHALDPLGVVKDRISILGKANDFIKLEWRPRLFFTISGEVDTRVIYKSAKVGLGLALNP

SEQ ID NO: 200751 - protein, 41 aa, Glycine max
  Clone ID: PAT_MRT3847_23303C.1.pep
ISNQGGNGEILARGHSRVPVYSGNPKNIIGLLLVGFKSSSF

SEQ ID NO: 200752 - protein, 99 aa, Glycine max
  Clone ID: PAT_MRT3847_23304C.1.pep
MTSVKLTTPQTGEFEQPTGLFINNEFVKAVDGKTFDVINPSTEEVICSVQEATEKDVDIAVAAARKAFNGPWRKETPENRGKLLNKLADLFEKNADLIA

SEQ ID NO: 200753 - protein, 72 aa, Glycine max
  Clone ID: PAT_MRT3847_23305C.1.pep
FEIGLSLVLQSMLACNSLNLRIDEINMVELLPHLCGVARWLGGCCPRQPESERGGYIMQFWQDYLCYIGRVC

SEQ ID NO: 200754 - protein, 45 aa, Glycine max
  Clone ID: PAT_MRT3847_23306C.1.pep
IKGFQPLLLMRVVLIPFLCVKTTPELFTLKVLLPYLFNSPDSYLK

SEQ ID NO: 200755 - protein, 48 aa, Glycine max
  Clone ID: PAT_MRT3847_23307C.1.pep
EFPGRPTRPDNIWNLEFYKCHLCISVMINSHFTKEHCQNFFIEYILIG

SEQ ID NO: 200756 - protein, 65 aa, Glycine max
  Clone ID: PAT_MRT3847_23308C.1.pep
SSPQTLMRGGGLAHVNVPRRPPAATNYTPDDSPRLAWSALLLAGCPPDPLPSKACPGHGPARECP

SEQ ID NO: 200757 - protein, 72 aa, Glycine max
  Clone ID: PAT_MRT3847_23309C.1.pep
VFYLPCGHMIHFFIGCSPRPLFRIVGLIALRVRQRRGFLVFAMGVSCMVLFKKINQNPFIFLVNPTFYHLFW

SEQ ID NO: 200758 - protein, 60 aa, Glycine max
  Clone ID: PAT_MRT3847_2330C.1.pep
LIDRAIGNDICLLDCCDISVCILPRSKSDHHPLLMMLEQQDHTNLVLLNFSKFDLLIVTT

SEQ ID NO: 200759 - protein, 93 aa, Glycine max
  unsure (1)..(93): unsure at all Xaa locations
  Clone ID: PAT_MRT3847_23310C.1.pep
MCLIPRVFGGRRSNVLDPLSLHVRDPTKDLSLTTILSAEKSAFESTRVDCKETPEAHVYKADIPGLNNEEVXCRFNXDRILQIILERNVEKED

SEQ ID NO: 200760 - protein, 69 aa, Glycine max
  Clone ID: PAT_MRT3847_23311C.1.pep
LSEHKIQILPEGSRTFIRQRNLISNKSFQINSVISSRYGFRDSFRSPEYEVFRFSDPLCSKGEKQIGPR

SEQ ID NO: 200761 - protein, 42 aa, Glycine max
  Clone ID: PAT_MRT3847_23312C.1.pep
AVAPTSSTPLPSQVIIGYSPRSHGSPFILSATYQASSFSGAI

SEQ ID NO: 200762 - protein, 244 aa, Glycine max
  unsure (1)..(244): unsure at all Xaa locations
  Clone ID: PAT_MRT3847_23313C.1.pep
MSSLSRELVFLILQFLDEEKFKETVHKLEQESGFFFNMKYFEDEVHNGNWDEVEKYLSGFTKVDDNRYSMKIFFEIRKQKYLEALDKHDRSKAVEILVKDLKVFATFNEELXKEITQLLTLEKFRXENEQLSKYGDTKSARAIMLVELKKVIEANPLFRDKLQFPNLKNSRLRTLINQSLNWQHQLCKNPRPNPDIKTLFVDHSCGQPNGARAPSPANNPLLGSLPKAGGFPPLGAHGPFQPTP

SEQ ID NO: 200763 - protein, 285 aa, Glycine max
  unsure (1)..(285): unsure at all Xaa locations
  Clone ID: PAT_MRT3847_23314C.1.pep
MSSLSRELVFLILQFLDEEKFKETVHKLEQESGFFFNMKYFEDEVHNGNWDEVEKYLSGFTKVDDNRYSMKIFFEIRKQKYLEALDKHDRSKAVEILVKDLKVFATFNEELFKEITQLLTLENFRENEQLSKYGDTKSARAIMLVELKKLIEANPLFRDKLQFPNLKNSRLRTLINQSLNWQHQLCKNPRPNPDIKTLFVDHSCGQPNGARAPSPANNPLLGALPKAGGFPPLGAHGPFQPTPAPVPTPLAGWMSNPTTVAHAAVSXSGAIGLXCSSMPAALKAS

SEQ ID NO: 200764 - protein, 181 aa, Glycine max
  Clone ID: PAT_MRT3847_23315C.1.pep
MAADEDMSALKSKLSQSNETWKKEMERSQSQVDVLQARIMEVKAQIQGSEEDAKKELEVLWRRVKTTSTLLTYLKSKARIMAVPHLAHTSCGIKKLDGVGLVDKDGIPLSGWSRNVDLCSFDDPDEESWIGINRQHGSLDQQDAVYIGEILKSVQMVTDVMEALVKRVLLAESETTIERKK

SEQ ID NO: 200765 - protein, 172 aa, Glycine max
  Clone ID: PAT_MRT3847_23316C.1.pep
TQSDSPSINYSQAQHKSSAISSDGYFVPNKTDQESFSAFRGGSGSGGSSPHGRGGVGRRGGGSGCGRRGGRFANFQCQVCFKFVHTTSVCYYHYDQYYQPITTTIHRIVTILVILDLLMFGLIPVTSLPVPIISQILVLCSQMLSPNLIPIIGFLILVLHSMLLENLETFSS

SEQ ID NO: 200766 - protein, 248 aa, Glycine max
  Clone ID: PAT_MRT3847_23317C.1.pep
MDTEQEEMQFMGLYGVYRESYKIIFAWSKVFNKITLTLILPLSFIFLIHIEVSNILFGKILHNTQQMMETPQDTPQYHNLTNMLSSEWAIFILFKLLYFTFLLVFSLLSTSAAVYTVASIYTSREVTFSKVMNVVPKVWKRLMVTFLCTFVAFFAYNVMTLVVFVIWALAIGLRNGGVVVLVVLGMLYFAGFVYLTVVWQLASVVTVLEEDTCGVRAMMKTNELIKGRIGLTVLIFLKLVISFGLIQF

SEQ ID NO: 200767 - protein, 322 aa, Glycine max
  Clone ID: PAT_MRT3847_23318C.1.pep
MFSLRLPIPLVKTPPSPSCYYSHYYHYRYRYRCYHPFHHRSQTQSLIVSKRGSAIAKCHADSVTLRDDGVSLAQESLEPLPAELAAEMMPKHVAVIMDGNGRWAKVKGLPPSAGHQAGVQSLRKMVRLCCSWGIKVLTVFAFSTDNWVRPKVEVDFLMRLFERTINSEVQTFKREGIRISVIGDSSRLPESLKRMIASAEEDTKQNSRFQLIVAVGYSGKYDVVQACKSVAKKVKDGHIHLDDINENIMEQELETNCTEFPYPDLLIRTSGELRVSNFLLWQLAYTELYFNRELWPDFGKDEFVDALSSFQQRQRRYGGRHS

SEQ ID NO: 200768 - protein, 79 aa, Glycine max
  unsure (1)..(79): unsure at all Xaa locations
  Clone ID: PAT_MRT3847_23319C.1.pep
QGFFXXLLNCNQSSCIFNPFTGVNPDEHVIHVAYYFSFRGNAWNEIERPYTSHEGCSDRTVSDFGFFFNGVIHCLVSSP

SEQ ID NO: 200769 - protein, 145 aa, Glycine max
  Clone ID: PAT_MRT3847_2331C.1.pep
MEGRKKMGSSSFTSELFGSNQFQKSAASGIFESMFPPPSKVLGRESLRSEVCEKTANERWSSKIDYISKGSDGETQSTTHKDMSSIYQEQRLQPCQLSSSIHYGGQDICSCPKSTQDSGYNSLLYKKDGVEDDLGSNLWQGGPYY

SEQ ID NO: 200770 - protein, 65 aa, Glycine max
  Clone ID: PAT_MRT3847_23320C.1.pep
IGITHITIAIYSYTIISIKWINTAGKSMKNNVFSSTIQYHHQHTRNQAPLSRHISQAKILKNPTH

SEQ ID NO: 200771 - protein, 78 aa, Glycine max
  unsure (1)..(78): unsure at all Xaa locations
  Clone ID: PAT_MRT3847_23321C.1.pep
MDPTRPLQIPFRDIASWPQVTPLAXNEGPNALPSIHYTVYFFHFMDHFLADYLPRERSPFALALTVESVQLHSRCYTV

SEQ ID NO: 200772 - protein, 88 aa, Glycine max
  Clone ID: PAT_MRT3847_23322C.1.pep
SRYDGGRAGPYAPALYRAPSSPSAIFAGNFVSSYPFAAAGVTTVVPGAGARIKLVFLSSLLGGVIYYIIAPSIIFSRPCKHINQPKGS

SEQ ID NO: 200773 - protein, 82 aa, Glycine max
  Clone ID: PAT_MRT3847_23323C.1.pep
NVAASERAMEEEYFDFEKKVSIKETMSMEVDPAKVLLLLRGFLQIQQRRAEAYSKLKWLIIITYKALLGFRQNICKIIFFSL

SEQ ID NO: 200774 - protein, 62 aa, Glycine max
  unsure (1)..(62): unsure at all Xaa locations
  Clone ID: PAT_MRT3847_23324C.1.pep
MDSTVCLGSTSTHVLDPTTGGYEAGISTDGQIREHAXLAFTTGVNHIMCCCNIIDATTPKYH

SEQ ID NO: 200775 - protein, 65 aa, Glycine max
  Clone ID: PAT_MRT3847_23325C.1.pep
QLKVLDMKIFLDNIHPIDYELCDFNTLSQVILNFRVKPISLCYPRRHCYYYKTTTIIALWGYPTR

SEQ ID NO: 200776 - protein, 66 aa, Glycine max
  Clone ID: PAT_MRT3847_23326C.1.pep
QSLSLSRGSLYQLKPLTKSLDIYNLSICLFSKNRLCSIRSFTFQAHCSRSAVLIDVGLLVSFSIKV

SEQ ID NO: 200777 - protein, 122 aa, Glycine max
  unsure (1)..(122): unsure at all Xaa locations
  Clone ID: PAT_MRT3847_23327C.1.pep
XQXNPGXXXNXXPDXXXTAXXEXXPMXXXXCAQPLXYXPPXSXPXXETXAXXXXXXPPNTXNXXLXHSXTLTXXXXXXXXHTPXXPLNTPXXELXPYARXXXXXGLCXXXPXFCSXXXLXXX

SEQ ID NO: 200778 - protein, 92 aa, Glycine max
  unsure (1)..(92): unsure at all Xaa locations
  Clone ID: PAT_MRT3847_23328C.1.pep
DDGRGAGGVRYIRIRCGYLPTSPFKMRSFGGTLAGETITLEVESSDTVDKRLXCKIVEVGGXPPEQQRFVFAAKQLEDGRTLGDYYIQEESP

SEQ ID NO: 200779 - protein, 75 aa, Glycine max
  unsure (1)..(75): unsure at all Xaa locations
  Clone ID: PAT_MRT3847_23329C.1.pep
AHLLNLVNMIXDLISISTYEARLMRMIAVSRLKCLQTADAPTISQXEKLHSMHMMINAPYPNHNIDLLLTIDLSD

SEQ ID NO: 200780 - protein, 234 aa, Glycine max
  Clone ID: PAT_MRT3847_2332C.1.pep
MSKSEDLKLLGGWFSPFALRVQIALNLKGLEYEVVEETLNPKSDLLLKSNPVHKKIPVFFHGDKVICESAIIVEYIDEAWTNVPSILPQNAYDRANARFWFAYIDEKWFTSLRSVLVAEDDEAKKPHFEQAEEGLERLEEVFNKYSEGKAYFGGDSIGFIDIGFGSFLSWMRVIEEMSGRKLLDEKKHPGLTQWAETFAADPAVKGILPETDKLVEFAKILQLKWTAAAAAAAK

SEQ ID NO: 200781 - protein, 95 aa, Glycine max
  Clone ID: PAT_MRT3847_23330C.1.pep
HWPIQSALFSSPTRCYEYSYPSSLRCMTNWTAREGSTASAAGPASHGGSRGRDDLVAGREPPPGPPGSRGHGGARFRHSQAREHGIRCQRHHTRA

SEQ ID NO: 200782 - protein, 111 aa, Glycine max
  Clone ID: PAT_MRT3847_23331C.1.pep
PNHGLFPNTHSSHHTSQVLKSPVTSPIFNPTPESPVFPCFPSPAFCTFSLLLSVDTHNVLLKCLPRVAILSRTPRDGATCTQAQTRTTTRFQFSSTLSLSHYQHIFTFTPL

SEQ ID NO: 200783 - protein, 57 aa, Glycine max
  unsure (1)..(57): unsure at all Xaa locations
  Clone ID: PAT_MRT3847_23332C.1.pep
MKIFRQMFWCLMVFLLIILVTILLIWAFLLPSXPTFTLHYFTFYTFNATLANFLTSN

SEQ ID NO: 200784 - protein, 67 aa, Glycine max
  Clone ID: PAT_MRT3847_23333C.1.pep
RPAVVTVMGHVDHGKTSLLDALRQTSVAAKEAGGITQHIGVAEWWLVVAWLFRHSDCSYSPPDAHSN

SEQ ID NO: 200785 - protein, 67 aa, Glycine max
  Clone ID: PAT_MRT3847_23334C.1.pep
HAETSVEGCPTDEYRQQGINIMEIQLISRVCYLLLFVDIWNYDGLFNVYGDNPSFPIAKNVEILTKL

SEQ ID NO: 200786 - protein, 40 aa, Glycine max
  unsure (1)..(40): unsure at all Xaa locations
  Clone ID: PAT_MRT3847_23335C.1.pep
NSARGRHCLRASAHLKXGVFXHXNMXTXKGXLRGRARPNN

SEQ ID NO: 200787 - protein, 58 aa, Glycine max
  Clone ID: PAT_MRT3847_23336C.1.pep
KDSDSDSVTMLFTFSLFLTHGPFTILAYISESLSPLCQALLSNASIVILSTVSGGSDF

SEQ ID NO: 200788 - protein, 68 aa, Glycine max
  Clone ID: PAT_MRT3847_23337C.1.pep
GNPNLLLKHAHSKNCNQPNLVIYREQKLGLKFTGFNQHAETRDRGELHFTGDTLTLENTKNFSPNGGI

SEQ ID NO: 200789 - protein, 244 aa, Glycine max
  Clone ID: PAT_MRT3847_23338C.1.pep
MVEQKNQVIPLLTPYRMGNLNLSHRIVLAPLFRARSYNNVAQPHAILYYSQRATKGGLLITEATTISPTSKYHPNAVGIWSREQIEAWKPIVDAVHAKGGIFFCQIVHTGRAYDPDLKPDGQTLISSTNKPFTHNATEPTALRTAEIPDIVNEFRLAARNAIEAGFDGVEIHGAHGFLIDQFLKDQVNDRTDKYGGSLENRCRFALEVVEAVVEEIGADRVGMRLSPFSDFNECSDSNPQALGL

SEQ ID NO: 200790 - protein, 368 aa, Glycine max
  unsure (1)..(368): unsure at all Xaa locations
  Clone ID: PAT_MRT3847_23339C.1.pep
MVMATVGSEPACARTVHDVASSFSSKWQHSSTVKKQPRARILQCSLRIRACSSMANKKDIYKQVGLFSLKRKIEDAVLRAETFASTALEMEEATWIKQEEMVRDFDMWDDPAKSNDILVKLANSAKVVDSLKDLKYKVEEAKLINQLAEINAIDYGLYKQAYETSLDVSEIVXQYEISKLLKGPFDMAGACXVIKAGPKGIYPKLWAEQILSMYLRWAKRRGYEGRIVDKCPFKNGGINSAIIEFEFEFAYGYLSGEKGVHYLIRGSPNESSQLXGERSHFANKMKALNRLKAKLLVTTKEQGVASIKSIQKENIVNLWQEEIRRYVSHPHKLVHDVKTGVEVPDLNYVLEGNIGPLIAAHINSRVMS

SEQ ID NO: 200791 - protein, 135 aa, Glycine max
  Clone ID: PAT_MRT3847_2333C.1.pep
MGRVFVLELDGRSYGCKFCNTPLALADHILSRNFNCSQGRAYLFSKVVNVILGPQVERMMISGLHTVEDIFCCNCGNLLGWKYVLAHEKNEIYKEGKFVLERWTIVDNEEEELNSDAQAGSQTGSQAGSSDTENA

SEQ ID NO: 200792 - protein, 135 aa, Glycine max
  Clone ID: PAT_MRT3847_23340C.1.pep
KHGQDIDADDEYEALVQATGVRCTVLEEQLKLRKAERTKRGIVSDRASDRYKVPKSLHSAWSAKMLPWGLTLAIGVLAASTLWTGNSLHPRDALYFNSFNTVYSAGAIEGFLPNGARSLAGALGAGAGLVGRVPT

SEQ ID NO: 200793 - protein, 159 aa, Glycine max
  Clone ID: PAT_MRT3847_23341C.1.pep
CPFKNGGINSAIIEFEFECAYGYLSGEKGVHYLIRGSPNESSQLEASSATVDVIPMFLESACDLEIDSEDLIISSPLIHGKNKRQTDHTVCIQHIPTGISVQSYGERSHFANKMKALNRLKAKLLVTTKEQGVASIKSIQKENIVNLWQEEIRRLSAWD

SEQ ID NO: 200794 - protein, 62 aa, Glycine max
  Clone ID: PAT_MRT3847_23342C.1.pep
PLFRRKVARRSFLFLTLWVGHVLIDSCPSIQIVLALVIIPFVSDACLVVLLLLVDRLGRMRS

SEQ ID NO: 200795 - protein, 96 aa, Glycine max
  Clone ID: PAT_MRT3847_23343C.1.pep
FLTLVGGPTLFPLVFRWLCSPRVLGVSSLTNSALCAPCVSESHFAWRFVTPAICRPLLRHDPFISLFLALSLSAHAVHGLSAHTQIKKFSCKNIDR

SEQ ID NO: 200796 - protein, 48 aa, Glycine max
  Clone ID: PAT_MRT3847_23344C.1.pep
QVGADRHRRQRAVHVTRLICGWWSHFFPSPIFKRVLIHSRLIGSSAVG

SEQ ID NO: 200797 - protein, 59 aa, Glycine max
  Clone ID: PAT_MRT3847_23345C.1.pep
YIAKIYLSHLDYCQAMHTAMLIIISDGCDIRSERIGLAYIDVAKNSAGNSFSNILLLTL

SEQ ID NO: 200798 - protein, 59 aa, Glycine max
  Clone ID: PAT_MRT3847_23346C.1.pep
TSKNSLQQLNLHRNILMKIMFFKRMCFGASFNCKEENHEPKKIKYRSIKSEMIFQLPYI

SEQ ID NO: 200799 - protein, 88 aa, Glycine max
  Clone ID: PAT_MRT3847_23347C.1.pep
HIYYLGFCNCNIFIIYLIICYYERVYILLENNGINPVLLLPPPHPPPPSSQNTLGGSLLNQTVGVPGPEQHIHNIKRNIYNIIRGFNF

SEQ ID NO: 200800 - protein, 36 aa, Glycine max
  Clone ID: PAT_MRT3847_23348C.1.pep
ICIIILRIKYLCITYSFNCNHMCTSGVSIKNCVMIV

SEQ ID NO: 200801 - protein, 67 aa, Glycine max
  Clone ID: PAT_MRT3847_23349C.1.pep
RKLRIAGCIAMACCSYFFFFLFTTPYQLQLRLRIRLHELPPYYGCGQILLDDLIIRYGVCPPFILKV

SEQ ID NO: 200802 - protein, 59 aa, Glycine max
  Clone ID: PAT_MRT3847_2334C.1.pep
PTRPLLCAVDLSQGLKATASTRRWYQNSSSSPNTTTNNKGIPTTTTWERTNHQRLRISR

SEQ ID NO: 200803 - protein, 286 aa, Glycine max
  unsure (1)..(286): unsure at all Xaa locations
  Clone ID: PAT_MRT3847_23350C.1.pep
MAYQAIQVPSSGSSSSSGFQLLNSPFGDTTYTKVFVGGLAWETQSETMRRYFDQFGEILEAVVITDENTGRSKGYGFVTFRDPEAARRACADPSPVIDGRRANCNLASLGRPRPPLPYGRIRPASPYVGSLQPARGAYVGGFGYQXPVSYSYQQGLVYPPYGYTSYGPEYIYPQSLYNPYMGQQYLQIYGVPGAVNTTTIYPYGQVGQAITSGHGYSAMQGYTVPGHQIVPYGGSNVNAITTSPMPAIQASYPSGIAAPVPGQPQFIVPAPSPQFMQGSGPDQTAG

SEQ ID NO: 200804 - protein, 70 aa, Glycine max
  Clone ID: PAT_MRT3847_23351C.1.pep
MKMVIVLVVCLALSAASASAMQMPCPCAGLQGLYGAGAGLTTMMGAGGLYPYAEYLRQPQCSPLAAAPYY

SEQ ID NO: 200805 - protein, 196 aa, Glycine max
  Clone ID: PAT_MRT3847_23352C.1.pep
MFTNILQAKWNRHSEEDEDHKDNEQQEEEEEEDEALSLCDLPINLEDPPGNQEHSRPNDEEFNFRLWRAPFNKEPEMCAADEVFFKGQILPLRVSFSSEAGLLATVSQSQQHYGKQFVRSESLDRNSSDYRGSSNSSRSSSLRSQNSFTSTSTSSTTTNTTISKSKHKIRTNFTRTPVPTRIKSIASHTTSRKSRR

SEQ ID NO: 200806 - protein, 59 aa, Glycine max
  Clone ID: PAT_MRT3847_23353C.1.pep
MAYQAMQGPSSGSSSSSGFQLLNSPFGDTTYTKVFVGGLAWETQSETMRRYFDQFGEIL

SEQ ID NO: 200807 - protein, 75 aa, Glycine max
  Clone ID: PAT_MRT3847_23354C.1.pep
PNSEPGSLGMPLTTIDHYSPPHAHTATTKRKKENQSRNEYTNSDWMVPKTSKEEKGRIVRVCVRCREKKDKREKI

SEQ ID NO: 200808 - protein, 111 aa, Glycine max
  unsure (1)..(111): unsure at all Xaa locations
  Clone ID: PAT_MRT3847_23355C.1.pep
SLYNPYMGQQYLQIYGVPGALXTTVYPYGQVGQAIPSGHGYSAIQGYTVPGHQIVPYGGSNVNAITTSSMPAIQASYPSGIAAPVPGQPQFIVPAHSPQFMQGSGPDQTAG

SEQ ID NO: 200809 - protein, 125 aa, Glycine max
  Clone ID: PAT_MRT3847_23356C.1.pep
LINDSHMWQMTGFPSRRGRAATINTAPPLHTSERHHKSLITSKKPGLANLLTLMRCSKRHILEKRTTPKWIRDQNKPMKAPVMGHMPLTLHQELNCGLMMLEASLKDVFMELETCPPIIGLVWNN

SEQ ID NO: 200810 - protein, 175 aa, Glycine max
  Clone ID: PAT_MRT3847_23357C.1.pep
FGTRSSSVISVSDGGVRSSREIIRYKSSRVHEIFTLYSRFWKIIYRTRQLLLTNTAEALLVGLVLGTIYINIGFDKEGIEKRFGLFAFTLTFLLSSTTETLPIFINERPILLRETSSGVYRLSSYLIANTLVFLPYLFVVAVIYSIPVYFLVGLCASWLSFAYFVLVIWVIVLMA

SEQ ID NO: 200811 - protein, 39 aa, Glycine max
  Clone ID: PAT_MRT3847_23358C.1.pep
SCSRTCVSMILGCKYTRKTPVSCGPMSGNIKARQKCTLT

SEQ ID NO: 200812 - protein, 107 aa, Glycine max
  Clone ID: PAT_MRT3847_23359C.1.pep
TMFNLLFSSLKGYFTNHSHKNFGFPQWREDTLMKTSHGGKLYNLLALFHQQQPHPLGSRSIFSLPYTCQAFMTRGLGISSRGEGKGGPSITRRSGPHQKRGSPYYTP

SEQ ID NO: 200813 - protein, 43 aa, Glycine max
  Clone ID: PAT_MRT3847_2335C.1.pep
YKFFRSLKTHIYGSSLCKVTFGDVYTLDVHHHSNLIYETFPLT

SEQ ID NO: 200814 - protein, 117 aa, Glycine max
  Clone ID: PAT_MRT3847_23360C.1.pep
MDSFVETEEQLKSDQKKWVVSKGKEASKKTIKSFLAPTPIRKLQENVKKGLISSTQTPFEHGRQICFHHHQLLQSCVAPPEGDEPSMTVPKTLALAENWVSAKLSYCGNPKIKKINK

SEQ ID NO: 200815 - protein, 59 aa, Glycine max
  unsure (1)..(59): unsure at all Xaa locations
  Clone ID: PAT_MRT3847_23361C.1.pep
SXDPLERPLXFFFFFFFXCFTNILTSYFETLHKTCFFYQILLSISKSYNHQTFFLILTL

SEQ ID NO: 200816 - protein, 67 aa, Glycine max
  unsure (1)..(67): unsure at all Xaa locations
  Clone ID: PAT_MRT3847_23362C.1.pep
HEETAELTKNAVNSDAESIAEEWNPSLAGHKNATGVWRVLRRTSLLTEXKEEIKGNEPNVKWTKEHR

SEQ ID NO: 200817 - protein, 52 aa, Glycine max
  Clone ID: PAT_MRT3847_23363C.1.pep
FLVVNYFNNWFRMIVKLKETIHIHSFKIVRDKSNLTKMDHIYFNIRQSTKIT

SEQ ID NO: 200818 - protein, 34 aa, Glycine max
  Clone ID: PAT_MRT3847_23364C.1.pep
SYFLGQPMFPLKCPPSLLTRIPSFPYKKKIYQSS

SEQ ID NO: 200819 - protein, 91 aa, Glycine max
  unsure (1)..(91): unsure at all Xaa locations
  Clone ID: PAT_MRT3847_23365C.1.pep
MNTWCEYVLELLLIGDSGVDKSCLLLRFADDCYLDRYISTIGADFKINTVEHDGKTIXLDIRDTAEXERFKTLTSSYYRRDHGIIIVYDVT

SEQ ID NO: 200820 - protein, 248 aa, Glycine max
  unsure (1)..(248): unsure at all Xaa locations
  Clone ID: PAT_MRT3847_23366C.1.pep
MAFHSHGHIFSFSSILFCMFAMASSQLTSNCYESTCPQALSIIKTAVIGAVAKEHRMGASLLRLHFHDCFVNGCDASVLLDDTSTFTGEKSAAANVNSLRGFEVIDDIKTKVEAACPGVVSCADILAIAARDSVVTLXGPSWNVGLGRRDSTTASKDAATTDIPSPLMDLSALISSXSNKGFNTKEMVALSGAHTTGASQCQLFRGXVYNESSHESNXATSLKSTXSSTGRDSTLSPTDVTPKCGFDN

SEQ ID NO: 200821 - protein, 69 aa, Glycine max
  Clone ID: PAT_MRT3847_23367C.1.pep
TICAEFELDKQVDAFTESVFKGNPAAVCFLEEKRDKKWLQGVAAEFNLSVTCYLTRITESHGTTCISFD

SEQ ID NO: 200822 - protein, 241 aa, Glycine max
  unsure (1)..(241): unsure at all Xaa locations
  Clone ID: PAT_MRT3847_23368C.1.pep
MRREPLSHPSTENTASFFHTCFNGINAVSHASALASGGWLSLALLFAIAAATFYTGVLIKRXMDKDSNIRTYPDMGELAFGKTGRLIISGLIYTELFLVSVGFLILEGDNLSNLFPTVEIHTADLAIGGKKLFVILVALVLDNLRILSYVSASRVFASAIIILSISWTATFDGVGFHQKGTLGNWKGNPTAVSLYAFCYWAHPGFPSLYNSMRNKHQFSNGLLGSFLLSTGCYASMGIIWC

SEQ ID NO: 200823 - protein, 153 aa, Glycine max
  Clone ID: PAT_MRT3847_23369C.1.pep
DCDLEALELLLRSPKQDPPPLPYLTEKVSRIYDISLEAHIKPAGHEDSGVVSRTNLKHLYWTLTQQLAHHTINGCNLRPGDLLGTGTVSGLEPESRACLLELTWNGQNAVPVNGLNKKFLEDGDEVILTGYCKGNGYTIGFGTCSGKIVPAAP

SEQ ID NO: 200824 - protein, 127 aa, Glycine max
  Clone ID: PAT_MRT3847_2336C.1.pep
GRSYGCKFCNTPLALADHILSRNFNCSQGRAYLFSKVILVNVTLGPQVDRMMISGLHTVEDIFCCSCGQPLGWKYVLTHEKNEIYKEGKFVLERWTIVDNEEEELNSDAQAGSLTGSQSGSSDTENA

SEQ ID NO: 200825 - protein, 42 aa, Glycine max
  Clone ID: PAT_MRT3847_23370C.1.pep
AFFHAPTKLGIRSRCAAAASSDGETELLWWVYVSVECIMNKG

SEQ ID NO: 200826 - protein, 421 aa, Glycine max
  Clone ID: PAT_MRT3847_23371C.1.pep
MAVLQSFVSVHPDSHFPIQNLPYGVFKPQSASPPRPGVAIGDFVLDLSEISSAGLFDGPLLKNSDAFLQPNLNKFVSLGRPAWKEARATLQKLLSATEPTLRDNAVLRQKALVPMSSVELLLPVAVGDYTDFFTSLHHTKNCGIIFRGPQTPVLDNWYRLPVAYHGRASSVVISGTDIVRPRGQAHPVGSSTPYFGPSLKLDFELEMATIVGPGNELGKPVDINNAKDHIFGLVLMNDWSARDIQAWEYIPLGPFLGKSFGTTISPWIVTLEALEPFASEAPKQDPSPLPYLTEKEPKIYDISLEAHIKPAGHEDSGVVSRTNLKHLYWTLTQQLAHHTINGCNLRPGDLLGTGTVSGPEPESRACLLELTWNGQNTVSVNELNRKFLEDGDEVILTGYCKGNGYSVGFGTCSGKIVPAAP

SEQ ID NO: 200827 - protein, 106 aa, Glycine max
  unsure (1)..(106): unsure at all Xaa locations
  Clone ID: PAT_MRT3847_23372C.1.pep
MEKISIFEQCPRSKLRKQCIXKNLGPQEREHCEYIDCEGNIXHKHYGDYYDTREDTKDAKRRFVMSTYNKLHAGKKKEGXLDHSFILGGGAAVDAGRLEAEHGILK

SEQ ID NO: 200828 - protein, 52 aa, Glycine max
  Clone ID: PAT_MRT3847_23373C.1.pep
QPRFVVLFIVALFLSPHTLLGGLPPSGLFPDCPPPPPPPPPPPPPPSKAALL

SEQ ID NO: 200829 - protein, 73 aa, Glycine max
  unsure (1)..(73): unsure at all Xaa locations
  Clone ID: PAT_MRT3847_23374C.1.pep
QLKLKFLPSLQLQQISPWPSVSXVGAVNRXLLNLNGSGPGVSXPSSSFXGSXLKKVIGSRVPKTKIXXGSXRL

SEQ ID NO: 200830 - protein, 43 aa, Glycine max
  Clone ID: PAT_MRT3847_23375C.1.pep
KSASRPPQMMANVLNPVLYSSRKAIPYQDLKQGAVTMLILPRL

SEQ ID NO: 200831 - protein, 70 aa, Glycine max
  Clone ID: PAT_MRT3847_23376C.1.pep
TRMRPSTLLCWQQWPRSAPIPFTTGPLIIRCTSRQNSLPRRLVLTNCHCTPLCVQQRPPLGNPMLRRTSP

SEQ ID NO: 200832 - protein, 63 aa, Glycine max
  unsure (1)..(63): unsure at all Xaa locations
  Clone ID: PAT_MRT3847_23377C.1.pep
HYNHILPSHHHNGDFYKTDDXNPSNYFSYHPTSHISGLILFTFLRCFKFTTFISFSPTKISIG

SEQ ID NO: 200833 - protein, 211 aa, Glycine max
  Clone ID: PAT_MRT3847_23378C.1.pep
MATESLIRISEAGGKWPSHKEAAAFGSSSRNMATEDLGILLKGHRFQGGGKDAAPNRSGSAPPSIEGSFLAIENLLPQHNTAQNASFANLSSTTQNCESEEQLRADPAYLAYYNSNVNLNPRLSPPLTSWENRHLGRHIGSFRNNWRMSSADDSGKSSVHLTQRTLSTHKEESEDDSAPQPYDDELVKASGIWRRPDATSLASQHKNMVDL

SEQ ID NO: 200834 - protein, 423 aa, Glycine max
  unsure (1)..(423): unsure at all Xaa locations
  Clone ID: PAT_MRT3847_23379C.1.pep
TNRNFCTVLAIDNKIQEELFIPGGVIMDQRNVVDQLYFVGHGVLEEVATSEHGTAXTVSLLQPNSSLAEISILCYILXPYTDRVCXLSTLLRLYKQSFTNILDIYFYDGRKVLNNLLEGKESFLDKQLESVITFHIGKQEAELAXLKVNSAAFNGDMYQLKXLIRAGADPNKADYDGRSPLHLAASRGYEDITIFLIQERVDVNIIDNFGNTPLLEAVKNGHDRVASLLVKEGASMKIENAGSFLCTAVARGDSDYLKRLLSNGMDPNLKDYDYRSPLHVAAAEGLYFMAKLLLEAGASVFTRDRWGNTPLDEARMCGNKNLIKLLEDAKSSQLSEFPSQEFTDKMHPKKCTVFPFHPWDPKDNRRHGIVLWIPHSIEELIKSAAEQIEISGGSCILSEDAGKITDVDMIKDGQKLYLVHETH

SEQ ID NO: 200835 - protein, 38 aa, Glycine max
  unsure (1)..(38): unsure at all Xaa locations
  Clone ID: PAT_MRT3847_2337C.1.pep
MADTETFALQAEINQLLSLIINTFYSXKEILLRELISN

SEQ ID NO: 200836 - protein, 72 aa, Glycine max
  Clone ID: PAT_MRT3847_23380C.1.pep
VRGRVGGTVTSIMMPVAMVYAVESAKRGAVVYEYSDSGTTYAPEGIILDSAGLQLDFPAQLPGVLHMAMCSA

SEQ ID NO: 200837 - protein, 42 aa, Glycine max
  unsure (1)..(42): unsure at all Xaa locations
  Clone ID: PAT_MRT3847_23381C.1.pep
XLNTXXXCLYXXSIXIXXXXFXXXXXQVSXXPNGVXFCPKXP

SEQ ID NO: 200838 - protein, 118 aa, Glycine max
  Clone ID: PAT_MRT3847_23382C.1.pep
MFASIIFSGDNRLTEKTIFTHRDFDVLDVYYTIATLFRKYLPHYITWNLYTLLIYIIPSFLTVEIKYKRELSNIHISGSFYDGRYRFWTEHEKNLALSEQEKTVVITNRGIPADVFSK

SEQ ID NO: 200839 - protein, 66 aa, Glycine max
  Clone ID: PAT_MRT3847_23383C.1.pep
PILVGPHLLVPANRGPVVKLFFLRFLNIKNCIFFLSIVTHRKLFFLNKWLSGNHLPRGQGCKYYIF

SEQ ID NO: 200840 - protein, 234 aa, Glycine max
  Clone ID: PAT_MRT3847_23384C.1.pep
MGRRQNKYQQYTSEDLPERGPVESLIYWRDSKKSGPVFGGVLVVLLALTYFSLISVVAYVSLITLGITLAFRIYKSIVQAVQKTGDGHPFKEYLELDVSLPQEKVKQITEVAVAHINAAIVELRRLFLVEDLVDSIKFAVLLWTLTYVGAWFNGMTLIIPAWVALFPLPKLFEVNKTQIDANLEIVRPKLAEIPPKIKAAIPMGKKAEKKKDPLFLPQVPCPSEENQTIFLYIY

SEQ ID NO: 200841 - protein, 114 aa, Glycine max
  unsure (1)..(114): unsure at all Xaa locations
  Clone ID: PAT_MRT3847_23385C.1.pep
LVDKLGHNIKKVLEKMRELTKRICXIGSAYTCLPHIVXGMRSNHNRTPIECPDRVGLIIDHHGTHISGQLQSMQIVARLSAAQDGVSRTCALNAPAPGYKILGEDIWRYVGTAT

SEQ ID NO: 200842 - protein, 48 aa, Glycine max
  Clone ID: PAT_MRT3847_23386C.1.pep
KKRTLHTSFNCCNNVCNFPNSQSLSSRGSSLISFIELDYRSNERAHNL

SEQ ID NO: 200843 - protein, 40 aa, Glycine max
  Clone ID: PAT_MRT3847_23387C.1.pep
YPPHKVAPTSLVSLILQAAILILISRTPRSISTLPFRKTR

SEQ ID NO: 200844 - protein, 57 aa, Glycine max
  Clone ID: PAT_MRT3847_23388C.1.pep
GRELTCFIPEMTWQNELQIRVIQLQHSIKATDQKCAKRKYIPHVTVFQLSTLTQNIA

SEQ ID NO: 200845 - protein, 92 aa, Glycine max
  Clone ID: PAT_MRT3847_23389C.1.pep
MNMSLHFPFEVMSEPKTSEVLISCAKDTYQGFAGDLLRSLEVCGFSVKVVSEDHRDLKEEETECVRIFIIVFSHHYATSSSRLDKLTEIVNK

SEQ ID NO: 200846 - protein, 111 aa, Glycine max
  unsure (1)..(111): unsure at all Xaa locations
  Clone ID: PAT_MRT3847_2338C.1.pep
EKPTEGECGPVTAVDPLATSPVIMKKPLREEIPPTXQSVSLRLKDDQDFDKAVGWQLELCAYNVASTXPGGNPIIGKNFMHQPPGDXPAENKVSSNYTYGGDSSLMGDRPF

SEQ ID NO: 200847 - protein, 86 aa, Glycine max
  Clone ID: PAT_MRT3847_23390C.1.pep
LEYEKGQVLELQKKTADLETHVPDCSLKIAKLVAQLELAEEQLKISDDEIARLEEELNSRSLGTRELQGQLELSHDFVAALENQLV

SEQ ID NO: 200848 - protein, 84 aa, Glycine max
  unsure (1)..(84): unsure at all Xaa locations
  Clone ID: PAT_MRT3847_23391C.1.pep
DXXPRPQFPXPXLXPXXRXPXKXXAQREXXXGFSCQXPXRXXFXRERAILLYDMSNLLVCCCENYDVLEINKLLSFRSSHHPFL

SEQ ID NO: 200849 - protein, 65 aa, Glycine max
  Clone ID: PAT_MRT3847_23392C.1.pep
HASADAWADAWADAWADAWVLMNILSKYMEKTFSRFIEYYTLKNNRLVNRTMVAATAKVRLTMEF

SEQ ID NO: 200850 - protein, 73 aa, Glycine max
  unsure (1)..(73): unsure at all Xaa locations
  Clone ID: PAT_MRT3847_23393C.1.pep
MSIDSTEAGTNFEPELKPVDRYMTCPLLLRVITKIDSHHSXNTLACDASSXKDAAHIYTCMDTNIRELTDIVI

SEQ ID NO: 200851 - protein, 96 aa, Glycine max
  Clone ID: PAT_MRT3847_23394C.1.pep
CTMYSSNLQNTPVASITVMLWLLAPQKLHGKKIINSAPLLPKHKFTIHEGKNSLKRREMTHGRTFYSSLFGRVCYHTVVRYSKDKVLNYGKVTLTS

SEQ ID NO: 200852 - protein, 81 aa, Glycine max
  unsure (1)..(81): unsure at all Xaa locations
  Clone ID: PAT_MRT3847_23395C.1.pep
TNKTXFINFMDLCKTMHSQPYHVTSSLLPKLKTNGSLDGLQRXTIKTRLAPYNFKVILRLYINXYIISLACNSPNTILTYE

SEQ ID NO: 200853 - protein, 84 aa, Glycine max
  unsure (1)..(84): unsure at all Xaa locations
  Clone ID: PAT_MRT3847_23396C.1.pep
XNVTNFPLHSTXXTNXKPPTRFHTXXKPWEESVQREXXIXRRLXTSQLPQHPPTNVPXHEHNPEPXLARSPISFQQXLLKPRIH

SEQ ID NO: 200854 - protein, 40 aa, Glycine max
  Clone ID: PAT_MRT3847_23397C.1.pep
PKRSYLSIRKAPFSPASFFAPASATVTLGFFGLFGFPFLD

SEQ ID NO: 200855 - protein, 167 aa, Glycine max
  Clone ID: PAT_MRT3847_23398C.1.pep
MEVQIPNHTVFDMPSLLQAVVADTVLAAAQSIALIGYLLTNGTSSVSPNLTEVDGRFPLEDLFGRKHAYLQNKNSETEDEEDGDEDDEDGPDEDEDGDDEEFSGEEGDEGGDPEDEANGEGSDDGDEDDDGDDNGDEEDDDDGEDEEEDEEEDEEETPQPPPTKKRK

SEQ ID NO: 200856 - protein, 81 aa, Glycine max
  unsure (1)..(81): unsure at all Xaa locations
  Clone ID: PAT_MRT3847_23399C.1.pep
MAVLAAYTAAACLDMSDMLGNPINLSGATXAAPSASSPASFKTVALFSIMKATPAPPKKAAAAAPATDELAKRHGPDRKIF

SEQ ID NO: 200857 - protein, 118 aa, Glycine max
  unsure (1)..(118): unsure at all Xaa locations
  Clone ID: PAT_MRT3847_2339C.1.pep
ERKQRREVRYIRKIRTIFANCSKSPSKKPHHTXYKNYITSNYSSNFEIQLYQXLNIELLNDSQYLSITQQSPDQLIQVXSNSVFCIVNLPSVNKYIVEFXVRVKDHCFSRSCTYLLFI

SEQ ID NO: 200858 - protein, 46 aa, Glycine max
  Clone ID: PAT_MRT3847_233C.1.pep
HGTHRTREITLNLTYGGWAILGRPIQMVACHHRLFQNTGPSVFSPL

SEQ ID NO: 200859 - protein, 45 aa, Glycine max
  Clone ID: PAT_MRT3847_23400C.1.pep
PGKSRWQGVRDRFKKKWTMSQSGLANAKKGYSKSMGIETSFSTAL

SEQ ID NO: 200860 - protein, 86 aa, Glycine max
  unsure (1)..(86): unsure at all Xaa locations
  Clone ID: PAT_MRT3847_23401C.1.pep
DKXKTRCFTILPKESNLVVRQKFLNFARFIMXKRDKLSCQVGINPSSMEWTXLANKFLSKGTDILXCDYXSFDGLVSKQVLSMMGK

SEQ ID NO: 200861 - protein, 51 aa, Glycine max
  Clone ID: PAT_MRT3847_23402C.1.pep
PTRTPTLSISLISLLNYQLLTYQMGMGTLYRTSANQPHSQHTDSSSTFINT

SEQ ID NO: 200862 - protein, 372 aa, Glycine max
  Clone ID: PAT_MRT3847_23403C.1.pep
PGIRLELEPNRLEFFCRKFVNQVVTGYLPSVILVLFLCAVPPVMILFSAVEGSISRSARKKSACFKVLYFTIWNVFFVNVFTGSVISQLSVFSSVTDLPAQLAKAVPAQATFFTTYILSSGWASLAVEVMQIFPLLRNLFQRFILRLKEDALDGSLSFPYHTEVPRILLFGFLGFTCAILAPLMLPFLLVYFFIAYLVYRNQIINVYITKYDSGGQFWPIVHNTTVFSLLFSQLIALGVFGLKRSSVASGFTIPLLIGTLLFHQYCRQRFLPVFRSNSAQILIDLDRRDGHSGRMEEIYEHLRSAYNQSSLMPHTTSQPECVSLHEDKDSGPSSSEDMETGNENEISQKDRPRPIQRTLSMSSDKSVLGVKQ

SEQ ID NO: 200863 - protein, 141 aa, Glycine max
  Clone ID: PAT_MRT3847_23404C.1.pep
IPLLAATKQHPFLFLSTLQRALFPPPLHPNLSHFLSQITLSITITHTQLEEFSPKIPRARAMVSPENSNWLFDYPLIEKDVIPVGDSSFAVSASTFSWPPPPANVSGEIGASLGDSEGLKNPGLKKRCTILPPPTFSFLLN

SEQ ID NO: 200864 - protein, 99 aa, Glycine max
  Clone ID: PAT_MRT3847_23405C.1.pep
FSTNHTLPQLDDVIDLVVPRGSNKLVSQIKGTTKIPVLGHADGICHVYVDKTANIDMAKKIIRDAKIDYPAACNAMETLLGHVDLSRNGGLDELVAELQ

SEQ ID NO: 200865 - protein, 132 aa, Glycine max
  unsure (1)..(132): unsure at all Xaa locations
  Clone ID: PAT_MRT3847_23406C.1.pep
LPGRLGGEPIFEKAIGTGIQWPPRKSLAPKILXKNPKRGWRMVNPLPKLEIGEASFIFFTPPQVLEMMKTSIXNVAGGLPNQMGPDYFIWSPIRDKNISPAVSWVTGEATPGDEFWDLEDDEDDEDIEKDDD

SEQ ID NO: 200866 - protein, 54 aa, Glycine max
  Clone ID: PAT_MRT3847_23407C.1.pep
RRHAVRKKKKKKKKKKKKKKKKKKKKKKKREKQKKGKQTKVRLLTRTNFFFCCG

SEQ ID NO: 200867 - protein, 39 aa, Glycine max
  Clone ID: PAT_MRT3847_23408C.1.pep
FLPQKSLDGLALYLPQDLRIGDIPSGTGGPLMLYSPSIW

SEQ ID NO: 200868 - protein, 54 aa, Glycine max
  Clone ID: PAT_MRT3847_23409C.1.pep
FAYTAHRGGRRSDAETSACVTRYEEMLSQLVLGRDRCSKGERISVRADHRLPES

SEQ ID NO: 200869 - protein, 77 aa, Glycine max
  Clone ID: PAT_MRT3847_2340C.1.pep
ATWLASHYIVFVEAVVPQTEPLAGQLGSRCYHWSYLRMAVMLSKIQVTNPGLHPLDQSILLTTANRLSSRQCKLCQR

SEQ ID NO: 200870 - protein, 35 aa, Glycine max
  unsure (1)..(35): unsure at all Xaa locations
  Clone ID: PAT_MRT3847_23410C.1.pep
CPKGSLRXRRXVKAPXEXXAYXGIXKRNDXXPXXX

SEQ ID NO: 200871 - protein, 203 aa, Glycine max
  Clone ID: PAT_MRT3847_23411C.1.pep
MLNEEAPSYIRPQHAKTPAVGGRRTNWKGFPTSERIAKLQLEDCGESGNDNDGLMGLSITFDQWLRLDSGTIEGDQNSEQILKILEVHHSKIRELDELKNATDWLKSYGRKLGHYGLLGNHLTVAFMIQLRDPLRNYEPVGVPMLVLTQVERVCISATPQDYSDFLDEKEKGMDNEALLNETSSKSMEYTNTDNEATQFRFKI

SEQ ID NO: 200872 - protein, 67 aa, Glycine max
  Clone ID: PAT_MRT3847_23412C.1.pep
AIGAVKIQIYDLCQLARITCSSTTKHSPFGSTSNFLFPNPCNSLFSHVIHSQLGEFMICSVTLTHLS

SEQ ID NO: 200873 - protein, 84 aa, Glycine max
  unsure (1)..(84): unsure at all Xaa locations
  Clone ID: PAT_MRT3847_23413C.1.pep
GVGFWGGKQNFVKTFSGKTFPLQVERFCPLSNVKAKIXAKEGIPPAHQRVIFFGKQLQDGRALPFFNIQKGLTLPLVPRFRGGV

SEQ ID NO: 200874 - protein, 147 aa, Glycine max
  unsure (1)..(147): unsure at all Xaa locations
  Clone ID: PAT_MRT3847_23414C.1.pep
DSGALLKLFTSQHLPHTQVGLFNFINMYFPTVSPIKHLIKFCSSLHGGLSKLSEMLEVSRVGIYHQAGSYSXLPSCAFRKLKAHFSSGSLDKYPGVLYGLGVHNAQGSPLQEKKGPINNAIRTKTNQASVDLSLFELLHIWRNTHFY

SEQ ID NO: 200875 - protein, 78 aa, Glycine max
  Clone ID: PAT_MRT3847_23415C.1.pep
HGPKYEEFKGIFQTKSSWVTKKKMLPGQGGTLTREKGPIGHGGLPVLISIAGMWLGTKFQRQDFRNFFIWNKSCKKMF

SEQ ID NO: 200876 - protein, 128 aa, Glycine max
  Clone ID: PAT_MRT3847_23416C.1.pep
GDRDEGQQEEDDGRDERKLQRLLVLHVDAHNAVAQQCACVEIETMFLEVRIRRDKGAHYLKYAYIVGPFPASLPAKDHAPWLRELARLGSDDLPLFPSPRPRSAVRYPVFWRINRGCRHGIRWNHAAR

SEQ ID NO: 200877 - protein, 113 aa, Glycine max
  Clone ID: PAT_MRT3847_23417C.1.pep
GFAIALHPFPLLTKTTRFLFPFVSILCVCFWLIEGIHSVIRCCILIDLSNQLRALLLISLSLSLSLSIYIYIYIYIYIYICILFCNDCVVSRSNELFSFSFFFISFVLFDCFI

SEQ ID NO: 200878 - protein, 109 aa, Glycine max
  unsure (1)..(109): unsure at all Xaa locations
  Clone ID: PAT_MRT3847_23418C.1.pep
AHPNDSFCVGGGTNVRAQSTDGSFDTAIGEXTITTARLNFTIDDTVGSKAENSRSQTLSASYYHTVDCXTNTDRGAWGSHQTXTNENTLTLGTQHALDPLTTAKACVNN

SEQ ID NO: 200879 - protein, 96 aa, Glycine max
  Clone ID: PAT_MRT3847_23419C.1.pep
GLAPTNGKHLCVFKGGSVWPPRGFFSLKGVIFSIFFAPFLFRVRCFRFFLKGIWVLFWRAFFARPPWLSFSGFPRWVGGGPLVLFSRFSFVVPRPP

SEQ ID NO: 200880 - protein, 101 aa, Glycine max
  Clone ID: PAT_MRT3847_2341C.1.pep
MWQSIAHMLMSKKLEPAKTSQTVEKSNKLHDEQVITIGAERFRCHIVLFKPSMIGMESPGIHETTYNSIIKCDVDISKDLYGTHVFNGGSTMKPGNTDRMS

SEQ ID NO: 200881 - protein, 61 aa, Glycine max
  Clone ID: PAT_MRT3847_23420C.1.pep
PTSPQAYKCEKFASIVLATPLCLFVLELHVPSDFPFGYVIILNFWGLFSDFNADSCIKPHK

SEQ ID NO: 200882 - protein, 69 aa, Glycine max
  Clone ID: PAT_MRT3847_23421C.1.pep
LRDSSIYVFIFARNTLFLRVYVRCIIISPCVRKMNAQIQILVVHVVYAKVQSVGTFIYNFFLSCMDACL

SEQ ID NO: 200883 - protein, 50 aa, Glycine max
  Clone ID: PAT_MRT3847_23422C.1.pep
PVARLHISLQRLIVFFCLSTLYYLFYLIFLFFCCCKIIVRSLCKSSISYS

SEQ ID NO: 200884 - protein, 56 aa, Glycine max
  Clone ID: PAT_MRT3847_23423C.1.pep
STTTIFFRFKTSRTITPLSRSRIFLYLIQRLESYFLQMRSQEHTYLVSHREDFVRL

SEQ ID NO: 200885 - protein, 83 aa, Glycine max
  Clone ID: PAT_MRT3847_23424C.1.pep
NTTLLVTVVLLLLITCSIVAWTSPLLEPILEDTFSFVFYLTIWSFYNYQKFDKVIGKCSIGAQRIHRVCISFRNSCEEQNVEG

SEQ ID NO: 200886 - protein, 74 aa, Glycine max
  Clone ID: PAT_MRT3847_23425C.1.pep
GGSPLPRFWALRVGYTRGPGVLVPRRWGVEQSKEGVRAFLVREGRPFLVADPRRWEPKRLGGRGARPGFQRSPR

SEQ ID NO: 200887 - protein, 141 aa, Glycine max
  unsure (1)..(141): unsure at all Xaa locations
  Clone ID: PAT_MRT3847_23426C.1.pep
NTLDEGSINTIYNSKANIPDRESIMYYHQLLILCSKXIDDIRARSWYNIQNDXSTSTLALLLRRGTKKRKTNTYTRPMKIKHLHDRGTHGIHQVYRVYEFGDIYMLQIDCLISXLGARTFLAIHLKSEYRSKCGLTYVYHK

SEQ ID NO: 200888 - protein, 123 aa, Glycine max
  Clone ID: PAT_MRT3847_23427C.1.pep
VRNKSRGVERASPVVVLFFFFFFFFFFFFFFFSFLFFFGKNTFEVVPGPRASAFEPPNHIPGPATRAKAHRIAGSPLTERPLKPQPPQAPHCKKPQPTGAQKPTGRGRKAGAPQNAMIPSPVP

SEQ ID NO: 200889 - protein, 88 aa, Glycine max
  Clone ID: PAT_MRT3847_23428C.1.pep
MGQIQYSEKYFDDTYEYRHVVLPPEVAKLLPKNRLLSENEWRAIGVQQSRGWVHYAIHRPEPHIMLFRRPLNYQQQQENQAQQSMLVK

SEQ ID NO: 200890 - protein, 271 aa, Glycine max
  Clone ID: PAT_MRT3847_23429C.1.pep
MGAPKQKWTAEEEQALKAGVVKHGVGKWRTILKDPEFSSVLYLRSNVDLKDKWRNLSVMANGWSSREKSRLSVRRVHQVPRQDENSMAITAVAPSDEEIVDVKPLQVSRDMVHIPGPKRSNLSLDKLIMEAITCLKENGGSNKTAIAAFIEVNRKYRIAPIAAYSDRRRNSSVLYLEGRQKASMKIDRDETNILTRSQIDLELEKIRSMTPQEAAAFAARAVAEAEAAIAEAEEAAKEAEAAEADAEAAQAFADATTKSAKGRKSPKRIHA

SEQ ID NO: 200891 - protein, 103 aa, Glycine max
  unsure (1)..(103): unsure at all Xaa locations
  Clone ID: PAT_MRT3847_2342C.1.pep
MTASQLVSVRPDELRCHFGVQKQTWRHVKGLNNSYTGCGQVKAVXPERYCVRPNTAVVQPWDSGIMRXTLRAQREYPADVRCEXRALLRSATXRPDSDVDDLP

SEQ ID NO: 200892 - protein, 45 aa, Glycine max
  unsure (1)..(45): unsure at all Xaa locations
  Clone ID: PAT_MRT3847_23430C.1.pep
CNLCNVRKLSRCVILVKRNFXQMSNVLWVAPEDKASLWSQLHYVS

SEQ ID NO: 200893 - protein, 84 aa, Glycine max
  Clone ID: PAT_MRT3847_23431C.1.pep
KKTPPGRFTDKKSRRAGAFFLLNLSPGVSRFYNGEGAPGFPMDLGQFPPPQILSFFSRLALLVLHFMVTDFSPVRNCDRNINML

SEQ ID NO: 200894 - protein, 44 aa, Glycine max
  Clone ID: PAT_MRT3847_23432C.1.pep
YLGPYSSELPSYTTVEFPSDYGWYTAGLEADPHTCDKNHELVVL

SEQ ID NO: 200895 - protein, 224 aa, Glycine max
  Clone ID: PAT_MRT3847_23433C.1.pep
MGAPKQKWTAEEEQALKAGVVKHGVGKWRTILKDPEFSGVLYLRSNVDLKDNWRNLSVMANGWSSREKSRLSVRRVHQVPRQDENSMAITPVVPSDEEIVDVKPLQVSRDIVHIPGPKRSNLSLDKLIMEAITSLKENGGSNKTAIAAFIEDQYWALPGLKSMLSAKLKFLTASGKLIKVNRKYRIAPIAAYSDRRRNSSVLYLEGRQKASMKIDRDETNILTR

SEQ ID NO: 200896 - protein, 89 aa, Glycine max
  unsure (1)..(89): unsure at all Xaa locations
  Clone ID: PAT_MRT3847_23434C.1.pep
NIKISQRKTALGRVSSIIKQQDCKLVXXGLLCHCYQEQIVNTDQMDILDNLILENRTIPSVLICVANVIYRFRIDSTSYDPNSQHPLLI

SEQ ID NO: 200897 - protein, 48 aa, Glycine max
  Clone ID: PAT_MRT3847_23435C.1.pep
ERAYFGGDTFGIHTLPFGTLWGWGLVISGTNEKKVFLKTKTPASAKWG

SEQ ID NO: 200898 - protein, 131 aa, Glycine max
  unsure (1)..(131): unsure at all Xaa locations
  Clone ID: PAT_MRT3847_23436C.1.pep
FIENDLIGMGCTLIEDKLDYGVPARIETLERAGLKIXVLTGDTIETAMNIAYACNLINTETNQYVISPETDEIREVENRGDQIQIARCIKEVAIRELNTCLAEAQNSFESLRGPKLALVIDGTCLIDALDP

SEQ ID NO: 200899 - protein, 55 aa, Glycine max
  Clone ID: PAT_MRT3847_23437C.1.pep
RRVSDTVRMLEAMRRLDDKGSQPDHVSYTTVVSALVKVGAMDRARQVLAEMTRIG

SEQ ID NO: 200900 - protein, 73 aa, Glycine max
  unsure (1)..(73): unsure at all Xaa locations
  Clone ID: PAT_MRT3847_23438C.1.pep
CVELXADXNXTQETXXXXLRQXLMXXYYXXXWYACRYRXRNXFPGSTXSLLGGRRLVXXXXREXRAYVRVHVX

SEQ ID NO: 200901 - protein, 104 aa, Glycine max
  unsure (1)..(104): unsure at all Xaa locations
  Clone ID: PAT_MRT3847_23439C.1.pep
TNGNMETGMGWVRAILELQLDDNWSFIKTTGPYDNMLNLARCECIRPQTGYAIVLNTFDALHHNXMAAFSTFWAPVYCIRPLNSLLNEAQDNDLNAVSSNLWNE

SEQ ID NO: 200902 - protein, 108 aa, Glycine max
  unsure (1)..(108): unsure at all Xaa locations
  Clone ID: PAT_MRT3847_2343C.1.pep
HXPXSFFFLFSSFPFLLLHLYLSLPLKIFIFLKTITITFNNILNLINPHLTPLFTILIILILIPIIFLYIQPKSILISPLLQTITLHKNMTINHTKNLKKNLFNFPLF

SEQ ID NO: 200903 - protein, 80 aa, Glycine max
  Clone ID: PAT_MRT3847_23440C.1.pep
FLVVFCSVSCVQLFLLSLSSPSDSFNFQFGSIAFFFCILDSSLSQQLFYSASWTTSLTSQLGFLSDVRFYCSMLGGILGA

SEQ ID NO: 200904 - protein, 47 aa, Glycine max
  Clone ID: PAT_MRT3847_23441C.1.pep
AQSNWTPGILHSNKCLVGISARDSAMQDQRSHELGLHSNIINSLLFY

SEQ ID NO: 200905 - protein, 62 aa, Glycine max
  Clone ID: PAT_MRT3847_23442C.1.pep
VLVISISKVRPLLCQRHAWMVYSSELSQEDVSLAPYTIPTTYFHYTVECSSAVINKVIMGLL

SEQ ID NO: 200906 - protein, 71 aa, Glycine max
  Clone ID: PAT_MRT3847_23443C.1.pep
WSSSQVFTPSNLPVPGLFVHLPALNSLVAFPPGKTTIAFPSFVATVEEFHAFRCWHPLGRRNLRIFSSLPN

SEQ ID NO: 200907 - protein, 62 aa, Glycine max
  Clone ID: PAT_MRT3847_23444C.1.pep
STFITSYHNRSGHHLIEFLMGKWGLKCLKLLDGFSFLPPDKASLLSGNIQLAEIGLISKDNA

SEQ ID NO: 200908 - protein, 93 aa, Glycine max
  Clone ID: PAT_MRT3847_23445C.1.pep
EPLTAASCTPIPPLVIKPLSTLTTQPQGIARSPKASVSTTSKLPLFTRHSPRPVPITTILLWPQPHSPRPSKYAYAAKHRLPPAPAGHGMQQK

SEQ ID NO: 200909 - protein, 43 aa, Glycine max
  Clone ID: PAT_MRT3847_23446C.1.pep
MIIINTGCWKKMPFRNIAIGGPEEATHPDTLKAGLAEFISTLI

SEQ ID NO: 200910 - protein, 61 aa, Glycine max
  Clone ID: PAT_MRT3847_23447C.1.pep
PQAQDPSIAIPRSQKTPELLKHIPQKKKKNSRGGPVPNSPYSESYYARSLAVVLQRRDWEN

SEQ ID NO: 200911 - protein, 80 aa, Glycine max
  Clone ID: PAT_MRT3847_23448C.1.pep
FKNIVSPCFLFLGEKFPPVWKKPIPVFKAFFFKTKFFSNVLTTWLLSLVIGTPVIGNPGNQTLGPQKFLPRKIKTTWPFA

SEQ ID NO: 200912 - protein, 119 aa, Glycine max
  Clone ID: PAT_MRT3847_23449C.1.pep
AESPLTSMNIPQLTYSTLHSASVIEPEAKKVYSFTGRLAQLARRLTTNQEIAGSSPASVMSFFYSLFPPSPQNTQIFFLSRWSKAESGGVGEGGGFGLVWFSFRFVLLFNVTRRITWPT

SEQ ID NO: 200913 - protein, 44 aa, Glycine max
  Clone ID: PAT_MRT3847_2344C.1.pep
ALANIHPEEDIVFNCDSCDGIKRSALSDFYHFFFQPFRNNTFLI

SEQ ID NO: 200914 - protein, 71 aa, Glycine max
  Clone ID: PAT_MRT3847_23450C.1.pep
LPFFSPPPQHLRCPVSEESSPPSRNTYSWDEPFSPASTKLLLMCSYSVHIFPRPHYKFLCYVVCDTLIIVS

SEQ ID NO: 200915 - protein, 98 aa, Glycine max
  unsure (1)..(98): unsure at all Xaa locations
  Clone ID: PAT_MRT3847_23451C.1.pep
MPIRNISVGRPEEASSXPHTLKAALAEFISTFIFEVAGXSGSDIAYNKLTDNGAVTPAGLIYACIVHAXILSGAVCVGANISDGHNNPGYCVHACHFF

SEQ ID NO: 200916 - protein, 126 aa, Glycine max
  Clone ID: PAT_MRT3847_23452C.1.pep
PTTDDYLVVLASYNRNFPQDELVTHFEYFSLRANTWKATDGTGFSYKQCYYYNDNQIGCFSNNALHWLAFRFDESLNVIVAFDLTKKVFWRSLCPFFWSSETLTLYFEGTWGIVLSMCCGAGPISR

SEQ ID NO: 200917 - protein, 566 aa, Glycine max
  unsure (1)..(566): unsure at all Xaa locations
  Clone ID: PAT_MRT3847_23453C.1.pep
EHGSQSCIVELSLRFCSFRDSVQGSISVLNLIEVVTGNMDSLSIGDNTSNYFHALSQQSFPGPLVGGSVGSKELYKWLDERIAHCESPDMDYKKGERLRLLLSLLKIGCQHYGKLRSPFGTDTILKEYDTPESAVAKLFASAKTSGTQYGMPSHCLQNLPSERQIRAMALEVQNLLVSGKKKEALQCAQEGQLCEPALVLASQLGEQFYVDTMKQMALRQLVAGSPLRTLCLLIAGQQAEIFSTDTSISGHPGASDMSQQSPHFGSDGMLDDWXRENLAVITANRTKSDELXXELVIIHLGDCLWKERSEIXARLCVIGADHWKCPRTYASPEAIQRTELYEYSKVVGNSQFTLHPFQPYKLIYAFMLAEVGKVPDSLKYCQALLKSLKTGRAPEVESWKQLALSLEERIRIHQQGGYAANLAPAKLVGKLLNFFDSTAHRVVGSLPPPAPSSSQGTVHGSEQQFKNMAPRVSSSQSTMSLAPSASMEPISEWTADNNRMAKPNTSVSEPDFGRTPRHETMSPDAQGKAQASGGPLAFPAPVWASAPLSDRLPCAGCSVVRDYPSR

SEQ ID NO: 200918 - protein, 429 aa, Glycine max
  Clone ID: PAT_MRT3847_23454C.1.pep
KYCQALLKSLKTGRAPEVESWKQLALSLEERIRIHQQGGYAANLAPAKLVGKLLNFFDSTAHRVVGGLPPPAPSSSAGTVHGSEKQYQNMAPRVSSSQSTMSLAPSASMEPISEWTADNNRMGKPNRSVSEPDFGRTPRQETTSPDAQEKPQASGGTSRFSRFGFGSQLLQKTVGLVLKPRSGRQAKLGDKNKFYYDEKLKRWVEEGAEVPAEEAAALTPPPTTAAFQNGSTEYNLRSALKTESSPPIEGSSIRTSSLELSPGMPLIPPSANQFSARGRLGVRSRYVDTFNQGGGTSANLFRSPSVPSVKPAVAANAKFFIPSAAPSSNEQTMEAIVESKQEDSATNEDPSTSATNEWWSYQSPKQVSSTTIQRFPSLGNISNQRATEGSNSHLPHSRRTSSWSGKFNDSFTPPKMGMPSSRFMPDESL

SEQ ID NO: 200919 - protein, 231 aa, Glycine max
  unsure (1)..(231): unsure at all Xaa locations
  Clone ID: PAT_MRT3847_23455C.1.pep
LELEPIRLEGTDTILKENDTPESAVAKHFASAKMSGTEFPQYGMPSNCLQNLPSEGHLRAMALEVQNLLVSGKKKEALQCAQEGQLWGPALVLASQLGEQFYVDTVKQMALRQLVSGSPLRTLCLLIAGQQAEIFSTDTSNSGHPGASDMSQQSPQVGSNGMLDDWEENLAVITANRTKGDELVIIHLGDCLWKERSEITVAHICYLVAEANXESYSDSGRICLIGAEHWK

SEQ ID NO: 200920 - protein, 172 aa, Glycine max
  Clone ID: PAT_MRT3847_23456C.1.pep
MLRIAASAKRIVQTASLEAPPLGIRVLPRLYHERVVDHYDNPRNVGSFDKNDPTVGTGLVGAPACGDVMKLQIKVDDKTGKIVDARFKTFGCGSAIASSSVATEWVKGKQMEEVLTIKNTEIAKHLSLPPVKLHCSMLAEDAIKAAVKDYEAKRASASAGGQTTTGEKAATA

SEQ ID NO: 200921 - protein, 49 aa, Glycine max
  Clone ID: PAT_MRT3847_23457C.1.pep
ESQEKNAIVVKVMGRRGSRGKVTQERVKFLDDQKRNIMRNEKGNGGEGE

SEQ ID NO: 200922 - protein, 145 aa, Glycine max
  Clone ID: PAT_MRT3847_23458C.1.pep
MKCPKHPHHLETPQVALSLKPTTGTHLRHLPNHQTTQPPSPPPPPEHTPHSAKPSLCRIQRGSIKICKVADHRQRSVTQPPKSSKAAGHAPNLDNSVTHAPNPDNSAAHPPNPDNSVVHPPNPDKPKAHLPNPDEPEAHPPNPSL

SEQ ID NO: 200923 - protein, 77 aa, Glycine max
  unsure (1)..(77): unsure at all Xaa locations
  Clone ID: PAT_MRT3847_23459C.1.pep
RTRPILQPFYCQHAIAAXXVAFIKLXLPQPWALLQQXPLVHMXAQNINAQQLQQQVLGNLAAYSQQXRYMQYNQHAA

SEQ ID NO: 200924 - protein, 92 aa, Glycine max
  Clone ID: PAT_MRT3847_2345C.1.pep
LLCIVFRNCPLTRGLRSGPLSSHRRGGSPLVHHPLFQTKTPCSGSSYRRWNRRLTSMRTSSIHGSRRLWLPTSLLYKLTFTRRLIIPQMVFN

SEQ ID NO: 200925 - protein, 191 aa, Glycine max
  Clone ID: PAT_MRT3847_23460C.1.pep
MKKNEERSDNQSMKKKQIMMKKKNVSRLGGSGLSLNAFANAKFKNNHYNPAIIKKQREFYKNAKNVNKFKKLVKQQNQQNEPSLAQRHIENVNETEENKDDSERRKRKNSALSLEELYKKQHEEKEKEIMEREAVLRVKKEEREQAEARRKAMREKMLKKTRKGQPVMKYRIEHLLETIQGSTKNAAGSKS

SEQ ID NO: 200926 - protein, 51 aa, Glycine max
  Clone ID: PAT_MRT3847_23461C.1.pep
ELPDRPTRTPTRLIPQYCRHRPVYQTCGVLNSYTELNPLVNCTLPFAGALL

SEQ ID NO: 200927 - protein, 97 aa, Glycine max
  Clone ID: PAT_MRT3847_23462C.1.pep
TNPYNYTYNILIHCCSGLTQTNYKELNVLYEKYKNQGFEILAFPCNQFAGQEPGNNEEIQEVVCTRFKAEFPIFDKVISDNHDVIHRCFPIFYLELC

SEQ ID NO: 200928 - protein, 67 aa, Glycine max
  Clone ID: PAT_MRT3847_23463C.1.pep
IIVDIVPRGLVSHTCIRSRQHTSRVMSFQWKFCLHRLPNSRMYAHNVNTVCFFFKNFTPDIQVGPRA

SEQ ID NO: 200929 - protein, 78 aa, Glycine max
  unsure (1)..(78): unsure at all Xaa locations
  Clone ID: PAT_MRT3847_23464C.1.pep
MDTDDDTYTACPDKGNSDDWRGHPTRGGKDIPRVDKDRPQALDDVAAHRDIDAPMDRLTTENXWPDPQTYGPDGTGTT

SEQ ID NO: 200930 - protein, 245 aa, Glycine max
  unsure (1)..(245): unsure at all Xaa locations
  Clone ID: PAT_MRT3847_23465C.1.pep
MAVIPCHCYRTVGSDKPYLSGQSLRRRAPFPAVSVSFRRRISCVASSAIAHKVGLKDFLHLDDFDKDTILKMLDRALEVKALLKSGDRSFRPFEGKTMAMIFTKPSMRTRVSFETGFTLLGGHAIYLGPDDIQMGKREETRDIARVLSRYNDIIMARVFAHKDILDLAKYATVPVINGLTDYNHPCQIMADALTMVEHIGRFEVEKARKAGISKIEITNDPKEAVKGADXVYSDVWASMGQKEES

SEQ ID NO: 200931 - protein, 358 aa, Glycine max
  Clone ID: PAT_MRT3847_23466C.1.pep
MAVIPCHCYRTVGSDKPYLSGQSLRRRAPFPAVSVSFRRRISCVASSAIAHKVGLKDFLHLDDFDKDTILKMLDRALEVKALLKSGDRSFRPFEGKTMAMIFTKPSMRTRVSFETGFTLLGGHAIYLGPDDIQMGKREETRDIARVLSRYNDIIMARVFAHKDILDLAKYATVPVINGLTDYNHPCQIMADALTMVEHIGRFEGTKVVYVGDGNNIVHSWLLMASVIPFHFVCACPKGFEPDAKTVEKARKAGISKIEITNDPKEAVKGADVVYSDVWASMGQKEEAEYRRQVFKGFQVNQNLMDLAGSKAFFMHCLPAERGVEVTDEVIEAPNSIVFPQAENRMHAQNAVMLHVLAK

SEQ ID NO: 200932 - protein, 412 aa, Glycine max
  unsure (1)..(412): unsure at all Xaa locations
  Clone ID: PAT_MRT3847_23467C.1.pep
MGILHDDVVIIREPEKEGEATVITVNCPDKTGLGCDLCRIILFFGLSIVRGDVSTDGKWCYIVFWVVGKQRTRWSLLKKRLIEACPTCSSASGIPYYRSELQPPKPPNVFLLTFCCHDRKGLLHDVTEVLSELELIIHKVKVSTTPDGKVVDLFFITDTRELLHTKKRRDDTIEQLXSYLGDPLIAIDFELVGPETAACSQASSFLPSAISEDMFDLELPGSYXSGTSTSDSVSITMDNSLSPAHTLVQIICQDHKGLLYDIMRTLKDYNIQISYGRFSPKPRGKCELDLFIVQADGKKIVDPSKQKSLSSRLRMELLRPLRVTVVSRGPDTELLVANPVELSGKGRPLVFYDITLALKMLGPCIFSAEVGRHVVGDREWEVYRILLDEGEGLSIPRNKIEKGVWKMLMGWE

SEQ ID NO: 200933 - protein, 106 aa, Glycine max
  Clone ID: PAT_MRT3847_23469C.1.pep
GGDPGFFLNRFFRGLKKKKKKTWVFSQPFFKEIRGGDLPPFFKNNTGWAPPPKGWQIKLFPKCGGKKFTREIHLPENIFGPLIKKPALVTFINSHLKILSLLWGLG

SEQ ID NO: 200934 - protein, 65 aa, Glycine max
  Clone ID: PAT_MRT3847_2346C.1.pep
KQKESILIAARMLVFVSRGGHYYQKGLACIYALVEHIGIPNEVYAPEAAMTGICEQAMQLVSYAV

SEQ ID NO: 200935 - protein, 52 aa, Glycine max
  Clone ID: PAT_MRT3847_23470C.1.pep
MVEQAIQNEFFLNKIHYYEKTYATKILLITVHRKKIIPKLVLMTDKKIITPF

SEQ ID NO: 200936 - protein, 79 aa, Glycine max
  Clone ID: PAT_MRT3847_23471C.1.pep
LLIKREGALPPPYRGGLAAPQINVIAPLLQQFLKNLQYMPVGFSLLEVVLFFSPLCQEGWTCENLQGTIFSFINVLGIN

SEQ ID NO: 200937 - protein, 115 aa, Glycine max
  Clone ID: PAT_MRT3847_23472C.1.pep
MTSSNKRLEVQTEDQTPHKWCVSLGEEAFKRFFSQINPTVHKVFGDGSLFSPLLFGKFFDPSDAFPLWEFESDVLLSHLRSSSQNTVDWCQTGEGYVLKAEIPGKTTSFSFYSYL

SEQ ID NO: 200938 - protein, 129 aa, Glycine max
  unsure (1)..(129): unsure at all Xaa locations
  Clone ID: PAT_MRT3847_23473C.1.pep
RSGGLELEPFDPFHFVLHTTTKAGVLSKLVAPIPXXQNHXXEQGPKVNNYSNFYKQTDXYRNPVHTANVTYYXTITTAAGYTDDINNQHDTTNTYRVNTVIHHSTVCYNGNTNKHYRTTDVYNHDTNPH

SEQ ID NO: 200939 - protein, 58 aa, Glycine max
  Clone ID: PAT_MRT3847_23474C.1.pep
HCITLHTNQYWLKETPRDIHGQSQTIFLIRRYTITTQSCKTRGHISREQHQILSMKHP

SEQ ID NO: 200940 - protein, 52 aa, Glycine max
  Clone ID: PAT_MRT3847_23475C.1.pep
PIWVRSYDSPEKTPRAFNTHLYCLRGQHANFNFRNTPCNMDTTNAPYQSLTP

SEQ ID NO: 200941 - protein, 65 aa, Glycine max
  Clone ID: PAT_MRT3847_23476C.1.pep
LITAMSSSYDNVVWIHTRYSPGESKKSVVTEVRRYADNYPHMLRDGHKWLLPWKFVYPYEYVMGS

SEQ ID NO: 200942 - protein, 76 aa, Glycine max
  unsure (1)..(76): unsure at all Xaa locations
  Clone ID: PAT_MRT3847_23477C.1.pep
QNGLEHDYNLMTMPRDLVMGDKTTTRGQMTTHGLNAGLXRTRLLGTIPQTITQHRAXRKMATVRTPVNCDTSKQSF

SEQ ID NO: 200943 - protein, 214 aa, Glycine max
  Clone ID: PAT_MRT3847_23478C.1.pep
LALHYRNADHPSRVDTDVDGLLGRLRFIQGLKFQVDVTYMEFLLRVKRVEEHAKGNGTWDAPHPWLNLFVSKSHIVDFDREVFKKILKDGVDGPILVYPLLRNKWDSRHSVVVPDSDMFYIVALLRFTPPPPKGPAAELLVAQNNEIIEFCTSRSLDFKLYFPHYQSREDWIKHFGNQWARFAERKANFDPMAILAPGQKIFSRTSQPQPPSIT

SEQ ID NO: 200944 - protein, 104 aa, Glycine max
  Clone ID: PAT_MRT3847_23479C.1.pep
SRLSSNTRHPNSLTETRTHKGFAMMALSKLVRSAISLISRSTFLTSERSSLYRFFIDHSISVASRNYTNMTGHNDFTVKVALALFGRSGYYACALYNASAIANA

SEQ ID NO: 200945 - protein, 28 aa, Glycine max
  Clone ID: PAT_MRT3847_2347C.1.pep
RLPSVIWTRNSFCYRELIPSFSQRLIHF

SEQ ID NO: 200946 - protein, 98 aa, Glycine max
  unsure (1)..(98): unsure at all Xaa locations
  Clone ID: PAT_MRT3847_23480C.1.pep
MKVLDTLHEYKAGGLYMTTPKSHTPPMYRMRIFAHNHVVTKYTFWYFVSXLKKMKKSSXEIVYCSQVFEISPLQAKNISIRLRYESRKSTHNMYFVYR

SEQ ID NO: 200947 - protein, 66 aa, Glycine max
  Clone ID: PAT_MRT3847_23481C.1.pep
HECSLMHWSPEDFEKLQEAMKQTYQRAMKAATDFGYQKESPEALVHGAVISAFLTIAQAMTDQGSI

SEQ ID NO: 200948 - protein, 637 aa, Glycine max
  Clone ID: PAT_MRT3847_23482C.1.pep
MLLPTSGVRMNSAMDDMNLIQQTQRHHLVVREIGEEIDLEIGAGEDDPSFGSTTLIGAPMRESSVEEHGESKQMGMISQLPNDAQDMSKTQQGKRKKKVVKRWREEWADTYKWAYVDVKDGTPRIFCSVCREYGRKHRRNPYGNEGSRNMQMSALEEHNNSLLYKEALRLQMASKDKIVVDKPVYVKVAMSKTAGSILEATLKRDPHEVEFIQAVQEAVQALERVIAKNSRYINIMERLLEPERMIVFRVSWVDDRGGTCVNRGFRVQFNQSMGPCRGGIRFHPSMNLSVAKFLGFEQTLKNALSPYKLGGAAGGSDFDPKGKSDNEIMRFCQSFMSEMYRYLGPDKDLPSEEMGVGTREMGYLFGQYRRLAGHFQGSFTGPRIFWSGSSLRPEATGYGLVFFAQLMLADMNKELKGLRCAVSGSGKIAMHVLEKLIAYGALPISVSDSRGYLVDEDGFDYMKISFLRDIKAQQRSLRDYSKTYARSKYYDEAKPWSERCDVAFACTSQNEIDQSDAINLVNSGCRILVEGSNMPCTPEAVQILRKASVLIAPAMAAGAGGVVAGELELNHECSLMHWSPEDFESKLQEAMKQTYQRAMKAATDFGYQKESPEALVHGAVISAFLTIAQAMTDQGSI

SEQ ID NO: 200949 - protein, 167 aa, Glycine max
  unsure (1)..(167): unsure at all Xaa locations
  Clone ID: PAT_MRT3847_23483C.1.pep
PRACSPCAVPAWAGAARPVSLVFPXLKGKLNGIALRVPRLNVSVVDLVVNVEKKGLTAEDVNAAFRKAAEGPLKGVLDVCDVPLVSIDFRCSDVSSTIDSSLTMVMGDDMVKVVAWYDNEWGYSQRVVDLAHLVASKWPGAPKAGSGDPLEDFCETNPADEECKVYE

SEQ ID NO: 200950 - protein, 106 aa, Glycine max
  Clone ID: PAT_MRT3847_23484C.1.pep
MLLPTSGVGMNSAMDDMNLIQQTQRHHLVVREIGEEIDLEIGAGEDDPSFGNATLIGAPMRESSVEEHGESKQTGMISQLPNDAQDMSKTPQGKRRKKVVKRWREE

SEQ ID NO: 200951 - protein, 606 aa, Glycine max
  Clone ID: PAT_MRT3847_23485C.1.pep
MSRSLKAFNRHLTLLPLHQRTASSSSHAFIASSPLPLFPHLVSYPSFSFSLFRPLSSSAPATLMEVVKAIAKHEPAAPESVAIRADQKSYSYKQLITSAQKISNLLCGSDAQTGNLGGARIGIVAKPSAEFVAGILGIWLSGGVAVPLATSYPEVELLYVINNSDVSAILSTEDHTEIMQSVANKSSSQFFHLPPVLNKSSEKSRDKHSQNGGIHTDKILLDKFGRSSEDPALILYTSGTTGKPKGVVHTHRSIISQVQTLTKAWEYSSADQFLHCLPLHHVHGLFNGLMAPLYAGSTVEFLPKFSVRGVWQRWRESYPTDGSKAEEAITVFTGVPTIYARLIQGYHAMDPELQAASVSAAKNLRLMMCGSSALPLPVMQEWEAITGHRLLERYGMTEFVMALSNPLKGERKPGTVGKPFPGIQVKIIADEESVNGNTGMGELCIKSPSLFKEYWKLPEVTKESFTDDGFFKTGDAVTTDEDGYFIILGRTNADIIKAGGYKLSALEIESVIIEHPAVSECCVLGLPDKDYGEIVSAIVVPEADVKRKQDQESKPVLSLEELSNWAKDKIAPYKIPTQLIVWDKLPRNAMGKVNKKELKKLLVSEQ

SEQ ID NO: 200952 - protein, 129 aa, Glycine max
  Clone ID: PAT_MRT3847_23486C.1.pep
QKKPLRNSEPSPTPSRSRQNRGNNIEGDRRQQSKSSSSSRKGVPHAVSLPTSKKQNSQTTWKHGKHKQLENAERYNYNPVAAAAASVVVITLVSMIVWGRFCSIICTSAWLYLILQTTWTRRETSQDIM

SEQ ID NO: 200953 - protein, 39 aa, Glycine max
  Clone ID: PAT_MRT3847_23487C.1.pep
PLFKFSLTYNCERTPRGLVNHPNPICITKTPTNTRLESY

SEQ ID NO: 200954 - protein, 142 aa, Glycine max
  Clone ID: PAT_MRT3847_23488C.1.pep
ESFTDDGFFKTGDAVTTDEDGYFIILGRNNADIIKAGGYKLSALEIESVIIEHPAVSECCVLGLPDKDYGEIVGAIVVPQADVKLKRDQESKPVLSLEELSTWAKDKIAPYKIPTQLIVWDKLPRNAMGKVNKKELKKLLTI

SEQ ID NO: 200955 - protein, 272 aa, Glycine max
  Clone ID: PAT_MRT3847_23489C.1.pep
MNFFLIIIILTLNPCPFEVKFDGIYCWGVSLLHTEVKASAPATLMEVVKAIAKHEPAAPESVAIRADQKSYSYKQLITSAQKISNLLCGSDAQTGNLGGARIGIVAKPSAEFVAGILGIWLSGGVAVPLATSYPEVELLYVINNSDVSAILSTEDHTEIMQSVANKSSSQFFHLPPVLNKSSEKSRDKHSQNVGIHTDKILLDKFGRSSEDPALILYTSGTTGKPKGVVHTHRSIISQVQTLTKAWEYSSADQFLHCLPLHHILESFCVYII

SEQ ID NO: 200956 - protein, 69 aa, Glycine max
  Clone ID: PAT_MRT3847_2348C.1.pep
PRAESARALILLPKITSWPPPHPKPFDSNLRHSLSPRSSPSPPRSPSRSVLANAAPALSCLVVSVGLDA

SEQ ID NO: 200957 - protein, 99 aa, Glycine max
  unsure (1)..(99): unsure at all Xaa locations
  Clone ID: PAT_MRT3847_23490C.1.pep
XXSMIXLCKNFYIIHILKLNSKKNQYISLVLKKIRTPINDCLLSVQFKCKTVVWLGDEMSVQISANSPRPLHRASRHFLWLYNKTSFCAKCKPNHKYHS

SEQ ID NO: 200958 - protein, 91 aa, Glycine max
  Clone ID: PAT_MRT3847_23491C.1.pep
MSASDNAWGESDTIEITGKIMVEAIIFLFMVVVFVLVLHLYAKWFWWSMEENATPQPRHRRRRRRMFVFAPGQDSVIYETHQVGLDPSVLK

SEQ ID NO: 200959 - protein, 90 aa, Glycine max
  Clone ID: PAT_MRT3847_23492C.1.pep
PASYASTVVRVAGIATDDKLLFANTEGDVKHTETKQDETGWPEPTSASYHWVGKTEDGKEVTADLSGALGKTIDRVDVMAEVPGFIKTIV

SEQ ID NO: 200960 - protein, 151 aa, Glycine max
  unsure (1)..(151): unsure at all Xaa locations
  Clone ID: PAT_MRT3847_23493C.1.pep
NSDAFREVVQRLTGPSEASAAKEGDATKVATVKRNTSNFHERKKYMKPXLEIVKPTFNYRTGASFPPSPGSGSSSLLPSPTTPSTLFSQLKINLEDEKKEESVNTAEEEEEKAIKERRFYLHPSPRAKPGYTEPELLNLFPLASRNASEKV

SEQ ID NO: 200961 - protein, 121 aa, Glycine max
  Clone ID: PAT_MRT3847_23494C.1.pep
EWSKLRALYAGKEEILERHRHRYEVNPDYIETLEKGGLSFVGKDDAGVRMEVIEIKDHPWFVGVQFHPEYLSRVLDPSRPYLDFDAASAGMLEEITRDYQSGAANGINATGLVSHWNLFAV

SEQ ID NO: 200962 - protein, 36 aa, Glycine max
  Clone ID: PAT_MRT3847_23495C.1.pep
HINHAILYYYIFSKIMNLVISLKKHNIIIYSIIIPV

SEQ ID NO: 200963 - protein, 199 aa, Glycine max
  Clone ID: PAT_MRT3847_23496C.1.pep
PRVRSLIDFSRVQTLDFFNGYASPVESPISTSLPSHNFYERRSVNRNLWSHENGGVDVSLKDGLFSKSGHGNASLDHSYHTMGHEFSNGGGDLTGEFAGFMHKSHWHGASRSASTSPLRSRTQDNIKIFMTPRKLIHSLQEDLNDEISDCSEKPNRRIKSLSSGNIKLSPASYSKYDQNGIADHVNYDSKESGSLCGDG

SEQ ID NO: 200964 - protein, 195 aa, Glycine max
  Clone ID: PAT_MRT3847_23497C.1.pep
MEFRCLPLVFSLNLLLMTAHAAIPPEVYWERMLPNTPMPKAIIDFLNLDQLPLGYGAKKTQSEDDQPLWYGVKKTQSEDQPLPPFWYGVKKTQSEDQPLPPFWYGVKKTQSEDLPPLWYGVKKTQSEDLPPLWYGVKKTQSEDLPPFWYGVKKTQSEDLPPLWYGVKKTYVAKRSLSQEDETILVANGHQHDIPK

SEQ ID NO: 200965 - protein, 412 aa, Glycine max
  Clone ID: PAT_MRT3847_23498C.1.pep
MEFLLSFMVLRKPNQQMKFLHTFMVLRKSNQQMKFLLSFMVLRKPNQQIKFLLFFLMVLRKPNQQIKFLLFFSYGAKKTQSTDQVPPFFYGAKKTQSTDQVPIFYGAKKTQSTDQVPIFYGAKKIQSTDQTPLFLYGAKKTQSEDQVPIFWYGIKKTQSEDQPPLWYGVKKTYVAKRSLSQEDETILVANGHQHDIPKADQVFFEEGLRPGTKLDAHFKKRENVTPLLPRQIAQHIPLSSAKIKEIVEMLFVNPEPENVKILEETISMCEVPAITGEERYCATSLESMVDFVTSKLGKNARVISTEAEKESKSQKFSVKDGVKLLAEDKVIVCHPMDYPYVVFMCHEISNTTAHFMPLEGEDGTRVKAAAVCHKDTSEWDPNHVFLQMLKTKPGAAPVCHIFPEGHLLWFAK

SEQ ID NO: 200966 - protein, 83 aa, Glycine max
  unsure (1)..(83): unsure at all Xaa locations
  Clone ID: PAT_MRT3847_23499C.1.pep
FGRAQCRFFNQRLFNFSGTGXPDPTLNTTYLXAXXGKTCPQTGSRNTFXKLALSSPDHFRNNLFQNLSQHQGAFXNNQKLFFT

SEQ ID NO: 200967 - protein, 37 aa, Glycine max
  Clone ID: PAT_MRT3847_2349C.1.pep
YTRACTLIALVSSRPKGRPRPAHHTVATAKTLPSPSL

SEQ ID NO: 200968 - protein, 56 aa, Glycine max
  Clone ID: PAT_MRT3847_234C.1.pep
LSSFFFFFFSFFSLLSFFHGFVYCLIHKKGNPLNIFLAGPISRILTPECYLYSHKR

SEQ ID NO: 200969 - protein, 114 aa, Glycine max
  Clone ID: PAT_MRT3847_23500C.1.pep
PHGAGSYVGNRSFWQASFDEFFGLLTMYCMNKYQSIMQSLLVQGMENVSVIGSDAAKAISREMPVELLRASLPHTNDHQRKLLLDFGQRSVPVVGFNSYTGSSSGHVNSETVLS

SEQ ID NO: 200970 - protein, 66 aa, Glycine max
  Clone ID: PAT_MRT3847_23501C.1.pep
FFKIFHLSNLISIHQSISILYIYISPKTKKKIFFLSLTSKLTYTSIPTSYLFLYFHLNSINFTTFL

SEQ ID NO: 200971 - protein, 102 aa, Glycine max
  Clone ID: PAT_MRT3847_23502C.1.pep
FLKYSPSKKKWCPRDFWRFPLNPLNNSGEKRRGQNFKGVVSGDNYWGLTPLPKKKKVFLKRIPRPEISPFFPWKKKKTKKKKKKKKKKKKKKKKKKKKKKGR

SEQ ID NO: 200972 - protein, 41 aa, Glycine max
  Clone ID: PAT_MRT3847_23503C.1.pep
LTGGVRCLSILNLIFAIVFGGLALFLGSTLLTLMSNCSKPL

SEQ ID NO: 200973 - protein, 55 aa, Glycine max
  Clone ID: PAT_MRT3847_23504C.1.pep
MSGGEKEAMAEVKEWLAKTFESAGKSVPEFEYTPRSVKHLNHLMTLFKAKDESAR

SEQ ID NO: 200974 - protein, 46 aa, Glycine max
  Clone ID: PAT_MRT3847_23505C.1.pep
VLFGRAILQSNCIMSIMQRGRRSIMFHRPFHHICFHLSMNPSVLGI

SEQ ID NO: 200975 - protein, 59 aa, Glycine max
  Clone ID: PAT_MRT3847_23506C.1.pep
TSEGVSAFGAHYTLRPKPRLKALFSLSDILTLSNHIPMVIYTKRLQFRPTWLYGGLNRE

SEQ ID NO: 200976 - protein, 39 aa, Glycine max
  Clone ID: PAT_MRT3847_23507C.1.pep
SDFFLLSFDIINITNYFNGYFLSFFFLIGQNKTPQTQKN

SEQ ID NO: 200977 - protein, 103 aa, Glycine max
  Clone ID: PAT_MRT3847_23508C.1.pep
SSRKLRVLALLGPSARFHTHSQTIFARTKMAADGHSNVPSHSTQHKHDDSHLWPNLCHTDTNSLCMMVNYRHGRHKHDVGPTTNERVDLCAASGVPTATTSDL

SEQ ID NO: 200978 - protein, 42 aa, Glycine max
  Clone ID: PAT_MRT3847_23509C.1.pep
HLALLVVLLHMYSKSVPFVSDSSAELLEMVGCEFTYSFETPL

SEQ ID NO: 200979 - protein, 34 aa, Glycine max
  Clone ID: PAT_MRT3847_2350C.1.pep
PPTEASNAGGDYHQRLFLGAERNCWEAGRRGRKT

SEQ ID NO: 200980 - protein, 63 aa, Glycine max
  Clone ID: PAT_MRT3847_23510C.1.pep
RCSSCSTLPPGCNQGHSLQVQVIQSNGSWLIKLGTTTTTKIQPKVVGFGFISIRRTGYLLSSF

SEQ ID NO: 200981 - protein, 34 aa, Glycine max
  Clone ID: PAT_MRT3847_23511C.1.pep
KSSGEQRYYPCHQNLAKTKNKHNNHQNSCSFNSA

SEQ ID NO: 200982 - protein, 77 aa, Glycine max
  Clone ID: PAT_MRT3847_23512C.1.pep
HYGMLMHALYNTLYGPHDSTKWEDHCYAMMRTYSYDLFTLYHLMYKLEKQLPAVATEDIDDKLLHLYAYENPRQPVR

SEQ ID NO: 200983 - protein, 431 aa, Glycine max
  unsure (1)..(431): unsure at all Xaa locations
  Clone ID: PAT_MRT3847_23513C.1.pep
MRLVISAVCVIVLFSYAAAYDPLDPNGNITIKWDVVSWTPDGYVAVVTMSNFQMFRHIMNPGWTLGWTWAKKEVIWSMVGAQTTEQGDCSKFKGNVPHCCKKTPTVVDLLPGVPYNQQFSNCCKGGVVAAWGQDPSSAVSSFQVSIGLAGTSNKTVKLPKNFTLLGPGPGYTCGPAKVVPSTVFLTPDKRRKTQALMTWNVTCTYSQFLARKNPGCCVSLSSFYNETITPCPTCACGCQNKRNCVKSNSKRINMXGIHTPKKDNEPLLQCTHHMCPIRVHWHVKLNYKDYWRVKVAVTNFNYRMNYSLWTLAVQHPNLNNVTQVFSFDYKPLLPYESINDTGMFYGMKYFNDLLMEAGPTGNVQSEILLQKNQDTFTFKQGWAFPRKVYFNGEECMLPPPDSYPILPNSAPVNLLNFPAFVLTMLVMITVW

SEQ ID NO: 200984 - protein, 344 aa, Glycine max
  Clone ID: PAT_MRT3847_23514C.1.pep
MSMSVAEDDESSEEVHVPGEIDWQMLDKSKFFFLGAALFSGVSAALYPVVVLKTRQQVAQSQVSCINTAFSLIRGEGFRALYRGFGTSLMGTIPARALYMAALEVTKSNVGTATVRFGLAEPTAAAVANAAAGLSAAMAAQLVWTPVDVVSQRLMVQGVSDSGNPKASALRYINGIDAFRKILSSDGLRGLYRGFGISILTYAPSNAVWWASYSVAQRMVWGGVGYYLCKGNDSAANSALKPDTKTVMAVQGVSAAVAGGMSALITMPLDTIKTRLQVLDGNENGRRGPTAMQTVRSLVREGGWMACYRGLGPRWASMSMSATTMITTYEFLKRLSAKNQEVLT

SEQ ID NO: 200985 - protein, 74 aa, Glycine max
  unsure (1)..(74): unsure at all Xaa locations
  Clone ID: PAT_MRT3847_23515C.1.pep
SLPPAXXIYIFPRFLHLHFIDSVLIQKFTFTKYPFLLPANTDKPKILIPPPPPPPILNRNHTRFFLSTSPTPSS

SEQ ID NO: 200986 - protein, 175 aa, Glycine max
  Clone ID: PAT_MRT3847_23516C.1.pep
SRFLSCSLILRKIADKCDRCGHNYGHRHSKNLDFTAKILFFKTLFSTTPQKNPELKSELSYKNTLRPSPSTTLTVQTLQTQQRKLENKGNIKKIKKEKKRNSSCTIRKLQSSVTKLEGKYHRVYGNEVSGIFFLLWNQVLDRTCDTMNRSSISKLTKGVLQTIHTGKVIKIGASD

SEQ ID NO: 200987 - protein, 123 aa, Glycine max
  Clone ID: PAT_MRT3847_23517C.1.pep
RMVWGGVGYYLCKGNDSALKLDTKTVMAVQGVSAAVAGGMSALITMPLDTIKTRLQVLDGDENGRRGPTAMQTVRSLVREGGWMACYRGLGPRWASMSMSATTMITTYELLKRLSAKNQEVLT

SEQ ID NO: 200988 - protein, 113 aa, Glycine max
  unsure (1)..(113): unsure at all Xaa locations
  Clone ID: PAT_MRT3847_23518C.1.pep
GPGNSRRRPTRPIRWQHLEGMRYETASQNSPEIDACSIASADEEHSAKQTALVELHKVVTGXQRVVTGTLDTITLEAQDVGHEKVYEANXWGRSAWMNVKDEQEFKLAGDARC

SEQ ID NO: 200989 - protein, 36 aa, Glycine max
  Clone ID: PAT_MRT3847_23519C.1.pep
ALSTPPIVLTITTNTTRNSMLLSQTSILIIYLSFIS

SEQ ID NO: 200990 - protein, 44 aa, Glycine max
  Clone ID: PAT_MRT3847_2351C.1.pep
LPFKAPCIVVIQDALMGRRSLTSLNLLIEPSAPSHSMSLSLPFL

SEQ ID NO: 200991 - protein, 28 aa, Glycine max
  Clone ID: PAT_MRT3847_23520C.1.pep
SEFGSRGWQGLWAGNMINMLRIVPTQAI

SEQ ID NO: 200992 - protein, 97 aa, Glycine max
  unsure (1)..(97): unsure at all Xaa locations
  Clone ID: PAT_MRT3847_23521C.1.pep
LPXCPWFLLXVXLLXLGXCLGVLCPPXGGCFVGFXGXXGGSPWGGKNFPWLFSFVLVXXCLVFLVCFGLPLACFGPFFGGLFPSLPXXCLSXPSPLX

SEQ ID NO: 200993 - protein, 64 aa, Glycine max
  Clone ID: PAT_MRT3847_23522C.1.pep
YIIKDTCQVQAEASSLVDIVIYSDWRNDVLVWLPRCHVSNYIKASFSISMIQFLMVRNQFLYNA

SEQ ID NO: 200994 - protein, 323 aa, Glycine max
  Clone ID: PAT_MRT3847_23523C.1.pep
MGSSLVEIQVPGQKFVNGVPFPAVVSPPPATASAVPLTDSVKTQKAFLESLLLQSGAVLFRGFPLSTASHFNDVVEAFGYDELPYVGGAAPRTNVVGRVFTANESPPDQKIPFHHEMAQVPQFPSKLLFFCEVEPRSGGETPIVLSHVVYQRMKDKYPEFVERLEKHGLLYTRVLGEDDNPNSPIGRGWKSTFLTTDKTLAQQRAAKLGMKLEWLEDGVKTVMGPIPGVKYDERRQRKIWFNSMVAAYTGWEDERNDPVKAVTFGDGLPLPFHIVYDCLHILEDESVAIPWQKGDILLIDNWAVLHSRRSFDPPRRVLASLVK

SEQ ID NO: 200995 - protein, 66 aa, Glycine max
  Clone ID: PAT_MRT3847_23524C.1.pep
GHHLIRSFGVFPMDISPGLELSSSLSCFQSSISVCSPSQVYQQNLSHWVRLHMVIQFPPQPCTKIN

SEQ ID NO: 200996 - protein, 35 aa, Glycine max
  Clone ID: PAT_MRT3847_23525C.1.pep
PCIMLSIAGNDPIVLLWPCNRIQLSHLHRKRGTLD

SEQ ID NO: 200997 - protein, 53 aa, Glycine max
  unsure (1)..(53): unsure at all Xaa locations
  Clone ID: PAT_MRT3847_23526C.1.pep
ARKGLELNLNDKVSGFLKTKVESTNAYLIHCGNQTLKQXTRFKHANTVFENLT

SEQ ID NO: 200998 - protein, 395 aa, Glycine max
  Clone ID: PAT_MRT3847_23527C.1.pep
ASPGREKGSSTQWTEPHHCHHLRFRNNKACQSHFHYPFLLMKLVVEILSRLPVKSLLQFRCVCKSWMSLIYDPYFMKKHLHLSSRSTHFTHHRIILSATTAEFHLKSCSLSSLFNNLSTVCDELNYPVKNKFRHDGIVGSCNGLLCFAIKGDCVLLWNPSIRVSKKSPPLGNNWRPGCFTAFGLGYDHVNEDYKVVAVFCDPSEYFIECKVKVYSMATNSWRKIQDFPHGFSPFQNSGKFVSGTLNWAANHSIGSSSLWVIVSLDLHKETYREVLPPDYEKEDCSTPGLGVLQGCLCMNYDYKKTHFVVWMMKDYGARESWVKLVSIPYVPNPENFSYSGPYYISENGEVLLMFEFDLILYNPRDNSFKYPKIESGKGWFDAEVYVETLVSPMKH

SEQ ID NO: 200999 - protein, 64 aa, Glycine max
  unsure (1)..(64): unsure at all Xaa locations
  Clone ID: PAT_MRT3847_23528C.1.pep
CIMLYEDLNTFTTVSIIFKEDFXFIFDELDDGNVLTINNDEFADIGRAIALKFQKEQVMIYFEN

SEQ ID NO: 201000 - protein, 71 aa, Glycine max
  Clone ID: PAT_MRT3847_23529C.1.pep
IFLKCRGGIYPINIHLQHTAQFLVQKMNRIHQILPSATPLPSSKTHYSDIKCLLYNIQELLTSTTEMYDHS

SEQ ID NO: 201001 - protein, 99 aa, Glycine max
  unsure (1)..(99): unsure at all Xaa locations
  Clone ID: PAT_MRT3847_2352C.1.pep
MVDIMLFKVDHGNLKHMVKRDKFENTLLGKDXKIQILPSHTIEPVPIVIGGYGLAPGVKFXRTNVPTGGLANVAAXVMNFHGFEAPRXYEASLIKVVDK

SEQ ID NO: 201002 - protein, 47 aa, Glycine max
  Clone ID: PAT_MRT3847_23530C.1.pep
LEKKEIVFFFGQPEKEIVDNSILSFVAFLNIISILHLHYRFNKEYMI

SEQ ID NO: 201003 - protein, 238 aa, Glycine max
  unsure (1)..(238): unsure at all Xaa locations
  Clone ID: PAT_MRT3847_23531C.1.pep
IFWRIFTDSPLPVAYVFVLTNALFQWLVLAAVAWARWASSGASSPSLSIWRRKKEMGKEGLVVAKELKXFIRSSVSRLLKSDLVVVLAEFQRQNQFFLCVKLYDIVRKEIWYRPDLFFYRDMLMMLARNKRVEEAKKVWGDLKTEEVLFDQHTFGDIIRAFLDNGLPSEAMDIYEEMRQSPEPPLSLPFRVILKGLIPYPELREKVKDDFLEIFPGMIIYDPPEDLFEDNKQHNDRDN

SEQ ID NO: 201004 - protein, 80 aa, Glycine max
  unsure (1)..(80): unsure at all Xaa locations
  Clone ID: PAT_MRT3847_23532C.1.pep
KTYXSXFLITRFXGSFVSPCSLFKNAKHIYKFFSTHSIPSIARTLKQSLDRVNINSNLLHSVQNENMLGYPMNELAYRVY

SEQ ID NO: 201005 - protein, 161 aa, Glycine max
  unsure (1)..(161): unsure at all Xaa locations
  Clone ID: PAT_MRT3847_23533C.1.pep
QWPKYIPLNFIFFLLPLSVVRVGSRNWARWASGVASSPSLSIWRRKKEMGKEGLVVAKELKRLRSDLXRLDLFIQSSVSRLLKSDLVAVLVEFQGQNQVFLCTKLYDIVRKEIWYRPDMFFYRDMLMMLARNKRVEEANSVWGDLKEEEVLFDQHTFGDII

SEQ ID NO: 201006 - protein, 154 aa, Glycine max
  Clone ID: PAT_MRT3847_23534C.1.pep
SEYMKIIIELERQHEICLKDLEDKQLTTRLTFQEISAPDELINPVTSNKSGTKVDQTCDQAQHSNAPKDLVSDHVVEGEGFNDIVEIMTRTGTGIGLSEAPDANASVVVPCSSTVELQTPLVKHAYANEMDIVASKDGPVSGNKCYNVAENEYD

SEQ ID NO: 201007 - protein, 97 aa, Glycine max
  Clone ID: PAT_MRT3847_23535C.1.pep
KKNPWKKKLFKSKMGGGEKKKNLSRALLETPGHIQERVFKARAASVKKVFFFSAEEMQNLVKPYSKSPNVLKGGEKKKKAPPPPQFFLRKKKIFWGF

SEQ ID NO: 201008 - protein, 81 aa, Glycine max
  Clone ID: PAT_MRT3847_23536C.1.pep
QTKEIFIDDEHAQQQPIKQIHMHTPYCDHMPIIKTRRQSRFDENYQGSNLHIGNPYRTTHIYRPHLIFLRLHNIKQTFPNP

SEQ ID NO: 201009 - protein, 131 aa, Glycine max
  unsure (1)..(131): unsure at all Xaa locations
  Clone ID: PAT_MRT3847_23537C.1.pep
LLGGRPPFFVGAPLXFPXFPCLCVFLVPFPXGFSPLPCXRPSFXLWPGPRRRLSGXGGYSFPGGCPLVLSFXRPPPWGLLVYFSFNWRPLAXLPPPPCLXLGPVLGGLPSFPLPGFFHARPGPAPGWPHWI

SEQ ID NO: 201010 - protein, 88 aa, Glycine max
  Clone ID: PAT_MRT3847_23538C.1.pep
HASGQGLKAATKKEKYDNICEKKLSTTIEMLCKSYPAEFATYFHYCQSLTFDQHPDYGYLKRLFRDLFKREGIGCLFYHILDFKYFFC

SEQ ID NO: 201011 - protein, 161 aa, Glycine max
  unsure (1)..(161): unsure at all Xaa locations
  Clone ID: PAT_MRT3847_23539C.1.pep
MLRSLTKLRCLAVQSRQVLSPPSSRRLLHHLPPPQSLHSASNFRISSPSFIFSWCPPHASQPSPSLVQVRHASSKERKRKPVPPTVSKVKKTKMKSYSSFKSRFRAMNDGNIRRWKEGKRHNAHLKKIELLXSKKSKRRLRKPGIVPAAYAKVMKKLNFFA

SEQ ID NO: 201012 - protein, 66 aa, Glycine max
  Clone ID: PAT_MRT3847_2353C.1.pep
RCFESQLTQSCSFASASLNRCRSDSTSRDLCSLKQVSHPETETLRPLPFMSSLDRPYRTLWVRPGN

SEQ ID NO: 201013 - protein, 43 aa, Glycine max
  Clone ID: PAT_MRT3847_23540C.1.pep
FMCTFLFRNTQSLRLDARIYLMTMCYAQEWMLIKHSMLDARVK

SEQ ID NO: 201014 - protein, 99 aa, Glycine max
  Clone ID: PAT_MRT3847_23541C.1.pep
RNRRGQAKRDPSQEHRLLFGVSSKSHEQSQEELKVSVPVPHGQATWPAFLRWSVSYCLIWAITILPSIIEVSKIRKSGSFHMIGTVSSVVQATVFAKGQ

SEQ ID NO: 201015 - protein, 120 aa, Glycine max
  unsure (1)..(120): unsure at all Xaa locations
  Clone ID: PAT_MRT3847_23542C.1.pep
LARVDPQLTTGIKGMINLVATVGIPENNXLSVSPVYIKKEYFMLRARTDFYTICFXDCKLWNAARTDSMTEPFFTNPYSEAWSKELLNRTVLQGDIMGVTGRTATPMQYVEVTIDGFISC

SEQ ID NO: 201016 - protein, 115 aa, Glycine max
  Clone ID: PAT_MRT3847_23543C.1.pep
TRGAQQGKVALANEAKQGGVPAYSGKDPKLKKGGQRKGASEGGTPAGGKPAGFATGPPRRETTRAGPKKKRCQHSGRQEGRKACARKAAPPFFCFFFFFFFFFFFFFFFFFFFFF

SEQ ID NO: 201017 - protein, 373 aa, Glycine max
  unsure (1)..(373): unsure at all Xaa locations
  Clone ID: PAT_MRT3847_23544C.1.pep
MDVAVSGNSLAGTSTPYNRLQELKAFDESKAGVKGLVDSGITKLPKIFVRPPEDLAAADPVSGNPAGAQFTIPIIDLDGLTGERSGVVAGVRRAAETVGFFQVVNHGIPVKVLEETMAAVHEFHELPQELKAEYYSREQMKKVKYGSNFDLYQSKYANWRDTLFCVMGPDPLDPQELPPIXDVAMEYSRQVKLLGRVLFGLLSEALGLDPDHLEGMDCAKGHSILFHYYPSCPEPELTMGTTRHSDPDFLTILLQDHIGGLQVLGPYGWVDVPPVPGALVVNIGDLLQLISNDKFKSVEHRVLANRIGPRVSVACFFTLHLYPSTRIYGPIKELLSEEKPPVYRETSLKDFIAYYDNKGLDGNSALDHFMISR

SEQ ID NO: 201018 - protein, 170 aa, Glycine max
  Clone ID: PAT_MRT3847_23545C.1.pep
MDVAVAGNSTPYNRLQELKAFDESKAGVKGLVDSGITKLPKIFVRPPEDLAAADPVSDNPAGAQFTIPVIDLDGLTGERSGVVAGVRRAAETMGFFQVVNHGIPLKVLEETMAAVHEFHELPQELKAEYYSKEQMKKVKYGSNFDLYQSKYANWRDTFFWVEGADPFVDP

SEQ ID NO: 201019 - protein, 75 aa, Glycine max
  Clone ID: PAT_MRT3847_23546C.1.pep
GSNLGYQSFINMPATYERINHSPATSYSMLVELIHLMILRLGFSSIHPAHLSHWYPWPFPAALCPPIYPRQQLVS

SEQ ID NO: 201020 - protein, 136 aa, Glycine max; identical to SEQ ID NO: 150528
  Clone ID: PAT_MRT3847_23547C.1.pep

SEQ ID NO: 201021 - protein, 143 aa, Glycine max
  unsure (1)..(143): unsure at all Xaa locations
  Clone ID: PAT_MRT3847_23548C.1.pep
MARTKQTARKSTGGKAPRKQLATKAARKSAPTTGGVKKPHRYRPGTVALREIRKYQKSTELLIRKLPFQRLVREIAQDFKQITDIFXTDLRFQSHAVLALQEAAEAYLVGLFEDTNLCAIHAKRVTIMPKDIQLARRIRGERA

SEQ ID NO: 201022 - protein, 112 aa, Glycine max
  Clone ID: PAT_MRT3847_23549C.1.pep
ATRKSAPTTGGVKKPHRYRPGTVALREIRKYQKSTELLIRKLPFQRLVREIAQDFKTDLRFQSHAVLALQEAAEAYLVGLFEDTNLCAIHAKRVTIMPKDIQLARRIRGERA

SEQ ID NO: 201023 - protein, 100 aa, Glycine max
  Clone ID: PAT_MRT3847_2354C.1.pep
KNYLELKDRTHHFKLKAYQKEKIILVGSIKFQFHGYYRGGSLCAKNRQQKAPEYNRRQKKRNPPDLSMLLSPKTHTYLLRIYFTSSSLLSKQENNSKQSY

SEQ ID NO: 201024 - protein, 62 aa, Glycine max
  Clone ID: PAT_MRT3847_23550C.1.pep
PWRSSSSSFASTSLCAPEMSVPALPTSSRALINKACPYDRVGITSDFLFILPLQYTAGLKIF

SEQ ID NO: 201025 - protein, 85 aa, Glycine max
  Clone ID: PAT_MRT3847_23551C.1.pep
ASKACRKGSVQLKWLLNRWNESFKTKDEMREIQVLKSGISRRHENIQASKYVEQKAKKSVSDVPVEEIEVLPKDIKCYYIMFEHI

SEQ ID NO: 201026 - protein, 124 aa, Glycine max
  Clone ID: PAT_MRT3847_23552C.1.pep
NMVFTFESQKSVPAPFLTKTYQLVDDPHTDHIVSWGEDETTFVVWKPPEFARDLLPNYFKHNNFSSFVRQLNTYVSILIFSYVLLYNPYSSSLLHFTSLSLKVKLFPFEQIDQILMLEVKYDGT

SEQ ID NO: 201027 - protein, 66 aa, Glycine max
  Clone ID: PAT_MRT3847_23553C.1.pep
RSGLPGPIHAFDIFVGFLAFEASKMTWSYIKWTASLLPSNSNFGCRPHSILGLYSQDGANLESFRN

SEQ ID NO: 201028 - protein, 114 aa, Glycine max
  unsure (1)..(114): unsure at all Xaa locations
  Clone ID: PAT_MRT3847_23554C.1.pep
PHXXASHHHYQPXPPTTHSCCSCHNFFSFFFAHXXLFVRRGTPVAHPHHPVTTTKCFKPFHHSSLNPNHALFPSPPRRPAPNPSFIIISSWRLKTTTFFFLXXPDLISPSSSLL

SEQ ID NO: 201029 - protein, 102 aa, Glycine max
  unsure (1)..(102): unsure at all Xaa locations
  Clone ID: PAT_MRT3847_23555C.1.pep
MEGGPGRCYRQIKNKPYPKAMYCREVPDPKIRIYDDGMNRKGVDENPYCXHLVNXEKENVSIDAHKAACIACIKYMTNSEGKDAYHLPVRVHPLHVHGINKM

SEQ ID NO: 201030 - protein, 44 aa, Glycine max
  unsure (1)..(44): unsure at all Xaa locations
  Clone ID: PAT_MRT3847_23556C.1.pep
XXXRXXAKXSXXXPESPXAXPXLTXXXPTTXSSXIXSLRXXXXT

SEQ ID NO: 201031 - protein, 87 aa, Glycine max
  Clone ID: PAT_MRT3847_23557C.1.pep
FYCSKRDSKKKKHWELRSGKCKTLAEENGNRRLKRRTRTRFSESENGTEHFGVERRGKRRRCGGVRAQRTRRLSLLASPRLSSSRSR

SEQ ID NO: 201032 - protein, 126 aa, Glycine max
  unsure (1)..(126): unsure at all Xaa locations
  Clone ID: PAT_MRT3847_23558C.1.pep
MWTIQFTQEMVGAPEPLLYLLGVHIALMQQQPNTMTIIVPQHPQQGREVAKXQKLEKEGQNVVLRSQYEKFKPRANIYVVDTLGELRLLYTLMPITVIGGSLLPGWSGHNISEAAAAGCAVLTGQC

SEQ ID NO: 201033 - protein, 38 aa, Glycine max
  Clone ID: PAT_MRT3847_23559C.1.pep
KFGSSIVSTKVELVWASNCNLYDDCLSISFTQFAHVKD

SEQ ID NO: 201034 - protein, 66 aa, Glycine max
  Clone ID: PAT_MRT3847_2355C.1.pep
KGWGGQFFRKEIKSGRPLKKQLLYHGDRDELKTWLYNVLMMTMITGMGWSKRWVLILQRGKSFFEL

SEQ ID NO: 201035 - protein, 146 aa, Glycine max
  Clone ID: PAT_MRT3847_23560C.1.pep
NAPITMKEALTLPSIGINSQFITFTHVTMESDKYICVRETAPQNSVVIIDMNMPNQPLRRPITADSALMNPNSRILALKAQLQGTTQDHLQIFNIEMKAKMKSYQMPEQVVFWKWISPKMLGLVTQTSVYHWSIEVTLNCKMLRDS

SEQ ID NO: 201036 - protein, 91 aa, Glycine max
  unsure (1)..(91): unsure at all Xaa locations
  Clone ID: PAT_MRT3847_23561C.1.pep
GHFSHMVLEMQRSNPLSVLQFTCXVSGKLELEHALIELFTNATLQVRGRAAKEAFCWLSSCGVVENIWSLLNFHIFVCRGIQESKTMRNEV

SEQ ID NO: 201037 - protein, 252 aa, Glycine max
  Clone ID: PAT_MRT3847_23562C.1.pep
LRVVSQSLGLQYLILTLSWDGGAKEAFNVLRSTVDRSYFPDGQTFCTLASALCRERKIDEMKELLYLGVGRNIVPPTSMYDKYISALCRAGRVEDGYLVHGELKSVAAKTSYVKMIKGFVKSGRGDTAARLLVEMNGKGHTPIPRLCRYVICSLLEMDNSRGRFFNLLEMLTRCQHSCETYNFFLDGAGHAMKPELAREVFELMQRNGITPNMCSLILMMNGYLISGRISDALDFFNDVQRRGLATKSYMLP

SEQ ID NO: 201038 - protein, 45 aa, Glycine max
  Clone ID: PAT_MRT3847_23563C.1.pep
IDPKSWHDDLKGAGNIASNRKITGVRVNQKRAAFFYEPFNKIVLV

SEQ ID NO: 201039 - protein, 363 aa, Glycine max
  Clone ID: PAT_MRT3847_23564C.1.pep
RDLDLYSYCESCLLPFQFKCHVGYVPSGQRVVGLSKLSRVVDVFAKRLQEPQRLADEVCSALHQEILPAGVAIVLQCTHIPFPDIESIFLESNQQVWVKTLVLSGSGIFENKSEDAWSDFFCLLRFRGIKIENIHLRGSSDQCWCPSLTALSAKVSSKIVPVNPAMVTAVSSILDSLGEDSLRKELAGTPSRFVKWLLNFQSIDMDVKLNRSLCDGIDTLNLDREVNFNDRQIHSELNLPFWSQCEHHILPFHGVVHIGYFLSEGSNPIGKSLLQSVVHFYGFKLQVQERLTRQIAETIAPLLLGGHVIVVVEASHTCMISRGIEKFGSSTATIAVLGRFSTDLAARDAFLQCVASATTSGGQ

SEQ ID NO: 201040 - protein, 78 aa, Glycine max
  Clone ID: PAT_MRT3847_23565C.1.pep
NKKQQLTRINLLPQPAKTMCSNKEEWSWPSYTSPSPLTQHVLQISLFLFVSFFYYQSKQHIFAVIFNFYTFFLHLFSF

SEQ ID NO: 201041 - protein, 67 aa, Glycine max
  Clone ID: PAT_MRT3847_23566C.1.pep
MASASSMALPSPSLAGKAVMLGPSAPEVRRVSMRKTVTEQVSAGSASYGLDRVTYLGPISGQPTSVP

SEQ ID NO: 201042 - protein, 84 aa, Glycine max
  Clone ID: PAT_MRT3847_23567C.1.pep
EHKHKQLFVAIKKITGLNIDGIWCMDDDILKKEALSFLKILFQKNDYCCPQSMVINTILRISDELYQGLMKQFSCLRLDNLCLL

SEQ ID NO: 201043 - protein, 51 aa, Glycine max
  Clone ID: PAT_MRT3847_23568C.1.pep
KISPRIDYIIMMHKHHYTMTLRNSYADRSPTFNALIQCYENCTSYLKCKHK

SEQ ID NO: 201044 - protein, 77 aa, Glycine max
  Clone ID: PAT_MRT3847_23569C.1.pep
SAFAIKVILFDKHSVVGTNDGLVNILWRQQVLCGALTIDRLDIWPGSTIALREKDFPHYIMWHLFTLLIYILPSFLT

SEQ ID NO: 201045 - protein, 41 aa, Glycine max
  unsure (1)..(41): unsure at all Xaa locations
  Clone ID: PAT_MRT3847_2356C.1.pep
FRPXRXFLLFFVIILDVTRDDFVLQGRRSCKPDLATSKEDN

SEQ ID NO: 201046 - protein, 91 aa, Glycine max
  unsure (1)..(91): unsure at all Xaa locations
  Clone ID: PAT_MRT3847_23570C.1.pep
RLNIWAPKGXXFLXVXXCVSALSLXSPSVAVGRQXXGXVXNFYXDHDPQXXXIITXQVXLLYXHHKNTXFSXLXNIFHDCXVXXCDAXLLL

SEQ ID NO: 201047 - protein, 49 aa, Glycine max
  Clone ID: PAT_MRT3847_23571C.1.pep
SPPFFAFGSGFFLHFLPFAPQPLSSQSTFLNPHILVPNELTFFPHLLQL

SEQ ID NO: 201048 - protein, 62 aa, Glycine max
  Clone ID: PAT_MRT3847_23572C.1.pep
CLFFLVSLSLFVSQDFRYKPLIFLEKIVPLRTCMLDPRFAAFLITIFHDVFHQRILHFLPQI

SEQ ID NO: 201049 - protein, 79 aa, Glycine max
  Clone ID: PAT_MRT3847_23573C.1.pep
TPPPQDIVVRGLCIAAAAFGVTWLALILITLLYNGIAGLNLEIFVADTPPPGSTEGGLRNAIVGSIIMTVLGVGIGAPL

SEQ ID NO: 201050 - protein, 44 aa, Glycine max
  unsure (1)..(44): unsure at all Xaa locations
  Clone ID: PAT_MRT3847_23574C.1.pep
VFSFSFFFFLLLSFSXMXIINRSATSSAPYSAREXXFMAYGACK

SEQ ID NO: 201051 - protein, 83 aa, Glycine max
  Clone ID: PAT_MRT3847_23575C.1.pep
CPKVDQNKRRRESSVEIKVINLPNILYLVETKIYAICPPQKWCFCPPKFGLFLLNKSKKTLLYFQHQGWAQFCINIISKVWVS

SEQ ID NO: 201052 - protein, 79 aa, Glycine max
  Clone ID: PAT_MRT3847_23576C.1.pep
QSYIKFSIHVAIDIHINVPKAKKNVNSEKGYIENKISIHNHSFATDNLLSKTLMNSKVKNASHQFCARHIQRDATPRAE

SEQ ID NO: 201053 - protein, 69 aa, Glycine max
  unsure (1)..(69): unsure at all Xaa locations
  Clone ID: PAT_MRT3847_23577C.1.pep
WKQKFDSNGYNFNFIKKCXEVMKEDVVRAIQEFHSHGCLSRGTNASFLTHPPXGLGDFRPVTLVGSLCK

SEQ ID NO: 201054 - protein, 58 aa, Glycine max
  Clone ID: PAT_MRT3847_23578C.1.pep
PRPRKLGGPCGQKTVKFFLAPWQIFPKKWKMGVFPKLFIIPSFLSKPPLFFFPGGGLY

SEQ ID NO: 201055 - protein, 118 aa, Glycine max
  Clone ID: PAT_MRT3847_23579C.1.pep
FGVSSTSHRSPLGCRNRELHDLYCFASLLLVNLGNWLCSYVLLWIFCVGFFSELCVLLSFKGAGVVCTSPIRGLQSYPVFEYAYPSLLSNWGVALLDSCYVYAWGVRVAALFVVLTSF

SEQ ID NO: 201056 - protein, 214 aa, Glycine max
  Clone ID: PAT_MRT3847_2357C.1.pep
MVKFTTHRLRHIMDCKHNIRNMSVIAHVNHGKSTLTDSLVAASGNIIAQEGEAERGNTVKSSGISLYYAMPEGDLKNFKGEREGKEFLINLIDSPGHVDFSSEVTTALRITDGALVVVDCVEGVCVQTETVLRQALGERVKPVLALNKMDKCFLELNLDPEEAYLTLQRVVESVNVIMGNYEDALLGDVKVYPEKGTVAFSAGLHGWGFTLTNF

SEQ ID NO: 201057 - protein, 68 aa, Glycine max
  Clone ID: PAT_MRT3847_23580C.1.pep
HACQHNIKFLLMQYTFATCEFQFNPHNIQTQKKKNLFFLFFTSTLLCFNLLHLNIHTQFFQYLPTIPS

SEQ ID NO: 201058 - protein, 106 aa, Glycine max
  Clone ID: PAT_MRT3847_23581C.1.pep
MQLIKRINQCCYPLQWKGLANAAKERSCYWRFLLLKLSIIRADILSDGNGDDMAEIEALLEEASELVDGSQQKNPNYYLTYKVKYVMKRQDNGSWKFCENDIIESP

SEQ ID NO: 201059 - protein, 107 aa, Glycine max
  Clone ID: PAT_MRT3847_23582C.1.pep
ANATSSRQPKNLTFTVSMEDRVFFFQYSIVKTILNSVFHDLMTTTPHHYCQHLLYIHQVQFRPTTPSTFPLLRIIVLRFSCTNFVKVVTKSELFTLLDDSECACVQL

SEQ ID NO: 201060 - protein, 63 aa, Glycine max
  Clone ID: PAT_MRT3847_23583C.1.pep
ALDGDHWTSSSRGGWTGLSSLKSSQWQAKDMKKNNLEYSRALLYYHLCDLCQPRTEWVSYSKL

SEQ ID NO: 201061 - protein, 246 aa, Glycine max
  Clone ID: PAT_MRT3847_23584C.1.pep
MSHILTTLLGHYPSLFTNFTLSTSQQKTHFFFFGLEERRMERKVLILCSVVAFLGLLSAATSFGAEATRIKVSQVHFVTPNQCTYPRSPALPLGLIAAVALVLSQIIINVGTGCVCCRKNLQIPDSNWKVALACFVLSWFTFVIGFLLLLTGAALNDQRGEESVYFGYYYCYVVKPGVFAGGAILSVASAAFGILYYISLTEKNNGIQYPYPNQGVIAMAQPQIPSQTSQEPVFVHEDTYIRRQFT

SEQ ID NO: 201062 - protein, 54 aa, Glycine max
  unsure (1)..(54): unsure at all Xaa locations
  Clone ID: PAT_MRT3847_23585C.1.pep
MVNSDVSTRLEGKYAAIVVCXLIGNGCLFSXNSMLTIEDYYGYLCYKYHPSRCL

SEQ ID NO: 201063 - protein, 85 aa, Glycine max
  unsure (1)..(85): unsure at all Xaa locations
  Clone ID: PAT_MRT3847_23586C.1.pep
TKVMDKIHGAVQCFVCTFLHLALTVVIFQXXPHNFEFPVVYIMARHYLLSHHDNHQELECCSSIIVSSSSISVIIFTIDXXXXTK

SEQ ID NO: 201064 - protein, 230 aa, Glycine max
  Clone ID: PAT_MRT3847_23587C.1.pep
MGSNRAEVRGSQRLQALIHHLHSSIPSDSNEPNSKFTVWKKRAAVLICVFEGADGNLRVFLTQRASSLSTHSGEVALPGGKREEGDADDVQTALREAKEEIGLDPSLVSVITLLPPFHTKYGVTIIPVVGVLFDKDAFSPVLNSAEVEAIFDVPLEMFLKNDNRRAEEREWMGEKHLVHYFDYEDGNKKYVIWAITAAILIRSATLLLQRPPAFLEQRPKIWGGMTENDI

SEQ ID NO: 201065 - protein, 79 aa, Glycine max
  unsure (1)..(79): unsure at all Xaa locations
  Clone ID: PAT_MRT3847_23588C.1.pep
CPLRQAWGSLDALIGRLTADYEESXCSPETNPYASLSIQVYLREGRXCHHMARGLAYTKKMMTTEENAEESSNSSIHLS

SEQ ID NO: 201066 - protein, 57 aa, Glycine max
  Clone ID: PAT_MRT3847_23589C.1.pep
KGINNKVPVLKELCCLKNQLSFVAILLLLCIYQLASGFKLKRCVDWTLWLKQPFTFS

SEQ ID NO: 201067 - protein, 95 aa, Glycine max
  Clone ID: PAT_MRT3847_2358C.1.pep
SPSPHLHITIHRIPSTQPFSHQNKHTMTRSHKSTDRDHAGLANGTAVPEDNLPKYFGKAGYAGESPSKTKKHGGGKSNWCAVGLSELENYELHAP

SEQ ID NO: 201068 - protein, 56 aa, Glycine max
  Clone ID: PAT_MRT3847_23590C.1.pep
NLYSLINRMPYTLLLFNVKILNVIVAYIIYLKQRYIGVECSHAFRISVDIFAFFLV

SEQ ID NO: 201069 - protein, 36 aa, Glycine max
  Clone ID: PAT_MRT3847_23591C.1.pep
GSSSNIDLWRKPPTAYMLAGIVTDFADIHDVNACTT

SEQ ID NO: 201070 - protein, 86 aa, Glycine max
  unsure (1)..(86): unsure at all Xaa locations
  Clone ID: PAT_MRT3847_23592C.1.pep
LQAIGQYCNQLQSLNLGWCDNVGDSGVATLAYGCPDLKIRDLXCGCVRITDDKGXIALATRCPHVRSVGLYFCKNMTDGAMDVLAH

SEQ ID NO: 201071 - protein, 57 aa, Glycine max
  Clone ID: PAT_MRT3847_23593C.1.pep
KKLHAMAVFGSQGVKNFACLAVSLIVYRCQVYRLRVTIWCPRFFFFFFPPLFPFRPP

SEQ ID NO: 201072 - protein, 62 aa, Glycine max
  Clone ID: PAT_MRT3847_23594C.1.pep
TLRRTASVVRFNNTCIVAHSICTCLARDLLVATAYSHEPTRGGLEREPPTYWEAHCSGVPVA

SEQ ID NO: 201073 - protein, 66 aa, Glycine max
  Clone ID: PAT_MRT3847_23595C.1.pep
SFTGCRTLKRGAKFKCYWVSRISQFLPTSLGTIFLRERTPFFVPATTPSNYFLSHSLVYLLEHFFI

SEQ ID NO: 201074 - protein, 266 aa, Glycine max
  unsure (1)..(266): unsure at all Xaa locations
  Clone ID: PAT_MRT3847_23596C.1.pep
ARGEMLYEYCSKHDIPHKQIGKLIVATRSSEIPKLNDILNCGIQNGVDGLKIVDGVEAMKMEPELQCVKAILSPLTGIVDSHSLMLSLVGEAENQGTTFTYNSTVIGGHLEGSEICLHVTETDRLTEWKGTSILQPELLLIPKLVVNSTGLSSPVLAKRFNGPKSGVVPPAYYARGCYFTLSNTKNSPFRRLIYPIPEDGGIGVHVTIDLNGQVXFGPNVEWIDSVDDISSFQNKYDYXSVNANRAERFYPEIRKYYPNLKDGSLE

SEQ ID NO: 201075 - protein, 89 aa, Glycine max
  Clone ID: PAT_MRT3847_23597C.1.pep
SSPLLWVFMLHIQRRCFVFQFSLFSCVCRAIRWLCAAQFWCNITVIASLCFPLLFNALSACSMFVQCAGVCSLGLATGLDSPSSVIGVK

SEQ ID NO: 201076 - protein, 104 aa, Glycine max
  unsure (1)..(104): unsure at all Xaa locations
  Clone ID: PAT_MRT3847_23598C.1.pep
AAAQLIMALFSPSSAAKADQLTPSAPQGKRVCMSXTDTYHASYSSAWVRPDRVKYLGPFSSEPECYLTGELPRDYSXNTAGLYDDPETLARNPELVVIHWRKPM

SEQ ID NO: 201077 - protein, 102 aa, Glycine max
  unsure (1)..(102): unsure at all Xaa locations
  Clone ID: PAT_MRT3847_23599C.1.pep
GLXSXXVXXXPPXXXSXXXTPPXXXXXXLNPXXXXTXXXXXIXXPXXQXMXXHXXXXXXXLXXDILXXXXXXXXXXXPXLXXPXXXXXAXAXFRAXVRXLTT

SEQ ID NO: 201078 - protein, 92 aa, Glycine max
  unsure (1)..(92): unsure at all Xaa locations
  Clone ID: PAT_MRT3847_2359C.1.pep
TFIFPFFIXQPTIFISPHILKKTWAPKNNNINKTIPSNKNLLTHITTISTTTYNSLSFTSTSTTSTTTNIYLLILLSTLTIQYKNIIIFIST

SEQ ID NO: 201079 - protein, 48 aa, Glycine max
  Clone ID: PAT_MRT3847_235C.1.pep
CLSKHLKVTEVHDSSKLCQSVPLNPLSYTSSFASCREFNIMLKESTFS

SEQ ID NO: 201080 - protein, 80 aa, Glycine max
  Clone ID: PAT_MRT3847_23600C.1.pep
TAPSPILIPGPFNHRSPHLDSISLSLCTSLYLYLCPFCLSRDLLISHKDIIETLLLYKEANHLAINVRDRSFTTSLTNTM

SEQ ID NO: 201081 - protein, 59 aa, Glycine max
  Clone ID: PAT_MRT3847_23601C.1.pep
SLVIRCNKIFPRGSISSRKAPLIVEIMVKPLHWSLYVSLLVFIQSLYIGNKGFSPWPLS

SEQ ID NO: 201082 - protein, 63 aa, Glycine max
  Clone ID: PAT_MRT3847_23602C.1.pep
KSKPLPCKVIFVVFKLIVYPLYESFEYCIQFKLLLRKLGMAFVIKILGFCLISGEIKDVLGVA

SEQ ID NO: 201083 - protein, 107 aa, Glycine max
  Clone ID: PAT_MRT3847_23603C.1.pep
VELLLSPAKSELRHDQTLCAKPVVDTTMDIAIIQDRHREKTNAVGLGIADHHCLTGARGPPTAVATAHVTGSRRFPGACLKTTGTSANCGTGSMSKTMGLPEGLIIG

SEQ ID NO: 201084 - protein, 62 aa, Glycine max
  Clone ID: PAT_MRT3847_23604C.1.pep
SNNEGEVHTWAHTSPKIKHKPSQSLGIFLLLLMLHLCMAQKVTQCTHQPRSGARKLEKFEKL

SEQ ID NO: 201085 - protein, 66 aa, Glycine max
  Clone ID: PAT_MRT3847_23605C.1.pep
VQHRTMITHYLAQGWRPSRYSDVANSNLLARRMKNESTLKSKSTIGGECDTRSIHDLLQDRERTDL

SEQ ID NO: 201086 - protein, 70 aa, Glycine max
  Clone ID: PAT_MRT3847_23606C.1.pep
MEINLDYSKMLFLLLLGSTSLIFFFPQLASAATPKLNTQEVKALKEIGSKIGKKDWDFGVDPCSGKGNWN

SEQ ID NO: 201087 - protein, 80 aa, Glycine max
  Clone ID: PAT_MRT3847_23607C.1.pep
ECKNTGGRNLMKRNPRGMTFKTHTQWGGGPNSSLIFQRLKNLGAVRLRMLSTVTGPDPWGDLWADPWANAGPEPMAGPAI

SEQ ID NO: 201088 - protein, 79 aa, Glycine max
  Clone ID: PAT_MRT3847_23608C.1.pep
CQSPVTAPKRQSLVAAPLSTGYRFLSQHTLCSNSLVGLLPRPAGVRLPIVGASVVVVFNSVGLGIAGTRVVQMSRNQTR

SEQ ID NO: 201089 - protein, 54 aa, Glycine max
  Clone ID: PAT_MRT3847_23609C.1.pep
RPWHQCTLLPKDHKPQTLKKYEYSATHISRPHPHDIKENAGVFFFSLRRRYRSE

SEQ ID NO: 201090 - protein, 96 aa, Glycine max
  Clone ID: PAT_MRT3847_2360C.1.pep
FPRPQNTQKPKKKLSQNEEHLQLQDQKHKQSCNHHMNHHLLSRNGNSKNHHQHQRSIRSLHHSHHFQQPNGDDSHSLAPNQHGTFGWVKELRNWIR

SEQ ID NO: 201091 - protein, 184 aa, Glycine max
  unsure (1)..(184): unsure at all Xaa locations
  Clone ID: PAT_MRT3847_23610C.1.pep
CVYHISSIIRPARLRILVIELAALGKRIKYLMRAPDSLHHEERSLSTAKKFLFNVESLEKESDQLEEDVMLLREMYSHWEKAATTWPLTDVGXLAKFSLCILRIIADEAWVAHIMIYLLMEPPLSPFLNEVIITLDDMWSLLGTAACALICYYPLLAVIVGAMMLVLKLLXITIHSMKWGATLM

SEQ ID NO: 201092 - protein, 69 aa, Glycine max
  Clone ID: PAT_MRT3847_23611C.1.pep
GKVLYSFFTCLQHFGRDINEHSLNQYCGMLNILLHPLIIFIFHIFLYFIFFFIFIFFYFFFIFIFYFFL

SEQ ID NO: 201093 - protein, 48 aa, Glycine max
  Clone ID: PAT_MRT3847_23612C.1.pep
SHPNDHSAIHQYVYCKELYTRIIHLAQLQYQRTNLSSVHSSQQHYWNN

SEQ ID NO: 201094 - protein, 243 aa, Glycine max
  Clone ID: PAT_MRT3847_23613C.1.pep
MSAAVSSTTSHLEEELKNNNNNNNNVGGESDQPPYNEGANSDVAEETEPEEDDDSKLESNKELDLGPQFTLKEQLEKDKDDVSLRKWKEQLLGSVDMSVVGSECKDPEVKILSLIITSPDKPDLTLPIPFTTDAKKSLFILKEGSKCQMKFTFTVSNNIVSGLKYTNVVWKTGVRVDSRKKMLGTFSPKQEPYTFELEEETIPSGMFVRGTYAARTKFVDDDRKCYLDVSYYFEIQKNRPTPQ

SEQ ID NO: 201095 - protein, 142 aa, Glycine max
  unsure (1)..(142): unsure at all Xaa locations
  Clone ID: PAT_MRT3847_23614C.1.pep
ERQSKIFFSFYFSNVSSHPLVLQLPFFYESLFLLHSKDDESLRKWKEQLLGSVDMSVVGSECKDPEVKILSLIITSPDKPDLTLPIPFTTDPKKSLFILKEXSKCQMKCTFTVLNNIVFVSIHIRVLKTCVRVDSKKKMLGT

SEQ ID NO: 201096 - protein, 68 aa, Glycine max
  unsure (1)..(68): unsure at all Xaa locations
  Clone ID: PAT_MRT3847_23615C.1.pep
LLFVPGMIHDIVHFRLTARVINALVASGKPYRLLVFPDDRLYTEVSKRXVSMQGRMWTVIHRHLQNTV

SEQ ID NO: 201097 - protein, 67 aa, Glycine max
  unsure (1)..(67): unsure at all Xaa locations
  Clone ID: PAT_MRT3847_23616C.1.pep
MSGIIHKIDETLHVGGHKKEDAHKGEQQHGGKXKGQNHGDPSIDSKGGLHFGDPKPDNQEEDYPKKG

SEQ ID NO: 201098 - protein, 199 aa, Glycine max
  unsure (1)..(199): unsure at all Xaa locations
  Clone ID: PAT_MRT3847_23617C.1.pep
DFVSYMTFFSPXISLDMWSLWPLMMEALADWAIDFFSNILVPLDNYISRGTAHFLICKEPDYQQSLWNMISSVMGDKNMEDNDIEPAPKLIEVVFLNCKGQVDQWVEPYLRITVERLHRTEKSHLKCLLMQVIADALYYNAPLTLSILQKLGVTSEIFTLWFNMLQGVKKNGVRANFKREHDKKVCCLGXTSLLALPAG

SEQ ID NO: 201099 - protein, 172 aa, Glycine max
  Clone ID: PAT_MRT3847_23618C.1.pep
MSRLMEPLVVGRVIGEVVDIFSPSVKMNVTYSTKQVANGHELMPSTIMAKPRVEIGGDDMRTAYTLIMTDPDAPSPSDPCLREHLHWMVTDIPGTTDVSFGKEIVGYESPKPVIGIHRYVFILFKQRGRQTVRPPSSRDHFNTRRFSEENGLGLPVAAVYFNAQRETAARRR

SEQ ID NO: 201100 - protein, 82 aa, Glycine max
  Clone ID: PAT_MRT3847_23619C.1.pep
GPILWHTWSLRLKEAYQKLKFMIFGQGRWLKTNVFQQVALISSIPRPLSGQIGIKDIIPLPGSKLWIHELFRNIFFRSECTS

SEQ ID NO: 201101 - protein, 350 aa, Glycine max
  unsure (1)..(350): unsure at all Xaa locations
  Clone ID: PAT_MRT3847_2361C.1.pep
MPYEKEFAAAKKAATLAARLCKKVQKALLQSDVHSKSDKSPVTVADYGSQALVSFILERELPSEPFSLVAEEDSGDLRKESGQDTLKRITELVNDTLASEGSNSFSTLTTDDVLAAIDGGKSEGGSVGRHWVLDPIDGTKGFVRGDQYAIALALLHEGKIVLGVLACPNXLPLASIGSNQQLSSSNEVGCLFFAKVGDGTYMQALGGSTQTRVHVCDIDNPEEASFFESFEAAHSSHDLSSSIAEKLGVKAPPVRIDSQAKYGALSRGDGAIYLRFPHKGYREKIWDHAAGSIVVTEAGGIAMDAAGNPLDFSKGKFLDVVSGIIVTNQKLKASLLRAVKEALNEKVSSL

SEQ ID NO: 201102 - protein, 127 aa, Glycine max
  Clone ID: PAT_MRT3847_23620C.1.pep
NTAEFSACRTFLDGSANMIQVRPTPIQLCYAQASQALQVQPNFTQHVPYSHSWPNQVHPPLPINCLLESLFGGLESENTCSRYRLFLGFLMFLFFIVYVCALFACFVLGLILIIVRTASPSVVFSQP

SEQ ID NO: 201103 - protein, 99 aa, Glycine max
  Clone ID: PAT_MRT3847_23621C.1.pep
EAANFNHPSKENCILSTLHTHDSSSAIVLTHFFNSHRYRCSTCHVTPLTTRAHHSRHRNCTARIKNKSLMRHVDFIVTHSPRLRPSPRRKPVHRTQTGR

SEQ ID NO: 201104 - protein, 64 aa, Glycine max
  Clone ID: PAT_MRT3847_23622C.1.pep
LTKITLLFMYISGKTQPDTCCTMTIHLTHYHPIMRTPSSGTALNVTELEEKRRGSLTRLWLLID

SEQ ID NO: 201105 - protein, 61 aa, Glycine max
  Clone ID: PAT_MRT3847_23623C.1.pep
GLGLNSGNPNRRGFKPKRERGVFLNWAFPQKKPGFCGLHPGGDKKTLFYLKIWAPQMGAPP

SEQ ID NO: 201106 - protein, 88 aa, Glycine max
  unsure (1)..(88): unsure at all Xaa locations
  Clone ID: PAT_MRT3847_23624C.1.pep
LVLPNPPPHALSPTRPDPLSSPEICPKGSPNWPMGXRFXDXRDPSRFRXSFFAFSPFSGXQFLKXLXXRKISXXXGXXXKEGGASAER

SEQ ID NO: 201107 - protein, 91 aa, Glycine max
  Clone ID: PAT_MRT3847_23625C.1.pep
MADLTSLFSSNLHSLNSKPFSSSLSFFRNVHSTLSFPSSKPSRGVVAMAGSGKFFVGGNWKCVSVSPEILLLVIPLLFFIGERGCLFIISM

SEQ ID NO: 201108 - protein, 40 aa, Glycine max
  unsure (1)..(40): unsure at all Xaa locations
  Clone ID: PAT_MRT3847_23626C.1.pep
GKYYRGFECPDYFVVGYGLDFAEXYRNLPYIGVLKPELYK

SEQ ID NO: 201109 - protein, 45 aa, Glycine max
  Clone ID: PAT_MRT3847_23627C.1.pep
TISKLYQSIECSSIHSKDSLQYLVKSQLESTFQISATTTGRERAY

SEQ ID NO: 201110 - protein, 55 aa, Glycine max
  Clone ID: PAT_MRT3847_23628C.1.pep
LQDAIVCSRLSLVQGLAMLNAVSHNIIRVRLHVHRVKLSSDMQSVIRSHVGYFVH

SEQ ID NO: 201111 - protein, 74 aa, Glycine max
  Clone ID: PAT_MRT3847_23629C.1.pep
KIETLVTKHVLKFDQAQLETVIPLVGGRVEKDDVAFEEHSLSLEGGTHIFCAWVQIEKGAYDDGALKSVEHMRR

SEQ ID NO: 201112 - protein, 232 aa, Glycine max
  Clone ID: PAT_MRT3847_2362C.1.pep
MSTLQMSRVDLEQGNVNHRHSVVGSDVSGEGNVCFSDADDGSCYSRFYSTNGGSYDDYSFACVSDPEVGGVPHSGRASSSASECSVEAETRSGVPEIKVHLAKVEKDCRICHMGLESDSHESGAPIQLGCSCKDDLAAAHKHCAEAWFKIKGNRTCEICHSVARNVYGGNEESTEHLSDVNNATTAATLSTPAPSAEPRRFWHGHRFLNFLLACMVFAFVISWLFHFNVPSS

SEQ ID NO: 201113 - protein, 41 aa, Glycine max
  Clone ID: PAT_MRT3847_23630C.1.pep
FSSITIGVSKNLTVYKIIYHQNTSLKGSMTPFQSACAKGRK

SEQ ID NO: 201114 - protein, 55 aa, Glycine max
  Clone ID: PAT_MRT3847_23631C.1.pep
NPHRSNLSSDHFRANILNSYMTCWLSRGTKAIMPEEKTCIRINRWKDRIHMFVDT

SEQ ID NO: 201115 - protein, 36 aa, Glycine max
  Clone ID: PAT_MRT3847_23632C.1.pep
HSYKKRETNSSISHLSLIRHSGFPLWRDDIPSINCL

SEQ ID NO: 201116 - protein, 276 aa, Glycine max
  Clone ID: PAT_MRT3847_23633C.1.pep
LWEVDDKNRSIIPIAVIHRHFSIYSLKHELGSFKDFIATFEDDEGNNILHYAAKLTPPDKLGLISGAALQMTHELLWFKEVKELMLLLDVEKKNAKGKTPREIFAEEHKELLTKAESWTKSTSISCMLVSTLITAGVFTATFMLPGGIHKKTQTPNFLHKPAFLAFSLSVAFALISASASILMFLSILISSYAEEECFKLLPKRLLIGMVAQIISITNMMVAFSAAFCMSYSHGSKWVQIFIFVISIVPLFLLFPLCWFDIIRSSYFCMPLFRRRK

SEQ ID NO: 201117 - protein, 49 aa, Glycine max
  Clone ID: PAT_MRT3847_23634C.1.pep
MAAIQLNFTLRTSSNCKTVHLLGSWDGYQGQLPLSKDPKKSGGWVGSFK

SEQ ID NO: 201118 - protein, 89 aa, Glycine max
  Clone ID: PAT_MRT3847_23635C.1.pep
RQLNHNDAMMSIFSHLEIAQAQNWRFSLGTGPVKGVNSKPKMEATSSSAARKDPNPSSTAGSKQNPPRLRPRFAPELDGLHCFESIVPC

SEQ ID NO: 201119 - protein, 42 aa, Glycine max
  Clone ID: PAT_MRT3847_23636C.1.pep
YLFGIKTTIYLSCFSRLEFAWAFYFSTPRRGTLFLFQRKKSF

SEQ ID NO: 201120 - protein, 62 aa, Glycine max
  Clone ID: PAT_MRT3847_23637C.1.pep
TTLQKHYLISNEISLSPQEQFNIYNLQLAKSNPNNIIQEYPHSDPHTPIRKNIDHSMQLNTY

SEQ ID NO: 201121 - protein, 143 aa, Glycine max
  unsure (1)..(143): unsure at all Xaa locations
  Clone ID: PAT_MRT3847_23638C.1.pep
GHIITYPDETYSLEGSCSFDIKSISRLXKGLSTQAQFVRGQTFHYDILGAGSHSLEESSEREDQXAPIWIDATLRPRIYPHYLEAYAQMDTDLFMSCVDDLETPVGSMLGLNIPQSNMALSKNTDGGTILRSDLLASTGTDGD

SEQ ID NO: 201122 - protein, 46 aa, Glycine max
  unsure (1)..(46): unsure at all Xaa locations
  Clone ID: PAT_MRT3847_23639C.1.pep
XTELSXXPIELXNGEWXXXXVAWIGGXIMSXXXIPSGTQWLHSRIE

SEQ ID NO: 201123 - protein, 146 aa, Glycine max
  Clone ID: PAT_MRT3847_2363C.1.pep
LEPFLNARRIAQVKENQCQIAVEDVMYLLIFYKFSEIRVPMVPKLSSCLYNGRLEILPSKDWELESIHSSEVLDMIREHITTVTGLRAKSSVTECWATTQVRQFLLARVYVASILYGYFLKSVSLKYHLERNLSLANHDLHLGHKT

SEQ ID NO: 201124 - protein, 157 aa, Glycine max
  Clone ID: PAT_MRT3847_23640C.1.pep
MAALKALVSGCGRLLRGLLAGPAATSWSRLPARGFREVVETQEGKTTIIEGRITATPKESPNPPNPSGQCPICRWNLKHKYNYDDVLLLSQFIRPHGGMLPRKITGLCQEEHRKIEECVKMAHRAGLLPNHRPRLPEGVVPKSKPQLNRYLTRWALA

SEQ ID NO: 201125 - protein, 41 aa, Glycine max
  Clone ID: PAT_MRT3847_23641C.1.pep
EYHKFIAYIQTEHVFFDPSCKEHVLCMNPFNYTHNRGDVIK

SEQ ID NO: 201126 - protein, 490 aa, Glycine max
  Clone ID: PAT_MRT3847_23642C.1.pep
QDVKKLSLYACLLTLSLLIFLPHIKASQANKLDELILSRSSHNPPVTLSWAEEDALKMHSAAYVAPQEGLRQADKIVTLPGQPHGVNFDQYSGHVTVDPKTGRSLFYYFVESPHNSSAKPLVLWLNGGPGCSSLGYGAFEELGPFRVNSDGKTLFHNKYAWNEVANVLFLESPAGVGFSYSNTTSDYDRSGDKSTAKDAYVFLINWLERFPEYKTREFYITGESYAGHYVPQLAYTILVNNKFSQQSINLKGIAIGNALIDDVTTIKGIFDYFWTHALNSDQTHHLIKKYCDFTSENISAACINATISSILEKGSIDSSNIYAPLCYDSSLKNGSTGSVYDFDPCSAYYVEAYLNRPEVQKALHAKPTNWTHCSGFDWKDSPTTILPIIEYLIASHIKLWIYSGDTDATVPVTSSRYSINTLRLPIQVDWHPWYSGNEVGGYVVGYKAVTFVTVRGAGHFVPSWQPARSLTMISSFLSGTLPPASPYDGF

SEQ ID NO: 201127 - protein, 114 aa, Glycine max
  Clone ID: PAT_MRT3847_23643C.1.pep
SPVIDMPMLKMDHRIPSMYKLLSTSTITATRQVGARGEVLNRSLVVKRGLVKRSCHAVPPRFVAVASGLGIGVSRVQWVIVNRIRGLRTRGIKRARLLSTCNIKAYTPGWCQRR

SEQ ID NO: 201128 - protein, 43 aa, Glycine max
  Clone ID: PAT_MRT3847_23644C.1.pep
LLAMGEFKHFVIGKFKEGVAVDDLTYRMGKLVSEINAVKFFVW

SEQ ID NO: 201129 - protein, 43 aa, Glycine max
  Clone ID: PAT_MRT3847_23645C.1.pep
VLKMKQKKLRDYKQKKNYRLRPVKRLRRTKNNRKRRSKLNKSY

SEQ ID NO: 201130 - protein, 247 aa, Glycine max
  unsure (1)..(247): unsure at all Xaa locations
  Clone ID: PAT_MRT3847_23646C.1.pep
MKMGKVVMVVAVMVLFNMSSCSAWFGGNKHKSGRNSILPSEATSSRSRLLNPAGSSIVLPLYGNVYPVGFYNVTLNIGQPARPYFLDVDTGSDLTWLQCDAPCTHCSETPHPLYRPSNDFVPCRDPLCASLQPTEDYNCEHPDQCDYEINYADQYSTFGVLLNDVYLLNFTNGVQLKVRMALGCGYDQVFSPSSYHPLDGLLGLGRGKASLISQLNSQGLVRNVIGHLLSSQGGGYIFLXHAYDSAR

SEQ ID NO: 201131 - protein, 94 aa, Glycine max
  Clone ID: PAT_MRT3847_23647C.1.pep
QQLFGGSYVVLREAPGVEVLAYINADHVVVQEPKTFPCSGSCGESAGGGFRRPYVQKTALKRGRRLKKVRWVEHAMPTGKDGAARKVAHPHTAH

SEQ ID NO: 201132 - protein, 54 aa, Glycine max
  Clone ID: PAT_MRT3847_23648C.1.pep
SFLCYREGIQIYVIGDSSKLPESLRSTIANAEKSTKHNSRLQLIVAMNYGGKYD

SEQ ID NO: 201133 - protein, 53 aa, Glycine max
  Clone ID: PAT_MRT3847_23649C.1.pep
VRAQTFYHIVNFVSRKKSFFIFSLKNICDELMIQAKLKYVTSKLLVQLFNQLN

SEQ ID NO: 201134 - protein, 292 aa, Glycine max
  Clone ID: PAT_MRT3847_2364C.1.pep
EESIFYRHVVPRCVWKIQRWLQIGQEKKMTEACKTLDQFIHARIASKREELSKYNENEMGEAHHVDLLTALMREGKAHDDKFLRDAVFNLFVAGRDTITSALTWFFWLVATNPSVEAKILEEMKEKLGTKEKSLGVLSVEEVKRLVYLHGAICEALRLFPPIPFERKQAISSDMLPSGHRVNSGTMILFSLYAMGRFEETWGKDCFEFKPERWISEKGGIVYVPSYKFIAFNAGPRTCLGKDSSFIQMKMVATAILHKYRVQVVEGFVATPSLSIVLLMKDGLKVQITKREL

SEQ ID NO: 201135 - protein, 52 aa, Glycine max
  Clone ID: PAT_MRT3847_23650C.1.pep
IFTFSAFPGGLFTLLPPSTLKFRPHYPPPIKPLNPHSLFSHIPTLPPPSSFT

SEQ ID NO: 201136 - protein, 129 aa, Glycine max
  unsure (1)..(129): unsure at all Xaa locations
  Clone ID: PAT_MRT3847_23651C.1.pep
GEGAAVRTDLGTTYSRVXAWQPDRYDIIVIDLWNNTTPSYLPYTDTQRLNADADDNQDHMDLIDTWFDASRLIGRRLSDCSAHSDLKVWPIKVIAGAADXPMIAVNCKGEAXQYDAEKLSSMEHHKMRE

SEQ ID NO: 201137 - protein, 42 aa, Glycine max
  Clone ID: PAT_MRT3847_23652C.1.pep
RVGALSADPDQAALLKVKEIKNGRLAMFAMPRAELGCMRHHS

SEQ ID NO: 201138 - protein, 516 aa, Glycine max
  Clone ID: PAT_MRT3847_23653C.1.pep
MSLLFPTLIISLVILLVTVNQCCALSRDGVLLLSFKYAVLNDPLYVLANWNYSDETPCSWNGVSCSNENRVTSLLLPNSQLLGSVPSDLGSIEHLQILDLSNNSLNGSLPSSLSQASELRFLNLSNNLITGDPPESLSQLRNLEFLNLSDNALAGKLPESFSNMQNLTVASFKNNYLFGFLPSGLRTLQVLDLSSNLLNGSLPKDFGGDNMRYLNISYNRFSGEIPTEFAAEIPGNATVDLSFNNLTGEVPDSTAFTNQNSKSFNGNFNLCGEITKNPCPIPSSPSSEPKASAPISPPAIAAIPKSFDDSPLAPTGQKQRGLKQGTIIGIVVGDIIGVGILAMLCVYVYRLKKKKDAESTKKKNEAAITRSRSESSSSTTSESRGFTRWSCLRKRTEEEDSSETTSSSESEVEGATAATHDNNNNNNTGTLVTVDGERQLEVETLLKASAYILGATGSSIMYKAVLEDGTSLAVRRIGESGVERFKDFENQVRLIAKLVHPNLVRVRGFYWGHDEK

SEQ ID NO: 201139 - protein, 89 aa, Glycine max
  Clone ID: PAT_MRT3847_23654C.1.pep
RRSSGNSPSTFSRNTEATLFISSTGIICFLSRPILTPLEMGSAFLGGTEREVASPESVRLTPWVIQGHSCSRGDFVTRPKFHTPYDPEP

SEQ ID NO: 201140 - protein, 88 aa, Glycine max
  Clone ID: PAT_MRT3847_23655C.1.pep
ESPSSPYVCSRLIGIRIRIPSRDDSRSSRECEENPRVDPTKRMGLEPLASPYLIGTIDILHQPQTPTPTPELEGAANYSPFIFSSMFS

SEQ ID NO: 201141 - protein, 64 aa, Glycine max
  unsure (1)..(64): unsure at all Xaa locations
  Clone ID: PAT_MRT3847_23656C.1.pep
TGHSGLYSDNFPYEFNYREMNNSAEKKREKRRKKKKKMXXXXXXXXXXXXXXXXXXXXXXXXXX

SEQ ID NO: 201142 - protein, 112 aa, Glycine max
  Clone ID: PAT_MRT3847_23657C.1.pep
TKYDPRVPIIFAFLPGIFFLSLNLMPPGFFRFFTPLSYGPFFTIVPSFTWAPVFPPQGFKGPFFLKLVPSLFPPPFPLFLAFFYIIIKFPLCILPFSSNLFFFFFPFLTPFP

SEQ ID NO: 201143 - protein, 62 aa, Glycine max
  Clone ID: PAT_MRT3847_23658C.1.pep
MATTAALSGTMVSSSFMRKQPMTTKSLETFPNALVGLKGRRCGRVTCMASYKVQLMAPDGVV

SEQ ID NO: 201144 - protein, 74 aa, Glycine max
  unsure (1)..(74): unsure at all Xaa locations
  Clone ID: PAT_MRT3847_23659C.1.pep
PPPPGEKNPYKYYIWGPPGPRKSSAPSTPQXRAPPGNPPPRPQKGGPPGQPHYPPEKGEPYPPPGRFQTRGATA

SEQ ID NO: 201145 - protein, 185 aa, Glycine max
  Clone ID: PAT_MRT3847_2365C.1.pep
VFRSGFSSFTYDVFLSFRGSDTRHGFTGNLYKALADRGIYTFIDDEELQSGKEITPTLLKAIQESRIAINALSINYASSSFCLDELATILGCAERKTLLVLPVFSHVRHREDSYGEALVKHEERFEHNTEKLQKWKMTLYQVALLSGYHFKYGDGYEYEFIGRIVERVCIKINLTHYMVRGIWWT

SEQ ID NO: 201146 - protein, 54 aa, Glycine max
  unsure (1)..(54): unsure at all Xaa locations
  Clone ID: PAT_MRT3847_23660C.1.pep
XTSYXXSYKAXGXAXXDLXSNKXIPSRXRXLLHVXALELLRXSXVSRYHXTHYN

SEQ ID NO: 201147 - protein, 43 aa, Glycine max
  Clone ID: PAT_MRT3847_23661C.1.pep
IYLTILLYICSYMIISLYIHTISDFNNQVFKLSTQHSSSIMKS

SEQ ID NO: 201148 - protein, 52 aa, Glycine max
  Clone ID: PAT_MRT3847_23662C.1.pep
AYAHTSYITCSQFMSIMLLTSNDTGVTTDEDRRYDGHIWDSVHHASDNCYPN

SEQ ID NO: 201149 - protein, 179 aa, Glycine max
  unsure (1)..(179): unsure at all Xaa locations
  Clone ID: PAT_MRT3847_23663C.1.pep
MGGGKDKHHDESDKGIFSHLAHGVAGAAHGGHGYPPGAYPPPPGAYPPQQGYPPAGYPPQQGYPXYPPAGYPPHQGYPPAGYPPAGYPGSSHAPGSHGHGGMGAMLAGGAAAAAAAYGAHHVSHGSHGSYGQYAHGAHMPHGKFKQHGHGKFKHGKHGKFGKHGKHGKFGKHGGFKKWK

SEQ ID NO: 201150 - protein, 89 aa, Glycine max
  Clone ID: PAT_MRT3847_23664C.1.pep
PIPMLLDIAPGGTRDSDDGRMALLPALFLRLGTLFALVSSSETVQRDRVRLLLKEVIREQEELKGSKVMVKERGAFPRDIQFDNQARGL

SEQ ID NO: 201151 - protein, 65 aa, Glycine max
  unsure (1)..(65): unsure at all Xaa locations
  Clone ID: PAT_MRT3847_23665C.1.pep
XRXGLXQXNAKHXXXRKQRXTIXPXCXXIXSRXXXIIXRXLIXXXNSSIAVGRFNLLYQEXRILL

SEQ ID NO: 201152 - protein, 34 aa, Glycine max
  Clone ID: PAT_MRT3847_23666C.1.pep
SPNFTYYELRILAFGQPTNSRSNSRFFTKSTLVS

SEQ ID NO: 201153 - protein, 57 aa, Glycine max
  Clone ID: PAT_MRT3847_23667C.1.pep
KLIPHSYNMNPITELYAKKFRLHTLILLQRHRTSLVYSFMRMRHLIPFPFSINSNAL

SEQ ID NO: 201154 - protein, 81 aa, Glycine max
  unsure (1)..(81): unsure at all Xaa locations
  Clone ID: PAT_MRT3847_23668C.1.pep
NIKDVTADTVYKAALNVATSIIRARIVCLPATIKVLGVITALGLILAIAFLAXLSEEILMRFTRDGETTTYAGVMREASGP

SEQ ID NO: 201155 - protein, 461 aa, Glycine max
  unsure (1)..(461): unsure at all Xaa locations
  Clone ID: PAT_MRT3847_23669C.1.pep
MGLDTTWTGIPFANVFGSFNKTFLPSIPVKLVEYNPVHILSFXEMERQTGARLLLTAGANDTIVPVYDDEPTRAIAYVLVSMDYHMQMLEYDRPKDSGDSSITLPLFDSTGLLYLNSFDETITNTYRSLGSFEENVLSTSGSRSLPAGDPFSYTKDLHARVSFTDDSSLGKVKYTVTCYYAKRFEALRRTCCPSELDFVRSLSRCKKWGAQGGKSNVFFAKTLDDRFIIKQVTKTELESFTKFAPAYFKYLSESISTGSPTCLAKILGIYQVTSKHLKGGKETKMDVLVMENLLYRRNIRRLYDLKGSSRSRYNPDTSGSNKVLLDQNLIEAMPTSPIFVGNKAKRLLERAVWNDTAFLASIYVMDYSLLVGVDEEKHELVLGIIDFMRQYTWDKHLETWVKTSGILGGPKNTSPTVISPQQYKKRFRKAMSLYFLMVPDQWSPPELHPSGSQSDICDENA

SEQ ID NO: 201156 - protein, 61 aa, Glycine max
  Clone ID: PAT_MRT3847_2366C.1.pep
ILFFYRMVEGILKDYATFMTVCYEKKTTLKNIKVKERKGSTYGIHEVEMASGTIWRILKCL

SEQ ID NO: 201157 - protein, 114 aa, Glycine max
  Clone ID: PAT_MRT3847_23670C.1.pep
TRPAVLNDTAFLASIYVMDYSLLVGVDEEKHELVLGIIDFMRQYTWDKHLETWVKTSGILGGPKNTSPTVISPQQYKKRFRKAMSLYFLMVPDQWSPPELHPSGSQSDICDENA

SEQ ID NO: 201158 - protein, 60 aa, Glycine max
  Clone ID: PAT_MRT3847_23671C.1.pep
LGATKETKCWSPMNVNYLFHRFAYRIPRVHSDISLQVFSSAYENHKCLSYLIMGERGYTL

SEQ ID NO: 201159 - protein, 117 aa, Glycine max
  Clone ID: PAT_MRT3847_23672C.1.pep
PGRFESVFLSNTEAQQSYLQGCTRNILDVYYDTKFAEIDRVLHSRDEEHHRGEQMTALSDIVLFSTEQIRTLRTRVTPTTRSTISSADGPLYCESRYPIYVHMLAHVCEITPADKPH

SEQ ID NO: 201160 - protein, 259 aa, Glycine max
  unsure (1)..(259): unsure at all Xaa locations
  Clone ID: PAT_MRT3847_23673C.1.pep
MYYEDMAGNVGWGVIEEEGWRKGPWTSEEDRLLILYVKXHGEGRWNSAARLAGLKRNGKSCKLRWVNYLRPHLKKGQITNSARGIIQELHARWGNRWSTIARSLPGRTDNEIKNYWRTHFKKKMKTPSDAAEKARIHSSRRQHFQQQQQQLKQQQQQFQFNLDMKGIINLLEENDHRVPSISQEAQEMASMYPNTSEHQGYFYSIFNVNDNDNNVSAPESSNEEILWDGLWNLDDVLCNFNAASATSKASLHNLVSPFC

SEQ ID NO: 201161 - protein, 86 aa, Glycine max
  Clone ID: PAT_MRT3847_23674C.1.pep
AGAPKAPDHEHGHSEVLLEDVEHLKVKQEPTDIQLQPMVTQLRYESFCLHQFQEQDGESIPENQELASKQEILKEMEHLGDSRLQR

SEQ ID NO: 201162 - protein, 61 aa, Glycine max
  unsure (1)..(61): unsure at all Xaa locations
  Clone ID: PAT_MRT3847_23675C.1.pep
EGXRVXXXXIRLGFFRVPFLCKGKPGHACQSTXMRPNGXLLIAVNTKILVAGITNFIKVIT

SEQ ID NO: 201163 - protein, 54 aa, Glycine max
  Clone ID: PAT_MRT3847_23676C.1.pep
DQSDDWLRSHRCWLLLQQLISLQWLESMEGQSSNQLVTVFQTLRGGIQSRKWHQ

SEQ ID NO: 201164 - protein, 60 aa, Glycine max
  Clone ID: PAT_MRT3847_23677C.1.pep
GGGCNGTGKSYAFISADREGPTLNLALSDGSSYTYIKSVFDPIIAPCAQRFKSLIILVTA

SEQ ID NO: 201165 - protein, 108 aa, Glycine max
  Clone ID: PAT_MRT3847_23678C.1.pep
HLKLRVTTFQQTKTQLIHDYTFLQMITGNQYMSFFSLSFTPPPFFPASILDNIISIMTTLFPLITCNLKGEQKQKRFNRVKPSINKNKTFCSPTTLCKASHPRSSPKS

SEQ ID NO: 201166 - protein, 67 aa, Glycine max
  Clone ID: PAT_MRT3847_23679C.1.pep
KKTDGGVDFPWSGVVFLGVYSVFCMSDNISTFSLIGKRKDLRPCFLAQEERNKSRKTCPLDDRRSKE

SEQ ID NO: 201167 - protein, 499 aa, Glycine max
  unsure (1)..(499): unsure at all Xaa locations
  Clone ID: PAT_MRT3847_2367C.1.pep
MFGYAAAIIAAILFFQYFFHRRRCCKHPILTEYPIIGMLPQLLFNLWRAHDYSTQVLQRHGGTGEFIGPWFTNMDYLVTCDPINVHHMLSKNFHNYVKGPEFRHIFQAFGDGIFAADSEAWKYSRDLFHSLFKQKSFEVFVAKTIHNKVHNGLLPILDHVQQQGRVVDLQDVFNRFTFDNICSIVLGNDPNCLSIDFSEVAIEKAFNEVEESIFYRHVLPRCVWKIQRWLQIGQEKKMTEACKTLDQFIHACIASKREKLSKXKNEMGEAHHVDFLTALMREETAHDDKFLRDAVFNLFVAGRDTITSALTWFFWLVATNPSVEAKILEEMKEKLGTKEKTLGVLSVEEVKRLVYLHGAICEALRLFPPIPFETKQAIKADMLPSGHRVNSGTKILFILYAMGRSEETWGKDCLEFKPERWISEKGGIIYVPSYKFIAFNAGPRTCLGKEISFIQMKMVAAAILHKYRVRVVDHVATPSPSIVLLMKDGLKVQIAKREI

SEQ ID NO: 201168 - protein, 51 aa, Glycine max
  Clone ID: PAT_MRT3847_23680C.1.pep
EHNHNKLILLPNDNSIGCLFKIKRPTIKHLDVYRILHIFTDNKHRPTTTNT

SEQ ID NO: 201169 - protein, 74 aa, Glycine max
  Clone ID: PAT_MRT3847_23681C.1.pep
VFSIQKGPWEEHTGRIHAIGRAIATNCDGRRTYSECCFRMTYCEHMNDLKEKHQRMCDKSMIKRRLVYVNEEMG

SEQ ID NO: 201170 - protein, 80 aa, Glycine max
  Clone ID: PAT_MRT3847_23682C.1.pep
LLREGRQKGKEDGDTQKLQTPARANGHIQDYPDHVLEDSQAGKHHGLGAKPLEPDQELKPTEMYSLEQLPTNQPEEEKTA

SEQ ID NO: 201171 - protein, 117 aa, Glycine max
  Clone ID: PAT_MRT3847_23683C.1.pep
MRMKIVVMLLLPLMFALFSCTSSANTTTCPMDLNYVLRIPWNTSACHNFQQTLAAKNGTDANTCCISLLSLFGIGLAQHLKETSKVQLKLALLLIKFNKFSFSTTVTVDISGLHIGE

SEQ ID NO: 201172 - protein, 56 aa, Glycine max
  Clone ID: PAT_MRT3847_23684C.1.pep
KPKKTGFSSKPNFFSNTFVKPSMNIGVSYKNPKGPEIGKKPKLGGGKGKPFLGPWC

SEQ ID NO: 201173 - protein, 79 aa, Glycine max
  Clone ID: PAT_MRT3847_23685C.1.pep
TILDAVSKRRKHYSEAAKHYNVPLSEKKRTNKMCTHRPLLNLQRCKLSVHNFKVSKLQFGRLNLVQLMTRALKMNKVLS

SEQ ID NO: 201174 - protein, 94 aa, Glycine max
  Clone ID: PAT_MRT3847_23686C.1.pep
TKPKTSLPIMFSPCYLLLKHVKTKSPLKRERPFKTYKLSPPRGGKMRGVALGAYPEIPKGLPPRKPCIQAFTPSVAPKLKSGTSPTQFGGPINP

SEQ ID NO: 201175 - protein, 101 aa, Glycine max
  Clone ID: PAT_MRT3847_23687C.1.pep
QYKHKACAALLDPSSAAPLVWPSPLKFISELNQEAKALLEKALLEANREGEKTILKETDMPPSPLHSESEDDNIASEVQNFPFLTASEFRFISFTLMHFNV

SEQ ID NO: 201176 - protein, 56 aa, Glycine max
  unsure (1)..(56): unsure at all Xaa locations
  Clone ID: PAT_MRT3847_23688C.1.pep
PXPSYVNHNLYLHQVKELLNGVQGLRQVKRTTSXLRAYEEIDPLDSNDPNTYKFLA

SEQ ID NO: 201177 - protein, 148 aa, Glycine max
  Clone ID: PAT_MRT3847_23689C.1.pep
MESWMWCFLLCSHLLILYFSPSHSLCHPHDTSALLHFKNSSIIDEDPYYYSKTRTWENGTDCCSWAGVTCHPISGHVTELDLSCSGIVGYIDPNSTLFHLSHLHSLNLAFNYFDESPLSSLFGGFVSLTHLNLSNSEFEGDIPSQISR

SEQ ID NO: 201178 - protein, 84 aa, Glycine max
  Clone ID: PAT_MRT3847_2368C.1.pep
REFRLLSQTKTQSISTTQRRGVRDSNTLLSALIEHSFFLGLDFALKYSHSQQTPSSSSSSSMAPKQNKAEKKITYYAKLCDLME

SEQ ID NO: 201179 - protein, 68 aa, Glycine max
  Clone ID: PAT_MRT3847_23690C.1.pep
AAGRHSRITRSTSAYKSDPTRVGIAASSTHEDQPAVHNSTASEHYTTVINRAIFSTVFFWISHPLMWS

SEQ ID NO: 201180 - protein, 147 aa, Glycine max
  Clone ID: PAT_MRT3847_23691C.1.pep
MASSVAAAASTFLGTRLADPAPQNGRIVARFGFGLGGKAKPAPKKVAKTSTSSDRPLWFPGAVAPDYLDGSLVGDYGFDPFGLGKPVEYLQFELDSLDQNLAKNEAGGIIGTRFESSEVKSTPLQPYSEVFGLQRFRECELIHGRWA

SEQ ID NO: 201181 - protein, 109 aa, Glycine max
  unsure (1)..(109): unsure at all Xaa locations
  Clone ID: PAT_MRT3847_23692C.1.pep
LSHDHRRTNLVVWLMREFGAEXSWTQLLNVSYHHLQVLDFPPCPVVPLCKSENDDVLLLEDYGGGAEFVLVDKRDNSIDRMEGFNNGLSSFSAFVSHDYVQSLVLPYRN

SEQ ID NO: 201182 - protein, 83 aa, Glycine max
  Clone ID: PAT_MRT3847_23693C.1.pep
QLLNFIIAPPRMPQERGNKKARSDESQVFSKYFNLYTYKNCPAPCHVWTVGCSTIKIIFFHFFLNKIFNFDFLKIRATARAHT

SEQ ID NO: 201183 - protein, 506 aa, Glycine max
  unsure (1)..(506): unsure at all Xaa locations
  Clone ID: PAT_MRT3847_23694C.1.pep
MVFQTNINPHFVLFPLMAQGHMIPMMDIARLLARRGVIVSIFTTPKNASRFNSVLSRDVSSGLPIRLVQLHFPSDDTRPPALCPISKEAGLPEGCENLDMVASNDLYKIFHAIKLLHKPAEEFFEALTPKPSCIISDFCIPWTAQVAEKHHIPRISFHGFSCFCLHCLYQIHTSKVCESITSESEYFTIPGIPDKIQVTNEAATXELSNELKDFGEQVIDADIKSYGVIINTFXRVGEGICEGIXKKVRNDKVWCIGPVSLCNKDGLDKAQRGNRASINEHHCLKWLDLQQPKSVVYVCFGSLCNLIPSQLVELALAIEDSKKPFVWVIREGSKYQELEKWISEEGFEERTKGRGLIIRGWAPQVLILSHPAIGGFLTHCGWNSTLEGISVGVPMVTWPLFADQFLNEKLVTQVLKIGVSVGAEVPMNWGEEEKTGVLVKKKNIERAICMVMDNDEEESKERRERATKLCEMAKKAVEKGGSSHLDMTLLIQDIMQQSSSKEDVKC

SEQ ID NO: 201184 - protein, 58 aa, Glycine max
  Clone ID: PAT_MRT3847_23695C.1.pep
RGNGTPGREGLIILFIGYWEFGLLKGSGSPHCKKKENKIGEIYCPPLISQKKKKKKKK

SEQ ID NO: 201185 - protein, 197 aa, Glycine max
  Clone ID: PAT_MRT3847_23696C.1.pep
MSKDKVSGDPRRAVCTGITIFLLLAGVTLLVLWLVYRPHKPRFTVIGAAIYGLNTSTPPLMSTTMQFSVLIKNPNRRVSIYYDRFSAFVSYRNQAITPQVLLPPLYQEKRSSVSVSPVIGGTPLPVSVEVSNGLAMDEAYGVVGLRLIFQGRVRWKAGAIKTAHYGLYVKCDVLMGLKKGLVGQVPLLGVTPCDVDL

SEQ ID NO: 201186 - protein, 140 aa, Glycine max
  Clone ID: PAT_MRT3847_23697C.1.pep
GRVGVDVSYVFVCACVCLCVFFILVFGKLLYLDGLNCDCSIVVVTDNAGTNKAASSSTSLNTKRLDDDTESLAHEKVPTELKKAIMQARMDKKLTQSQLAQLINEKPQVIQEYESGKAIPNQQIIGKLERALGAKLRGKK

SEQ ID NO: 201187 - protein, 142 aa, Glycine max
  Clone ID: PAT_MRT3847_23698C.1.pep
MSGVGPLSQDWEPVVLRKKAPTAAAKKDEKAVNAARRSGAEIETLKKYNAGTNKAASSSTSLNTKRLDDDTENLAHEKVPTELKKAIMQARMDKKLTQAQLAQLINEKPQVIQEYESGKAIPNQQIIGKLERALGAKLRGKK

SEQ ID NO: 201188 - protein, 112 aa, Glycine max
  Clone ID: PAT_MRT3847_23699C.1.pep
MSPQTPTIPLFIVLASLVLCNGYYLEESFYKTNAKHYPVHDGRLIKTKHEHFGLITRANRASHLTSRPRGTVSVDDFGAKADGSDDSEAFGKAWNEACSRGAILWVPENRIY

SEQ ID NO: 201189 - protein, 48 aa, Glycine max
  Clone ID: PAT_MRT3847_2369C.1.pep
SVHSIQPGSHGRDLSWIAGVRVVGINRAVNNLSDVAPVADARVMPIKA

SEQ ID NO: 201190 - protein, 42 aa, Glycine max
  Clone ID: PAT_MRT3847_236C.1.pep
PLCELEWLADVVFTQLVIKKFRPKLGAQAWTKAWTNACTNAW

SEQ ID NO: 201191 - protein, 142 aa, Glycine max
  Clone ID: PAT_MRT3847_23700C.1.pep
MSGVGPLSQDWEPVVLRKKAPTAAAKKDEKAVNAARRSGAEIETLKKYNAGTNKAASSSTSLNTKRLDDDTESLAHEKVPTELKKAIMQARMDKKLTQSQLAQLINEKPQVIQEYESGKAIPNQQIIGKLERALGAKLRGKK

SEQ ID NO: 201192 - protein, 80 aa, Glycine max
  Clone ID: PAT_MRT3847_23701C.1.pep
QLVVEDRRISYHWKRDNRVGLCTDKPFKVYYCVPFLLTVNILGEVEALNIILILALLTSAKTTTLNRCGVCHDIFNYMNT

SEQ ID NO: 201193 - protein, 59 aa, Glycine max
  Clone ID: PAT_MRT3847_23702C.1.pep
TLLFYKWPVVVRISLFPKFPAHLSPLETFHYHFLFGAPSFILSTKVICKSFCLIEKFTV

SEQ ID NO: 201194 - protein, 27 aa, Glycine max
  Clone ID: PAT_MRT3847_23703C.1.pep
PWSSLTLVKHLSLVKFYTFSHFRSSNL

SEQ ID NO: 201195 - protein, 64 aa, Glycine max
  unsure (1)..(64): unsure at all Xaa locations
  Clone ID: PAT_MRT3847_23704C.1.pep
RVRVLRXXSXLXRSPLKVPFXEVGVTASMFFYIIFLGIFFXHFFPLFIYIPICGNSFCSSFCTK

SEQ ID NO: 201196 - protein, 84 aa, Glycine max
  Clone ID: PAT_MRT3847_23705C.1.pep
KKKKGGSNSESPPNLFVVPNWGHFFKKKGFPRRFLSLWGGVEMGSFLGRCFRLFFFFPISFRGLVFYGYISKPFPLEAFLSFLK

SEQ ID NO: 201197 - protein, 136 aa, Glycine max
  Clone ID: PAT_MRT3847_23706C.1.pep
MEGQPAKRRRVYSLEPTKVEQAAFARNYMNCLVPALMKIKERSSTSAEQHSVHSCDDDNIQNVVKYEVDMAMVRSAQGYAWSNALSVKLQRNRVNVDCDTTSFGEGSPSRVCGQNYEMVPLSNFSSNPSLKSNNKC

SEQ ID NO: 201198 - protein, 348 aa, Glycine max
  unsure (1)..(348): unsure at all Xaa locations
  Clone ID: PAT_MRT3847_23707C.1.pep
ISISKYLLHIFSSNVPLVVSRQIIQTFAQELGRLEPEIQKESAHYSLSQIQTRVVSXYSKLWSLERNMLSCINLRTGVRKHDEXFMVLNLIQKGWLYMEDDDCVNAEDLIIKVLLFVXSDVRREVLNLKYKVCYARILDLKRKFLEAALRYYDISQIEKRQIGDEEINEEALEQALSAAVTCTILAAAGPQRSRVLATLYKDERCSKLKIYPILQKVYLERILRKPEIDAFAEELKPHQQALLPDNFTVLDRAMIEHNLLSASKLYTNISFDELGTLLGIPPHKAEKIASRMIYEDRMRGSIDQVEAVIHFDDDTEELQRWDQQIVGLCQALNDVLDSMAKKGFPVPV

SEQ ID NO: 201199 - protein, 126 aa, Glycine max
  Clone ID: PAT_MRT3847_23708C.1.pep
KSGVGCLYVKVSMDGAPYLRKVDLKTYSNYIELSSALEKMFSCFTIGQCNSRALPGKDGLSESAFRDLVDGSEYVLTYEDKEGDWMLVGDVPWKMFTESCKKLRIMKGSEAIGLAPRGMEKFRSQY

SEQ ID NO: 201200 - protein, 118 aa, Glycine max
  Clone ID: PAT_MRT3847_23709C.1.pep
KPWTSPPSLRGAACEPGYSLPVASHSNPAPFLPHRGKRDSKEGVSNRCTCSPPCSAGNQCGAPEGHFISERACWPQDPVQPCFLHRGSFLIAASLRLQPQDRTRSDAFQTTHTMLRFE

SEQ ID NO: 201201 - protein, 151 aa, Glycine max
  Clone ID: PAT_MRT3847_2370C.1.pep
FLNNQLTGCIPQGVGIFTEMQVFDVSFNSLMGHLPDTMSCLQDIEVLNLAHNKLSGELSDVVCSLRSLLNLTVAYNFFSGLSQECSRLFSVGFDFSDNCIPGRDMQRPQPECSIIPGGSLNCLRIPTPKPLVCAALAATLSKHTNSRSSSP

SEQ ID NO: 201202 - protein, 235 aa, Glycine max
  Clone ID: PAT_MRT3847_23710C.1.pep
MGGQSSKMFSVESPTPIKMGTHSLYAADLSSYEAACVKDPNLQSFDVSIQEHTNRVISSLAHGVEVRSLSFDSLREMTDSLLEMNQEVVKVILDCKKDIWGNSELFSLVNDYFDNSLHTLEFCNSLEKCLRRARENQMIVKSVVTYFEEEGQNGADGVTYVKTLQELKKFKDAGDPFTEEFYLLFQSVYTQQASMLQKLQIRKRKLDKKLKSLKTWRRVSNVIFVAAFDSVLIFS

SEQ ID NO: 201203 - protein, 44 aa, Glycine max
  Clone ID: PAT_MRT3847_23711C.1.pep
RARERKQSEDTNLTQGCRLNARGSQVWFNTEWILGPSPSSSHSR

SEQ ID NO: 201204 - protein, 62 aa, Glycine max
  Clone ID: PAT_MRT3847_23712C.1.pep
DYSVFATTMERSNCQSLMYLEEEGMERNLVNQPHRTRYITNTNLNARTPQKKKQTKQPTLPI

SEQ ID NO: 201205 - protein, 74 aa, Glycine max
  Clone ID: PAT_MRT3847_23713C.1.pep
IAVSISLLFLLKTCRIYMCRLLLVLVSWNHLQSMSHLVRFCLENNVHEYSRSHIKSFNWAYRGITYPISRERQQ

SEQ ID NO: 201206 - protein, 42 aa, Glycine max
  unsure (1)..(42): unsure at all Xaa locations
  Clone ID: PAT_MRT3847_23714C.1.pep
GNQRSPMILIKRSSVPFVRPKPPRYITNACTRAXXELRRGSD

SEQ ID NO: 201207 - protein, 69 aa, Glycine max
  unsure (1)..(69): unsure at all Xaa locations
  Clone ID: PAT_MRT3847_23715C.1.pep
CAGFSHRNGHVYITRLGVTLYHPISCSRLXKPDEDLLQRRCLNWYQTTKEEHTHCAALPTAPSHEHGNI

SEQ ID NO: 201208 - protein, 108 aa, Glycine max
  Clone ID: PAT_MRT3847_23716C.1.pep
DQEWIGVKPTLDAYIINVGDIIQVWSNDAYESVEHRVVVNSEKERFSIPFFFYPAHETEVKPLEELINEQNPSKYRPYKWGKFITHRKNTNFKNQNVENIQIYHYKLA

SEQ ID NO: 201209 - protein, 350 aa, Glycine max
  unsure (1)..(350): unsure at all Xaa locations
  Clone ID: PAT_MRT3847_23717C.1.pep
CRKFRFNNTDFEAHYPAKEELKSKLLNIRDMRNPGFVIVVDIGLLDLSTDIWKEQFNFLHRYFGRAKFVWMLNHDTSNTIKMELRRKGHILMVNKPLYKAKMIHILEAVINERNLELQKKNMIAPRTTMKEGDLHEFLEIDSTHFDGASSDDSDISEISGSNPVSANGDKPVEKLENSHPSSPHHMNNCLVRLTNENECLEEHNLRKEESSSPSSSSATEDNQPKSLSTKESSSISTEDQDEDSECGDTNRVTSSSKAVVDGKKSLEGLKILLAEDTPVLQRVATIMLEKMGADVVAVGDGQQAVDALNCMFTAEDCXENHSRRKETQDHLKQRFSTCRPYDLILMDCQV

SEQ ID NO: 201210 - protein, 81 aa, Glycine max
  unsure (1)..(81): unsure at all Xaa locations
  Clone ID: PAT_MRT3847_23718C.1.pep
PQHNTLRKIAFNNCQTPEYPFSAIVGQPKMQLCLLLMYLNPNIGGVMHMVAIRTAKSTTVTTXVELLPEINAVAGDPYHSD

SEQ ID NO: 201211 - protein, 51 aa, Glycine max
  Clone ID: PAT_MRT3847_23719C.1.pep
GMSLTIPLAMLADMVIHGRHYSALYILGSVQVFAGFVIANISDRPTKRLGL

SEQ ID NO: 201212 - protein, 119 aa, Glycine max
  unsure (1)..(119): unsure at all Xaa locations
  Clone ID: PAT_MRT3847_2371C.1.pep
RRGDPRRPRARTPREDDRGGETTRGETQGEGGGNGPPKPRTRRRRDPRRQTNHKGGKNGTETHTAXAKQAESTKDTATKTTKPARKAKAAKEPNKPKRPPXXXXXXREAKRSNTTHKTT

SEQ ID NO: 201213 - protein, 60 aa, Glycine max
  Clone ID: PAT_MRT3847_23720C.1.pep
HRILQFCRKNYAVLYPPSVIRHLAEHVTIEFVEGYKMKTHKASAERFTVTGQCKITRRRA

SEQ ID NO: 201214 - protein, 61 aa, Glycine max
  Clone ID: PAT_MRT3847_23721C.1.pep
LFISGKIEFLFLPIHFCKTLALMMYGSAPKKTYFIATKKLYSQIFFSGPVKVRLGSHLKQK

SEQ ID NO: 201215 - protein, 57 aa, Glycine max
  Clone ID: PAT_MRT3847_23722C.1.pep
QFVLNAASDDTVDTRMTNNISLAIQEKNIIFICFQFSSIQNVKLRVVIFNIILQIPI

SEQ ID NO: 201216 - protein, 52 aa, Glycine max
  Clone ID: PAT_MRT3847_23723C.1.pep
MINDQDTFKRADLTSDLNDDNTADLVNALKSKIHSWAGQHSYILETMTTNVR

SEQ ID NO: 201217 - protein, 62 aa, Glycine max
  Clone ID: PAT_MRT3847_23724C.1.pep
ELFNPGEIPRACITHSQSGEKRPRHFCPHGGKKVFSSHAPVIKNGPPFVRKEKSWDKKGSFL

SEQ ID NO: 201218 - protein, 379 aa, Glycine max
  Clone ID: PAT_MRT3847_23725C.1.pep
MGKTAYKRLKGSQSFRQRLLLSTLSSTPILIEDIRADETWPGLRNHEISLLRLFETVCDDCHVEINETGTKLKYKPGTIMGGRQHSPHDCGVSRSIGYFLEPLIVLCLFAKQPLTIRLKGITNDSKDPSVDTFKSTTLPILKRFGVPSEGLEIKVESRGLPPNGGGEVLLSVPVVQSLTAVSWIDEGFVRKIRGTSFSTRVSVQFEYGMIKAARGIINPLVSDVHIFSDHRSGPEAGNSPGYGISLVAETTSGCFISVDTAVSQVRDDDTSGLADDAKRDLMPPDDIGVGIASALLGEIAQSGVVDSTHQGLLFLLCALCPQDVSKVRVGKLSQHGVETLRNLRDFLDLKFIIKPDPNSQSVFLKCIGYGMKNLSRKVS

SEQ ID NO: 201219 - protein, 348 aa, Glycine max
  unsure (1)..(348): unsure at all Xaa locations
  Clone ID: PAT_MRT3847_23726C.1.pep
MGIPGVDGELKKILNANMDEVGARRRAREAFKDIQLGIDHILFKTPCDGIKMEESYEKNSKGLEIFCKSWLPSASKPKAAVFYCHGYGDTCSFFFEGIARKLASSGYAVFAMDYPGFGLSEGLHCYIHSFDGLVDDVIEHYSKIKENPEFHSLPSFLFGQSMGGAVALKIHLKQPKAWDGAILVAPMCKIADDMVPPKFLTHILIGLANVLPKHKLVPNKDLAEAAFRDLKKREQTAYNVVAYKDKPRLKSAVEMLTAXEEIEQRLKEVQIXSLPIFILHGEADTVTDPSVSKALYENASCSDKKLQLYKDAYHALLEGEPDEIITQVFGDIISWLDEHSLTHNQSSS

SEQ ID NO: 201220 - protein, 350 aa, Glycine max
  Clone ID: PAT_MRT3847_23727C.1.pep
MGIPGVDGELKKILNANMDEVGARRRAREAFKDIQLGIDHILFKTPCDGIKMEESYEKSSKGLEIFCKSWLPSASKPKAAVFYCHGYGDTCSFFFEGIARKLASSGYAVFAMDYPGFGLSEGLHCYIPSFDGLVDDVIEHYSKIKENPEFHSLPSFLFGQSMGGAVALKIHLKQPKAWDGAILVAPMCKIADDMVPPKFLTHILIGLANVLPKHKLVPNKDLAEAAFRDLKKREQTAYNVVAYKDKPRLKSAVEMLKTTEEIEQRLKELVKILVSLPIFILHGEADTVTDPSVSKALYENASCSDKKLQLYKDAYHALLEGEPDEIITQVFGDIISWLDEHSLTHNQSSS

SEQ ID NO: 201221 - protein, 58 aa, Glycine max
  Clone ID: PAT_MRT3847_23728C.1.pep
GIRIEKQPFKMLVYEGGEERRRRRMVTDQDIAKGVEYMMRQSDQNYLNTVKGVVKQME

SEQ ID NO: 201222 - protein, 62 aa, Glycine max
  Clone ID: PAT_MRT3847_23729C.1.pep
RMFGLMCLITKSRTSANASFIVKLSIININYNNYMQCSHNILKNYKMVFQTDTASLLHSFNF

SEQ ID NO: 201223 - protein, 34 aa, Glycine max
  Clone ID: PAT_MRT3847_2372C.1.pep
QAESSRREHKSSAMHLRRKVGPHARCTLILLHPL

SEQ ID NO: 201224 - protein, 50 aa, Glycine max
  Clone ID: PAT_MRT3847_23730C.1.pep
SVSVRISDLGCYESYRLFMHDIEVCHLHLFSKSSLKPPFPFRYQLNSSSL

SEQ ID NO: 201225 - protein, 48 aa, Glycine max
  Clone ID: PAT_MRT3847_23731C.1.pep
PAAGFSLLHGHPPWGSAPIRHVPVCFILPLVDGCFCALLHVFSPSDGY

SEQ ID NO: 201226 - protein, 101 aa, Glycine max
  unsure (1)..(101): unsure at all Xaa locations
  Clone ID: PAT_MRT3847_23732C.1.pep
GFCRGSARFLCFRRFVPSRVGVLAXCLRSVVLLRXGFVVLRVLCRLXGLRGRCGLWGAXGGLSRGGLCLLPFLXAFGVWLFRLLVAVVPAVFSXRVRIRKA

SEQ ID NO: 201227 - protein, 166 aa, Glycine max
  Clone ID: PAT_MRT3847_23733C.1.pep
TIFGEVGKVYAVKWKDVLDSIWHLVDKDENYHNIVYNQDLNQPVIVAGWITLRNFYQLTGNHLVSLHHYVLGSVTFKVYLTEQKVSCSSLDVPSVMHYFLKDKGWTHLHLEDVAECRLVFNHWRKTLKIEAGWKHFYKTLSFTTDMKIVFEFIDPDVNCVLYWSCV

SEQ ID NO: 201228 - protein, 60 aa, Glycine max
  Clone ID: PAT_MRT3847_23734C.1.pep
KLKPFSFAQSPIKQQFLTLNTYSTHTAFLIILALTLFVALTTPLFFFLLFTPDFLFFKTN

SEQ ID NO: 201229 - protein, 309 aa, Glycine max
  unsure (1)..(309): unsure at all Xaa locations
  Clone ID: PAT_MRT3847_23735C.1.pep
MALEPNRLEEISTISLSLFFCVSKMAPSSTHNNGFYVLMLVGIVVSAMVAICAASFYQDFDPTWVGDRAKIFNGGQLLSLSLDKVSGSGFKSKKEYLFGKIDMQLKLVAGNSAGTVTAYYLSSQGPTHDEIDFEFLGNLSGDPYILHTNIFTQGKGNREQQFYLXWFDPTRNFHTYSIIWKPQHIIFLVDNTPXIRVFKNAEPLGVPFPKNQPMRIYSSLWNADDWATRGGLVKTDWSKAPFTAYYRNFKATEFSLKSSISNSGAEYEANELDSYSRRRLRWVQKYFMIYNYCSDLKRFPQGLPAECRR

SEQ ID NO: 201230 - protein, 71 aa, Glycine max
  Clone ID: PAT_MRT3847_23736C.1.pep
VTTKAATTAKTVTEVKIKIPKKQLEELLSKVDVRELRVEQVLSQLMNHSSGGFQSLQRPWRPALQSIPEVN

SEQ ID NO: 201231 - protein, 48 aa, Glycine max
  Clone ID: PAT_MRT3847_23737C.1.pep
EANGQMLHYANGKLVKGDGAMNKCVIVVDIICIEGAVQLYLVGEVVKN

SEQ ID NO: 201232 - protein, 120 aa, Glycine max
  unsure (1)..(120): unsure at all Xaa locations
  Clone ID: PAT_MRT3847_23738C.1.pep
GPEPPGRPKTPPLGPNNNNHRERGRQQAGHTPQPAKATPANTAEXRNDTGTAGHNPEDEPQNTENRPKPPTDQKPGQDNPDDTAXKQXTEQEDDSGPQKAXGHKEGARGAHXRRAGPRQK

SEQ ID NO: 201233 - protein, 54 aa, Glycine max
  Clone ID: PAT_MRT3847_23739C.1.pep
ITGALLLRLWLHVDHPFLNQVVGYRHLQVLLKGQSCFSYDFNIDSPPANGVFKT

SEQ ID NO: 201234 - protein, 38 aa, Glycine max
  Clone ID: PAT_MRT3847_2373C.1.pep
EKSTLYSHQNEKLTQLQSMIIKLKDTLQNREAKRITKV

SEQ ID NO: 201235 - protein, 93 aa, Glycine max
  Clone ID: PAT_MRT3847_23740C.1.pep
SWKSFFKILFFFMEPFFLIWGGGRSFLLRMDGESFILGGIGPVIPMGTNFFFYPRIGPMYGRAFFFLIFPPIMNEILGFVWGPPQKTQVVLLS

SEQ ID NO: 201236 - protein, 108 aa, Glycine max
  Clone ID: PAT_MRT3847_23741C.1.pep
LCACPSAFCYHHQYTAKAPRRLVPGRNQNTPIQPDQQHPRKIRNAKPERSSINVLVRRQAPLRQRAPRMELRGNDEGKKTSTKPRLSCKSTVWNRTEVTERYNSKNLL

SEQ ID NO: 201237 - protein, 107 aa, Glycine max
  Clone ID: PAT_MRT3847_23742C.1.pep
LPPSVLITPPHFTTSPSVSYSSPLSYKAPPASKSQLPPPPPPSRIAPPPPFKFYNTPPSSLTQPQPTEISAPHDFSYPYYYDYAAGAASLLFHPPFFGIRIDLNWVF

SEQ ID NO: 201238 - protein, 59 aa, Glycine max
  Clone ID: PAT_MRT3847_23743C.1.pep
NLKGMYKNNRVKIKIQCLGCKRVVILIIKIDVAINQLNILLSSFRRRKVWSYSEIRACL

SEQ ID NO: 201239 - protein, 30 aa, Glycine max
  Clone ID: PAT_MRT3847_23744C.1.pep
GQVHAGVQDLNIVSSIRDWSNHGNRCFMCE

SEQ ID NO: 201240 - protein, 78 aa, Glycine max
  unsure (1)..(78): unsure at all Xaa locations
  Clone ID: PAT_MRT3847_23745C.1.pep
RKVIGESQIVVTGQAPIHSEXEKKNPCPISPRLEKNNLEKYALAFKESSGRARHQTRRRPAAGRSSYVCHKLLIQIFL

SEQ ID NO: 201241 - protein, 75 aa, Glycine max
  Clone ID: PAT_MRT3847_23746C.1.pep
RSSCNLIFYLYLFRFLLSTLMKQNLIALCCYLILLRRLEAVEVDQGPVEVVPGVALQKRTFNLLNKLPYIRHAHT

SEQ ID NO: 201242 - protein, 34 aa, Glycine max
  Clone ID: PAT_MRT3847_23747C.1.pep
DGRTIRSNLSYAITLRHSPPKSSHRSTSQNVVIE

SEQ ID NO: 201243 - protein, 51 aa, Glycine max
  unsure (1)..(51): unsure at all Xaa locations
  Clone ID: PAT_MRT3847_23748C.1.pep
RIVTQGTGTLLHHHIIAXFDGMPDDNRLMLTDKAFREVLTYSHDAIVVPPW

SEQ ID NO: 201244 - protein, 82 aa, Glycine max
  Clone ID: PAT_MRT3847_23749C.1.pep
MNIFPIEKYLPYTLALSFISIFYFYFSSDLSHTLSYHLSLFFSLSLSFLIVFSVPLFSFFFSPIHPKMKYRFIITLKNLPFI

SEQ ID NO: 201245 - protein, 91 aa, Glycine max
  Clone ID: PAT_MRT3847_2374C.1.pep
QKTTEGGGDFLGKAGCHAHRRTEERPTQFITINKPSLIRWLIRILIRHLIWVCMLSQTRRDQQYRGQRRTPPTHPILLRRRLLSPTLDHRP

SEQ ID NO: 201246 - protein, 93 aa, Glycine max
  Clone ID: PAT_MRT3847_23750C.1.pep
DEAMNFLDFGVKQSQVRNLDFTGFKKLICKLVVMYPNLVYAHSLLPLEFQISQQSYQNSTSVIIALICDVANSTFFFKHVLVVTNFLFTILAS

SEQ ID NO: 201247 - protein, 128 aa, Glycine max
  unsure (1)..(128): unsure at all Xaa locations
  Clone ID: PAT_MRT3847_23751C.1.pep
GWENFRERIARGASTGDAGLRENSSDSLELRMGAHYRGQTXLARTERGMMYYRRALMLHSSLESITLGVDNYIQNNFITTXDFESYDESRAQADMQITYVASCQMYGQQKQRKAPEAADIALLIQRNE

SEQ ID NO: 201248 - protein, 96 aa, Glycine max
  Clone ID: PAT_MRT3847_23752C.1.pep
KTQKGFLGFTVSPGEKNLFPPSNLPLYIKKGRKPKRGYPEKRTKSFTVPVPIKNPAFGGGLALFQFVRHQTLFWRETSSPLRTIGGVMKHQAWWFS

SEQ ID NO: 201249 - protein, 59 aa, Glycine max
  Clone ID: PAT_MRT3847_23753C.1.pep
DTYNCINPTHIASSKLKFLRSPHQTETNCNRNHQDGIGVLALKGGCVFRNQRHGFLLGY

SEQ ID NO: 201250 - protein, 303 aa, Glycine max
  Clone ID: PAT_MRT3847_23754C.1.pep
MMLHFVQPSKLKTKKMVFEDVYASCDSTTLEHLKELSSKRKAIEDSINECNFVTGALALAMSGGLVARLHQDIHKIENYLPFLEILIPYADATSTINQIQISQWNAALKIRWSSALTTSSFFKIKGPKFFQINNLRFELGMTLFLCGGILRERALEVLSTDLVQSATIFRQAAGIYHHLAQEVLPHLEPELPPEKPPEALAAVSSIMSLICLAEAQAVTIRKAEEKGTSSSLLAKLHHGVTLFLEEAIGIFHTVVTQCKDISSRLSEFMYFCKCLHELKGQQYLAESLKACGQIGAAIGVLSS

SEQ ID NO: 201251 - protein, 405 aa, Glycine max
  unsure (1)..(405): unsure at all Xaa locations
  Clone ID: PAT_MRT3847_23755C.1.pep
RMEINRPFPASPADIRRFHSDDYVDFLSSVSPETLADSAFSRHLKRFNVGEDCPVFDGLFPFCQASAGGSLGAAVKLNRADADIAINWAGGLHHAKKSEASGFCYVNDIVLGILELLKAHRRVLYVDIDVHHGDGVEEAFYTTDRVMTVSFHKFGDFFPGTGHVKDIGVGSGKNYAVNVPLNDGMDDESFRSLFRSIIQKVMEVYQPEAVVLQCGADSLSGDRLGCFNLSVRGHADCLRFLRSFNVPLMVLGGGGYTIRNVARCWCYEXVAVGVEPDNKLPYNEYYEYFGPDYTLYVDPSNMENLNTSKDLEKLRNTLLEQISRLPHAPSVPFQTTPPTLQLPEEAEENMDRRPKLRKWDGEDYDSDPEEGGKDNSKFSNITAHMRDIADEMEEEKPEEHPSSCS

SEQ ID NO: 201252 - protein, 472 aa, Glycine max
  Clone ID: PAT_MRT3847_23756C.1.pep
MGMEEESSIIEGGASLPSSGSDAKKRRVTYFYEPTIGDYYYGQGHPMKPHRIRMAHNLIVHYSLHRRMEINRPFPASPADIRRFHSDDYVDFLSSVSPETLADSAFSRHLKRFNVGEDCPVFDGLFPFCQASAGGSLGAAVKLNRADADIAINWAGGLHHAKKSEASGFCYVNDIVLGILELLKAHRRVLYVDIDVHHGDGVEEAFYTTDRVMTVSFHKFGDFFPGTGHVKDIGVGSGKNYAVNVPLNDGMDDESFRSLFRSIIQKVMEVYQPEAVVLQCGADSLSGDRLGCFNLSVRGHADCLRFLRSFNVPLMVLGGGGYTIRNVARCWCYETAVAVGVEPDNKLPYNEYYEYFGPDYTLYVDPSNMENLNTSKDLEKLRNTLLEQISRLPHAPSVPFQTTPPTLQLPEEAEENMDRRPKLRKWDGEDYDSDPEEGGKDNSKFSNITAHMRDIADEMEEEKPEEHPSSCS

SEQ ID NO: 201253 - protein, 420 aa, Glycine max
  unsure (1)..(420): unsure at all Xaa locations
  Clone ID: PAT_MRT3847_23757C.1.pep
MGMEEESSNNSSIIEGGASLPSTGSDAKKRRVTYFYEPTIGDYYYGQGHPMKPHRIRMAHNLIVHYSLHRRMEINRPFPASPADIRRFHSDDYVDFLSSVSPENLADSAFSRHLKRFNVGEDCPVFDGLFPFCQASAGGSLGAAVKLNRADADIAINWAGGLHHAKKSEASGFCYVNDIVLGILELLKVHRRVLYVDIDVHHGDGVEEAFYTTDRVMTVSFHKFGDFFPGTGHVKDIGVGSGKNYAVNVPLNDGMDDESFRSLFRTIIQKVMEVYQPEAVVLQCGADSLSGDRLGCFNLSVRGHADCLRFLRSFNVPLMVLGGGGYTIRNVARCWCYEVCFFLFXLDYNVTWYLFNLLIWLHAFSLFXTAVAVGVEPENKLPYNEYYEYFGPDYTLYVDPSNMXNLNTPKGMEKIRCLYY

SEQ ID NO: 201254 - protein, 111 aa, Glycine max
  Clone ID: PAT_MRT3847_23758C.1.pep
VRKKGGIWEPPGGGGKNLCMACSREFLVKKIGAPGARIPPPHVQSGSSPGAARAGGLHGPANLFLLWSWGVPTRGFLAPPPPHFNPQANVVFFFSPACSVFCYLISPSCKF

SEQ ID NO: 201255 - protein, 104 aa, Glycine max
  Clone ID: PAT_MRT3847_23759C.1.pep
TAARDDRRVSIIAEADLQKLNNALKILSETEKQLRNSKNQTTWFIVALLQLSSVDCQSVDANDTKLSLRGACNGGELDFFPLFITLFSIPFLHWCLAEWSGFVS

SEQ ID NO: 201256 - protein, 71 aa, Glycine max
  Clone ID: PAT_MRT3847_2375C.1.pep
HIQTKRSGSHKIEIKVHRLRIMFIILSSLDLDLIFHLKLKEYICAFTLFSYMHTQLVTYHILFIKFIIPYL

SEQ ID NO: 201257 - protein, 182 aa, Glycine max
  unsure (1)..(182): unsure at all Xaa locations
  Clone ID: PAT_MRT3847_23760C.1.pep
ESKVIITARNKGLLQSHGIESIYEVERFSKTEAFQLLILKAFNSISVSADYVTIFNRVETYALGHPWTLEVIGSNLSGKSVENCESALLKYESITNRDIRKILEESXNALEKCQQEMLIHIALKLKELELXVVEDELCNYYKVCPKKDIXVLLDKSLIKINEHGQVTLHPSTQDMIRDKITR

SEQ ID NO: 201258 - protein, 48 aa, Glycine max
  Clone ID: PAT_MRT3847_23761C.1.pep
IKFGSHYIRSFRLWARVGKLGSYIATGIFFLFYKIRSNYVVLAGMNIS

SEQ ID NO: 201259 - protein, 100 aa, Glycine max
  unsure (1)..(100): unsure at all Xaa locations
  Clone ID: PAT_MRT3847_23762C.1.pep
XXXSXXXEXQLXXXXXXGSAXXXSVCSXXLXVAMXGAXXXHPLXXMXHSXXXRWHEXXXXXLQXXRPXEXXVGHPIQXXPXRAXLXXDXAAXXRXRXXVX

SEQ ID NO: 201260 - protein, 140 aa, Glycine max
  Clone ID: PAT_MRT3847_23763C.1.pep
SGVLQITKVCISGVPTSGSFGRALFPAPIPIWDHETGNVAHWGTFFKFNIFSPHKSDSADGLAFFFAPGGSKPQSDHGFLGLFNSALKDKSLPTVAIEFDTFSNKKWDPAHRLIGNGVNIINTASIILRGFQSPIDETIV

SEQ ID NO: 201261 - protein, 86 aa, Glycine max
  unsure (1)..(86): unsure at all Xaa locations
  Clone ID: PAT_MRT3847_23764C.1.pep
MASFDEQQGKPLPKFGEWDVNDPASAEGFTVIFNKARDDKKIASASGRFPSQRRYDSRKHGKDKKKCKSSXLFSXXSKKKWSCFGP

SEQ ID NO: 201262 - protein, 246 aa, Glycine max
  unsure (1)..(246): unsure at all Xaa locations
  Clone ID: PAT_MRT3847_23765C.1.pep
MNTQYVKQLLRNFYSTKFFLNREKPHWNYMHRVFNQLQLQRSRADKVEDKLKEEQETQQISFKSEVKKADGNDGISKYSSDDEDSLDSKWKLELAWLTKALEPALQFCRWALPTGNGIGNKPPPSNRSLTEIIACIQRSKIGIQDWSLSDLTIGLYLIYLRQASTHPFEDIKGIQILSESIVQDLIYHIELAKGAYRDNPFSLSRNCMLRESYXKFVKYSSVMRPAYIXGGDTRXKLVILGIRGTH

SEQ ID NO: 201263 - protein, 43 aa, Glycine max
  unsure (1)..(43): unsure at all Xaa locations
  Clone ID: PAT_MRT3847_23766C.1.pep
SRGLMLGDTLTYTPTLRCRHMKGGEKEHKWHCVIDDSSLTHXL

SEQ ID NO: 201264 - protein, 475 aa, Glycine max
  Clone ID: PAT_MRT3847_23767C.1.pep
MEMMGLANTVLMMKIPQIVSGSWSWLGLQRHLNQLCNFVGNEIGNKPPPSIRSLTEIIACIQRSKIGIQDWSLSDLTIGLYLIYLRQASTHPFEDIKGIPILSESIVQDLIYHIELAKGAYRDNPCSISRNSMLRESNVKKFVKNSSVMRPAYYIGVDTRKKLVILGIRGTHTFYDLITDILSSSDGEVTYEGYSTHFGTAESARWFLRHEIEIIRKCLEKHEGFKLRLVGHSLGGAIASLLAIMIHRKSSKELGFSPDIVSAVGYGTPPCVSRELAESCSGYVSTVVMQDDIIPRLSVASLARLRNEIVQTDWMSVIEKEDWKSVTDLVTNAKQFVSSVQDVARRLADYANFRRNKSLAVGTADKELPVATEAPLPSKAAKENSGVTKVAGTKTAVIEELFIPGTVYYLKRNLGSQIDAGKDFFTLYKREPGEHFQKVIFSGNFITDHRCDSHYYALRDVLKGVPWCGKEGIFK

SEQ ID NO: 201265 - protein, 130 aa, Glycine max
  unsure (1)..(130): unsure at all Xaa locations
  Clone ID: PAT_MRT3847_23768C.1.pep
AGHSSLNTILKAPGGPRGKKNTGRHPQGNQGGASPNSQKQRSERSPRPRAPTHRNPRNQNLDHPPPPPGKPPKXGPKGLGWASQNTTPLEGGGPPKLPKGWPQEQFQPPWPGGGKPPLETRPWGATPPPP

SEQ ID NO: 201266 - protein, 368 aa, Glycine max
  unsure (1)..(368): unsure at all Xaa locations
  Clone ID: PAT_MRT3847_23769C.1.pep
MNMTPVCPFVKASRPDDNNASKKSGENSMKHQVESESKGKKEVNDSASTSPKCPFGYDSHSFKIGPLSCTVCQALLFDTSKCVPCSHVFCKACILRFKDCPLCGADIVKIEPDANLQGVVDHFIEGHARIKRSVSSDKGEEATESKKVIYEDVSLERGSFLVQQAMRAFRAQNLESAKSRLNLCAEDIRDQLEKVGNTSELCSQLGAVLGMLGDCCRAMGDASSAVAYFEESVQFLSKFPKDDLEITHTLSVSLNKXIGDLKYYDGDLQAARSYYFKSLNVRRDVVKHNSNVPSQVLDVAVSLAKVADVDRNLGDEKLATDGFQEAIDLLESLTLKSEASGLEQRRQSVLDFLRSQLPDKQEQAEAPV

SEQ ID NO: 201267 - protein, 69 aa, Glycine max
  Clone ID: PAT_MRT3847_2376C.1.pep
PTRSPTRPPTRPVIPVFYHVEPADVRHQRGSYKNAFKKHEKRNKTKVQIWRHALKKSANIVGIETSKIR

SEQ ID NO: 201268 - protein, 108 aa, Glycine max
  unsure (1)..(108): unsure at all Xaa locations
  Clone ID: PAT_MRT3847_23770C.1.pep
MATVTSAAVSIPSFTGLKASAGKVSAAAVKVSAPQATRFCGIKGLPSXRNXGSAVVGTGGKRSLXKQPMAHEMVPGTDEGLWVSLPNLSPGAPGKKTGPKQPGFPPNI

SEQ ID NO: 201269 - protein, 186 aa, Glycine max
  Clone ID: PAT_MRT3847_23771C.1.pep
DGKTTLLHFVVQEIVRTEGSHISGSNHPHASDNGHQYTLQDEVDFKKLGLQVVSGLSGELTNVKKAAAMDSDVLSSDVAKLSRGIEKVVQVVKWNKELPLKETNKKFSDAMKGFLERGEQELSTIQTQEKNALSSVKEITQYFHENSAKEKAHPFRIFIIIKNCLSILNNIYRKVNKVDKKTLVSS

SEQ ID NO: 201270 - protein, 69 aa, Glycine max
  Clone ID: PAT_MRT3847_23772C.1.pep
KYASRFFFIPPPFGLNVTICSHEMLKMCKGPGSSNSPWGGQCFFFMPQNLDFGGSLTLTKAIFFSATFG

SEQ ID NO: 201271 - protein, 132 aa, Glycine max
  Clone ID: PAT_MRT3847_23773C.1.pep
MTLKGLVSLVINLIGLAEGTRNNDAPPLPCYMLSSHIQNNKQQSSESASASNFNEDSWCCVCLSRLKAKDEIRVLPCSHKFHKICVNKWLKGRHKTCPLCRFSMGAEEKSHRAEMFTEEMLIWFSSFHVAGM

SEQ ID NO: 201272 - protein, 132 aa, Glycine max
  unsure (1)..(132): unsure at all Xaa locations
  Clone ID: PAT_MRT3847_23774C.1.pep
VVMSVTLHRPARDFRTSGSCLPLASWLLGVLPSLVVLAFLLALVLLLVLFVCRGFACVLSPSHLGLLFCFLRPFSAVGSSSLACVCVWFCFPYRIGRVLVTLFCLWLVWPLSLGFSVCRSFSGLYLGXPHHT

SEQ ID NO: 201273 - protein, 147 aa, Glycine max
  Clone ID: PAT_MRT3847_23775C.1.pep
MAPLALRARAASVARSQVKAQASLKPVQKIAQVAGVAVSSLALTLAAHADATVKLGADSGALVFVPEKVTIKAGETITWVNNAGFPHNVVFDEDEVPEGVNADALGREDLLNAPGETFSAKFTTPGSYSYYCAPHQGAGMKGTVIVQ

SEQ ID NO: 201274 - protein, 75 aa, Glycine max
  Clone ID: PAT_MRT3847_23776C.1.pep
CIETLIKTLSDHYSELYLTRSIFHQDLMTDSTKTILNFSLMRSSHLHSYILKCIITTHRDVNTCNCHNSTSNLST

SEQ ID NO: 201275 - protein, 70 aa, Glycine max
  Clone ID: PAT_MRT3847_23777C.1.pep
CINYCLPHLFVFVFLLGLNVAVVCFNVGDAFVVHACDNCCGLVWFPKLFFWLVAVIEFSITKQAVEVENL

SEQ ID NO: 201276 - protein, 141 aa, Glycine max
  Clone ID: PAT_MRT3847_23778C.1.pep
MEQQRRWHDVFWLGIFVIHLVGMGLVLGVLGLNRFKQKNRLDIDKYTYRFMENEAGLTEDYWPLYAVAGGLGTALGWSWLLLLGSRATQMMKVSVHILTTYLAVISVLCFWAEQFFWGVAFAIGAALQFLYVISVIKRLSF

SEQ ID NO: 201277 - protein, 85 aa, Glycine max
  Clone ID: PAT_MRT3847_23779C.1.pep
KQSFPKSPRRLQNILQKKKKGNLLLLLHRRKERMKNFEHPLYQYTRPLQQLYPSNRPKGLALTLNPVTHQIIFLANITTKLQFPI

SEQ ID NO: 201278 - protein, 69 aa, Glycine max
  Clone ID: PAT_MRT3847_2377C.1.pep
PQEGPNLLWKGSFEYILNRHNLKVWMLKTIGEGGCYMGKGVDKNFIWGPNSKGQGLQFRKRETCWLHRG

SEQ ID NO: 201279 - protein, 61 aa, Glycine max
  Clone ID: PAT_MRT3847_23780C.1.pep
RFSTRSAPLTSIPAFYAQLRCAESRHDETDSKHIPLYAATFAHLFRFSCITENCPPFSLQE

SEQ ID NO: 201280 - protein, 44 aa, Glycine max
  Clone ID: PAT_MRT3847_23781C.1.pep
HRTCHYTMGPMILSFYREFFFGINNYRITCCLLNRTNGPRTTFN

SEQ ID NO: 201281 - protein, 49 aa, Glycine max
  Clone ID: PAT_MRT3847_23782C.1.pep
ESEPFPNPIAPSFGRLHYHDQFHMGLPGQNILFNNHNHFGKLKFLQIVI

SEQ ID NO: 201282 - protein, 92 aa, Glycine max
  Clone ID: PAT_MRT3847_23783C.1.pep
FLRSKSNQYPNTSLIQIEGVNTKEEVGWYAGKKMAYIYKAKVKKDGSHYRCIWGKVTRPHGNSGVVRAKFKSNLPPRSMGARVRVFMYPSNI

SEQ ID NO: 201283 - protein, 266 aa, Glycine max
  Clone ID: PAT_MRT3847_23784C.1.pep
MSHSINSEFKFDPKEPSMPISYPIKTLKELESRSYFESFHYPFNKASVPIESGYSEPLPNCRRILVCHDMAGGYLDDKWVQGGTNAEAYAIWHWHLIDVFVYFSHNLVTLPPPSWTNTAHRHGVKVLGTFITEGDEGTTVCNELLSTKESAQMYAKHLAELAVNLGFDGWLLNMEVSLKPEQISNLKEFVNHLSLTTHSSVPGSLVIWYDSVTINGDLWWQNELNEHNKPFFDICDGIFTNYSWQEDYPRRSAAVAGDRKFDVYMG

SEQ ID NO: 201284 - protein, 208 aa, Glycine max
  Clone ID: PAT_MRT3847_23785C.1.pep
SHAHVGSASVLVGDIDDALDSEKRYLKRGVNDRGRVANDVETEQIVLDEESGSCKGKMSSVVQMRGSIPLFWSQEASRFSPKPDIILQRYDPTYQATKLHFEDLAKRYGNPIIVLNLIKTVEKRPREMMLRREFANDVGYLNQILPVENHLRFIHWDFHKFAKSKSANVLEVLGAVASEALDLTGFYYSGKPSIIKRANKSNQTSTGR

SEQ ID NO: 201285 - protein, 65 aa, Glycine max
  Clone ID: PAT_MRT3847_23786C.1.pep
KKKKKKKKKNKKKKKKKRKNGKIKKKKKKKKKKKKKKKKKKRPTLLKDPSYHTLASKENPFLQAH

SEQ ID NO: 201286 - protein, 52 aa, Glycine max
  unsure (1)..(52): unsure at all Xaa locations
  Clone ID: PAT_MRT3847_23787C.1.pep
DAPLLQLSECPICQEEDSVXDRRHPXSRRGSLKDAHRKGAQPCSNEKGDYNS

SEQ ID NO: 201287 - protein, 77 aa, Glycine max
  Clone ID: PAT_MRT3847_23788C.1.pep
CPPPPFYVFLSFTNVLIKFLPCLKNSVFPMPLFFFSPVKVLRPLLLNLRPEKKKIIPFNKISPVHLFPHIFLFFLVP

SEQ ID NO: 201288 - protein, 249 aa, Glycine max
  Clone ID: PAT_MRT3847_23789C.1.pep
MEGNEDFTEELLQIELPESTSLIEEKFRSNMDEILEENLTFWLKFSAYYSEIQKFETTIKDLLTELSKLEEREKSSEGSSSIKYSIKSDSRPIYKHLTEIQSEITVWMEKGALLKEELQSRFSSLCDIQEEITTELKSSAEDDDFRFTSYQAAKFQGEILNMKQENNKVADELQTGLDGVTSLQLEIEKALVKLNDKFGFSASKRQQNGQLRQSETRAKVPLRSFIFGAKPKKQSIFSCMTPGMHRKYR

SEQ ID NO: 201289 - protein, 87 aa, Glycine max
  Clone ID: PAT_MRT3847_2378C.1.pep
PKAICEANTFFSTLYFAFMALSLSLKRFSRFSLAACSASASSTTSALTSCFITRPGRALGLYIGLLGAARSVLSRPSSHEILMLITP

SEQ ID NO: 201290 - protein, 33 aa, Glycine max
  Clone ID: PAT_MRT3847_23790C.1.pep
EQCVENKLCSSISHHNSFISSQAPSSLSLPLHF

SEQ ID NO: 201291 - protein, 42 aa, Glycine max
  Clone ID: PAT_MRT3847_23791C.1.pep
SKELMYVQLGLVARHFRVISLSDATIGLHLTKSESHLRTMTH

SEQ ID NO: 201292 - protein, 364 aa, Glycine max
  unsure (1)..(364): unsure at all Xaa locations
  Clone ID: PAT_MRT3847_23792C.1.pep
ISNKVLYILIIVGLKNAWFHWWKEEIYPAKYVFVDIYNPERHSWCEIKNAMGVVCKGWRSFIQSKEFTTVRKLAGMLEEWLYFLTTDCEGKESHWEVMDCLGHKCGSLPPMPGPGKAGDHMAALNGKSSLMPEYSPXTGETVPIHPVASILCCINSWSRLSDMNVSRYDFACAEVNGLVYAVGGYGVNGDSLSSAEVYDPDTDKWALIESLRRPRWGCFACGFEGKLYVMGGRSSFTIGNSKFVDIYNPERHSWCEIKNGCVMVTAHAVLGKKLFCIEWKNQRKLAIFSPEDNSWKMVPVPLTGSSSIGFRFGILDGKLLLFPLEAETAFQTLLYDPNASLGSEWQTCDIRPSGLCLCCVTIKA

SEQ ID NO: 201293 - protein, 88 aa, Glycine max
  unsure (1)..(88): unsure at all Xaa locations
  Clone ID: PAT_MRT3847_23793C.1.pep
KRRCTCSMTRTPPHMDHVLFSHIICQFRDIQRIFFAPXDSSGQVSAHEVXGSRYQAYSEGWGEFGNKSDANRVDXMLNGAQIGVLKRS

SEQ ID NO: 201294 - protein, 102 aa, Glycine max
  unsure (1)..(102): unsure at all Xaa locations
  Clone ID: PAT_MRT3847_23794C.1.pep
MVTAHAVLGKKLFCIKXKTQRKLAIFSPEVNSWKMVPVPLTGSSSIDFRIGILDEKLLLFPLKAETAFQTLLYDPNATLGSEWQTCDIRPSGLCLCCVTIKA

SEQ ID NO: 201295 - protein, 214 aa, Glycine max
  unsure (1)..(214): unsure at all Xaa locations
  Clone ID: PAT_MRT3847_23795C.1.pep
SNLAKTPSLASFPFTTISFNVVILRVFLCSTLRCEHYKRRCKIRAPCCNQIFPCRHCHNDAANSSSNPADRHELVRRDVKQVICSVCDTEQEVAKVCSSCGVNMGEYYCEICKFYDDDTDKGQFHCDECGICRXCYSVSVQNNHSCVENSMKSFCPICLEYQFDSIKGSTILKCGHTMHMECYREMATQNQSRXPICSETIGNDVNWGILDREI

SEQ ID NO: 201296 - protein, 136 aa, Glycine max
  Clone ID: PAT_MRT3847_23796C.1.pep
DTDSEDEYPNSRVLIAPNGSVYSLGVPLLADFKGTSNPILEESTLDVISPVSTDPLVFDAEQSLESELSFIHKAKESGVVYLLGHGDIRARKESWFIKKLVINYFYAFLRKNCRRGITTLSVPHSHLMQVSMTYMV

SEQ ID NO: 201297 - protein, 40 aa, Glycine max
  Clone ID: PAT_MRT3847_23797C.1.pep
ACQTIRKDLFHVKWLRNAYVPTMGQTEDSHLMLRMMNASD

SEQ ID NO: 201298 - protein, 81 aa, Glycine max
  Clone ID: PAT_MRT3847_23798C.1.pep
LAWLLQLVITLTIINVRTGYFPLYPLPSTHSYALVYLCCFNYSPPLSLLALCLLLAFPISLPIYPLHLLFSLILCFQSVLL

SEQ ID NO: 201299 - protein, 272 aa, Glycine max
  Clone ID: PAT_MRT3847_23799C.1.pep
LLEPATEKREDFGKLQYGCEHYKRRCKIRAPCCNQIFPCRHCHNDAANSSSNPADRHELVRRDVKQVICSVCDTEQEVAKVCSSCGVNMGEYYCEICKFYDDDTDKGQFHCDECGICRVGGRDKFFHCKKCCACYSVSVQNNHSCVENSMKSFCPICLEYQFDSIKGSTILKCGHTMHMECYREMATQNQYRCPICLKTIVNDMNWEYLDREIEGVHMPEEYKFEVSILCNDCNSTSTVSFHIFGHKCLQCGSYNTRRISKPKQEGLGVSGT

SEQ ID NO: 201300 - protein, 79 aa, Glycine max
  Clone ID: PAT_MRT3847_2379C.1.pep
CFPVRNGANKPFLQFQNTFRVPVEIKLGGEKKKPDHTGPGFGVKKSKVSNSNRPRGWISQGQKQASLRSGSKKGNAGAF

SEQ ID NO: 201301 - protein, 120 aa, Glycine max
  unsure (1)..(120): unsure at all Xaa locations
  Clone ID: PAT_MRT3847_237C.1.pep
CTLGASPLRPSTCFCIIFQTRPRQSDCMIVSGTLTNKRAPALRKVYDQMPETXDGLSQCENELVDXGYYHYSYSANERXDGIVPDDIYNPRCSPTADALLCGLLQLLIMIYTLQDFLHWR

SEQ ID NO: 201302 - protein, 141 aa, Glycine max
  Clone ID: PAT_MRT3847_23800C.1.pep
EGRGGYDEICQNLFILKCFWFITVLLLLIYNVTIVWVFDRFQFYAMIVTLPAQYLFTYLVTSVYSAVRITPVGFRNPNKKVWVLVEPNYKIIPKFLFYPLHFVLITFAYFPDVISKGNKRIYIIILPIVLAYVVKYIVDDL

SEQ ID NO: 201303 - protein, 73 aa, Glycine max
  unsure (1)..(73): unsure at all Xaa locations
  Clone ID: PAT_MRT3847_23801C.1.pep
LIVSARVPTMIFHFAPLRDVFASSSGSPKFFFFLVXPPFDFFIITFGFLAPAFCKLSRFSLCPFRVVLFFFWL

SEQ ID NO: 201304 - protein, 61 aa, Glycine max
  Clone ID: PAT_MRT3847_23802C.1.pep
DKGFECGINYQVNTAIFFLLVFVGYLYYYSKKVPLFLLRGGINLLQEYSFKITHLSYHLFS

SEQ ID NO: 201305 - protein, 81 aa, Glycine max
  Clone ID: PAT_MRT3847_23803C.1.pep
MEPATEKREDFGKLQYGCEHYKRRCKIRAPCCNQIFPCRHCHNDAAVFFSLTFIPIMQLTSSFFFSSLSSSSFSSINFRLF

SEQ ID NO: 201306 - protein, 60 aa, Glycine max
  Clone ID: PAT_MRT3847_23804C.1.pep
RFSSSSSSCCRANWQRPEKVVVELSCATGNRSRCAKSKSNKLGRTLSSLCKNRGFSLSQG

SEQ ID NO: 201307 - protein, 81 aa, Glycine max
  unsure (1)..(81): unsure at all Xaa locations
  Clone ID: PAT_MRT3847_23805C.1.pep
RQLKGNDLSRLERLHRADFPPIEQIEKFHGMQMWMNARASNDEMDLLLSIDTLGXQGAREALLNIIVYDDKLVXANTQEFF

SEQ ID NO: 201308 - protein, 79 aa, Glycine max
  Clone ID: PAT_MRT3847_23806C.1.pep
WQASKPRGLEKNLGGGLGGKNLTGKRKRGKTQGGPKQGGFYENKKGPLGFLILKRKTTLGEKTFWEKTSGKHWGLFWPG

SEQ ID NO: 201309 - protein, 39 aa, Glycine max
  Clone ID: PAT_MRT3847_23807C.1.pep
FNNEIVMTLLLACSSYLKISTPISIVLMICEVCYILIKL

SEQ ID NO: 201310 - protein, 56 aa, Glycine max
  unsure (1)..(56): unsure at all Xaa locations
  Clone ID: PAT_MRT3847_23808C.1.pep
RQLRSCADCPKQSTVFXDILLXGISQDFEIAGYTLMPAFSGPQATARTSENAESSA

SEQ ID NO: 201311 - protein, 47 aa, Glycine max
  Clone ID: PAT_MRT3847_23809C.1.pep
WANTHTKTKKKKDKNGGRKKFSVTIPKSLNFGGYHINELSLDLNYHN

SEQ ID NO: 201312 - protein, 31 aa, Glycine max
  Clone ID: PAT_MRT3847_2380C.1.pep
PCHHSHAPSSNNLKSPAAMIFFYAKICAQFA

SEQ ID NO: 201313 - protein, 112 aa, Glycine max
  Clone ID: PAT_MRT3847_23810C.1.pep
LHSHLRLRHSLFLSFTSFSLSYHYSLLFLFFSFFNAHNTTPLSLFSPHLQHSHTLKKKIKKNIKNKKKFVFLQQTMEGLPHGYRPNVGVCLINSDDQIFVASRLNVPGAWHM

SEQ ID NO: 201314 - protein, 196 aa, Glycine max
  unsure (1)..(196): unsure at all Xaa locations
  Clone ID: PAT_MRT3847_23811C.1.pep
KRLSVGVLGIPGSTHASAREKESGEGGLKLEAEKDDGLDNCAPSVRYAVRRLIRGVSSSRECARQGFALGLTILAGTVHNINVASFLKLVVNLLEVTSSMKGQEAKDCLLGRLFAYGALAXMDKSTPYLREFISVLISLGNKKRYLQEPAVSIILDLVEKLPVEALMNHVLEAPGLKEWXFEAAIEVRNPDALLPA

SEQ ID NO: 201315 - protein, 57 aa, Glycine max
  Clone ID: PAT_MRT3847_23812C.1.pep
PVVLPSPPGVGQPVVKNTVGQGSGPCGTPLNCGVEELTTEARVSSDLFGAGFLFFSF

SEQ ID NO: 201316 - protein, 101 aa, Glycine max
  Clone ID: PAT_MRT3847_23813C.1.pep
FVVAKSLDIAHYPFFIQSSLSHSSRTFSNMASTASEVSQQVQSNNRTSFTSVKALTKSPELTFLPPSYTTTNSDDEIVADPDEDDPIPIIDYSLLITGTLD

SEQ ID NO: 201317 - protein, 43 aa, Glycine max
  unsure (1)..(43): unsure at all Xaa locations
  Clone ID: PAT_MRT3847_23814C.1.pep
FYSRNGSASFQAGIVQFPGHLSNNTAQVTXYRIKIPYLPIIKR

SEQ ID NO: 201318 - protein, 112 aa, Glycine max
  Clone ID: PAT_MRT3847_23815C.1.pep
KEEKSKKFLGLPEFLKPAEGEAFFNPALGRGRGRGSQGGGGFHGSAPTNAPAPSIEDPGLFPPLSAKWGLPKTLLTYFCPIFNFGFFFLNLTRKGTLVIGFPGLKGSFNFFP

SEQ ID NO: 201319 - protein, 90 aa, Glycine max
  Clone ID: PAT_MRT3847_23816C.1.pep
ICCLVWRKRMATSVAVLKRTLLDVTSISKPMIDPHKITNWDRIYFDNLNIWGTPHSGTFGFSQQITWKRKCGRCSTMLPGLVQQRGITQP

SEQ ID NO: 201320 - protein, 73 aa, Glycine max
  Clone ID: PAT_MRT3847_23817C.1.pep
GWDVIDDCCGAYLLIQLCARSCPFHCHKWPGPLPVFMFLTCKSYALHASSDFYGVATMSSPPIIHPRLRPLPS

SEQ ID NO: 201321 - protein, 148 aa, Glycine max
  unsure (1)..(148): unsure at all Xaa locations
  Clone ID: PAT_MRT3847_23818C.1.pep
MSGKGGGSHNNGGGKALSATIPASSRKMVQSLKEIVSNFPDHEIYATLKDCNMDPNEAVSRLLSQDPFHEVKSKREKKKEIKDPTDSRSRGSGTNNTSSRGGGRAGTDRYGGRXGANQFGSSDYGLQGKPVYKKENGAPTFRVHIFLT

SEQ ID NO: 201322 - protein, 130 aa, Glycine max
  unsure (1)..(130): unsure at all Xaa locations
  Clone ID: PAT_MRT3847_23819C.1.pep
PLVLKHSTINNKGKPIFSPWFPAFNWRRLPFNSKEQPQQNEVQIQKLNGLKPDNRIESERGLIETWNPNNKPFQCAGVALSRCTLNRNALRRPSYTNGPQEIYIQQGXGYFGMIYPGXCPSTFEEPQTTQ

SEQ ID NO: 201323 - protein, 186 aa, Glycine max
  unsure (1)..(186): unsure at all Xaa locations
  Clone ID: PAT_MRT3847_2381C.1.pep
ENFKSXXKNTVSRVAQKTLITEGKEEINPFRLCEKDLLXXVDREYVFXXIDDXXNVTYXXMXXXKQVLYEKAHISAINDKNVSLLIFEKIGAFEDELKSLLPKEVENARVAYENGNPAIPNRIKECRSYPLYKFVREELEIGLLTGEKNLSPDEEFEKVYTAMCQAKIVDPILECLGDWKGSPIPI

SEQ ID NO: 201324 - protein, 37 aa, Glycine max
  Clone ID: PAT_MRT3847_23820C.1.pep
FNCVVLKKKKKKKKKKKKKKKKKKKKKKKKKKKKKKK

SEQ ID NO: 201325 - protein, 40 aa, Glycine max
  Clone ID: PAT_MRT3847_23821C.1.pep
TINFVIYLAKMSPSQKKLGQLKQMKEKPTQKSGNPVVNQS

SEQ ID NO: 201326 - protein, 48 aa, Glycine max
  unsure (1)..(48): unsure at all Xaa locations
  Clone ID: PAT_MRT3847_23822C.1.pep
IAXWFXSCXDNXRXRXDMKHIRWXGXXRXLSRXXXCXXXGDXLKKCTG

SEQ ID NO: 201327 - protein, 629 aa, Glycine max
  unsure (1)..(629): unsure at all Xaa locations
  Clone ID: PAT_MRT3847_23823C.1.pep
ESLVRGLFVSMIIGITFSIIITKLILTXGMVPNCNVSAALLAFVFIRTWTKLLHKAGFVAKPFNRQENTIIQTCAVTYYSIARPGGFASYLLGLNRTTYELTGVENEGNNPGAIKEPGFGWMTGFLFVVCFVGLFVLIPLRKIMIVDLKLTYPSGLATAVLINGFHTQGDKMAKKQVRGFTKYFCTSFLWGLFKWFFSGIEDCGFEQFPTFGLQAWKQTFYFDFSMTFVGAGMICSHLVNCSLLLGAVLSFGVMYPLIDRLKGDWFPDNLEETNMKGLYGYKVFVSIALILGDGIYNFTKILISTVLNVNERMRSKNNKNVAADRHENPTEDLKQTDEFLRETIPLRIGVIGYVVFTMISIIIIPQMFPQLKWFYVVVAYIFAPSLAFCNAFGTGLTDMNMAHNYGKVALFVIAAMSGRDNGVVAGLVGCGLVKSVVSVACTLMLDFKTAYYTCTSPKAMFICQLVGTALGCVIAPLSFFLFYKAFDVGNPHGEFKAPYALIYRNMAIIGVQGFSALPQHCLQLCFGFFAFAIGVNMIRDFAPQKIGKWMPLPMVMAVPFLVGAYFAIDMFIGTVVVFAWQKLDSKKAELMVPAAASGLICGEGLWTLPAAILALARIKPPICMKFVPT

SEQ ID NO: 201328 - protein, 490 aa, Glycine max
  unsure (1)..(490): unsure at all Xaa locations
  Clone ID: PAT_MRT3847_23824C.1.pep
LPQIMIVDLKLTYPSGLATAVLINGFHTQGDKMAKKQVRGFTKYFCTSFLWGLFKWFFSGIEDCGFEQFPTFGLQAWKQTFYFDFSMTFVGAGMICSHLVNCSLLLGAVLSFGVMYPLIDRLKGDWFPDNLEETNMKGLYGYKXVFVSIALILGDGLYNFVKILVSSILSVHEKIKNRKNASSADQQRDNAEELKQKEVFLRDNISMWIGTGGYIVLSVISIIVIPLMFPQLKWFYVVVAYIFAPSLAFCNAFGAGLTDINMAYNYGKVALFTLAAVTGKENGVVAGLVGCGLIKSVISVSCILMQDFKTAHYTRTSPRAMFICQVIGIAMGCVTAPLSFFLYYKAFDVGNPHGEFKAPYALIYRNMAIIGVQGFSALPQHCLQLCFGFFAFAIGVNMIRDFAPQKIGKWMPLPMVMAVPFLVGAYFAIDMFIGTVVVFAWQKLDSKKAELMVPAAASGLICGEGLWTLPAAILALAXIKPPICMKFVPT

SEQ ID NO: 201329 - protein, 187 aa, Glycine max
  unsure (1)..(187): unsure at all Xaa locations
  Clone ID: PAT_MRT3847_23825C.1.pep
YDXCGAGMICSHLVNCSLLLGAVLSFGVMYPLIDRLKGDWFPDNLEETNMKGLYGYKVFVSIALILGDGIYNFTKILISTVLNVNERMRSKNNKNAADRHENPTEDLKQTDEFLRETIPLRIGVIGYVVFTMISIIIIPRMFPQLKWYYVVVAYIFAPSLAFCNAFGAGLTDINMAYNYGKVALFTL

SEQ ID NO: 201330 - protein, 288 aa, Glycine max
  Clone ID: PAT_MRT3847_23826C.1.pep
MFRNQYDTDVTTWSPAGRLFQVEYAMEAVKQGSAAIGLRSKTHVVLACVNKANSELSSHQKKIFKVDNHIGVAIAGLTADGRVLSRYMRSECINYNYTYESPLPVGRLVVQLADKAQVCTQRSWKRPYGVGLLVAGLDESGAHLYYNCPSGNYFEYQAFAIGSRSQAAKTYLERRFENFVGSSREDLIKDALIATRESLQGEKLRSSVCTIAVVGVGEPFHILDQETVQQLIDTFEIVREEEAAPAEEEAQPAAGQDAPTDPGAAAGAADQGGGGAAAVDQGGSPMDI

SEQ ID NO: 201331 - protein, 71 aa, Glycine max
  Clone ID: PAT_MRT3847_23827C.1.pep
YTFYPNQNQHNATQKKHYIVKKTLSHTLYPCTTSLLLNIFFLPYHYTRLPCLLCYNYSCYWVPFVFIFEKL

SEQ ID NO: 201332 - protein, 284 aa, Glycine max
  Clone ID: PAT_MRT3847_23828C.1.pep
MFRNQYDTDVTTWSPAGRLFQVEYAMEAVKQGSAAIGLRSKTHVVLACVNKANSELSSHQKKIFKVDNHIGVAIAGLTADGRVLSRYMRSECINYNYTYESPLPVGRLVVQLADKAQVCTQRSWKRPYGVGLLVAGLDESGAHLYYNCPSGNYFEYQAFAIGSRSQAAKTYLERRFENFVGSSREDLIKDALIATRESLQGEKLRSSVCTIAVVGVGEPFHILDPETVQQLIDTFEIVREEEAAPAEEEAQPAAEQDAPTDQGAAAADQGAAAAVDQGGSPMDI

SEQ ID NO: 201333 - protein, 285 aa, Glycine max
  Clone ID: PAT_MRT3847_23829C.1.pep
MFRNQYDTDVTTWSPAGRLFQVEYAMEAVKQGSAAIGLRSKTHVVLACVNKANSELSSHQKKIFKVDNHIGVAIAGLTADGRVLSRYMRSECINYNYTYESPLPVGRLVVQLADKAQVCTQRSWKRPYGVGLLVAGLDESGAHLYYNCPSGNYFEYQAFAIGSRSQAAKTYLERRFENFVGSSREDLIKDALIATRESLQGEKLRSSVCTIAVVGVGEPFHILDQETVQQLIDTFEIVKEEEAAPAEEEAQPAAEQDAPTDPGAAAADQGGGAAAVDQGGSPMDI

SEQ ID NO: 201334 - protein, 75 aa, Glycine max
  Clone ID: PAT_MRT3847_2382C.1.pep
SPLIPGYSRFRVIISLRLLLTSDNKVHSIRLRLTVFFYGHHSRLSRKTVEVLEADTQSPSIIFSRPCKHINQPKR

SEQ ID NO: 201335 - protein, 90 aa, Glycine max
  Clone ID: PAT_MRT3847_23830C.1.pep
HRLATEAGFELNFLSHFGGKVFPNEKTEDLEFLIGLAHKKLLKAFCEESITSKKQNFQQKIAWPHWDFLHILEEGLEYFCQQWALRILTE

SEQ ID NO: 201336 - protein, 71 aa, Glycine max
  Clone ID: PAT_MRT3847_23831C.1.pep
PIHCAPWSSALCLKTHLRPLVLPLRNISLPESTALARRDPHRAFSNRGAHTMARVARPLYPPITLIARGAP

SEQ ID NO: 201337 - protein, 64 aa, Glycine max
  Clone ID: PAT_MRT3847_23832C.1.pep
FTNYKPCFEEQINNDGIVSASSRLEFSSPLQVTPLFRSLAAGIPSPQFSESVSHPSTFSLIWFV

SEQ ID NO: 201338 - protein, 79 aa, Glycine max
  unsure (1)..(79): unsure at all Xaa locations
  Clone ID: PAT_MRT3847_23833C.1.pep
MSCCSGNCGCRTTCXYSNSYRSYKIYPXLXYTKSTTTKTLIMGMAPVKAQFKSTKMGVPTKNNSYKYKTNYTYNPYTYK

SEQ ID NO: 201339 - protein, 497 aa, Glycine max
  Clone ID: PAT_MRT3847_23834C.1.pep
MLLQTLAIPTILLVIFIWVVQPKQRHGKIAPGPKALPIIGNLHMLGKLPHRTLQTFARKYGPIMSLKLGQVQAIVVSSPETAELFLKTHDTVFASRPKIQASEYLSHGTKGLVFSEYSAYWRKVRKVCTLQLLSASKVDMFAPLRRQELGVLVKSLRNSAASREVVDLSEVLGELMENIVYKMVLGRARDHRFELKGLVHQVMDLVGAFNLAAHMPYCFNWELPLGMSPDDLDMTEKFGLTIPRSNHLLAKVQKAPHNNKDFVDILLSLMNQPIDLQGHQNVIDRTNIKAIILDMIMAAFDTSSTTVEWAMSELLRHQSVMKRLQDELENVVGMNRHVEEIDLEKLAYLNMVVKETLRLHPVAPLLVPRESREDVTIDGYFIKKKSRIIVNAWAIGRDPKVWHNPLMFDPKRFENCNVDIRGSDFRVIPFGSGRRGCPGIHMGLTTVKLVLAQLVHCFNWVLPLDMSPDELDMNEIFGLTTPRSKHLLATPVYRLVD

SEQ ID NO: 201340 - protein, 70 aa, Glycine max
  Clone ID: PAT_MRT3847_23835C.1.pep
MAAASSMALSSPSLAGKAVKLGPSVPEVGTVTLRKNVTNHVSSGSPWYCADRIKYLGSFSGEPPSYISGE

SEQ ID NO: 201341 - protein, 61 aa, Glycine max
  Clone ID: PAT_MRT3847_23836C.1.pep
FSFPAGELHDLSYPFVIYAHGEGIEKEIEGVVFRGAVLISWFFTTHSEFSISKKKKKIKKK

SEQ ID NO: 201342 - protein, 89 aa, Glycine max
  Clone ID: PAT_MRT3847_23837C.1.pep
IKNPPPKKKGGGKKGGPPLGFPGEKPPPPIFKKKKPPPPPPPLGGEKKERGGPHPGPKPRGVPPATKQGGKAFFLDLWDNFWEGGKFGP

SEQ ID NO: 201343 - protein, 95 aa, Glycine max
  Clone ID: PAT_MRT3847_23838C.1.pep
PETASPQNFSSSPKIGQKPVFKKFYKLCKSGPNLGKKGETPSLIRGIKNSKTFSFVKKKKGGPKKMGGIPKGDFWVNKNFETLGFNHFKSPCLIP

SEQ ID NO: 201344 - protein, 126 aa, Glycine max
  unsure (1)..(126): unsure at all Xaa locations
  Clone ID: PAT_MRT3847_23839C.1.pep
FCLKRPPQSLKAVSAYTLRFKSVMSREIEKIDGRALAQTSGDKYQNNIVMDVHTYDGSSPLQHQLYGNGKIGVDAPPAGRQKHLLDXQESHGAHILASGQALNKAVIPRKICYKLLKRPAGCTWVA

SEQ ID NO: 201345 - protein, 114 aa, Glycine max
  Clone ID: PAT_MRT3847_2383C.1.pep
ESHQRFNSSCYPRREDQLFSLVPHLLEGGGSVSAPAVFKVLAQPAYTITQTVHHHIRSAFLYTANILQNPQRHSLYRPSSVFLLCCQQYRPHNGSRYSPHKCQRALLSKSCFIH

SEQ ID NO: 201346 - protein, 67 aa, Glycine max
  Clone ID: PAT_MRT3847_23840C.1.pep
GSSFSLWVVIHLYPFLKGLMGGQNRTPTLIVIWSVLLASIFSLVWVRVDPFVLKTKGPDVKQCGISC

SEQ ID NO: 201347 - protein, 67 aa, Glycine max
  Clone ID: PAT_MRT3847_23841C.1.pep
SFLTAILGTVRVIHSITTSSVRQVCVIRDDTSRTEPRTSMSCVRLTCDDVREFDLARFVSSPCRVCS

SEQ ID NO: 201348 - protein, 245 aa, Glycine max
  Clone ID: PAT_MRT3847_23842C.1.pep
MGRGRVELKRIENKINRQVTFSKRRNGLLKKAYELSVLCDAEVALIIFSSRGKLYEFGSVGTTNTIERYQRSSFTPQDEHVECETQSWYQEVSKLKAKYESLQRTQRHLLGEDLGPLNIKELQNIEKQLEGALAQARQRKTQIMIEQMEELRRRERHLGDMNKQLRLKLEAEGFNLKATESLLSFTSAAGNSGFHFQQPPQTNPIDYQQPEPFLQIGYHQYVQSEASNVPKSMACETNFMQGWIL

SEQ ID NO: 201349 - protein, 78 aa, Glycine max
  Clone ID: PAT_MRT3847_23843C.1.pep
IVYFALDILSNMASLKADKPVGTQLFGQGKKEAAPKASDGASSKSKGSASKSATKKVPVQKPQESKKKGKGGKSSTKH

SEQ ID NO: 201350 - protein, 193 aa, Glycine max
  unsure (1)..(193): unsure at all Xaa locations
  Clone ID: PAT_MRT3847_23844C.1.pep
PRPPQAKSLCSMXSIDDQXFLSCRTPVSKQKLKVHVLAGEDRSKVEGFLSRRGSELALRHLCEKFGVSLFDKLPKLWDCLTEVLKPSSSESLLVTNEKSATLSIESVSDPQALINNIQVVRSVAPILNEELKPKLLTLLPCIFKCIQHSHVAVRLAASRCITSMAQSMTVEXLWGAVGENAIPMLEDASSVYA

SEQ ID NO: 201351 - protein, 55 aa, Glycine max
  Clone ID: PAT_MRT3847_23845C.1.pep
MLCYKLIMQNMIVVISIALLLEISGISKWMFHPKKSLKNSNWTTDGPVNCVRQVA

SEQ ID NO: 201352 - protein, 64 aa, Glycine max
  Clone ID: PAT_MRT3847_23846C.1.pep
NSIPGSLIRQVTRGRAANKVAMNQSCNPFYFPVSQVCMVKPEYFMSKILCIYLYFYIIFYSLGA

SEQ ID NO: 201353 - protein, 114 aa, Glycine max
  Clone ID: PAT_MRT3847_23847C.1.pep
AGPCGSGGRGSAPWWGSRHGCSWGARRSRPPRKRSWSGCFAVGFSGLRPCALWWAQHTGGEKRTSSRGPPGEVGHRCCKSYSLKRGKKRQRCVKQRGGTSAVFQDWGKIMFGAK

SEQ ID NO: 201354 - protein, 97 aa, Glycine max
  Clone ID: PAT_MRT3847_23848C.1.pep
MAKRLIPCFNRILIEKIVPPSKTSAGILLPEKTSQLNSGKVIAVGPGSRDKAGNLIPVSVKEGDHVLLPEYGGTQIKLDDKEFHLFRDEDILGILHD

SEQ ID NO: 201355 - protein, 117 aa, Glycine max
  Clone ID: PAT_MRT3847_23849C.1.pep
MREILHVQGGQCGMGTLLISKIREEYPDRMMLTFSVFPSPKVSDTVVEPYNATLSVHQLVENADECMVLDYEALYDICFRTLKLTTPSFGDLNHLISATMSGVTCWFRFPCPLNFDL

SEQ ID NO: 201356 - protein, 50 aa, Glycine max
  Clone ID: PAT_MRT3847_2384C.1.pep
LELTDRSIEIKGSKLQWSYKRYLMARALDKHSYHYRTRLIAFIEPWRLLL

SEQ ID NO: 201357 - protein, 219 aa, Glycine max
  unsure (1)..(219): unsure at all Xaa locations
  Clone ID: PAT_MRT3847_23850C.1.pep
MREILHVQGGQCGNQIGSKFWEVVCDEHGIDPTGKYVGNSDLQLERVNVYYNEASCGRFVPRAVLMDLEPGTMDSVRTGPYGQIFRPDNFVFGQSGAGNNWAKGHYTEGAELIDSVLDVVRKEAENCDCLQGFQVCHSLGGGTGSGMGTLLISKIREXLVENADECMVLDNEALYDICFRTLKLTTPSFGDLNHLISXTMSGVTCCLRFPGQTHSDLRN

SEQ ID NO: 201358 - protein, 300 aa, Glycine max
  Clone ID: PAT_MRT3847_23851C.1.pep
EFGSSHSEAIRHFSKILEGRRGAPQGFLAECYMHRASANRSAGRIADSIADCNRTLALDPTSIQALETRASLFESIRCFPDSLHDLEHLKLLYNTILRDRKLAGPTWKQLRHHNNLRYREIPGKLCALTVKTQELKQRIASGDTGNVDYYSLIGLRRGCGRSELQRAHLLLCLKHKPDKATCFVERCELADERDLDSVKERAKMSALLLYRLLQKGYTNVMGTIMDEEAAEKQRKKVLEAQVLMSNENLEDKKCNVSSPSTANPSVYQGVFCRDIAVVGNLLSQSGFNRSIPVKYEALSC

SEQ ID NO: 201359 - protein, 449 aa, Glycine max
  Clone ID: PAT_MRT3847_23852C.1.pep
MREILHVQGGQCGNQIGSKFWEVVCDEHGIDPTGKYVGNSDLQLERVNVYYNEASCGRFVPRAVLMDLEPGTMDSVRTGPYGQIFRPDNFVFGQSGAGNNWAKGHYTEGAELIDSVLDVVRKEAENCDCLQGFQVCHSLGGGTGSGMGTLLISKIREEYPDRMMLTFSVFPSPKVSDTVVEPYNATLSVHQLVENADECMVLDNEALYDICFRTLKLTTPSFGDLNHLISATMSGVTCCLRFPGQLNSDLRKLAVNLIPFPRLHFFMVGFAPLTSRGSQQYRALTVPELTQQMWDAKNMMCAADPRHGRYLTASAMFRGKMSTKEVDEQMINVQNKNSSYFVEWIPNNVKSSVCDIAPRGLSMASTFIGNSTSIQEMFRRVSEQFTAMFRRKAFLHWYTGEGMDEMEFTEAESNMNDLVSEYQQYQDATAEDDGEYEDEEDDDVEADHM

SEQ ID NO: 201360 - protein, 349 aa, Glycine max
  Clone ID: PAT_MRT3847_23853C.1.pep
LELGEHLTRHGTRQWLTSATLEKNAGTIDSLDDTMMVIEAPRQSDLMIELIKKLKPKVVVTGIAHFEAVTSSAFVHLLDTTRDIGSRLFLDISDHFELSSLPGSNGVLKYLSGTPLPSHAAIICGLVKNKVYPDLEVAFVISEEESLLNALSKTVELLEGNTALISQYYYGCIFHELLAFQLADRHAPAKRNCENVKSVDMIGFARSATSVLSNAELSIDGVENESLIHMDVDQIFLPVPSPVKAAIFESFARQNMSESETDVTASIKGFVKSNYGFPTDSSTEFIYADNSKALFNKLVLCCIKEGGTLCFPAGLNGNYVSSARFLKADIVTVPTDVNVGFKFTEKTLT

SEQ ID NO: 201361 - protein, 98 aa, Glycine max
  Clone ID: PAT_MRT3847_23854C.1.pep
WVLAPFSVGQQYSRPIPRIVFALLTLVVAKDLLFIGGLSWIAVTAKTVTVLKSQSPMDKFSKCGYHSEAVLSGCLRQGCVGWFAPVPSGSCRPIKEDG

SEQ ID NO: 201362 - protein, 62 aa, Glycine max
  Clone ID: PAT_MRT3847_23855C.1.pep
KILRKKQLEGTFFFTLILDFQFFRSIFGNMSKTRSAKKFGFSRQKYQSNMGKFSRKHQLCCI

SEQ ID NO: 201363 - protein, 463 aa, Glycine max
  Clone ID: PAT_MRT3847_23856C.1.pep
MVSSSSSAPTQGKMREILHVQGGQCGNQIGSKFWEVVCDEHGIDPTGKYVGNSDLQLERVNVYYNEASCGRFVPRAVLMDLEPGTMDSVRTGPYGQIFRPDNFVFGQSGAGNNWAKGHYTEGAELIDSVLDVVRKEAENCDCLQGFQVCHSLGGGTGSGMGTLLISKIREEYPDRMMLTFSVFPSPKVSDTVVEPYNATLSVHQLVENADECMVLDNEALYDICFRTLKLTTPSFGDLNHLISATMSGVTCCLRFPGQLNSDLRKLAVNLIPFPRLHFFMVGFAPLTSRGSQQYRALTVPELTQQMWDAKNMMCAADPRHGRYLTASAMFRGKMSTKEVDEQMINVQNKNSSYFVEWIPNNVKSSVCDIAPRGLSMASTFIGNSTSIQEMFRRVSEQFTAMFRRKAFLHWYTGEGMDEMEFTEAESNMNDLVSEYQQYQDATAEDEGEYEDEEEEDGEADDHM

SEQ ID NO: 201364 - protein, 35 aa, Glycine max
  Clone ID: PAT_MRT3847_23857C.1.pep
VGHHRLARHESDFLCKLSTFERQRESGWLLRKMRI

SEQ ID NO: 201365 - protein, 55 aa, Glycine max
  Clone ID: PAT_MRT3847_23858C.1.pep
FSLVANLILKRLETCDLVLVCTNIYPKNIFPTPKKLIEKFISYTKLKYKYFNQQQ

SEQ ID NO: 201366 - protein, 97 aa, Glycine max
  Clone ID: PAT_MRT3847_23859C.1.pep
MTESEGKCKKMGKEKRGRSFIAFTGAAAVLGIAANLAITAIKYQKAKNAKKKDLAGSKVRVNLSASEILKLAEQIIANSNKAHNSVASVPLDKGTYA

SEQ ID NO: 201367 - protein, 37 aa, Glycine max
  Clone ID: PAT_MRT3847_2385C.1.pep
QDNAEPMAQVSKFGTLLLHTSLPRPSNSNIQFRTLLT

SEQ ID NO: 201368 - protein, 34 aa, Glycine max
  Clone ID: PAT_MRT3847_23860C.1.pep
SHSCLSLRESTYMTFEVQEDGLWVMFQKLSYASG

SEQ ID NO: 201369 - protein, 53 aa, Glycine max
  unsure (1)..(53): unsure at all Xaa locations
  Clone ID: PAT_MRT3847_23861C.1.pep
YMYLYIIDIIACRRPGKXYIAKEXVCDHDGRRKTSSTWNVFHAARMEGCVSTT

SEQ ID NO: 201370 - protein, 98 aa, Glycine max
  unsure (1)..(98): unsure at all Xaa locations
  Clone ID: PAT_MRT3847_23862C.1.pep
YEKRLQLHSPPEKXGELLMKPVDLMRAVVPVFPPSVSKLVREGYLNGERSPGHLFCLPSEFFMLFDVDNDGLISFKEHIFFVTLLXIQESSFSAALGV

SEQ ID NO: 201371 - protein, 54 aa, Glycine max
  Clone ID: PAT_MRT3847_23863C.1.pep
FLLKGKGQGKFYLICSIVKGSGFGLVKGPGCLTGPDCPSLKPFKGIILIFTNVL

SEQ ID NO: 201372 - protein, 47 aa, Glycine max
  Clone ID: PAT_MRT3847_23864C.1.pep
LLFDGLGIDGSLARTVIRECSARGSSRMVSAHASQNIYTRRPSHLGW

SEQ ID NO: 201373 - protein, 50 aa, Glycine max
  Clone ID: PAT_MRT3847_23865C.1.pep
IYFFFSGKNKGYGYPSFSTKAQPYQKIEKLVGRTRLIQTSKTQCYLLKGE

SEQ ID NO: 201374 - protein, 93 aa, Glycine max
  Clone ID: PAT_MRT3847_23866C.1.pep
KKRKPFFVMIYAQIVKRVFLGGQGKYFKKGGPGDVVWKALKGGGGPPSTKGGLKLKLFPPLMGGGGVPIDKGKRQLTSHPNGGFFEFCLIPNR

SEQ ID NO: 201375 - protein, 148 aa, Glycine max
  unsure (1)..(148): unsure at all Xaa locations
  Clone ID: PAT_MRT3847_23867C.1.pep
PPRIFGALGEYAKVNLFFLGGAIAPFLVWLAPKAFPKQKWIPLIPTPVLLGAPSIIPPPPPVNFPSWKLVGFFSGSIAFRSPQKWWKPSNYVLFGGFNAGTPFMPILLFFALTKNNIMFNWWGNTPKGCPLANFPPXKGLVVKGSPVH

SEQ ID NO: 201376 - protein, 66 aa, Glycine max
  Clone ID: PAT_MRT3847_23868C.1.pep
MVFASLEHILTHISFSVVSILISIHLITLLFVKEIIGLSDSSKKGMIITFFGLPGWLVTRGVFSGH

SEQ ID NO: 201377 - protein, 72 aa, Glycine max
  Clone ID: PAT_MRT3847_23869C.1.pep
SEAVKIPLSPILHFKQPVSMDLYGRAPARNGSNPLNQPEWGTDTALEGLFLSSSPSVRVSLVWKLGGFVSLF

SEQ ID NO: 201378 - protein, 188 aa, Glycine max
  unsure (1)..(188): unsure at all Xaa locations
  Clone ID: PAT_MRT3847_2386C.1.pep
RTLSSFSRPFSTHSSQPPNQNQDPHSLMKQDPIEICTSLWVKTFSSSTTSYXNLTGFLSNFDLWLLAYQRSCAHATGTFPPRNAVHATVLHSLLSLRNAVIRNRFEWNDKTNPLLRAPNDAGVSKPLSKRKFRAAIQSGKPCFQDRVVQEILLMILEPVXEPRFSPKSHAFRPGRNAHTVIRTIRSNF

SEQ ID NO: 201379 - protein, 81 aa, Glycine max
  Clone ID: PAT_MRT3847_23870C.1.pep
NELLAHSLSPSESRWSKKVGSRYCLMKNFSNMFQEKKRFSYNVSDILLFFPTSCLTQFLEKSISQMSTFGHGGNYRMAQHL

SEQ ID NO: 201380 - protein, 70 aa, Glycine max
  Clone ID: PAT_MRT3847_23871C.1.pep
LLCLFHIYGFFFLNGFFISNKVLLPKTHFNLLFVIFLARPGLVLGQHPSEVAFELRSDALSSESLGCLVH

SEQ ID NO: 201381 - protein, 229 aa, Glycine max
  Clone ID: PAT_MRT3847_23872C.1.pep
MDPNPTASLDSDPDPLRVKRKTLEAVLLQCQRALESINATSATASSSASTYVDEEDYDGEGEATASADPDADELCDLLKSRVECPAFLQQLECARASVSQNIDEEGNSWDMVSENDLWEGERVDSEQEDYVLVRQEDIVEGIACFMAAYLLSLKQTKDLTPIQLQSALSKTGPVTKKKGKLRKAWDGSKVIYNVASWGATAIGIYQNPVILRAATKAFWTSCHVISKLL

SEQ ID NO: 201382 - protein, 53 aa, Glycine max
  Clone ID: PAT_MRT3847_23873C.1.pep
VLVPLFGLGKSKVECCRKEEGKKVYGEGGEKGIRMLLHCNVFWFQITRYDNTE

SEQ ID NO: 201383 - protein, 226 aa, Glycine max
  Clone ID: PAT_MRT3847_23874C.1.pep
MPMDPNPQASVESDPDPLRVKRKTLEAVLLQCQRALELINATSSTAADVDEEDCEIEGEATASADPDADELCDLLKSRVECPAFLQQLECAQASVSQNIDEEGNSWDMVSKNDLWEGERADSEQEDYVLVRQEDIVEGIACFMAAYLLSLKQTKDLTPIQLQSALSKTFSVKKKKGKLRKAWDGSKVIYNVASWGATAIGIYQNPVILGAATKAFWTSCHVISKLL

SEQ ID NO: 201384 - protein, 67 aa, Glycine max
  unsure (1)..(67): unsure at all Xaa locations
  Clone ID: PAT_MRT3847_23875C.1.pep
PXSPPLKKNLIQGRVMLREKNQPLFSLKSLVTSKIAFKANKFRLAFGGRXXDFKGLNYSGRFRGSKL

SEQ ID NO: 201385 - protein, 74 aa, Glycine max
  Clone ID: PAT_MRT3847_23876C.1.pep
ETGHSPRTHGVQNITLHSPSSWINSTSYPTSLCSFGSKLMPVAWDPDASCLHGCSPPPPFPSLPQPALYLVNST

SEQ ID NO: 201386 - protein, 122 aa, Glycine max
  Clone ID: PAT_MRT3847_23877C.1.pep
PTRPGVLPVSYGVGGPIGWWAKVNVMGNDFGNNKLISNGLNINAGMEPFALEPNRLLRGFNPIIKLFYPNSRATLNLMGFVGQSLINAGGIMEQTFLPGKDSIEMSSIVYKNGVLTDQALPV

SEQ ID NO: 201387 - protein, 47 aa, Glycine max
  Clone ID: PAT_MRT3847_23878C.1.pep
EWIILTEDNIPDDDPHDYAAENLDRTTKETPLPLASPSSSSNRILTL

SEQ ID NO: 201388 - protein, 219 aa, Glycine max
  Clone ID: PAT_MRT3847_23879C.1.pep
MEEENAIELLQRYRRDRRVLLDFILSGSLIKKVVMPPGAVTLDDVDLDQVSVDYVLNCAKKSTLLELSEAIRDYHDHTGLPQMSDTGSVGEFYLVTDPGSSGSPPRRPPPTVPTAVPPVAVSTPPVFPPSPIVSNVSRSESFDSTQEKELPVDDIEAFEDDDDVPVVEGFRAKRPLNDASDLAVKSPSFPPGISDDDLRETAYETLLACAGPPGGLIVP

SEQ ID NO: 201389 - protein, 84 aa, Glycine max
  Clone ID: PAT_MRT3847_2387C.1.pep
TESTLSIKSYHYKYTPFINLFIIIYNLINLYYNDFINLFIHPTYYYLPKYTYYINFFSISLIIHNNLFITINYNYISFKLLIYT

SEQ ID NO: 201390 - protein, 245 aa, Glycine max
  Clone ID: PAT_MRT3847_23880C.1.pep
RGLDGYMKQNVQCPEANYPTFFYAMPMSRTKVFFEETCLASKDAMPFDLLKKKLFSRLNTMGIRIKKTYEEEWSYIPVGGSLPNTEQKNLAFGAAASMVHPATGYSVVRSLSEAPKYASVIATILKDGHAKDIITQERRKENLSMQAWNTLWPQERKRQRAFFLFGLALILQLDIEGIRTFFRTFFCLPDWMWQGFLGSSLSSTDLVLFAFYMFIIAPNNLRMGLVRHLLSDPTGATMIKTYLTI

SEQ ID NO: 201391 - protein, 74 aa, Glycine max
  Clone ID: PAT_MRT3847_23881C.1.pep
LELLAHIPSLPSQRPCSELRLLEFRAAPAAVVAVNGLLHLLLSVCRLLPPVVGSVNHLVASGVALFSESSELFH

SEQ ID NO: 201392 - protein, 47 aa, Glycine max
  Clone ID: PAT_MRT3847_23882C.1.pep
DKNSVTECLLQKLFVFEFNLAIFKVNQMAIWLSICTDSEAIIYSKFT

SEQ ID NO: 201393 - protein, 263 aa, Glycine max
  unsure (1)..(263): unsure at all Xaa locations
  Clone ID: PAT_MRT3847_23883C.1.pep
MKEKRGTVRKVHSGSTKRDYILQHKSFHKEKSYRTYGLKGSSRRGKVNGLSGLVLDKKLKSVSESSTINLKSASLQISKAMGIDTTQDSISVNFSCNAGTSTSTAFSLVNSSDSVCRSTNTSFAINAAHTIPVFSCPASLSATNTDLSLSLSSKIKPSTESVCSNNEAPNSSYMGILYNNNNNNKSPRQWIPHDGKDEMILKLLPRVRELQNQLQEWTEWANQKVMQAARRLSKEKAELQTLRQEKEEVERLXKEKQSLEENT

SEQ ID NO: 201394 - protein, 42 aa, Glycine max
  Clone ID: PAT_MRT3847_23884C.1.pep
RMEGFSFKNLNFTIIIFSPYINYLRVVLKKYYIIIDKYNFNN

SEQ ID NO: 201395 - protein, 55 aa, Glycine max
  Clone ID: PAT_MRT3847_23885C.1.pep
VYATQVLYLLIQKMYKPDPVNNRQTLTNSTQNTKTRLTQPTYNAPSTPSNTMVVT

SEQ ID NO: 201396 - protein, 80 aa, Glycine max
  Clone ID: PAT_MRT3847_23886C.1.pep
GRSRRPKHHSSSNSKMLTTTTQSRIEQTMGQRSYLGGSRATKDGTFTRFELIAHSLLLLSLLQAINKGFQRLHKGLSVLE

SEQ ID NO: 201397 - protein, 67 aa, Glycine max
  unsure (1)..(67): unsure at all Xaa locations
  Clone ID: PAT_MRT3847_23887C.1.pep
GVSXVSLLPSALWLLWCRXXLCFSVCLWFLPLLVPSFPLLLLLSALPVLXGEVVLFPLWRPLLPAAN

SEQ ID NO: 201398 - protein, 94 aa, Glycine max
  Clone ID: PAT_MRT3847_23888C.1.pep
CLFFTSTTTTTTLGELPPPPPQSTPSPTPYLPPPSPSPPPPPPPVYHSPPPASPPPCETPPSVSPPPPPAPVYEGPLPPIVGLPYASPPPPPFY

SEQ ID NO: 201399 - protein, 31 aa, Glycine max
  Clone ID: PAT_MRT3847_23889C.1.pep
ISIYSLSVSRNLELWESLTQAWALITREPLE

SEQ ID NO: 201400 - protein, 117 aa, Glycine max
  Clone ID: PAT_MRT3847_2388C.1.pep
KSCFFSPPVCLNPCLPFARKFFFLGKISPFFGFAGLANKVGEFCFWRSPFVLAPPKFLAGMTCFSLLKRGRGGGYPIGGGPMGLGNFVFCIFIGALAFSRFSRGFSLISLPLSLFFF

SEQ ID NO: 201401 - protein, 64 aa, Glycine max
  Clone ID: PAT_MRT3847_23890C.1.pep
FSLKRILWWCMHRALQRTTGLHHVLTYTTMTRAEVAPLRQVRHEEWRHLLFSILSLSTVDPWQK

SEQ ID NO: 201402 - protein, 303 aa, Glycine max
  Clone ID: PAT_MRT3847_23891C.1.pep
MEGGKRGTILVTNDDGIDAPGLRALVHSLVNANLFNVLVCAPDSEKSAVSHSITWLHPVAVKQVQIEGTTAFAVSGTPADCASLGISKALFPTVPDLVVSGINKGSNCGYHIVYSGTVAGAREAFFNDILSISISYDWVKGKSKLQDFTLAAQVCLPIISALLVETKNQSYPRKCFLNIDVPNNVPNHKGYKLTKQGKSIIKTGWRQVTSETEGPKMSSDMTNTDKETSKNFDSSSASPEHLLFAREVIGSVLDEDDTDYKCLREGYITVTPLAALTHVEVDCQAYFKNWLQSVPELPSSSSL

SEQ ID NO: 201403 - protein, 84 aa, Glycine max
  Clone ID: PAT_MRT3847_23892C.1.pep
HFIFIILTLSSTFNTVTHSPLPQKTLSFSSLSLCPLTVTHSTNQINFKFPLFLFILSSHKLFSLFISHFQPFSSVNTFTRFLIT

SEQ ID NO: 201404 - protein, 30 aa, Glycine max
  Clone ID: PAT_MRT3847_23893C.1.pep
LAGLTIDVLFITVSLFHLNQTLTYMVSFPN

SEQ ID NO: 201405 - protein, 71 aa, Glycine max
  Clone ID: PAT_MRT3847_23894C.1.pep
HLLCSEWFSLMWFIIPASFQAMVLLVSTRDGCAEGKVVYSAAPRTVFISRSDPLVCNEIKCRDSGFIFYSL

SEQ ID NO: 201406 - protein, 49 aa, Glycine max
  Clone ID: PAT_MRT3847_23895C.1.pep
ENECKSKMMMICNLYSEVDIPDTQLIEENSFRRTLNDSSVMREIKNLKN

SEQ ID NO: 201407 - protein, 73 aa, Glycine max
  Clone ID: PAT_MRT3847_23896C.1.pep
RPGLNCPTDPRRPSIFRTEPSANSESQSCCVLPLKSTRCLLCLHNGTRSHLLKHRFSHTSDTLARTATRSVVQ

SEQ ID NO: 201408 - protein, 116 aa, Glycine max
  unsure (1)..(116): unsure at all Xaa locations
  Clone ID: PAT_MRT3847_23897C.1.pep
TSNSSQSLNCFSQNNTKLKKQNYLRLSNYSSVNXYTSTIPNLYNKKKENINXKTTDLKLNLPRFQWPKEKPNLFSVSSPKLNKKPLFPLLPTKNKIYSSNQRTVVSNTTKNLTHAI

SEQ ID NO: 201409 - protein, 98 aa, Glycine max
  unsure (1)..(98): unsure at all Xaa locations
  Clone ID: PAT_MRT3847_23898C.1.pep
FLCRRAIXSAAALKKKGGFLKREIGMNAMMQSLIKPGIKYNLLMSTLEFPGSQINRTLTPRSIHLSNLQIDFSESTIPKLLKGAVRTISDMGKCGTPE

SEQ ID NO: 201410 - protein, 106 aa, Glycine max
  unsure (1)..(106): unsure at all Xaa locations
  Clone ID: PAT_MRT3847_23899C.1.pep
FIPNILVASPRAGEXSVGVIIEVLPDGSYRIALGSPGNSEAFPALLKKKKLVVPKISAEIKIMGGPLGGPPRKLTGEHGAEGIVKAQSXLDEKILSLVILARLGNP

SEQ ID NO: 201411 - protein, 70 aa, Glycine max
  Clone ID: PAT_MRT3847_2389C.1.pep
MDVINLSPVFVDVAILFMFRHVPPSSKNPEKNVFFVVVTLRKPLGQVEDDGYCPKQDIVGRVGTVVTDAP

SEQ ID NO: 201412 - protein, 227 aa, Glycine max
  unsure (1)..(227): unsure at all Xaa locations
  Clone ID: PAT_MRT3847_238C.1.pep
MGKSNSTQAKKPEDVDLLKFDIAFFASELGLATIXPHSGFNDVDFRKIKPNKPPKKKQQTPEKLTPQNSQNPKIKTFGKNNGPHEKRNANPEPKPKPPVLSLENGAHREKGFNNKFRNLPKLPLMKASGLGVWFEDMGELEVKVIGEGKKVEVKDXESGKGVCWGKKRELGDRLXWHSLVQDYESSRGQSSDIKMLXQHRGLGTAADKVSAFAVLVGDNPIANLRSS

SEQ ID NO: 201413 - protein, 49 aa, Glycine max
  Clone ID: PAT_MRT3847_23900C.1.pep
YKQKESHKSNRTTTNTIQNTPAPPFINLTPPQINFSLSPLGVPLSLLID

SEQ ID NO: 201414 - protein, 99 aa, Glycine max
  unsure (1)..(99): unsure at all Xaa locations
  Clone ID: PAT_MRT3847_23901C.1.pep
HQPAPCRSVYTWRTRSAFGTCTLKGVTVPEDHSPFMIDEYPIIAAIVNFLEGATEMNGLEELQIXESDRLLDVINGLKYNGXVDCDKGKTAARLCVVRP

SEQ ID NO: 201415 - protein, 61 aa, Glycine max
  Clone ID: PAT_MRT3847_23902C.1.pep
KKHHKKLSSQLNQSKRAVDFLSQTIIIKHFQQFQMILIIELTIPTTIRLTNQIILLPNKKI

SEQ ID NO: 201416 - protein, 54 aa, Glycine max
  unsure (1)..(54): unsure at all Xaa locations
  Clone ID: PAT_MRT3847_23903C.1.pep
HSGXKLIXXGRRCXMXXXSGVXQQXCXXGEXXLKXGVLPRAARAEFRAYYACXN

SEQ ID NO: 201417 - protein, 135 aa, Glycine max
  Clone ID: PAT_MRT3847_23904C.1.pep
MGAILSALTGGAATAATSSPESSASRVQSFHSSARWQLHFNELKETNKLVVIDFSASWCGPCKFIEPAIHAMSEKFTDVDFVKIDVDELPDVAKEFNVEAMPTFVLCKKGKEVDKVVGAKKDELEKKIEKHRSQS

SEQ ID NO: 201418 - protein, 70 aa, Glycine max
  Clone ID: PAT_MRT3847_23905C.1.pep
VTTFMNKKEMGHGKIGALFKNTCFSSIKLLSKTWAYYYNIVYTGANPMNNQPFGDSTNTGAINSKTLSFS

SEQ ID NO: 201419 - protein, 84 aa, Glycine max
  Clone ID: PAT_MRT3847_23906C.1.pep
VAGSAKVTFTGLGGDSHIVTFGFLQSIYRVLRTITRFHLALPKIMIMSMKRCSKAHVQLAASPTPPTCSLIHRFMLIIIILHFP

SEQ ID NO: 201420 - protein, 502 aa, Glycine max
  Clone ID: PAT_MRT3847_23907C.1.pep
MSFAGFLSLQSMSATCGFFFFSFTLLFSFFSFLVFISRMKPWCNCDLCKSYLTVSWLKKFPNLCDWYTHLLRKSPTGTIHVHVLGNTITSNPHNVEHILKTNFQNYPKGKPFSTILGDLLGRGIFNVDGESWKFQRKMASLELGSVAIRTYAMELVNEEIHARLIPIMESTARGELNSVCVLDLQDILRRFSFDNICKFSFGLDPGCLLPNLPVSDLAVAFDLASKLSAERAMNASPFIWKLKRLLNIGSEKKLRETINVVNDVAKEMIKQRREMGFKTRNDLLSRFMGSIDDDVYLRDIVVSFLLAGRDTIAAGLTGFFMLLSKSPEVEELIREEVGRVMGPGQEFPSFEQIREMHYLNAAIHDSMRLFPPIQFDSKFATEDDVLPDGTFVRKGSRVTYHPYAMGRMENIWGPDCLDFRPERWLRDGVFVPECPFKYPVFQAGVRVCLGKDLALMEMKSVVVALVRRFDIRVAQPDQEPRFAPGLTATLRGGFPVRVCERK

SEQ ID NO: 201421 - protein, 190 aa, Glycine max
  unsure (1)..(190): unsure at all Xaa locations
  Clone ID: PAT_MRT3847_23908C.1.pep
GLTGFFMLLSKSPEVEELIKXKAGRVVGPGQEFPSFEQIREMHYLNAAIHESMRLFPPIQFDSKFATEDDVLPDGTFVRKGSRVTYHPYAMGRMENIWGPDCLEFRPERWLRDGVFVPACPFKYPVFQAGVRVCLGKDLALMEMKSVVLALVRRFDIRVVQSGQEPRFEPGLTATLRGGLPVRVRVCERK

SEQ ID NO: 201422 - protein, 155 aa, Glycine max
  Clone ID: PAT_MRT3847_23909C.1.pep
LGPSRRRPFLFIYFILFYLFYFFFIFFFYFFFFFFFFFFFFFFFWEPGGQPGKPGPDPGGEQIFPKGREKKGGEKKGKKGSRGKKVTRQKSQKKKKRKKKRENPGGPKGGPNQKKGGGPNGPFSRRKTGGASGKKKPPNPREKGVCKRAPRGVFF

SEQ ID NO: 201423 - protein, 89 aa, Glycine max
  Clone ID: PAT_MRT3847_2390C.1.pep
ISIQTKNLEMKTLSVHRRKQPLKKKRQCNHFIFFFAIASQLKVYIQQNRKTGQMKKLLLYPSLVGYMILTAYIYFGVWTSTPVKALLYG

SEQ ID NO: 201424 - protein, 58 aa, Glycine max
  unsure (1)..(58): unsure at all Xaa locations
  Clone ID: PAT_MRT3847_23910C.1.pep
YSVLIILYYLYDLVHLPISIAEERTYVHKVSQEYLVKIIKNKKNSYYIQXXXXXXXPX

SEQ ID NO: 201425 - protein, 51 aa, Glycine max
  Clone ID: PAT_MRT3847_23911C.1.pep
ILVGDRGLRGLGMTEVIYSLVDFVIWGEKKEERKKRRTGDEEEVGVILKRY

SEQ ID NO: 201426 - protein, 109 aa, Glycine max
  unsure (1)..(109): unsure at all Xaa locations
  Clone ID: PAT_MRT3847_23912C.1.pep
ISGFLEPSDRNSLDIFIYQDLLTRDELLSYSFRYKEIDNGMLWEVDGKWVVKGAIDVDIVANPSSEGGXXNYGFHDATFKVVYICDTFILHEQPAFDNKHFCTLINMFI

SEQ ID NO: 201427 - protein, 74 aa, Glycine max
  Clone ID: PAT_MRT3847_23913C.1.pep
TGLHRQTKDLSSNNHNCKGPTFYKAEQAMENASHDYIISLDQQRSLIIIGRSTDLKRPDTGDLHGTKIAYWIGN

SEQ ID NO: 201428 - protein, 63 aa, Glycine max
  Clone ID: PAT_MRT3847_23914C.1.pep
ILIVKRILSKKKKKKKKKKKKKKKKKKKKKKKKKKKKKKKKKKKKPQKKKKKKKKKKKKGGPF

SEQ ID NO: 201429 - protein, 59 aa, Glycine max
  Clone ID: PAT_MRT3847_23915C.1.pep
TIWKRNQSFSPKRNAIVWEKRVLKKISAKPERCAFYLPQLKRKHRPRGYKKKKGLERRY

SEQ ID NO: 201430 - protein, 47 aa, Glycine max
  unsure (1)..(47): unsure at all Xaa locations
  Clone ID: PAT_MRT3847_23916C.1.pep
GKKPRSYSSSILGIPDGFNSILLLWVNLLIXGFPSTALSLNPPVFFF

SEQ ID NO: 201431 - protein, 185 aa, Glycine max
  Clone ID: PAT_MRT3847_23917C.1.pep
GSRREWVPRKPKTRLSVAPKKKRVLLLTRNAGKADIVFNSPEDNSTLNLSDVQGLVTWVLSEGFMPSWVFIKNKPLIPKVVMLYVPGLDAALFLSQSKMLPRLKKFCGKPRALLALSCVSDGMQTIDALLTCKMKRKRDENSSIMGKFARTSHKVFIIQLIYENLFHGKGCCDTDSLSFRSLKTY

SEQ ID NO: 201432 - protein, 113 aa, Glycine max
  Clone ID: PAT_MRT3847_23918C.1.pep
YTHAGLRLNVIPLFASRKQALRYLSVKGGIDLSKVVVFVGEKGDTDYEELVAGIQKTLVLKGAVEYGSERLLRSEDSYKREDVFSQDSPNIIYAEKSYEDCDISAILEHLKVS

SEQ ID NO: 201433 - protein, 216 aa, Glycine max
  Clone ID: PAT_MRT3847_23919C.1.pep
MGSSEAENEALRGAEEEEGSTSNKKCGKFYDVYGPEGKADIVFNSPEDNSTLNLSDVQGLVTWVLSEGFMPSWVFIKNKPLIPKVVMLYVPGLDAALFLSQSKMLPRLKKFCGKPRALLALSCVSDGMQTIDALLTCKMKRKRDENSSIMGKFARTSQQEEGCCDTDSLSFKELTKDIPFPVTYYTLTEKELEENGYSVNKPGFLSTLPAPSGSFY

SEQ ID NO: 201434 - protein, 212 aa, Glycine max
  Clone ID: PAT_MRT3847_2391C.1.pep
MDQTQNESGWMHSIKVTLGSLDHREVKSFISSIPCVSSKLRKSNEEAYSPKFVSIGPLYRGTSSHLLAMEEHKWRYMLALLHRTQNPVSTLDECGTVILGLDDAVRASYGGNIKYEAHELAKIMLLDGSFLLELLLRCAPPNMVPQIPKEDNHNNGSSSDPILGHKEVFLSILTDFTLLENQMPFFVLKTLARMLFPNVFTSEADHLGADLT

SEQ ID NO: 201435 - protein, 39 aa, Glycine max
  Clone ID: PAT_MRT3847_23920C.1.pep
ARKAKFHELRMSYVIEFTSSLADLPIGWYPYLLITIHHH

SEQ ID NO: 201436 - protein, 78 aa, Glycine max
  Clone ID: PAT_MRT3847_23921C.1.pep
SEVRCWRELKNASLCHREYMSCGDRNQKNFTLLNLLNQTLLNQTVLNQTCSLVDPDTIKDPKTFNFGIFSDALDSHVV

SEQ ID NO: 201437 - protein, 61 aa, Glycine max
  Clone ID: PAT_MRT3847_23922C.1.pep
IKIILFLQIIKKRYISFLFHLFKYFILRVKKYYGGICINYNKNFASFAFSRPSNFSPESEA

SEQ ID NO: 201438 - protein, 73 aa, Glycine max
  Clone ID: PAT_MRT3847_23923C.1.pep
IQIEITVTYYLKIYDITHVYIFIYFFVKLSHNLILIYEKYLIKDNYFSNYLSKGYLNIIIKLCKFIFNSIVYI

SEQ ID NO: 201439 - protein, 67 aa, Glycine max
  Clone ID: PAT_MRT3847_23924C.1.pep
CHRIVSRRVVLTSLGQVIPRTRSLHFGSRFLTPNLNQSLFLIAIHFTYLFSSHHCMLLLHCLIAISM

SEQ ID NO: 201440 - protein, 34 aa, Glycine max
  Clone ID: PAT_MRT3847_23925C.1.pep
NYTIIIIKLYRLKMDLWLSEWIDNTYFIYLYFFK

SEQ ID NO: 201441 - protein, 77 aa, Glycine max
  Clone ID: PAT_MRT3847_23926C.1.pep
LLMCTRHSIKALFTGSRASSVPPLFPLIVAIRVSIFSLPLDPSVLSADGIVHGCNPRTVPSIMQFTILVSYSSLHVH

SEQ ID NO: 201442 - protein, 296 aa, Glycine max
  Clone ID: PAT_MRT3847_23927C.1.pep
GFQSLQQFTSMISKIGLDSTNQARLLIGCSMQQNMKLMNFLHFLFVRLTSPLGNPSVDCCLEVSTSREGSGQNTLLWKPKSGEMVSDDKANWMNRSEGDDDNAHDHTIGKQGSNNNICHGGTLVLPNNLLPRPNHPSFLSLMNIMPSLGYQWEANYSAHDVNIGQWQNHGFLNQTDVHSINVVPFPSTLALSTGNDTTTTSQILVCPPHGATTQPYFPSSHHVAAMEMNARQINHYQMLSSSSHQNLLANSLNPSSQQLMSQSEKLPFSLGIRPKLFHSPNRSESHSQKDQDLPSK

SEQ ID NO: 201443 - protein, 19 aa, Glycine max
  Clone ID: PAT_MRT3847_23928C.1.pep
YPYATFPMTILISLVRISY

SEQ ID NO: 201444 - protein, 156 aa, Glycine max
  Clone ID: PAT_MRT3847_2392C.1.pep
MGTPRGEAILCFLFFFWFWSSSNALLSPKGVNFEVQALMGIKASLVDPHGILDNWDGDAVDPCSWNMVTCSPENLVISLGIPSQNLSGTLSPSIGNLTNLQTVVLQNNNITGPIPSELGKLSKLQTLDLSDNFLSGEIPPSLGHLRRLQYLRLNNN

SEQ ID NO: 201445 - protein, 37 aa, Glycine max
  Clone ID: PAT_MRT3847_23930C.1.pep
LACVETAIWSLPCRVFDSAFVKSDQIRAFNGCSIQKI

SEQ ID NO: 201446 - protein, 329 aa, Glycine max
  Clone ID: PAT_MRT3847_23931C.1.pep
MEVKGIRASNSTTTTTIQSEDEMDLRRGPWTVDEDLALINYIANHGEGRWNSLARSAGLKRTGKSCRLRWLNYLRPDVRRGNITLEEQLFILELHCRWGNRWSKIAQYLPGRTDNEIKNYWRTRVQKHAKQLKCDVNSKQFKDTMRYIWMPRLVERIQATAAASATTTVTATTATNNAYTYGSNLNNNKFEVHDHKGKMGLTDPSVMNNDLVGSHVTQSYTPENSSTGASSSDSFGTQVSAISDLTEYYTVTVSGNNNNTNSADYYQPSQISYSDSCITSPSGLFPQGLDFQSMDPNTPWNMQSGDSSDSFWNVESMLFLEQQLMNDNM

SEQ ID NO: 201447 - protein, 44 aa, Glycine max
  Clone ID: PAT_MRT3847_23932C.1.pep
IIIYQRIIIAITSKQSVTDNIYKSSNFHTSLNIGEDNIKNTKKY

SEQ ID NO: 201448 - protein, 65 aa, Glycine max
  Clone ID: PAT_MRT3847_23933C.1.pep
PVQNQFPGRPCSLGRPLFFFFFSQYLINFLGLGLKKTTRLYLTIYYKSGTQHPLLEWIEITITLR

SEQ ID NO: 201449 - protein, 91 aa, Glycine max
  Clone ID: PAT_MRT3847_23934C.1.pep
MGWLVIKQVAWDGWGSGGVVGNAWSVHEECGANKANVKEETSWKLAQREASVQRYKEKRQSRLFSKRIRYEVRKLNAEKRPRMKGRFVKRE

SEQ ID NO: 201450 - protein, 19 aa, Glycine max
  Clone ID: PAT_MRT3847_23935C.1.pep
YLVFMVLTIRSYIELSRKK

SEQ ID NO: 201451 - protein, 34 aa, Glycine max
  Clone ID: PAT_MRT3847_23936C.1.pep
GLLQKQFIQAIPAFNFSYAYKMTLLFWFPSIITL

SEQ ID NO: 201452 - protein, 131 aa, Glycine max
  unsure (1)..(131): unsure at all Xaa locations
  Clone ID: PAT_MRT3847_23937C.1.pep
AKPTEKAARMGPRLEPRFNADYDEVEAQMETXSLEEAVADKGSMMGFMMDQNNIELTKDTAGGTIGGTDLWADLLTEGKTKASVRARGAXHITGMIKGVATVVVTESTGVKTGIAMNSAIKGRVRWHANTV

SEQ ID NO: 201453 - protein, 52 aa, Glycine max
  unsure (1)..(52): unsure at all Xaa locations
  Clone ID: PAT_MRT3847_23938C.1.pep
IAQMGSCPKKPVFKFHQDGSITFEKRMGLRGRGKPSLGIPILTRPIXKKIWS

SEQ ID NO: 201454 - protein, 416 aa, Glycine max
  Clone ID: PAT_MRT3847_23939C.1.pep
MASWDQMGELANVAQLTGVDAVRLIGMIVRAASTARMHKKNCRQFAQHLKLIGNLLEQLKISELKKYPETREPLEQLEDALRRSYILVNSCQDRSYLYLLAMGWNIVYQFRKAQNEIDRYLRLVPLITLVDNSRVRERLEVIEMDQREYTLDDEDQKAQTVIFKPEPDKDDTAVLKKTLSCSYPNCSFTEALKKENEKLKLELQRSQANLDMNQCEVIQRLLDVTEVAAYSVPAKCSPEKSHKKEEYNYSDVNSDQDHSSDEKYHAKIDKHSPSRYSVAQKDLASTGGSYQQEDWHTDLLACCSEPSLCMKTFFYPCGTFSKIASVARNRPISSGEACNDLMAYSLILSCCCYTCCVRRKLRKMLNITGGFIDDFLSHLMCCCCALVQEWREVEIRGLTGSEKTKTSPPPSQYMES

SEQ ID NO: 201455 - protein, 69 aa, Glycine max
  Clone ID: PAT_MRT3847_2393C.1.pep
GNEKRILGGFLEKKGFLPYPNLKPSCFFLLGGARPFFEWKLGSALSYFRFWKGFSPRGRLKKKFFIRGW

SEQ ID NO: 201456 - protein, 55 aa, Glycine max
  Clone ID: PAT_MRT3847_23940C.1.pep
PGAIFALRCFRGTSHMNIARRIVGIGDSAVHIYLLLFCVCLFCITHQKKKRRRLG

SEQ ID NO: 201457 - protein, 215 aa, Glycine max
  Clone ID: PAT_MRT3847_23941C.1.pep
MEGTATGCYKCGRPGHWSRDCPFSAPNSNPNPNPNPNPNPATTPNPNTPNPSSSSFKPRFAAEKPKKLPRTKPKLTPELLLSDEGLGYVLRYFPREFKYRGGGHEVRDLGNLLRLYTEWHSRLLPYYSFNQFVHKVEKVAATRRVKTCLRELRERVASGGDPTKLREPPVVHDIPSDEHGYVVSAEDGGATHQETDVFAESENVNDIQEDMLNDI

SEQ ID NO: 201458 - protein, 97 aa, Glycine max
  Clone ID: PAT_MRT3847_23942C.1.pep
LNHTRLPKYFWANAGNIICYTLNRILIRHILKKTPYELDVWKNLFMLCVMKLILLFKKILEIKCYISFVFSFSCVFPPLFVLSPLFNSILIFYRLLF

SEQ ID NO: 201459 - protein, 54 aa, Glycine max
  Clone ID: PAT_MRT3847_23943C.1.pep
ATRMTIVTMGNGQLGMPVLILATGASLGDLKASSILYPGISIVHSVIGTPRALR

SEQ ID NO: 201460 - protein, 385 aa, Glycine max
  unsure (1)..(385): unsure at all Xaa locations
  Clone ID: PAT_MRT3847_23944C.1.pep
MACGSVLSSFLHITNSMAIKGVLSFAPNPPLLLRLPKAVTFLSFSASTKSPTKSFQVRSIAGTTEAASGFDEMVSGTKRKYYMLGGKGGVRKTSCAASLAVKFSRTPHLYIFSNHRNIACLLDSYVIDLIRGALVPVGAPDYSPLPPLINPEKSREEFRIAPQQFDPYLGKKKPDRMXADKLEKLRERMIKVRELFRDTDSTEFVIVTIPTVMAVNLLSTRFFHRLHLIASFVKILKLRQNIVSVNSAIKYVFAEDETRQHDAEKLEKLMXRMIKVREFFRDTDSTEFVIVTIPTVMAISESSRLSASLKKENVPVKRLIVNQILPPSTSDCKFCAMKRKDQMRALDIVQNDPELSSLLMIQAPLIDVEIRGVPALKFLGDIIWK

SEQ ID NO: 201461 - protein, 49 aa, Glycine max
  Clone ID: PAT_MRT3847_23945C.1.pep
HNADLSQGKSAVSQVLGYSVETVYVPRPMSHCVRMLKNVACYGVYANAC

SEQ ID NO: 201462 - protein, 94 aa, Glycine max
  Clone ID: PAT_MRT3847_23946C.1.pep
FRKHSENRRGQHFIDRNSTTHTQAEHTRQGHWRNRTRARITYQQTGMERSEDGKKSAKKIMAQFLTNTLENRNKDTGDTLDIVRGEANIRDKNR

SEQ ID NO: 201463 - protein, 91 aa, Glycine max
  unsure (1)..(91): unsure at all Xaa locations
  Clone ID: PAT_MRT3847_23947C.1.pep
SVSPIVLPTTSLKWSDPAPFRTEPLSKPTPIIHNHFLPIQFXXXTFSGIGKATFGWWLRLVLIKRKSPFSFMFTISLPRTLYVIDSIDSSL

SEQ ID NO: 201464 - protein, 94 aa, Glycine max
  Clone ID: PAT_MRT3847_23948C.1.pep
RPRCVFSCFGPPLRRPLLVSVSWWGLWAFGSGFCSGSSLGVLCLFRGLGLFPCFASWRVLFVFCAGSAAFALRSVGVPVGVCSAPPFVCVGGRV

SEQ ID NO: 201465 - protein, 47 aa, Glycine max
  Clone ID: PAT_MRT3847_23949C.1.pep
DILRHGMSILPEVVQQQRYHTSSYPPLDKLAYSSQLTRAPSPSVVIC

SEQ ID NO: 201466 - protein, 83 aa, Glycine max
  unsure (1)..(83): unsure at all Xaa locations
  Clone ID: PAT_MRT3847_2394C.1.pep
RRRSXPLXPRPPLLPXPMLXRLAPPLXVQHXYSSTLYVSSPXEAREHSXXAPPSSHTTHHLGFIHXTECGHSFVFLEPPLLXF

SEQ ID NO: 201467 - protein, 53 aa, Glycine max
  Clone ID: PAT_MRT3847_23950C.1.pep
SYDAGFVYFVEGVLPIINDLYHGGTMFFTNSYFEFILIRNFLKFTKCLLFSSC

SEQ ID NO: 201468 - protein, 66 aa, Glycine max
  unsure (1)..(66): unsure at all Xaa locations
  Clone ID: PAT_MRT3847_23951C.1.pep
XFIFFLFFFFFCFFFFFFFFFLEIKQNPLFFHHFGFHSPSYFHWNKNPALMGSRWMHRPGDLVSVF

SEQ ID NO: 201469 - protein, 50 aa, Glycine max
  Clone ID: PAT_MRT3847_23952C.1.pep
RTCYMLSIQASLGHTTHRPLLDNEGTRNTMPLPNLRCWIDIICLQAGVIH

SEQ ID NO: 201470 - protein, 62 aa, Glycine max
  Clone ID: PAT_MRT3847_23953C.1.pep
AWQGRAHCALDHAIYTDRLLALLMRRGFSFSHTHCIMWRTAARPLICKQSPEQPIVVPHCPH

SEQ ID NO: 201471 - protein, 58 aa, Glycine max
  Clone ID: PAT_MRT3847_23954C.1.pep
KTKDERCVQRSYWIEHTTDLSVESMMLDSNASDLDKEERPEVLSLLPAYEGKSVVELG

SEQ ID NO: 201472 - protein, 51 aa, Glycine max
  Clone ID: PAT_MRT3847_23955C.1.pep
TSWLWETNEILRAYAMSHRGCKKICLERTILLKILVLSRSCTRGIMPDNCA

SEQ ID NO: 201473 - protein, 109 aa, Glycine max
  unsure (1)..(109): unsure at all Xaa locations
  Clone ID: PAT_MRT3847_23956C.1.pep
AXTSTLLESVDSADLIAFVIIPEFVVLFTILRRWSALTEDQLYARXLTEPNNALCXQSKNLLNMNNVQLLFTDKALRLIAKKAMANNYXARVLRALLESIITEGHVLIF

SEQ ID NO: 201474 - protein, 102 aa, Glycine max
  Clone ID: PAT_MRT3847_23957C.1.pep
MDADEAKILLGFPPNSRPTPSQVKSAYKKKVWESHPDLFPSHEKPLAESKFKLISEAYTCLESGGRGGAAVPFKLRAVHLIFFYFLDCIITRIRMIGAILQL

SEQ ID NO: 201475 - protein, 138 aa, Glycine max
  Clone ID: PAT_MRT3847_23958C.1.pep
YCNCFQVSGGVPKKQQTFSQFLPKVRKKKLGIPGGAFPPPQKKLIFLKRTISRGGNGWGGFGALSPFQFFLRKIPGPPLCKNAGPPGFFFSPFQTRKSFLLFTGAFAPPIGSFCGDPKTGELFKLPCDPHPGTLWGVG

SEQ ID NO: 201476 - protein, 50 aa, Glycine max
  Clone ID: PAT_MRT3847_23959C.1.pep
KYILPLWLLNGSSELRCRVKNLYGRFQLLCLKKAKTNIVLSIIFLWLLYR

SEQ ID NO: 201477 - protein, 94 aa, Glycine max
  Clone ID: PAT_MRT3847_2395C.1.pep
VLNDAVRFSYVAHLVLVFPVVFYAVRVNLDGLVFSSYRPLRQDNFRFASITISLIGVIFLGANFIPSIWDIFQFTGATAAVCVAFIFPAAVTLG

SEQ ID NO: 201478 - protein, 83 aa, Glycine max
  Clone ID: PAT_MRT3847_23960C.1.pep
QPKKMKSTIVFATLRRCGVSAELTSAIAQDVLYVDGHPNRNRSIYYVLPAKGGNGGRIQLAAPLKDTCPISVSADFHSTIQGV

SEQ ID NO: 201479 - protein, 45 aa, Glycine max
  Clone ID: PAT_MRT3847_23961C.1.pep
QRALDHTNRLVIDLAGGLTIHYNHSNSRDSTIFDWYRHKPSAEFY

SEQ ID NO: 201480 - protein, 68 aa, Glycine max
  Clone ID: PAT_MRT3847_23962C.1.pep
YTHFCLTNSKKPIPFRFNYKPIFFFTPLLFSDLKGTCQAQFGLSAGEILVFFFPLLGLIRTTMDEWLW

SEQ ID NO: 201481 - protein, 260 aa, Glycine max
  Clone ID: PAT_MRT3847_23963C.1.pep
YWHCCYTDNGLNGFYAGKPFVNVLKEAGVLPGIKVDKGTVELAGTNGETTTQGLDGLGQRCAKYYEAGARFAKWRAVLKIGPNEPSELSIHENAYGLARYAVICQENGLVPIVEPEILVDGPHDIHKCAAVTERVLAACYKALNDHHVLLEGTLLKPNMVTPGSQSAKVSPQVVAEHTVRALQRTVPAAVPAVVFLSGGQSEEEASVNLNAINQVNGKKPWSLSVSFGRPLQQSTLKAWGGKEENVKKAQEALLVRAKAN

SEQ ID NO: 201482 - protein, 111 aa, Glycine max
  unsure (1)..(111): unsure at all Xaa locations
  Clone ID: PAT_MRT3847_23964C.1.pep
MPPVNLVSHVSPALTHQHLGNSSLEKLRLLVPSLSNVKSFRCKSCQLGKHTRISYGSRVNKCVAFVLVHFDIWGPSRACSTLGYFYFVTFIDXFLSCTWVFLMNNRPDVFS

SEQ ID NO: 201483 - protein, 101 aa, Glycine max
  Clone ID: PAT_MRT3847_23965C.1.pep
NHRKDRFMINITDHVGSISSSSSRSSSVSGRSSGSSFVSDSFEDLTASASSSASTSADDQLVVVADPLGDMTSLFQQLLINMGLSQFYQGESQTFTSLTHV

SEQ ID NO: 201484 - protein, 80 aa, Glycine max
  Clone ID: PAT_MRT3847_23966C.1.pep
MASSLSSVINQPHLAQRLKLHRPSSLTTFTIFHHKHKHQHRHNASFPHPYTSLPRSRPLNLIIASRTFSPSNTLHLHFIP

SEQ ID NO: 201485 - protein, 78 aa, Glycine max
  Clone ID: PAT_MRT3847_23967C.1.pep
LVYSLAFFKRKEFFGGETLVDYLSFLVCGGVILRMVCSVILFVTLIPLCVCNSRYFWCHLLIYFHFAEQKKEEKRSSK

SEQ ID NO: 201486 - protein, 33 aa, Glycine max
  Clone ID: PAT_MRT3847_23968C.1.pep
QVFDKGSQNRIATISNGESLLKIRERKHQQYYN

SEQ ID NO: 201487 - protein, 137 aa, Glycine max
  unsure (1)..(137): unsure at all Xaa locations
  Clone ID: PAT_MRT3847_23969C.1.pep
KHTSSRTNTILLNVQFISVRDYTTGHRSLAKMVTPFTGLKSVARFTTTKTTYAITXILSNCXRQQYILEWPPIYNKKTENTFYLPNLNDXQLHNTIFQYLIKEKIGPLAIELXNNHAFXYRNHNSSSAYYYTRYWTM

SEQ ID NO: 201488 - protein, 76 aa, Glycine max
  Clone ID: PAT_MRT3847_2396C.1.pep
AIHFRPPAYCIWFPWPVVTLVSSSWRKGSLKRVALVYFPSQPLPCPKTMQTGYYVRYSKTGPDVRSCKQDQVIFGF

SEQ ID NO: 201489 - protein, 99 aa, Glycine max
  Clone ID: PAT_MRT3847_23970C.1.pep
FRNSLLFPHVLTVCCFSLHEDPQQASTIICNMEQLSQPSFQPHQVSDHLLHSDRVPCIEVILREKQEEELEGKEVEYFKERVERLESEREEVKGKWGHV

SEQ ID NO: 201490 - protein, 59 aa, Glycine max
  Clone ID: PAT_MRT3847_23971C.1.pep
KKLPHYTTLSLYLLIYLHSILISFFYPFLTYIYPLSSIISPYHFNFSPFLKLISIHFNS

SEQ ID NO: 201491 - protein, 148 aa, Glycine max
  unsure (1)..(148): unsure at all Xaa locations
  Clone ID: PAT_MRT3847_23972C.1.pep
KVKAAAPAGPESQFRPTPTLPCFGKHRHMVGLHVAIRNGRLXNPPMQPIVEPDWQAQSAEVYFDLLPVVEARXEGMIXHLLSXHTGVYVPLTTQTNLVYPPLEMQLDLPVNNLPKVSSTIVHILVGTEHYGSDPSLSGSHKYXTPMMP

SEQ ID NO: 201492 - protein, 82 aa, Glycine max
  Clone ID: PAT_MRT3847_23973C.1.pep
LQSLQNMLYPNYLMQLERFITSYFLKRSSPSNLFYSCFHVPSYLCSRKPDFAVLYATKTTHDSCASNYHLCLFKNMFCISNV

SEQ ID NO: 201493 - protein, 78 aa, Glycine max
  unsure (1)..(78): unsure at all Xaa locations
  Clone ID: PAT_MRT3847_23974C.1.pep
HTRLTLPPHPRRTLHHDLPQWDFLTDRERQFVTHVLAFCPASXDASVLENLSAPFTKEIQLPKTRAFYCSQISVENIH

SEQ ID NO: 201494 - protein, 83 aa, Glycine max
  Clone ID: PAT_MRT3847_23975C.1.pep
MGSKDSCRTELRIAIRQLSDRCLYSASKWAAEQLVGIEEDPAKFTPSNTRFQRGSSRIFRKSRTHETAAVITPVVGVLYDATP

SEQ ID NO: 201495 - protein, 80 aa, Glycine max
  Clone ID: PAT_MRT3847_23976C.1.pep
ISVFNLSSRLLIQNLKDTTVLFLTNNVGRNCFRIHQCIKAFSEAYSVLENELKFLNSDGESCSRPPDRLLPKIIPSLDIS

SEQ ID NO: 201496 - protein, 42 aa, Glycine max
  Clone ID: PAT_MRT3847_23977C.1.pep
KSYRSTLVPLLGIFTTLPPIDFKFNSFQSNYVWPYVMLAFGI

SEQ ID NO: 201497 - protein, 44 aa, Glycine max
  Clone ID: PAT_MRT3847_23978C.1.pep
DEAGIRSEKKINLPVFSAHQPPPGGTGLLSLIRVNRAWLIWSSC

SEQ ID NO: 201498 - protein, 49 aa, Glycine max
  Clone ID: PAT_MRT3847_23979C.1.pep
STEVVRHSSQERQWAEYRFLSQQSRRFPLARRRARTHIVDKDIKPRLGW

SEQ ID NO: 201499 - protein, 54 aa, Glycine max
  unsure (1)..(54): unsure at all Xaa locations
  Clone ID: PAT_MRT3847_2397C.1.pep
FLLPYCFFXFXPSEVSSNXFLLQIIKDVCLRVLQLDHNENTRVTDTFVVXSGYV

SEQ ID NO: 201500 - protein, 75 aa, Glycine max
  unsure (1)..(75): unsure at all Xaa locations
  Clone ID: PAT_MRT3847_23980C.1.pep
CGIPSGIPVTVICNRLFNEMLIRYSYEKLLRQXAKAPSMFLQSLKNFGSLCVXGDDNXISVHRYVSLLSGLNESF

SEQ ID NO: 201501 - protein, 114 aa, Glycine max
  unsure (1)..(114): unsure at all Xaa locations
  Clone ID: PAT_MRT3847_23981C.1.pep
SLAAGSNITRFADQIRTFKPEADGLINDSLIEELREALADADHKPXIIPGALGGTEAARYPDATTVVTGIVGCAXLKPTVAAIVAGKDIALANKETMVAGATFVLPLAHKHNIK

SEQ ID NO: 201502 - protein, 179 aa, Glycine max
  unsure (1)..(179): unsure at all Xaa locations
  Clone ID: PAT_MRT3847_23982C.1.pep
PRVRVPVLLARSTLPESHFLPFLPRGASVTLSSQFHFTPIPDLQNLIAPEHGKLLRELACKSISKKKLCTVIDIDDVRREVEIMRHLXRRELTLKDTYEDDNVVHLVMELCVGGKLFDRIVARGHXTKCAAAAITKTIIEVVQLKTGCVALVLCLNISVDPPDVIKIFPCARMECWIGR

SEQ ID NO: 201503 - protein, 58 aa, Glycine max
  Clone ID: PAT_MRT3847_23983C.1.pep
IRPNCGLTFRSNLMCPLSLNTSYAQPVIPNLSVMKSCMRTGYKQHSCCVGIQNWNESH

SEQ ID NO: 201504 - protein, 62 aa, Glycine max
  Clone ID: PAT_MRT3847_23984C.1.pep
LIPPLTYLYHHKILNSPSSTLCPLTEDKQHTQRHRTTTFKNVDKPLHHGPSRTNTLVATPTP

SEQ ID NO: 201505 - protein, 85 aa, Glycine max
  Clone ID: PAT_MRT3847_23985C.1.pep
GKAPYFHSPRSPAQVARSEPSRELSSPIHLSDKILIPIPYLLIYIGDNVRYKFGISNLMSNALSCSIRNIRCICIMMNVLNAPEK

SEQ ID NO: 201506 - protein, 148 aa, Glycine max
  unsure (1)..(148): unsure at all Xaa locations
  Clone ID: PAT_MRT3847_23986C.1.pep
GPQIRVIVEYATLQRVPRQWYKKDLCDGTIYKESEDLECIELLAKPVENITRAVIQLVNREXNXTGAEKDMPIITPLMCFVRPSRTAMGHMRPLSNGKGNITAGASLYGGPSYATSRRGLGKKRVIATMYVARDPMKSCTVRDEPSYT

SEQ ID NO: 201507 - protein, 99 aa, Glycine max
  unsure (1)..(99): unsure at all Xaa locations
  Clone ID: PAT_MRT3847_23987C.1.pep
WLITIMRSGFSVRIHNDHXGCETWQVLSNQGNVNLLEKTTMDDLVKERGTGSVTFTLRVSSVNMFKSGSISTRTEEIVAICEGLKVVFQNNNATTGTMD

SEQ ID NO: 201508 - protein, 651 aa, Glycine max
  unsure (1)..(651): unsure at all Xaa locations
  Clone ID: PAT_MRT3847_23988C.1.pep
MGMAVASDDLLSKKAAAMRASLERSQAITDDVVSILGSFDHRLSALEAAMRPTQIRTHXIRKAHENIDRTLKSAEAILAHFDQYYQAEAKIVKGPHEDVKNYLEAIDQLRRNIRFFGNKKGFKNDDDVVIRANNLISEAISKLEDEFKRLLSSYSKPVEPERLFDSLPRSMRPSAASPGRDDESXGKNHSSNFHSELHKNNADAAQYTLPILIPPRILPLLNNLTQQMVQAGHQQQLLKAYRDTRSKVLEESLQKLGVEKLSKDDVQKLQWEVLEAKIGNWIHFMRIAVKLLFAAERKVCDQIFEGFDSLSDQCFAEVTTNSISMLLSFGEAIAKSKRSPEKLFVLLDMYEILQEIHSEIEILFKGRACTKIREAVMGLAIQLAQTAQETFGDFEEAVEKDATKTAVTDGTVHPLTSYVINYVKFLFDYRSTLHQLFQGIEGDSSQLASVTMRILQALQTNLDGKSKHYRDPALTHLFLMNNIHYIVRSVRRSEAKDLLGDDWIQRHRRIVQQHANQYKRNAWAKILQSLSIQGLTSSSGGGGSSTAGGDAGSSGASRAIVKDRFKTFNTMFEELHQKQSQWTVPDAELRESLILAVAEVLLPAYRSFVKRFGPLVENVKSTQRYIKYTAEDLERILGEFFEGKSMNDNKR

SEQ ID NO: 201509 - protein, 57 aa, Glycine max
  Clone ID: PAT_MRT3847_23989C.1.pep
ILMLRLVIYRARSTGVWKACSTVCLNILVAQNKKQRYTIIWLTQTVCTMGKVLHVST

SEQ ID NO: 201510 - protein, 130 aa, Glycine max
  Clone ID: PAT_MRT3847_2398C.1.pep
SSTGPAKAVGKVIPSLNGKLTGMSMRVPTANVSVVDLTCRIEKGASFEDIKKTIRDASNGELKGIFAYSEDELVSFDLNGNPAFSIFDAKAGIALNENFIKLVFWYDNEWGYSPRVLDLVSYIAKQDGAH

SEQ ID NO: 201511 - protein, 125 aa, Glycine max
  unsure (1)..(125): unsure at all Xaa locations
  Clone ID: PAT_MRT3847_23990C.1.pep
YIIGLFYRYRAVTSAYYRGAVGAMLVYDITKRQSFDHIPRWLEELRNHADKNIVIILIGNKSDLENQRQVPTEDAKEFAEKEGLFFLETSALEAPNVETAFMTXVLTEIFNIINKKNLAASDNQG

SEQ ID NO: 201512 - protein, 82 aa, Glycine max
  Clone ID: PAT_MRT3847_23991C.1.pep
TQEIESQLHKVSAPLLILHGAADQVTDPLVSQFLYEKASSKDKTLKIYEGSYHGILEGEPDDRIFAVHNDIISWLDFRCSLK

SEQ ID NO: 201513 - protein, 46 aa, Glycine max
  Clone ID: PAT_MRT3847_23992C.1.pep
VLGLHHPSVNLPSSSVICALYYYYGCISPNSGLRFNERALVAPVEA

SEQ ID NO: 201514 - protein, 71 aa, Glycine max
  Clone ID: PAT_MRT3847_23993C.1.pep
IVTYVFILYPPRLRPPHQKRKRKRNLFTMVIQENPPESGCMCTSWKLFSIFLLSVYKDDWILTSFLGHPFY

SEQ ID NO: 201515 - protein, 85 aa, Glycine max
  Clone ID: PAT_MRT3847_23994C.1.pep
GVPNPRNNEEQWWHDHWRGLLRLSSLSKSVGTESVFLENECRKGENWSGTKRWKGGGEDAIDGSQIAKKLGWRPALSNDALSRNP

SEQ ID NO: 201516 - protein, 58 aa, Glycine max
  Clone ID: PAT_MRT3847_23995C.1.pep
AIHQNGTVHQDSHLKERNHSKASLNYTLMMTLKNDRDEVLTCIKFNFKIVFGSFVSDM

SEQ ID NO: 201517 - protein, 86 aa, Glycine max
  Clone ID: PAT_MRT3847_23996C.1.pep
SKCVTVKKQFGIKRSVSARSAWEETWLDGKWKEHGVVADRRKNRALPLADGWIHRKSEDWNDRIKDAELETLAPSLSELYRKSKWA

SEQ ID NO: 201518 - protein, 138 aa, Glycine max
  unsure (1)..(138): unsure at all Xaa locations
  Clone ID: PAT_MRT3847_23997C.1.pep
MESRVRSRTGTLSSLPHLRKPPREVGAGPSLVTVKAVGSMANDGNLFWVRQLRPKLCSPALKKEAFLLQPCLVIAGRGXDSVGXREAKVAPAGFFEKYPALVTGFFFFTCYVTSRDSVLCLLRSLSLTFNHLTVFHEE

SEQ ID NO: 201519 - protein, 80 aa, Glycine max
  Clone ID: PAT_MRT3847_23998C.1.pep
LSPEAISYMRRVKSYALTYNATLYTPIGKPMASCESSTTVPTPAMNPHYTPILPMPYPYMPCAQNFAFPHRIQVPLNPKP

SEQ ID NO: 201520 - protein, 166 aa, Glycine max
  unsure (1)..(166): unsure at all Xaa locations
  Clone ID: PAT_MRT3847_23999C.1.pep
MASELKEKLRELVKAIVDSDDYSLQAADEAIATLSSLKHLKSPDDFPLPPQFRCPISTQLMSDPVILSTGQTYDRPFIQRWLNEGHRTCPQTQLLLSHTIVPPNYLVRCRDRGIDLPNPAKDLDEVVTNADRNHLNSLIRXLQLFLPDQKEAAKEIRLLTKRMPSI

SEQ ID NO: 201521 - protein, 216 aa, Glycine max
  unsure (1)..(216): unsure at all Xaa locations
  Clone ID: PAT_MRT3847_2399C.1.pep
MAAAPARARADYDYLIKLLLIGDSGVGKSCLLLRFSDGSFTTSFITTIGIDFKIRTIELDSKRIKLQIWDTAGQERFRTITTAYYRGAMGILLVYDVTDEASFNNIRNWIRNIEQHASDNVNKILVGNKADMDESKRAVPTSKGQALADEYGIKFFETSAKTNMNVEEVFFSIARDIKQRLADTDSRAEPQTIKINQPDQATSGGQPAXKSACCGS

SEQ ID NO: 201522 - protein, 91 aa, Glycine max
  unsure (1)..(91): unsure at all Xaa locations
  Clone ID: PAT_MRT3847_239C.1.pep
SGLGDGAVATQRFRQTGVGAHQRPTWFQGLDPQLNLEGPLVGDLGFDQFGLARDPAGXRGFVQAGLVNGRFARLGVLGILGPDLLRVTGIS

SEQ ID NO: 201523 - protein, 58 aa, Glycine max
  Clone ID: PAT_MRT3847_23C.1.pep
CYYYYVLPSYIIGWRRLHLRRIPMHMTRTQTYISLQELSASLCSSTIPTLPLTRSLTP

SEQ ID NO: 201524 - protein, 132 aa, Glycine max
  Clone ID: PAT_MRT3847_24000C.1.pep
METKDCDSLQNDTHMYCVSQVNHSSPNSQWISLHTVDPNCVATLTVPSFTSSLTFLLTTLQFLKLQLNPSTFPIMAVVEWIKKTRKRSLSAPKLLILIFWIPRILYARRIYRRSRKPLRGLKTRIWILLLTR

SEQ ID NO: 201525 - protein, 92 aa, Glycine max
  Clone ID: PAT_MRT3847_24001C.1.pep
YLFFFFHFNRGMYQEFWCLKRRLFAEHSQCNYSFPYTPMYCSFSLDTSSRSSPMIRFQHREQSSSSQGVSSLFLGAHWSLFILYLPPPVRVV

SEQ ID NO: 201526 - protein, 95 aa, Glycine max
  Clone ID: PAT_MRT3847_24002C.1.pep
IVALVKSTGDYFHGNSGKDEGTRLFIVVRDFLIMVDKVCNEVRDTKKKSVKTQKQETPREASSSEPRPPPDFRQRLFPAIAERRMDDISSDDESP

SEQ ID NO: 201527 - protein, 184 aa, Glycine max
  unsure (1)..(184): unsure at all Xaa locations
  Clone ID: PAT_MRT3847_24003C.1.pep
GRVPLLLSRRRVSLCSSSSSYSSISDHVSFVKDVFAIHPPQHLSQLRGLLFFSXESIISPGARRXLIPPPLPLSKNSSGNVTALLRWPTAPPEMEMPVVEVRKYGVWLLAKSVDQFIQRLLVEEDTKNGRERNEEVFYASGDAGEKFYRKGDFTESGISNLDVYLLKKGGLFSDIIKRKVARHF

SEQ ID NO: 201528 - protein, 92 aa, Glycine max
  Clone ID: PAT_MRT3847_24004C.1.pep
VAVASPRDTKFMDFQKWRVRDHTESPCRIEEGSILVTECEASQHCCEAAESNKIRSSGYLGDMITLFLPRVLLVLARQSSLLPFLFPLCFCV

SEQ ID NO: 201529 - protein, 109 aa, Glycine max
  Clone ID: PAT_MRT3847_24005C.1.pep
NSPHFLFFKGGGGCSTQVGKKKQKKGFFMGLPFLCPFFLTFFFPPKFFYNNKLFHLRPQNFGVHSSITLLSALIGHMATSDSGPSFFFLFSHTNLVTTSFFLGTWSFFS

SEQ ID NO: 201530 - protein, 121 aa, Glycine max
  Clone ID: PAT_MRT3847_24006C.1.pep
SSRDPTVVATKMFSYNSLRSATGDFHPSSKIGGGGYGVVYKGVLRDGTQAAIKSLSVESKQGTHEFMTEIDMISNIRHPNLVELIGCCVEGSHRILVYEFLENNSLASSLLGKYQNNLNMY

SEQ ID NO: 201531 - protein, 74 aa, Glycine max
  Clone ID: PAT_MRT3847_24007C.1.pep
VEPCDFRGFEVLSVFHPSDEVINSVVIARKLYHSLEQGLVGSMILPNKCSEIQAFNPLNHGNMIEELAVEEQLL

SEQ ID NO: 201532 - protein, 121 aa, Glycine max
  Clone ID: PAT_MRT3847_24008C.1.pep
RGCLHLQPSLLPFPLHAKFKPQLHHMRHTTKLFWLTTHQPPRGQHLPSASPLSTKALPHLVVVAPAQSGDLSTLLRISAVLLSAYFIANFVVPGFFTNSFGYDKSSNEEQKVDDVNAIEDE

SEQ ID NO: 201533 - protein, 57 aa, Glycine max
  Clone ID: PAT_MRT3847_24009C.1.pep
DKADVQSIIGLQRFFETRMNDAFGDTKFSAVLVEPPPLNLPSAGVKSQELSGPCDGP

SEQ ID NO: 201534 - protein, 36 aa, Glycine max
  Clone ID: PAT_MRT3847_2400C.1.pep
NQPIIINIIATQIIILHTQSFNCISKPLIGFKVLQI

SEQ ID NO: 201535 - protein, 108 aa, Glycine max
  Clone ID: PAT_MRT3847_24010C.1.pep
MVHAVVTGPMRISSLRVSCSDDMDRHRQRRKLSPTEPIYPSVETVSFQYIGTALCQIATSYAHEKKAGLLCRLGTIYAQLRETGWETCSFVYREEDHERVVAGTTPNA

SEQ ID NO: 201536 - protein, 68 aa, Glycine max
  Clone ID: PAT_MRT3847_24011C.1.pep
KCYSLCPGILGGKNFFYCKAFTKKKFGNKKFHGVGSFFLLGILDPTQKRAPVSTSFFRPNVKGNLVKE

SEQ ID NO: 201537 - protein, 125 aa, Glycine max
  Clone ID: PAT_MRT3847_24012C.1.pep
VGLTESLLTDHQPDLVVFKGCLCLSHEHMRTHVLVWLMREFGVENSRVLLLNVSYEHLQLRQHPSLTPLCMSENQDVLLLINDLEQFILYHSRDNRRDRAEDLVDHKHIGFCYDFDQSYVVPYSN

SEQ ID NO: 201538 - protein, 172 aa, Glycine max
  Clone ID: PAT_MRT3847_24013C.1.pep
MDNKATILMQKYEVGHFLGQGNFAKVYHARNLKTGQSVAIKVFNKESVIKVGMKEQLKREISLMRLVRHPNIVQLHEVMASKTKIYFAMEMVKGGELFYKVSRGRLREDVARKYFQQLIDAVGHCHSRGVCHRDLKPENLLVDENGDLKVTDFGLSALVESRENDGLLHTIC

SEQ ID NO: 201539 - protein, 74 aa, Glycine max
  Clone ID: PAT_MRT3847_24014C.1.pep
PRTRPFPHSRIGLLCHLGRNPWASRVVISNFCKVFSLFLYAQNSCPPTPCFFMRSKPFFITRKRAPLFPLGGNL

SEQ ID NO: 201540 - protein, 80 aa, Glycine max
  Clone ID: PAT_MRT3847_24015C.1.pep
PFEKGSSLNKGGLPPKVYPVPKKGFISGKNRFRGSSKEKWRPQSGGGTGPPLGGFLKTKMGGFLVGPWGISATFFFRGYF

SEQ ID NO: 201541 - protein, 83 aa, Glycine max
  unsure (1)..(83): unsure at all Xaa locations
  Clone ID: PAT_MRT3847_24016C.1.pep
DPSFSHGGRIWIEGEPYALNGLDITDAILPWVQDYVXFYFESNEEPAXRPWTQTSWKELDEERADDVKDNQXWPKMLTRGDLA

SEQ ID NO: 201542 - protein, 68 aa, Glycine max
  unsure (1)..(68): unsure at all Xaa locations
  Clone ID: PAT_MRT3847_24017C.1.pep
XVEIDVLRXTGXXTSSPSSLARAAALFFHIYTLPNFFLFITEQHIYIGAPGSNNITIYGRKTFALKNS

SEQ ID NO: 201543 - protein, 128 aa, Glycine max
  Clone ID: PAT_MRT3847_24018C.1.pep
MASSATNTWIRTTLPSLPTSSPTTLNKRFPSYPNSNSNSNTITCSLQTLHFPKKYQPTSTTTTTKTTTTTTTTTTSPARETKPVITSPSETKHPLPQKWNFLQKAAASALNMVETALVSHEREHPLPK

SEQ ID NO: 201544 - protein, 50 aa, Glycine max
  Clone ID: PAT_MRT3847_24019C.1.pep
KNQIGYYTCICINLILINTTKSMNDTETIKVISDQDNLSMKMRLIKYRIW

SEQ ID NO: 201545 - protein, 124 aa, Glycine max
  Clone ID: PAT_MRT3847_2401C.1.pep
QPLSAICANGGPGTNLTNFDPTTPDTVDSNYYSNLQVNKGLLQSDQELFSTTGADTIAIVNSFSSNQTLFFENFKASMIKMGNIGVLTGSQGEIRQQCNFINGNSAGLATLATKESSDGMVSSI

SEQ ID NO: 201546 - protein, 128 aa, Glycine max
  Clone ID: PAT_MRT3847_24020C.1.pep
VFVDRFSTAGGWFPPPCRRSAFVVWSCLCFLSPPLCLCPVTFLRFPVAVVDLLIWFPLLVVVSWFSPFFVCGFLSLFYLLIAVSLARFFCCPFFGQPLWALVLHVPVPLVNHNKERIFHTKRLKAQLP

SEQ ID NO: 201547 - protein, 151 aa, Glycine max
  Clone ID: PAT_MRT3847_24021C.1.pep
LAFAHASGPSERERLGTCFANMELISKTTPDKGNSNNNSTNNLPTEQHGNAKTGILLRFKKASDVNGVFSYSTGGGTATKFSAALEPGSVVTVSTDNAYALLIATIVSVDVFECSVTLRSEKDFPAEFGQQQSVLYHLDKNDGFSSFAYRL

SEQ ID NO: 201548 - protein, 133 aa, Glycine max
  Clone ID: PAT_MRT3847_24022C.1.pep
GYLLPRPKMVNSDLARIINSDEVQSVVRPIKKDVKKATLKKNPLKNLNSMLKLNPYAKTAKRMALLAEAQRVKAKKEKLDKKRKTVSKVQHVIALYFIYFGIFIVCCLLWWIYIVDHGFMSFFLLTNVSLLEC

SEQ ID NO: 201549 - protein, 546 aa, Glycine max
  Clone ID: PAT_MRT3847_24023C.1.pep
GNSARGSVVSKLQTLSTSDHASVVSMNLFVALLCGCIVLGHLLEENRWMNESITALLIGVCTGIVILLFSGGKSSHILVFSEDLFFIYLLPPIIFNAGFQVKKKQFFVNFMTIMLFGAIGTLISCTIITLGATQIFKRLDVGPLELGDFLAIGAIFAATDSVCTLQVLNQDETPLLYSLVFGEGVVNDATSVVLFNAIQSFDLNQIDSSIAVHFLGNFLYLFIASTMLGVLTGLLSAYIIKKLYIGRHSTDREVALMMLMAYLSYMLAELCYLSGILTVFFCGIVMSHYTWHNVTESSRITTKHSFATLSFVAEIFIFLYVGMDALDIEKWKFVSDSPGTSVATSSAYSCLILLGRAAFVFPLSFISNLAKKSPNEKISFRQQVIIWWAGLMRGAVSIALAYNQFTMSGHTSLRSNAIMITSTITVVLFSTVVFGLLTKPLIRLLLPHTPHHKESSITIITDPSTPSPKSVTIPLLGSAQESEVDIDGHDIHRPSSIRALLTTPTHTVHRLWRKFDDAFMRPVFGGRGFVPVEPGSPTERNGHQWR

SEQ ID NO: 201550 - protein, 149 aa, Glycine max
  unsure (1)..(149): unsure at all Xaa locations
  Clone ID: PAT_MRT3847_24024C.1.pep
KNILFAILGSFYSPGTSVATSGVLLGLILLGRAAFVFPLSFISNLAKKSPNEKISFRQQVIIWWAGLMRGAVSIALAYNQFTMSXHTSLRSNAIMITSTITVVLFSTVVFGLLTKPLIKLLLPHTPHHKESSITIITDPSTPSPKSVTI

SEQ ID NO: 201551 - protein, 33 aa, Glycine max
  Clone ID: PAT_MRT3847_24025C.1.pep
GLQHQHNPSSLQSTIIEKIAEHFTAMVTARLYR

SEQ ID NO: 201552 - protein, 268 aa, Glycine max
  unsure (1)..(268): unsure at all Xaa locations
  Clone ID: PAT_MRT3847_24026C.1.pep
MDIDEWEFLSDDGYLDFNEEGGKQKQKQNSFGKLDSEGIFDMDYFCSSPPPPRVRTQLVPLPIQLEPKIGKAPEDILVKDIIKSSPMEVAIATPSENTKEFETVEADRVKVFFKIKEKSEFVDMKRGILAPMDAAGSLKFEDKGEAMEIITSPRRKVIEKDVCDKEEESTWEEENNSGFNLWKWSLTGVGAICSFGVAAATICVLFFGSQQRNKLKQDQKIRFQIYTDDKKXKQVVQHATKLNDAISAARGVPMSRAHISVGGYYDGL

SEQ ID NO: 201553 - protein, 99 aa, Glycine max
  Clone ID: PAT_MRT3847_24027C.1.pep
MVPKGLTFLAVLICSSGLSLNPADAGQAQHNGLDMNLYKESCLQAEDIITEHVQLVYKRHKNTGFYWLTNIMHDWAVQSGDALLLLDSTRRNLSDKETD

SEQ ID NO: 201554 - protein, 102 aa, Glycine max
  unsure (1)..(102): unsure at all Xaa locations
  Clone ID: PAT_MRT3847_24028C.1.pep
PTTEVNLKVSVDRARTHLVRGERNTEATGGLLVNTRLLWDXAMHSRIRGRVPCEHYTSRCQYCEXGNDGCTKSMTVSCDAHHDCDAWNWAYLKCTDSYNDSI

SEQ ID NO: 201555 - protein, 61 aa, Glycine max
  Clone ID: PAT_MRT3847_24029C.1.pep
TFICKVPKKAIQNSQIRDAELITMYQAWPMYFMEYKLNTAPSMYKKSIANVAKWMKNGTKL

SEQ ID NO: 201556 - protein, 216 aa, Glycine max
  Clone ID: PAT_MRT3847_2402C.1.pep
MAAAPARARADYDYLIKLLLIGDSGVGKSCLLLRFSDGSFTTSFITTIGIDFKIRTIELDGKRIKLQIWDTAGQERFRTITTAYYRGAMGILLVYDVTDEASFNNIRNWIRNIEQHASDNVNKILVGNKADMDESKRAVPTSKGQALADEYGIKFFETSAKTNMNVEEVFFSIARDIKQRLADTDSRAEPQTIKINQPDQATSGGQPAQKSACCGS

SEQ ID NO: 201557 - protein, 78 aa, Glycine max
  Clone ID: PAT_MRT3847_24030C.1.pep
KIYFGWGLWVVSLGFLVYEFFQWTSLFSSWEGMLFTVLFLLRVTVIMEIFIHLSQSERFKPPMVLPTQDPMKQKLFQT

SEQ ID NO: 201558 - protein, 42 aa, Glycine max
  Clone ID: PAT_MRT3847_24031C.1.pep
YVYYHIKVKFNLFLCIFYMIYHSIFVMHTVQVLKFIYLTIYL

SEQ ID NO: 201559 - protein, 327 aa, Glycine max
  Clone ID: PAT_MRT3847_24032C.1.pep
MPPSTKPNLPWKLRILTSLLNLLINASRRSNGTVNRRLFNFFDRKLPSSPNPVDGVKTSDVTVDATRNLWFRLFAPSSSVATTLPVVIFFHGGGFAFLSPASAAYDAVCRFFCRSFNAVIISVNYRLAPEHRYPSQNDDGFDVIKYLDENGAVLGDINNCFLVGDSSGGNIAHHVAVRVCKEKFRFVRVIGLVSIEPFFGGEERTESEIRMTQDPLVSLEKTDWYWKSFLPSGLGRDHEAVNVSGPNAVNISGLGYPNTLVVIAGFDPLQDWQRRYYEWLRKSGIEAQKIEYPNMIHGFHLFPDLPASSVFASDVKDFITKQIADVN

SEQ ID NO: 201560 - protein, 66 aa, Glycine max
  Clone ID: PAT_MRT3847_24033C.1.pep
DNIDPFHYFFWGVSQNYPNRKFGLDLDFYGYNYLMTGSGQGGLKIYQGKNRLGAAPASSYSAILTQ

SEQ ID NO: 201561 - protein, 68 aa, Glycine max
  Clone ID: PAT_MRT3847_24034C.1.pep
KLVIMVMDIIFCRIETIRSTMYSAKPDNNAMKGYLRKRVIASSPAPSTVPHAPSSSAKYTYYTNSSRM

SEQ ID NO: 201562 - protein, 272 aa, Glycine max
  unsure (1)..(272): unsure at all Xaa locations
  Clone ID: PAT_MRT3847_24035C.1.pep
MAAASGERWMDRLQFSSLFWPPPLDDQQRKDQVAAYVEYIGQFTSEQFSEDIAEEFYQTHLLVCVALXLIRNHYPSKEMLLFDDVLGSSSSRIGSSGHAVVLPIISCIIDGTLDYDKTSPPFASFISLVCPKNENEYSEQWAMACGEILRILTHYNRPIYKMERQYCEPEVSSGKSHATTNDSVDGESGHNSLMQQEKKPIRPLSPWITDILRAAPLGIRSDYFRWCSGVMGKYAAGELKPPTIGSARGSGKHPQLVPSTPRMAVANGAVLY

SEQ ID NO: 201563 - protein, 62 aa, Glycine max
  Clone ID: PAT_MRT3847_24036C.1.pep
KPMETMLSHSVKWQKPFNQSSHHLVHMRDLAIPYAYFTGPIDSAPTDPTSNAHKFHGSFIPQ

SEQ ID NO: 201564 - protein, 94 aa, Glycine max
  Clone ID: PAT_MRT3847_24037C.1.pep
EVPICKSICNTLRFSLMIGHTYLWLILCLMDLSCEILSSFSFRLIRSGLNKTYLYHDSIRAARVLRESQTLRRGLLCSYDQHPCKRNNQGHTTM

SEQ ID NO: 201565 - protein, 87 aa, Glycine max
  Clone ID: PAT_MRT3847_24038C.1.pep
VIQSWLDNLIKIQHPYYTGECLQSTKNQAQRLDTKEKRKGVVFVRKGERRLSNSTTLEIEESVLFEGNQKEVRVPFCRLLAAVRTRG

SEQ ID NO: 201566 - protein, 601 aa, Glycine max
  Clone ID: PAT_MRT3847_2403C.1.pep
RLVPLTRNEGDFEDDAVGGINGSENKDKSPSFAKTLTQSDANNGGGFSVPRYCAETIFPRLDYSADPPVQNILAKDVHGETWKFRHIYRGTPRRHLLTTGWSSFVNHKKLVAGDSIVFLRAEKDDLRVGIRRAKRGIGIGGGPEAPAGWNSGGGIRPMPYGGFSAFLREEDSQLLRNGLSPNAKGKVRPEAVIEAATLAANMQPFEVVYYPRASAPEFCVKANLVRAALQVRWCPGMRFKMPFETEDSSRISWFMGTISSVNFADPRWPNSPWRLLQVTWDEPELLQNVKRVSPWLVEIVSNMPTIHLSHYSTQQKKPRFPQHPDFSFDGQISLPAFPSNFLGPSNPFGCLAESTPAGIQGARHANYGISLSNLHFNKLQSGLFQAGFPPLDHTASPVLRVSSNNAATMQKVGTGDNVSCLLSMSTATQPSKKVDDVKAPQLVLFGQTILTEQQISLNTSAKTDPTRNNSFDGNADKMCKFSDGFGYALHPQGSSLERLQWYKDQQKETMASLETGHCKVFMESEDIGRTMDLTMLGSYDELYRKLADMFGIEKSVVLSHMLYRDTTGAVKHIGDEAFSEFTKTARRLTILMDSNSDGRGI

SEQ ID NO: 201567 - protein, 31 aa, Glycine max
  Clone ID: PAT_MRT3847_24040C.1.pep
NVCIINMYQKKKNQKIVMVKKYSIHDVSILG

SEQ ID NO: 201568 - protein, 45 aa, Glycine max
  Clone ID: PAT_MRT3847_24041C.1.pep
APLGVKPTSAGWFSNGDSSFSTFRTAHEKHFRSPLFRTPPSRTRP

SEQ ID NO: 201569 - protein, 65 aa, Glycine max
  Clone ID: PAT_MRT3847_24042C.1.pep
ANEQRPGHDWVRAVNVAHVSPFPQQIGGALPPSLVLATMLPTFPQASLPWPPLSLLPMPPLPSPS

SEQ ID NO: 201570 - protein, 48 aa, Glycine max
  Clone ID: PAT_MRT3847_24043C.1.pep
LFYVCVKSYDYTYYGMKYFFKKNKKSMNKQQAILNNIYHLHCKVIITS

SEQ ID NO: 201571 - protein, 125 aa, Glycine max
  Clone ID: PAT_MRT3847_24044C.1.pep
ERVMSSFILGHNPWSWIVVESLGSMLLSWVPFRGILPIPLSSFPSYPTRKSSMRTESEGSMEFLVFCMDYLAVFMSQRLVENDFSWIFLTVVYFLLFYILLAYCFLIMLNVCNTVFLKTFPNVIF

SEQ ID NO: 201572 - protein, 101 aa, Glycine max
  unsure (1)..(101): unsure at all Xaa locations
  Clone ID: PAT_MRT3847_24045C.1.pep
MSCCGGNWGCGSPCNSGNRCRGXKMYPNLSYTESTTTETLVMGVAPAKAQFERAEMGVPADNDGCKXGANCTLNPCTCKWGVGELKLQAKMALMKYDKNYI

SEQ ID NO: 201573 - protein, 62 aa, Glycine max
  Clone ID: PAT_MRT3847_24046C.1.pep
ERFSNPFFLFPAPFSEVKPLGGFLNGPNPAKKRPNNWGKFFVRRKGSNFQKLNVEKIQVYPF

SEQ ID NO: 201574 - protein, 79 aa, Glycine max
  Clone ID: PAT_MRT3847_24047C.1.pep
GANGIINDNPGSAHPYYELFVFVRRRRPLHLSFAVRERRKNSVWIESRRNLCLDLGSVVASEYLFYMRFSPDPKTKAQS

SEQ ID NO: 201575 - protein, 301 aa, Glycine max
  Clone ID: PAT_MRT3847_24048C.1.pep
TGPAQPFHTELVYPPFKPSNLSFNSKLVHPLFSSSSKHQPWLHNNNLGDIHLASFFLSLCHVLLTPPPSPTTPTTHASAHASEGSCGSCWAFSTVATVEAINKIVTGKFVSLSEQELVDCDRAYNEGCNGGLMDYAFEFIIQNGGIDTDKDYPYRGFDGICDPTKKNAKVVNIDGYEDVPPYDENALKKAVAHQPVSIAIEASGRALQLYQSGVFTGECGTSLDHGVVVVGYGSENGVDYWLVRNSWGTGWGEDGYFKMQRNVRTPTGKCGITMEASYPVKNGLNSANSVYESTEVYVSSA

SEQ ID NO: 201576 - protein, 92 aa, Glycine max
  Clone ID: PAT_MRT3847_24049C.1.pep
MSSRRSRQHSGSTRISDDQIIELVSKLRQLVPEIRNRRSDKVSASKVLQETCNYIRSLHREVSDLSERLSQLLTTIDADSAEAGIIRSLLNQ

SEQ ID NO: 201577 - protein, 62 aa, Glycine max
  Clone ID: PAT_MRT3847_2404C.1.pep
DELYRKLADMFGIEKFVVLSHMLYRDTTGAVKHIGDEAFSEFTKTARRLTILMDSNSDGRGI

SEQ ID NO: 201578 - protein, 139 aa, Glycine max
  Clone ID: PAT_MRT3847_24050C.1.pep
WLLFPRGLLYYSSCVPFAVFPGNQYQIHLVFKFYSIPSSKKSFFSHPLFSAHQISSLKTHSFSLSILLCVSVVLGWSDFEILNRKKRKAKREFPEVLFFSFLILTWLFSNPFIYLFIYFLLLPLLILSSFYSFLFVYIP

SEQ ID NO: 201579 - protein, 99 aa, Glycine max
  Clone ID: PAT_MRT3847_24051C.1.pep
TVLEIQASWLLLFCFVFVRKCVSFLLKDLGLYALTSQRLLEKKIRKENELNFSHYLKLAFKSAFTQVKCENFCKSCSVWVDLSQWEKVNLFLAFCFILL

SEQ ID NO: 201580 - protein, 85 aa, Glycine max
  unsure (1)..(85): unsure at all Xaa locations
  Clone ID: PAT_MRT3847_24052C.1.pep
SQISSLFLILFSGRILRGWHQGGVNWTNLPDISKCLEQAGNQYXNLIQIASCAMVIIMGISVLFLMQSKTKVLTGIGLSLLMSGL

SEQ ID NO: 201581 - protein, 89 aa, Glycine max
  Clone ID: PAT_MRT3847_24053C.1.pep
MSSRRSRQHSGSTRISDDQIIELVSKLRQLVPEIRNRRSDKVSASKVLQETCNYIRGLHREVSDLSERLSQLLTTIDADSAEAGIIRSL

SEQ ID NO: 201582 - protein, 68 aa, Glycine max
  Clone ID: PAT_MRT3847_24054C.1.pep
TRVELFSALGKSHLLTAAEPSSSKSNPPWVRDFIGCRFDDSKASTVIDVINPATSVVVSQVPLCTGEE

SEQ ID NO: 201583 - protein, 51 aa, Glycine max
  Clone ID: PAT_MRT3847_24055C.1.pep
KKKKKKKNKIKKKKKKKKGRKKKKKKKKKKKKKKKKKKKKKKKKKKRGGPF

SEQ ID NO: 201584 - protein, 72 aa, Glycine max
  Clone ID: PAT_MRT3847_24056C.1.pep
QPHLNIGSCKGDMLLPSDLKGSHYHYCHILISFGDHCLPACDLRLTTSKCLIPIAMESVKFQDVLERKQPKT

SEQ ID NO: 201585 - protein, 77 aa, Glycine max
  Clone ID: PAT_MRT3847_24057C.1.pep
QGGFRFIRNLYHKPKKHPPKRAILDNFVKKKKGLYSWAHYCKYIMNWHCFFWNKNAKKKKKPFRVYVTPKRGPKMSV

SEQ ID NO: 201586 - protein, 59 aa, Glycine max
  Clone ID: PAT_MRT3847_24058C.1.pep
QATLMYWLTVLPQNTRVLLKLLDSHIFLKSPASLCVFLNLFSWKTPTYDNKSLYHRAFL

SEQ ID NO: 201587 - protein, 72 aa, Glycine max
  Clone ID: PAT_MRT3847_24059C.1.pep
KEVMCLENELCSELAYLEQKKKELEEQINAVKFNIFASQAARNMASQKKKKIFGEAKILKAQKNGLKEQMPH

SEQ ID NO: 201588 - protein, 920 aa, Glycine max
  unsure (1)..(920): unsure at all Xaa locations
  Clone ID: PAT_MRT3847_2405C.1.pep
ARGKQSRASFPKKSTWRATQVLQLIHADICWCFQGLNTLYQQSMVYGLPTMKTPTKLCQDFLVGKQSRASFPKKSTWRATQVLQLIHADICGPITPISNSKKRYLLTFIDDFSRKTWIYFLTEKSEALPVFKKFKILVEKEADSLIRSLRTDRGGXEFTSHDFTNFCCDNGIRRQLTAAYTPQQNGIAERKNRTIMNMVRSMLSEKKMPKTFWAEAATWSVHILNRSPTLAVINKTPEEAWSGVKPSVKYFRVFGCISHVHVPDAKRTKLDDKSLCCVLLGVSEVSKAYKLYDPISQKIIISRDVVFDEDKSWDWDKQYEETILCDLDWGDKDVEAVVEEEHEVRHNTDTPKEDIIISSDSMAEVNTSSPVQRRCRRPPLWMEDYETGEGLSEGSTEANLAMSATGESDPTHFDAAVQIAKWRKAMDEEMEAINKNGTWELMELPDGAKKVGVKWIYKTKFKENGEVDKYKARLVVKGYAQEYGVGYTEVFALVARMETIRLVVALAAQKGWPIYQLDVKSAFLHGELDETVYVDQPCGYEQKGEEHKVYKLKKALYGLKQAPRAWYSHIEAYFLKEGFEKXYEHTLFVKREKEDMILIVSLYVDDLIFTGNDELMFAKFKSSMKHEFDMTDLGNMRYFLGLEVMQRIDGIFLCQKKYALEMLQRFGMDKSNSVQTPIVPGVKLTKDDTGVKVDKTYYKQIVGSLMYLTSTRPDMMFVVNLISRYMENPTELHLLAAKRVLRYLKGTTEFGIFYKKGGNKELLAYTDNDYAGDLDDRKSTSGYVFLLCSAAVSWSSKKQPIVSLSTTEAEFIGAASCACQAIWLKRVLGKLCKMQDQATVIRCDSSSAIKLSKNPVMHGRCKHIDVRLHFLRDLTKAGTIKMMHCGTQEQVADIMTKPLKLDTFLKLRRSLGMCSESDIN

SEQ ID NO: 201589 - protein, 51 aa, Glycine max
  Clone ID: PAT_MRT3847_24060C.1.pep
FITIQDLFHLPFEATDPFNNEGCHWLLFLGDYHLTHGINPNYWVTFKRTQP

SEQ ID NO: 201590 - protein, 76 aa, Glycine max
  Clone ID: PAT_MRT3847_24061C.1.pep
PRRSSSSCVLLILEFHPPKIKKIWLTFRYCLTSFEKFGWWGSGTLSLAVFLSLCLRAFFVQRCIVHILLRGSSTSR

SEQ ID NO: 201591 - protein, 82 aa, Glycine max
  Clone ID: PAT_MRT3847_24062C.1.pep
KKRPRGDWEFGYREMAEALEKFGEIYERVEGAKQRQMVELEKQRMQFAKDLETQRMKLFMETQVHLQKINRSKRSSASDSVS

SEQ ID NO: 201592 - protein, 58 aa, Glycine max
  Clone ID: PAT_MRT3847_24063C.1.pep
RGKEGVKVRGLHDKLTREVCCVKKCYARSQLPKQPNRVLRKNSFKTPLPTRPSVQRKK

SEQ ID NO: 201593 - protein, 63 aa, Glycine max
  unsure (1)..(63): unsure at all Xaa locations
  Clone ID: PAT_MRT3847_24064C.1.pep
MHQASRIQRLPRSVNTVFKPPDYNPGAPVFRDXPAGYKPTYKKAPYTKPPYGKIPAAEDNTPA

SEQ ID NO: 201594 - protein, 79 aa, Glycine max
  unsure (1)..(79): unsure at all Xaa locations
  Clone ID: PAT_MRT3847_24065C.1.pep
LKRNFKQMSNVLWVAPEDKASLXSQLHYSSCNNLEMQEAYLGNFLKGVRELVLPKPKETPPLRKKPPSPLNGPQKLMGP

SEQ ID NO: 201595 - protein, 41 aa, Glycine max
  Clone ID: PAT_MRT3847_24066C.1.pep
VIALIQNSMPFWDCYSTFHMGDIIYKQTKNVSYKLLDKLND

SEQ ID NO: 201596 - protein, 60 aa, Glycine max
  Clone ID: PAT_MRT3847_24067C.1.pep
PRADVETAEAVANQYNCPFLEASAKTAENVTESIELLLLEIAKAGVTSDSGVMKRPAKKG

SEQ ID NO: 201597 - protein, 157 aa, Glycine max
  Clone ID: PAT_MRT3847_24068C.1.pep
KLTEETLTEKRQLQQLLSICAAERTTEETAMNETSSRSHQILRLTVESNPRDYADTARSGALFASVNFVDLAGSERASQAMSAGTRLREGSHINRSLLSLGTVIRKLSKGRNEHIPYRDSKLTRILQNSLGGNARTAIICTISPARGQSEQSRNTLL

SEQ ID NO: 201598 - protein, 125 aa, Glycine max
  unsure (1)..(125): unsure at all Xaa locations
  Clone ID: PAT_MRT3847_24069C.1.pep
NVFGHPISKPVWANLSDFDIIDRFLRICRNFSHYYNGSXKKKSLYQIRYILRLSCIKTLARKHKSTARTFLKRLGSEKLLEEFFTEEEETFSLIFPRTSFTLQRLYIGRIWYLDILVRNDFVNHF

SEQ ID NO: 201599 - protein, 62 aa, Glycine max
  Clone ID: PAT_MRT3847_2406C.1.pep
TIYTHGSGLITCRMRTISRHYNYHMRGLSHTLNKRYFFDARTFKCCCTAHSCIDSFLDRGYN

SEQ ID NO: 201600 - protein, 244 aa, Glycine max
  unsure (1)..(244): unsure at all Xaa locations
  Clone ID: PAT_MRT3847_24070C.1.pep
PASGNLCERLVSLRLHGNSLSGLVSEPALPNSSCKNLQVLDLGGNKFSGSFPEFITKFGGLKQLDLGNNMFMGAIPQGLAGLSLEKLNLSHNNFSGVLPLFGGESKFGVDAFEGNSPSLCGPPLGSCARTSTLSSGAVAGIVISLMTGAVVLASLLIGYMQNKKKKGSGESEDELNDEEEDDEENXGNAIGGAGEGKLMLFAGGENLXLDDVXNATXQVLEKTCYGTAYKAKLADGGTIALRLL

SEQ ID NO: 201601 - protein, 75 aa, Glycine max
  Clone ID: PAT_MRT3847_24071C.1.pep
FLGKRQLVKTACDVIILSICIPRFLQFPRSIIMDIEFNLCCFIDIDTRSNSCECKLGFCRTTASKSLTWSGFEDI

SEQ ID NO: 201602 - protein, 57 aa, Glycine max
  Clone ID: PAT_MRT3847_24072C.1.pep
STHSSGWRGHERVHQHPAMSILLLAIYDKQVAVTIETVGHLLARKTGVVKRALITDN

SEQ ID NO: 201603 - protein, 517 aa, Glycine max
  unsure (1)..(517): unsure at all Xaa locations
  Clone ID: PAT_MRT3847_24073C.1.pep
MANQDFGRALAVINPQELGYDPNXVPDSVKSFVXHLYRHXSVKKNVYEIHQMYESSFQTLSERLFKDTPWPSVDAVAHYVDNDHVFCLLYREMWFRHLYARLTPTLRQRIDSWDNYCSLFQVVLHGVVNMQLPNQWLWDMVDEFVYQFQSFCQYSAKMKNKTEQEIALLRQFDQAWNVFGVLNFLQALVEKSAIIQILEQEKEGLEQFTATDGYDYNGGSNVLKVLGYFSMVGLLRVHCLLGDYHTGLKCFSSRFGSRQGVYTSVIGSHITTIYHYGFANLMLRRYVEAIREFNKILLYIFKTKQYHQKSPQYEQILKKNEQMYALLAISLSLCPQSRLVDETVNSQLREKYGEKMVRMQRYDDEAFAIYDELFSYACPKFITPSAPSFEEPLVNYNQDAYRLQLKLFLYEAKQQQLLSGVRTFLKVYSTISLTKLASYMEVDEPTLRTILMTYKHKTHAVDSDGKITSNADLDFYIDDDTIHVMESKPAKRYGDYFLRQIVKLEGVINEMDGIKLE

SEQ ID NO: 201604 - protein, 105 aa, Glycine max
  Clone ID: PAT_MRT3847_24074C.1.pep
VDLKNYSTYPELSSALEKMFSCFTISKCGSHGILGREMLNETKLKDLLHGSEYVLTYEDKDGDWMLVGDVPWEMFIETCKRLRIMKSSDAIGLAPRAVEKSKSRT

SEQ ID NO: 201605 - protein, 42 aa, Glycine max
  unsure (1)..(42): unsure at all Xaa locations
  Clone ID: PAT_MRT3847_24075C.1.pep
PPXPSFWGYVSRGQGLSLLILNQPTNHRVLLNTINQTGLNHY

SEQ ID NO: 201606 - protein, 150 aa, Glycine max
  Clone ID: PAT_MRT3847_24076C.1.pep
QETASAVASEACDVFGVIRCEQPNRNIYEFPANMEFNGLKFFLSQSNIVLGGCQLKNPDWIIGVVVYAGQETKAMFNSAAFPSKRSRLETFMNRETLWLSIFFFIMCLVVAIGMCLWLVRPKNQLDTLPFYRKKYFPNGPDNGKKYKFFG

SEQ ID NO: 201607 - protein, 110 aa, Glycine max
  Clone ID: PAT_MRT3847_24077C.1.pep
MEGDDGDGNSVASGFTNAVEEEEEEEEEDAGEEALRYLEWEILLAVNNSERNVNGVLEHEGNAVGGADFLTIQDGYVYAAEYDVSFGQFLENESALKGSPPAAKSVVESL

SEQ ID NO: 201608 - protein, 170 aa, Glycine max
  Clone ID: PAT_MRT3847_24078C.1.pep
IDGSANNNNSAPATKAHVVGWAAIRSFRKNSLATTSKNNEVVDGKKGVGALFVKVSMDGAPYLRKVDLKNYSTYPELSSALEKMFSCFTISKCGSHGILGREMLNETKLKDLLHGSEYVLTYEDKDGDWMLVGDVPWEMFIETCKRLRIMKSSDAIGLAPRAVEKSKSRT

SEQ ID NO: 201609 - protein, 69 aa, Glycine max
  Clone ID: PAT_MRT3847_24079C.1.pep
GYPETVPGRHRQVWGPSAGGYGGGSNGSTDQPIVYLQLPRTGLIGSIKPSVVVREKRSLVLRWLLCLQS

SEQ ID NO: 201610 - protein, 49 aa, Glycine max
  Clone ID: PAT_MRT3847_2407C.1.pep
AFTMAMMRLDSTHYFDISNIKLIIDVDIITFLANKYKNKTACTEGILYT

SEQ ID NO: 201611 - protein, 50 aa, Glycine max
  Clone ID: PAT_MRT3847_24080C.1.pep
VRSRHSFHLLRSSFAADDHHNAPSPSPDLTAHNEPTNLRHCRTKSTDFNL

SEQ ID NO: 201612 - protein, 38 aa, Glycine max
  Clone ID: PAT_MRT3847_24081C.1.pep
KKIKKKKKKKKKKKKKKKKKKKKKKKKKKKKNKKKIKN

SEQ ID NO: 201613 - protein, 49 aa, Glycine max
  Clone ID: PAT_MRT3847_24082C.1.pep
GSSANIPFHSHRRAHPNTAMSRDGYHCQITLNDVRDELVGKVQNATTWL

SEQ ID NO: 201614 - protein, 86 aa, Glycine max
  Clone ID: PAT_MRT3847_24083C.1.pep
RRENTSERRLHFLSPTRPPTFTKALLTTLLLFIPTPIPYRSSFILHIHQQPHSALTTLALPNIQTILNQTRAISNTKDLQDNSILK

SEQ ID NO: 201615 - protein, 267 aa, Glycine max
  unsure (1)..(267): unsure at all Xaa locations
  Clone ID: PAT_MRT3847_24084C.1.pep
MVSQRQRLARKRYKAEHPELFPKPEPTPPKDPEKKKKKKKNSAFKRKRPEPKPGSRKRHPLRVPGMKPGESCFICKAMDHIAKLCPEKAEWEKNKICLRCRRRGHRAKNCPXEVLDGAKDAMYCYNCGENGHSLTQCPHPLQEGGTKFAECFVCNQRGHLSKNCPQNTHGIYPKGGCCKICGGVTHLAKDCPDKGKSGSVAANRPADGWMRIEERPMGQVTKFVSGDDIEDDFMTDDIHSADKKKPAKSTEDHVKPKKKEGPKVVNF

SEQ ID NO: 201616 - protein, 364 aa, Glycine max
  Clone ID: PAT_MRT3847_24085C.1.pep
WRSDPATAYNLQSIRPAFSAIRHFSSAAKEITVRDALNSALDEEMSADPKVFLMGEEVGEYQGAYKISKGLLDKYGPERVLDTPITEAGFAGIGVGAAYYGLRPVVEFMTFNFSMQAIDHIINSAAKSNYMSAGQISVPIVFRGPNGAAAGVGAQHSQCYASLYGSCPGLKVLSPYSSEDARGLLKAAIRDPDPVVFLENELLYGESFPVSAEVLDSSFCLPIGKAKIEREGKDVTITAYSKMVGYALKAAETLAKEGISAEVINLRSIRPLDRSTINASVRKTNRLVTVEEGFPQHGVGAEICTSVIEESFGYLDAPVERIAGADVPMPYAANLERMAVPQVEDIVRAAKRACYRSVPLAASA

SEQ ID NO: 201617 - protein, 360 aa, Glycine max
  Clone ID: PAT_MRT3847_24086C.1.pep
MLGVIRHKSIRHAFSAIRHLSSAAKEITVREALNSALDEEMSADPKVFLMGEEVGEYQGAYKISKGLLEKFGPERVLDTPITEAGFAGIGVGAAYYGLRPVVEFMTFNFSMQAIDHIINSAAKSNYMSAGQISVPIVFRGPNGAAAGVGAQHSQCYASWYGSCPGLKVLSPYSSEDARGLLKAAIRDPDPVVFLENELLYGESFPVSAEVLDSSFCLPIGKAKIEREGKDVTITAYSKMVGYALKAAETLAKEGISAEVINLRSIRPLDRSTINTSVRKTNRLVTVEEGFPQHGVGAEICTSVIEESFGYLDAPVERIAGADVPMPYAANLERMAVPQVEDIVRAAKRTCYRSVPLAASA

SEQ ID NO: 201618 - protein, 360 aa, Glycine max
  Clone ID: PAT_MRT3847_24087C.1.pep
MLGVIRHKSIRPAFSAIRHLSSAAKEITVRDALNSALDEEMSADPKVFLMGEEVGEYQGAYKISKGLLDKYGPERVLDTPITEAGFTGIGVGAAYYGLRPVVEFMTFNFSMQAIDHIINSAAKSNYMSAGQISVPIVFRGPNGAAAGVGAQHSQCYASLYGSCPGLKVLSPYSSEDARGLLKAAIRDPDPVVFLENELLYGESFPVSAEVLDSSFCLPIGKAKIEREGKDVTITAYSKMVGYALKAAETLAKEGISAEVINLRSIRPLDRSTINASVRKTNRLVTVEEGFPQHGVGAEICTSVIEESFGYLDAPVERIAGADVPMPYAANLERMAVPQVEDIVRAAKRACYRSVPLAASA

SEQ ID NO: 201619 - protein, 359 aa, Glycine max
  Clone ID: PAT_MRT3847_24088C.1.pep
FILFYLQSIRPAFSAIRHLSSAAKEITVREALNSALDEEMSADPKVFLMGEEVGEYQGAYKISKGLLDKYGPERVLDTPITEAGFTGIGVGAAYYGLRPVVEFMTFNFSMQAIDHIINSAAKSNYMSAGQISVPIVFRGPNGAAAGVGAQHSQCYASWYGSCPGLKVLSPYSSEDARGLLKAAIRDPDPVVFLENELLYGESFPVSAEVLDSSFCLPIGKAKIEREGKDVTITAYSKMVGFALKAAETLAKEGISAEVINLRSIRPLDRSTINTSVRKTNRLVTVEEGFPQHGVGAEICTSVIEESFGYLDAPVERIAGADVPMPYAANLERMAVPQVEDIVRAAKRACYRSVPLAASA

SEQ ID NO: 201620 - protein, 267 aa, Glycine max
  Clone ID: PAT_MRT3847_24089C.1.pep
MGKGAGCLHSKKKPPPVADDAPAPTVAAAAPTPPPISPPDNAHAREPDAPAREAASSSSSLPGGAKLKVFIVFYSMYGHVEGLAKRLKKGVDGVEGVEGVLYRVPETLPIEVLNQMRAPPKDDAIPEITAAELTAADGVLFGFPTRYGSMAAQMKAFFDSTGHLWKEQKLAGKPAGFFVSTGTQGGGQETTAWTAITQLVHHGMLFVPVGYTFGPGMFKLDDIRGGTPYGAGVFAGDGTREPSETEMALAEHQGKYMAIVVKKLAQS

SEQ ID NO: 201621 - protein, 104 aa, Glycine max
  Clone ID: PAT_MRT3847_2408C.1.pep
PQPFSGTGRSPLLRALRRGQKRLGPPWQGVPGTVLPARFFEPKKGGPQGFGPPNNLFSQPVDSHNNWVHLFVAPPFFPRISNILPCGVPFYLDCKCPAQLFSLG

SEQ ID NO: 201622 - protein, 171 aa, Glycine max
  Clone ID: PAT_MRT3847_24090C.1.pep
MGKGGGCVPSKKKPPPVADDAPAPTPPPISPPDNAHARKPDAPAQVAREAASSSSSLPGGARLKVFVVFYSMYGHVEGLAKRLKKGVDGVEGVEGVLYRVPETLPIEVLNQMRAPPKDDAIPEITAAELTAADGVLFGFPTRYGSMAAQMKAFFDSTGHLWKEQKLAGKPA

SEQ ID NO: 201623 - protein, 48 aa, Glycine max
  Clone ID: PAT_MRT3847_24091C.1.pep
MEDIRGGTPYGAGVFAGDGTREPSETEMALAEHQGKYMPVVVKKLAQS

SEQ ID NO: 201624 - protein, 289 aa, Glycine max
  Clone ID: PAT_MRT3847_24092C.1.pep
ARNSARAQLSAPLVKSPQQQLTERIFLQTIQFLKDDIEDAHTQVSIIQDVYKCFFEDIVSEFRCSTEELHMENSFMQEIYEVIFKEASHSAQASSGLGIEEAEMESTILQGQLDINHIIFKETLVNAGEALKFESAEKETLKYEMLMLNSVVEEKEKLIQGAADALVLEKQKTESAAEQLNSLRAEIVQQHKLIAENSKELNVTKGNLVAALKEIEQYKEQVQELHQNLEQRMNKLKETDEEKKVLCTLTQKQQETLKLIEEIERESRKQMESTINLIYKLLAMVTDFE

SEQ ID NO: 201625 - protein, 42 aa, Glycine max
  Clone ID: PAT_MRT3847_24093C.1.pep
VGGGHCEGVGGAKVHTLLSKKVNLHCRHGSTWVKGAHVSVTD

SEQ ID NO: 201626 - protein, 59 aa, Glycine max
  Clone ID: PAT_MRT3847_24094C.1.pep
IRNRESNLISLVVNGLTLNVVYCDQAYTMFVVRMHTDCKGLANALNTASCTHRYHRIQQ

SEQ ID NO: 201627 - protein, 40 aa, Glycine max
  Clone ID: PAT_MRT3847_24095C.1.pep
SSVPYGLCGLIHRWYHRGIRVLRSNMHKLSSCKLATSPLS

SEQ ID NO: 201628 - protein, 46 aa, Glycine max
  Clone ID: PAT_MRT3847_24096C.1.pep
SPAADKNLPTRINHSLKSDGKTGRPAGFYMLINGLTLTKGDFFFFP

SEQ ID NO: 201629 - protein, 72 aa, Glycine max
  Clone ID: PAT_MRT3847_24097C.1.pep
RILKDYNLCLQCKKAVPLAFHSSLEILSLQPFLGSTFLRLLANSWEGHETCTSRKAVIDQSSSGSSDNSTHS

SEQ ID NO: 201630 - protein, 254 aa, Glycine max
  Clone ID: PAT_MRT3847_24098C.1.pep
MLQKQLPPPIEASSDEEQRPSSKQHTEEGVSSSEEASSQEEDDDDQPPTLPLASANPHPKPSSSDSDTDFEPTKVKPKPTDQAQKPQPSPAPPKWGSKRPAQNNAPATDPKRAKKKLTNSSSAAAAHETEEKSGGGQAKLSQRLFSKEDELAILKGMAEFISKTGQDPYKYADAFQNFVKNSLCVEASSNQIKEKIRRLKKKFETKAQRAKKWEDPEFSKFHDRTVFELSKKVWGEGANGLVEKPKPIMEKENC

SEQ ID NO: 201631 - protein, 178 aa, Glycine max
  unsure (1)..(178): unsure at all Xaa locations
  Clone ID: PAT_MRT3847_24099C.1.pep
GTASFMGFLFPFLAGKGRKLGPLTPKMGKVNIKKNVTKPGFLRNPMDRPKPVKYLGPFFCEPPAYLTGEFPSQYRWDPGGLFAKPETFAQNRELQVIHFKWALLRTLGCLFPEMLCRNRVKFGKTVLVKGRFXNFNEGGLXFLGNPNLIHAQSILCICAXQGILMGAVERYPYLDGPR

SEQ ID NO: 201632 - protein, 40 aa, Glycine max
  Clone ID: PAT_MRT3847_2409C.1.pep
CSQDHPTSNGHEMTSQTSFSNLSSIGHGHRYSHSLFTPLA

SEQ ID NO: 201633 - protein, 97 aa, Glycine max
  unsure (1)..(97): unsure at all Xaa locations
  Clone ID: PAT_MRT3847_240C.1.pep
CGFYGRIFALYVQTRGDFIVAGDLMESISLLMYKHEXGANEDIVPXFQKNWMSPVKKAGESQYVASXSRFDLFTDRKNSEGATNEKKGSLKKVAFPF

SEQ ID NO: 201634 - protein, 47 aa, Glycine max
  Clone ID: PAT_MRT3847_24100C.1.pep
NYGWISFKIMVGTSKPVCTMNFPQSWGELHNYQGFMIDFDSPYRALD

SEQ ID NO: 201635 - protein, 185 aa, Glycine max
  Clone ID: PAT_MRT3847_24101C.1.pep
GPRSTHASAFGVLPASSMSALKQPTIRVVAIIAEGVPESDTKQLISYARANNKVIIGPATVGGIQAGAFKIGDTAGTIDNIIQCMLYRPGSVDFVSKSGGMSNEMYNTIARVTDGIYEGIAIGGDVFPVSTLSDHMLRVNNIPQVKMMDVLGELGGKDEYSLVEALKQGKVQKPVVAWVSGTCAR

SEQ ID NO: 201636 - protein, 48 aa, Glycine max
  Clone ID: PAT_MRT3847_24102C.1.pep
PNFKLAIVRYGVTGQTSLVNRHLTGELDIKYEPIIGVEVHPLAFFTNC

SEQ ID NO: 201637 - protein, 172 aa, Glycine max
  Clone ID: PAT_MRT3847_24103C.1.pep
LLFFTWSWCFEIIMLRKRNRSVQKDQHLMCEVNSEHYSQSHHALGRNNIKGHSIFNVPCLFVGLGPKGLLDSDSVRSPTSPLDDARVLSNLGKNPVRKPRSSHHERSWDCCKVGLGIVESLEDCSSSRFSGKILQSPESKRVSLSPQMMMIKAPNCQIHRDSSLEGSKSLPK

SEQ ID NO: 201638 - protein, 75 aa, Glycine max
  unsure (1)..(75): unsure at all Xaa locations
  Clone ID: PAT_MRT3847_24104C.1.pep
ASYTPVRLSPKYRDRMSXTPLIHPTHSPIQSNKPILHVSTNLYHLPLYLKILLPLSLMLSNFPTYTMSTSHSPPS

SEQ ID NO: 201639 - protein, 167 aa, Glycine max
  Clone ID: PAT_MRT3847_24105C.1.pep
HREKTGCFEIIMLRKRNRSVQKDQHHMCEANSEHYSQSHHALVGRNNIKGHSIFNVPCLFVGLGPKGLLDSDSVRSPTSPLDARVLSNLGNPVRKPRSSPHEKRWDCCKVGLGIVESLEDCSRFSGKILQSPESKRVSLRPQMMIKAPNCQIHRDSFEGSKSLPKDF

SEQ ID NO: 201640 - protein, 348 aa, Glycine max
  Clone ID: PAT_MRT3847_24106C.1.pep
MVKQVSRACPAPPPRWTAPRAALCKSFSLAEEMEKAEKDRREKKEKKREKKERKREKKEKKERRKAEKERKLKEGASASPGTDDGKKFKLINELKETKADGKLQKGEDSENEQHERSGITEELDLPVTSVEPCCLSDCTQSSKRKRSSPESTHDHGSAIKIRLPLRKHREPEELKSKSKFQAGCSSGSVGATANSFTKTTLGSDRQSQCLRITELNRVLGNSDSRHGKAMQNSVHGDVVVTKNTIGSNRQSQCHRTTEPKHVIGNSGKVMQNSVHGDAAVIKNTIGSDRQSQCLRTTEPKRVLGNSGKVMQNSVHGDAAVIKNSIGSDCQSACLSSWRCYGVLGSPGK

SEQ ID NO: 201641 - protein, 114 aa, Glycine max
  Clone ID: PAT_MRT3847_24107C.1.pep
FEKLVVCVFVLFRCFEIIMLRKRNRSVQKDQHLMCEVNSEHYSQSHHALGRNNIKGHSIFNVPCLFVGLGPKGLLDSDSVRSPTSPLDDARVLSNLSKNPVRKPRSSHHERIWD

SEQ ID NO: 201642 - protein, 65 aa, Glycine max
  Clone ID: PAT_MRT3847_24108C.1.pep
KCYSGALKLREEMEKAEKDRREKKEKKREKKERKREKKEKKERRKAEKERKLKEGASAFPGTDDG

SEQ ID NO: 201643 - protein, 503 aa, Glycine max
  unsure (1)..(503): unsure at all Xaa locations
  Clone ID: PAT_MRT3847_24109C.1.pep
MVSPHLILYITLPMLLLFFFQYRRAFKNSTLPPGPRGLPIIGNLHQLNSSSLYLQLWQLSKKYGPLFSLQLGLRPAIVVSSHKLAREALKDNDLEFSGRPKLLGQQKLSYNGLEMIFSPYGEFWREIRKICVVHVLSSRRVSRFSSIRNFEVKQMIKRISLHASSSKVTNLNEVLMSLTSTIICRIAFGRSYEDEETERSKFHGMLNECQAMWGTLFISDYIPFLGWIDKLRGLHARLERNFKELDEFYQEVIDEHMNPNRKTTKNEDITDVLLQLKKQRLYSIDLTNDHIKAVLMDMLVAATDNTCSHNKVWXMTALLKNPRVMKKVQEEIRTLGGKKDFLDEDDIQKFPYFKAVIKETLRLYLPAPLLAQRETNEACIIDGYEIPAKTIVYVNAWAIHRDPKAWKDPDEFLPERFLDNTIDFRGQDFELIPFGAGRRICPGMPMAIASLDLILANLLNSFDWELPAGMTKEDIDTEMLPGLTQHKKNPLHVLAKSRIQNYD

SEQ ID NO: 201644 - protein, 564 aa, Glycine max
  unsure (1)..(564): unsure at all Xaa locations
  Clone ID: PAT_MRT3847_2410C.1.pep
LAYKRVPVHDVSLLMLFLVCTGESVPVDCEVFQGSATITIEHLTGEVKPLEAKVGDRIPGGSRNLDGRIIVEVMKTWKESTLSRIVQLTEEAQSNKPKLERWLDEFGERYIDYVEVLSIAICXISPFLFKYXIRQYIGLALTSLQMPSLPAVRGFLPLWLTXLAYAIATCLSVSIAVRALNEPSWSWKHDIFHLISEIKSRLLSLKTNITGSNSIITTKFAFIPYCIPNCEKESLAVAAAMEKGTTHPIGRAVVDHSEGKDLPSISVESFEYFPGRGLTATVNSIESGTGGAKLLKASLGSIDFITSFCQSEVESEKIKEAVNTSSYGSEYVHAALSVNQKVTLIHLEDRPRPGVSNVIQELQDEAKFRVMMLTGDHESSARRVASAVGINEFHCNLKPEDKLSHVKDISRDMGGGLIMVGEGINDAPALAAATVGIVLAHRASATAIAVADVLLLRESISAVPFCIAKSRQTTSLIKQNVALALTSILMASLPSVLGFLPLWLTVLLHEGGTLLVCLNSVRALNEPSWSWKHDISHLISEIKSRLLSLKTNITGSNSIMTANL

SEQ ID NO: 201645 - protein, 77 aa, Glycine max
  Clone ID: PAT_MRT3847_24110C.1.pep
PPKTSHPGGPPPRPTFLGDPTKKPPEPEKNLEKKQRAKILSLPQKRGNNPSNSFLGDPPKKAPESEKNLAKKQGAII

SEQ ID NO: 201646 - protein, 59 aa, Glycine max
  Clone ID: PAT_MRT3847_24111C.1.pep
FFSLLENTTPRLPPTPWGVPGSSTKTHNTRFPLILILLHGKSLRLSLPSFSPSYSVHVL

SEQ ID NO: 201647 - protein, 75 aa, Glycine max
  Clone ID: PAT_MRT3847_24112C.1.pep
INNHPGVLFMLQVIHFFQEKNVKNAFSSSYQRRGNDSITTRLGLSRPAANSVSDNILKKMNILFIYILQQLHFPT

SEQ ID NO: 201648 - protein, 47 aa, Glycine max
  Clone ID: PAT_MRT3847_24113C.1.pep
SNNTPSIFIQPNIYPISKLTTLFITNNSYKYKLFPQYSITNTSKNLI

SEQ ID NO: 201649 - protein, 121 aa, Glycine max
  unsure (1)..(121): unsure at all Xaa locations
  Clone ID: PAT_MRT3847_24114C.1.pep
TKDVCRDQCAIRCGLSLTEVGNSFFNERLIRSTYEQXCARLQARSMCLHSHKSFGCLGGDGDHTLISGHEYVRPYFSANKWERSLSCQXITITGCLDKTSTTLQTRKLADCDFLKRNFKQM

SEQ ID NO: 201650 - protein, 96 aa, Glycine max
  Clone ID: PAT_MRT3847_24115C.1.pep
MDTADQRKGKYAPTRDTENPLLGKFDKPLPCFGCGIGWFSLLLGFVCPPMWYYATILYFGNYYHKDPRERAGLAASAIAALVFTIAAVVTVAVIFL

SEQ ID NO: 201651 - protein, 342 aa, Glycine max
  Clone ID: PAT_MRT3847_24116C.1.pep
MAVSLTQGAITEICRGNCSESLQPVLQVIELKQVQSQQNSTVERYCVVLSDGSFYQQGMLATQKNDLVHSGKLQKGSVLRLTQFLCNVVQNHKIIIIIDLDVILDYCELIGQPVSTPKHTPKEPGVNFGNSQSLNSSSHAGGMNARPNVSGSSIYYPKANPPARNDPPAYPKAKTLTQGAIMEICSGNDPKNLQPVLQVIEFKLVQSQQNSTIERYRVVLSDGSFYQQGMLATQKNELIYSGRLQQGAIIRLTQFICNVVQNRKIIIIVDLDVICEKCELIGEPVAAPKGAPAESATGQSGFTFGNLQYLDRSSHSGGMTTIQNLAGQSLDLKPVLQVLELE

SEQ ID NO: 201652 - protein, 143 aa, Glycine max
  Clone ID: PAT_MRT3847_24117C.1.pep
MSGEEGVIAVEPAAAAAAIPGEPMDIMTALQLVLRKSLAYGGLSRGLHEGAKVIEKHAAQLCVLAEDCDQPDYVKLVKALCAEHNVSLLTVPSAKTLGEWAGLCKIDSEGKARKVTGCSCVVVKDFGEEHEAYNVVLQHVKSQ

SEQ ID NO: 201653 - protein, 51 aa, Glycine max
  Clone ID: PAT_MRT3847_24118C.1.pep
ARGNLEIGNAHVAIHTQRHEKTFIERQRHENCTDWRKRSTTKLLMSRGRCA

SEQ ID NO: 201654 - protein, 143 aa, Glycine max
  Clone ID: PAT_MRT3847_24119C.1.pep
MIVFLSEEVVVAAEPAAAIPGEPMDIMTALQLVLRKSLAYGGLARGLHEGAKVIEKHAAQLCVLAEDCDQPDYVKLVKALCAEHNVSLLTVSSAKTLGEWAGLCKIDSEGKARKVTGCSCVVVKDFGEEHEAYNVVLQHVKSQ

SEQ ID NO: 201655 - protein, 214 aa, Glycine max
  unsure (1)..(214): unsure at all Xaa locations
  Clone ID: PAT_MRT3847_2411C.1.pep
DLASGNFKVVSGRTDNAVKNRFSTLCKKRAKYEALANENNTSYINSNNKRIFLQHGCDTDVASESASGKMRRSHISDATEKINFGDRSHKQNGILLNQQSRAPFAVLAQNSHNVNLPDQHRVCNLKFSDYAQNNKIQGTFLKKDDPRINTLMXXXELLSSLALKVGAENMDQSLENAWKVLQEFLXRTKELDIPGCKIPDLQLVDLKDLLAGLK

SEQ ID NO: 201656 - protein, 28 aa, Glycine max
  Clone ID: PAT_MRT3847_24120C.1.pep
RSPDLRAELYNELHVDDWQQHDSVRVGV

SEQ ID NO: 201657 - protein, 405 aa, Glycine max
  Clone ID: PAT_MRT3847_24121C.1.pep
MEQQHQQRTLSGSSQSPRSPSSSSQPFLSVSVTDPVKLGNGVQAYISYRVITKTNFPEYQGPEKIVIRRYSDFVWLRDRLFEKYKGIFIPPLPEKSAVEKFRFSAEFIEMRRQALDVFVNRIASHHELKQSEDLRLFLQAEEETMERLRSHETGIFKKKPADLMQIFKDVQSKVSDVVLGKEKPVEESDPEYEKMKHYIFELENHLAEAQKHAYRLVKRHRELGQSLSDFGKAVKLLGASEGNALGKAFSELGMKSEILSAKLQKEAHQLLMNFEEPLKDYVHAVQSIKATIAERANAFRRQCELAETMKLKEINLDKLMLIRSDKVAEAEHEYKELKAESEQATKTFETIVKLMNEEMGRFQEQKTLDMGIAFHEFAKGQARLANGIADAWRSLLPKLEACSSS

SEQ ID NO: 201658 - protein, 56 aa, Glycine max
  Clone ID: PAT_MRT3847_24122C.1.pep
NVIKEDFVILNDILLFLSINWIHQASYLPPSFLFILKLSFLIQSRHKVQFIRMFSR

SEQ ID NO: 201659 - protein, 53 aa, Glycine max
  Clone ID: PAT_MRT3847_24123C.1.pep
CLDMRWPTRCATFRLSCDPATLTSGPAMAHYAISIPVCWPVIFIITRFGVGVL

SEQ ID NO: 201660 - protein, 39 aa, Glycine max
  Clone ID: PAT_MRT3847_24124C.1.pep
GSLGTKLQSFLFPVLRSANPRPWWVQKSTEWVGPASKAG

SEQ ID NO: 201661 - protein, 110 aa, Glycine max
  Clone ID: PAT_MRT3847_24125C.1.pep
MILDSPPPPSLCTWDSAQGFSVFIFTKVPPRNQQPASVSFGSPSLGPLGLGVLPYWEQRGSVTRLSRTPLCGFQEEPPFLWVSLSLINIFKSNKFLLTTCNLVIFYTCSL

SEQ ID NO: 201662 - protein, 158 aa, Glycine max
  unsure (1)..(158): unsure at all Xaa locations
  Clone ID: PAT_MRT3847_24126C.1.pep
GLPGPLYNCSAKDTFKLKVKPGKTYLLRLINAALNDELFFSIANHTLTVVDVDAIYVKPFDTDTILISPGQTSNVLLKTKSHYPNATFLMSARPYATGQGTFDNSTVAAILEYEVSPHALHSTTSIKKLSLFKPILPALNDTSFATNFXNKLRTFTRA

SEQ ID NO: 201663 - protein, 90 aa, Glycine max
  Clone ID: PAT_MRT3847_24127C.1.pep
YTLKTARWHPVLRNPHSAMSKYRFWPITAWPAWPMRASAPGTIRVVSDRRNGYACANEFGMMLVITPDSYGFPSERQDQALLYISWRTHP

SEQ ID NO: 201664 - protein, 267 aa, Glycine max
  Clone ID: PAT_MRT3847_24128C.1.pep
MNCLCEKDSGLFSSHSTAPYVLGCPSWATSEFEVQRSSMSRSLSSKVDVLPQQCHNSKTFNFQFQEQDASSTKSTDQSYPEVGQISVQHSSTDSTLIRNEGKSMGCVIRSFMGSQDFPFPPPLLDHRPILPVETAPVRIPLQLDFAEEPIYVNSKQYHAILRRRQYRAKLEALNKPIKDRKPYLHESRHQHALKRARGAGGRFLNTKKQLQSNHTPGNIAESKMHHIENYRDGADVSYAFNSDARNMQNDAADKGGGTTQQPLFVYM

SEQ ID NO: 201665 - protein, 306 aa, Glycine max
  Clone ID: PAT_MRT3847_24129C.1.pep
MLQKMLRLHFTTALSHFASKASPFPLTPVSVTVSRAIVCNNPTRFRSQMGSFSTSSSSSSKLLFRQLFEKESSTYTYLLADASHPEKPALLIDPVDRTVDRDLSIIEQLGLKLVYAMNTHVHADHVTGTGLIKSKVPSVKSVISKASGATADLYVEPGDKVQIGDLFLEVRATPGHTKGCVTYVTGDAPDQPQPRMAFTGDTLLIRGCGRTDFQGGSSEQLYKSIHSQILTLPKSTLIYPAHDYKGFTVSTVGEELQNNPRITKDEETFKNIMGNLNLSYPKMIDIAVPANMVCGIQSNPKQAEAS

SEQ ID NO: 201666 - protein, 88 aa, Glycine max
  Clone ID: PAT_MRT3847_2412C.1.pep
DPSQPCTHIEAKLRQPIPRWALASLLRICTSTTERLAGAQEADDVLCYVSIRPIATSLPVRNDQGQEGLGSHEHRRSHATIYVCCDCD

SEQ ID NO: 201667 - protein, 58 aa, Glycine max
  Clone ID: PAT_MRT3847_24130C.1.pep
KAYVSICLASLPINKQSPWAALLESDLDFLSESATLESLTCIDAMLIFFNMQSAFPCV

SEQ ID NO: 201668 - protein, 64 aa, Glycine max
  Clone ID: PAT_MRT3847_24131C.1.pep
METKRVGSHSRPYKKKKKKKKKKKKKKKKKKKKKKKKKKKKKKKKTWGGARAPISPYRGCINPP

SEQ ID NO: 201669 - protein, 91 aa, Glycine max
  unsure (1)..(91): unsure at all Xaa locations
  Clone ID: PAT_MRT3847_24132C.1.pep
LWSFIKHLRAMGEKKLFXQMNNIPKRDTALTTAANYESMFSXNDGPVLATFQXLYNMYRRGPEHPSQQKAKRMGLTTIAFNDIQEQVGNQK

SEQ ID NO: 201670 - protein, 84 aa, Glycine max
  Clone ID: PAT_MRT3847_24133C.1.pep
DTVQETETKMVEMSALNHLMSTHVLHQAQQIEHLYDQAVEATNNVELGNKELSQAIQRNSSSRTFLLLFLFVLTFSILFLDWYS

SEQ ID NO: 201671 - protein, 309 aa, Glycine max
  unsure (1)..(309): unsure at all Xaa locations
  Clone ID: PAT_MRT3847_24134C.1.pep
MGKARDRTEDFKDAVRHTARSLGYDEAKLASVMASFIIHKPVLCTPVFFSLCLXLESIGELDQFLLKHRKDYTDLHRTTEKERDSIEHEVSTFIKTCQEQIDILKNSINQEEETSKGWLGIATTKSNADIIAHKHGVVLILSERLHSVTAQFDQLRAVRFQDAINKAIPRRKLNRVARKDSAETSKSGDMELREPEELRAEPLRVQQQLLDDETRALQVELTSLLDTVQETETKMVEMSALNHLMSTHVLHQAQQIEHLYDQAVEATKNVELGNKELSQAIQRNSSSRTFLLLFLFVLTFSILFLDWYS

SEQ ID NO: 201672 - protein, 43 aa, Glycine max
  Clone ID: PAT_MRT3847_24135C.1.pep
GGWMACYSGLGPRWASMSMSATTMITTYEFLKRLSMKNQEVLT

SEQ ID NO: 201673 - protein, 296 aa, Glycine max
  Clone ID: PAT_MRT3847_24136C.1.pep
MKEQQKQKIFQRSSSACTVTTRNSRRILPSNLTHHFRSFESDDVSDNLLVRRGSSPSVSNLYQQQQHTPKLTQQNKISSLIRSFLNIFTFPTMIPTCKWLTIPSQLSVTPSLGRKVTGTLFGHRRGHISFAVQLHPRADPVLLLELAMSTSSLVKEMSSGLVRIALESQKLSASTITRTMRSNSGRQQQCKLFQEPSWTMYCNGRNCGYAVSRTCGDLDWHVLSTIQSVSVGAGVIPLLEDGKAASAAAGGGSEGELMYMRARFERVVGSRDSEAFYMLNPDGNGGPELSIFLLRI

SEQ ID NO: 201674 - protein, 74 aa, Glycine max
  unsure (1)..(74): unsure at all Xaa locations
  Clone ID: PAT_MRT3847_24137C.1.pep
VNPLKFLGGKIVADRAKPGHGVHGXYRLFSINVPSDRFVKGTNTIYLRQSRAMNPFQGVMYDYIRLERPPLTQI

SEQ ID NO: 201675 - protein, 98 aa, Glycine max
  unsure (1)..(98): unsure at all Xaa locations
  Clone ID: PAT_MRT3847_24138C.1.pep
MSGRVGQVSDCKTSISWDAGKPXVIEXVQVAPPQAGEVRMKILYTSLCHTDDDFWEVKGQTPLFTFIFXQEAGGIVDSVSQGVSXLKLRDHALPVFTG

SEQ ID NO: 201676 - protein, 144 aa, Glycine max
  unsure (1)..(144): unsure at all Xaa locations
  Clone ID: PAT_MRT3847_24139C.1.pep
MRARTRGGNLGDDTINFEAFSHKLXQFGEIQEKVVSKFSQEEFLTACSTQVRPATTLMADGCPYLYAMVHDGYKCTTPGDIVTGVELTTINNMCAYGLNPGISGPRLMGTIPQSISQYTVRYQMAAERTPLNFEASKQSFCHFL

SEQ ID NO: 201677 - protein, 56 aa, Glycine max
  Clone ID: PAT_MRT3847_2413C.1.pep
LRIIYDPDLLTNAKALTPKTTNPTFIYEHYCHLSLSKISASFLKTYLTTGSFSWLT

SEQ ID NO: 201678 - protein, 200 aa, Glycine max
  Clone ID: PAT_MRT3847_24140C.1.pep
AQNCHATALTFIRSLTGLPPSPGSAIGSEMSGGVSEVHAEDIYIFDSHSAMRIKTSPGRGGYVRNVYISNMILANVDIAIRFTGLYGEHPDDTYDPDALPVIERITIKDVIGVKVKRAGLIQGIKGDNFVNICLSNITLNVSKKLPWNCSYVKGYSDLVSPEACEPLRERIFPEHCSDCYYLPNHLKSLSNQNWGAWLLS

SEQ ID NO: 201679 - protein, 136 aa, Glycine max
  Clone ID: PAT_MRT3847_24141C.1.pep
SETAFFADNQTIDITPFLKQGGSSNKKGAIIGGVVGGVGLVVILLALFGLLRRYKKPKRVPRGDILGATELKGPVPYRYKDLKTATKNFSDENKLGEGGFGDVYKGTLKNGKIVAVKKLILCQSGKMDEHFESEVK

SEQ ID NO: 201680 - protein, 69 aa, Glycine max
  Clone ID: PAT_MRT3847_24142C.1.pep
VKTALRIECSETGGNGSPAETTMLHELYEKEGESPWFDILCRPGTDAASIIAGGVRRVTSYPVICRKAL

SEQ ID NO: 201681 - protein, 84 aa, Glycine max
  Clone ID: PAT_MRT3847_24143C.1.pep
GLGDSERKEFSRRIRQTTYGEVIDYVTLFCAHIAEDISDYATFPDGVPKERLPIPDVLVRIALLLLIRDKVVACVTTFLELHCF

SEQ ID NO: 201682 - protein, 96 aa, Glycine max
  unsure (1)..(96): unsure at all Xaa locations
  Clone ID: PAT_MRT3847_24144C.1.pep
XGFANRXNFPHEKXFXNXXLXLQXKXXXXIXFXHXIAPXKXPXXQXXXIXXXXXXDXIVXPHXLXHXELXLKSVFREXXSEXERFXSNXHXXDYXR

SEQ ID NO: 201683 - protein, 73 aa, Glycine max
  Clone ID: PAT_MRT3847_24145C.1.pep
GVSTHPNSPSRAPASTSAAQRGDDDSTPTIDVANLSPTPETGEESSHPTVVAPVQAEQVSASGSGTTALATAQ

SEQ ID NO: 201684 - protein, 59 aa, Glycine max
  Clone ID: PAT_MRT3847_24146C.1.pep
PTRTYGSADRRGEGPVVAAAHDSAGSTALCVYHHYPVVLSRTLLRLPILVAGSLTRRVF

SEQ ID NO: 201685 - protein, 99 aa, Glycine max
  Clone ID: PAT_MRT3847_24147C.1.pep
GEIGCRNSEREREREREMASGWGITGNKGRCYDFWMDFSECMSRCREPKDCAFLREDYLECLHHSKEFQRRNRIYKEEQRKLRAASRKGQEDGVNEHHH

SEQ ID NO: 201686 - protein, 71 aa, Glycine max
  Clone ID: PAT_MRT3847_24148C.1.pep
DPPLFGNCSLNSSHKANPPGESHQLHGPLVFLFPLLLIVKHTSFSLFSSIPYSYLYSFIHNPTHFIFSLLS

SEQ ID NO: 201687 - protein, 123 aa, Glycine max
  unsure (1)..(123): unsure at all Xaa locations
  Clone ID: PAT_MRT3847_24149C.1.pep
ARRRQKGGCRNSEREREREREMASGWGITGNKGRCYDFWMDFSECMSRCREPKDCAFLREDYLECLHHSKENLAMDCELXITTGLSIFDLTFQRRNRIYKEEQRKLRAATRKGQEDGVNEHHH

SEQ ID NO: 201688 - protein, 65 aa, Glycine max
  unsure (1)..(65): unsure at all Xaa locations
  Clone ID: PAT_MRT3847_2414C.1.pep
IFLKSVVRRVPLTGESLDSTGLYIYPDGIRPIIWFAMVXSPDIVNNLLGADFAVYYIKADYSQRA

SEQ ID NO: 201689 - protein, 45 aa, Glycine max
  Clone ID: PAT_MRT3847_24150C.1.pep
VFSLQFLFELYFENINPDFFVQSPNLKLVCILSFIFMNHALDLPH

SEQ ID NO: 201690 - protein, 91 aa, Glycine max
  Clone ID: PAT_MRT3847_24151C.1.pep
EGKKLTGGFHGKKKKTLLLTRYPWKHLQITQLDMDEKKNYYIGGNLVSWKGIYINPHILYLEGLSIKVYGGFFAFPGPRGILGREVLLNLL

SEQ ID NO: 201691 - protein, 86 aa, Glycine max
  Clone ID: PAT_MRT3847_24152C.1.pep
TKNLSLLTLRKKKPQRALLGGIKRGYILRNSKKRSNLKLPPFFWDPHINGPGNSLFMKLNIQAKARGKKGGLNYFQKLALHWASLY

SEQ ID NO: 201692 - protein, 118 aa, Glycine max
  Clone ID: PAT_MRT3847_24153C.1.pep
VPRVGRPSFPPPPLLRPVCEGKKSNFESFPLAPLGGKGFLRMKCFQPLSLVLGPSQLPHVLFLSLLLWPKKIKCVLAPHCSITPGGVPQKLGFFCFALAPMAQPRVPRPPSKMFVFAF

SEQ ID NO: 201693 - protein, 63 aa, Glycine max
  Clone ID: PAT_MRT3847_24154C.1.pep
SVQPWYPRSVFFQPSQQNMPWLYINLCPVHHTYNTFQQQQPPNYEASVESKSMGIIRMIRDLC

SEQ ID NO: 201694 - protein, 486 aa, Glycine max
  Clone ID: PAT_MRT3847_24155C.1.pep
MLEPRFSGGVLLLWLLCGTLVPTMVESAIGVNWGTISSHRLKPTTVVDLLRQNKISKVKLFEADSDVLRALMGSGIQVMVGIPNEMLPFLSSSPAASDLWVRQNVSAYVGRGGADIRYVAVGNEPFLSSYNGQYQNLIMPAILNLQQSLVKANLAGYIKLVVPCNADAYESSLPSQGAFRPELTQIMTQLVQFLNSNGTPFIVNIYPFLSLYNNGDFPQEYAFFEGTTHAVQDGSNVYTNAFDGNYDTLVAALTKLGYGQMPIVIGEIGWPSDGAIDANITAAKVFNQGLINHIASNKGTPLRPNAPPMDVYLFSLLDEGAKSTLPGNFERHWGIFSFDGQAKYPLNLLLGNKELKNARNVEYLPSRWCVANPSGDLNNVVNHMRLACSVADCTTLNYGGSCNEIGEKGNISYAFNSYYQLQMQDSRSCNFDGLGMVTFLDPSVGDCRFLVGVTDKGSDSSTSQTTYQWWTLVLLLILHGAFLLSM

SEQ ID NO: 201695 - protein, 82 aa, Glycine max
  Clone ID: PAT_MRT3847_24156C.1.pep
VLLYEELCVLHRLTYQMLLTFDFTVSNVAEVKNKARPLRANYFHYFPGFLVPVMLSFEIILVPWVLLSCGDSTMTPGGLCSF

SEQ ID NO: 201696 - protein, 63 aa, Glycine max
  Clone ID: PAT_MRT3847_24157C.1.pep
VDVSYFLYLFKLWKRGGKECGRSPTMSPCYLGSFVMISSVMSFCFSPCDFCLNDFRSVKFNIY

SEQ ID NO: 201697 - protein, 104 aa, Glycine max
  Clone ID: PAT_MRT3847_24158C.1.pep
EAYIEGETQWLFSVTLVKKRARNENYLPLKKIRWVAKWGGKLGRFKKTPPCLITPLQRCVPLAMSVVAHCRQGLSCAGLFFYFVIFLYFPSFFFFFFFFFFFFF

SEQ ID NO: 201698 - protein, 108 aa, Glycine max
  unsure (1)..(108): unsure at all Xaa locations
  Clone ID: PAT_MRT3847_24159C.1.pep
ALASGGAGGVYLTWRKRRASVGTPIRNGSGAIAVPGKREPRQTVNCESKNVLTRGKTARDDEKHKEYREEVIKNHADNGGEPDKXEELGQAYEGMREPEMKEQSDQRG

SEQ ID NO: 201699 - protein, 139 aa, Glycine max
  Clone ID: PAT_MRT3847_2415C.1.pep
LLEKSDFRVNFKLLTMSCCNLFKTNTTIVSSHKATFQTVRKTWSHSQTPSESQNKSHKRPSNPVKIWKLGLKTNNSTKKFREEKHRDPSITGEISTPIIKINTQQILTHLVLMIKSESIIFSLPSYAYLIETECVCGHE

SEQ ID NO: 201700 - protein, 108 aa, Glycine max
  Clone ID: PAT_MRT3847_24160C.1.pep
LQKLQSKNLFQKTQATGFSTYILHPCGSTVAVNLSTKGVKCTCSSHWLQHVHFTPMWMYCGSQFIHEGSHQCLVLHALADTLSYSTSIQQNCDENKVTKHASNYETKD

SEQ ID NO: 201701 - protein, 247 aa, Glycine max
  unsure (1)..(247): unsure at all Xaa locations
  Clone ID: PAT_MRT3847_24161C.1.pep
MRDMKDAGALGGKTARACDSCVSRRARWFCAADDAFLCHGCDTLVHSANQLASRHERVRLQTASSKVTTTHAWHSGFTRKARTPRHNSKHFALQQRLKDEXSLQQEPVVVDNDETEEQMLCRVPVFDPFDVRTDDLDSFSDMDFSEFAADVEGRLDKEDDEISAYVGGGEGVQGVLAKVKGEEEIDGDVACYLESVFDMISDDAFHWNNIESVVSDAPEEKGCVVPCEGGVREQGGIKGDIFLRLNY

SEQ ID NO: 201702 - protein, 369 aa, Glycine max
  unsure (1)..(369): unsure at all Xaa locations
  Clone ID: PAT_MRT3847_24162C.1.pep
MRDMKDAGALGGKTARACDSCVSRRARWFCAADDAFLCHGCDTLVHSANQLASRHERVRLQTASSKVTTTHAWHSGFTRKARTPRHNSKHFALQQRLKDEVLFNNTSVLPLVPELGGEEQEPVVVDNDETEEQMLCRVPVFDPFDVRTDDLDSFSDMDFAEFAADVESLLEKEDDEISAYVXKGRGEEEIDGDVXVIVKDEEEIDGDVACYLESVFDDAFHWNNIESVLSDAREEKEGVVACDVGVGDEEGGTKRDIFLRLNYDEVITAWSSQGSSPWTTSNPPKFNSDYDFSLGLSGVGGEVRSLRGHLDGGREARVSRYREKRRTRLFAKKIRYEVRKLNAEKRPRMKGRFVKRTCFVGANAFPAYH

SEQ ID NO: 201703 - protein, 48 aa, Glycine max
  Clone ID: PAT_MRT3847_24163C.1.pep
QRVCFCARIYIILPPVELALMINTYISHKEMESASIGQFYSSNWIYIS

SEQ ID NO: 201704 - protein, 317 aa, Glycine max
  Clone ID: PAT_MRT3847_24164C.1.pep
TYLQSITIRLEEWRLKRRDTEEWMRHRQLPEDLRSRVRRFVQYKWLATRGVDEETILRALPADLRRDIQRHLCLDLVRRVPFFSQMDDQLLDAICERLVSSLSTQGTYIVREGDPVTEMLFIIRGRLDSSTTNGGRSGFFNSIILRPGDFCGEELLSWALLPKSTINLPSSTRTVKALSEVEAFALRAEDLKFVANQFRRLHSKKLQHTFRFYSHHWRTWAACFIQAAWRRYKKRMTMKDLSLRETIPLDEAVAGERKHGDYSAGSNSTQTKLNLGATILASRFAANTRRGALKMKDDMPQLQKPEEPDFSTEADDD

SEQ ID NO: 201705 - protein, 115 aa, Glycine max
  Clone ID: PAT_MRT3847_24165C.1.pep
FSGFLFCFCVRASCISLVAACSALFPPRGPFVGLVLGRCVCLGWSSGWFWRGLGRVCCVLLSGACLVVVGGVCCLLALSSAFVGFFALLLRRPPSVVFLRASVCVGRPGPFRVGA

SEQ ID NO: 201706 - protein, 95 aa, Glycine max
  Clone ID: PAT_MRT3847_24166C.1.pep
MFHSIKTVLTCPQVSFPARSLSSNLGRETCAVRFCTDSARKMDKTQKPSTEENKQGDTMSHSFGEGYATRSDEEGFGGVYGGNQSKPEMDPAYDK

SEQ ID NO: 201707 - protein, 149 aa, Glycine max
  Clone ID: PAT_MRT3847_24167C.1.pep
HASAHASGTTWSNITPNTGNFAVSESSFHFSFSTMSPLHVRDTKTNDSVSDDAFPNCIGNDMASSGSASSENDKMNSSKGRNFSFINSKVSSVRSYVTPSGSESDQLESKDSSGPPLSSFSPQSSSVDKNSVCADALNFHILQSTGSNV

SEQ ID NO: 201708 - protein, 106 aa, Glycine max
  unsure (1)..(106): unsure at all Xaa locations
  Clone ID: PAT_MRT3847_24168C.1.pep
PPRKEAPPEATEGDPKASPTDPEPARKTTXGRNPKGSKTTEASPRSSTHETQAQGEHTRPXAQDQTEPHEXGHTAEQATQNKKQDSGKHHDKPTPHERKRNAXATK

SEQ ID NO: 201709 - protein, 148 aa, Glycine max
  Clone ID: PAT_MRT3847_24169C.1.pep
PGCVWDAKFMENGDIVTACSDGVVRIWTIDQDNVADQLELELYTSLLSEYKSSRKRVGGLKLEELPGLEALKIPGTTDGQTKVVREGDNGVAYGWNMKEQKWDKIGEVVDGPEESNRQFFDGIQYDYVFDVDIGDGMPTRKTIDQYDG

SEQ ID NO: 201710 - protein, 102 aa, Glycine max
  unsure (1)..(102): unsure at all Xaa locations
  Clone ID: PAT_MRT3847_2416C.1.pep
GLTRSFLHSGNNTHNTAMSFSLFATPQQQQPQQQSPFQPQQTSLFLSQQQQQFQQQQQQQQQQQQQQQQQFFPHAHQHQPPHXLFLFTYHRTPPRFFSHWAG

SEQ ID NO: 201711 - protein, 44 aa, Glycine max
  Clone ID: PAT_MRT3847_24170C.1.pep
MASILHYFIDHSLSCSNHIFLSVSVSPIKPVNLVDLHDHNDGST

SEQ ID NO: 201712 - protein, 76 aa, Glycine max
  Clone ID: PAT_MRT3847_24171C.1.pep
PMSLLLRPAFSRLLQAIPRTLSSRTPSPLGASSPRVSSSPCAQPRLLLLMEYDQSLSKTQKKKNKKKKKKKKKKNK

SEQ ID NO: 201713 - protein, 344 aa, Glycine max
  Clone ID: PAT_MRT3847_24172C.1.pep
MAPTNVTCFREENESEKGEEITIEEDKLSQECKELILSLPRERGWRTRYIYLFQGFWCQPLEIQAIITFQKHFQAKDSDVIVATIPKSGTTWLKALTFAIVNRHTHSITTSMSSHPLLTSNPHELVPFIEYTVYGNAPSHVPNLSNMTEPRLFGTHIPFHALAKSIKESNSRIIYICRNPLDTFVSTWIFLNKIKPEHLPEFELGEAFEKYCKGIIGFGPTWDQMLGYWKESIARPSKVLFLKYEDLKKDVNFHVKRIAEFLGCPFTSEEEGDGTIESIIKLCSFEKMKELEANKSGTFARNFERKYLFRKAEMGDWVNYLSPEMGEKLSQIMEEKLSGSGLSF

SEQ ID NO: 201714 - protein, 352 aa, Glycine max
  Clone ID: PAT_MRT3847_24173C.1.pep
MIGVGILLCRWPPKKHLDEESKSIEKSDQPISMVWGKDGKFTFSDLVKATDDFNDKYCTGKGGFGSVYRAQLLTGQVVAVKRLNISDSDDIPAVNRQSFQNEIRFLTGLRHQNIIKLYGFCSRRGQMFFVYEHVDKGGLGEVLYGEEGKLELSWTARLKIVQGIAHAISYLHTDCSPPIVHRDITLNNILLDSDFEPRLADFGTAKLLSSNTSTWTSVAGSYGYVAPELAQTMRVTDKCDVYSFGVVVLEIFMGKHPGELLTTMSSNKYLTSMEEPQMLLKDVLDQRLPPPTGQLAEAVVLTVTIALACTRAAPESRPMMRAVAQELSATTQATLAEPFGTITISKLTGFQK

SEQ ID NO: 201715 - protein, 95 aa, Glycine max
  Clone ID: PAT_MRT3847_24174C.1.pep
GCAVLTGCHIGHFSHMVLEMQRSNPLSVHQVSGKLELEKALIELFTNATLLEARRRAAKEAFCQLSCGIVENIWSLLNFHIFCRLSADESKSFRL

SEQ ID NO: 201716 - protein, 105 aa, Glycine max
  Clone ID: PAT_MRT3847_24175C.1.pep
VESKIGFTFGQNLGGHLPLLTWASMAFGQTKGRRLPFPGKLFHLPLIFYRGPRGYWSIARGGRGPGSYSLTWTNWTTGGTAFSTTFKGKKTHPSLSNWGLFPGWF

SEQ ID NO: 201717 - protein, 142 aa, Glycine max
  Clone ID: PAT_MRT3847_24176C.1.pep
MLTNTMLLVLLRIFIRHFDGPDQIFIGNSQGLHIKGSSCSFFKSPLNSKFSFVLKNLLHVPSITKNLLSVSQFARDNSVYFEFHPYTFVVKSQATHGPLIQGTIGANGLHSFTHVNLHPSSALLSSSSSISPSSLSNKSLTS

SEQ ID NO: 201718 - protein, 81 aa, Glycine max
  Clone ID: PAT_MRT3847_24177C.1.pep
SLIPGLKVKNLNLIPQLKKGVALGKKIFNFFSKNKPCGGKIFPPKFLRTKKNFWPLHRVDQNWKKPPLPFQTKKKIIKTVN

SEQ ID NO: 201719 - protein, 76 aa, Glycine max
  Clone ID: PAT_MRT3847_24178C.1.pep
TRSAIISLEFSEALPFAAFTSLLVEMVAKLDHVMVEVYELGLVAHFKEFQGDEIVVTCEKPNMNRAQNDLPSHGAE

SEQ ID NO: 201720 - protein, 154 aa, Glycine max
  unsure (1)..(154): unsure at all Xaa locations
  Clone ID: PAT_MRT3847_24179C.1.pep
ARNRSGHSASRKRCPLDLSKEQKNSLFPKNWPLGYGGDDEDEDELAESFRFDSACSTESNELALFSLRKFARELEMLGLKIVDGLTKDLGCENXLGDDPNRFCSVLWVSESLSGNKSGGFYPFVIGLQYQIRNQKYSLLSDSGWVSVLPHVDSI

SEQ ID NO: 201721 - protein, 135 aa, Glycine max
  Clone ID: PAT_MRT3847_2417C.1.pep
MMWEWDDYQDTIPKHDLPQPDSHLKFDFFSALSRPKDYYKILEVDYDATDDAIRSNYIRLALKWHPDKHKDQNSATSRFQDINEAYQVLSDPVKRREYDINGMRYEYDYNIIDYLNRYKGLILTCNGLGIKHSIW

SEQ ID NO: 201722 - protein, 84 aa, Glycine max
  Clone ID: PAT_MRT3847_24180C.1.pep
WKLFNEAPSLVEEGVVVFVTQQTALVVRLSPTLQVYAQLSRPDGVREASMPETAWKYMTQICSSTENMSAEAVERVSLLAIAWE

SEQ ID NO: 201723 - protein, 64 aa, Glycine max
  Clone ID: PAT_MRT3847_24181C.1.pep
QLISYVEKGNSSDGGVSPATATAAAAERELPEGGDAAHGGGGGRHLHRVLLHLVRSGQHYLPGD

SEQ ID NO: 201724 - protein, 105 aa, Glycine max
  unsure (1)..(105): unsure at all Xaa locations
  Clone ID: PAT_MRT3847_24182C.1.pep
XXXXSCXXXXXXXXXXXXXXXXXNXXRXXXXXXFPXXXKXXXXGXTGTXPXXXPGXXPRATXXLIXXPFXFXFXXXXXLSSSRSRTRAESARXRAEFRAYVRVHA

SEQ ID NO: 201725 - protein, 32 aa, Glycine max
  Clone ID: PAT_MRT3847_24183C.1.pep
YTKFQNKIFCKLEFHGMEKFWCEVNDSSQVLF

SEQ ID NO: 201726 - protein, 49 aa, Glycine max
  Clone ID: PAT_MRT3847_24184C.1.pep
GVSNRLGSIMYSMFFKIIPRFQLTLPLNEQKKLSLPFYLNPFISGSSSS

SEQ ID NO: 201727 - protein, 200 aa, Glycine max
  unsure (1)..(200): unsure at all Xaa locations
  Clone ID: PAT_MRT3847_24185C.1.pep
MDLESSKCWDTSKGSWKTILLLAYQSLGVVYGDLSISPLYVYTSTFAEDIEHSETNEEIFGALSFVFWTLTLVPLFKYVFVVLRADDNGEGGTFALYSLICRHAKVSLLPNRQHADEALSTYNTDDAPHKDTSKVNMMLEKYEGLRTALLIVVLLGTCMVIGDGLLTPXISGFSAGSGLEGSMSKKHHQYAGIPITCFIL

SEQ ID NO: 201728 - protein, 90 aa, Glycine max
  Clone ID: PAT_MRT3847_24186C.1.pep
DIPKDVQQQLAVPNWDEPVNLPGYLARLPRPPAEAQLEHIVRLIMEAQKPVLYVGGGSLNSSAELRRFVELTGIPVASTLMGLGTFPIGD

SEQ ID NO: 201729 - protein, 141 aa, Glycine max
  unsure (1)..(141): unsure at all Xaa locations
  Clone ID: PAT_MRT3847_24187C.1.pep
GPEFPRRPRVRPYSVAPDGLRMLYGPDSDVWSAGDILYISLSGXPPLWAESXPVIXRQILLGKLDFQFEPCSNISDIAKDLIRKMLDQNDYTWLTSHEGLRLPWIDDDNIAPDKPLDSARVSRVEQSHCMHKKRKMALKDI

SEQ ID NO: 201730 - protein, 81 aa, Glycine max
  Clone ID: PAT_MRT3847_24188C.1.pep
TYMACAGFSAPGQRHQRHDPIWRRRPKRRGYVRRVGLENGGLMVPPVIYLTFWGKAGGGLVPLINQGLGFVFGPSLENSSD

SEQ ID NO: 201731 - protein, 140 aa, Glycine max
  unsure (1)..(140): unsure at all Xaa locations
  Clone ID: PAT_MRT3847_24189C.1.pep
XXXXXXXKAXXXKYAXXXXXKXFLAXSXXHXXHGLXHNEXXXXCXXTXRXXDXXNHXXXLXPXRXXMXXHXXYMPXXSXXPXITQXYGXXXXXPPXHXXXXXXTXXXSXLATXXXXHXXLAXTAXXXXXHTVXTXXHXLP

SEQ ID NO: 201732 - protein, 66 aa, Glycine max
  Clone ID: PAT_MRT3847_2418C.1.pep
DAFIVLPGGYGTLEELLEVITWAQLGIHSKPAGLLNADGCYNSLLPLIDKAVDEGSISPTARRIIV

SEQ ID NO: 201733 - protein, 32 aa, Glycine max
  Clone ID: PAT_MRT3847_24190C.1.pep
MKLNTLVSSLSLYDIAGNSRRQRQYQQHKPQI

SEQ ID NO: 201734 - protein, 45 aa, Glycine max
  Clone ID: PAT_MRT3847_24191C.1.pep
LQSRFVIIVPCCSRKKGFPALSLACLLPSAVSAPPYVCLTRDGLS

SEQ ID NO: 201735 - protein, 41 aa, Glycine max
  unsure (1)..(41): unsure at all Xaa locations
  Clone ID: PAT_MRT3847_24192C.1.pep
RAGQNQSLTSLFCVSKXXKIMTKDKIKILSYTNMPFDQRTY

SEQ ID NO: 201736 - protein, 143 aa, Glycine max
  Clone ID: PAT_MRT3847_24193C.1.pep
QTTERGVEFNLRKYICQDSVAARSRVADMKKQASSTFLMWVMVISLHAHLIIAAVSKSNGTISVCDGSVEDCLNVVHLDSELLPTISSSHFRRILAGKYDGVTNDALIPDKPFKGCKIGEAYRSCLAQVEGRARNCAIYKRGC

SEQ ID NO: 201737 - protein, 62 aa, Glycine max
  Clone ID: PAT_MRT3847_24194C.1.pep
GLRCRGLVRKIDFVVWILAKTHWKEHECLFRVQCCVFGGAASALRTRMFHVQSVQKHQLKLS

SEQ ID NO: 201738 - protein, 187 aa, Glycine max
  Clone ID: PAT_MRT3847_24195C.1.pep
PVDAASGQGVKWAGHSPSPSPPIWREYFCTRRPNARAVVGPLLSTFGVVLFRFDGCSVSPTRWGQAVVFLAAGSLLAAEVKPTKGAATRRVLSPHLVSSGRGDWVLSFVGAYWPWRLLGVSRFGLPRHPGHVLNLCKLIFAPTLFEEHWSCYAFEPKDKILYVLDSMHDKFSTRKKNLDDAMKRRFE

SEQ ID NO: 201739 - protein, 581 aa, Glycine max
  Clone ID: PAT_MRT3847_24196C.1.pep
SNSPSSLHHPFSQIQSAKYRKPKRHHHIPRVTCSDNQKPNTSGELVLPHRRNILLGLGGLCGAAATLNNIPFANAAPILGPDLTTCVQAELPEGVEPTNCCPPISTNIIDFKFPPSNQPLRVRSAAHLVNKDYLAKYEKAVNLMKNLPSDDPRSFAQQAKVHCAYCDGGYHQLGFPDLDLEVHFSWLFFPYHRWYLYFHERILASLINDPTFALPFWNWDAPGGMQLPSMYADPKSPLYDSLRNANHQPPTLVNLDFTIEDPNAEANISTNLTTMYRQLVSNAKTPTLFFGNPYRAGDQPNPGGGSVESTPHGPVHAWTGDINHPTMEDMGNLYAAARDPIFYCHHSNVDRMWSIWKTLGGKRRDLTDPDWLESAFLFYDENKNLVRVKTKDCLDTRKLGYVYQDVDIPWLKSKPTPLRSRAQKVELTPLFGGVAAAHAAETSRNVKFPLVLDSVVSTVVKRPKKSRSKKEKEEKEEILVVEGIEFESSTGVKFDVFINDEDDKLVKPDNTEFAGSFVSVPHSHEHHKNNKKIVTCLRLGLTDLLEELGAEDDDSVLVTLVPKYGKGRVNIRGIKIDFVSD

SEQ ID NO: 201740 - protein, 193 aa, Glycine max
  unsure (1)..(193): unsure at all Xaa locations
  Clone ID: PAT_MRT3847_24197C.1.pep
HPLFPHAPNQCPLRPLHTLILKLGFHSNVYVQNALISSYGTSGSLHVSLKLFNEMPHRDLFSWSSLISCFAKHGFPDESLALFQQMQLLESDILPDGVVMLSVISAVSSLGALELGIWVHAFISRIGLNLTVPLGSALIDMYSRCGDIDRSVKVFDXMPHRNVVTWTTLINGLAVHGRGMEALEAFYVMVESG

SEQ ID NO: 201741 - protein, 47 aa, Glycine max
  Clone ID: PAT_MRT3847_24198C.1.pep
FSVYIDTYLYHSTEFLEREGELEYSQERFREGNCPVHTFLLLIFKFI

SEQ ID NO: 201742 - protein, 65 aa, Glycine max
  unsure (1)..(65): unsure at all Xaa locations
  Clone ID: PAT_MRT3847_24199C.1.pep
CSDKQQDLFNAMVLLYAAVLLIGIXNANAGQPVVAVERTVFYREKAAGMYSALPYAFAQASKSSF

SEQ ID NO: 201743 - protein, 52 aa, Glycine max
  Clone ID: PAT_MRT3847_2419C.1.pep
MPIKDIIVSKPDEATHPETFKAALAEFNSSLIFVYDGSSSSIAYNKLTDNGT

SEQ ID NO: 201744 - protein, 77 aa, Glycine max
  Clone ID: PAT_MRT3847_241C.1.pep
RAQPSLHLRLTMKLIKVDCLYMFSFLSLKTKNIFKNKESFLIFITQKLGVTQDVYGGNFSLYGILILLVNDKSTLLV

SEQ ID NO: 201745 - protein, 48 aa, Glycine max
  Clone ID: PAT_MRT3847_24200C.1.pep
LVRKHLRGSNQARPFHSMAGFHQEINEICWEWKTWEIKTRERVGGWEL

SEQ ID NO: 201746 - protein, 25 aa, Glycine max
  Clone ID: PAT_MRT3847_24201C.1.pep
HFDSTGKAGLMQFILQHTNRSLHSL

SEQ ID NO: 201747 - protein, 101 aa, Glycine max
  unsure (1)..(101): unsure at all Xaa locations
  Clone ID: PAT_MRT3847_24202C.1.pep
XXXXXXXPXXQXXXHPXTXSXXXXXPHTXXXHXXXXSXXTXXPXLTVPPXXXXXQXXXRTLSPXXXXXXSXXXXPXKXPXTKTXPXSXPYXHXHSXXXYXX

SEQ ID NO: 201748 - protein, 59 aa, Glycine max
  Clone ID: PAT_MRT3847_24203C.1.pep
SNGGFSLLRKKFGRIEITEQLAYCIGNSFERGSRNWILQQSKKTKWHSARWQLRRKRKR

SEQ ID NO: 201749 - protein, 49 aa, Glycine max
  unsure (1)..(49): unsure at all Xaa locations
  Clone ID: PAT_MRT3847_24204C.1.pep
SRVVVQSXSKTXXKTXRRIVLISYYCXEHGVGGCFTSCXLSVHCFITXX

SEQ ID NO: 201750 - protein, 226 aa, Glycine max
  unsure (1)..(226): unsure at all Xaa locations
  Clone ID: PAT_MRT3847_24205C.1.pep
MHNNDHIPVHHVQGSNPKPVKLNRHHTMRYYVHRVHESLTTRVSKMICATFLGLLFIVGLITFILWLSLRPHRPRFHIQEFNLPGLTQNSGFENAVITFKVSARNSNQNIGVYYESMDGAVYYRDQKIGSKPLLYPFYQQPKNTTEVDGDLSGATLTVSSQRWSEFQSDRADGSVVFRLELTSVIRFKISTWDSKRHTMHANCNVGVGPDGSLLTLYKXKRCPVYF

SEQ ID NO: 201751 - protein, 72 aa, Glycine max
  unsure (1)..(72): unsure at all Xaa locations
  Clone ID: PAT_MRT3847_24206C.1.pep
GIGPGVYDIPSPKIPPIEKIAAKINKKLPGLEKNILWVNPDCGFKTPKSPXMKPALPNMVAATKIIRNELAK

SEQ ID NO: 201752 - protein, 52 aa, Glycine max
  Clone ID: PAT_MRT3847_24207C.1.pep
YLNIVLKFKAMKRVVVVDLKIEALSCHKLRRRRALKSEFINLNENQVSVSSG

SEQ ID NO: 201753 - protein, 66 aa, Glycine max
  Clone ID: PAT_MRT3847_24208C.1.pep
TERARVLFMRFRGDLTLPSANELLQGIALADDHVIDRTREKHTAPGAAKNCWCGLSLSLMTTQRVT

SEQ ID NO: 201754 - protein, 77 aa, Glycine max
  Clone ID: PAT_MRT3847_24209C.1.pep
VGSVGGLPSGGSLVTSASGSSFSFSSVAGSVGSSEACACSSGHSSQAPTPSVGGDTIKNLPPSFLDHINTERSKVVT

SEQ ID NO: 201755 - protein, 72 aa, Glycine max
  Clone ID: PAT_MRT3847_2420C.1.pep
FYPQTMFSGLTEGGKLPPPAICLSTGGPTWGLTFGFSKSLFWNLPPARNNSLLGGVTQAGLNPTLVSRGGKK

SEQ ID NO: 201756 - protein, 40 aa, Glycine max
  unsure (1)..(40): unsure at all Xaa locations
  Clone ID: PAT_MRT3847_24210C.1.pep
PPHSSVLFIXYSKLCIIGHTCACTXEDLXVHLSPDNTRVT

SEQ ID NO: 201757 - protein, 262 aa, Glycine max
  Clone ID: PAT_MRT3847_24211C.1.pep
MSQEQLKKPQGEQDPIKYGDVFKVSDELAFKPIAPRDAALMQATENQALGQTQKGGPASVMQSAATENLRAGVVGRQDISDVARNEGVSVTETKVGCHRVITEFVGRHVVGQFVEPDVPMNTPGTALERDAITIGEALEASAIAGASDKPVDESDAAAIQAAEMRATGKNETEPGGLGARAQSAATRNTRTVSHSHKTTLSDVLTDAKEKLPADKAVTREDAEGVIGAELRNKLDMRTTPGGVAASMAAAATLNQNRQVTDA

SEQ ID NO: 201758 - protein, 55 aa, Glycine max
  unsure (1)..(55): unsure at all Xaa locations
  Clone ID: PAT_MRT3847_24212C.1.pep
FALWVMPFFFFFYSFRFRGGKTRKSHLDKQSIALLLSILQTSLGTKRKCFKPLXE

SEQ ID NO: 201759 - protein, 162 aa, Glycine max
  Clone ID: PAT_MRT3847_24213C.1.pep
MMPESDITLSSFRLRWDVFLSFRGTDTRDTFTMSLYHALHRRGLRVFRDDDGLERGDEIQKKLLEAIEDSAAAVVVLSPDYASSHWCLDELAKICKCGRLILPVFYWVDPSHVRKQKGPFEDSFGSHANKFPEESVQQWRDAMKKVGGIAGYVLDEKWLVIN

SEQ ID NO: 201760 - protein, 63 aa, Glycine max
  unsure (1)..(63): unsure at all Xaa locations
  Clone ID: PAT_MRT3847_24214C.1.pep
SSSLVLLLAALILSPQVLADYEHXPIYEPPVYTPPVYTPPVEHPPVYKHPVNKPPVYMPPVYK

SEQ ID NO: 201761 - protein, 86 aa, Glycine max
  Clone ID: PAT_MRT3847_24215C.1.pep
YMKRQIRNPLCGIVFDRKMMEGTDLGTEQNQLLRTSAHCQQQLIKILDDSDLSTIIYGCWDVEMAEFTMHEVLVTSLSQVMTKSNG

SEQ ID NO: 201762 - protein, 72 aa, Glycine max
  Clone ID: PAT_MRT3847_24216C.1.pep
PRFSKEIHRETDDGNMKEGGLQGTTGSALETSSPKHERLPASMASAAHIPAATDSAFLCNRLRIQHTLLEQN

SEQ ID NO: 201763 - protein, 96 aa, Glycine max
  unsure (1)..(96): unsure at all Xaa locations
  Clone ID: PAT_MRT3847_24217C.1.pep
MPKAKYDAKAVDXRMKRKGAGAGRKQSKKAAKDPNKPKRPPSAFFDFMSEFREQYKKEHTNNKFSGVVSKAGGDKWKWLSEAEKALFVATVERRNK

SEQ ID NO: 201764 - protein, 89 aa, Glycine max
  Clone ID: PAT_MRT3847_24218C.1.pep
VRSVSSHYALAVSLFLSLQRATACSDSIFRFPIPATLTPPFLIETPIETSHWVNKSIYLGFRFERAEKLNVIHTDLKPQSWGRITLLHS

SEQ ID NO: 201765 - protein, 52 aa, Glycine max
  unsure (1)..(52): unsure at all Xaa locations
  Clone ID: PAT_MRT3847_24219C.1.pep
ILVCLFYVKMQKGKINSLTFFFFGLNIIYYSVNEVQKIETSFGFWKXDLLSF

SEQ ID NO: 201766 - protein, 104 aa, Glycine max
  Clone ID: PAT_MRT3847_2421C.1.pep
LSKDAGIYRFPRVSCAAASADDADLDPTVAELPPRPLLEKLAKELRWRLGLRLFNLDIIREYGTRNHFYVIDINYFPGYGKMPEYEHIFTDFLLSLGQGKYKKK

SEQ ID NO: 201767 - protein, 70 aa, Glycine max
  Clone ID: PAT_MRT3847_24220C.1.pep
DARGALVGTIALDTSAITLLLSALIHASIASFNSGNHWVFLLQNGSLNRPIDECFAPCSSHPIPLLVWKF

SEQ ID NO: 201768 - protein, 82 aa, Glycine max
  Clone ID: PAT_MRT3847_24221C.1.pep
RKRQRRSFAYCGTLWLHYCALRTRATALSYSEAGPVRWTLDTMRAHWTKSSAADMHSPDYDSTTDKGGDGYGRGYNRLAMTP

SEQ ID NO: 201769 - protein, 56 aa, Glycine max
  Clone ID: PAT_MRT3847_24222C.1.pep
STTCFSVHLGQGLLDLYVNPLVPVQRVAAAPLSDSTASAWNLSSNSFNCFMSQSIH

SEQ ID NO: 201770 - protein, 61 aa, Glycine max
  unsure (1)..(61): unsure at all Xaa locations
  Clone ID: PAT_MRT3847_24223C.1.pep
LLGISLXSDDGDAIEFIQVILXIHGDSSNQKLTWVGGTKPGKKKEEEMKLINFYLSLYYDH

SEQ ID NO: 201771 - protein, 534 aa, Glycine max
  Clone ID: PAT_MRT3847_24224C.1.pep
FTFIHRNSERRKRSTTQASSNNKKTKRNHKKSLSLPARNGITPPDDGGERTVKKLRLSKALTIPDGTTVSEACRRMAARRIDAVLLTDSNALLSGILTDKDVATRVVAEGLKPEETTVAKVMTRNPIFVTSDTLAIDALQKMIQGRFRHLPVVENGEVIAMLDITKCLYDAISRMESATQQHGSAVAAAVEGVELQQTTPNTFIETLRERVFKPSLSTIVDENTKVAIALASDPVYVAAKKMRELHVNSAVIVMENKIQGILTSKDILMRVVAQNLSPESALLEKVMTPNPECASLETTILDALHMMHNGKFLHLPVVDRDGNAIACLDVLQITHAAISLVESSPGASNDAANTVMQKFWDSAFALEPPPEDFDTHSEASGRLTLDGADTTKSTYQSVGFGNSFAFKFDDHNGHVHRFYCGAEHQELLSAVMQRIGDINDGEHPTMLYKDDDGDKIIIATDNDLVAAVSYARSAGLKALKLDLEFPNSTKPTKLQPGTATIQKTSTLRLRSGIFAGVVVLTSISVLVYLKRSRQ

SEQ ID NO: 201772 - protein, 45 aa, Glycine max
  Clone ID: PAT_MRT3847_24225C.1.pep
RCSGFCILLTLSTRAYGIMISRWRLVLIWERSLSHPNSIMDMYHI

SEQ ID NO: 201773 - protein, 61 aa, Glycine max
  Clone ID: PAT_MRT3847_24226C.1.pep
TKSRMAIRIHLPAHLHIAAYVPVSMSSSMSKGCINRRIYEPIVSPLARHLSRNKSVFPYAC

SEQ ID NO: 201774 - protein, 40 aa, Glycine max
  Clone ID: PAT_MRT3847_24227C.1.pep
YVSNCYVTPFQNPLIIISALAKTRLKKKLGGCSPRAEFAR

SEQ ID NO: 201775 - protein, 129 aa, Glycine max
  unsure (1)..(129): unsure at all Xaa locations
  Clone ID: PAT_MRT3847_24228C.1.pep
PACTXSGIPGRPTRPLDRERPPFFFFFFFFFFFFFFFFYFYYVLFFFSLNYLVSYLFHYFIFRGKKRTILNAESRRGGGTSKPKIEYLPHDKIRGKKKGTLNKPKKKRGAEFRGPQELRNAVPCRQYIF

SEQ ID NO: 201776 - protein, 64 aa, Glycine max
  Clone ID: PAT_MRT3847_24229C.1.pep
MATKQGGKAKPLKKPKSDKKDYDENDGANIQKKKEEEKALKELKAKAQQKGSYGGPGLKKRGKK

SEQ ID NO: 201777 - protein, 62 aa, Glycine max
  Clone ID: PAT_MRT3847_2422C.1.pep
KELRWRLGLRLFNLDIIREYGTRDHFYVIDINYFPGYGKMPEYEHIFTDFLLSLGQGNYKKK

SEQ ID NO: 201778 - protein, 93 aa, Glycine max
  Clone ID: PAT_MRT3847_24230C.1.pep
RYEDTKAKGKAAIDGVRNPLGKPGGALIHQLMILTLGALANATPYLGGVLLLIAPACLAAAKSLHTQLTALRREEELDKEMERARAERNTREG

SEQ ID NO: 201779 - protein, 72 aa, Glycine max
  Clone ID: PAT_MRT3847_24231C.1.pep
LLTFFQLLIPTHKQTKTRGYFQRGADSYKQLNIKISPSQHPHTSQSIFHNQNPFFSTSPKTSPISTHLLTHF

SEQ ID NO: 201780 - protein, 122 aa, Glycine max
  Clone ID: PAT_MRT3847_24232C.1.pep
WGVLRGGPFGSSGGFSFASMLAGGGLLALAVFGFFGPVGALWGALLASACCAGSFKLPCPLCFFLALTACLFVALCFLWLRSWVFVLCLVRALSFVVFPFRGFPVLWVLVPLGFCPFPVPFS

SEQ ID NO: 201781 - protein, 186 aa, Glycine max
  unsure (1)..(186): unsure at all Xaa locations
  Clone ID: PAT_MRT3847_24233C.1.pep
CEKWIRAAEDPLEGSKAKWWLSRLVGPPKKVTIDWQFPFSEGKLFVLSNSAWVWKGVINGFXVGMGRHGEPLFPNRAWFLTXEGMPTRAFSXEKEDIECPTSCNLPAVFCPFNRNPSFAPQRHLEIFPTPRWRASTNFHESGIELFIGVLSAEXFAERMAVKKSWMQHXLIKSEVSVARFFVALHA

SEQ ID NO: 201782 - protein, 54 aa, Glycine max
  Clone ID: PAT_MRT3847_24234C.1.pep
GGHFFAVLFSISNFVKLLCLQPAKLYKLKHLSKVEVVANDPCGCTFTLGFDNLK

SEQ ID NO: 201783 - protein, 114 aa, Glycine max
  Clone ID: PAT_MRT3847_24235C.1.pep
WRRCLLICRSRLESTRKSVMAKLVCLGEIASCQNPSQKQRIHHGPRQPTLHTTTKPKPEAPPRNRRSTFRDVTMLRVILFLDRGGRRMVWLRLGIIGSRREEDCQESWRFAVER

SEQ ID NO: 201784 - protein, 90 aa, Glycine max
  unsure (1)..(90): unsure at all Xaa locations
  Clone ID: PAT_MRT3847_24236C.1.pep
RXXXXKAIXFLKXTDGLLKIXDILPFFPDFALIDDFKEAICSXLEDXXXXXXQLXEXXNDXTHGADNIXNDISALLQRCTIXDRXEECGV

SEQ ID NO: 201785 - protein, 67 aa, Glycine max
  Clone ID: PAT_MRT3847_24237C.1.pep
TPKKKAFFTKKTFFHQGNHEIPKIKIFFLKNPKKTTEKANIFFYKTHTNFYNPISPKNHNRVLGEKL

SEQ ID NO: 201786 - protein, 40 aa, Glycine max
  Clone ID: PAT_MRT3847_24238C.1.pep
ISKQFNWIGRMVSEEWSTDSHFLFIIDLTDQLALLSNMSS

SEQ ID NO: 201787 - protein, 130 aa, Glycine max
  Clone ID: PAT_MRT3847_24239C.1.pep
MAYGRSRASSVLDGFTLNPLPYPVLLILSLIFIFLGVSWYFSYEEVVETAEQQLGWLLFCTPVVLILIVRWLSSMENSYWFFSASLPGERRGRTHQGLSEGSSPWGVAALILVLLIMVQYQSNFLDSWFV

SEQ ID NO: 201788 - protein, 188 aa, Glycine max
  Clone ID: PAT_MRT3847_2423C.1.pep
EVLFPSTHASVKNRHVAKPLVADGSAKSHELSLAYEHFSLQNLEPPLVLQEFVNHGGVLFKVYIVGDAIKVVRRFSLPDVSKWELSKDAGIYRFPRVSCAAASADDADLDPTVAELPPRPLLEKLAKELRWRLGLRLFNLDIIREYGTRNHFYVIDINYFPGYGKMPEYEHIFTDFLLSLGQGKYKKK

SEQ ID NO: 201789 - protein, 102 aa, Glycine max
  Clone ID: PAT_MRT3847_24240C.1.pep
RPGPVVPEGGCSHPAFSTDWLRWLSWAPVFKQGDSGAGSACGGSPVCFGPLPSFAPAADPAVPVCCPVPSSSSSMRTAIVKCRKEQKKKKKTRKNKKNLSTD

SEQ ID NO: 201790 - protein, 118 aa, Glycine max
  Clone ID: PAT_MRT3847_24241C.1.pep
MSLNKCMPRVFSFIDINFGKKKKKKKKKKKKKKKKKKKKKKKKKKKKKKKKKKKKKKKKKKKKKNFLLGQKKHQKKNFVCAFPPFWGAFNGSRSHTFVTLWGDLFLPLKYFYPPVLYP

SEQ ID NO: 201791 - protein, 191 aa, Glycine max
  Clone ID: PAT_MRT3847_24242C.1.pep
MSKPFCALFALSIILVTCHAQTLNTSTTCEPSKCGNLNISYPFWKKSNTNVQEFCGYPEFGLECLDDQAIMIFPTDRYQVTDINYDIHSITLLDIDVLGQPCPRARHNVSLHNLPLSFSSLDFNLSFYFNCSSYPSSIQHIGCMKHDKYQSYVFKTGDEAESNGFDWLRHCEEHVVVTVKKDEIEISGLIT

SEQ ID NO: 201792 - protein, 89 aa, Glycine max
  unsure (1)..(89): unsure at all Xaa locations
  Clone ID: PAT_MRT3847_24243C.1.pep
LETDRLRVGKIYHLYKQGATNTLERVPTHTHASGNALKRVXANGYTNIGLGNKINTQTAIXTPIESAGQALHSLMKARMEEEKPQAKAT

SEQ ID NO: 201793 - protein, 41 aa, Glycine max
  Clone ID: PAT_MRT3847_24244C.1.pep
FEARFKQVSEACDLVSDPEMRQIYDLCGHYALDCNASIKNM

SEQ ID NO: 201794 - protein, 219 aa, Glycine max
  Clone ID: PAT_MRT3847_24245C.1.pep
LDERSVLEYVKGVPGLWSKLELDDDNIITVKEIGDGNLNFVFVVANSVIIKQALPYIRCIGESWPLTKDRAYFEAMALQEQGRLTPHHVPQVYHFDPTMSLIAMRYLEPPHIVLRKGLIAGIQYPLLARHMAHFMANTFFFTSLLFRSTLDHKREVAKFCGNAALCRHTQQVVFSDPYQISQYNHWTSPYLDPDAEALRQDDLLKLEIADLKSKYIYSP

SEQ ID NO: 201795 - protein, 169 aa, Glycine max
  unsure (1)..(169): unsure at all Xaa locations
  Clone ID: PAT_MRT3847_24246C.1.pep
AVKALRFSSALSVLKDEFLRSRDYPRCPPTCHLFHRFRQLGYACIRFGQFDRAKETFEVTADYKSMLDLFICHLNPSAMRRLAQKLEDEDLDSXLRRHCEWILRVRSSGWTQGIFANFASESMVPKGPEWGGGDWEIKTPTYAKDIPHWELAAEVLPYMKTDDGAIPYI

SEQ ID NO: 201796 - protein, 37 aa, Glycine max
  Clone ID: PAT_MRT3847_24247C.1.pep
TNLNKIYICMLFFKFGPKNIYNTFSLFKREIFFFPKI

SEQ ID NO: 201797 - protein, 172 aa, Glycine max
  unsure (1)..(172): unsure at all Xaa locations
  Clone ID: PAT_MRT3847_24248C.1.pep
NAVYEIEEQFMKIXXCCSRXXXXPGLNLLRRIAGCQEYLTQENFEKLWCWLYPVAFIISRDWINPIWNSTSPKWIEGFITKEEAESSLQGPTGFQEPGTFILRFPTSRSWPHPDAGNLVVSYVGNDYKLHHRLLSMHHVYGSGDNRVDVKPLQDMLLAEPELSRLGRIIRSH

SEQ ID NO: 201798 - protein, 48 aa, Glycine max
  unsure (1)..(48): unsure at all Xaa locations
  Clone ID: PAT_MRT3847_24249C.1.pep
GCTDANNVLKELQYAKTAYPNGYIHIMXLYNFRHVQFISFIVYKPPRF

SEQ ID NO: 201799 - protein, 449 aa, Glycine max
  Clone ID: PAT_MRT3847_2424C.1.pep
ESKANFRQAINENKLFMIDYHDIYLPFLEGINALDGRKSYATRTIFFLTPRGTLKPVAIELSLPHAGPNSRSKRVVTPPVDATTNWMWQLAKAHVCSNDAGVHQLVNHWLRTHANLEPFILAAHRQLSAMHPIFKLLDPHMRYTLEINALARQSLINADGIIENCFTPGRYAMEISSAAYKNFWRFDMDSLPADLIRRGMAVPDPTQPHGLKLILEDYPYAADGILIWSAIEDWVRTYVNHYYPHSSLICNDKELQSWYSESINVGHADLRHESWWPTLNNSEDLVSILSTLIWNASAQHAALNFGQYPYGGYVPNRPPLMRRLIPEEGDPEYASFHADPQKYFLNALPSLLQATKFMAVVDTLSTHSPDEEYLGERQQPSIWSGDAEIVEAFYDFSAKVRQIEKVIDSRNLDRTLRNRCGAGVLPYELLAPSSEPGVTCRGVPNSVST

SEQ ID NO: 201800 - protein, 89 aa, Glycine max
  unsure (1)..(89): unsure at all Xaa locations
  Clone ID: PAT_MRT3847_24250C.1.pep
ANTPKTAAPVVLTPIVKPTGSLPPMIERQTTSTPPTANGRDTXCTPPQYLXHATCLIDTLKLSACVDLVGGXGYTGSGGPVANQCCRVL

SEQ ID NO: 201801 - protein, 124 aa, Glycine max
  Clone ID: PAT_MRT3847_24251C.1.pep
FFFPPLKNLFFFFGTGLGTLPLISTSKKIKEKTIHLWDLGKTGQAKKPGVWDLFFFIRHKNPRKKKKKKKPKGRVQSTKNFRVLGTLKRKQVHFFFLGMGAPTWIIGMANKSIGTGWVQKGNPK

SEQ ID NO: 201802 - protein, 78 aa, Glycine max
  Clone ID: PAT_MRT3847_24252C.1.pep
SKCWQVTSDSHIIALRQCHMIPREIHDNRGIKKTRRFGDLHCDEVLWGERLNTRREIHGSNARKRERKNPFAKGRRRT

SEQ ID NO: 201803 - protein, 151 aa, Glycine max
  Clone ID: PAT_MRT3847_24253C.1.pep
VEIKLQVVNVFIEFLILLGSNKDMAKISLALVFALVVTVPFHSVMGQDDAWKSIIDQAKDEASKAGLSEDTIFGAEKAITDGSAEKVAEDALGEGSLDDWVKQAKDMTNGESSPSGAPEDLPDDEEEDNLLETPELAPKIAPSKAPVGAPT

SEQ ID NO: 201804 - protein, 51 aa, Glycine max
  unsure (1)..(51): unsure at all Xaa locations
  Clone ID: PAT_MRT3847_24254C.1.pep
GVFFIIITFFFFIRPASXXPIKIKNKSSFQAKLTLETYLKIALVTAFFTFQ

SEQ ID NO: 201805 - protein, 42 aa, Glycine max
  Clone ID: PAT_MRT3847_24255C.1.pep
ISSSFNLALMISSQVNYIFHNGFLKIPATLPLARFSTAIRRL

SEQ ID NO: 201806 - protein, 57 aa, Glycine max
  Clone ID: PAT_MRT3847_24256C.1.pep
SSRIGSRRLREDDRNCLVSHMSWRLYKCKMEIFSKGEKDKKGNEGKKMTLIACFSFF

SEQ ID NO: 201807 - protein, 650 aa, Glycine max
  Clone ID: PAT_MRT3847_24257C.1.pep
GLVLELVLSCKKFELNESENVYLKESVERMDKDLHEAKTENDHFNCQIESSEHLLEKKNVELLEMEGRLKAAEMLSAEFCRDIEKLKMEKQQSRLINENLERQILELSEGCMNHKREIEHLNEANRSLQSEMRCLRQEVEQQRAREETLSSELLDKTNEFELWEAEAATFYFDLQISSISEALLENKVTELTGVCMRLEDESDAKSLEIKQMTERVCLLESEIGGLKGQLSAYNPVISSLKEDFASLEHTALVRINKMPVECNQEQKDAVIETCLQGNGYQSSTDNKSALIPDGVSDLLSMKARIRAVEKLMMEELERHVKEESLTTNVKAEAVTEMTEHSNLEVGTYPEIDDRKVVMKIKKDNSKRGNNAWRTKSQKRLIMIDIPLDDYKDDPDSNKYCKRDHTRCNDHMLELCETDQHDVTEESKHNSVSIEDVITCHESERCQNYSSELETEKELGVDKLELWKTRKETTSEDSKRKILERLASDSQKLAILKMTLQDLKKKTETKKRRQKGAGTEYETVKRQIDEVEGAVVKLVDTNDQLTKDLEESAPSLNRQTSVELEKSRHIQRKRITEQARKGSEQIGRLQFEVQNIQYTLLKLADESKGKSRFTGKTVVLLRDFIHSGSKRTSKKRNKGFCGCSRPSTDEH

SEQ ID NO: 201808 - protein, 340 aa, Glycine max
  Clone ID: PAT_MRT3847_24258C.1.pep
MTTITLSLPCTNPYFLSSSPKRFRFNTQSAQLSPSSSSPLQSPPLPKTTGVIVIGAGLAGLAAATHLNSQNIPFLLLEASDAVGGRVRTDIVDGFLLDRGFQIFITAYPEAQKLLNYQSLNLQKFYSGARIFYDGQFHTVADPLRHFWDSARSLTNPIGSPLDKLLIGSTRIRALVKSDEEILTAEEVPTIELLKKLGFSDSIIRRFFRPFFGGIFFDPDLETTSRLFNFIFKCLALGDNTLPARGISAIPEQLAARLPSGSILLNSKAVSVDLDNSDSPLVRLQNGDVLKSELGVIVAVEEPAAVHLLSGRTGPVPKKPVRSTVCLYFTANRDQIPVPD

SEQ ID NO: 201809 - protein, 36 aa, Glycine max
  Clone ID: PAT_MRT3847_24259C.1.pep
YTCVRAYVHEHTVAYMYALPCAQSCALECACVHAHA

SEQ ID NO: 201810 - protein, 137 aa, Glycine max
  Clone ID: PAT_MRT3847_2425C.1.pep
MEEPSKLKRAMIDSLAGAISGGISRTVTSPLDVIKIRFQVQLEPTSSWALLRKDLASATAAASKYTGMLQATNDILREEGVQGVWRLYVPALLMVMPYTAISFTVHSLLKTDPPGSSKTENHINLSPYLSYISGALA

SEQ ID NO: 201811 - protein, 425 aa, Glycine max
  Clone ID: PAT_MRT3847_24260C.1.pep
MARVSRSSPPRLLYSLCCTTASRSPASSLIGGAFHLRHFSAGNAARTKPDKEPWWKESMERLRNIGISAHIDSGKTTLTERVLYYTGRIHEIHEVRGRDGVGAKMDSMDLEREKGITIQSAATYCTWKDYKINIIDTPGHVDFTIEVERALRVLDGAILVLCSVGGVQSQSITVDRQMRRYEVPRLAFINKLDRMGADPWKVLNQARSKLRHHSAAIQVPIGLEDDFKGLVDLVQLKAFYFHGSNGENVVTEEVPADMEALVAEKRRELIETVSEVDDKLAEAFLGDETISAADLEEAVRRATIAQKFIPVFMGSAFKNKGVQPLLDGVISYLPCPIEVSNYALDQTKNEDKVELRGSPDGPLVALAFKLEEGRFGQLTYLRIYEGVIRKGDFIINVNTSKKIKVPRLVRMHSDEMEDIQEAHAG

SEQ ID NO: 201812 - protein, 80 aa, Glycine max
  Clone ID: PAT_MRT3847_24261C.1.pep
FNSSPAEFPEGIISSSPSPLFQTHLESPTFFPVIPSPEIPGFTSPLGQHLSDFSGSSTSKGNFQAYVPVGVSFLIKVKSL

SEQ ID NO: 201813 - protein, 56 aa, Glycine max
  Clone ID: PAT_MRT3847_24262C.1.pep
NSRLRLTITSKCNAWVHLSPALSPPYPRFVLEVIAFMLMTWQAFYLLFPCVYQYLH

SEQ ID NO: 201814 - protein, 84 aa, Glycine max
  unsure (1)..(84): unsure at all Xaa locations
  Clone ID: PAT_MRT3847_24263C.1.pep
XDTEGGTWTHWGDGQCSGPARLPVWGRRACACAASALVTVSCFLPAGNWHLLACDVNAFERIHPFSTVTRRRRLTWALIDMMHP

SEQ ID NO: 201815 - protein, 99 aa, Glycine max
  unsure (1)..(99): unsure at all Xaa locations
  Clone ID: PAT_MRT3847_24264C.1.pep
HFCGVAFVYVEIRHLIAGSISCAKILXPVTRPRTTVLGKDPWTTVYRHIQQFFESGGDPGGPIITLHAXIYWSNCTYVKERISLWAKDAEELAKGDYLP

SEQ ID NO: 201816 - protein, 464 aa, Glycine max
  Clone ID: PAT_MRT3847_24265C.1.pep
MIFQSCFMMTATLLLFVIAQCVVGVNSLSQADKISTLPGQPPVKFQQYAGYITVDDKQKRALFYYFVEAEVEPASKPLVLWLNGGPGCSSVGAGAFVEHGPFKPSENGLLKNEHSWNKEANMLYLESPAGVGFSYSANKSFYDFVNDEMTARDNLVFLQRWFTKFPELKNNDFFITGESYAGHYVPQLAQLIVQTKTKFNLKGIAIGNPLVEFNTDFNSRAEFFWSHGLISDSTYEIFTKVCNYSQIRRQHQGGTLTPICSGVNRLVSTEVSRYIDTYDVTLDVCLSSADQQAYVPNQLTQLQEGAKIDVCVEDETIAYLNRKDVQEALHAKLVGITSWSTCSDVLKYDMQNLEIPTISILGALAKSGIRVLVYSGDQDSVIPLTGTRSLVNGLAKDFGLNTTVSYRAWFEGRQVAGWTQVYGDILSFATIRGAAHEAPFSQPERSLVLLKAFLEGKPLPEPFL

SEQ ID NO: 201817 - protein, 75 aa, Glycine max
  unsure (1)..(75): unsure at all Xaa locations
  Clone ID: PAT_MRT3847_24266C.1.pep
KKMFFFPPQKKTRRMNCFGFFQKRPKNKPPPDLDLKSPSVKQENVWGRIRLPLFKSXKKKKKKKKKKKKIKKXXX

SEQ ID NO: 201818 - protein, 188 aa, Glycine max
  unsure (1)..(188): unsure at all Xaa locations
  Clone ID: PAT_MRT3847_24267C.1.pep
MTGKASASKPNIGLSGSDGLSHAYIQYPPLRFNVPGSSGLFYDDGNKFLLSPTADQVFSWKVGPFDPLSDPNTDSISEGPIIAIRYSLDTKVIAIQRSNHEIQFWDRETGGTFSHKCKPESESILGFFWTDSQQCDIVLVKTSGLDLYTYNSESKSLQLVQTKKLNVSWXYVYTHESXLVLLASGMQC

SEQ ID NO: 201819 - protein, 59 aa, Glycine max
  Clone ID: PAT_MRT3847_24268C.1.pep
LKGRDKVLIILTPPFLTYNSWSEFRNITKINISPSHQMVALRLTTLIGCKNTMILRSLN

SEQ ID NO: 201820 - protein, 186 aa, Glycine max
  unsure (1)..(186): unsure at all Xaa locations
  Clone ID: PAT_MRT3847_24269C.1.pep
MSSQHRPPVKLDVPRFDGTDPLGWIFMXHTFFNFHSTPDEDRITMASFYMDGPALSWYQRMYRNGFITSWNGLLQALETRFAPSYYDDPKGALFKLSQRGSVNDYLTDFERLANRIVGLQSQFQLSCFISGLSPEIRREVIALQPLSLPQAAALAKLKEDKLTDRRHRYRISPTTSHYTPPALPRV

SEQ ID NO: 201821 - protein, 156 aa, Glycine max
  Clone ID: PAT_MRT3847_2426C.1.pep
METSQPLSIESFSYSWLVNLRPSALESLESSLRTPLDASDETSSFIEMDPRMPPSKRFFKNSQDSKFDFPISQSPLTLVHADELFSNGYLMPLFVESLQMEEYESSDSNTSLVSSSSHAPKSEAPTGPSRCLSLKRCRTLSRRVFQKYLNFLRPLC

SEQ ID NO: 201822 - protein, 70 aa, Glycine max
  Clone ID: PAT_MRT3847_24270C.1.pep
VVIIPSPESLLGPGTVTPKTLLDQFCYLVRSYYLLKVICMMVIAWIVIAARAVLNLRQLGHAIIYSIYAA

SEQ ID NO: 201823 - protein, 66 aa, Glycine max
  Clone ID: PAT_MRT3847_24271C.1.pep
MRENLYPLHITRLDTIKIMITNSKLQYHHNFFQTIMCYFIFNIILKLILIHINFYLPCHHPKHAIQ

SEQ ID NO: 201824 - protein, 73 aa, Glycine max
  Clone ID: PAT_MRT3847_24272C.1.pep
GLLLHLWLNLLRVFYPMSLGVGLHQMWSLVSTDFIRYKSPSRFRTTYVTLPCILQKERSPLMNFYALDYFSWD

SEQ ID NO: 201825 - protein, 87 aa, Glycine max
  Clone ID: PAT_MRT3847_24273C.1.pep
MGGHGEVTIFADTNLGTRIAFNAPPDITAASLKRDFEKAHFSCLPDIGEIQVKGLMVKRKSCFYYLPDSFPIQYAFPAIRGTWFLHV

SEQ ID NO: 201826 - protein, 81 aa, Glycine max
  unsure (1)..(81): unsure at all Xaa locations
  Clone ID: PAT_MRT3847_24274C.1.pep
QETLXXVQHXXAVXGXRYQGPQXLXXXRCXVXXXSXMGLQRQXXGVSKXQMXVHNLEYMEHFXXMKNEISNLXPXXVWSXV

SEQ ID NO: 201827 - protein, 66 aa, Glycine max
  Clone ID: PAT_MRT3847_24275C.1.pep
KKSQSDQSPVQFQVPFFGCSTLIQGPLHKFQDPWSLSRWKIPWGNPLPLWCLMMVNFHWVKFRNLK

SEQ ID NO: 201828 - protein, 75 aa, Glycine max
  Clone ID: PAT_MRT3847_24276C.1.pep
MPLRRGRGTLARPSERESGAELLLYPTGRGIRIPRSLKSLTLSPLLPAITINITLTYLSLANPLNQSITATPAPE

SEQ ID NO: 201829 - protein, 167 aa, Glycine max
  unsure (1)..(167): unsure at all Xaa locations
  Clone ID: PAT_MRT3847_24277C.1.pep
QPMIDSDALSVLLDKKLQELASRINLPQCTLATEGSSTGLRSSVQDQVPSVSSTTPKEQNKSFCSDLSSDKLDSMHNSHYCSSDDPVLNMNRQLLTSEVSEDPSCSSNSESGNDLVCWHSTAVAGFETPFVCESYLDSEDSAYGSTVYSPTQXEALSSXXQIGDXGP

SEQ ID NO: 201830 - protein, 94 aa, Glycine max
  Clone ID: PAT_MRT3847_24278C.1.pep
EQTATELCGDCGFEKGNFFTEYRPDLKKTTGNSDDHTGPGPLHQQHHCLISSTCSISVAASSFVNSGIAIVSSSRIENSVTRRFTSLVLNLPKS

SEQ ID NO: 201831 - protein, 47 aa, Glycine max
  unsure (1)..(47): unsure at all Xaa locations
  Clone ID: PAT_MRT3847_24279C.1.pep
XAGRVKKHNHDPSGSFSNMDIDMRGAYLRGRRLHLPPTISMLMTLKD

SEQ ID NO: 201832 - protein, 760 aa, Glycine max
  unsure (1)..(760): unsure at all Xaa locations
  Clone ID: PAT_MRT3847_2427C.1.pep
LEAKKSNEAVLKDWSKKSNLKAERVNYTAEFIVDSSFGEPGAITVTNKHQKEVFLESITIEGFASGPVHFPCNSWVQSRKDLPGKRIFFSNKPYLPGDTPAGLRLLREKELRNLRGDGKGVRNLSDRIYDYDIYNDLGNPDKGIELARPNLGGSDMYPYPRRCRTGREPSDTDMYAESRVEKPLPMYVPRDERFEESKQNTFTVKRLKAVLHNLIPGLKASLSSSNQDFNEFSDVDGLYSEGLLIKLGWGLQDDVLKKIPFVSKIQESSQGLLKYDTPKIISKDKFAWLRDDEFARQAIAGVNPVNIEKLQVFPPVSKLDPEIYGPQESALKEEHILNQLNGMTVQXRKSYATRTIFFLTPRGTLKPVAIELSLPHAGPNSRSKRVVTPPVDATTNWMWQLAKAHVCSNDAGVHQLVNHWLRTHANLEPFILAAHRQLSAMHPIFKLLDPHMRYTLEINALARQSLINADGIIENCFTPGRYAMEISSAAYKNFWRFDMDSLPADLIRRGMAVPDPTQPHGLKLILEDYPYAADGILIWSAIEDWVRTYVNHYYPHSSLICNDKELQSWYSESINVGHADLRHESWWPTLNNSEDLVSILSTLIWNASAQHAALNFGQYPYGGYVPNRPPLMRRLIPEEGDPEYASFHADPQKYFLNALPSLLQATKFMAVVDTLSTHSPDEEYLGERQQPSIWSGDAEIVEAFYDFSAKVRQIEKVIDSRNLDRTLRNRCGAGVLPYELLAPSSEPGVTCRGVPNSVST

SEQ ID NO: 201833 - protein, 54 aa, Glycine max
  unsure (1)..(54): unsure at all Xaa locations
  Clone ID: PAT_MRT3847_24280C.1.pep
HAVLMEIISFRFGKXTWGDVVILNNPQHPRHFMTKLVVKFYGDTLTYISNPKTY

SEQ ID NO: 201834 - protein, 357 aa, Glycine max
  unsure (1)..(357): unsure at all Xaa locations
  Clone ID: PAT_MRT3847_24281C.1.pep
MSLLSDLINLNLSDITDKVIAEYIWVGGSGMDMRSKARTLSGLVNDPSKLPKWNYDGSSTGQAPGQDSEVILYPQAIFRDPFRRGNNILVMCDAYTPAGEPIPTNKRNKAAKIFSNPDVAAEEPWYGLEQEYTLLQKDVQWPLGWPLGGFPGPQGPYYCGTGANKAFGRDIVDSHYKACIYAGINISGINGEVMPGQWEFQVGPSVGISAADELWVARYILERITEIAGVVLSFDPKPIQGDWNGAGAHTNYSTKLMRNDGGYEIIKKXAIAKLEKRHKEHIAAYGEGNERRLTGRHETADMNTFLWGVANRGASIRVGRDTEKAGKGYFEDRRPASNMDPYVVTSMIAETTILWKP

SEQ ID NO: 201835 - protein, 355 aa, Glycine max
  Clone ID: PAT_MRT3847_24282C.1.pep
MSLLSDLINLNLSDITDKVIAEYIWVGGSGMDMRSKARTLSGLVNDPSALPKWNYDGSSTGQAPGEDSEVIYIHKQFRDPFRRGNNILVMCDAYTPAGEPIPTNKRNKAAKIFIHPDVAAEEPWYGLEQEYTLLQKDVQWPLGWPLGGFLGPQGPYYCGTGANKAFGRDIVDSHYKACIYAGFNISGINGEVMPGQWGFQVGPSVGISAADELWVARYILERITEIAGLVLSFDPKPIQGDWNGPGAHTNYSTKLMRDDGGYEIIKKAIAKLEKRHKEHIAAYGEGNERRLTGPDETADMNTFLWGVANRGASVRVGRQTLKAGKGYFEERRPASNMDPYVVTSMIADTTILWKP

SEQ ID NO: 201836 - protein, 356 aa, Glycine max
  Clone ID: PAT_MRT3847_24283C.1.pep
MSLLSDLINLNLSDITDKVIAEYIWVGGSGMDMRSKARTLSGPVKDPSKLPKWNYDGSSTGQAPGQDSEVILYPQAIFKDPFRRGSNILVMCDAYTPAGEPIPTNKRNNAAKIFGHPDVAAEEPWYGLEQEYTLLQKDVQWPLGWPLGGFPGPQGPYYCGTGANKAFGRDIVDSHYKACIYAGINISGINGEVMPGQWEFQVGPSIGISAADELWVARYILERITEIAGVVLSFDPKPIQGDWNGAGAHTNYSTKSMRNDGGYEVIKKAIAKLEKRHKEHIAAYGEGNERRLTGRHETADMNTFVWGVANRGASIRVGRDTEKAGKGYFEDRRPASNMDPYVVTSMIAETTILWKP

SEQ ID NO: 201837 - protein, 144 aa, Glycine max
  unsure (1)..(144): unsure at all Xaa locations
  Clone ID: PAT_MRT3847_24284C.1.pep
RTPTRPDKVREVCAAVGXTSRYTPTALMESGXKKDRGIIEEXFGRMSYVAHTVHQTQEKDSLEGNIYFDIKSRSRLEKVASTEAQFVSGKTYKCDIVGAGSHSSEDFPEKDEQERLMKIDPRVRQEIDPHSNEVQAQMETNSVN

SEQ ID NO: 201838 - protein, 62 aa, Glycine max
  unsure (1)..(62): unsure at all Xaa locations
  Clone ID: PAT_MRT3847_24285C.1.pep
ENPNHCKDSFGFRPGMISITLDLKRGGNGRFLTLAAKGRFDKNAPAFTWXVVKPLKGQKAPG

SEQ ID NO: 201839 - protein, 67 aa, Glycine max
  Clone ID: PAT_MRT3847_24286C.1.pep
HKTWFNLVHCSMWALFSKHTPTSHSASLIPGAPQLNMLHIKILHLSSDFLVLPIIITFFRSQHLKAK

SEQ ID NO: 201840 - protein, 266 aa, Glycine max
  Clone ID: PAT_MRT3847_24287C.1.pep
MYWEVMAGNMGWSVIIEEEGWRKGPWTSEEDRLLIQYVKFHGEGRWNSVARLAGLKRNGKSCRLRWVNYLRPDLKKGHITPQEESIIQELHARWGNRWSTIARSLPGRTDNEIKNYWRTHFKKKTKTPSDAAEKARIRSSRRQQFQQQQQQLKQQQVQQQQQQQQQFQFNLDMKGIINLLEENNHRVPSISQEAQEMASMYPNTSEHQDYFYSMFNVNDNNVSAPECLNEEILWDGLWNLDDVLCNFNAASATSKASLHNLVAPFC

SEQ ID NO: 201841 - protein, 72 aa, Glycine max
  Clone ID: PAT_MRT3847_24288C.1.pep
PLPPPPPPPPPHPSTPLPPNSPNALSTPSAPLITPQLFSSQLMELSTEAFKQLLILLCGSNKLTPTLSRGIN

SEQ ID NO: 201842 - protein, 73 aa, Glycine max
  Clone ID: PAT_MRT3847_24289C.1.pep
QTPTVKNFPRLFLTLSIPLKSYLNFLTTDNITPYYNQLTPTNCSSFQNTKQTITPFFPYQHDIYAHKQIKTIP

SEQ ID NO: 201843 - protein, 328 aa, Glycine max
  unsure (1)..(328): unsure at all Xaa locations
  Clone ID: PAT_MRT3847_2428C.1.pep
MEEPSKLKRAMIDSWAGAISGGISRTVTSXPLDVIKIRFQVQLEPTSSWALLRKDLAAASKYTGMFQATKDILREEGVQGFWRGNVPALLMVMPYTAIQFTVLHKLNTFASVSSIPENHINLSPYLSYVSXALACCAATFGSDPFDLLRTILASQGEPKVYPNMRSAFMDIIHTRGFQGLYSGLSPTLVEIIPYAGLQFGTYDTFKRWGMAWNHRYSNTSAEDNLSSFQLFLCGLAAGTCAKLVCHPLDVVKKRFQIEGLQRHPRYGARVEHRAYRNMPDAMQRIFRLEGWAGLYKGIIPSTVKAAPAGAVTFVAYELTSDWLESTFN

SEQ ID NO: 201844 - protein, 171 aa, Glycine max
  Clone ID: PAT_MRT3847_24290C.1.pep
LASDCNSSHECESNARIQLYQLYCSQLKELKELKQLSQKVMMENSSLDYSTTVGSTHQTVVNAEKPLEGSNVVASLVDQHLNGQKVKSRPSRYLNVGGTHFHERKQPSFNDEDYLSLSEFLSDSNNDLTLDEIQKMKQNESISVSIISNNGTNIAQERSFMHQKSLTLSST

SEQ ID NO: 201845 - protein, 63 aa, Glycine max
  Clone ID: PAT_MRT3847_24291C.1.pep
ASSEIKTLLYLQRVLFLMLMPLANCNFYNGNAFLNCLYFSTSFLYYLMIENDDDFPSQSNKFN

SEQ ID NO: 201846 - protein, 83 aa, Glycine max
  unsure (1)..(83): unsure at all Xaa locations
  Clone ID: PAT_MRT3847_24292C.1.pep
HSWKKKKKLFKLALTKQTGRNSTGGKAPRKLFATRVALKSAPXTGGVKKPNRYRPGTVALREFRKSQKVTELLIRKLPFQRLV

SEQ ID NO: 201847 - protein, 91 aa, Glycine max
  Clone ID: PAT_MRT3847_24293C.1.pep
KGDAPPPFFVLLQSLTQAKNGVVFVFGPGVKSPFVKPNWRAVYKGIGVGHPRSRVGVFYWGPPALTKQVGQLAWVFSPPPTPKFFFPKKNF

SEQ ID NO: 201848 - protein, 41 aa, Glycine max
  Clone ID: PAT_MRT3847_24294C.1.pep
CSLRESEQLHYLVFICSTRGSLYVVLLQSGEHPGGAAAMRL

SEQ ID NO: 201849 - protein, 65 aa, Glycine max
  Clone ID: PAT_MRT3847_24295C.1.pep
LEHSSASDTTIESVSNYFIQSMVSFLDTSLSGSQKKTEFLSSGCVRAFISLVTIGIRNNDFKSHM

SEQ ID NO: 201850 - protein, 181 aa, Glycine max
  unsure (1)..(181): unsure at all Xaa locations
  Clone ID: PAT_MRT3847_24296C.1.pep
MGEDQPAQLPTPDVPPHHMKALEELKGILKGEIPSSFSDTRLLNFLRAKKFNVEQTTEMLRADFKWRKSEKVEEIFEFAKTEHGRLATEYWPNRMHGFDKYGIPVVYDKTGSCDTRSLLQVLSKDELLKTHIYFQERQQXSVDEAAAKIGKPLNCGIVFITDLEGLGXKHMYAPGLAVARE

SEQ ID NO: 201851 - protein, 51 aa, Glycine max
  Clone ID: PAT_MRT3847_24297C.1.pep
LQKLKVNSYEIHDYSNQGSKLTLKFREAGKVEFLDEWFHHQMCHSLKGGGG

SEQ ID NO: 201852 - protein, 69 aa, Glycine max
  Clone ID: PAT_MRT3847_24298C.1.pep
VPRSFGYKPKKASPLIHTQPSLSNALIAALKRAQAHQRRGCIEHQQQQPLLTIKVELEHLIISILDDPS

SEQ ID NO: 201853 - protein, 85 aa, Glycine max
  unsure (1)..(85): unsure at all Xaa locations
  Clone ID: PAT_MRT3847_24299C.1.pep
MAGKEQDVSLGANXFPEIQSIGTAALSQDDGKDYQESAPAPLVDPTAFTSWSFFKAGVAEFVATFLYLXITVLTVMGFSGAKSKC

SEQ ID NO: 201854 - protein, 85 aa, Glycine max
  Clone ID: PAT_MRT3847_2429C.1.pep
PQKKRFNFKKGEKKTPQGPNKSPFLMSKPPLTKGGFKIWALWIAAPPVFFLKNTLGLNPLKNSQYRGGGKIQKEPSQFFNFSPQR

SEQ ID NO: 201855 - protein, 76 aa, Glycine max
  Clone ID: PAT_MRT3847_242C.1.pep
HNLCSRFYTSYWGLSMIPRFVEVSSSLGQQKALILLDGTYVLSNSMLQMSTLVNMLQELTCHRGWYHDKKTVKRAA

SEQ ID NO: 201856 - protein, 140 aa, Glycine max
  Clone ID: PAT_MRT3847_24300C.1.pep
MMRGAEYERVLRYFDEDGDGKISPSELRNRIAMMGGEVMLKEAEMAIEALDSDGDGLLCLDDLMNLMEAAGEEEKLKDLREAFDMYDTERCGFITPKALKRMLKKLGESKSMVECKVMISRFDLNGDGMLSFEEFRIMMK

SEQ ID NO: 201857 - protein, 100 aa, Glycine max
  Clone ID: PAT_MRT3847_24301C.1.pep
QYKNPYIFMLLYTRQFMLVVPGYSSFEIQILGKFIASGCYFYNLQMHNNMILVIIKGPFFNAPKNKVQFSPCQFCCLTVRIEFWTGWLRLGYIKWRNYRF

SEQ ID NO: 201858 - protein, 48 aa, Glycine max
  Clone ID: PAT_MRT3847_24302C.1.pep
ILPNNRKCVIKSVLQIVSLSILKTLKIRGNLIFYLPTLDKYASKSRMK

SEQ ID NO: 201859 - protein, 449 aa, Glycine max
  unsure (1)..(449): unsure at all Xaa locations
  Clone ID: PAT_MRT3847_24303C.1.pep
MARKTKSIFLAFLLLCSFSLGVVVVAQEEAIAKSESEALGEPEKRETLEIIIGGGGSPAPSPSPPTYCPPPPPKPLSRLEKAKRVLLKFKTTIDDPNCYTQNWSQDTDACKFNGVRCANFPDDQQRAVAGLDLNGAKLATKNGGNLPLTGLLDSIPELTFFHVNSNNFSFVGGFPNNITSFRFFFELDLSNNKVSGXFPTQAIQNNQLVFLDLRFNQLTGPIDPKLFERDLDVIFVNNNKFTGYLPENFGSTPARYLTFAHNSLSGSLPKSVGYAPNLTEVLFLKNQFEGCLPFEIGYLKKAVVFDISENLLTGPIPLSFGCLKKIQFLNLAHNKLYGCVPDNLCQIPSIRNNGNLSLANNYFNEIGPSCWSLIKSKVLDVSGNCIPGLPNQKSPKECYQFYKTKKTCPNPNSFYYVPCKSYWGRQSKPTSPPSEPVTYKTLKPHRLRL

SEQ ID NO: 201860 - protein, 166 aa, Glycine max
  unsure (1)..(166): unsure at all Xaa locations
  Clone ID: PAT_MRT3847_24304C.1.pep
LECKCIDKALEIFHSTLEKNIVSWTSIILGLRINNRCFEALFFFREMIRRLKPNSVTLVCVLSACARIGALTCGKEIHAHALRTGVSFDGFMPNAILDMYVRCGRMEYAWKQFFSVDHEVTSWNILLTGYAERGKGAXATELFXRMVESNVSPMEXTFIXILCACS

SEQ ID NO: 201861 - protein, 72 aa, Glycine max
  Clone ID: PAT_MRT3847_24305C.1.pep
VGCKHCHSVWPCLCQQDRIYAHEVTNLCLEATCGYAGLRSYGRQGSLGVSSSPPVCGFLLSYLGVGNQVLYR

SEQ ID NO: 201862 - protein, 56 aa, Glycine max
  Clone ID: PAT_MRT3847_24306C.1.pep
VNIKKQHLLQPMGLMPSIPLNNKFDQPGTQGGPRARYAIAPDHLIAYYCDYCSFFI

SEQ ID NO: 201863 - protein, 120 aa, Glycine max
  unsure (1)..(120): unsure at all Xaa locations
  Clone ID: PAT_MRT3847_24307C.1.pep
QALAQREPTPTGRGPNAARETVDDTPGAAEFGPSTNHHATGGGASARAAELYGLPAMADGKQDEPRPVTRGXRLKKKPIIPRTARPHKTSKEIAHNKENSELNKEQTAIAKNNNRKTRNK

SEQ ID NO: 201864 - protein, 83 aa, Glycine max
  Clone ID: PAT_MRT3847_24308C.1.pep
IICFNLICLFSQVTSPYGNNLHHNENATQGQFAFTTAESGNYVACFWMDGKHQEEATVSLDWKTGIYAKDWESVAKKEKIEVN

SEQ ID NO: 201865 - protein, 41 aa, Glycine max
  Clone ID: PAT_MRT3847_24309C.1.pep
FCHDRLDPTALSRGQRPRSLLIERKGSGGTWVEGDQSSLEP

SEQ ID NO: 201866 - protein, 61 aa, Glycine max
  Clone ID: PAT_MRT3847_2430C.1.pep
VCAGPKIEHNPKGDQPALSVHVHVHVHVHDVVVSQQCYCSNFKRVRKKEGVERVADTKVGP

SEQ ID NO: 201867 - protein, 215 aa, Glycine max
  Clone ID: PAT_MRT3847_24310C.1.pep
MARDRNSRIGISVVMLLCFAAHFYVLPLAEAVWLTLPTSGTKCLSEEIQSNVVVLADYYVVTQEGGLQTLSVKVTSPYGNNLHHNENATQGQFAFTTAESGNYVACFWMDGKHQEEATVSLDWKTGIYAKDWESVAKKEKIEGVELELRKLEGAVEAIHGYLVYLKDKEARMREVSERTNGRVAWFSIMSLSVCILVSVLQVWYLKRFFLKKKLI

SEQ ID NO: 201868 - protein, 258 aa, Glycine max
  Clone ID: PAT_MRT3847_24311C.1.pep
MITWKDLYMVLTAVVPLYVAMILAYGSVRWWKIFSPDQCSGINRFVAIFAVPLLSFHFISTNNPYAMNFRFIAADTLQKIIMLFALAIWTNLTKTGSLEWMITIFSLSTLPNTLVMGIPLLIAMYGEYSGSLMVQVVVLQCIIWYTLLLFLFEYRAAKILIMEQFPETAASIVSFKVDSDVVSLDGRDFLETDAEVGDDGKLHVTVRKSNASRKSFMMTPRPSNLTGAEIYSLSSSRNPTPRGSNFNHADFFSMMGYQ

SEQ ID NO: 201869 - protein, 144 aa, Glycine max
  unsure (1)..(144): unsure at all Xaa locations
  Clone ID: PAT_MRT3847_24312C.1.pep
MITWKDLYTVLTAVVPLYVAMILAYGSVRWWKIFSPDQCSGINRFVAIFAVPLLSFHFISTNNPYAMNFRFIAADTLQKIIMLFALAIWTNLTKTGSLEWMITIFSLSTLPNTLVMGIPLLIAMYGDYSGSLMVQXVVVLQCII

SEQ ID NO: 201870 - protein, 37 aa, Glycine max
  Clone ID: PAT_MRT3847_24313C.1.pep
LHGRFVIMKSAKYSSLTMRHTLSTAAARSCQTLITQT

SEQ ID NO: 201871 - protein, 64 aa, Glycine max
  Clone ID: PAT_MRT3847_24314C.1.pep
FFHNRNIIIELELLIHVLYETIAIRTQNDQRGGKICFKLRAKLKNKNLISNQSFSFLLDNKVLQ

SEQ ID NO: 201872 - protein, 57 aa, Glycine max
  Clone ID: PAT_MRT3847_24315C.1.pep
EYEFLIIIFIINISTTFRLFTTIYLLRDTLNELIKVNEGKVEKGWITTFPSCTTIFI

SEQ ID NO: 201873 - protein, 110 aa, Glycine max
  Clone ID: PAT_MRT3847_24316C.1.pep
MEFNKDGALRAKKLAEKMLLQREFGGARMLAMKALELYPNLDGLPQFLATIEVYISSEDRVNGELDWYRILGVQPLADEETIPRRYRKLALTLHPDKNRSVGADGAFRLI

SEQ ID NO: 201874 - protein, 125 aa, Glycine max
  unsure (1)..(125): unsure at all Xaa locations
  Clone ID: PAT_MRT3847_24317C.1.pep
KKLPHLLPSLLCEASKSAMPATKHIPAPVRWGYPAYMPVDRLPGDRFCERIPLLFATPTRRYNLLQRTHAAFVSPVPCEYPTLYTLLQCAYFVARFVVTWIPIAGILFPLPFFXLITLRQPLLPK

SEQ ID NO: 201875 - protein, 85 aa, Glycine max
  Clone ID: PAT_MRT3847_24318C.1.pep
KKLKTKSGQALTRTSLICPFMSYVSDILAQYAHSCISYQYLTVRLTSVTSFLEQQVHLRLVQARLLLLLTHQVQFLCGCRSFIWL

SEQ ID NO: 201876 - protein, 97 aa, Glycine max
  Clone ID: PAT_MRT3847_24319C.1.pep
HTVVNVSASLLYSCGFSKSVYIIVYYLTYCFKFIYNLLYFNNNRHMNETSMRAGNADVYGFLKPQFIQRSGQSQFESKSYIKNWMQNSRRDVYLGTY

SEQ ID NO: 201877 - protein, 52 aa, Glycine max
  unsure (1)..(52): unsure at all Xaa locations
  Clone ID: PAT_MRT3847_2431C.1.pep
KIHPYLSFTESTTTETLXMGEAPVXAQFEGAEMGVPAENNGCICGPNCSCNP

SEQ ID NO: 201878 - protein, 313 aa, Glycine max
  Clone ID: PAT_MRT3847_24320C.1.pep
MGKKEKAKERREQRLQEIHLQRTIPYSHHQRWWSKETVAVVTGGNRGIGFEICRQLATHGLTVILTSRDASAGVESVKALQEGGLSVVYHQLDVVDYSSINQFVEWLRENCGGLDILVNNAGVNFNLGSDNSVENARKVIETNYYGTKRMTEAIISLMKPSLVGARIVNVSSRLGRLNGRRNRISNVALREQLSDVESLSEELIGMTLSTFLQQAEDGTWTTEGWPQVYTDYSVSKLAVNAYTRLMARKLSERPEGQKIYINCYCPGWVKTALTGYAGNNTVEEGADTGVWLALLSDQTFMGKFFAERREINF

SEQ ID NO: 201879 - protein, 182 aa, Glycine max
  Clone ID: PAT_MRT3847_24321C.1.pep
MESAFASASAITDQRQKIEQYKQILAAVISSNDIVQARKFIDHMLSDDVPLVVSRQLLQTFAQELGRLEPEIQKEIAHYALAQIQPRVVSFEEQVLVIREKLAELYESEKQWSKAAQMLSGIDLDSGMRVIDDGFRLSKCVQIACLYLEDDDAVYAEAFINKASFLVSNSQHEVLNLKYKVC

SEQ ID NO: 201880 - protein, 77 aa, Glycine max
  Clone ID: PAT_MRT3847_24322C.1.pep
LGIRLEIRIGNNHLVCTIPKTIGNVGGLRYFEAYDNDLSGEVMYEFAESSYLTLLKLASHHMTDTITHHFVHLMNLG

SEQ ID NO: 201881 - protein, 81 aa, Glycine max
  Clone ID: PAT_MRT3847_24323C.1.pep
VLCVPSQVIQRKMAFIVKAQATNVECPPILLELEKFGGIISNLNILLQWNWFQNFKSSLDLDGWEQAPFPLITIKIFSTNF

SEQ ID NO: 201882 - protein, 37 aa, Glycine max
  Clone ID: PAT_MRT3847_24324C.1.pep
RLSWFLETKMRLNHPGHDLIMLKGLILRHGSSKIWYY

SEQ ID NO: 201883 - protein, 77 aa, Glycine max
  Clone ID: PAT_MRT3847_24325C.1.pep
FPHLDKIQKRNTLIFYCGNNVKNVFGPAFSFWGQSIVEILACFAIQFLFFLGGAILAKCTKLVAREILSCEVLFPPG

SEQ ID NO: 201884 - protein, 86 aa, Glycine max
  Clone ID: PAT_MRT3847_24326C.1.pep
HFPVGDFFPPAQSPPPVQKTPRFKRIPPRRICGRGFCPPPLVHLNPPKGGKKKIIIPQKFPPFFFYFFKGNIFSFKVLNLENFEFV

SEQ ID NO: 201885 - protein, 46 aa, Glycine max
  Clone ID: PAT_MRT3847_24327C.1.pep
ISVPNKCVKNVVNLFLPGFICEARFCIHLSSPPLLLQNPKGLNSTL

SEQ ID NO: 201886 - protein, 92 aa, Glycine max
  Clone ID: PAT_MRT3847_24328C.1.pep
MGEVDPAFIQDLEHRPKLSIIQAEGIPIIDLSPISNHTVSDPSSIENLVKQIGSACKEWGFFQVTNHGVPLTLRQNIEKASRLFFAQNLEEK

SEQ ID NO: 201887 - protein, 50 aa, Glycine max
  Clone ID: PAT_MRT3847_24329C.1.pep
SPLSRASMRFSVQAVTERVQVCDMCSVKQSPDSNKMDKREPLVRFKSNAW

SEQ ID NO: 201888 - protein, 110 aa, Glycine max
  unsure (1)..(110): unsure at all Xaa locations
  Clone ID: PAT_MRT3847_2432C.1.pep
QAPTFGTLLRLRGSKNPIRAPNTLYHFNTHAEDLHIANXYTISPSTYASTHPDVSESAWPNRGGAFQPHATTNNCNTNNTNARPRETNAXCPPKDATIAIYTFLYELFNE

SEQ ID NO: 201889 - protein, 66 aa, Glycine max
  unsure (1)..(66): unsure at all Xaa locations
  Clone ID: PAT_MRT3847_24330C.1.pep
MAXGXHKRIXKGKKGGKKKAADPFAKXXXDDIXGPXXXSXSRNWXNLVXXTXGTRIXSEXLKHRVF

SEQ ID NO: 201890 - protein, 75 aa, Glycine max
  Clone ID: PAT_MRT3847_24331C.1.pep
SGQCCHYIRHLSYHVIHAVVRLLSSVEGLTANRAFLNRCKDILVTGRDSYFPWCHSTSAYLESDHIYVSCPSDRC

SEQ ID NO: 201891 - protein, 411 aa, Glycine max
  Clone ID: PAT_MRT3847_24332C.1.pep
FQNFTNDQLTSSVFIRGVRASDFGPKASFWMDFPKEGSQLTPTHQSDDFKWKDYCPMVFRNLRELFKIDAADYMMSICGNDTLRELSSPGKSGSVFFLSQDDRFMIKTLRRSEVKVLLRMLPDYHHHVKSYENTLITKFFGLHRIKPSSGQKFRFVVMGNMFCTELRIHRRYDLKGSSLGRSSDKIEIDENTTLKDLDLNYCFYLEPSWQESLLKQIEIDSKFLELQQIMDYSLLLGVHYRAPQQLHPYNQNRTADGLPILAEEDPLEDEGSNYPQGLVLVPRGTDDDSVVVGSHIRGSRLRASAAGDEEVDLLLPGTARLQIQLGVNMPARAEQIPGKEEMQMFHEAYDVVLYLGIIDILQEYNMTKKIEHAYKSIQFDSLSISAVDPTFYSRRFLDFIQKVFPPHEMAG

SEQ ID NO: 201892 - protein, 74 aa, Glycine max
  Clone ID: PAT_MRT3847_24333C.1.pep
RMQDEVTNRTLPLPHIPLPTTFFSRTRALLQGLLTRGGFGEENTLADAIPLFHYYFHCSFFFPFPVFFSTCKIL

SEQ ID NO: 201893 - protein, 109 aa, Glycine max
  Clone ID: PAT_MRT3847_24334C.1.pep
RLEAIEGGHGATYGTILTAMPTAIRNVVRGGARSALGGGDLTTYLLYMLLTVGCVTGVCGLRPLPQLTPIHILRPHRKPWSLLHYYHSVLLIVQQVVARLCPWTPYIEH

SEQ ID NO: 201894 - protein, 60 aa, Glycine max
  unsure (1)..(60): unsure at all Xaa locations
  Clone ID: PAT_MRT3847_24335C.1.pep
IIPIGRPIKFSLLYISSEGFFYLVIXKKAQGNNQVVECVFTTIGASVPFLYESPRSLEWQ

SEQ ID NO: 201895 - protein, 57 aa, Glycine max
  Clone ID: PAT_MRT3847_24336C.1.pep
ETNLGTLILETDDPNPQIPSIIQSFHSKSTYSSFFYIFFTYNETSDQNSYNIIKCNR

SEQ ID NO: 201896 - protein, 43 aa, Glycine max
  unsure (1)..(43): unsure at all Xaa locations
  Clone ID: PAT_MRT3847_24337C.1.pep
NCXXSIPFXYAPLSGDESSGIGPGVXVDXXSKXIGXILQWTLX

SEQ ID NO: 201897 - protein, 91 aa, Glycine max
  unsure (1)..(91): unsure at all Xaa locations
  Clone ID: PAT_MRT3847_24338C.1.pep
MGRCVKTLTVQTITLDVVSFDTIVYVKVSIQDKECILTVYXRLIFAGKHLEDASALGVYIIRMETTLLLLLRHLIGRHIFVMTLTFVTMIL

SEQ ID NO: 201898 - protein, 50 aa, Glycine max
  Clone ID: PAT_MRT3847_24339C.1.pep
DGDLRVRPLILLYEMLISNPPSSIEEGGIEDELIYIPLFADNDFLSHTHT

SEQ ID NO: 201899 - protein, 232 aa, Glycine max
  Clone ID: PAT_MRT3847_2433C.1.pep
MLMDIEWILHYSSSTHGRGLGRFWSHVEGYKGPLLILIAASSGDAHEGNSIDRKWVIGALTDQGLENKDIFYGNSGCLYSIDPVFHVFPPTGKEKNFVYSHLHPTGKVYQPHPKPVGVAFGGTPGNERIFIDEDFAKVTVRHHAIDKTYRSGSLFPDQGFLPVEGLISEVEVWGLGGKVAKEVQNSYKKREELFTEQRRKVDLKTFASWEDSPEKMMMDMMSDPNAVRKEDR

SEQ ID NO: 201900 - protein, 440 aa, Glycine max
  Clone ID: PAT_MRT3847_24340C.1.pep
MSQVGGQGGGGSHSLAFRVMRLCRPSFNVEPPLRLDPTDLFVGEDLFDDPAAKPHSFSSAAAHDDDSDPNYRNRFLLRHFSDAMGLSGLLVLPQSFGAIYLGETFCSYISINNSSNFEVREVLIKAEIQTERQRILLLDTSKSPVETIRAGGRYDFIVEHDVKELGPHTLVCTALYNDGDGERKYLPQFFKFIVANPLSVRTKVRVIKETTFLEACIENHTKSNLFMDQVDFEPAQYYSATILKGDGHHSEKDSPTREIFKPPILIRSGGGIYNYLYQLKTLSDGSPQTKVEGSNVLGKLQITWRTNLGEPGRLQTQQILGTPATKKEIELQVVEVPSIINLQKPFMLKLNLTNQTDRELGPFEVGLSQNVSYGERVVMINGLQSMVLSEVQALGSTNFHLNLIATKPGIQRITGITVFDTREMKSYEPLPDLEIFVDMD

SEQ ID NO: 201901 - protein, 164 aa, Glycine max
  unsure (1)..(164): unsure at all Xaa locations
  Clone ID: PAT_MRT3847_24341C.1.pep
MSQGGQGGGGSHSLAFRVMRLCRPSFNVEPPLRLDPADLFAGEDLFDDPAANPPSFSSSSDSDPNYRNRFLLRHFSDAMGLSGLLVLPQSFGAIYLGETFCSYISINNSSNFEVRDVIIKAEIQTERLRILLLDTSKSPVETIRAGGRYDXIVEHDVKELGPHT

SEQ ID NO: 201902 - protein, 32 aa, Glycine max
  Clone ID: PAT_MRT3847_24342C.1.pep
GSQRLVFRPSSSRQHLDARWLLASICGQRNAV

SEQ ID NO: 201903 - protein, 92 aa, Glycine max
  Clone ID: PAT_MRT3847_24343C.1.pep
SLGRTNTAGNNSNKQTCLGLGRLTFVASNNLKIMVVERQSATYMRPLPACCNNIRYHFIQFPEKHIILKSCQCPQTTLPSSVQRFPFVFINI

SEQ ID NO: 201904 - protein, 151 aa, Glycine max
  unsure (1)..(151): unsure at all Xaa locations
  Clone ID: PAT_MRT3847_24344C.1.pep
GSRTTTNDTRCSALPTLPPRVSNTKTTRDAPYPXTNSSGARMTSLPQTRTSSEESSSXDANEVLADLKGKRDAQENKSTEHHYGGGDLLANCIXTKLVSAINSVPXLTKNMVKARPAYTERIVYRNLVVKRSMNDLGTGIVSPNENAQARE

SEQ ID NO: 201905 - protein, 87 aa, Glycine max
  Clone ID: PAT_MRT3847_24345C.1.pep
QLSAVRSVLPSHLFGKFQFQGLSTLQSDALRVAISGIIADSKDKNRKFVETIELQIGLKNYDPHKDKRFSGSVKFPHIPRPKMKICM

SEQ ID NO: 201906 - protein, 116 aa, Glycine max
  unsure (1)..(116): unsure at all Xaa locations
  Clone ID: PAT_MRT3847_24346C.1.pep
NSPPPTKQPPFSVRLXNPKGLENGPMKNRNNPFPPSRAFFFPGASPRGEEKMGGRPLFDKPFTPNSGVVNQQTCASSKYYSPRPRELKKIRRSYFYRKSHLFWAGKKKKKKKKKTP

SEQ ID NO: 201907 - protein, 51 aa, Glycine max
  Clone ID: PAT_MRT3847_24347C.1.pep
GLTCLLMLYSRRGMTVCFILTKEGVSSHNIYIHTNDSQSSGFMQVERTDVL

SEQ ID NO: 201908 - protein, 320 aa, Glycine max
  Clone ID: PAT_MRT3847_24348C.1.pep
MASLKLPEVVPSPTQDSERLRKAFQGFGTDEKAVILVLGHRNAQQRKKIGETYQQLYNESLVDRLHSELSGDFRNAVILWTYDPPERHARLAKDALKAKKGIKHLQVLVEIACASTPNHLVAVRQAYCSLFDCSLEEDIIASVAPALRKLLVSLVSSFRYDKVAVNLEVAKEEASKLHEAINSKQLDNDHIIWILSTRNLFQLRETFACYNNLYGNTLEQDIKKCGNGDLESLLHTVIWCIDCPEKHFAKVVRDSIVGFGTDEDSLNRAIVTRAEIDLLNVRFEYANVYKSSLDDDVIGDTSGYYKDFLMTLLGKGPDGE

SEQ ID NO: 201909 - protein, 83 aa, Glycine max
  unsure (1)..(83): unsure at all Xaa locations
  Clone ID: PAT_MRT3847_24349C.1.pep
AXPKKKKKKKKKKKKKKKREKGCDGLKDHKLTACERANVLYCAIVKQKTSSLAYNFTTWENGKTLQLPKSCSLVPLFPFGQMA

SEQ ID NO: 201910 - protein, 57 aa, Glycine max
  Clone ID: PAT_MRT3847_2434C.1.pep
RHLVRHISDRGLIPESKLEGMGHYKRHLILHRISGQHLKCSHVMMTPSKSLLSSHYQ

SEQ ID NO: 201911 - protein, 151 aa, Glycine max
  Clone ID: PAT_MRT3847_24350C.1.pep
KSKLLKQVDDTLAVFHTHAVAGSIGGILAVFFADPKLCYLFYGVEDSLHYTGLVYGIFNGRPNAGFRQMMVQLLGIVFVILLNVTTTSIVCLLVRIIVPLRLSEDDLQVGDEAVHGEVAYALWGDGEKLETATEPLTSEKNLEWPTVELRT

SEQ ID NO: 201912 - protein, 95 aa, Glycine max
  Clone ID: PAT_MRT3847_24351C.1.pep
TRPAKEEASKLHEAINSKQLDNDHIIWILSTRNLFQLRETFACYNNLYGNTLEQDIKKCGNGDLESLLHTVIWCIDCPEKHFAKVINFLLLKLTY

SEQ ID NO: 201913 - protein, 70 aa, Glycine max
  Clone ID: PAT_MRT3847_24352C.1.pep
VPHTILYRSDIHCYALLHKKAASLITCIFISLLSLYKHPVVDETDIYKKAAPKRRKINPFKPVTLSLVSR

SEQ ID NO: 201914 - protein, 142 aa, Glycine max
  unsure (1)..(142): unsure at all Xaa locations
  Clone ID: PAT_MRT3847_24353C.1.pep
MVGGDDYDFGKLDVGFGTDEKAVILVLGHRNAQQRKKIGETYQQLYNESLVDRLHSELSGDFRNAVILWSYDPPERHAGLAKDALKAKKKGTXTFRFLGEIACASTPNHLVAVRQAYCSLFDCSLEEDIIASVAPPLRKVRT

SEQ ID NO: 201915 - protein, 39 aa, Glycine max
  Clone ID: PAT_MRT3847_24354C.1.pep
MGTEKTYINIGVIGHVDSGKSTTTGHLIYKLAGIDMRVI

SEQ ID NO: 201916 - protein, 69 aa, Glycine max
  Clone ID: PAT_MRT3847_24355C.1.pep
SGTADAPALFSNLNLYFRQKIIALRRRGVFHKNLTSYKKHGRLCDSKPHPQGGLEEAPPDPEKDHDNYR

SEQ ID NO: 201917 - protein, 93 aa, Glycine max
  Clone ID: PAT_MRT3847_24356C.1.pep
VCSFIFFLRYGGWARVGFVLYSCRRYRRSVEARRARLEIVRSLAEGSSGSGCAVVLRPSFLRGGSSGPLGGPGIVFGDLSVPKHINQPKGSKP

SEQ ID NO: 201918 - protein, 96 aa, Glycine max
  unsure (1)..(96): unsure at all Xaa locations
  Clone ID: PAT_MRT3847_24357C.1.pep
MHLRVLSLTFQESDAIGKSYPTVSADYHKAAEKAKKNLRGFITEKRCSPLMLPLAWHSSVTYYASSKTGCPFRTIKHPSXLAHGANNRLDITVKLF

SEQ ID NO: 201919 - protein, 56 aa, Glycine max
  Clone ID: PAT_MRT3847_24358C.1.pep
DPRVVGSNKKTHLISSTNQQKGRFQKIHILLFKLNYTWIRLQKYYIGVPMLKYFTM

SEQ ID NO: 201920 - protein, 160 aa, Glycine max
  unsure (1)..(160): unsure at all Xaa locations
  Clone ID: PAT_MRT3847_24359C.1.pep
FGVTHGDSTRDLDXLXKDSEHLXDMIEKVSSVDSSDFIMESDALGQRGMDQRQGHETXREVAVFFTREEENSVGAHVFDPKDDCAKPTASLTAIIEGRSSKKVNMREAVTIKSRXITTETSEAXKAGLHEANQREPEVEGPKEPIPSTQVDEVKKLCQPG

SEQ ID NO: 201921 - protein, 63 aa, Glycine max
  Clone ID: PAT_MRT3847_2435C.1.pep
RAMSSINEAFISLSRSARDQILSRPGFMGIEKCRCILGCFLAQCQGLIKILMKVQSNLAGVMK

SEQ ID NO: 201922 - protein, 43 aa, Glycine max
  Clone ID: PAT_MRT3847_24360C.1.pep
ECFQSLFLSIIFWYGFGSPLHIFFIVRECNMYHKYCCVNFTGS

SEQ ID NO: 201923 - protein, 64 aa, Glycine max
  Clone ID: PAT_MRT3847_24361C.1.pep
NAGDNADKLGGKKEHGKEGKPSSVQLFHVSMESLEKAGRLDVMQVFFFYVNVISGCMLLVQSGH

SEQ ID NO: 201924 - protein, 70 aa, Glycine max
  Clone ID: PAT_MRT3847_24362C.1.pep
ANLLTNRGLQWLSASTHTVATSCSRRFIHGLTKFFPGVSGSRGPKWVRKPLCIPQPKSNARRHLTKLICT

SEQ ID NO: 201925 - protein, 57 aa, Glycine max
  Clone ID: PAT_MRT3847_24363C.1.pep
SRTRAAARKFNGQALPKRSTDRLIILQIEIVLGAPRYLLITRGVVLSFSKASHHSYS

SEQ ID NO: 201926 - protein, 454 aa, Glycine max
  Clone ID: PAT_MRT3847_24364C.1.pep
MRYWLSRTTMMQSRFPEKEKKKHLGFLLPWTPRTSSVSMEINSLSLPSCRMPSLLKDSRSSGSPQQQNKLIWWQNDKGVIGGKDSSVDCSSLVQNSCRKRMIHQSDGVFHDMNVEGYMPKQTSLCVLMLHYTENGFFPQAQTVWEQLLNSSFVPSVQFISRLFDAYAKHGKFDEVIDTLRYVDMRNFSILPDVYSLTISCFGREGQLELMEDMAKEMASRGIHICSRTANAFLLYCSIFGSLKEMENAYGRLKKSRFLIEKGAIRAVASAYIKERKFYELGEFLRDVGPHRKNVGNLLWNLMLLSYAANFKMKSLQREFVRMVESGFRPDITTFNIRALAFSRMALFWDLHLSIEHMEHENVIPDLVTFGCVVDAYLDRRLGRNLDFALNKMNLDDSPRLLTDPFVYQALGKGDFQMSSEAFFEFKTQRKWTYRVLIQKYLKKHYRRNHIFWNY

SEQ ID NO: 201927 - protein, 72 aa, Glycine max
  Clone ID: PAT_MRT3847_24365C.1.pep
KLPRPPFIFFFFFLSLDPFPVYVGNFGFTDCDVGSVAVLLRMFLVIDNAINAFRCWKGKRKIVLLMPDVDYA

SEQ ID NO: 201928 - protein, 129 aa, Glycine max
  Clone ID: PAT_MRT3847_24366C.1.pep
RTLVPIFVFWAFLTIITPTLILLSENSKVDLDPNGNITEGVKLGRMIGYTHNYSIKTASPLAKSEEELASAPAPEPLPTSSSGTSTNRVTPMGSHSHHNHTLIRNKTHDGFNLSSPIKIHAQVKQAYIR

SEQ ID NO: 201929 - protein, 91 aa, Glycine max
  Clone ID: PAT_MRT3847_24367C.1.pep
PCKLVLPKFPKLYSSWLTVLIDIHGMSLISTTVFSTKQRWFWSDWQSYLIMVERAPFGITMYGTMILSLCGLSTGTFSLPQALVINSVSGL

SEQ ID NO: 201930 - protein, 53 aa, Glycine max
  Clone ID: PAT_MRT3847_24368C.1.pep
PPSGGKGPTFKGVVCITPPPMELLPGGGEKKGGFYDYKLYPPFNFLMPFLPSL

SEQ ID NO: 201931 - protein, 88 aa, Glycine max
  Clone ID: PAT_MRT3847_24369C.1.pep
GETWGRVTMTKLAQWLWGLAILGSTWVALTTGALGLELPLSCQEVLWPLPAYLLVSAGCYALGTVGYRVATFHDCEDAARELQSQIQE

SEQ ID NO: 201932 - protein, 106 aa, Glycine max
  Clone ID: PAT_MRT3847_2436C.1.pep
ALNKNTPGKASHSGNLLTTKIGLSLLHFFWTKTGTPGFLLVLTPKLMFQTLKLQSKPKKGLYLGRIKQSLVSTKYLPKGQLQTRLPRPGSCNCEENEGHLLALKAF

SEQ ID NO: 201933 - protein, 470 aa, Glycine max
  unsure (1)..(470): unsure at all Xaa locations
  Clone ID: PAT_MRT3847_24370C.1.pep
MGMEEESSNNSSIIEGGASLPSTGSDAKKRRVTYFYEPTIGDYYYGQGHPMKPHRIRMAHNLIVHYALHRRMQVNRPFPAAEADIGRFHADDYVDFLSTVSPQILSENSHSHYRQLKRFNVGEDCPVFDGLFDFCRASAGGSIGAAVRLNREDADVAINWAGGLHHAKKAEASGFCYVNDIVLGILELLKVHRRVLYIDIDVHHGDGVEEAFYTTDRVMTVSFHKFGDFFPGTGHIKDIGVGAGKNYSLNVPLNDGLDDEXFRGLFRPIIQKVMDVYQPDAVVLQCGADSLSGDRLGCFNLTVKGHADCLRFLRSFNVPLMVLGGGGYTVRNVARCWCYETAVAVGVEPSPKLPYNEYYEYFGPDYNLHVEPSTMENLNTPRDLEKIRNTLLEQLSRLPHAPSAPFQTTPSVIEVPEEEEEDMDVRPKRRIWSGEDFDSDHDDDMASSKNSDLTAQTSRSVADDMDEDKD

SEQ ID NO: 201934 - protein, 120 aa, Glycine max
  Clone ID: PAT_MRT3847_24371C.1.pep
LFLCCPHFLSCPQHFQCCLALLRVLFPAGGPSLRLTRFQGGQAVPQNRSLFPGPPPLSPGSLTLPSAAASRFRNFLAFPFRSRRSERFLAGFPRPLGWSLPCASAVHMAPFPSSALGVLI

SEQ ID NO: 201935 - protein, 75 aa, Glycine max
  Clone ID: PAT_MRT3847_24372C.1.pep
YGCMSRPSISTVIVSNARTHDIQAPFGKASFIRVSLLGGSTRPRPPCRRLSDQLRMEFSTCEPACPSPGSVWSYA

SEQ ID NO: 201936 - protein, 120 aa, Glycine max
  Clone ID: PAT_MRT3847_24373C.1.pep
MNMNELVLFIDAILVGCPCHACEMKPFRMNTGYRARTPEVKCACWRLDVEAHNILGFDTIPVECVDATKEYIHGEQYISDYKTANQQAYFYARDLEVHTKDTLAFSVHGTVLSNIPYYKQ

SEQ ID NO: 201937 - protein, 312 aa, Glycine max
  Clone ID: PAT_MRT3847_24374C.1.pep
AIKKFNVAKNALAQVAWNWVNDGLRTSLCLQFKPHHIAAGAIFLAAKFLKVKLPSDGEKVWWQEFDVTPRQLEEVSNQMLELYEQNRLPPAQGSEVEGSAGGTRAASKAPSANEEQASKQISSQAPQHSSVERTAVPQRGTENQSNDGSAEMGSDITDHNLDIRESQNSEQLTQQDNKREVSNRSKSGTERDQDRMVGTKEGAEVGRRDESALNNSGSNVGRNLERREVPLGHSPNEAIKIDKDKLKALAAMGKKRKEQRGEMALKKDVMDEDDLIERELEDGIELAVEDEKNKRERRQNWSSLMVKITMGG

SEQ ID NO: 201938 - protein, 94 aa, Glycine max
  unsure (1)..(94): unsure at all Xaa locations
  Clone ID: PAT_MRT3847_24375C.1.pep
VCFSITRKKTPFQKKKKEEEAKKKRAENEPARLNAEFEKSFQGDTTLGSKIFVXGGTINPNKKFKDDFEGEKSKNGVFGPKKGRRKGPSLILSA

SEQ ID NO: 201939 - protein, 141 aa, Glycine max
  unsure (1)..(141): unsure at all Xaa locations
  Clone ID: PAT_MRT3847_24376C.1.pep
SEYSLFIITQIFVKTLTGKTITLEVEASDTIXNVKAKTQDKEGIPPDQQRLIFAGKQLEDGRTLADYNIQKEXTLHLVLSFRGGMHIFXVKTLTVKTITLKVEASDTIENVNAKIQDKEGILPDQQCLIFPGKQFEDSRTL

SEQ ID NO: 201940 - protein, 103 aa, Glycine max
  Clone ID: PAT_MRT3847_24377C.1.pep
MRKGNMKKHNKLVWIITTPLRMLWKARDMYVRSITNCGHKMNYSNPVDAAGRLQALPRSYSAATSRSDNNEDFAELLRAAFARTLGNRIDVDMVLKQQAQARA

SEQ ID NO: 201941 - protein, 151 aa, Glycine max
  unsure (1)..(151): unsure at all Xaa locations
  Clone ID: PAT_MRT3847_24378C.1.pep
DPQSSSNLPISXRTVQTLSEVEAFALKADDLKFVASQFRRLHSKQLRHTFRFYPHQWRTWAACFIQAAWRRYGKKKLEESLREEENRLQDALSKAGGSSPSLGAPIYASRFAANALRLLRRNGPRKARVPERISPMLLQKPAEPDFTSEEQ

SEQ ID NO: 201942 - protein, 36 aa, Glycine max
  Clone ID: PAT_MRT3847_24379C.1.pep
AFFLRQLELRAAFFVMSPRPALLSALPLACFCPYCP

SEQ ID NO: 201943 - protein, 121 aa, Glycine max
  unsure (1)..(121): unsure at all Xaa locations
  Clone ID: PAT_MRT3847_2437C.1.pep
FVKMVKDWCLVPDIKHYGCVIDMLGRAGRLEEAEKIALQVPHEVANAVMWRTLLGACNVHNNVEIGXRVTNKILEMERGHGGDYVLMSNILVGVGRFKDAEKLREMIDKRIAFKLPGYSFV

SEQ ID NO: 201944 - protein, 312 aa, Glycine max
  unsure (1)..(312): unsure at all Xaa locations
  Clone ID: PAT_MRT3847_24380C.1.pep
QTYLQSTTTRLEEMRVKRRDAEQWMSHRLLPDSLRERIRRHEQYKWQETRGVDEDSLIRDLPKDLRRDIKRHLCLALLMRVPMFENMDEQLLDAMCDRLKPVLYTEESCIAREGDPVDEMLFIMRGKLLTVTTNGGRTGFFNSEYLKAGDFCGEELLTWALDPHSSSNLPIXTRTVQTLTEVEAFALKADDLKFVASQFRRLHSKQLRHTFRFYSQQWRTWAACFIQAAWRRYSKKKLEESLREEENRLQDALAKAGGSSPSLGATIYASRFAANALRLLRRNGTRKTRVPERISPMLLQKPAEPDFTSEEQ

SEQ ID NO: 201945 - protein, 79 aa, Glycine max
  Clone ID: PAT_MRT3847_24381C.1.pep
TPALVKGGVHLAQIYAIRQFISKALVVYSQKYGVEAFKKEIKKILIQFVWPLFVADPRRLKTKKFGGPGARARSQKSYR

SEQ ID NO: 201946 - protein, 206 aa, Glycine max
  Clone ID: PAT_MRT3847_24382C.1.pep
MPSQALFCCSCSFSASEIGTNPSWVPLKSLNSLCCSSKPRNLCRFLCLSTQNGGFRENSGEVGLGDAVIIVDHGSRRKESNLMLNEFVEMFKHKTGYEIVEPAHMELAEPSIRDAFQSCVEQGAHRIIVSPFFLSPGRHWTQDIPSLSAEAAKEHPDVSYIFVILNYKHLVLQDVVNDRIKHCLKHVAGDADECSVCSGTGKCRLY

SEQ ID NO: 201947 - protein, 35 aa, Glycine max
  Clone ID: PAT_MRT3847_24383C.1.pep
ISVPTKLLRISYTDSVLYITIATSYQTKNSQNLFT

SEQ ID NO: 201948 - protein, 88 aa, Glycine max
  Clone ID: PAT_MRT3847_24384C.1.pep
SPFDRKKVPFFYAPIFVSFFHISPQVYGQNGWVIINLALPNIRPLFALLERSGISGSPRGYPGIPSPYIYKKKAFSPPPNPSMLPKQN

SEQ ID NO: 201949 - protein, 48 aa, Glycine max
  Clone ID: PAT_MRT3847_24385C.1.pep
VRGLFDNSPHGNFMPTVDVFDLLNGGGKKFFDRTKPSKFLKGKPMAFF

SEQ ID NO: 201950 - protein, 67 aa, Glycine max
  unsure (1)..(67): unsure at all Xaa locations
  Clone ID: PAT_MRT3847_24386C.1.pep
AKFNVVQKKIRALIADNKIQFHFDPLTGKFKIXGPTPXLSGKRKRKLFKKWRRDQKVALHIGLVTIE

SEQ ID NO: 201951 - protein, 48 aa, Glycine max
  Clone ID: PAT_MRT3847_24387C.1.pep
YIGSYLHNNLKSSLLIKTYLTFHLALTTPHFHFHNIYFHFLPHLQASL

SEQ ID NO: 201952 - protein, 66 aa, Glycine max
  unsure (1)..(66): unsure at all Xaa locations
  Clone ID: PAT_MRT3847_24388C.1.pep
RSCGVCVSRGHVLLSLVCSSQHKSCNHACEWFPSPYRRGDNRELFMCRIVGDSNTXTHSVCHMETW

SEQ ID NO: 201953 - protein, 76 aa, Glycine max
  Clone ID: PAT_MRT3847_24389C.1.pep
NRKQKQSVLDFKNLSMYSYFLVYHCLREGESLSVLAHRLRESFSFPFLDHLLNTLLFDIGLGVRCKLVVRLFQFYD

SEQ ID NO: 201954 - protein, 52 aa, Glycine max
  Clone ID: PAT_MRT3847_2438C.1.pep
PKLVGTSIFVVAAFSESVGTHNLVLIVLAYDVHSPRAIYLCTLCKSRAESAR

SEQ ID NO: 201955 - protein, 100 aa, Glycine max
  Clone ID: PAT_MRT3847_24390C.1.pep
MSGLKEHLKLAREYAVEGLYDTSVIFFDNAVAQINKHLNSNSVEDPLVRAKWMKVKKALCEETEVVKQLDAERRAFKETTRSPSQSSSFVFQPLDNYPTT

SEQ ID NO: 201956 - protein, 74 aa, Glycine max
  Clone ID: PAT_MRT3847_24391C.1.pep
QRQQRMIDRMGRINNSFGGIVYCLRSGCDLSGRSFVTLDLCIFLRLKIGKVSKQFACVCYCIYISNDSLRPLID

SEQ ID NO: 201957 - protein, 79 aa, Glycine max
  unsure (1)..(79): unsure at all Xaa locations
  Clone ID: PAT_MRT3847_24392C.1.pep
MSCCSGNCGCXSACMLGNGCGGCKMYPDLIYTESTTTETLVILVSPAKAXFSSAEMGIPAENACFTCGANCSCYHCSCM

SEQ ID NO: 201958 - protein, 46 aa, Glycine max
  Clone ID: PAT_MRT3847_24393C.1.pep
CIKTLVFAIIHSVANGLQFLSGHLELEKSSNAFTLLPNSLVFLGSS

SEQ ID NO: 201959 - protein, 79 aa, Glycine max
  Clone ID: PAT_MRT3847_24394C.1.pep
TVPPNPFGKIAPPCKRNRGNWFPKEKEKGGASNPTPPPYISETKPPHYSFFFVPLYFFFFFEIKLPFPWISIKLYSPSN

SEQ ID NO: 201960 - protein, 105 aa, Glycine max
  Clone ID: PAT_MRT3847_24395C.1.pep
GSSVETPSSIKVVQGAGACAPSHDDGSSIQHLCSRSCPPNGLWYMEWICVGLFILGGSARIKSIDSSESDPWVFKTMYTMVRETSSECGTGPSSVASPRVVFFHP

SEQ ID NO: 201961 - protein, 82 aa, Glycine max
  Clone ID: PAT_MRT3847_24396C.1.pep
GRFVICPLMVFFSLRRSTRTTKGWVRMSCYRVEFLVPYSLSLFIRNPIICQHPSLCSSSSSSVLPLCAINSHAIACSYRQSF

SEQ ID NO: 201962 - protein, 326 aa, Glycine max
  Clone ID: PAT_MRT3847_24397C.1.pep
GSGSRLKQAESSDNMNIIKLFKTKAVRRGLVAGMGLQIFQQFTGINTVMYYSPTIVQLAGYASNQTALLLSLITSGLNAFGSVVSIYFIDKTGRKKLALLSLCGCVVALTLLTFTFRHTATHSPMISALETVHFNNTCPSFGHAVNANQWDCMMCLKAECGYCASGVSSKSLPGACLISNDATKGMCQKEHRAWYTQGCPSKIGWLAIVGLALYIIFFSPGMGTVPWVVNSEIYPLRYRGVCGGIASTTCWVSNLIVSQSFLTLTVAIGTAWTFMLFGFVALIGIFFVLIFVPETKGVPMEEVEQMLEERAVHLKFWEKASPPQKG

SEQ ID NO: 201963 - protein, 98 aa, Glycine max
  Clone ID: PAT_MRT3847_24398C.1.pep
MSSFSITRKKTPFQKHREEEEAKKKRAEDETARLYAEFVESFQGDTTPGSKTFVRGGTINPNDKFKDDSEGEKSKDGVSGPKKGSRYVPSFIPPPMAT

SEQ ID NO: 201964 - protein, 25 aa, Glycine max
  unsure (1)..(25): unsure at all Xaa locations
  Clone ID: PAT_MRT3847_24399C.1.pep
EGWLHLDVILSXAIDHYSMRALYHL

SEQ ID NO: 201965 - protein, 204 aa, Glycine max
  unsure (1)..(204): unsure at all Xaa locations
  Clone ID: PAT_MRT3847_2439C.1.pep
MANGSPPSVPGQRSSPEPNPPNHVSDSKEETAAAPPPPTTRSTRPSRACTMRAASRLHSSPAPVKKEAPAKKEDSPPPPPSQYSKIVTPLVEPPSPSQLPRWNLRSMWEVRFRPNFMHLVXPLLNISVEFSAEEFETASSYPNETLVHIHMPLXKAIPSIXRMXLTRDTWITXLCRKLRDXXHWVAHGTFNGGYMGGKMRIKYL

SEQ ID NO: 201966 - protein, 62 aa, Glycine max
  unsure (1)..(62): unsure at all Xaa locations
  Clone ID: PAT_MRT3847_243C.1.pep
XXXXRSYXVXNCXADTXFHXRXRXDXHXXXEXSNXTXYGXSCVXLXXXRXXNSRAYVRVXAT

SEQ ID NO: 201967 - protein, 91 aa, Glycine max
  Clone ID: PAT_MRT3847_24400C.1.pep
MSSFSITRKKTPFQKHREEEEAKKKRAEDETARLYAEFVESFQGDTTPGSKTFVRGGTINPNDKFKDDSEGEKSKDGVSGPKKGSRKRRKS

SEQ ID NO: 201968 - protein, 107 aa, Glycine max
  unsure (1)..(107): unsure at all Xaa locations
  Clone ID: PAT_MRT3847_24401C.1.pep
MFGCKSLCWDSVPEFTDPDPLPFSLPSPLPQWPQGGSFACGRICLGEIEVIKVNKFEKVWRCTSLNGKSLGFTFYRPLEXPEGFFCLGHYCQSNDPPLRGYCSWGPG

SEQ ID NO: 201969 - protein, 60 aa, Glycine max
  Clone ID: PAT_MRT3847_24402C.1.pep
KHPCIAFSVINVRIRTSIHTMHLEPSNCPCQQFRSECVAAKCSTTAAAPVIRLLGAKPTA

SEQ ID NO: 201970 - protein, 121 aa, Glycine max
  Clone ID: PAT_MRT3847_24403C.1.pep
MAEEDVYTKDGTVDYRGNRANKKETGTWRACPFILGNECCERLAYYGMSTNLVTYFNTKLNQSGPTASKNNANWGGTCYITPLIGAFVADAYLGRYLTILCFSIVYVIGMTLLTLSASVPG

SEQ ID NO: 201971 - protein, 63 aa, Glycine max
  Clone ID: PAT_MRT3847_24404C.1.pep
GLFISLFDLCMLYFCCLFYIFRFCILFCCCIMFLVLLPFHNNCKRDFHIRTKVTGCSVCLDYS

SEQ ID NO: 201972 - protein, 59 aa, Glycine max
  Clone ID: PAT_MRT3847_24405C.1.pep
THEDTLGSNPLYLFMGPLYLLTRGHQARRNKFCRYTRFCLKISMGVCSTIMDDYSYLVN

SEQ ID NO: 201973 - protein, 148 aa, Glycine max
  unsure (1)..(148): unsure at all Xaa locations
  Clone ID: PAT_MRT3847_24406C.1.pep
MVGKTNAYYVESTGASFTLDCSVSLIHRYCGTLPRDKYSCVKPNFEFLSVEGGYQCKLILPSNSAFQTIIGPSGKDMRLAKHLACFEACKKLHQMGALNEHLVPLIEDSSEDDHIVKNKESSSGAGTTXRKELHGKANIHALRCAWGD

SEQ ID NO: 201974 - protein, 61 aa, Glycine max
  Clone ID: PAT_MRT3847_24407C.1.pep
AIAPKYRHLMSAGLRSLHMILSSCYTSAYECKLKNTVISAIKCLISLSSSDEVWQVNQLDN

SEQ ID NO: 201975 - protein, 112 aa, Glycine max
  Clone ID: PAT_MRT3847_24408C.1.pep
RDWGFLTHSGWNSTLESVCGGVPMICWPFFAEQQTNCRFCCKEWGIGLEIEDVKRDKIESLVRELMDGEKGKEMKKKGLQWKELAKSAASGPNGSSFLNLENLVLLCRNAKN

SEQ ID NO: 201976 - protein, 185 aa, Glycine max
  unsure (1)..(185): unsure at all Xaa locations
  Clone ID: PAT_MRT3847_2440C.1.pep
EDCYGLCASFWFLIAQLQIQREASNRKIMSLVRSADLAPTSYENAKLFSLKGTDVRPGLSSQIFGPDKHRSTYMTDTYPSESYEKYFHDSQTEEIIEPSSSSIYGSSIHPDVASSYQIRAISGASMVANNPFDSSFMSTRHRDAYQSTSGSDLMENGSLDSRXDDGLMRLKLQALXRALLDDSDA

SEQ ID NO: 201977 - protein, 70 aa, Glycine max
  Clone ID: PAT_MRT3847_24410C.1.pep
KKADNKEKMLKTNIPPYAYNAHLRMCQIQLKRKNHGHRVLYSGMPLPLVFLFYHLYLLFTFPTLTRHFLD

SEQ ID NO: 201978 - protein, 32 aa, Glycine max
  Clone ID: PAT_MRT3847_24411C.1.pep
FKSKKFINSLLVYYLIVLLHPISSYLIGLEPN

SEQ ID NO: 201979 - protein, 59 aa, Glycine max
  Clone ID: PAT_MRT3847_24412C.1.pep
RFMHCMDLAYAAADLIVSRAGAMTCYEISATGKPSILVIKYCVYSFVSFLLIFIQALNY

SEQ ID NO: 201980 - protein, 208 aa, Glycine max
  unsure (1)..(208): unsure at all Xaa locations
  Clone ID: PAT_MRT3847_24413C.1.pep
MYGQSSSSSSSYESDLALLDSIRHHLLGESESIFGAPNFGSGRSSSFSSLDSCLSDNWGELPFKEDDTEDMVLYGVLRDAVNVGWVPSLDAGSPESVSSGFPAVKLEPDLMPALIRLEXSVRIAAEEKKVVPAKGKHYRGVRQRPWGKFAAEIRDPAKNGARVWLGTFETAEDAALAYDRAAYRVGTVQEQVGSQVAECTRGEQLLVS

SEQ ID NO: 201981 - protein, 43 aa, Glycine max
  Clone ID: PAT_MRT3847_24414C.1.pep
PVLVHYNNERQTGKVHIYSLSSLALPKEHIYLHVMKWVKLASK

SEQ ID NO: 201982 - protein, 102 aa, Glycine max
  unsure (1)..(102): unsure at all Xaa locations
  Clone ID: PAT_MRT3847_24415C.1.pep
YCTTCGCGTEMPYVDSTPHDKGLKTQPTFTTSNLRTMKARGVIPHRTQKMPEASYRGSAQADQHEILNKRDNPLGVQKGIXTVLLWKLTRPRIQCKTQPGGW

SEQ ID NO: 201983 - protein, 38 aa, Glycine max
  Clone ID: PAT_MRT3847_24416C.1.pep
LGATSLSNPTFKNIMNILFFFLKIKYSSYTFRFDKTPL

SEQ ID NO: 201984 - protein, 166 aa, Glycine max
  Clone ID: PAT_MRT3847_24417C.1.pep
PRVRTAARRRQKGTAARRRQKGTAARRRQKGTAARRRQKGDNITLFSIITVMSFLLSVPVTLLMEGVKFTPAYLQSAGLNVNEVYIRSLLAALCFHAYQQVSYMILQKVSPVTHSVGNCVKRVVIIVSSVIFFQTPVSPINALGTAIALAGVFLYFRVKRLKPKTT

SEQ ID NO: 201985 - protein, 45 aa, Glycine max
  unsure (1)..(45): unsure at all Xaa locations
  Clone ID: PAT_MRT3847_24418C.1.pep
QXVWAASXXXPWRQDKRXDAXPXESXTCXPGLPVIWRSPIDDINQ

SEQ ID NO: 201986 - protein, 97 aa, Glycine max
  Clone ID: PAT_MRT3847_24419C.1.pep
NMFDCPRLFGNLYISIGQWLSHILHDNNVSITVTSLASSTIFSNMNVLRLLDRSICWSTFITGNSIICWLRVSHNCIILINKLDNVILPQVAFEPPR

SEQ ID NO: 201987 - protein, 161 aa, Glycine max
  Clone ID: PAT_MRT3847_2441C.1.pep
VKVLIQLQIQREASNRKIMSLVRSADLAPTSYENAKLFSLKGTDVRPGLSSQIFGPDKHRSTYMTDTYPSESYEKYFHDSQTEEIIEPSSSSISGSSIHPDVASSYQIRAISGASMVANNPFDSSFMSTRHRDAYQSNSGSDLMENASLHSRNDDGLMRLN

SEQ ID NO: 201988 - protein, 85 aa, Glycine max
  Clone ID: PAT_MRT3847_24420C.1.pep
MAKDIQVAERGSFSGKDYQDPPPAPLIDAEELTKWSFYKAIIAEFIATLLFLYITVLTTIGNKHQTDLKENGEICGGVGILGIAW

SEQ ID NO: 201989 - protein, 134 aa, Glycine max
  Clone ID: PAT_MRT3847_24421C.1.pep
DNNTLTQHRHRSKERERERERERETALTSNEYSYSTFQTTTLTSSLSLFYVTHSHSNHIFSQIHLPLQQKKLFIGSRHPSFLLLSPASELSIYGFHWALIELGMCKICGFVCWWQKDMILVVGPTQLSDWIRSG

SEQ ID NO: 201990 - protein, 42 aa, Glycine max
  Clone ID: PAT_MRT3847_24422C.1.pep
SSSLASPLLDPLDEAEAVSRLCLILNNLYDAITCVGGSKSES

SEQ ID NO: 201991 - protein, 224 aa, Glycine max
  Clone ID: PAT_MRT3847_24423C.1.pep
MIEGGSIRLKTWQQAAVAVGSAVGALLDPRRADLIAALGETTGKPAFERVLQRMKSSPEGRAVLLERPRVVSAKVGHAWDLPANTFGAAYARFMGSRNFSPDDRPPVRFMDTDELAYVAMRAREVHDFWHTLFDLPTNLIGETALKVIEFEQMGLPMCLLSVIGGTARFSEKQRKLFYHHYFPWAIHAGMQSTDLMCVYYERHFDEDLEDVRRKLQIVPAPTVH

SEQ ID NO: 201992 - protein, 71 aa, Glycine max
  unsure (1)..(71): unsure at all Xaa locations
  Clone ID: PAT_MRT3847_24424C.1.pep
TDLRTQLRGAAGAIASDEKIVLLGAMQAFFDRSTYTYVFLWTPALSLNDEXILDETHIVTFMLASKMRSSL

SEQ ID NO: 201993 - protein, 353 aa, Glycine max
  unsure (1)..(353): unsure at all Xaa locations
  Clone ID: PAT_MRT3847_24425C.1.pep
MGGVTSSIAAKFAFFPPHPPSYTVVAAEVGGVSDPPPAPPRLEIPEVPSKDNVDVLKLRTRRGNEIVAVYVKYHRPTCTMLYSHGNAADLGQMFELFVELSNRLRLNVMGYDYSGYGQSTGKPTECNTYADIDAAYKCLKEQYALKDEQLILDGESVLSXPTLDLATRIRDLPRIALQSPILSGLRVLYPVKRTYWFDIYKNIDKVGAVKCPVLVIHGTADEVVDVSHGKQLWELCKVKYEPLWVSGGGHCNLELYPEFIKHLKKFVQTIGKSKATANGSKKDTVESENQGKASKESESGTSGTSELSTEIPEVSRNSLDSRLEKSKKPGKPEKSRMSTDHVDRFRRRKGLVW

SEQ ID NO: 201994 - protein, 189 aa, Glycine max
  Clone ID: PAT_MRT3847_24426C.1.pep
MSFIGTQQKCEACDKTVYPVDQLSADGTAYHKACFKCSHCKGTLKLSNYSSMEGVLYCKPHYEQLFKETGSFKKNFQSPAKQAVKTTPELTRSPSKAASMFSGTQEKCATCGKTAYPLEKVTVEGQAYHKSCFKCSHGSCPITPSNYAALEGVLYCKHHFSQLFKEKGSYNHLIKSASIKREANSVPQA

SEQ ID NO: 201995 - protein, 69 aa, Glycine max
  Clone ID: PAT_MRT3847_24427C.1.pep
RTAGGFAFWWLFFYCYIGLSLIFTKAAADDELSTLLSIKSTLIDPMKHLKDWQLPSNVTQPGHLIVTGL

SEQ ID NO: 201996 - protein, 80 aa, Glycine max
  Clone ID: PAT_MRT3847_24428C.1.pep
HSHRVASAHFHPPKALSLPLSYLLVQPSTSISTKILPTSIMATVHSMSMLFTTISCPFHNTPNLNFRPSSTNQLTRASLM

SEQ ID NO: 201997 - protein, 99 aa, Glycine max
  unsure (1)..(99): unsure at all Xaa locations
  Clone ID: PAT_MRT3847_24429C.1.pep
AMDNVVRTHPKLDWFCSESTADTIMKHGSNSFMANIEDSRAIMESKDGNDCMVAINLTIDWKHDLPRAANRMTQCMGRAFALQDEPXVHKVWLTFDDAP

SEQ ID NO: 201998 - protein, 253 aa, Glycine max
  unsure (1)..(253): unsure at all Xaa locations
  Clone ID: PAT_MRT3847_2442C.1.pep
ENRGAERNIPPPGVSSNSVLVSVYTVVLHFLSEGFALGDICGWLKSCKADVGFLHRGGEQTFPVHLFLKNDPHRADISRLGGSYSHLSKLHPTIDHEMEVIQWDEGCMDSEETRVTHSTRQKPCCCSSYDSDFTRNFKVPAKYLAKGSSGHCSSIPERPAHVAAECSDGSLNDEITDKPSSSDQSEPEYGYRQVHHMKSVPKDTNMSTDTLQEEELLDAXLWVVXHVGLAPNFKXASYYMTHQAQSISLLEET

SEQ ID NO: 201999 - protein, 77 aa, Glycine max
  Clone ID: PAT_MRT3847_24430C.1.pep
LKHIFIYGNPIPKVWFQTLMELLQNLILLINSFLYLSNIYTIYYIMLFCAINENLYQLLFLNTHTIISVIFNLKLFS

SEQ ID NO: 202000 - protein, 71 aa, Glycine max
  Clone ID: PAT_MRT3847_24431C.1.pep
KKITIKKKYQKKKTKGTISSTWKNFDAYNNYWDAPFSFPLTAPTIYYDTFPGWVPLLFFYKTIMRRPTYCH

SEQ ID NO: 202001 - protein, 231 aa, Glycine max
  unsure (1)..(231): unsure at all Xaa locations
  Clone ID: PAT_MRT3847_24432C.1.pep
RLFPHGDLTEIGERGVNLSGGQKQRIQLARALYQNADVYLLDDPFSAVDAHTATNLFNEYIMDGLKEKTVLLVTHQVDFLPAFDSVLLMSNGKILEAAPYHHLLSSSQEFQDLVNAHKKTAGSDKPMNVTSSKRRSTSVREITQAFKEKHLKEANGDQLIKEEEREIGDTGLKPYMQYLNQTKGYIYFFXASLXHLLFXICQILQNSWMAANVDHFQVSTLKLIVVYFLIG

SEQ ID NO: 202002 - protein, 69 aa, Glycine max
  Clone ID: PAT_MRT3847_24433C.1.pep
LRWCYSWRHMIPSSFLFNGLCPWCTSNACTSVCQLSIQICTTCLLSGVPAFTALHNSPGMLAPQHLMLA

SEQ ID NO: 202003 - protein, 127 aa, Glycine max
  unsure (1)..(127): unsure at all Xaa locations
  Clone ID: PAT_MRT3847_24434C.1.pep
PRGRAAERRTQERGGXKTATAGPHARKVIMKILXEGEGCEHSTEAALGNLIVGGGLHYGPRSVKRVRMMKEGCLNSRLMRSKESXGLDRSVSAMTKGEVALLTIAPEYALGPSGSERELTHGAADCT

SEQ ID NO: 202004 - protein, 328 aa, Glycine max
  unsure (1)..(328): unsure at all Xaa locations
  Clone ID: PAT_MRT3847_24435C.1.pep
MAATTRSLAYNYDVFLSFTGQDTRQGFTGYLYKALCDRGIYTFIDDQELPRGDQITSALSKAIQESRIAITVLSQNYASSSFCLDELVTILHCKRKGLLVIPVFYKIDPSDVRHQKGSYGEAMAKHQKSFKAKKLQKWRMALQQVADLSGYHFKDGDSYEYKFIGSIVEEVSRKINRAYLHAVDYPFGQWSQVMEXSNKHGLKHLQSILLSKLLGEKDINLTSWQEGASMIRHRLRRKKILLILDDVDKREQLKAIVGRSDWFGPGSRVIITTRDKHLLKYHQVERTYEVTKSLVNTSILVISLIKSLVRLIGRITGIGNNKAPVTGS

SEQ ID NO: 202005 - protein, 357 aa, Glycine max
  unsure (1)..(357): unsure at all Xaa locations
  Clone ID: PAT_MRT3847_24436C.1.pep
MAATTRSLASIYDVFLSFRGTDTRYGFTGNLYKALCDKGFHTFFDEGXDKLHRGDEITFALLKAIQESRIAITVLSQNYASSSFCLDELVTILHCKREGLLVIPVFYKIDPSDVRHQKGSYGEAMAKHQKRFKAKKLQKWRMALQQVADLSGYHFKDGDSYEYEFIGSIVEEVSRKISRASLHVADYPVGLESQVTEVMKLLDVGSDDVVHIIGIHGMGGLGKTTLALEVYNLIALHFDESCFLQNVREESNKHGLKHLQSILLSKLLGEKDITLTSWQEGASMIQHRLQRKKVLLILDDVNKREQLKAIVGRPDWFGPGSRVIITTRDKRLLKYHEVERTYEVKVLNQSAALQLLT

SEQ ID NO: 202006 - protein, 173 aa, Glycine max
  unsure (1)..(173): unsure at all Xaa locations
  Clone ID: PAT_MRT3847_24437C.1.pep
MAATTRSLAYNYDVFLSFTGQDTRQGFTGYSYXALCDRGIYTFIDDQELRLEDEIKPALSNAIQESRIAITVLSQNYASSSFCLDELVTILHCKSQGLLVIPVFYKVDPSHVRHQKGSYGEAMAKHQKRFKANKEKLQKWRMALHQVADLSGYHFKDGYTIILIYITLWFLLD

SEQ ID NO: 202007 - protein, 484 aa, Glycine max
  Clone ID: PAT_MRT3847_24438C.1.pep
LRVRATLLLPTLLLLIPFATLVSARPHLAGDFLRLPSETDNDDNVQGTRWAVLLAGSNGYWNYRHQADVCHAYQILRKGGLKEENIIVFMYDDIAFNGENPRPGVIINKPDGGDVYEGVPKDYTGEDVTVGNFFAALLGNKSALTGGSGKVVDSGPDDHIFVYYTDHGGPGVLGMPAGPYLYADDLIEVLKKKHASGTYKNLVFYLEACESGSIFEGLLPEDINIYATTASNAEESSWGTYCPGEYPSPPPEYSTCLGDLYSVAWMEDSDRHNLRTETLHQQYKLVKERTISGDSYYGSHVMQYGDVRLSSDVLFHYLGTDPANDNFTFVDENSLWSPSKPVNQRDADLIHFWDKFRKAPEGSLRKNAAQKQVLEAMSHRMHVDNSVKLIGKLLFGIEKGPEVLNAVRPAGSALVDDWHCLKTMVRTFETHCGSLSQYGMKHMRSFANICNVGIKNEQMAEASAQACVSIPSNPWSSLQRGFSA

SEQ ID NO: 202008 - protein, 294 aa, Glycine max
  unsure (1)..(294): unsure at all Xaa locations
  Clone ID: PAT_MRT3847_24439C.1.pep
MEMKGFMFYQQQQQQQIVEENMSNLTSASGEASASSGNRTEIGTSYMAPPPTQIQPPKKKRNLPGNPDPDAEVIALSPKSLLATNRFICEICNKGFQRDQNLQLHRRGHNLPWKLKQRTSKEVRKKVYVCPEPSCVHHDPSRALGDLTGIKXHFCRKHGEKEWXCDSAQEYAVQSDWKAHSKTCGTREYRCDCGTLFSRRDSFITHRAFCDALAEESARAIANPLLPPQQQQSSSSHMSTLQTQFNPQNLHAFPLKKEMPPWLGPPATVVVDHHLSSSSSIMFSPPHQENDNPP

SEQ ID NO: 202009 - protein, 612 aa, Glycine max
  Clone ID: PAT_MRT3847_2443C.1.pep
AKNSREANNRRIMSLVRSADLAPTSYENAKLFSLKGTDVRPGLSSQIFGPDKHRSMYMTDAYSGECYEKYFHDSQTEELIEPSSSSISGSSIHPDVASSYQLRASSGASMVANNPSDSSFMSTRHHDAYQSNSGSDLMENGSLDSRDDEGLMRLRLKALERALLDDSDAGEDEEEEEEEEEDIFEAAQSMEIDPDIAEWADSIHNMLLHGSPKESSSSDSNTSSISSTKEISQTSQTPKKLLYECAIALSEGNEVEGSSMINNLRQMVSIQGEPSQRIAAYMVEGLAARLAESGKSIYKALRCKEPPTSDRLAAMQILFEVCPCFKFGFIAANNAITEAVKDDMKIHIIDFDINQGSQYINLIQTLASRSSKPPHVRLTGVDDPESVQRSVGGLRNIGQRLEKLAEALGLPFEFRAVASRTSIVTPSMLNCSPDEALVVNFAFQLHHMPDESVSTVNERDQLLRLVKSLNPKLVTVVEQDVNTNTTPFLPRFVEAYNYYSAVFESLDATLPRESQDRMNVERQCLARDIVNVVACEGEDRIERYEVAGKWRARMTMAGFTSSPMSTNVTDEIRKLIKTVYCDRYKIKEEMGALHFGWEDKNLIVASAWKLPR

SEQ ID NO: 202010 - protein, 482 aa, Glycine max
  Clone ID: PAT_MRT3847_24440C.1.pep
MPTFFLPTLLLLLIAFATSVSGRRDLVGDFLRLPSETDNDDNFKGTRWAVLLAGSNGYWNYRHQADVCHAYQILRKGGLKEENIIVFMYDDIAFNGENPRPGVIINKPDGGDVYKGVPKDYTGEDVTVDNFFAALLGNKSALTGGSGKVVDSGPDDHIFVYYTDHGGPGVLGMPAGPYLYADDLIEVLKKKHASGTYKNLVFYLEACESGSIFEGLLPEDINIYATTASNAEESSWGTYCPGEYPSPPPEYTTCLGDLYSVAWMEDSDRHNLRTETLHQQYKLVKERTISGDSYYGSHVMQYGDVGLSRDVLFHYLGTDPANDNFTFVDENSLWSPSKPVNQRDADLIHFWDKFRKAPEGSLRKNTAQKQVLEAMSHRMHVDNSVKLIGKLLFGIEKGPEVLNAVRPAGSALVDDWHCLKTMVRTFETHCGSLSQYGMKHMRSFANICNVGIKNEQMAEASAQACVSIPSNPWSSLQRGFSA

SEQ ID NO: 202011 - protein, 111 aa, Glycine max
  Clone ID: PAT_MRT3847_24441C.1.pep
QKQEQRPRFFCAQNGIERLVSALFFLMREIDVPSPMTPPLEAFLGVKSSDFYFEQKAYNAFASWVRGIFFFLFLIGSPPRVLALVELLKLQGLVNIGHCWAQKNWFGNLWS

SEQ ID NO: 202012 - protein, 93 aa, Glycine max
  Clone ID: PAT_MRT3847_24442C.1.pep
HIWNNFPLLFFTLLSTYPPPVSGNQLLSQVPRTERRSLKIQSLQWLLHLLHWAIIHIIAYLNRRLFKRGERQRNTFVLTATLYYLHENWSFIH

SEQ ID NO: 202013 - protein, 44 aa, Glycine max
  Clone ID: PAT_MRT3847_24443C.1.pep
MGFYLSQYAMPYETDTDASKPALSISHGNRALIIVYLKFFNTVY

SEQ ID NO: 202014 - protein, 53 aa, Glycine max
  Clone ID: PAT_MRT3847_24444C.1.pep
SKLSHLVFSIYTKRGDKVIPTNLVGKNRLKFNLGLYSKSLEQSKMCLIFFMRN

SEQ ID NO: 202015 - protein, 90 aa, Glycine max
  Clone ID: PAT_MRT3847_24445C.1.pep
VFELFIRDGHLTARDGILHSQSMWLTVKMPGADSAGIIPPLEPICANSRQPVIVGPLYVAFAHIPNVRRSDCSEASSVALSATDNWISLG

SEQ ID NO: 202016 - protein, 33 aa, Glycine max
  Clone ID: PAT_MRT3847_24446C.1.pep
EDFMFYPKLKESVCCDFVSLPASSHRLKSNEPI

SEQ ID NO: 202017 - protein, 83 aa, Glycine max
  Clone ID: PAT_MRT3847_24447C.1.pep
IYIGNYFAMDKSPQMPLLKPKFFRVMNYQKWPAGYFDQKLGLPLPIIFLFRPFREKGKPFGGDYFKALITYPTFNHFLLILLT

SEQ ID NO: 202018 - protein, 38 aa, Glycine max
  Clone ID: PAT_MRT3847_24448C.1.pep
GSGFRQASSPACSIRSQSSSGCPSFPVFEVNSECLVPL

SEQ ID NO: 202019 - protein, 44 aa, Glycine max
  Clone ID: PAT_MRT3847_24449C.1.pep
ICGVVVELKISSSPKNIKNDLWKVKVLYPSVDYTKIPRKWEYKH

SEQ ID NO: 202020 - protein, 109 aa, Glycine max
  unsure (1)..(109): unsure at all Xaa locations
  Clone ID: PAT_MRT3847_2444C.1.pep
ITITRLDILVVLIIKAHKHPDAYALYVQHIHFXKNKPQLLFNXLFRFIPLYEIHNPNVCVLCSLKPVTMTGIKSQTIILAASYRDHTNVELLEPPRTTQPAAIITFSLY

SEQ ID NO: 202021 - protein, 217 aa, Glycine max
  Clone ID: PAT_MRT3847_24450C.1.pep
GSRYGTNHMSLGLGAQLQNHQISATNSILSLGSEPKFEHLISPNLHHSSSSSFGVQSPQSSSFFMTDPNHAFQDLQSQNQGHLFSNKQLHGLMQLPDLQGNTNNNSTTSASSLSASANNTNLFNLSFFPNTNTSGSIINDQFSNISGGNNNQGTATLYSTNSPVSNNHVGNSSLSSLFGNASVPHHKMSPHIYLGRKNCISFSDLISKVMEDIIQRR

SEQ ID NO: 202022 - protein, 71 aa, Glycine max
  Clone ID: PAT_MRT3847_24451C.1.pep
FSLKSDQNQILECALPCNQHHLTVLCFFSLSATFSALYSHFTMFVLIISQWHVKVRIKVSCVLRVLYLSNI

SEQ ID NO: 202023 - protein, 63 aa, Glycine max
  Clone ID: PAT_MRT3847_24452C.1.pep
FKILTLKHYFCILEIHWDIYMLPLSIAISLTFAPCLVLFQKPAPFSTVSDFFKKLYQAVYWAS

SEQ ID NO: 202024 - protein, 55 aa, Glycine max
  Clone ID: PAT_MRT3847_24453C.1.pep
LTNRMIRVIFSSTVIYTFCNIDISFILISYKTKRSAVSYACAYDVGERVGGRVGV

SEQ ID NO: 202025 - protein, 337 aa, Glycine max
  Clone ID: PAT_MRT3847_24454C.1.pep
MESTESSYVSSPEGPRKHAASPPPKSPSLDSEEKPTYIRFLVSNSAAGSVIGKGGSTITDFQSQSGARIQLSRNHEFFPGTTDRIIMVSGAINEIQRAVELILSKLLSELHSEDDNDAEPKTKVRLVVPNGSCGGIIGKGGATIRSFIEDSQAGIKISPQDNNYYGQNDRLVTLTGSFDEQMRAIELIVSKLSEDPHYAQSMNSPFSYPGVYFSGYQGVPYTYVLPSVAPPAYNAVNYRPNGAAGGKLQNSKEERSNSLTMGVADEHIGLVVGRGGRNIMEISQASGARIKISDRGDYVSGTTDRKVTITGSQRAIRTAESMILQKVAYATERGVME

SEQ ID NO: 202026 - protein, 93 aa, Glycine max
  Clone ID: PAT_MRT3847_24455C.1.pep
SGEPAGKPINFAFKGNGEFASSGAHSRRSIGDWSRNSFFSFIGTVGVMERLEGIKDLHGSRRRWRVFGVVAGIVQGAVIHLARRRRVCVEIRE

SEQ ID NO: 202027 - protein, 95 aa, Glycine max
  Clone ID: PAT_MRT3847_24456C.1.pep
DLPTSVVPVRHSHQVCRIGSGSGVDIGSATGRLCCAIIADLSIRTQFFCSVECLYGRTRWHSACDPRRRLRHRLIAVDKAMVTGTHDPQYENSLR

SEQ ID NO: 202028 - protein, 71 aa, Glycine max
  Clone ID: PAT_MRT3847_24457C.1.pep
GLGRPPKKRLVSKGFKKVCPFVEKKGVGSNWIPKRLRAFFKRGLDPFLLGQKGVPKFWGLFLIMGDFYFPF

SEQ ID NO: 202029 - protein, 65 aa, Glycine max
  Clone ID: PAT_MRT3847_24458C.1.pep
RCPKFPPKGSPPSPCGTIFNKILIFKLQPSQSFFCNPIFPCSSLRTPLAGNKFQRLFWFAFCFHH

SEQ ID NO: 202030 - protein, 161 aa, Glycine max
  Clone ID: PAT_MRT3847_24459C.1.pep
CLPWLSNISGYSYGIGISIGILLLIITITLTSYFCTRSQVSFAPATRNRRRTPNVLEPQHSIVDVSLDEATILSYPTLLYSEAKLKKSDSTATCCSICLADYKGTDMLRMLPDCGHQFHLKCIDPWLRLHPTCPVCRTSPIPTPLSTPLAEVVPLASRQDS

SEQ ID NO: 202031 - protein, 81 aa, Glycine max
  Clone ID: PAT_MRT3847_2445C.1.pep
RYCTGPTIKSCELCITPSIFTRLSLHATGAGCTVAAYILLPTYHVLLELRYYDRVLECPMGVAMNNELIQLVGIVAPASGI

SEQ ID NO: 202032 - protein, 155 aa, Glycine max
  Clone ID: PAT_MRT3847_24460C.1.pep
LPDFFFKNHFFSKNHFFSKHPRPIPLGKNTLTAATISSHSSSDSINRSMSSHSSSESIDTSMTSDSPSDSTHRSLSSESSSGTSKIQYPVNRKSLILQFAATFRNDTDTIQVPSFYHEQWAPQYPAFVRFRYDGTIYQIRLPQHRQKVYFAKGLN

SEQ ID NO: 202033 - protein, 138 aa, Glycine max
  Clone ID: PAT_MRT3847_24461C.1.pep
NDPDTPEVGNGGMPKNEYIVHFSLWALSKALLLLGCDVRNMTKEPMEIVANKEVISVNQDPLGVQGKKVRMEGDQEIWAGPLSGYRVAVVLLNRGPSKISITANWDDIDIPPKSAVEAKDLWELLESLMSIFVFLAEI

SEQ ID NO: 202034 - protein, 59 aa, Glycine max
  Clone ID: PAT_MRT3847_24462C.1.pep
SVCLSLIDYAYMLSRLCLLNRFQAKKITNYSTLEQPKKHACCRSEFKLYTKQKKVAIIS

SEQ ID NO: 202035 - protein, 77 aa, Glycine max
  Clone ID: PAT_MRT3847_24463C.1.pep
FDFLDAVFCVIYRFLDERVEGEASPCCCSNREMLKRRMNVTDDDGLSDSLYERKNTFREMGFLQFGRKCEDSNRNRG

SEQ ID NO: 202036 - protein, 62 aa, Glycine max
  unsure (1)..(62): unsure at all Xaa locations
  Clone ID: PAT_MRT3847_24464C.1.pep
SNITSSIIFSLRSKMXKFHTGLLPPTVLFSPSKLLFLGASHCLLRLVLLHLQLFVQTLIFCI

SEQ ID NO: 202037 - protein, 168 aa, Glycine max
  unsure (1)..(168): unsure at all Xaa locations
  Clone ID: PAT_MRT3847_24465C.1.pep
NEYIVHFRLWALSKAPLLLGCDVRNMPKESMEIVANKEVXSVNQDPLGVQGKKVRMEGDQEVSXIWNTTMALSLVSDEQYMIIHMVTLFGQIWAGPLSGYRVAVVLVHRGPSKISITANWDGIDIPPKSAVEARDLWEHKSLMRPFVDKLTAPVDPHGCKMYVLKPVA

SEQ ID NO: 202038 - protein, 410 aa, Glycine max
  Clone ID: PAT_MRT3847_24466C.1.pep
MERRVGYEVLVALVTLLVFSFACATASSSGPTKLHHRVEQFRRNLLANGLGRTPPMGWNSWNHFSCQINEKMIRETADALVSTGLSKLGYTYVNIDDCWAELNRDAKGNLVAKNSTFPSGIKALADYVHGKGLKLGIYSDAGYFTCSKQMPGSLGHEFQDAKTFASWGIDYLKYDNCNNDGSKPTDRYPIMTRALMMAGRPIFFSLCEWGDLHPALWGAKVGNSWRTTNDINDSWESMVSRADMNEVYAEYARPGGWNDPDMLEVGNGGMTKNEYIVHFSLWALSKAPLLLGCDVRNITKETMEIVANKEVIAVNQDPLGVQGKKVRMEGDEEIWAGPLSGYRVAVVLLNRGPWKISITANWDDIGIPPKSAVEARDLWEHKTLMRPFVDKLTATVDPHGCKMYVLKPLA

SEQ ID NO: 202039 - protein, 72 aa, Glycine max
  Clone ID: PAT_MRT3847_24467C.1.pep
RSWLGSSISSHEIINKIHHVFIFLCSSSIYLGSSLSICRTCLLLKNRPISWPCNNGSKLLRSRPRVPSVAAV

SEQ ID NO: 202040 - protein, 54 aa, Glycine max
  Clone ID: PAT_MRT3847_24468C.1.pep
REKKGMPKSCMFGWQRHVLILIPSPHQESRFIAHAWNDQLSLFALSGTFRVCIV

SEQ ID NO: 202041 - protein, 68 aa, Glycine max
  Clone ID: PAT_MRT3847_24469C.1.pep
LHSILMAQQYSHPRRQTPPPSQYLEVNHRSSRKIRRFAAGTGAGFAVALITRTLKGTVVAASHIEAVK

SEQ ID NO: 202042 - protein, 114 aa, Glycine max
  unsure (1)..(114): unsure at all Xaa locations
  Clone ID: PAT_MRT3847_2446C.1.pep
AARRRQKGGVGRGERVVFXEQSKAAYWTLSPGVPWFXFLQIFLFFSLFLSLHPKQIFWYPYTPHLYIFSLPAEHNKHVLFVSFPWTSPFPPSSKLLFLTPNSSHAFYPYSPSHF

SEQ ID NO: 202043 - protein, 39 aa, Glycine max
  unsure (1)..(39): unsure at all Xaa locations
  Clone ID: PAT_MRT3847_24470C.1.pep
XPXXQXXIXRDXNTERXSXPICXXSKXXGNHFRVNSHTP

SEQ ID NO: 202044 - protein, 71 aa, Glycine max
  Clone ID: PAT_MRT3847_24471C.1.pep
QLQEVLLFSHRNSILTKMVMPCFVHSITLALYRKTALIPAHAAHSAFSEDEAVACGTEKVGIRVSPALSKS

SEQ ID NO: 202045 - protein, 46 aa, Glycine max
  Clone ID: PAT_MRT3847_24472C.1.pep
RHWKLLPMEWGINYVLLVGSFKTTKLLGFMNFAKLGAFTYLNFSCI

SEQ ID NO: 202046 - protein, 39 aa, Glycine max
  Clone ID: PAT_MRT3847_24473C.1.pep
VRRALVILVDLLNCPAPFCRLMPMPAPLDHVHWQAEPAP

SEQ ID NO: 202047 - protein, 252 aa, Glycine max
  Clone ID: PAT_MRT3847_24474C.1.pep
VLEVLEDFPSVQMPFEWLVQLVPPLKPRAFSISSSQSAHPNQVHLTVNVVSWTTPYKRKKKGLCSSWLAALDPCDVGIHVPTWFHKGLLPTPSPSLPLILVGPGTGCAPFRGFIEERAVQSRTNSTAPIIFFFGCWNEDGDFLYRDFWLSHSQNKGVLSEAKGGGFYVAFSRDQPQKVYVQHKMREQSQRIWNLLAEGAAVYIAGSSTKMPADVTSAFEEIVSYENEVSAEDAVRWIRALEKCGKFHIEAWS

SEQ ID NO: 202048 - protein, 105 aa, Glycine max
  Clone ID: PAT_MRT3847_24475C.1.pep
SISLKEGEVDKDISIVQGTLGKERGILLGVRGGVQNAKFLNMPNADVSMWRNFDGERDFVDAKRTVPYMKKAGSFFIEFGKVADDTINIEGFAHTLGQIWESQEK

SEQ ID NO: 202049 - protein, 190 aa, Glycine max
  unsure (1)..(190): unsure at all Xaa locations
  Clone ID: PAT_MRT3847_24476C.1.pep
MWCVPQCMKAGMATSSGNTNTKSQNVNVKAVVTIEQSDGGLVPNLINSAVDGIKELAGKTLVLELVSDELDPKTNIEKKTPKSSVQNIGKKEDEIRYEAQFELSTDFGSVGAVTIENEQQEEVFLKSIVLHGFPDIGHVHFTCNSWIQPKHDGAMKRVFFTDKSYLPSQTPRRLXRLREEELVLLKGNGE

SEQ ID NO: 202050 - protein, 226 aa, Glycine max
  unsure (1)..(226): unsure at all Xaa locations
  Clone ID: PAT_MRT3847_24477C.1.pep
MTITFENIEEIQAATTLQSVIRGWLVRRHASGLHKSKKSPENARSRRRSRVKMPEVKDVSSERGQNLPSALAELQRRVIKAEATIEQKEEENAELKEQLKQFERRWIEYEKRMKSMEEMWQKQMSSLQMSLAAARKSLASENVSGQIARRDVASPLGYDSEDAASVGSRTPRTPHASTPLKYSXSLTEAGAGRDVKSTLTSVSNLMKEFEQRRHTFDDDAQTLGEV

SEQ ID NO: 202051 - protein, 100 aa, Glycine max
  unsure (1)..(100): unsure at all Xaa locations
  Clone ID: PAT_MRT3847_24478C.1.pep
DSSFNDFDGWCWPGSSSYSDTLNPEIKSWGADKISHPRYVGFTPFLYTWKDTYEPLVSXSGPEATPPRDATHCGGVQHRELHTAYGYYYHMATDNVLLKR

SEQ ID NO: 202052 - protein, 60 aa, Glycine max
  Clone ID: PAT_MRT3847_24479C.1.pep
IGTLLNNMHIGTSQWFVQLINSLILQSNMIVMSMRGYKELCIRRSRDIDYLVHSVVFHVS

SEQ ID NO: 202053 - protein, 89 aa, Glycine max
  Clone ID: PAT_MRT3847_2447C.1.pep
KAFWAITPGWFPLVGAPYVFLGNIWVLGPSENGIAPLLVDSPGGPCFFQGQFLSNSPLFLPPFWGQFWGAPPFFCRPLFPGNSRVIMGG

SEQ ID NO: 202054 - protein, 56 aa, Glycine max
  unsure (1)..(56): unsure at all Xaa locations
  Clone ID: PAT_MRT3847_24480C.1.pep
SRIFASVCARVVTMRGRLCTMHNISENLIPXFQLTSNMVAPLLXXINVSLRAQFRS

SEQ ID NO: 202055 - protein, 81 aa, Glycine max
  Clone ID: PAT_MRT3847_24481C.1.pep
LEGSGSSNYLGVFFFVILSSPVNTLSLLHSFSFFFIIPCSSSITFQKYCCKPFSSYDISTCHGDSHLNCLRMWENWVMSVP

SEQ ID NO: 202056 - protein, 363 aa, Glycine max
  Clone ID: PAT_MRT3847_24482C.1.pep
MDLNRWCSSTTNPYCLLFQALSLIPIWHYLLFFSFVFLSFFYRFLELHFLQDLFSLFSGSSVTLTYHHGSQFYDAVVSKCRILHGTYLATPWLSSPHLQTVFLNFFGRPPLFKYRRQLFTTPDGGTVALDWLLSSDVSAGAIHMEDVVSTDESTPIVVVIPGLTSDSSSAYLKHLAYHTAKCGWKVVVSNHRGLGGVSITSDCFYNAGWTEDVRTVVNYLHKENPRAPLFVVGTSIGANILIKYLGEDGENIPVAGAVAVCSPWDLLIGDRFITRRHVQKFYDKALAIGLQGYAKLHQPHFSRLANWEGIEKSISIRDFDHHATRIVGKYETVDTYYRRCSSSTYVQSVSIPLLCISALDDPV

SEQ ID NO: 202057 - protein, 90 aa, Glycine max
  Clone ID: PAT_MRT3847_24483C.1.pep
MEKRLKPPLVLSSYDSFFSLHEYYLANPNDSSGFLRERKRLQCEGFFSQFRHDIEIPNGENARNCVANMILKFHDDPMVNGFEIVIFLRL

SEQ ID NO: 202058 - protein, 47 aa, Glycine max
  Clone ID: PAT_MRT3847_24484C.1.pep
ATKRTRPVTEGPILGIPRTLVKMKRQMELRKLSTKMAMLKELTLLST

SEQ ID NO: 202059 - protein, 73 aa, Glycine max
  unsure (1)..(73): unsure at all Xaa locations
  Clone ID: PAT_MRT3847_24485C.1.pep
PLDYCEIWICCSKFNSAHLHRWDXRDNIRGGRKRNRMKTAQVEVSISSPSMNRWMTMKNLMLEDTGTQRSDRM

SEQ ID NO: 202060 - protein, 159 aa, Glycine max
  Clone ID: PAT_MRT3847_24486C.1.pep
MSLFFHVRIARIFNTYGPRMCLDDGRVVSNFVAQAIRKQPLTVYGDGKQTRSFQYVSDLVNGLVALMESEHVGPFNLGNPGEFTMLELAQVVKETIDSSATIEYKPNTADDPHMRKPDISKAKELLNWEPKIPLREGLPLMVNDFRNRILNEDEGKGMK

SEQ ID NO: 202061 - protein, 112 aa, Glycine max
  Clone ID: PAT_MRT3847_24487C.1.pep
MFCVEFCDPLLAYKTNVMGTLNMLGLAKRIGARFLLTSTSEVYGDPLEHPQKETYWGNVNPIGERSCYDEGKRTAETLAMDYHRGAGVEVRIARIFNTYGPRMCLDDGQVPI

SEQ ID NO: 202062 - protein, 75 aa, Glycine max
  Clone ID: PAT_MRT3847_24488C.1.pep
IYISYKPNKTYLHVIHVIPPLFHSRFTFHPSITLFNHQSHYTRITHSNQDIITPQFHNKQLASAWDSYAKTQAYM

SEQ ID NO: 202063 - protein, 57 aa, Glycine max
  Clone ID: PAT_MRT3847_24489C.1.pep
SIHSIYYRYLYRANHPTYPILNSHTYHLFILLYGHLYTKNITSFNIKPTSKPYHYPT

SEQ ID NO: 202064 - protein, 112 aa, Glycine max
  Clone ID: PAT_MRT3847_2448C.1.pep
PLLTSYFHGSLPSVATDVHTPTLEFSIVQTTRPHVTSTSSHKHTSHINRGDDISCGIADNNWCGNVHPLATCGTCVKCQPISHGNQQQHPNSSHTRVFKHPSGPPLPTTNFA

SEQ ID NO: 202065 - protein, 151 aa, Glycine max
  Clone ID: PAT_MRT3847_24490C.1.pep
YENLELRLYRLDGKLPPDDLDIDDWLGINEPADIYVLGLQEIVPLNPGNIFGAEDTRPVLKWENIIRDTLNRARPKAPKMKSFSDPPSPSKFKPSDDAPDIEQEILLESDGDIGEEVHPLDEEYNVYEGGADKPITDEEALNTNLQASVAA

SEQ ID NO: 202066 - protein, 61 aa, Glycine max
  Clone ID: PAT_MRT3847_24491C.1.pep
DLVKKKIKKGKIRDRFVFWEEGKGWEVFMKKPARYVGKSFFLKKKVNKRVLIKGRVGAAGF

SEQ ID NO: 202067 - protein, 84 aa, Glycine max
  Clone ID: PAT_MRT3847_24492C.1.pep
SDMVGAFSQNIVTLTGLPMILVSESDLTNPLYGVSCYVLLSAQGDFSLTWYHIAYRLESQHNYLMRLLIVYYEIDVLLCLDQSM

SEQ ID NO: 202068 - protein, 223 aa, Glycine max
  unsure (1)..(223): unsure at all Xaa locations
  Clone ID: PAT_MRT3847_24493C.1.pep
TVMKQGSANNQQLLWARVVMRKWLNMASNEPDYTADPDDDNEEDPESDSDNEEWGKRTRFGDSREEQAPIESNEFLPRLRRQKSLTSRSQYINKKELRVCVGTWNVGGKLPPDDLDIDDWLGINEPADIYVLGFRRLXPLNPGNIFGAEDTRPVLKWENIIRDTLNRARPKAPKMKSFSDPPSPWQFNICWPWNALCAIWKAHQTSLKKRQSRTRSPLDRREI

SEQ ID NO: 202069 - protein, 77 aa, Glycine max
  Clone ID: PAT_MRT3847_24494C.1.pep
KTARSRVKLEGKASQLSHNLIFFFKGEPLGGSVTLAFFYHTKMQKKKKKNTQGGEPGFSCGFGDSYMGENLLGYGLF

SEQ ID NO: 202070 - protein, 223 aa, Glycine max
  Clone ID: PAT_MRT3847_24495C.1.pep
TVMKQGSANNQQLFWARVVMRKWLNMASNEPDYTADPDDDNEDDPESDSDNEELGKRTRFGDSREEQAPIESNEFLPRLRRQKSLTSRSQYINKKELRVCVGTWNVGGKLPSDDLDIDDWLGINEPADIYVLGLQEIVPLNPGNIFGAEDTRPVPKWENIIRDTLNRVRPKAPKMKSFSDPPSPSKFKPSDDAPDIEEEILLESDGDIGEEVHPLDEDTMFMM

SEQ ID NO: 202071 - protein, 57 aa, Glycine max
  Clone ID: PAT_MRT3847_24496C.1.pep
LIRGKPWETLSAMAWMRISLVRTTRMCFMMRLITDPSALAVTSLLLEVPSIGIQAHH

SEQ ID NO: 202072 - protein, 173 aa, Glycine max
  Clone ID: PAT_MRT3847_24497C.1.pep
MSLISQNASTKNVVNKSKREVEDDVENSDTLKVKKKKKYDEGEQLAMEQVKEMKKLENFLFGSLYSPLEFGKEEDEVEPPKAAEKVSDLFFTDRSADSVLTVYREEDADLSEGSHDDDDRALQKKPVWVDDEEENATVNIAKVNRLRKLRKVEDEDLISGSEYVSRLRLSMLS

SEQ ID NO: 202073 - protein, 53 aa, Glycine max
  Clone ID: PAT_MRT3847_24498C.1.pep
LRDSLNMQSTRTIRKFLTAIKPFLSLILLLPTLLPLFSFSKIQIPINRLTYKR

SEQ ID NO: 202074 - protein, 294 aa, Glycine max
  unsure (1)..(294): unsure at all Xaa locations
  Clone ID: PAT_MRT3847_24499C.1.pep
MEVVVQSPSSPTMDNFDFGGNMGSIYQSVPSSPKGFGNYYLSAPASPSRMSELFSEFEYYSSASPSSFEAANIIDDDDDDEYVNRDLSFYSSRSASELFYGCKVKLLNESSRATSVAEQNSGRDTYGAASXRGRERETSSNSGVRRVSSSSSRRRVTRSHSPYRKSWEVEQQQQQQPQPRSSKEESSASVLSSSTSSKGSKRWWLKDFLLFRSASEGRGSSKDALKKYYKKNSNEEVKGSSSFRSSDSSRSRKEPLSAHELHYAMKRQESEDMKKRTFLPYRQGILGRLAGFGI

SEQ ID NO: 202075 - protein, 47 aa, Glycine max
  Clone ID: PAT_MRT3847_2449C.1.pep
DGYVKVENSIKFMKCFSLKTNFNCCRMIFLLLICRNYATIIDDSRSR

SEQ ID NO: 202076 - protein, 112 aa, Glycine max
  unsure (1)..(112): unsure at all Xaa locations
  Clone ID: PAT_MRT3847_244C.1.pep
HYHMDLAKTRLHTHACEXGQIASLGTLTKDIWFKDGPRSSYMGLIPSFLXIIPYASVNIAAYQTLTDMHQXYLVHNGKPGPVIQFRFGTAFRDSCTTCSYPLHYRLTRMHAQ

SEQ ID NO: 202077 - protein, 186 aa, Glycine max
  Clone ID: PAT_MRT3847_24500C.1.pep
RGGTIGNGTSERDEEENATVNIAKVNRLRKLRKGEDEDLISGSEYVSRLRAQHVKLNPGTEWARADSRIDRSSDDELTDDENEAVLSHGYEDVNDVLRTNEDLVVKSGTKLLPGHLEYSRLVDVENFLFGSLYSPLEFGKEEDEAEPPKAAEKGSDLFFTDRSADSVLTVYREEDADLSEGIMMMM

SEQ ID NO: 202078 - protein, 59 aa, Glycine max
  Clone ID: PAT_MRT3847_24501C.1.pep
FKYKHIFLTLSNMHNVVPNVFHYYSHNIQLKITVSRIVPTKISYWQILTGWTCKMWLEF

SEQ ID NO: 202079 - protein, 60 aa, Glycine max
  Clone ID: PAT_MRT3847_24502C.1.pep
VRFRPDTLKFSFEVSRLVSSSIPGHRIFFHDIQWEVSSPFGSGYSSTDVLFFYSKWVAGH

SEQ ID NO: 202080 - protein, 88 aa, Glycine max
  unsure (1)..(88): unsure at all Xaa locations
  Clone ID: PAT_MRT3847_24503C.1.pep
GSSVVAKAGNHKQSVGYHVTGNKGRQRDAPLIPYVEPVXPAQRAEGYFDFFPVEVDWEQGVAHIGELKSGVYCPLSTKTKMVETPKEW

SEQ ID NO: 202081 - protein, 83 aa, Glycine max
  Clone ID: PAT_MRT3847_24504C.1.pep
NLCFGKRSFHALLVQCLTGPSFRAGKINVNRRLSPESLGEKILRWIVFAKKMETQRGLFQSFEYWNSARFPPVTPVTSNVSPH

SEQ ID NO: 202082 - protein, 54 aa, Glycine max
  Clone ID: PAT_MRT3847_24505C.1.pep
FLRAWTNPKNGIQLKHYKWHQEKKAAPNSQKDKASKVPSQSRPKESKATKHNEP

SEQ ID NO: 202083 - protein, 60 aa, Glycine max
  Clone ID: PAT_MRT3847_24506C.1.pep
ASYGFKITSNSTGLFSPRYTQYLSHSAIMKGVHTDLDLHVYYNLSVLYHFFAMIESIFIN

SEQ ID NO: 202084 - protein, 130 aa, Glycine max
  Clone ID: PAT_MRT3847_24507C.1.pep
FVGPPNPTHRTCGRLFWWLATPSPLPQPQRLHTQITHPLNCGCELMHQSLSLTHTLILLTALQKYSSYITILVTLLLHTKQKENVRRAKMPVQDKCFIHQNITSRNPKSTLFFFFPSSYFSSTKLKQKPL

SEQ ID NO: 202085 - protein, 285 aa, Glycine max
  Clone ID: PAT_MRT3847_24508C.1.pep
PRVRSGLHTVPAYPTQTQSQICRLDLSNELFGGVNAACGGGPTLDRSRCCPVLAAWLFAAHARTALEVSAASSPPPSGDLPMMPADDSQKCVNSLQDSLRNRSIRIPQPNATCDAILCFCGIRLHHITSLTCPNAFNVTTALRNASSGGTHNATPTAIVRNLEKNCRNASYAGCTQCLIALQKIKGNNKKESESERAKKMFNRDCQLMALTWLLGRNKTAYIPTVSAVLRAVMYSAHPHESTCSPDQENMPLAVDSLRYETSKGSSSPLRLFWIVLVIVLILFCM

SEQ ID NO: 202086 - protein, 52 aa, Glycine max
  unsure (1)..(52): unsure at all Xaa locations
  Clone ID: PAT_MRT3847_24509C.1.pep
GILFCLAFXKGXDGLIKGQXWMFKVYTRQFRLLCGSCYVIHNWKMXKKSDIF

SEQ ID NO: 202087 - protein, 124 aa, Glycine max
  unsure (1)..(124): unsure at all Xaa locations
  Clone ID: PAT_MRT3847_2450C.1.pep
SLDGKEEXEKEKSQVDASVRDIEIQETTPEGEKDDAEMDAGKEAKAKKKKEDTDRKETKKVTGQDKTTDPRALKQRLEKINGQLPPLLEKKADIERQIKEAAADGHVLNGKDTDEVQPLIKIHP

SEQ ID NO: 202088 - protein, 114 aa, Glycine max
  unsure (1)..(114): unsure at all Xaa locations
  Clone ID: PAT_MRT3847_24510C.1.pep
MASSYPGSVSAAQVGSYFVGQYYQILRQQPNLVHQFYSDSSSMIRVDGDSVETAHDVLQIHSIVSLLNFTTIEIKTINSLDSWDGGVLVMVSGFVKIKDISGKRKVXXTFFLAP

SEQ ID NO: 202089 - protein, 374 aa, Glycine max
  unsure (1)..(374): unsure at all Xaa locations
  Clone ID: PAT_MRT3847_24511C.1.pep
EYHENLEKDVIRLSFFSQPDGPLMGNGSFKSSSLVPGIKEGIYLGPPPKEKLPKNSPQGSVLLGAISYGKLSFVGQGENKSPEKHPASYQISYIVPPNKIDEDKGKGSSLSSKKNVSERLKEEVRDAKIKVLASLKQETDEERLEWKELSALLKSEYPKYTPLLATILEGLVSWSNIKDKIHHDEGXKVVGAAGEVINSIDREELAKFFALKNDPEDEEAENIRKKMELTRDQLADALYQKGLALAEIESLKDVDKSPTLAATEGAKEDIENKKSTDGRSQGDLFEENFKELKKWVNVKSTKYGILLVTRERRAQRLGTALKVLCDIIQDDAEPAKKKFYDLKLSLLDEIGWTHLAAYERQWMHVRFPPSLPLF

SEQ ID NO: 202090 - protein, 160 aa, Glycine max
  unsure (1)..(160): unsure at all Xaa locations
  Clone ID: PAT_MRT3847_24512C.1.pep
VVDYSLSAHESVKPYFRGAQLQSFLAGHNITITDGXDRTSATVPFIKVADCDFLKRHSLQMSNVLWLAPEDMASLWAQLHSVACNNLEMHEAYLVNLRNVLRELDLHSPEEARLLRRKALSRLEWLQXADGPTIAQIEEFHSMQKMMNAPDSNDNTDLLV

SEQ ID NO: 202091 - protein, 83 aa, Glycine max
  Clone ID: PAT_MRT3847_24513C.1.pep
NGKRCYPLTVLMTSEGLIIAGATQDSSLLLLIRCLTKKLDSRFWILKTLEVVIHDNRRNLKPILHHHLQQFSTHHWYMTTGRT

SEQ ID NO: 202092 - protein, 77 aa, Glycine max
  Clone ID: PAT_MRT3847_24514C.1.pep
KHQIRVPLALSGPQFIPNTFPVLNGIVYGITSYTELQSYPLVASRLYFRVFSRCHIPYTIFQLIRFILWLKLNTFVP

SEQ ID NO: 202093 - protein, 96 aa, Glycine max
  unsure (1)..(96): unsure at all Xaa locations
  Clone ID: PAT_MRT3847_24515C.1.pep
VSMLHHDELWEXLFGRCLHAPDLVGILLEQTVGTHDPLSIFPLVPNGCDFSLLRDWLVEFVSDYKTETSVRHGCHAIIQADCVSRLCHYYNEVLHG

SEQ ID NO: 202094 - protein, 83 aa, Glycine max
  Clone ID: PAT_MRT3847_24516C.1.pep
VCSIGVVSCASPAMLVWSSSFYSSINCGVSLPVPLAFQQQPYGSFRVATQLVYHREAYLMESVEFSGCISMAGSLYCGHKASP

SEQ ID NO: 202095 - protein, 155 aa, Glycine max
  Clone ID: PAT_MRT3847_24517C.1.pep
IRLEAARRRQKGLKLFVEMRKKNLSPTDHTLCTILNACSSPAVLLQGRQMHSLVIKMGSERNVFVASALIDMYSKGGNIDEAQCVLDQTSKKNNVLWTSMIMGYAHCGRGSEALELFDCLLTKQEVIPDHICFTAVLTACNHAGFLDKGVEYFTK

SEQ ID NO: 202096 - protein, 287 aa, Glycine max
  Clone ID: PAT_MRT3847_24518C.1.pep
DHSLVSLITFDSMVYLHHLSSSHFSSLLVFHGNRHLSSNQIRHFLNPHRHQAFLLPISECQFSITTAIEEIHSTSNSTISASRPPRCTGSAISVALGLLESCPINTGSRILVFTSGPATLGPGIVVDSDRRQPIRTHHHIFNAQATHYAKSSAFYNQLSKRLSGASVVLDLFACSLDQVGAAELRGPVEHSGGFIVLSESFDSDQFKNCLRQMFRCDDQGHLRMNFDATIEIVTTKDVKICGALGPCVSLERNNCLVSEAEVGEGGTSVWKLNTLTHKTCIAFFFQV

SEQ ID NO: 202097 - protein, 68 aa, Glycine max
  Clone ID: PAT_MRT3847_24519C.1.pep
LLTLATDTKIQRLYVLFPAHKQSARLPITVETQTPIRSYLVIKNLRALSLHQHINPVQPHNEFITISR

SEQ ID NO: 202098 - protein, 38 aa, Glycine max
  Clone ID: PAT_MRT3847_2451C.1.pep
IGDDGKESWLTNHHNMGHILGNIVVLVVDSFVIYVKEG

SEQ ID NO: 202099 - protein, 46 aa, Glycine max
  Clone ID: PAT_MRT3847_24520C.1.pep
KRECNLFSSQHLSLVRQLKILDVHHSLTTTACSSPLCSPHTNSWIY

SEQ ID NO: 202100 - protein, 96 aa, Glycine max
  Clone ID: PAT_MRT3847_24521C.1.pep
FPGPSHPFFHAFLRLEEDDSLGLPSFNWWELWATLIIYHPPSRHMSSTSVVYSLHCETKMKVALTAGVLICLVLIYSSFEVLIAGSAVCNSKRSKR

SEQ ID NO: 202101 - protein, 34 aa, Glycine max
  Clone ID: PAT_MRT3847_24522C.1.pep
IMLYWGGIILYGQNSIHHIINFRKKKLFFILLNC

SEQ ID NO: 202102 - protein, 88 aa, Glycine max
  Clone ID: PAT_MRT3847_24523C.1.pep
DFYRAFSFIACLYGHLYPAGVMFGNRLRLKQRSNILIPNHRTYSALKTPSSLVILRLTDTITLTTDSISTSTSTDDHLSRRMSLILPL

SEQ ID NO: 202103 - protein, 71 aa, Glycine max
  Clone ID: PAT_MRT3847_24524C.1.pep
FYTEKTRFYHNEEKYKLFLTLKKKADRCPLYLNHTLYSIFSKINPKICVTQIFTHTLYTIYCGLRQGRLVP

SEQ ID NO: 202104 - protein, 62 aa, Glycine max
  Clone ID: PAT_MRT3847_24525C.1.pep
YISQFIKPISHFKNPIIQKHLFSLMQNCFTSLAIFLYRSYKKNGHLPNLTWLTAHPNFLILT

SEQ ID NO: 202105 - protein, 101 aa, Glycine max
  unsure (1)..(101): unsure at all Xaa locations
  Clone ID: PAT_MRT3847_24526C.1.pep
MDNAVEYTNYASQWGNEANDKKTCSKVGEYANYGSQNAKETKDATNEKAXEYTDYASHKAKETKDNTMEKAGEYTDYASHNANETKDKTMENAGEYTHYAF

SEQ ID NO: 202106 - protein, 341 aa, Glycine max
  Clone ID: PAT_MRT3847_24527C.1.pep
MMMNVIGLSLSLVLTSLAAASTIVKEGHRVVVVEYDQGGHQNTKISISPEQPTHANLKDPICDAYGKCKHKIVDAMEKSQEVIHEKKDEIAANKEAARQVAGKTKERVYDKARHVHEYAQNTVETAKNHIACNVSNAKDAFKRLIAGSLERQSLNSLMGVANMLGFATAYGMCVWVTFISSYVQSRAMARQQFAVVQSKIYPVYFRAMSYSIGVALFAHVLAHRNTLLSNKSDLLQAYNLLASLVTLFFNSLYLEPRATKLMFERIKIEKEEGRGRSEDVSSRTKEPASTTADQDAVRTRIIKLNDKLKKLNSYSSFLNILNLMSLTWHLVYLAQRLPHIC

SEQ ID NO: 202107 - protein, 227 aa, Glycine max
  Clone ID: PAT_MRT3847_24528C.1.pep
MMMNVLGLSLVLTSLAAAGIFSPNPRTEKHGASTIVKEGHRVVVVEYDQGGHQKTKISISPEQPTHHHDHDDDLIKEAASVLPNLCQGISSSSQYSHQPQNHMDHGPLNLHAPNPKELICDAYGKCKHKIVDAMEKSQEVIHEKKDEICKTKETVYDKARQVHEYAQNTVETAKNHIACNVSNAKDAFKRLIAGSLERQSLNSLMGVANMLGFSTAYGMCVWVTFIS

SEQ ID NO: 202108 - protein, 158 aa, Glycine max
  unsure (1)..(158): unsure at all Xaa locations
  Clone ID: PAT_MRT3847_24529C.1.pep
SYVQSRTMQGXHFAVVQSKIYPXYFRAMAYSIALAFLAHFLAHRNTNSDMLQSYNLLASLATLFLNYLYLEPRATKLMLERIKIEKEEGRGRSQDMMSSRTVDPKEPADQEDALRSRIIKLNDKLKKFNSYSSFLNILNLMSLTWHLVYLAQRLHHIC

SEQ ID NO: 202109 - protein, 111 aa, Glycine max
  Clone ID: PAT_MRT3847_2452C.1.pep
MEMEDFLWGGGIDVDVTKRKSDGFEGSNGVIGSGWCGSSFSLVLDRERGELVEEPVRLEKKGVSTERSIEALKSHSEAERKRRARINAHLDTLRSVIPGAMKMDKASLLGE

SEQ ID NO: 202110 - protein, 67 aa, Glycine max
  Clone ID: PAT_MRT3847_24530C.1.pep
LLQVCSMFLIPSLIVCLIVNENGLGLIHRYGIYTNDVGAFFLERYRVYVCWVCQNHYLYKGAIPPSP

SEQ ID NO: 202111 - protein, 66 aa, Glycine max
  Clone ID: PAT_MRT3847_24531C.1.pep
EKHQTRLCDSLLRGQTLKIWCNGMQISRTWGRHPEARTATCSVACIARLILKDGYSITTLEDRLPC

SEQ ID NO: 202112 - protein, 107 aa, Glycine max
  Clone ID: PAT_MRT3847_24532C.1.pep
SQQGCNWQVLVGLCICAFWQQCPCLHIVSGVSHSRGSRYVFNSSGFRHSWHGPFAHPLAFSHRIVLIFSMFPSLLFNSVLSAVALVLNVPPFYVYSVCVRSCRIYYI

SEQ ID NO: 202113 - protein, 91 aa, Glycine max
  Clone ID: PAT_MRT3847_24533C.1.pep
MEMLTTNSGAMLPLLPPVGQHWGRMKANNLPLRWYSSQHQTPNSRRLSMVAKARPVFLKPIPSTRTKGGVLCSSRKNNAFICFAALNARCA

SEQ ID NO: 202114 - protein, 153 aa, Glycine max
  Clone ID: PAT_MRT3847_24534C.1.pep
PRLELPVSWDLMLVENTWSELGVPMAEKLEFATLVPRNGALGLVGGTCGGTACIWELNEGDKWCLVDKVPLELGLRLLGGKSVKCVGNEDAICLYRDLGYGMVLCKKVVGEIMGRWEWVWVDGCGYTKGKQVYNCPIRGALVHPSLASSSLIF

SEQ ID NO: 202115 - protein, 67 aa, Glycine max
  Clone ID: PAT_MRT3847_24535C.1.pep
VAATSHMLTTLLVLHYLKPNLRGGNTSWTVPTVKQPCCRTAGFTTLLTIFERRTRNPTPPNGSQYAQ

SEQ ID NO: 202116 - protein, 112 aa, Glycine max
  Clone ID: PAT_MRT3847_24536C.1.pep
MGSKKKNGGKGEIVDGSKIMELVGNEKVFSNFVDHKFDELDKDRDGKLSMKELEPAVADIGAGLGLPAQGTSPDSDKIIVEAFKMVNADDTKTVKEDEFKRLIRLLLKPLRW

SEQ ID NO: 202117 - protein, 124 aa, Glycine max
  Clone ID: PAT_MRT3847_24537C.1.pep
FGSRPFSHYGNQLANTWTLASENGDKLELAFSAVPDPKPKKDWVILSLRVVAFFATASATLAMAFNKQTIGMVVATIGTNHRTITLTAMFQHTPAIIFFVIVNATASFYNLLVIGMEILGPQYD

SEQ ID NO: 202118 - protein, 369 aa, Glycine max
  unsure (1)..(369): unsure at all Xaa locations
  Clone ID: PAT_MRT3847_24538C.1.pep
MGSKKKNGGKGEIVDGSKIMELVGNEKVFSNFVDHKFDELDKDRDGKLSMKELEPAVADIGAGLGLPAQGTSPDSDHIYFEVLNEFTHGKQEKVSKTEFKEVLSDILLGMAAGLKRDPIVILRMDGEDLLEFVNGPSYEAEMASIFSQIESPSGSLREHVIEAFGRLTVDQGIPPTSDSWVFNNIVDPALSQAGPALDKPAAQETFLEEFKKVALTVVDFLKEKPGIVAHSENTFDGRGVKRLLSNKFELDRXLFYCDSLRYLSCFEFTFFKHPYMKFTTLLRDADVELSCRESAERXAIQEIDKVIVEAFKMVNADDTKTVKEDEFKKILSEIXGSITLQLEANPISVSSNSVVHEPLGSSSTLLQPF

SEQ ID NO: 202119 - protein, 98 aa, Glycine max
  unsure (1)..(98): unsure at all Xaa locations
  Clone ID: PAT_MRT3847_24539C.1.pep
RXLRVRNXXIRXXXIXXXFLXDXYPXXDCXTXIVXXXXXXXXFXRDXVVVXXXSCCGXGSXXXXWXLXXXPXXXRXXXXYXXXXXXXSXXXXXXFXXX

SEQ ID NO: 202120 - protein, 85 aa, Glycine max
  Clone ID: PAT_MRT3847_2453C.1.pep
ASSRRNNSPWSRTSEITPSSLEGTSDTPPKSAPERASAEEAASFAFTYTLDHLFWLRFRFALFQYTTMCTSINVPMTRKKKQKGG

SEQ ID NO: 202121 - protein, 169 aa, Glycine max
  Clone ID: PAT_MRT3847_24540C.1.pep
KPASQETFLEEFKKVALSVVDFLKEKPVIVAHSENTFDGRGVKRLLSNKFELDRTLNLALENLPKDRNGKISKDYLRVALDLVSPSAGLPPVGAIEEIDKVIVEAFKMVNAEDTKTVKEDEFKKILTEILGSIMLQLEGNPISVSSNSVVHEPLGSSSTLLQPSSSETA

SEQ ID NO: 202122 - protein, 85 aa, Glycine max
  Clone ID: PAT_MRT3847_24541C.1.pep
RGSEDTIKVQMLKAFKLFEMTLQRTFNMLAVTLDDIRTSHLYRKHIKAEPHTALFDVGCNELYQICPAMGNILFMQVMYKDDFPN

SEQ ID NO: 202123 - protein, 120 aa, Glycine max
  Clone ID: PAT_MRT3847_24542C.1.pep
FCSLIISDPTRPYGCEKTTEGDGKCSFVEHRNYRIVYRRYASLFFLVGVDVDENELAILEFIHLLVETMDRHFGNVNELDIMFHLEKVHFMLEEIVMNGCIVETSKANILSPIQLLDKTS

SEQ ID NO: 202124 - protein, 249 aa, Glycine max
  Clone ID: PAT_MRT3847_24543C.1.pep
MEEGDSEAIFGALNLNPQLFCNEVLNIVDDVLDEAFNFFYQDASTKLNIEGTQRSQDLKKGVDCVRLNVQSVLDKQLAAWESYILRHCFALPQGFRMPNTDESNENALDPGAPFDPDIDAQLDSLREKLIEVGKESEMLNQEMQALERKSAVNVAGHINEAVQLYEQNSMHEVFQEIVTTASELGAKMAKLNSSMIEETDQTKTKRIYSTQMDPSAINPVKGLSNMKLDDVEEFCKCYEEYVNLSFSSI

SEQ ID NO: 202125 - protein, 53 aa, Glycine max
  unsure (1)..(53): unsure at all Xaa locations
  Clone ID: PAT_MRT3847_24544C.1.pep
CHKQTPLMLAAMLXTSLCGKXXKPGLXXXVETIREAXSTXXXXXSAAXXAEAX

SEQ ID NO: 202126 - protein, 42 aa, Glycine max
  Clone ID: PAT_MRT3847_24545C.1.pep
LLEISMLSSRLESGLDNLALNDYFIRSNRYSFNKPDQMTNFD

SEQ ID NO: 202127 - protein, 64 aa, Glycine max
  Clone ID: PAT_MRT3847_24546C.1.pep
QVLQVRGSSISCLVIRNHTWQPYKGSILPPCQWCLFWIWPICPTPLIKKACLQILRVTDENHFK

SEQ ID NO: 202128 - protein, 281 aa, Glycine max
  Clone ID: PAT_MRT3847_24547C.1.pep
FCQVKQIYATYSPHLFSDSFPGVSANDCKEKDDAGEKHCEGNPDQYGNHRLPKIVSLKHHWWWMMNTVWNGLRETRDHSGHILFIEEDHFIFPNAYRNLQVLISLKPKKCPDCYAANLAPSDVNSRGEGWATLIAERMGNVGYSFNRTVWKKIHNKAREFCFFDDYNWDITMWATVYPSFGSPVYTLRGPRTSAVHFGRCGLHQGQEENKACIDNGMVNINVEEPDTVSNIELNWEVHTYKNQPGYKAGFKGWGGWGDNRDRLLCLSFAKMYHSTGTASPL

SEQ ID NO: 202129 - protein, 274 aa, Glycine max
  Clone ID: PAT_MRT3847_24548C.1.pep
ACLQCGRDKAWHSHWWKDLRRLYNQPDFHSIHQNMVWRVGCGDKIKFWQDSWLSEGCNLQQKYNQLYTISRQQNLTISKMGKFSQNAWSWDFKWRSLFDYEYAMAVDFMDEISGISIQNQAHDSMFWKADPSGVYSTKSAYRLLMPSISSAPSKRNFQILWHLKIPPRAAVFSWRLFLDRLPTRGNLAKRSIPIQDIMCPLCGCQHEEAGHLFFHCKMTKGLWWESLRWIRVIGALSADPASHFIQFCDGFAATSNHSRRGMWWIALSITIWQH

SEQ ID NO: 202130 - protein, 65 aa, Glycine max
  unsure (1)..(65): unsure at all Xaa locations
  Clone ID: PAT_MRT3847_24549C.1.pep
GCSRYCLYXLGKTQSPIFSLFGFLVLILLASFGGFALYVDKSLRTMCLTQILDSVLWSPMSQRLG

SEQ ID NO: 202131 - protein, 80 aa, Glycine max
  Clone ID: PAT_MRT3847_2454C.1.pep
SPFRFCISLALVFIFSSCALRGLCVSFFSPALLFFSDFCLSSFVFPSVRCFGSPSPLCLRFFVFAFSLPFVVFGFSKTFE

SEQ ID NO: 202132 - protein, 71 aa, Glycine max
  Clone ID: PAT_MRT3847_24550C.1.pep
SFPPPPRLSFKFTCNWTRNPTQPISNSPQGSVLCYNRCLILRVGFSWPDLVGKSPSDILLFNSINLGEEIF

SEQ ID NO: 202133 - protein, 65 aa, Glycine max
  unsure (1)..(65): unsure at all Xaa locations
  Clone ID: PAT_MRT3847_24551C.1.pep
PFKHCLYPIPLLILSDPAQTIIPKHHKLLXLFSNQRSPLAAIFQSLEICIEHARLVLHTLALVLH

SEQ ID NO: 202134 - protein, 49 aa, Glycine max
  Clone ID: PAT_MRT3847_24552C.1.pep
QNGWINFGHEIQYQQQRVLGKSLHLFNNSNPYDHNLTNIIINYSITIPL

SEQ ID NO: 202135 - protein, 53 aa, Glycine max
  Clone ID: PAT_MRT3847_24553C.1.pep
SPRGSGVRWGNLASPVKTYLVTRLTPISRVAWLVGKACMLPYSTKQLATHEFP

SEQ ID NO: 202136 - protein, 116 aa, Glycine max
  Clone ID: PAT_MRT3847_24554C.1.pep
LVLSGGTLGILCHLRLLAVGDDDACAVGVGGCGGGPCFLRSLLGCGWWFPLGVVFLSLSLYEWVCLGCAVFLGHMRVLSLCIAIYSSVRFRFGQREIHRQIVVWVFSPAYRPDGCV

SEQ ID NO: 202137 - protein, 79 aa, Glycine max
  Clone ID: PAT_MRT3847_24555C.1.pep
GRPFLRYLTDSSQSDDMFVRELSSDSVDGRITVFESGMVCSQQQLILVYIVSELSSGRAQAPLCDSLREVGSLINAELA

SEQ ID NO: 202138 - protein, 63 aa, Glycine max
  Clone ID: PAT_MRT3847_24556C.1.pep
PLYRPGYCSRTKRTGSSSHEIFQCYRSLTRSWSLSFPQLFHKQDHHRHDFFVKSHDSPLLLGY

SEQ ID NO: 202139 - protein, 41 aa, Glycine max
  unsure (1)..(41): unsure at all Xaa locations
  Clone ID: PAT_MRT3847_24557C.1.pep
MFFLAKGTVSXTAIPAFTQALKETNGVSYFKFQLPQGLAIL

SEQ ID NO: 202140 - protein, 87 aa, Glycine max
  Clone ID: PAT_MRT3847_24558C.1.pep
HYPVSMIFSVGSRLPKSTKAESEGLKNSIDLLGENYYTTYYAEHAEPVNAHRTLYTYILVSLRSVRIGLHVGTPAGGYWLLIYPKGI

SEQ ID NO: 202141 - protein, 169 aa, Glycine max
  Clone ID: PAT_MRT3847_24559C.1.pep
MELKFVLFLLLLLAVAGYGLASNATLNETCGYFDGSLNRDPKVPCPIGWIMDPNKTKCFLHVGRPQSWNDSETCCSKYGGHLVSLTSLPELQFAQGLCGESINSCWVGGQRVNATAGNQWMWSDNSPWNNSIFSMRETPPHFLGTMFHPIVMELDRPVIGTVQTICVQQ

SEQ ID NO: 202142 - protein, 112 aa, Glycine max
  Clone ID: PAT_MRT3847_2455C.1.pep
NSRSPVRGHFSDRDRSRSPKRSPSPEDRRPPISDQLKSRLGPRSDERLPDRGRSKSKSRSNGSSCSRSPDATPPKRYDKRTSVSRSRSRSSSPSGQRGLVSYGDASPDSGSG

SEQ ID NO: 202143 - protein, 101 aa, Glycine max
  Clone ID: PAT_MRT3847_24560C.1.pep
FFFFFFFFFFFFFFFFFFFFGRETRLKKYLGKQEIPGLSKGALNKNFSFWQTKFCNKCLPHPKYSPFGPIFQAPLTYNTPFFFFCFPALDFQKKLVIGQKL

SEQ ID NO: 202144 - protein, 42 aa, Glycine max
  Clone ID: PAT_MRT3847_24561C.1.pep
TYGFSNCGCIILYMIINSPYYVHKLPLMPVFYMRLKKALNIC

SEQ ID NO: 202145 - protein, 72 aa, Glycine max
  Clone ID: PAT_MRT3847_24562C.1.pep
SLFYTPFISDTCWTTGKSTNCHQDLGLKRRRVVKEGSIEGERRWWHRIRQWQSGRARVENHNSPVDCGFSCY

SEQ ID NO: 202146 - protein, 290 aa, Glycine max
  unsure (1)..(290): unsure at all Xaa locations
  Clone ID: PAT_MRT3847_24563C.1.pep
DEMISGTILKSYMLGGKGGVGKTSCAASLAVKFANNGHPTLVVSTDPAHSLSDSFAXDLTGGALVPVEGPDYPLFALEINPEKSREEFRNAAQKNGGTGVKDFMDGMGLGMIADQVGELKLGELLDSPPPGLDEAIAISKVMQFLESQEYSMFTRIVFDTAPTGHTLRLLSLPDFLDASIGKILKLRQKIASATSAIKSVFGQEETRQNAADKLEKLRERMIKVRELFRDTDSTEFVIVTIPTVMAISESSRLSAXLKKENVXVKRLIVNQILXPSTSDCKFCAMKRKDQ

SEQ ID NO: 202147 - protein, 90 aa, Glycine max
  unsure (1)..(90): unsure at all Xaa locations
  Clone ID: PAT_MRT3847_24564C.1.pep
PELRNLGALEKVETSKVLEGGWVYHVPLTLFQCLVLLRMIVXYNIPIDLPVLFSYSAFNKLGVLFVEPLYLGHCYKGCLPRLIMNVVGVD

SEQ ID NO: 202148 - protein, 62 aa, Glycine max
  Clone ID: PAT_MRT3847_24565C.1.pep
IVTGATWDHLITHQSMRYLTATLTQYVSNIRDHSKICAHAASGGNSEGSAELGLHRWNKKFS

SEQ ID NO: 202149 - protein, 72 aa, Glycine max
  Clone ID: PAT_MRT3847_24566C.1.pep
RKLSLPNPIITITVGPDTIVVAGHIAPHAKKKFEVSVKDAVKAISGAVNFEEDHFKRRTTHHQSDYTTAHNP

SEQ ID NO: 202150 - protein, 100 aa, Glycine max
  unsure (1)..(100): unsure at all Xaa locations
  Clone ID: PAT_MRT3847_24567C.1.pep
MGMGVLGSGSGSGSSRSRMXMWMIRATTSVLLWTCIVQLTALGDMWGPRXLKGWPSCFTHESAVRAXXXELPSPRPPLLPPKRVYKNNGYLMVSCXGGLX

SEQ ID NO: 202151 - protein, 86 aa, Glycine max
  unsure (1)..(86): unsure at all Xaa locations
  Clone ID: PAT_MRT3847_24568C.1.pep
TVLKELFSIFSINPKLFSFGQKILLTPLQFSYLFPIFFFFQPPTTKGLALSFLIQSLVKMCLPNLNLVGLKFNPFFFXKKKRSKXK

SEQ ID NO: 202152 - protein, 103 aa, Glycine max
  unsure (1)..(103): unsure at all Xaa locations
  Clone ID: PAT_MRT3847_24569C.1.pep
YPVPLVILSLWVGKNXPYSFMVQVIYSFPXLKPKIEAWVENLLLEEGNSTILTLFVSLLTVLYPRHRQRRQASVADGEVAQPNRPNELGAPLKLKVPLSHRNL

SEQ ID NO: 202153 - protein, 69 aa, Glycine max
  Clone ID: PAT_MRT3847_2456C.1.pep
QGSPMRSTVFGYLSGLGLPVLWPKEGISSKHKPWPLKGVLYPSMIVRVAILQRVPSGCDPRSISLYLSI

SEQ ID NO: 202154 - protein, 58 aa, Glycine max
  Clone ID: PAT_MRT3847_24570C.1.pep
YASTEAARSLLVGAPPKVSMAYMASVALLYRTGACFVVVLSCGCVITATAIKGPIVLG

SEQ ID NO: 202155 - protein, 56 aa, Glycine max
  Clone ID: PAT_MRT3847_24571C.1.pep
PTRSIKIYYLILCSTFTIQVRSYNLSTFLNILQPYTIPTYFQKPYLFIHPSLYSLT

SEQ ID NO: 202156 - protein, 87 aa, Glycine max
  Clone ID: PAT_MRT3847_24572C.1.pep
VGSEQVVSLFGQKSWGFSKLVCESGGGNFFNLFGGWVKGGCLPPKKNPPQKGPGAPKGFGGPPPQGLKPLFCFGAVYLLVESPRGFH

SEQ ID NO: 202157 - protein, 493 aa, Glycine max
  unsure (1)..(493): unsure at all Xaa locations
  Clone ID: PAT_MRT3847_24573C.1.pep
MAAAAAAFVISVALLAAVAGGSPATLTLERAFPTNHGVELSQLRARDELRHRRMLQSSSGVVDFSVQGTFDPFQVGPYYTKVQLGTPPVEFNVQIDTGSDVLWVSCNSCNGCPQTSGLQIQLNFFDPGSSSTSSMIACSDQRCNNGKQSSDATCSSQNNQCSYTFQYGDGSGTSGYYVSDMMHLNTIFEGSMTTNSTAPVVFGCSNQLTVVLTKSDRAVDGIFGFGQQEMPVISQLSSQGIAPRLFSLCLXGDSSGGAILVLGEIVVPYLVYTSLVPAQPHYNLNLQSISVNGQTLQIDSSVFATSNSRGTIVDSGTTLAYLAEEAYDPFVSAITASIPQSVHTVVSRGNQCYLITSSVTEVFPQVSLNFAGGASMILRPQDYLIQQNSIGGAAVWCIGFQKIQGQGITILGDLVLKDKIVVYDLAGQRIGWANYDCSLSVNVSATTGTGRSEFVNAGEIGGSISLRDGLKLTKTGFLAFFVHLTLIYCFGFL

SEQ ID NO: 202158 - protein, 55 aa, Glycine max
  Clone ID: PAT_MRT3847_24574C.1.pep
NFWWELYWNRGPRKNRFKKTCYSLSPHPPWVCKKPCFLDPSRLLHTIKGKKFAII

SEQ ID NO: 202159 - protein, 64 aa, Glycine max
  Clone ID: PAT_MRT3847_24575C.1.pep
RSRRMAMEKVQERCFLNELARTCLSTRCNPPFCRLLAAVPFCRLLAAVRTRGRTRGRTRGRTRG

SEQ ID NO: 202160 - protein, 88 aa, Glycine max
  Clone ID: PAT_MRT3847_24576C.1.pep
KSPIGFQGFFLGGLLKFYRGVFSGGDFFPVFIWGRNQLGQENFLFLKGFVSPPGSKFFKDLGGPLFSFFNFFGPKKKCLFLNFPLNFF

SEQ ID NO: 202161 - protein, 183 aa, Glycine max
  unsure (1)..(183): unsure at all Xaa locations
  Clone ID: PAT_MRT3847_24577C.1.pep
ARVNHMLSSYRSFSGDDIPFSRSFSSHRDLDSESGHSVLHADTPVAVLQEIALKCGTKVDFISSLVASTELQFSMEAWFSGKKIGHRVGRTRKEAQNKAAEDSIKHLADIYLSSAKDEPGSTYGDVSGFSNVNDSGYMGIASSLGNQPLSXEDSASXSTASXSRSXDPXVDVSKRSMGSISSL

SEQ ID NO: 202162 - protein, 66 aa, Glycine max
  Clone ID: PAT_MRT3847_24578C.1.pep
PFSQNVLLKILPLLLPHQTKLHAKNSLAARLRFVTIVLKKKFPTLGTCDSKDNSNEPQPTRPPTHQ

SEQ ID NO: 202163 - protein, 90 aa, Glycine max
  Clone ID: PAT_MRT3847_24579C.1.pep
FLIPIYFYWFVFFFFFFCFFFFFFFFFFCFFFFFFFFRLNKLFTQLNQRSLKKKKSEKKIQSYDHRIINVWKYKDNFNIVEAPKDKEPPS

SEQ ID NO: 202164 - protein, 69 aa, Glycine max
  Clone ID: PAT_MRT3847_2457C.1.pep
WFCGGCRVVACRLVWRRPGRLLGGCWVVAASWCLVSLPRLGWVLGFYLSAWYRSREPGSRPPGGFPEDP

SEQ ID NO: 202165 - protein, 25 aa, Glycine max
  Clone ID: PAT_MRT3847_24580C.1.pep
GPCARASSFAASLYSTYGPQFMNPG

SEQ ID NO: 202166 - protein, 54 aa, Glycine max
  Clone ID: PAT_MRT3847_24581C.1.pep
LYLFLVSYSTKLVNYEEFFPTYHDNILISIINSLNFKNHYSKYTVRFPHFTLHI

SEQ ID NO: 202167 - protein, 55 aa, Glycine max
  Clone ID: PAT_MRT3847_24582C.1.pep
NPSLVDICLQIERLQLCVLNSVCFNPRIVKARDILDAKTGLYLVSYLSLWKDMDF

SEQ ID NO: 202168 - protein, 53 aa, Glycine max
  Clone ID: PAT_MRT3847_24583C.1.pep
TKRGVKNLKVFLGPVVGAKLQIIIILHNNLLSEIHLILPLIIIDIILLTYASY

SEQ ID NO: 202169 - protein, 142 aa, Glycine max
  Clone ID: PAT_MRT3847_24584C.1.pep
FICLVICNNYQPFRVASCIHNAISVPKVSVFFFFAGNISSTFMDRYGLIYVRAPAVKKHVDDLRAKMTYSCSFTPCLYINMVEYDISCVKSVASSLYIYKIQGCPSILFNCSVLDYFFCPVFNFCILFNPHIEGPIVSGADK

SEQ ID NO: 202170 - protein, 107 aa, Glycine max
  unsure (1)..(107): unsure at all Xaa locations
  Clone ID: PAT_MRT3847_24585C.1.pep
SLGLYYCKNITDRAMYSLAHRQGEQXXMWGSVKGGNDEDGLRTGSSSQCTALTPSAVQAVCDSFPSLHTCSGRHSLIMSGCLNLTSVHCACAVHAHRAFTTFPHPAH

SEQ ID NO: 202171 - protein, 280 aa, Glycine max
  Clone ID: PAT_MRT3847_24586C.1.pep
IHLVLSLVPKFAKLQTLILRQDKPQLEDNAVETIAKCCHELQILDLSKSFKLTDRSLYELALGCRDLTKLNISGCSAFSDNALAYLASFCRKLKVLNLCGCVRAASDTALQAIGQYCNQLQSLNLGWCDNVGDVGVTTLAYGCPDLRIVDLCGCVRITDDSVIALATRCPHLRSLGLYYCKNITDRAMYSLAHSKVNNRMWGTVKGGGNDEDGLRTLNISQCTALTPSAVQAVCDSFPSLHTCSGRHSLIMSGCLNLTSVHCACAVHAHRAFTTFPYPAH

SEQ ID NO: 202172 - protein, 98 aa, Glycine max
  Clone ID: PAT_MRT3847_24587C.1.pep
ILPYPPHVVSDRQLAPRSMVPCWDRSSRPALHNSVRPGLRRAFICWLARRKTEIPPPRAIRMTPLLAGRLVQAVKWGGGSALCYGGRGRIALEVFWIS

SEQ ID NO: 202173 - protein, 43 aa, Glycine max
  Clone ID: PAT_MRT3847_24588C.1.pep
CVHDQNLPREDESHCESCCEESESLVPLCGSPFSWIFDSCTSA

SEQ ID NO: 202174 - protein, 86 aa, Glycine max
  Clone ID: PAT_MRT3847_24589C.1.pep
AIRKWKVHIPSDTKELYELDLEEYAKRGRVRIDSTPTLRILNKACVNTDSSTSGWKLSPVTHVEETKQMLRMIPILAATLIPSAMV

SEQ ID NO: 202175 - protein, 169 aa, Glycine max
  Clone ID: PAT_MRT3847_2458C.1.pep
MASSSSYPRTEGEEEYGSESGWVDARSWCDHLASSLSEDLGQIPGPDTPCQTCQHPTENWLCLSCKQVLCSPFVNKHMLQLSLDTSPSHSAILSFSDLSASLTWILNSFPNSVLFINSPIFRNSVSLHQFHPPVFDSHSLPLLTLFSAMLCLCVKGEFIGLPKYVFPPN

SEQ ID NO: 202176 - protein, 137 aa, Glycine max
  Clone ID: PAT_MRT3847_24590C.1.pep
TQRTHKVSLNRSTSLYIKYLRGRINRGSSSSYLGSFLYNTEKRKMKERRNTSREDGSFTSRTSQSLTDSSHALRMTSSSRSVLCQSSHNKSSQNSLDLNPSLSRISHMQKLFEKNGQNPSPFLISGLNRRSCWCLRA

SEQ ID NO: 202177 - protein, 96 aa, Glycine max
  Clone ID: PAT_MRT3847_24591C.1.pep
SPEGWLHWFFSGVAYGHFGTVVLPFSFQLIQPLFWLLACALSLLTRCHSPFFLSVPNLLCIWSRHFSLLVGSFSPFPLPLPSIPFLLSSNVILYNE

SEQ ID NO: 202178 - protein, 54 aa, Glycine max
  Clone ID: PAT_MRT3847_24592C.1.pep
TKSSTLIFARWIRDILFVLVSSVHPESVFKAKFKYMNQYISSIRPDTVKSYCMC

SEQ ID NO: 202179 - protein, 81 aa, Glycine max
  Clone ID: PAT_MRT3847_24593C.1.pep
CTCSGDPHNKDPEISSYVVKPTVVLVDHLVDGLQQFPLLTQNLGCDQRSIFRHIHANLNILHHARQKQLNKDRDKLTKHLQ

SEQ ID NO: 202180 - protein, 332 aa, Glycine max
  Clone ID: PAT_MRT3847_24594C.1.pep
MGTQRSKPSCTIVAIFLAFCCFVSSSKAKLESLQHAPKADGSLSFLVVGDWGRKGAYNQSLVAFQMGVIGEKLDVDFVISTGDNFYDNGLTGVFDPSFEESFTKIYTAPSLQKKWYNVLGNHDYRGNAKAQISHVLRYRDNRWVCFRSYTLNSENVDFFFVDTTPFVDKYFIEDKGHNYDWRGILPRKRYISNLLKDVDLALRQSTATWKVVIGHHTIKSIGHHGDTQELLIHFLPLLKANNVDLYINGHDHCLEHISSLDSSVQFLTSGGGSKAWRGDTKQSEGDEMKFYYDGQGFMSVHISQTQLRISFFDVFGNAIHKWNTCKFDSCDM

SEQ ID NO: 202181 - protein, 102 aa, Glycine max
  unsure (1)..(102): unsure at all Xaa locations
  Clone ID: PAT_MRT3847_24595C.1.pep
AQKAGTPQRARPRSILRPXXQTQPGAVLKNHGGGPPQEGFSRRPRNRNPRXQGNETTQKRPAKKKDTXXHTPKKNAGEPSNTEPGKGQKKHPTQGKGPESEP

SEQ ID NO: 202182 - protein, 253 aa, Glycine max
  Clone ID: PAT_MRT3847_24596C.1.pep
MASAQLTAIASSISTASFEGLRPSAVQFASTGRIRIGNLSQRSFRGLVVKAATVVAPKYTAIKPLGDRVLIKIKEAEEKTEGGILLPSTAQTKPQGGEVVAVGEGKTVGKNNVEISVKTGAQVVYSKYAGTEVDFNGTKHLIVKDDDIVGILETDDIKDLKPLNDRVLIKVAEAEEKTSGGLLLTEATKDKPSIGTVIAVGPGHLDEEGNRKPLSVTPGNTVLYSKYAGNDFKGKDGSDYITLRVSDVMAVLS

SEQ ID NO: 202183 - protein, 225 aa, Glycine max
  unsure (1)..(225): unsure at all Xaa locations
  Clone ID: PAT_MRT3847_24597C.1.pep
NNSLNSVVNDATHRSKVTVIGSGNWGSVAAKLIASNTLRLSSFHDEVRMWVYEETLLGAGKLTDVINRTNENVKYLPGIKLGKNVVADPDLESAVKDSNMLVFVTPHQFMEGICKRLVGKIREDAEAISLVKGMEVKMEGPCMISSLISQQLGINCSVLMGANIANEIAVEKFSEATVGYRLNREVAERWVQLFXSHYVIVTAVRDVEGVELCGTMKNVEPVLAS

SEQ ID NO: 202184 - protein, 198 aa, Glycine max
  Clone ID: PAT_MRT3847_24598C.1.pep
MPRPNRYHCSNRRFVLGCLCKQQTARGFFLSFSNLYEDSIIQGFKILDVISFKDTNNVEISVKTGAQVVYSKYAGTEVDFDGTKHLIVKDDDIVGILETDDIKDLKPLNDRVLIKVAEAEEKTSGGLLLTEATKDKPSIGTVIAVGPGHLDEEGNRKPLSVTPGNTVLYSKYAGNDFKGKDGSDYITLRVSDVMAVLS

SEQ ID NO: 202185 - protein, 285 aa, Glycine max
  Clone ID: PAT_MRT3847_24599C.1.pep
SYDCRSCKIGTRPTACINLALSTRCSPQKPLLGTMSKSPRRDLQVFDFNEEDEVASDKHHDFLARDAQVNKVGIKSVASIYHVDVDEAGAMFNLEKGGSDTSPDTVEDIYDSKENSSVLEADKQSNLISHESRHHFKIDIHNHNKLEKMDTSSEVSSPETSQIDPSGSSFFCTAPSGSSYSNESIDVNSEADESMNESAPTSPASDIPENGVSLDGCGLNGTDNSDMDDTMEVVLHPDYVIYQDNYYLGPKVTFSPCFVKINVSTACIKQEAFDLEWAVDDLIDI

SEQ ID NO: 202186 - protein, 79 aa, Glycine max
  Clone ID: PAT_MRT3847_2459C.1.pep
MSDQEGEEEYGSESGWVDARSWCDHLASSLSEDLGQIPGPDTPCQTCQHPTENWLCLSCKQVLCSRFVNKHMLHHSRDT

SEQ ID NO: 202187 - protein, 42 aa, Glycine max
  unsure (1)..(42): unsure at all Xaa locations
  Clone ID: PAT_MRT3847_245C.1.pep
GQXXCLTLXTLPHXTXHXGIVXXNSIQFIDGAXXXAMXXILA

SEQ ID NO: 202188 - protein, 41 aa, Glycine max
  unsure (1)..(41): unsure at all Xaa locations
  Clone ID: PAT_MRT3847_24600C.1.pep
VVTLDHNRIFYIILCLHLNMFLXHCRYCKDGTRSKSIECSP

SEQ ID NO: 202189 - protein, 137 aa, Glycine max
  Clone ID: PAT_MRT3847_24601C.1.pep
KSAETLLRYIAAEQLPVKYGGLSKDGEFGISDAVTEITVRSAAKHTVEFPVTENSLLSWELRVIGWDVSYGAEFVPTSEGSYTVIIQKARKVASSEEPVLCNNYKIGEPGKVVLTIDNQSSKKKKLLYRLKVKPSSD

SEQ ID NO: 202190 - protein, 96 aa, Glycine max
  unsure (1)..(96): unsure at all Xaa locations
  Clone ID: PAT_MRT3847_24602C.1.pep
MDEVKIGINGVGRNGRLVATIALQRDDVELVGVNDPFITTRXMTYMYKFHSVHGHWXHVHVTAHDDKTHVFGDKAITASGHRNPEEMPWGSTGADI

SEQ ID NO: 202191 - protein, 147 aa, Glycine max
  Clone ID: PAT_MRT3847_24603C.1.pep
LYNSATTVIPFHLCMLSLGNPPAVQRLEIIPVIMMPTSFTQLLFPYAFCMVVNSIVLVIDGDGDGGHSGGGGDSLQICPALFSHLSLPELLKLNANRSTGASEHPNSSMTRREPWYLAVIGFESSHVKRGCCRKQCASAKFEVDRCS

SEQ ID NO: 202192 - protein, 40 aa, Glycine max
  Clone ID: PAT_MRT3847_24604C.1.pep
HTFSIDHCGRIILCHRSILSLDCITKRSSIHRVKIVNLYT

SEQ ID NO: 202193 - protein, 59 aa, Glycine max
  Clone ID: PAT_MRT3847_24605C.1.pep
FSDQHLTNYLSVSIPEYNRTLRRNYEHSSSTSVEPVPVAAVATVEPKETAAKAPPLGSD

SEQ ID NO: 202194 - protein, 64 aa, Glycine max
  Clone ID: PAT_MRT3847_24606C.1.pep
EIGSYGGPRNSDTTILILLLVFQGRGSLFKTFLICPFNGTLFSLSLRDWTQIFTVFTATIGPGG

SEQ ID NO: 202195 - protein, 71 aa, Glycine max
  Clone ID: PAT_MRT3847_24607C.1.pep
IPQACKFLFGFEPKVRRITPWEQKLKVVAQICATKLNFALPYLQPPLDLNTGIHNTFFFSKKSLKFSRTFF

SEQ ID NO: 202196 - protein, 291 aa, Glycine max
  Clone ID: PAT_MRT3847_24608C.1.pep
PAALRHIVCFKPCIPSSLLCPRTSFRKFPLTIPRFSLQDSQQQQQQQQQQQLNLSVLRFTLGIPGLDESYLPRWIGYGFGSLLLLNHFLGSDSATVTPAQLSTEVLGLSLASFSIVLPYLGKFLKGAQPVDEKTIPDGTEQIFVMSTDRVDGLKEDLAWASYVLLCNTNAIAMLIFIQGEICARGYWNIPDDTSKEILPGWFKKKIENAGLYDLKDTLYFPQDADSEFQDLVPIGTRCLLIQPVLQVSNESDTGLQKPGGFILLASTTRYAFSNKDKAWIAAVANKFRGKV

SEQ ID NO: 202197 - protein, 135 aa, Glycine max
  unsure (1)..(135): unsure at all Xaa locations
  Clone ID: PAT_MRT3847_24609C.1.pep
MRPFLLEDHRREVHGGMMADRWGKQTDEIYKKLDAGVRQLKPVGYTPSTISILSDIEEEERQQEAHHYFQRDPLCYGLIGERKESSIRIVKKLKICDDCHHFMKGVSKVHQSXMVMRDKTRLHHSNGGICSSREY

SEQ ID NO: 202198 - protein, 50 aa, Glycine max
  Clone ID: PAT_MRT3847_2460C.1.pep
GETNQRSDNFYHHTPPLLHSNIILYQPFFFRFQNYLSHLIIQNTNCYFSI

SEQ ID NO: 202199 - protein, 77 aa, Glycine max
  Clone ID: PAT_MRT3847_24610C.1.pep
MCNSDGDCRPLGFLLGLPFAFLALLVSVVGLVVWIVGLLLTCICPCCLCITVIVECALELVKAPLHVMEWCTSQIPC

SEQ ID NO: 202200 - protein, 167 aa, Glycine max
  Clone ID: PAT_MRT3847_24611C.1.pep
CVNMSNWLGFSLTPHLRIDEEFERENQERGGGYHHPSPSCHPHLSVMPLRSDGSLCVADSFSHSAASQEWRYDSAIGGGNSNEEGPKLEDFLGCYSNSPAKVFCQDSQPDQNQSQNNVSKINVNVAPSFCTNNSEIETGDNLTNPSSLLHSFHAYNDNSHALIPTNG

SEQ ID NO: 202201 - protein, 120 aa, Glycine max
  Clone ID: PAT_MRT3847_24612C.1.pep
KKVKVFDGKGESFSRLKVRRRSPLRVVPNTNLFQDGFYRLVPDLFPPLKEKHVSGCFVKSVNTDPNSKGWIHVKGPFVVLGQTSPSQNYSYFDRFPCYSPNVFSTKGRIFAANSTFVCEL

SEQ ID NO: 202202 - protein, 138 aa, Glycine max
  Clone ID: PAT_MRT3847_24613C.1.pep
VATQKVLKLWTFLVGIPSTYCTIISPFLRCSRVAKGVSNTERAIRAKRHNRQVRVRRRRRMMVPSSSSCSTLLVLSLKFFINPQVWSQREPQPVTHINTLFHTHTHRLLFSQENNPHKQNSTNLHSYTPTDLSLPPKI

SEQ ID NO: 202203 - protein, 82 aa, Glycine max
  unsure (1)..(82): unsure at all Xaa locations
  Clone ID: PAT_MRT3847_24614C.1.pep
LITHQTSKIPRPTTKPRSKLTTLTQTHNSFTQKCXKXXNLEMGCSMAKMKRPYNSSRKQNTQTHNYPTEKLPKTKXSQDGVG

SEQ ID NO: 202204 - protein, 85 aa, Glycine max
  Clone ID: PAT_MRT3847_24615C.1.pep
VESTVRPYLMDVIYCWSKGATFAEVMEMTDIFEGSVIRLARRLDEFLNQLRGAAHAVGEVDLEKKFEKSCESLRRGIMFANSLYL

SEQ ID NO: 202205 - protein, 69 aa, Glycine max
  Clone ID: PAT_MRT3847_24616C.1.pep
DTKICSNDGSFPPKSYLGNEATRLPEGGMQKTLGLRFYLQGERQTHNLLNPELLHHCSMSRDSTICICN

SEQ ID NO: 202206 - protein, 80 aa, Glycine max
  unsure (1)..(80): unsure at all Xaa locations
  Clone ID: PAT_MRT3847_24617C.1.pep
QDSAAVKTNDNDYSQDMISDMSKYIARNTRVXKSVKLDHXYIFHKLTCMKSKIISTYPNALTEDSTSEVIDMTPDLEMPK

SEQ ID NO: 202207 - protein, 76 aa, Glycine max
  Clone ID: PAT_MRT3847_24618C.1.pep
MGAVIFKDPLFFPPKALFSKSPMREIFFGRGSKIVGILGAQWSVLFGAPKGESRPFKLPNPMGSLGWALPLFHQFR

SEQ ID NO: 202208 - protein, 73 aa, Glycine max
  Clone ID: PAT_MRT3847_24619C.1.pep
PPSSIQVSLQFPSLFHFHRVLFRRSNLSHRFLTIPFLPSFILFLDSFLSCIYNHYQKRFSDSSRINSQSRLQF

SEQ ID NO: 202209 - protein, 30 aa, Glycine max
  Clone ID: PAT_MRT3847_2461C.1.pep
KYLVLYFYKILNFSYALKLKVSIVKSLTEH

SEQ ID NO: 202210 - protein, 85 aa, Glycine max
  Clone ID: PAT_MRT3847_24620C.1.pep
LSDEERIHSRVTHTNTKGINQCCLSTYPMPQLMPCVCGHKPRESPRSPHLICIFNPSTWGVQSVHKETTTKLRNPSSRSQNLFCL

SEQ ID NO: 202211 - protein, 74 aa, Glycine max
  unsure (1)..(74): unsure at all Xaa locations
  Clone ID: PAT_MRT3847_24621C.1.pep
EXXXXXSPCILIPGALLRVPHLRMLVIGLAAGEEGIKCLVWARDDLGHERRKLSAAESILFSRVFIKKWCRDYV

SEQ ID NO: 202212 - protein, 108 aa, Glycine max
  Clone ID: PAT_MRT3847_24622C.1.pep
MSLKNNMVVLKVCLLLLFLVGVTAARMELSFFKSDQSSIYNNDDYSKQCGVPCICTRSMLPQCTCKNIRLNSCHSNCKTCICKRSQPEHCRCLDTNDFCYKPCNSRDD

SEQ ID NO: 202213 - protein, 105 aa, Glycine max
  Clone ID: PAT_MRT3847_24623C.1.pep
NNMVVLKVCLLLLFLVGVTAARMCILSFLKSDQSSSYDDDEYSKPCCDLCMCTRSMPPQCSCEDIRLNSCHSDCKSCMCTRSQPGQCRCLDTNDFCYKPCKSRDD

SEQ ID NO: 202214 - protein, 108 aa, Glycine max
  Clone ID: PAT_MRT3847_24624C.1.pep
MSLKNNMVVLKVCLLLLFLVGVTAARMELSFFKSDQSSSYDDDEYSKPCCDLCMCTRSMPAQCSCEDIRLNSCHSDCKSCMCTRSQPGQCRCLDTNDFCYKPCKSRDD

SEQ ID NO: 202215 - protein, 103 aa, Glycine max
  unsure (1)..(103): unsure at all Xaa locations
  Clone ID: PAT_MRT3847_24625C.1.pep
LDLPLLPPLLSVIPFNPLSEYALMNEKLLNFIRPSDHSLHRHDTSECLPDDLAGVIVLPITAATTFDSHAINIILTCQKPNRSXLLRLVSAIARPRGLGITPY

SEQ ID NO: 202216 - protein, 250 aa, Glycine max
  Clone ID: PAT_MRT3847_24626C.1.pep
AGGEIKETILRYNPIAKIDMMELDLSSMESVRTFASQFNSRGLPLNILVTRAGSARAPFKLSKDKIELQFATNHIGHFLLTNLLLETMKRTAIEQRKEGRVVNVSSRRHKLSYPEGIRFDKINDKSGYNSLSAYGQSKLANVLHTNELARRLKEEGTNITANSVSPGPIATNLFRYHSLMEVFVGILGKYAMKNIQQGAATTCYVALHPQVKGLTGCYFADSNLAEASSQASDPEVARKLWEYSSDLVKF

SEQ ID NO: 202217 - protein, 119 aa, Glycine max
  Clone ID: PAT_MRT3847_24627C.1.pep
KLSRLSSISGSNYLSASNTKVFSSLSYRSATVSVNGSDQSFSQLNKAPDASTQSMRSSLLSTTILSWLSRWSNLRCLSRATSASSSIWKTCRSLRGPLFMVLQHQQGCLVVRTFSLERD

SEQ ID NO: 202218 - protein, 50 aa, Glycine max
  Clone ID: PAT_MRT3847_24628C.1.pep
MRERKSKDVEAGKGPSSIPHWRLVWDQGLITDMVMNWNYPGSGTEEDPYV

SEQ ID NO: 202219 - protein, 325 aa, Glycine max
  Clone ID: PAT_MRT3847_24629C.1.pep
MKKIMEYLQHYINQYPHRLALVFEDRHLTYGELSKEIYQASMRYKEVKLNKKVGLMDEHPVNNIINYFAVHQRGGIPCIFNHQWSNERIHQLVKSYDIQWLIKDNHLTSNHDNSIYNDEVIPRNVIHIGFTSGTTGLPKAFYRNEHSWIVSFKENEKLLQHCEETIVAPGPLSHSLSLYACIYALSTGKTFIGQKNFNPLSLMRLINQLNKTTAIFVVPTMVQQLISTQRHCSSIKSILSSGAKLTLQQFQQIRNLYPQANLIEFFGTSEASFISYNFNQSSPANSVGKLFPHVETRLLNQDDDAVGLLAVRSEMVDELLYHLIR

SEQ ID NO: 202220 - protein, 52 aa, Glycine max
  Clone ID: PAT_MRT3847_2462C.1.pep
IHYSLIHLHWIIYQLLRTKNRMEVPTDWRNVTNRIKVVGQPILRQNDRAGET

SEQ ID NO: 202221 - protein, 76 aa, Glycine max
  Clone ID: PAT_MRT3847_24630C.1.pep
EVSARIRNLAYAMSRAAPQNPIFILMGDNISSVLLEHVGEQVQNYLPHRSSSSSHAVAFSTALIVGTPYAKVFWRA

SEQ ID NO: 202222 - protein, 101 aa, Glycine max
  unsure (1)..(101): unsure at all Xaa locations
  Clone ID: PAT_MRT3847_24631C.1.pep
IDARLIRIGDPQYNEGQAQMGTNLFKLSLDDVETPKGSMLDLKNSQSKIALSKNTXVGGTILRNDLLAKFLTEGNFRTSVDLQRTHCIKRMIKMVATSWIS

SEQ ID NO: 202223 - protein, 61 aa, Glycine max
  unsure (1)..(61): unsure at all Xaa locations
  Clone ID: PAT_MRT3847_24632C.1.pep
KYSGAHSPSINFIGRAFFRRSLWDHYQYVSIQRVSNLPKAELFFTLICDXXXLXPVTMSIH

SEQ ID NO: 202224 - protein, 35 aa, Glycine max
  Clone ID: PAT_MRT3847_24633C.1.pep
VSLQLSRDRQMQNGLIAADKHRISLRELGRVELED

SEQ ID NO: 202225 - protein, 129 aa, Glycine max
  unsure (1)..(129): unsure at all Xaa locations
  Clone ID: PAT_MRT3847_24634C.1.pep
NMKLFVFFVAAVVLVAWPCHGAGYQRFPLRMKTGYGERSSEVKCASITLAVEAHNISTFLTIPEXCVDPTXDYINGEQFTSDSKTTNQQALFYAIERVVHGNDIFIFGMDNSVLSNIPYYGKHRYRVDE

SEQ ID NO: 202226 - protein, 83 aa, Glycine max
  Clone ID: PAT_MRT3847_24635C.1.pep
GLYRISAFFGEISVSYVHDVRTVPRENWSFNISTMKGPVRNLCSECRYRKFGLHKSLLRIFSFSSWRPINDIKIGGVCVVRSR

SEQ ID NO: 202227 - protein, 77 aa, Glycine max
  Clone ID: PAT_MRT3847_24636C.1.pep
LEDLCWLLCSCFTAGLVATGTSTMKVALSGSISVGTFHGANVDRREEDAAHNWFLFGAKAHDIVGLWNERSQGLVCV

SEQ ID NO: 202228 - protein, 80 aa, Glycine max
  Clone ID: PAT_MRT3847_24637C.1.pep
TGGRSRNGGRERDETIAKMPCYNTLVMNDQNRIPVAFTVMCFMTRGYGDASDALPGTNLSTPNLLQLLRYHGYWFSYDKE

SEQ ID NO: 202229 - protein, 106 aa, Glycine max
  unsure (1)..(106): unsure at all Xaa locations
  Clone ID: PAT_MRT3847_24638C.1.pep
RREDDRRGAERGGKKETXAXXXXXXHKTXPXXDKSEXXKGQTRRDXXXRXNXXXAXXPTSKXXXXXDEXXKTAKTXAXPGXGXXAKXEXXATXGKXXAXXGXENTE

SEQ ID NO: 202230 - protein, 52 aa, Glycine max
  Clone ID: PAT_MRT3847_24639C.1.pep
MLGTFDFAENTRAAYPIEYIPNAKIPCVAPHAKNVILLACDAFGVLPPVSKL

SEQ ID NO: 202231 - protein, 65 aa, Glycine max
  Clone ID: PAT_MRT3847_2463C.1.pep
SGLFWWGSTSPHLLKSILWCWYFIRFRYNGLIICVNNCFVFWPVPFPLFFASRIKKSYLHASPNH

SEQ ID NO: 202232 - protein, 78 aa, Glycine max
  unsure (1)..(78): unsure at all Xaa locations
  Clone ID: PAT_MRT3847_24640C.1.pep
XLLMXLGAGXXAIHXSFXLIAXTQKFXXYYRXLDMRNXFXDLCPXRXGLFGRYXVXXDXLNXLTXXXXXIXXGLXYXX

SEQ ID NO: 202233 - protein, 113 aa, Glycine max
  unsure (1)..(113): unsure at all Xaa locations
  Clone ID: PAT_MRT3847_24641C.1.pep
MAQKAVLEVMTMTDDXTKQRAIKAVAHIYGVDSIVADVKDQNLTAIGQMDTLNIANKLKKVRKVDIISFGPAXTRLKTIXKEDKKEQKMDEKQEDNNGDKKEYKREENNDDKK

SEQ ID NO: 202234 - protein, 183 aa, Glycine max
  Clone ID: PAT_MRT3847_24642C.1.pep
MEATTMFRFFSAVMVNPKPHKLFSSLSIFPSATAPRHFQSLKFPTKQNAHSENRDIGDRVVFDDGIFESGAVFQNDSNLTTNTPKRRPSPRTKVTRITRENLVPDKWREVQSETKITINERRKKKKNIRGLVPLRDANKIEVEKKLSRYKDVNWDEYKSSKKAKLRQISPLVLKNPSTFPVKE

SEQ ID NO: 202235 - protein, 67 aa, Glycine max
  Clone ID: PAT_MRT3847_24643C.1.pep
IPQIIGFTPYTCTTASSCCKLKVPEYQHPVDSANLTPASTNLMHRLSPHSNGWHRAACPRTSQRTCD

SEQ ID NO: 202236 - protein, 244 aa, Glycine max
  Clone ID: PAT_MRT3847_24644C.1.pep
MTMTCAPHQNSRKPQKHQGIFIQGNQNRLSIFQFNWNQELGRPQMKGQWNKTLRIIMLRSLLSHHHQLPLRKSKEGFWKLIMTLLHTFSPRSRKLSLQSLLVEDCCSLDIGALKFEDKGGEAQEIIMASPRMKIEKEIATIMDCGKEVEDSSGGFNFWKWSLNGVGAICSFGFAAATICVLILGSQQRNNKIQQDQKIWFQIYTDDKRIKQVVHATKLNEAMAAVSGVPLSRARITCGGYYDGL

SEQ ID NO: 202237 - protein, 57 aa, Glycine max
  Clone ID: PAT_MRT3847_24645C.1.pep
KKKSHDMNHPTPNKTHRLAFDLAKSPTILIYLFTSSIFLSKPITTTLSTNPHIISRA

SEQ ID NO: 202238 - protein, 174 aa, Glycine max
  unsure (1)..(174): unsure at all Xaa locations
  Clone ID: PAT_MRT3847_24646C.1.pep
SGVKMDTTDWEVLSYDGLSDFDDYDLCTSPKFKKASEASRNFHPRVPKQILHIPIQLEPRIGKAPDEGSMEENTKDHHRVEVPLVPSSPTTIENIKGGILEADYDTVAHLFSKIKEIESPKSIDRGLLFPDIGALKFEDKGGDQAQEIIMALPRMKIEKEIDTIMDXCTEVEDS

SEQ ID NO: 202239 - protein, 39 aa, Glycine max
  Clone ID: PAT_MRT3847_24647C.1.pep
DKVINICYHERAIAIIIITRRSVLRIKFGLLGIWLALQH

SEQ ID NO: 202240 - protein, 77 aa, Glycine max
  Clone ID: PAT_MRT3847_24648C.1.pep
KDCQRGAAHVRGGAGYVQGQRRSLIEKRWPCPPPEDRGIFFIPFLSDKLKTATFVDLNLRAATLVLGIVGHEKLAKS

SEQ ID NO: 202241 - protein, 63 aa, Glycine max
  Clone ID: PAT_MRT3847_24649C.1.pep
TPREPSSLLAQALFMMTNRLIQRPTFYAQLYLIHFSNRCHVFAARNNVSMPIVLMTGSGGPCE

SEQ ID NO: 202242 - protein, 78 aa, Glycine max
  Clone ID: PAT_MRT3847_2464C.1.pep
NISALQEALRDRTLSHKTKKAPTVTPFSSAAPASIAIVLELELLAIFLRLLKVGLLQVLAIVLELELLAIFLRILKGR

SEQ ID NO: 202243 - protein, 47 aa, Glycine max
  Clone ID: PAT_MRT3847_24650C.1.pep
DLNSTIVFALFPICAIISAVGASATAQFVLDTDDDPLHIPSHTPYCC

SEQ ID NO: 202244 - protein, 89 aa, Glycine max
  unsure (1)..(89): unsure at all Xaa locations
  Clone ID: PAT_MRT3847_24651C.1.pep
EQLSRDTDGSLSTVETLASTAICGIIHSILGGQPLLIVGVXEPTIIMYTYLYNFAKNRDSLGQELFLAWAGWVCVWTALLLFLLAIFNA

SEQ ID NO: 202245 - protein, 39 aa, Glycine max
  unsure (1)..(39): unsure at all Xaa locations
  Clone ID: PAT_MRT3847_24652C.1.pep
TKALKEIIKYQNSTXLLIMNLTFQRLLREISHDFKTDLR

SEQ ID NO: 202246 - protein, 58 aa, Glycine max
  Clone ID: PAT_MRT3847_24653C.1.pep
PHSLFLGWACPPNIHTLPIRARVLLPSRGFVVFILFSNMVMEEALECWSRAESARAAR

SEQ ID NO: 202247 - protein, 106 aa, Glycine max
  unsure (1)..(106): unsure at all Xaa locations
  Clone ID: PAT_MRT3847_24654C.1.pep
FLYFERQCTQVSGSNTELTKHTAGGTILGTELMAHFLAYGNYRACEHSTRTHGVRSMMEMTATGVILEHTALVLDLAIDGSFKEGSRIDMNAICSKDXETWNAGCT

SEQ ID NO: 202248 - protein, 53 aa, Glycine max
  Clone ID: PAT_MRT3847_24655C.1.pep
KILKDLLHRNYKIQQMYNFIYMWVGIRQVGYYNILTDTHTLTIFVGNLPRPKP

SEQ ID NO: 202249 - protein, 237 aa, Glycine max
  unsure (1)..(237): unsure at all Xaa locations
  Clone ID: PAT_MRT3847_24656C.1.pep
LPGLRHVVLIGDEKQLPALVKSEISGKAGFGRSLFERLVLLGMKNTFXNVQYRMHPSISLFPNMEFYDKQILDSPSVKERSHEKHFLHGDMFKFYSFINVAYGQDEFDEGNSRKNMVEVAVVSEIVLNLYKESASRKXTVSVGVISPYKAQVLAIQDALGKRFVGNVDNDFSLKVSTVDGFQGGEEDVIIISTVRYNNMGYVXGFLSNFQRTNVALTRARYCLWIVGNSETLMNSGS

SEQ ID NO: 202250 - protein, 210 aa, Glycine max
  unsure (1)..(210): unsure at all Xaa locations
  Clone ID: PAT_MRT3847_24657C.1.pep
KGVXXRDSVIRTGDDCIXIVXXSSRXXIRNISCXPGHGISIGSXXKSKKWEKVQNVIVDGVYLYNTDNGVRIKTWQGGSGFASKITFQHILMENVSNPIIVDQYYCDSRNPCKNETSAVRVENISFIDIQGTSATEEAIKFSCSDAFPCEGLYLENIFLASCFGGNTSSFCWQAHGSARGFLHPSTCLSSSDDRIRQNVGVKSNPAIHSV

SEQ ID NO: 202251 - protein, 128 aa, Glycine max
  Clone ID: PAT_MRT3847_24658C.1.pep
GAYFFGFYFGRTPLIKLSPKKTWEGFIGASVATMIAAFTFANFLGRFQWLTCPRKDLATGWLQCDPDPIFKPDYIPLPGLISHWLPWKEIAVLPVQWDALWMGLFASIIAPFGGFFASGFKRAFKIKD

SEQ ID NO: 202252 - protein, 66 aa, Glycine max
  unsure (1)..(66): unsure at all Xaa locations
  Clone ID: PAT_MRT3847_24659C.1.pep
MGGGPYFFTFGKSEGPKGLEMGIGTMGREEKGGIYVTRQYLTGSPLMPXIEGYDEVHFEVGLGHFI

SEQ ID NO: 202253 - protein, 462 aa, Glycine max
  Clone ID: PAT_MRT3847_2465C.1.pep
MAGLDMVAATAAANKDAPIPIFELLADAWADAWADAWADAWASSESSVEELGHHAGYYRLPRSKAARMFYFFFESRSSKNDPVVIWLTGGPGCSSELALFYENGPFQLTKNLSLVWNDYGWDKASNIIFVDQPTGTGFSYTSDESDIRHDEEGVSNDLYDFLQAFFKEHPQFTKNDFYITGESYAGHYIPALASRVHQGNKAKEGIHINLKGFAIGNGLTNPEIQYQAYTDYALDRGLIKKAEYNSINKLIPPCKQAIEACGTEGGETCVSSLYVCNKIFNRIMTIADDVNYYDIRKKCVGVLCYDFSVMEDFLNEKTVRDALGVGDLDFVSCSSTVYSAMMQDWMRNLEVGIPTLLEEGIKVLVYAGEEDLICNWLGNSRWVQAMEWSGQKQFGASGTVPFLVDGAEAGTLKSHGPLAFLKVYEAGHMVPMDQPKAALEMLRSWMQGKLTMTKSGDNVSPK

SEQ ID NO: 202254 - protein, 37 aa, Glycine max
  Clone ID: PAT_MRT3847_24660C.1.pep
DPIRPHVYKVLLPFRACRLKTQLCHKTPWPLITNVTK

SEQ ID NO: 202255 - protein, 142 aa, Glycine max
  Clone ID: PAT_MRT3847_24661C.1.pep
LHSLHALQNRSTYTLLSSMSNKEFFLLTKDDKEDLSNFEIVKRPMLEFQSENCNETLSSSSNSHHSQKEEKKSNHQQIIEECQRQICRITKTDSESSTSKLKEEDDEEEQEQEDGFKTPTSLDHKIPLPLQCPPAPRKTHLL

SEQ ID NO: 202256 - protein, 85 aa, Glycine max
  Clone ID: PAT_MRT3847_24662C.1.pep
LLFSIPIPTTSTAPKSPTSPSPTSNKSSTFSTERARPVSAVFNPSPSPSPNPNPNPTKSSASTGNPPRVQLDFVKPTILNSKPSN

SEQ ID NO: 202257 - protein, 128 aa, Glycine max
  Clone ID: PAT_MRT3847_24663C.1.pep
VQPGHLMAPAGPGIGFNPSAAAAAQAALNPAMAQALTALLASQGTLGLTNLLGSIGTSAAVNPGVPAAGSAVQGGGYSAQPNISPGVVGGYGNQVGLQAAYPNQNQQIGQGGSGRGQYGGGAAPYMGH

SEQ ID NO: 202258 - protein, 353 aa, Glycine max
  unsure (1)..(353): unsure at all Xaa locations
  Clone ID: PAT_MRT3847_24664C.1.pep
MEELFSSLKLLSFTFMLLLFLLKLTVLLWWRPRKIEGHFSKQGIRGPPYRFFIGNVKELVGMMLKASSQPMPFSHNILPRVLSFYHHWKKIYGATFLVWFGPTVRLTVSEPDLIREIFTSKSEFYEKNEAPPLVKQLEGDGLLSLKGEKWAHHRKIISPTFHMENLKLLVPVMATSVVEMLEKWSAMGEKGQVEIEVSEWFQSLTEDVITRTAFGSSYEDGKAIFRLQAQQMDLAADAFQKVFIPGYRFFPTRRNIRSWKLEKEIKKSLVKLISRRRENEKGCGVEEKEKGPKDLLGLMIQASNMNMNMSNVTVDDMVEECKSFFFAGKQTTSNLLTWTTILLAMHPHWQVRX

SEQ ID NO: 202259 - protein, 76 aa, Glycine max
  Clone ID: PAT_MRT3847_24665C.1.pep
CRHKSITIQTQIHSSTRETVHKMERNWFAAVLKITSHFKKYLLTIKFGTLLIKPTLLCFSHRWPLLNFTGNTRFHF

SEQ ID NO: 202260 - protein, 111 aa, Glycine max
  Clone ID: PAT_MRT3847_24666C.1.pep
VPFGGPRVFLICIFSPQTNNFFPQYLVVLGNAEKGARRLCRLGQLVLECKRRHGLCDHRSRPSCVFFGKSKGRKKTVLPCQAFLLACGTAKCSTVGPSPSLWGSHHILTPP

SEQ ID NO: 202261 - protein, 520 aa, Glycine max
  unsure (1)..(520): unsure at all Xaa locations
  Clone ID: PAT_MRT3847_24667C.1.pep
LCISKTPPKMLVILNPRSGRGRSSKVFHGIVEPIFKLAGFILEVVKTTSAGHARYLASSVDISSCPDGIICVGGDGIINEVLNGLLSRDNQKEGISIPIGIIPAGSDNSLVWTVLGVRDPVSAAMAIVKGGLTATDVFAVEWIQTNKIHYGLTVSYYGFVGDVLELSEKYQKRFGPLRYFVAGFFKFLCLPRYNYEVEYLPASKTEREGKLSGEKEVVDMSDLYTDIMSRSNKDGMPRASSLSSIDSIMTPSHISGVDLDTCSSTHASTEPSELVRGLDPKSKIRLXGRGNVIAEPEVIHPQLPLSTTPNWPRTRSKSRNDKGWTGLTTTHDTSRRGNTVTNDREDISSTLSDPGPIWDAEPKWDAEPSNWDVENPIELPGPSDDTEIGSAKEVVPRFGDKWVASKGQFLGILVCNHACRTVQSSQVVAPKAEHDDNTLDLLLVHGSGRLRLLRFFLLLQMGRHLSLPYVEYVKVKSVRIKPGKHTHNGCGIDGELFPLNGQVISSLLPEQCRLIGRFRI

SEQ ID NO: 202262 - protein, 133 aa, Glycine max
  Clone ID: PAT_MRT3847_24668C.1.pep
IDCIWCGLAGCITTKELGTVMRSLGQNPTEAELQDMINEVDADGNGTIDFPEFLNLMARKMKDTDSEEELKEAFRVFDKDQNGFISAAELRHVMTNLGEKLTDEEVDEMIREADVDGDGQINYEEFVKVMMAK

SEQ ID NO: 202263 - protein, 426 aa, Glycine max
  Clone ID: PAT_MRT3847_24669C.1.pep
MPSPSRYGFGISQITLRLMMLLFLFFARAASGLNLTALLSTVPELSQFTSLLASATPLAADLSDRSSLSILAVPNAYLAADDHLSRHHLSPAALADVLRYHVLLQFLSWSDLRALPPSGKLITTLLQTTGRATDNFGSVNLTRDSQSGVISIRSPAPYSPSNATILSLIKTLPYNVTIFAVNSLLIPYGLDLMASETRPNIVLNITNALVNGHNFNVAASMLAASGVVQEFEADEGGAGITLFVPVDDAFADLPPSVALQSLPADKKAVVLKFHVLHSYYPLGSLESVVNPFQPTLATEAMGAGSFTLNISRVNGSVAINTGIVQASITQTVFDQNPVAIFGVSKVLLPREIFGRNPIVSAKPLDNAPPPDDDALSPENSPGFDGQPSHLSSPPGFREDVRSHAGGSGGSLNFVVLLCCIGLYFVV

SEQ ID NO: 202264 - protein, 84 aa, Glycine max
  unsure (1)..(84): unsure at all Xaa locations
  Clone ID: PAT_MRT3847_2466C.1.pep
CGTSNTNFFIYHSYPSLXXQALVLLSHAPSLNQTHPLFILIFLYIPKKPNQNTVLTNFSLSLKNNQTFPLKKEPPFFKFPILVS

SEQ ID NO: 202265 - protein, 87 aa, Glycine max
  Clone ID: PAT_MRT3847_24670C.1.pep
LSRSNCPRSCHPHPAIHLRLLLVGSSPAALRDTGRLALPRLQSRRRHPPPSIRPHHQSQQVLLLKQWSCLATSSTTMLFATTSGIIF

SEQ ID NO: 202266 - protein, 205 aa, Glycine max
  Clone ID: PAT_MRT3847_24671C.1.pep
ERMLDAICERLKPALCTEGMFLVREGDPVNEMLFIIRGHLDSYTTNGGRAGFFNSCCIGPGDFCGEELLTWALDPRPSVILPSSTRTVKAISEVEAFALIAEDLKFVASQFRRLHSKQLRHKFRFYSHQWRTWAACFIQAAWRRHKKRKEVAELIRARAIHVNVVDEPQTQTPTYAKRVARSTRTDSGVVSSLQKPAEPDFSVVE

SEQ ID NO: 202267 - protein, 82 aa, Glycine max
  Clone ID: PAT_MRT3847_24672C.1.pep
YRASIASAMAALRFRPRCSGDGFRRGKTSAIGSLHRMSKFLKELVCLIYLEHFCVSLYLEFLPNVCIFGFPYFFIFRTCKVG

SEQ ID NO: 202268 - protein, 80 aa, Glycine max
  Clone ID: PAT_MRT3847_24673C.1.pep
IRLEHEGNKRPAIIRSLCLTWEGDLRAPRRVNLTDETEQWNFVQFTFEIHDQHCWCTQQFFKNPKIPLNVFQMKNNFVLV

SEQ ID NO: 202269 - protein, 55 aa, Glycine max
  Clone ID: PAT_MRT3847_24674C.1.pep
LYCTKLNLYVIRLYCRIQFTAFAGNNSIGIVRAIWYSSLANDVHVPGYVKIQIGS

SEQ ID NO: 202270 - protein, 97 aa, Glycine max
  Clone ID: PAT_MRT3847_24675C.1.pep
ALEEASQQLAGQEREKNQGFDFDSFIAGTIQLSSQHEPTDVVDKLNDLNSSVSQLELKSLISKSVSQEKQEKGMANLAQLEALYQSSWDSQFVSGGE

SEQ ID NO: 202271 - protein, 59 aa, Glycine max
  unsure (1)..(59): unsure at all Xaa locations
  Clone ID: PAT_MRT3847_24676C.1.pep
MAETFLFTSESVNEGHPDKLCDXISDAVLDACLEQDADRTVACEXCTNTNLVIAFGEIT

SEQ ID NO: 202272 - protein, 51 aa, Glycine max
  Clone ID: PAT_MRT3847_24677C.1.pep
MLESGFLRRSFSAIVSSKFYSIAVLFHSLDWETPGVSQLIRLAPHPPLISW

SEQ ID NO: 202273 - protein, 61 aa, Glycine max
  Clone ID: PAT_MRT3847_24678C.1.pep
VFHFKGGVFALPGDTYIFGDSNLGGACLAGGAFSGRLKFGNVHQGFILVNHGFLREPISFV

SEQ ID NO: 202274 - protein, 91 aa, Glycine max
  Clone ID: PAT_MRT3847_24679C.1.pep
PLERPLFVFFFFFFGGGGSDLNQIAWVNWEIVCLPKERGGLGIKDLTRFNLALLGKWKWELFHPQDELWAKVLVSRYRDWRGLAEPPYDKN

SEQ ID NO: 202275 - protein, 123 aa, Glycine max
  Clone ID: PAT_MRT3847_2467C.1.pep
MCSNDLLGPHPLPFLIANINCTGLPAMAKAGRVRCSMEEKPSSSSNLGMGASLLAAAAAATMSSPAAMALVDERLSTEGTGLPFGLSNNLLGWILFGVFGLIWALFFVYTSTLEEDEESGLSL

SEQ ID NO: 202276 - protein, 109 aa, Glycine max
  Clone ID: PAT_MRT3847_24680C.1.pep
ESTYVSLRRTINSTLEINKSASSHARLFLVPHLPDVVGHNPLLDAADVTEKHSTYPVNLATERVEVARRDPNVINTNTERAAGARYVKNATRSVAKKSEVDIPATGIYG

SEQ ID NO: 202277 - protein, 191 aa, Glycine max
  Clone ID: PAT_MRT3847_24681C.1.pep
PAMLTSRYAEFPDERFTFHSARMRMMHVTPEELKNMDVASDRCALELSDARCDVMAYACLVAIMSQGRGYHRVSQERLARITEQNNAPTPVLSSAGALIDAIHVQGYKKVAIITPYMKPLTQTVIDYIEDSGIEVTDSISLEVSDNLAVGRLDPANLVGHADRLNISGADAVVLSACVQMPSLPSIQVVED

SEQ ID NO: 202278 - protein, 56 aa, Glycine max
  Clone ID: PAT_MRT3847_24682C.1.pep
IKGAMLANQCVDEDPIFRPEMRQVVISLSQILLSSGRGEATLAGKSPVFRGLGQGR

SEQ ID NO: 202279 - protein, 50 aa, Glycine max
  Clone ID: PAT_MRT3847_24683C.1.pep
PFSKTRVPTVADANSKQMIIANRIFHDQRCYLLSYFLLLFLHSLLQFFKS

SEQ ID NO: 202280 - protein, 42 aa, Glycine max
  Clone ID: PAT_MRT3847_24684C.1.pep
KKIAQDIFNLADYKKRPPLSSREIYPRVRIFFPGELAKNPVF

SEQ ID NO: 202281 - protein, 91 aa, Glycine max
  Clone ID: PAT_MRT3847_24685C.1.pep
PKVFFWAVCSGKGWSKHKESKVFWPWGKALPKVILPPLLKKKLFNGGGWNLFQQVGTKKGQSLSGRFWPREILGAPFQKRQLVGEVFKACF

SEQ ID NO: 202282 - protein, 89 aa, Glycine max
  Clone ID: PAT_MRT3847_24686C.1.pep
GGEKKKAPPKPGHLIKKWGGTKKPIPLTKKPLPPTCTRKFVRSYLQKETTGARANTIRPKKRKNFLKRARTLPPWFPKKTPPLLLALFF

SEQ ID NO: 202283 - protein, 134 aa, Glycine max
  unsure (1)..(134): unsure at all Xaa locations
  Clone ID: PAT_MRT3847_24687C.1.pep
MSLVIPEKFQHILRVLNTNIDGRRKIAFAITAIKGVGRRYAHXXVLRKADIDLTKRAGELTEDEVERVITIMQNPRQYKIPDWFLNRXKDVKDGKYSQVLANGLDNKLRXDLERLKKIRAHRGXRHFWXLRVEA

SEQ ID NO: 202284 - protein, 88 aa, Glycine max
  unsure (1)..(88): unsure at all Xaa locations
  Clone ID: PAT_MRT3847_24688C.1.pep
STNTSTNDKSXCTSNSTLFLLSYFASSLAQSSGEFLGLSSKMLPSNHWLLLLPVEIAQTAIIASAGRSWNSSYKMQREKSKYTSTRQY

SEQ ID NO: 202285 - protein, 44 aa, Glycine max
  unsure (1)..(44): unsure at all Xaa locations
  Clone ID: PAT_MRT3847_24689C.1.pep
RILNAXKDLQKAPXTFCSXGPVAEDMLHWHATLMGPTDNPYAGG

SEQ ID NO: 202286 - protein, 86 aa, Glycine max
  unsure (1)..(86): unsure at all Xaa locations
  Clone ID: PAT_MRT3847_2468C.1.pep
PGAHRIALYNQEYTDTNQSRNAVKXPMSDMYDYENDIWLXTHFHGQCXNFTALXPSINTLKEVHAFLTDNPTDIETIITEDYAHTH

SEQ ID NO: 202287 - protein, 587 aa, Glycine max
  Clone ID: PAT_MRT3847_24690C.1.pep
MGKSPGKWIKTVLFGKKSSKSNISKGREVKLVNQKGVVVTSKVPETGLALEPTSDTIARHEEDPELENKEAENVLPGNQEIDTVGSINEDAALDPEKMRLEEAATKAQAAFRGYLARRAFRALKGIIRLQALIRGHLVRRQAVVTLCSMYGIVKFQALVRGGIVRQSNVGSEIHEKSNILNPLDGKLVKPNAMFTKITKLSANAFIRKLLTSSTTIMALRLQYVPGDPNSVLSWLERWSASHFWKPVPQPKKIRDTKSQRKHGNISVGDTHVSKSKRINRKLPTASFDSVPVQANPEFEKPKRNTRKISNQSSDPHVQENPQSELEKIKRNLRKVYNPVVENAVPSEVESEMPKDHLEKVTVTSCLAVSEQEVISSNEKIKKEAILTVSSVPDIETTPRLSVSKEVSDTPSSYQVTVESKPLTEITTKDKNISVSDEVKNEPIDLPEPICKDENSHLTNGDLSHKEDQIGSENQKPNQKASIVAKQERAENGIQNSPTLPSYMAATESAKAKLRAQGSPRFGQDGSERNNHTRRHSLPSSTNSKINSPSPRTQRPVQSGGKGGHRSDRTVSSSRDGNGKVIQAEWRR

SEQ ID NO: 202288 - protein, 587 aa, Glycine max
  Clone ID: PAT_MRT3847_24691C.1.pep
MGKSPGKWIKTVLFGKKSSKSNISKGREKLVNQEEGVVVTSKVLETGLALEPTSDTIARHEEDLELENEEAENVIPGNQEIDTVGSINEDAALDPEKIRLEEAATKAQAAFRGYLARRAFRALKGIIRLQALIRGHLVRRQAVATLCSMYGIVKFQALVRGGIVRHSNVGSEIQEKCNILNPLDGKLVKPIAISMKITKLSANAFIRKLLTSSTRIMVLQLQYVPGDPNSVLSWLERWSASHFWKPVPQPKKIRDTKSHRKHGNISVGDTHMSKSKRTNRKLPPASFDSVPVQAHPEFEKPKRNMRKIPSQSSDPPVQENPQSELEKIKRNLRKVHNPVVENAVPSEVESETPKDHLEKATVTSCLAVSEQEVISSNEKIKKEATLIVSSVPDIETTPRLSVSKEVLDSPSSYQVTVESKPLTEITTKDKNIHVSDEVKNEPIDLPEPICKDENSHLTNGDLSHKEDQIGSENQKPNGKASIVAKQERAENGIQNSPALPSYMAATESAKAKLKAQGSPRFGQDGSEKNNHTRRHSLPSSTNCKISSHSPRTLRQVQSGGKGGHRSDRTVSSSRDGNGKVIQAEWRR

SEQ ID NO: 202289 - protein, 217 aa, Glycine max
  Clone ID: PAT_MRT3847_24692C.1.pep
PIVSPWHPLTKYLWEMGGAMKAAQNAPRKLRRPHAGCANDCSTTITSLVEKGQWFDVVNADRIKSINDFANFFAYKLIPEYNIRVQVYDGAGNACFKLPYKDVKILLKISCKDIVLHIEGPYAQELPALLYDLNGLDLLFLVDTRIEGSATSSSNVSDHDGYSVSEICHEKEILRMLQRGEHYFQFDEGQAKRALCLSVKENKLKVTKQHHAPGCID

SEQ ID NO: 202290 - protein, 38 aa, Glycine max
  Clone ID: PAT_MRT3847_24693C.1.pep
LLITHLLESSINTSHLLFPKLKSAYLLVHTPMGFLTVF

SEQ ID NO: 202291 - protein, 67 aa, Glycine max
  Clone ID: PAT_MRT3847_24694C.1.pep
YMRNRRLRIYSHGQCSHGCKMVSMVLNKTDPPDHHPDMLLLLKSGPKQCIKFQRRANPFFKKILPLI

SEQ ID NO: 202292 - protein, 83 aa, Glycine max
  Clone ID: PAT_MRT3847_24695C.1.pep
NAPKKLAICWIYNRLLSSPTCPVLDALGKKLSFEIAVGLNGRVWVDASSAHTTIVVANAIMNSETLSGAQQRIMIDKLLQRIQ

SEQ ID NO: 202293 - protein, 125 aa, Glycine max
  Clone ID: PAT_MRT3847_24696C.1.pep
FKAGITSSIIHLDSNIVLWNQLVGKKVSKIIYTLDPISINDIKPLTFLNQTANFGPHGTLSALVIVVEQSFAQPAWGRLNFLKAFWAAFIAPPISHKYFVNGCHGDTIGHFLTSLSSPKLLISAL

SEQ ID NO: 202294 - protein, 22 aa, Glycine max
  Clone ID: PAT_MRT3847_24697C.1.pep
LLLIDSLRGGILTALTIQNLHK

SEQ ID NO: 202295 - protein, 74 aa, Glycine max
  Clone ID: PAT_MRT3847_24698C.1.pep
QPDLHEFETYCHTHMMTVMREATTLTLSGFWPACSYQTHWQLLNYMLIFNRAISFDLISSVEAHSFVVSFSEVY

SEQ ID NO: 202296 - protein, 182 aa, Glycine max
  unsure (1)..(182): unsure at all Xaa locations
  Clone ID: PAT_MRT3847_24699C.1.pep
GSRKATVSATDEDSIADVMEQHDEFLSSMLARSAKLQMVFRCWERNDVKEVIGIMARMDDHAVIADVVSIIMEKIDIITLEICAGLLPLLTDLLQSEMERHLGISLEMLLKLVRIFGSVIYSTVSATQPVGVDIEAENRLERCNLCFTELEKVKRXLPSLSRRGGSIAKSAQELNLALQDVS

SEQ ID NO: 202297 - protein, 224 aa, Glycine max
  Clone ID: PAT_MRT3847_2469C.1.pep
WLPFFFTNESEYGYATFVTPAVYFISIGETCVSSLYVCNKIFNRIMTIADDVNYYDIRKKCVGDLCYDFSVMEDFLNKKTVRDALGVGDLDFVSCSSTVYSAMMQDWMRNLEVGIPTLLEEGIKVLVYAGEEDLICNWLGNSRWVNAMEWSGQKQFGASGTVPFLVDGAEAGTLKSHGPLSFLKVYEAGHMVPMDQPKAALEMLRSWMQGKLTMTKSGDNVSPK

SEQ ID NO: 202298 - protein, 55 aa, Glycine max
  Clone ID: PAT_MRT3847_246C.1.pep
DVTLGYMFYINYMKLIRPCLSRDDFIINLDKFEYDVEESECESFTPLKDLYLKMF

SEQ ID NO: 202299 - protein, 86 aa, Glycine max
  Clone ID: PAT_MRT3847_24700C.1.pep
LSGTAYLSSCCLLLSSSSIVTHTHLLLPSWLSNLPSPFTISQSRFVFLLLKLLPAHTQLLFLYSYVKRLWLAHAQLCLHSNCLMGE

SEQ ID NO: 202300 - protein, 78 aa, Glycine max
  Clone ID: PAT_MRT3847_24701C.1.pep
LSSGIVNIMFSLVSEVRSQDDDRLELCESMVLFLSGVSFIISRDKLDSTLLLWYVIFVIIGLLSRTIWARNNMVSFPH

SEQ ID NO: 202301 - protein, 491 aa, Glycine max
  unsure (1)..(491): unsure at all Xaa locations
  Clone ID: PAT_MRT3847_24702C.1.pep
MEAKKSGLNLPAGMSGTSLRLDTAAASSISTLNSPSSLRSISNLTSPSKSNSACSDRFIPCRSSSRLHTFGLLDRPSPVKEGSNEAYSRLLKSELFGSDFASPSLSLSSPAGAAPPSPLSPSKNMLRFKTDHSVAPSSPYSPSILGQQNAFPSDSSTPPPKPPRKVLKTPHKXVLDAPSLQDDFYLNLVDWSTQNVLAVGLGTCVYLWSASNSKVTKLCDLGPYDGVCSVQWTREGSFISIGTNLGQVQVWDGTQCKKVRTMGGHQTRTGVLAWNSRILASGSRDRNILQHDMRVPGDFVSKLVGHKSEVCGLKWSCDDRELASGGNDNQLLVWNQHSQQPVLRLTEHTAAVKAIAWSPHQSSLLVSGGGTADRCIRFWNTTNGHQLNCVDTGSQVCNXLAWSKNVNELVSTHGYSQNQIMVWKYPSLTKVATLTGHSMRVLYLAMSPDGQTIVTGAGDETLRFWNVFPSMKAPAPVKDTGLWSLGRTQIR

SEQ ID NO: 202302 - protein, 974 aa, Glycine max
  Clone ID: PAT_MRT3847_24703C.1.pep
MNPSHTLIPSSHCYPPLLPFTFATLCTSQRRRFRVFFPRCFSATSAPPQVPKDLCGIEHLVDKLSPPVRLATSVVVFAAAASAGYGLGSKLGGCQNVAIGGAVAFGVAGTAAAYALNAVAPQVAAVNLHNYVVGLDNPFLLKKEDIDGISNRYGVSKQDDAFKAEICDIYSHFVSSLLPPGDVELKGDEADKIISFKNSLGIDDPDAAAMHIEVGRNIFRQRLEVGDCEADIEQYRAFQKLIYMSYLVFGEASSFLLPWKHVFKVTDSQVEEAIRDNAQRLYASKLKSVGREQLVTLREAQHLYCLSDQLAENLFKEHTRKLVEGSISVAHVIEAVEELDSVLAFNNILISLKNHPDVDHFAQGVGPVSLLGGEYDGDRKIEDLKLLYRAYIANALSSGRMEDNKVAALNLLRKFFGLGKREAEAIMLDVTSRVYRKKLAQAVSGGSLEMTDSKETFLQKLCDELHFDPQKACEIHEEIYRQKLQQLVADGELSDKDAAALLRLGVMLCIPQQTIDTAHSDICGSLFEKVVKDAIASGVDGNGAEMRKSVRKAAHGLRLTGDTAMSIASKTVRKIFINYIKRARAAGNCTESAKELKKMIAFNTLVVTELVNDIKGESDDESTEEPGKDDVIQTEDEEWDSLQTLKKIRQNKELEAKLGNLSHTEITLIDDLSERDRTDLYKIYLLFCLTGEETRVPFGAQITAKKDDSEYVLLNQLGGILGLSGKEIVEVHRSLAEQAFRQQAEVILVDGQLTKARVEQLNNLQNQVGLPQEYSQKIINSITTTKMAAAIETAVTQGKLSIKQIRELKEASVEIDNMVSEDLRETLFKKTVGDIFSSGTGEFDEEEVYERIPLDLNINKEKARGVVLELAETRLSNSLIQAVALLRQRNREGVVSSLNNMLACDKAVPSRPHSWGVQEELADLYTIYMKSNATPEKLSRLQYLLGINDSTAASLREMGERLLSNNAEVEEFVF

SEQ ID NO: 202303 - protein, 990 aa, Glycine max
  Clone ID: PAT_MRT3847_24704C.1.pep
MNPSHTLIPSSHCYPPLLPFTFATLCTSQRRRFRVFFPRCFSATSAPPQVPKDLCGIEHLVDKLSPPVRLATSVVVFAAAASAGYGLGSKLGGCQNVAIGGAVAFGVAGTAAAYALNAVAPQVAAVNLHNYVVGLDNPFLLKKEDIDGISNRYGVSKQDDAFKAEICDIYSHFVSSLLPPGDVELKGDEADKIISFKNSLGIDDPDAAAMHIEVGRNIFRQRLEVGDCEADIEQYRAFQKLIYMSYLVFGEASSFLLPWKHVFKVTDSQVEEAIRDNAQRLYASKLKSVGRDIDAEQLVTLREAQHLYCLSDQLAENLFKEHTRKLVEGSISVAHGILKSHTRSVYGVIEAVEELDSVLAFNNILISLKNHPDVDHFAQGVGPVSLLGGEYDGDRKIEDLKLLYRAYIANALSSGRMEDNKVAALNLLRKFFGLGKREAEAIMLDVTSRVYRKKLAQAVSGGSLEMTDSKETFLQKLCDELHFDPQKACEIHEEIYRQKLQQLVADGELSDKDAAALLRLGVMLCIPQQTIDTAHSDICGSLFEKVVKDAIASGVDGNGAEMRKSVRKAAHGLRLTGDTAMSIASKTVRKIFINYIKRARAAGNCTESAKELKKMIAFNTLVVTELVNDIKGESDDESTEEPGKDDVIQTEDEEWDSLQTLKKIRQNKELEAKLGNLSHTEITLIDDLSERDRTDLYKIYLLFCLTGEETRVPFGAQITAKKDDSEYVLLNQLGGILGLSGKEIVEVHRSLAEQAFRQQAEVILVDGQLTKARVEQLNNLQNQVGLPQEYSQKIINSITTTKMAAAIETAVTQGKLSIKQIRELKEASVEIDNMVSEDLRETLFKKTVGDIFSSGTGEFDEEEVYERIPLDLNINKEKARGVVLELAETRLSNSLIQAVALLRQRNREGVVSSLNNMLACDKAVPSRPHSWGVQEELADLYTIYMKSNATPEKLSRLQYLLGINDSTAASLREMGERLLSNNAEVEEFVF

SEQ ID NO: 202304 - protein, 58 aa, Glycine max
  Clone ID: PAT_MRT3847_24705C.1.pep
ASAGYCDRTGASLVHAILQIGVCSARIITSCYYSIFLMFIDETFCHDLCIPLITHGIS

SEQ ID NO: 202305 - protein, 190 aa, Glycine max
  Clone ID: PAT_MRT3847_24706C.1.pep
MAIAMKATPITASGFVSTRNSTLPPFKSSFLRYRSGALEVPGMRVTYSDRLKCNCHGGGALGTQMNLFSRFARVIKSYANAIISSFEDPEKILEQAVLDMNNDLIKVRQATAQVLASQKQLESKYKSIEKASDDWYRRAQLALQKGDEELAREALKRRKSYADNATALEMQLDQQKNVADDLVSKTQLLE

SEQ ID NO: 202306 - protein, 148 aa, Glycine max
  Clone ID: PAT_MRT3847_24707C.1.pep
KENDMKDYERLGNLVLKINKSLAIAGPLFTGVAAVGSACLSQDSSWGAIVAVLGGALATTVNAFEHGGQVGMVSEMYRNCGGFFQLLENSIQETMEEDEEQRENGELFEMKLALKLGRSLSQLRDLARKSAYSRVEGTTTDEFASKLF

SEQ ID NO: 202307 - protein, 199 aa, Glycine max
  Clone ID: PAT_MRT3847_24708C.1.pep
VLGRYQSNPGIDHWKTAKKVMRYLQGTKDYMLMYKQTNCLEVIGYSDSDFAGCVDSRRSTSGYIFMLADGVVSWRSSKQTLIATSTMEVEFVPCFEATSHGVWLKSFMSSLRVVDSISRPLKLYCDNFAAVFMAKNNKSGNRSKHIDIKYLVIRERVKEKKVVIEHVNTELMIVDPLTKGMTPKNFKDHVVRMELSSMM

SEQ ID NO: 202308 - protein, 76 aa, Glycine max
  Clone ID: PAT_MRT3847_24709C.1.pep
RFIFSNGTEPARRGPATCEWDLLMRTNTLHPPYQKSYNIATPCIDQRSCIYPVHVDLEFYNISLTIPCSPDPSCAR

SEQ ID NO: 202309 - protein, 60 aa, Glycine max
  Clone ID: PAT_MRT3847_2470C.1.pep
QGVLGFSPPQFFAHHFLGGGTGLFLVPIPPKKGLISWLTVYPGPKLCFFLFFPKKGAPVF

SEQ ID NO: 202310 - protein, 107 aa, Glycine max
  Clone ID: PAT_MRT3847_24710C.1.pep
GFRGLNSSYKGLGSNKHYRPFRSTPPHASALSACFLVYIFGHNATVVLLPYSFRLSISTPNLPLLAWAPESLSVFCSLLSPSHIVSPLSLCPPPPPSRRHSYTCTTQ

SEQ ID NO: 202311 - protein, 54 aa, Glycine max
  Clone ID: PAT_MRT3847_24711C.1.pep
HLLGYVTVRAGLKLVFRGSWPENSGEGLRCDGPPGGITLPVERVGERVGVRVSV

SEQ ID NO: 202312 - protein, 157 aa, Glycine max
  unsure (1)..(157): unsure at all Xaa locations
  Clone ID: PAT_MRT3847_24712C.1.pep
FPGRPPRPKXAPARVCVSFSPKTKRTIYVPKPLRLFPFPPNTVPSAMTTPGECAGDDEQTADNGQRWPGSAGGDGIHQVRRRAACSQWGYVNEHGLWLRLFPLIQVSIIMGGNYLIFNFKTLRYYLIFNFKTLRFFFKKNLKILSNLYESLEFKNII

SEQ ID NO: 202313 - protein, 68 aa, Glycine max
  Clone ID: PAT_MRT3847_24713C.1.pep
RRNCPIYVFLSLYHLFFPMPLTNTKVNLRFSSSLSVLLTKKLIKMKLNIIDKSENETQPHRLCPRIRN

SEQ ID NO: 202314 - protein, 56 aa, Glycine max
  Clone ID: PAT_MRT3847_24714C.1.pep
HKDYEAKRKNHRKVQGVTGAANTLSMGHPMLTFSHTQDYGLDYNDPLPSPLVHPPE

SEQ ID NO: 202315 - protein, 53 aa, Glycine max
  Clone ID: PAT_MRT3847_24715C.1.pep
QFWLRVLKKQEKKKYQPWQPFLINLKGPTPKEPQMEHPKEPRLRTTTAFTNQL

SEQ ID NO: 202316 - protein, 57 aa, Glycine max
  Clone ID: PAT_MRT3847_24716C.1.pep
QEARFYLNKVWGLSNENEKKMHQKGFALLNEFIQLNLDYTEDPNKKKCNFTSIVFQD

SEQ ID NO: 202317 - protein, 118 aa, Glycine max
  Clone ID: PAT_MRT3847_24717C.1.pep
HPNFFFFFKKKKGEPGGKINTNSFLPTGLIFFFQGGWALPPPTFNHKTQGPKGVFFSPWLPFPQWWLITRLTPGKLTFPPPWKPTVLTMWGLSWRDPFFRGGLTPGKTSGGKIGPFLP

SEQ ID NO: 202318 - protein, 75 aa, Glycine max
  Clone ID: PAT_MRT3847_24718C.1.pep
MDCQMPKMDGYEATKAIRKSEVGTSRHIPIVALTAHAMSCDEAKCLEVGMDAYLTKPIDFKMMVSTILSLTKRTS

SEQ ID NO: 202319 - protein, 265 aa, Glycine max
  Clone ID: PAT_MRT3847_24719C.1.pep
QKSEETWKKAKQDARDFPSALKVAHEKYLAALKSVVNCLEGHKIDFVKLLPEWQLKNKITNLEKDIGDANKKIEEKSMLKRKVDKNNSSNKMKIPEAKRTRFTGKDASVLSPSLAILQEQRIVSHMDGNSSYDGSLSALLLDGRSYGNYPNNYLAAASVSDSLAEKYLGSTVASGANMLGGAMGGSFSGYQGDMYRYHGIGEGALSHDRSVGQSFVGQSASTLNNLYGKTSTEGFAGVPEHLSVGASSRSGGSDLYGFADAVFDM

SEQ ID NO: 202320 - protein, 54 aa, Glycine max
  Clone ID: PAT_MRT3847_2471C.1.pep
PFSLGLSNTNSVYHLKCHKMPSLSPTVDEPSKGLATHIHLYRKPSPSYDYLTTT

SEQ ID NO: 202321 - protein, 408 aa, Glycine max
  unsure (1)..(408): unsure at all Xaa locations
  Clone ID: PAT_MRT3847_24720C.1.pep
METPENAAYCSSWLPPEDENDSGAKLAKSVNKLNDLAVAIQAFNNRYEELQKHLEFIEQAIDTRTKELRALGYNSTQGTAENGVVQSDSNPKPEEAKAVEKEKEKVKEEEKEKEDELITLCKTMNSRGLRKYVLTRLSETASLREQVPVALRSAAKPSRLVFECIGRFFLQGSKAYTKNSPMVPARQVSVLVLEHYLLSGCVGNEKDVEASLKREADSAAVAWRKRMFVEGGLLKAAEVDARGLILFVAGFGIPSVFKDEDIYNLVCVSNGREFSDALLQSQPLLKRVSDVADGMMKKGMAVKAVDLAYTFGFEEKYSSQTALTSFLQKSEETWKKAKQDARDFPSALKVAHEKYLAALQSVVKCLEGHKIDPVKFLPGWQLKNKIXNLEKDINDANKKIDEKSMLKS

SEQ ID NO: 202322 - protein, 228 aa, Glycine max
  unsure (1)..(228): unsure at all Xaa locations
  Clone ID: PAT_MRT3847_24721C.1.pep
MAKSKNNAKKLSYISVPSQIINSISSSSLQSLLDSPKKSSRNTNNNRFFIFFTNSTSTIIFRKQRLWFFTLFLFGFLGMLKFGLTLHTPFPPYPCATTTLLPQNMISTTPHSKSNLGAVLRENNDQKKDEVLLSHSEFWEKPDGLGYKPCLSFSRDYXTASEGVLKDRRKFLMVXVVSGGVNHDKEXTCDALCLARILXSCLGGSISQPDVIFGDERELGDICETEHM

SEQ ID NO: 202323 - protein, 81 aa, Glycine max
  unsure (1)..(81): unsure at all Xaa locations
  Clone ID: PAT_MRT3847_24722C.1.pep
PKCLAIYFYVKRATFEIHQCKPLSSFSTAEPGQLRTVPAFVSGRCLAAIKGFYALFEVEPLTRQFFAGCXVNXKHALTFFL

SEQ ID NO: 202324 - protein, 90 aa, Glycine max
  Clone ID: PAT_MRT3847_24723C.1.pep
TIKAFKRIVGPPAKGFKKKRVSPKTLFWKKKLFNFFSPLLKWEKFHFGGPPIFIHPPFFPIPSPPPFGKNLTPGGFKVVLENFQFPNPGV

SEQ ID NO: 202325 - protein, 180 aa, Glycine max
  Clone ID: PAT_MRT3847_24724C.1.pep
MNKFKKSQVLVLLVLVLLLLITPFLPSSLRPTYLYFIINFLIMALFAEAGLISDFSRPLEDKKQSTSVTNSTSEKREVSNSTPTVVGDDVSEHVEKSASERVVCVTKVDKVQNSPSMPTLLFIGGGEADEQVMDEELEAEEELGGVNGQELFTKAEAFIGNFYKQLKMQSEESWIYQKAL

SEQ ID NO: 202326 - protein, 50 aa, Glycine max
  Clone ID: PAT_MRT3847_24725C.1.pep
TKSRKKRLWHIYGRSQICHSQLLIISKQLDKSIHNQFVFDRKCTITGFHA

SEQ ID NO: 202327 - protein, 68 aa, Glycine max
  Clone ID: PAT_MRT3847_24726C.1.pep
IFYFYHFPSSELSKSPFLLLSVFSCTCSASGYEFVYLRIGSNSFLCYIVFKKILVFTYHLVSEHKKVI

SEQ ID NO: 202328 - protein, 220 aa, Glycine max
  Clone ID: PAT_MRT3847_24727C.1.pep
MGRFENHVVKGGIKLPIGFRFCPTDEELLLHYLKKKAFAQQLPASVISEFDVFQTEPWKLPGELRENRYFFSNRSNGNIKRPAGSGCWKSVGKEKQIIHSESNQVIGMKETLFFCKGSHETRTQWVMHELRLVASYPCQMPVADFAVYRIFQKNKMKTRRSHGKKPSSSSKLQRLVDVKASFFDFTVDFNHDDIGPPTPFFPTAASFVFSWLLLSLDFSH

SEQ ID NO: 202329 - protein, 59 aa, Glycine max
  Clone ID: PAT_MRT3847_24728C.1.pep
TLLTMEGGVSYARMPWVKIRKLKDDYAKLELLDYYTSIFNALVIVTIDVLTTPYTYLIT

SEQ ID NO: 202330 - protein, 45 aa, Glycine max
  Clone ID: PAT_MRT3847_24729C.1.pep
PLYYTINHYNKPLYHNFFITFFSPHTLILLSITLSYFHNLKHPTY

SEQ ID NO: 202331 - protein, 133 aa, Glycine max
  Clone ID: PAT_MRT3847_2472C.1.pep
MATIIAGTPTTSITRTGHVLKRPVGASSSTVLGLPAMAKAGRVRCSMEEKPSSSSNLGMGASLLAAAAAATMSSPAAMALVDERLSTEGTGLPFGLSNNLLGWILFGVFGLIWALFFVYTSTLEEDEESGLSL

SEQ ID NO: 202332 - protein, 45 aa, Glycine max
  Clone ID: PAT_MRT3847_24730C.1.pep
VGNGARFRFAISHLVVYNSDDRLCYVTIVGPDLLTYHEGLVSLSC

SEQ ID NO: 202333 - protein, 33 aa, Glycine max
  Clone ID: PAT_MRT3847_24731C.1.pep
ERALAIKTCNHVCQWIKDVENEIFLLGASPFLW

SEQ ID NO: 202334 - protein, 50 aa, Glycine max
  unsure (1)..(50): unsure at all Xaa locations
  Clone ID: PAT_MRT3847_24732C.1.pep
XLKXNXAARSXGXXGVTAEIXERRSNVRKKNNEEAMCXCXXCVQCNAMKV

SEQ ID NO: 202335 - protein, 51 aa, Glycine max
  unsure (1)..(51): unsure at all Xaa locations
  Clone ID: PAT_MRT3847_24733C.1.pep
XSXPXQNXXXHFXLXIGXXLIACAESXXRAQGXGISKWXXPPXXFPRPYXQ

SEQ ID NO: 202336 - protein, 55 aa, Glycine max
  Clone ID: PAT_MRT3847_24734C.1.pep
YNTHQARQPTPLPQSSCLTTSQLSTTVSAWTASQTSLSAPDSLQRARWIPRKLAS

SEQ ID NO: 202337 - protein, 51 aa, Glycine max
  unsure (1)..(51): unsure at all Xaa locations
  Clone ID: PAT_MRT3847_24735C.1.pep
MTDSSPLIPPSPVTVTVIDLEVGPSYQIQCRIRLVTDGXFFIVPCKCKGTL

SEQ ID NO: 202338 - protein, 56 aa, Glycine max
  Clone ID: PAT_MRT3847_24736C.1.pep
VWGLGFPFRRVFPGIIFVGNMLVLGGNYFPFWGIRPQKKKKKKKKKKKKKKKKKQL

SEQ ID NO: 202339 - protein, 115 aa, Glycine max
  Clone ID: PAT_MRT3847_24737C.1.pep
MSHRKFEAPRHGSLAFLPRKRAARHRGKVKSFPKDDPKKPVHLTAAMGYKAGMTTIVRDLDRPGAKLHKKEIVEACTVIETPPMIAVGLVGYIETPRGLRSLTTVWAEHLSDEVK

SEQ ID NO: 202340 - protein, 71 aa, Glycine max
  Clone ID: PAT_MRT3847_24738C.1.pep
MGWNYNVDLVVPMVHTPSVYLYRTDGTCDFFDGRVMKEALIKVMVPIYPMAVRLRRDKYGRVEIDCYSEGV

SEQ ID NO: 202341 - protein, 55 aa, Glycine max
  Clone ID: PAT_MRT3847_24739C.1.pep
SIQIYTLDPGDWIYIQSGTPLSIVTINENDKLFRAMLHIPVSVPTPGKFEEFFGP

SEQ ID NO: 202342 - protein, 330 aa, Glycine max
  Clone ID: PAT_MRT3847_2473C.1.pep
MSTATTHVLAYPFPTSGHVIPLLDFTKTLVSRGVHVTVLVTPYNEALLPKNYSPLLQTLLLPEPQFPNPKQNRLVSMVTFMRHHHYPIIMDWAQAQPIPPAAIISDFFLGWTHLLARDLHVPRVVFSPSGAFALSVSYSLWRDAPQNDNPEDPNGVVSFPNLPNSPFYPWWQITHLFHDTERGGPEWKFHRENMLLNIDSWGRRYLHIHRVSAVGAFVSHCGWNSVVEGLISGVAMLTWPMGADQYTNAKLLVDELGVAVRPAEGEKVIPEASELGKRIEEALGRTKERVKAEMLRDDALLAIGNGGSSQRELDALVKLLSEVQRVESTS

SEQ ID NO: 202343 - protein, 268 aa, Glycine max
  Clone ID: PAT_MRT3847_24740C.1.pep
MKLWCFPWLCFTEEEEEERNVPKPMKEDDIFGNDVVSDDDDDGNNTRGGDDEQFATARTDALGSWPGESSSTAAAACSETPAAGGESRDSSHKRAKFYADFEEHDLNWGSSCGQSDNFPAVNTPSRASSNENIPESSEQSTRLLQNLNCVGCPNIRKVVIPLRANCFHLLFLNLSLSANLKEVDVTCLNLCFLNLSNCSSLEILKLECPKLTSLFLQSCNIDEEAVEAAISKCSILETLDVRFCPKISSMSMGRLRPICSSLKRIFSS

SEQ ID NO: 202344 - protein, 248 aa, Glycine max
  Clone ID: PAT_MRT3847_24741C.1.pep
MKHETDNINNNNGTHDGSEDSVLRPCLSLLKCRSFAACHVSANKISRSDPNVSLHVDQILAVADVLAAAERRRVPSHPHDWYSILRLLPGDGDNRDLTRQHFKTLVRLLDPNKNKLPFADEALMRVREAWFVLSDPTRKARFDKEINDAAKTKTTSFWTMCPYCWYLHEYERKYEDCTLRCSNCKRTFHGAAVTSPRPEAVAAGNEEYYCYHVSLPVRYPVGGERCRFGDGARKRMRVKTVANRMKKK

SEQ ID NO: 202345 - protein, 399 aa, Glycine max
  Clone ID: PAT_MRT3847_24742C.1.pep
VIANAAMRAKVQDSMGQKEAIQDQVKLIGGDLDGVKKERQAIRSKIKQLEDTVKALDKDIQSLQDELGAVTEKREKAYESIQQQRKQRDQGNSYFYQSRTILNKARELAAKKDINAIEELAQTEVEKAMSLWNSDKSFRDDYEKRLLPSLDMRQLCRDGRMRNPDEKPLLEEPKPAETDTLPKSSVKQPKEEEPKSSASKTVPEQKIQKETKKKGKDLKSNLNKVLEDTDEYEFELPKVNKEPPIDPEKLKEMKREEEIAKAKQALERKKKQAEKAAAKAATRAQKEAEKKLKVREKKAKKVAGGTGAVPSPEEPANEAVEVAEQKTDDSMEASAPAKEKVPKESSVKFRNRAKALKGPDTIPKAIMKRKRSNYDDWIWIASCVFLVLSALVFAYIILS

SEQ ID NO: 202346 - protein, 363 aa, Glycine max
  Clone ID: PAT_MRT3847_24743C.1.pep
MGVTPLDHAVFLDPAPFDNVKNRLVGADNACLDLCQKGCPVVGAMAVEVVGFEMVQGPVENGAKEDKSISEKTENGKLEQDTGVAEPTKFGSHGDESAKPEANVVSDANVPKDAVDDWPAPRQIHSFYFVRFRPYDDPNIKAKLEKYDKEISQENQARIQVTDALRAKRTERAGCISQIKSLKGDNRQFQSIVDEKIKEIEPLQQALGKLRTANNAGRGVGLCSSEEELNNLINSLHYRIQHESIPFAEEKQILREIKQLEGTREKVIANAAMRAKVQDSMGQKEAIQDQVKLIGGDLDGVKKERQAIRSKIKQLEDTVKALDKDIQSLQDELGAVTEKREKAYESIQQQRKQRDQGVCFPFL

SEQ ID NO: 202347 - protein, 104 aa, Glycine max
  unsure (1)..(104): unsure at all Xaa locations
  Clone ID: PAT_MRT3847_24744C.1.pep
KKLRSIFHQECVEICFTDTNCLAPEGYLTSTIMNFYIQYLQQQALLTNRSLSAYHFFNTYFYKKLKEAVAREQSDXEIFAKFRRWWKGVNIFQKAYVLIPIHEE

SEQ ID NO: 202348 - protein, 112 aa, Glycine max
  Clone ID: PAT_MRT3847_24745C.1.pep
GVLYHEMVHVWQWLEPIRLEGGLIEGIADYVRLKANYAPSHWVKAGQGQKWDQGYDVTARFLDYCDSLKSGFVAQLNKLMRTGYSDQYFVQLLGKPVDQLWRDYKAKYGNIA

SEQ ID NO: 202349 - protein, 43 aa, Glycine max
  Clone ID: PAT_MRT3847_24746C.1.pep
KLSSRIERWVTSFWELLRVQLNPRDGGLVSEVAERALAESARA

SEQ ID NO: 202350 - protein, 131 aa, Glycine max
  unsure (1)..(131): unsure at all Xaa locations
  Clone ID: PAT_MRT3847_24747C.1.pep
MNLGQLTLFAILAALFVGAPVQSGVLPPQPQSPQPPEPPQPKAPAPPSYEPPEPPSYGAPTSPPTSSPPPSPPAPSPASSAYEPPEPPSYGAPAASSPPTATTPTAPPPXSTPPXPAYEPPEPPSYEPPEP

SEQ ID NO: 202351 - protein, 69 aa, Glycine max
  Clone ID: PAT_MRT3847_24748C.1.pep
HASGSCNSCVYGGQFGVSLSRKRGLKAFLSPTQSPNFPNPSSPWTFFFFLFQTKAKTQGVNLFAFKSAI

SEQ ID NO: 202352 - protein, 47 aa, Glycine max
  Clone ID: PAT_MRT3847_24749C.1.pep
VLPVLLAVPFGRFFSSGCGVPVSAPLAGGFRGSLFICPPPCVVSSGV

SEQ ID NO: 202353 - protein, 50 aa, Glycine max
  Clone ID: PAT_MRT3847_2474C.1.pep
RPTRTPRVFPLVRPIHKWYYGGFVCELLDRDFRQIFVRCPYGLKNTTSMD

SEQ ID NO: 202354 - protein, 221 aa, Glycine max
  unsure (1)..(221): unsure at all Xaa locations
  Clone ID: PAT_MRT3847_24750C.1.pep
MVAANERVVAVIMVGGPTKGTRFRPLSFNVPKPLFPLAGQPMVHHPISACKRIPNLAQIYLLGFYEEREFALYVSSISNELKVPVRYLKEDRPHGSAGGLYHFRDLIMEEDPSHIFLLNCDVCCSFPLPEMLDAHKRYGGMGTILVVKVSAESASEFGELVADPTTNELLHYTEKPETFVSDRINCGVYVFTPDIFTAIXGVSTQRKXRANLRRVSSFEAM

SEQ ID NO: 202355 - protein, 180 aa, Glycine max
  Clone ID: PAT_MRT3847_24751C.1.pep
RTLGIRLELEPNRLEEYQNTNVPQIYALGDVCDKGFELTPVAIAAGRKLSERLFGGNADAHLEYENIPSVVFAHPEVGSIGMTEPEAREAYGDDNIKIYQTNFTAMYFAMMEPEDKQPTAYKLVCAGKEEKVVGLHIMGVGSAEMLQGFGVAIRMGATKKDFDRCVAIHPVSAEELVTLK

SEQ ID NO: 202356 - protein, 250 aa, Glycine max
  Clone ID: PAT_MRT3847_24752C.1.pep
MGCPANGKSGLGTLNDNGRNLVPLVGPPTSACKRIPNLAQIYLLGFYEEREFALYVSSISNELKVPVRYLKEDRPHGSAGGLYHFRDLIMEEDPSHIFLLNCDVCCSFPLPEMLDAHKRYGGMGTILVVKVSAESASEFGELVADPTTNELLHYTEKPETFVSDRINCGVYIFTPNIFTAIEGVSTQRKDRANLRRVSSFEAMQPDTRSLPVNYVRLDQDILSPLAGAIVQYIYISNDFWEQTGMINLAR

SEQ ID NO: 202357 - protein, 74 aa, Glycine max
  Clone ID: PAT_MRT3847_24753C.1.pep
GSRIHIPDFYRHVFIFNLIHTLRLIKDVVSTNNDYHNNNLLHYSSRQALPDLLNVYTETPQYNMPDLSFNLIHR

SEQ ID NO: 202358 - protein, 76 aa, Glycine max
  Clone ID: PAT_MRT3847_24754C.1.pep
AGLVRALGRERNGGRRPFLGGAAYLGFLRIVAKSKFGVAPTHGFFLRREMISGLQSPSSGAPPGVFMSWSKEVEKG

SEQ ID NO: 202359 - protein, 362 aa, Glycine max
  Clone ID: PAT_MRT3847_24755C.1.pep
GNLSSYGNLVGDSFGKFGKALVQICVIINNIGMLIIYMIIIGDVISGTSSSSEFHHSGVLEGWFGVHWWTGRTFVLLFTTFAVFAPLSCFKRIDSLRYTSALSFGLAVAFLVIAVGISIFKISIGGIGMPRLFPIITDVASVFELFTVTPVVVTAYLCHFNVHSIDNELEDSSQINGIVRTSLALCASVYLLTSFFGFLLFGEGTLDDVLANFDIDLGIPFGSVLNDAVRFSYAAHLVLVFPVVFYAVRINLDGLIFPSSRPLVLDNFRFASITMVLIVASFLGANFIPSIWDIFQFTGATAAACLSFIFPSAITLRDRYNIATKKDKILSVFMIVLAVLANVVAVYSDAFALIKNSITKRE

SEQ ID NO: 202360 - protein, 90 aa, Glycine max
  Clone ID: PAT_MRT3847_24756C.1.pep
VAPAPSPTPSQLAPPALARPFVRRHGCAYVQASLGLRLPLRRPSRGLFGSSGLKLPPPPRSSAPRLEQAAAWLLRPRTERPCQRVRRPGC

SEQ ID NO: 202361 - protein, 89 aa, Glycine max
  unsure (1)..(89): unsure at all Xaa locations
  Clone ID: PAT_MRT3847_24757C.1.pep
SHLLRLFSGPRYTGYGARTTEVKCASWRLAVEAHNXIFGFETIXEERVAATKEYMHGEQFRSDSRTAYQHAYFYARDLEVHSKDTFVFS

SEQ ID NO: 202362 - protein, 273 aa, Glycine max
  Clone ID: PAT_MRT3847_24758C.1.pep
MSVVADNSANNGSHQVVLNVNGDAPKKCDDSANQDCVPLLQKLVAEVVGTYFLIFAGCASVVVNLDKDKVVTQPGISIVWGLTVMVLVYSVGHISGAHFNPAVTIAHATTKRFPLKQVPAYVIAQVVGATLASGTLRLIFNGKNDHFAGTLPSGSDLQSFVVEFIITFYLMFVISGVATDNRAIGELAGLAVGSTVLLNVMFAGPITGASMNPARSLGPAIVHHEYRGIWIYLVSPTLGAVAGTWAYNFIRYTNKPVREITKSASFLKGSEAE

SEQ ID NO: 202363 - protein, 156 aa, Glycine max
  unsure (1)..(156): unsure at all Xaa locations
  Clone ID: PAT_MRT3847_24759C.1.pep
PAHVIAQVVGATLGYGTLXRLIFNGKSDHFXGTLPCGSDLQSFVVEFIITFYLMFVISGVATDNRAIGELAGLAVGSTVLLNVMFAGPLTGASMNPARSLGPAIVHNEYKGIWIYLVSPTLGAVAGTWAYNFIRYTNKPVREITKSASFLKGGEAE

SEQ ID NO: 202364 - protein, 58 aa, Glycine max
  Clone ID: PAT_MRT3847_2475C.1.pep
NGNRPPHFCKNSGAVARPIFHQLQNMSIIELGPKGGRKIPSSGRRDFDQVAGRIVVAP

SEQ ID NO: 202365 - protein, 94 aa, Glycine max
  Clone ID: PAT_MRT3847_24760C.1.pep
TPAQGIKFGGPKKKIIPSHPRVRNLEIGPHHQKGFTSGGPKGTPLSKNGAFCFSREPSPQLYKNPNGGLDFKPFCCKKIVKGGPIHIFPPNLLV

SEQ ID NO: 202366 - protein, 59 aa, Glycine max
  Clone ID: PAT_MRT3847_24761C.1.pep
FVRSRVRPRVRPRVRSIIFFWGNHYTILLLLFLFYFIFIKISYITSAALAQIWFCIWLS

SEQ ID NO: 202367 - protein, 42 aa, Glycine max
  Clone ID: PAT_MRT3847_24762C.1.pep
SSAAAGITVHSTVARRLVTHYYTRRAHCLALRTACITAALSR

SEQ ID NO: 202368 - protein, 99 aa, Glycine max
  Clone ID: PAT_MRT3847_24763C.1.pep
SILIHHRTQDARCLPAKQDNEEGAFHFPPPSVGSKIYSAPVQSLCDRLSMSFPVVPSSSGAPRPCSASIPLMLRRRRLSVIPLGLGSSSHEVPLVVLSK

SEQ ID NO: 202369 - protein, 203 aa, Glycine max
  Clone ID: PAT_MRT3847_24764C.1.pep
MEGEHDDSQKLSLFYESGIYYFDDSNAVFVDPVRVLNRSYHRFTVSPSTYYSRFFKSPTTPNSVSSTVSSSLRKRKRKPKEPPPLNERELIALQRHQEARPLLLAAHECLLKSTELLNVLKTLKSESRCSKKECEGGQQHSFVDLGRGSPQLEVTLSLRVSDADTHLPPNELEDSLSVQCCEQKVLPAFINLVAYDTKDDAGG

SEQ ID NO: 202370 - protein, 345 aa, Glycine max
  Clone ID: PAT_MRT3847_24765C.1.pep
ILNLQQSLVKANLAGYIKLVVPCNADAYESSLPSQGAFRPELTQIMTQLVQFLNSNGTPFIVNIYPFLSLYDNNDFPQDYAFFEGTTHPVTDGNNVYTNAFDGNYDTLVAALSKLGYDQMPIVIGEIGWPSDGAIGANITAAKVFNQGLISHVLSNKGTPLRPDAPPMDIYLFSLLDEGAKSILPGGFERHWGIFSFDGQAKYPLNLGLGNKELKNAKNVQYLPSRWCVASPSTDAQNVANHMRIACSVADCTTLDYGGSCNGIGEKGNISYAFNSYYQLQMQDSRSCNFDGLGVITFRDPSVGDCRFLVGVTDKGSDSSASQIRCQWWILLAFLVIQTISSFSL

SEQ ID NO: 202371 - protein, 119 aa, Glycine max
  unsure (1)..(119): unsure at all Xaa locations
  Clone ID: PAT_MRT3847_24766C.1.pep
VYSTSTDYEVNVVINALEGFKLFLINKSEITIRTDCEVIVANKXNTDKKSQKRWLLFQEYVYDNGIKINFEHIKGVNNVVVDIFSRFAGIQQDEALQSLLPKYKTQNEVRQSTITSTYK

SEQ ID NO: 202372 - protein, 89 aa, Glycine max
  Clone ID: PAT_MRT3847_24767C.1.pep
FKLVESSLFFLDRLLKDLLIPHVLSEPPLIQSLACDCSHSPKKGETRESSAPVHVTNRTSLGPEFCEPPDLDQDLHYVVRYIDPKNFQL

SEQ ID NO: 202373 - protein, 94 aa, Glycine max
  Clone ID: PAT_MRT3847_24768C.1.pep
SLYYSFSLYFLDKILIVWVRVNLCIPIMLVNYEELREVVDLIFLLVKLRMCVILEGFECSIISQSCKKTVFQLTVILCFRWVKVKLILLNSHDR

SEQ ID NO: 202374 - protein, 61 aa, Glycine max
  Clone ID: PAT_MRT3847_24769C.1.pep
GSSRPFLVNINSQKVFYSHKRLSNCAKRKQVSNPQGFSLRKQNFVPLREKRNQKVEITFGG

SEQ ID NO: 202375 - protein, 292 aa, Glycine max
  Clone ID: PAT_MRT3847_2476C.1.pep
QLFNGPFLCCCVNGSSCYCTIFSSISDICWGLSEKDSMVNPKVSTQPKICYRPIQPSDLDILEHIHCRLFPIRYESTFFHDVVNGRDIVSWGAVDSSRSDGQSDELIGFVTARIVLAKESEIVDMLGYDSAKSDQTLVYVLTLGVVEAYRSLGIASSLIREVIKYASSIPTCRAVYLHVISYNNPAINLYKKMSFKCVRRLQGFYLINGQHYDSFLFLYYVNGGQSPCSPLEFLTAIVSYMKSGFNSVAARLCKNGGRKISRRAKCKESHSLVSATPNKRNVAVECPGYECV

SEQ ID NO: 202376 - protein, 269 aa, Glycine max
  Clone ID: PAT_MRT3847_24770C.1.pep
MADIVKQLLAKPIQLADQVAKAAEEASSSFKQECLELKSKADKLAALLRLAARASSDLYERPTRRIIADTELVLDKALSLTLKCRANGLMKRVFSIIPTAAFRKMSSQLENSIGDVSWLLRVSTPAEDRADTEYLGLPPIAANEPILGLIWEQVAVLHTGSLDDRSDAAASLVSLARDNDRYGKSIIAARALLTLLKLIKKVEKENPANAMRVLGRDPESVELMIHAGVCSVFAKVLKEGPMKVQAVVAWAVSELAAKYPTCQDLFVSI

SEQ ID NO: 202377 - protein, 84 aa, Glycine max
  Clone ID: PAT_MRT3847_24771C.1.pep
GTHGKIDVLASMISLTSLWLHGNKFEGSVPDSIGDLVSLKDLDLNGNEFVGLIPSFVDQGATHVQSDLDIFCFSYCCDIIMCQF

SEQ ID NO: 202378 - protein, 59 aa, Glycine max
  unsure (1)..(59): unsure at all Xaa locations
  Clone ID: PAT_MRT3847_24772C.1.pep
TXXRSXXNALXVAXMXLVIALGHSPRSXXXHQXMNLCPXTLPCTSXSSXWQPIXGHXXC

SEQ ID NO: 202379 - protein, 47 aa, Glycine max
  Clone ID: PAT_MRT3847_24773C.1.pep
FMRVSSRRAYFLHIHWLLVSDFTFSCIKDNSQIEIVLPNIICRDCTM

SEQ ID NO: 202380 - protein, 157 aa, Glycine max
  Clone ID: PAT_MRT3847_24774C.1.pep
MNLDKLTDLSLGYLTNSCQALRTLKLCRNLFSDEAIAAFLEITGESLKELSLNNIKKVGHHTTISLARHAKNLHTLDLSWCRNLTDNELGFIVDSCFSLRLLKLFGCSLVTDVFLNGHSNPEIQILGLKMSPLLQNVKVPEPYQGPLRYSPVSVDLV

SEQ ID NO: 202381 - protein, 57 aa, Glycine max
  Clone ID: PAT_MRT3847_24775C.1.pep
ITIRGSCSMWREITRRTTPTPLPSMLPNLIVDTVPYITLAPLSPIHFLSLQYDHSYI

SEQ ID NO: 202382 - protein, 65 aa, Glycine max
  Clone ID: PAT_MRT3847_24776C.1.pep
TGLKFSSIFQEETLLSASIILRNCIFYTYPLYIMNMNTLIKENSLYIMASLKQKVKQATQGFPCL

SEQ ID NO: 202383 - protein, 36 aa, Glycine max
  Clone ID: PAT_MRT3847_24777C.1.pep
ARGSVRASYGGSVEVSEGELVVTAETSGESTVVSGG

SEQ ID NO: 202384 - protein, 264 aa, Glycine max
  Clone ID: PAT_MRT3847_24778C.1.pep
MLMHHHHKPELHIGKENPHLSSDDAATSTPQTHFSIQVSPSSPHPPPPNSPNTPFHHERFSNKRIIPIMTFPLFQTPFGAKFPTSKLLPRFRFLLFLPLPSLYLLFSNPSPLDFFSVIAFSAASSVSLNLALSFFTRLFPTKFSSSSSSSSPQPVVWSIGSNPKQVKNTNWGCWVQVYSNGDVYEGEFQKGKCWGSGVYHYHMHGRYEGGWVDGKYDGYGVETWARGSRYRGQYREGLRHGMGIYKFYCGDVYGGEWSNGQCHG

SEQ ID NO: 202385 - protein, 79 aa, Glycine max
  Clone ID: PAT_MRT3847_24779C.1.pep
QRTIRFFIMFSAQWDRGIYGDLTNILRHSTGIETIHVLYGSSYDLIDSIGNVLVLFNTIVNRYKLYTDHDIKSLINLDS

SEQ ID NO: 202386 - protein, 98 aa, Glycine max
  Clone ID: PAT_MRT3847_2477C.1.pep
MASSEPIPPGAEPESHLSSLIYEISNEVQGIMENMFKTVTEINQSSAVVEEEIEKCKGSALERKRALDEEKDYFQKAAYAVLDMLSEVNALYREELED

SEQ ID NO: 202387 - protein, 65 aa, Glycine max
  Clone ID: PAT_MRT3847_24780C.1.pep
KLAYRRNRRLLIRSDEWSDRTDPEGCVGEWESGDSGHACRSPIEVCRFRYRRDLMQIDQLRYRGH

SEQ ID NO: 202388 - protein, 56 aa, Glycine max
  Clone ID: PAT_MRT3847_24781C.1.pep
NSGPRHAQVRYGLVLSVNTACANQPRSLMLCVASPNNTVMTFTQLALQAASARARS

SEQ ID NO: 202389 - protein, 183 aa, Glycine max
  Clone ID: PAT_MRT3847_24782C.1.pep
MAPHGESFSRKSNMSKPQKLSSENLQRTVSDISFELTKEEIDDLKLPTISEVENAKCECCGMCEECTPEYIDRVREKFNGKWVCGLCAEAVKEELEKNGGKKEEAVSAHMSACVRFNKYGRAFPVLFQAQAMKEMLKKNTLDGRRAKSISPRDKGGAKKGGIARSSSCIPAITREINDIKIAN

SEQ ID NO: 202390 - protein, 56 aa, Glycine max
  Clone ID: PAT_MRT3847_24783C.1.pep
ACMPKRKRTLKAGSEGVESPKCRSVRECRELHEKLWRMKQMIPFKHSHFQTEEPVF

SEQ ID NO: 202391 - protein, 421 aa, Glycine max
  Clone ID: PAT_MRT3847_24784C.1.pep
MSNNIFDGQLLAEKLLKLNNSQQSIESLSHWCISHRKRAKEIVETWDKLFNASQKEQRISFLYLANDILQNSRRKGSEFVNEFWKVLPAALRHVYESGDEDGRKAVTRLVDIWEERKVFGSRGQGLKDDVMGKNPLPSASNGKSSNSIKIVKRDAHSVRIKLAVGGLPEKILTAFQPILDQHLNEKDALNNCSAAVREVGRVVEDVENTLAHGNQLESTLVNDLQEQEKKLKQYMEQLENGEAARASLLSQLKHALQEQESRQELVHTQLLVARGQIEKVVGIRKQLNQAAEATDPSQPTSVQSSVSYAPCQTTEDDNKKAAAAAVAAKLAASASSAQMLTSVLSSLVAEEAASLNGSLNSTGFSSVLPIFNPEKRPKLEKPTPAHDVSNYDMANSPFYATMQQPPVPNVPLTLPVGMQTV

SEQ ID NO: 202392 - protein, 106 aa, Glycine max
  Clone ID: PAT_MRT3847_24785C.1.pep
CRKDQQAETTTFRFENNMKDVGVGSMLEAPESPVEWPMQFKQQQTEIVELWRAYNVSLFHRTYFFLLFRGDPTDSIYMGVELRRLSFLKETFACGNQSMNDTHTSH

SEQ ID NO: 202393 - protein, 86 aa, Glycine max
  unsure (1)..(86): unsure at all Xaa locations
  Clone ID: PAT_MRT3847_24786C.1.pep
NRSGLAKNTVXGTILHHGLSVNFLTAGYYXARVDQKRTHRVEGMIXKAATGGMPATSHIQLAWAMKKNLRGRAESDIMTLCHKDCV

SEQ ID NO: 202394 - protein, 49 aa, Glycine max
  Clone ID: PAT_MRT3847_24787C.1.pep
FFILLTGTSLFLQLIYPTLIQTPLHKYLLPVHYTIHSTSYSIYTQPIHT

SEQ ID NO: 202395 - protein, 71 aa, Glycine max
  Clone ID: PAT_MRT3847_24788C.1.pep
FPVSHRRTRLPQPRTIKHAPTTTAAVDGSREPTLTQHPPKNTAKQHHMKRDGRTTQPHTTNRQGTTKSSYG

SEQ ID NO: 202396 - protein, 73 aa, Glycine max
  Clone ID: PAT_MRT3847_24789C.1.pep
IICLNVSILSARSNFHFIDSHTKSFSMHLNMHNDHQMITCESRAKSMYKMHVLFVLSDLISFLFFFMHRCTET

SEQ ID NO: 202397 - protein, 91 aa, Glycine max
  unsure (1)..(91): unsure at all Xaa locations
  Clone ID: PAT_MRT3847_2478C.1.pep
QVFSCRGYWXQGLTSKKGQERLAHFFFFSWQGXFKQALPFSFLLAFFNLPSGLQSPKKGSRNQSTFFFSRGSRLLKGEAFKLEQASAHLKS

SEQ ID NO: 202398 - protein, 103 aa, Glycine max
  Clone ID: PAT_MRT3847_24790C.1.pep
FFLSNMGLNYRNLFPGTPSNCLQDCSYDDKSSCCDPSNLLPPTPPIYSDNDLSQSPSKHIKAEYLIISFSIVATAFIALFCYAIYVKFFSPRNTSIIRRRRRT

SEQ ID NO: 202399 - protein, 207 aa, Glycine max
  Clone ID: PAT_MRT3847_24791C.1.pep
VAAPARVGLVAPIDVVVPPGNTGLDPSQTSFFQVLNIPTKINKGTVEIITPVELIMKGDKVGSSEAALLSKLAIRPFSYGLAVVSVYENGSVFSPEVLDLTEDDLVVKFAEGVCMVSSLSLAISYPSIAAAPHMFVNSYKNILAVAVATEYSFPEADKVKEYLKDPTVVAAPATKSGAAPAAASKVEDKKEEAADESDDDMGFSLFD

SEQ ID NO: 202400 - protein, 80 aa, Glycine max
  Clone ID: PAT_MRT3847_24792C.1.pep
WVVPLIAILKSQALLFVRGHVPGSNLHGAVPPLVIASNLCKVDPHDACFKSLHFPFLLAMICGFLHFTVVFRYFFGHSCV

SEQ ID NO: 202401 - protein, 202 aa, Glycine max
  Clone ID: PAT_MRT3847_24793C.1.pep
RNIRLREDDRRGTLFVNGIPQKYNKREALLAHFKKFGEVIDIYIPLNSERAFVQFSKREEAEAALKAPDAVMGNRFIKLWWANRDSIRKDSTTSGNGVIVTPRGQAPAFVPSHPVVTDRGKDIHQADASKTMYEVSSPTDQSKPVITDGPKVPPPLQKKLVNLESLKEELRKKQEMLDQKRNEFKRQLNKFEKQVNTGGAFL

SEQ ID NO: 202402 - protein, 61 aa, Glycine max
  unsure (1)..(61): unsure at all Xaa locations
  Clone ID: PAT_MRT3847_24794C.1.pep
PHENLTPHKSNRWVVNYRLYLYFLTLCDDLWLRLSQGWPKITKGLLHRFLVLKKKKKKXXX

SEQ ID NO: 202403 - protein, 65 aa, Glycine max
  Clone ID: PAT_MRT3847_24795C.1.pep
MIDYLRKTNKINIIGEDSKLFCPFCLQHNESLNHIFIHCNVIFIHCNVTSMVWNECYKWLLQTLR

SEQ ID NO: 202404 - protein, 180 aa, Glycine max
  Clone ID: PAT_MRT3847_24796C.1.pep
MGNYVSCTLAPPLMKNSKATRVIIPTGEVKQFKEIVKAAELMLEHPNYFLVNSRSLHIGRRFSALGADEELEFGNVYIFFPMRRVNSLVTAPDMAVLFLAANSAAKRLSGSKARVLPDNCGGKAWQQREEEEESSKDESLSVIPRLSLEGVESGFQYRLNYCRSRKPVLETINEEPVRLR

SEQ ID NO: 202405 - protein, 61 aa, Glycine max
  Clone ID: PAT_MRT3847_24797C.1.pep
PTYVQQEGVLKFLRISRIIFNIIGMKRVKYPKVMAYGRTVYNYKYRYKIEDARTIMILIYS

SEQ ID NO: 202406 - protein, 138 aa, Glycine max
  unsure (1)..(138): unsure at all Xaa locations
  Clone ID: PAT_MRT3847_24798C.1.pep
NVDHIIIILHALCHHHPNIVLMSCSSCAVMNIHAMEDFRSRGAETLKFLSNLDQIKLPGLHPSMSMDDLVSHIGHCISEQMGSDNPSLAGDSQYSRSILEEFSQYLFNDSQHATTSDEQRVMSRVNSLYCLLQXDPSS

SEQ ID NO: 202407 - protein, 137 aa, Glycine max
  Clone ID: PAT_MRT3847_24799C.1.pep
YYKRQRLTEKSDVYSFGVVLLEVLSGRQPLIRTVEKQKVSLVDWAKHRYAKGSLGEIVDPALKGQIATECIHKFGEVALSCLLEDGTQRPSMKDVVGMLEFVLQLKDTMDVAFGGDSRAFHEEQRWDSGLPFEASGY

SEQ ID NO: 202408 - protein, 75 aa, Glycine max
  Clone ID: PAT_MRT3847_2479C.1.pep
RCFPLEDSSDAGCDTGSFICKSCEGRADPHSVSELCSDLLEATHLHSTSEILFSPFKDCPQISIQSLTHNIQNFR

SEQ ID NO: 202409 - protein, 77 aa, Glycine max
  Clone ID: PAT_MRT3847_24800C.1.pep
TCLYLRGLILTYTPPYTFLFPKHPSLGEGRSIFSYNLNAPFIPHINLNSYIFNQNFTQCHHPKFNLNLYTTRKSHYI

SEQ ID NO: 202410 - protein, 117 aa, Glycine max
  Clone ID: PAT_MRT3847_24801C.1.pep
MEKDKSHTHSFLHSIVKHFKFGSPKERNNEADVHQMAAQEQKIFAYETLTAATKNFSAIHKLGEGGFGPVYKGKLNDGREIAVKKLSHTSNQGKKEFMNEAKLLARVQHRNVVNLVG

SEQ ID NO: 202411 - protein, 67 aa, Glycine max
  Clone ID: PAT_MRT3847_24802C.1.pep
GKGQKPLPSFYKFLFFPGRELFLSHDNNGEEGPYLHFTNKSWTHASTTRDREKNMPRWIVIVVVGVP

SEQ ID NO: 202412 - protein, 64 aa, Glycine max
  Clone ID: PAT_MRT3847_24803C.1.pep
FEKHFVLNLFHVFKSLYSEKQLIAFCFHFFLYKLQKTGNKMRQQFRCSPTGKSVLKNREAKHRK

SEQ ID NO: 202413 - protein, 51 aa, Glycine max
  Clone ID: PAT_MRT3847_24804C.1.pep
IYNSSVSAFQRCSWDSITHTPHFTVVIINSLHSASKRQHLVPPNSRRCEAR

SEQ ID NO: 202414 - protein, 113 aa, Glycine max
  Clone ID: PAT_MRT3847_24805C.1.pep
MCQDLSSRNPNQNMNLLVPAKGRPSAGTLIVCPTSVLRQWAEELHNKVTCKAKLSVLVYHGSNRTKDPYELAKYDVVLTTYSIVSMEVPKQPFVDKDDEEKGTYDDHAISSKK

SEQ ID NO: 202415 - protein, 88 aa, Glycine max
  Clone ID: PAT_MRT3847_24806C.1.pep
DPEVAKFREQGLKFLPEMEFLFKGTIATGFAAYAPSEDSRQYEGFNTRTEETNDNIDDNTDMEVNEPEIDTTTQNTSSAKENGQRKRG

SEQ ID NO: 202416 - protein, 61 aa, Glycine max
  Clone ID: PAT_MRT3847_24807C.1.pep
ETLTLSSENSRSSKRSPVKCSDSYVHWHCSYVSNVWLLKLSTITHFHDGSLTIPDLHEARQ

SEQ ID NO: 202417 - protein, 170 aa, Glycine max
  Clone ID: PAT_MRT3847_24808C.1.pep
LPVYGFLKRLFRDLFAREGYEFDYVFDWTILKYQQAQKNRVQSRISTVPGTSSSPAMPMDVDNHRGINAYSGDVTAERIKSGNVTGSGVKIQFKSPVGKNLGSEKPLDKNIFGEANIPSTSYSIAGTSRRNTLKPALSTEAPNPGHGQGSNKIGPSSSWISSVQRISSAK

SEQ ID NO: 202418 - protein, 97 aa, Glycine max
  unsure (1)..(97): unsure at all Xaa locations
  Clone ID: PAT_MRT3847_24809C.1.pep
KPXXXLKNXFPNPTPFHXLXFSKTXPNXXXLXIKTTIHTKXTLYSXPXQIPIXXNQIINXXXHXPPPKKILPXTKKINLILKSHSLQFXIXTQINPP

SEQ ID NO: 202419 - protein, 50 aa, Glycine max
  unsure (1)..(50): unsure at all Xaa locations
  Clone ID: PAT_MRT3847_2480C.1.pep
KKKKKKKFFXXYKKKKKKKKKKKKKKKKKKKKKRGRPFWGSLFKFPFFAP

SEQ ID NO: 202420 - protein, 63 aa, Glycine max
  Clone ID: PAT_MRT3847_24810C.1.pep
TARRLFLIVFHIMLQIRIAPSLSKLLVQGVEQLEAELKSCFTFLLRKFKLLNIGFDKHVLLLL

SEQ ID NO: 202421 - protein, 119 aa, Glycine max
  unsure (1)..(119): unsure at all Xaa locations
  Clone ID: PAT_MRT3847_24811C.1.pep
VFSRVAFSPPLLFLLSFFGASASIPSGSVLFAFLSGLLSPGAGIFSLGSWVVGLLGGAGGSSCPCVARSSSFRLCSSLVSAVLCFLSLGSAVIPQMASRLENIWGLLMLFESVTXVLAE

SEQ ID NO: 202422 - protein, 52 aa, Glycine max
  Clone ID: PAT_MRT3847_24812C.1.pep
WLECSSYLAYQYNIKTLLLNITSIYGQALSHPLTNWRLPFVLYIRLCIGELI

SEQ ID NO: 202423 - protein, 78 aa, Glycine max
  Clone ID: PAT_MRT3847_24813C.1.pep
FVLIKNLRSNEFSTRELVFFCVCIHGDCYAKNISNLLKSGWTHKKFVFALVYTTTLYVHNLLESALKMFLKVQTKISR

SEQ ID NO: 202424 - protein, 73 aa, Glycine max
  Clone ID: PAT_MRT3847_24814C.1.pep
SSQSSQPSVATWWKTTEKYDHLNRKNKKAASSLSLSLGDQFLYQGFLLGKLLTRLNLFKLAFKGVPMNAINLF

SEQ ID NO: 202425 - protein, 147 aa, Glycine max
  unsure (1)..(147): unsure at all Xaa locations
  Clone ID: PAT_MRT3847_24815C.1.pep
XXXXFXXXXVLXXXGXXXXXXXXXXXXLXXXXXXGXXXSGXWXXGVXVXVMXXXXXCXXXXXXXXVCXXWXXXXXXXLXXVXXGXXXXXXXWXXXXXXXXXWXXXXXXXXXXCXXWFXXXXXXVXXIFXWVXXWXGXWGXXGXXXXX

SEQ ID NO: 202426 - protein, 269 aa, Glycine max
  unsure (1)..(269): unsure at all Xaa locations
  Clone ID: PAT_MRT3847_24816C.1.pep
DAGRIFQSGPTRPEEAVTNGQTDEEEKECDDCRVDYDDDEEEEENEEVSFDRDSFSRMLRRVSLSEARFYARISHLGNLAYCIPKIKPGKLFKHYGLRFVTSSIEKKELAMAAEKNQISQKEETNEKDVDETKEEKNNGGYMISASAVYEIAASAASYLHAQTRSILSLTSSDAAEGEGSIEAINESFNGDKIRNTEEANLKATTDSVTAVVAANEQVKQAFADDLNSTSSSPCEWFVCDDDQTSTRYFVIQGSESFASWQAXLLFEPV

SEQ ID NO: 202427 - protein, 56 aa, Glycine max
  Clone ID: PAT_MRT3847_24817C.1.pep
DSLVTPSPIPTVWSMYSTTFSTKAATTNVELIEFIDDCHEESNGAELAPSAARRIR

SEQ ID NO: 202428 - protein, 59 aa, Glycine max
  unsure (1)..(59): unsure at all Xaa locations
  Clone ID: PAT_MRT3847_24818C.1.pep
SRGHLNLRLFYCKKKGVGVFKFENLTLGIPPEKISKQGAIPPLAQIRGIKPXPGRGKVF

SEQ ID NO: 202429 - protein, 45 aa, Glycine max
  Clone ID: PAT_MRT3847_24819C.1.pep
LPLAAICGMCRALLFPNYVYILSVFFPLNVRCEFTLREGELSSFD

SEQ ID NO: 202430 - protein, 87 aa, Glycine max
  Clone ID: PAT_MRT3847_2481C.1.pep
NSAVSVVSRAPLWSRTKDLTRYGPYHWLPEEACLVEVFHYGDPLHFVDESEQFHGLASQRLGKENHVAGCLDFLSISLRMPGGRGGT

SEQ ID NO: 202431 - protein, 41 aa, Glycine max
  Clone ID: PAT_MRT3847_24820C.1.pep
KILSHDFIQVNKLKNLFTSFGGFIKGRSIIFFSNEIDEIWF

SEQ ID NO: 202432 - protein, 96 aa, Glycine max
  unsure (1)..(96): unsure at all Xaa locations
  Clone ID: PAT_MRT3847_24821C.1.pep
LRSPXXXXPRTTGTNKGETPTEPQXEQPREKTPXAXTTTDERTGGTEQEGQRPHTGGSQKKARPRRPRDKEKPXKEAHNRDEERPDRAEEEEPHEE

SEQ ID NO: 202433 - protein, 60 aa, Glycine max
  unsure (1)..(60): unsure at all Xaa locations
  Clone ID: PAT_MRT3847_24822C.1.pep
SLKAXXPERSGCLFHRPPAPTPTYHSTGGKPAHPILKRLQLTNFRNNHPSTFNHSIDQSK

SEQ ID NO: 202434 - protein, 76 aa, Glycine max
  Clone ID: PAT_MRT3847_24823C.1.pep
PRLNSPDPSGPFGKNKGKKFGSGAKGAPIFFQKQYKKAPPLQKRGAIAFPLFNQVMEKRAPPPKGDIPKGGPPNHF

SEQ ID NO: 202435 - protein, 38 aa, Glycine max
  Clone ID: PAT_MRT3847_24824C.1.pep
YITTDARRFFSRHFSSFIRCFLYIVGPFHGEDTKNGSS

SEQ ID NO: 202436 - protein, 407 aa, Glycine max
  unsure (1)..(407): unsure at all Xaa locations
  Clone ID: PAT_MRT3847_24825C.1.pep
MAKPRSWTQIWSSIVGVCVLNFVLNFKIVAVADDTGSNSIVSEGDCKNTNYQIFLPPPYQNISSTICKPVWHSYELRYTKTGDTTTIILSAPYTVGWVGIGFSRDGMMAGSSAMVGWINKHGHAKVKQFYLRGREXSEVIIDKGELPLNTVPAAVATNGAEIYIAFQLQTTIPFRKQPILLAFSTKYPLNHHLSKHEDKTAIIFDFSSGSTGPVSNELIHMRTNHGILGIIGWGLILPVGAIIARYFRHKDPLWFYLHSVIQFVGFSFGLGTVLLGLQLYRNMHVHIPAHRGIGIFVLVLSILQILAFFLRPDKDSKYRNIWNLYHSWFGRMALFFAALNIVLGMRAAGAGNDWKAGYGFLLSIVLVAVIVLEVLAYLKRSEKRSLPQTFQMDPVGDANFPTNLAKG

SEQ ID NO: 202437 - protein, 65 aa, Glycine max
  Clone ID: PAT_MRT3847_24826C.1.pep
MKSYIISARKKKKKKKKKKKKKKKKKKKKKKKKKKKKKKKKKKKKKKKSHPAKKKQSFKMQKTWR

SEQ ID NO: 202438 - protein, 77 aa, Glycine max
  Clone ID: PAT_MRT3847_24827C.1.pep
YRRLSSSSSISTSFAGPSAPFLSYIVNKHKSMIANTLFVTNPFLIIKNTTKGNTCFEKGCTRSISQASNLLRAHPTN

SEQ ID NO: 202439 - protein, 43 aa, Glycine max
  Clone ID: PAT_MRT3847_24828C.1.pep
DLTPLFELMYLTQQYRFNISLLYSHGIQCPFDVQLEVQFDCAP

SEQ ID NO: 202440 - protein, 40 aa, Glycine max
  unsure (1)..(40): unsure at all Xaa locations
  Clone ID: PAT_MRT3847_24829C.1.pep
RLNGHTCSYALYCHRCGDLILRHFILXCNEYWINILSRLD

SEQ ID NO: 202441 - protein, 126 aa, Glycine max
  unsure (1)..(126): unsure at all Xaa locations
  Clone ID: PAT_MRT3847_2482C.1.pep
KNXXXXXXXKKKKXRKKKRHKKKKKSKKXKKKKKGKKKKXNRKXXNKKKKKINQGXKRKIKXXKKKEDGLKKKKKENKETRKXKGVSKNQKGLKKQERPXXXXEKNKKKXXXKXKKKRKRKRXKKT

SEQ ID NO: 202442 - protein, 50 aa, Glycine max
  Clone ID: PAT_MRT3847_24830C.1.pep
QGIFGWTGGKNGRLCCWLSDDSSESNQSWISSTLTMKAERTHKKNRHHPY

SEQ ID NO: 202443 - protein, 192 aa, Glycine max
  unsure (1)..(192): unsure at all Xaa locations
  Clone ID: PAT_MRT3847_24831C.1.pep
MMSQEAIPAPSNNNNLRDSTVQLHEPNSNPNPNPNSVKRKRSLPGTPYPNAEVIALSPKSLMATNRFICEVCHTGFQRDQNLQLHRRGHNLPWKLRQRNREDVANKKVYVCPEKTCVHHDPCRALWDLTGIKEHFMXKHGAKKWXCEKCSKKHAVQSDWIAHSKMCRTTQYRCDCGTIFFMKDSFATHMAFV

SEQ ID NO: 202444 - protein, 48 aa, Glycine max
  Clone ID: PAT_MRT3847_24832C.1.pep
NRPKFFFWVFKKKTKKKKKYNKKKKKKKKKKKPKKKKKKKGGHRHSEL

SEQ ID NO: 202445 - protein, 83 aa, Glycine max
  unsure (1)..(83): unsure at all Xaa locations
  Clone ID: PAT_MRT3847_24833C.1.pep
FYCSFLSFFWVLLFFFNSDARFLLDHFASLTLYLTASPXAFXFWLXSVGSLDGRHYAWDMPYAFIRSLAWAATALLTAGYAAW

SEQ ID NO: 202446 - protein, 371 aa, Glycine max
  Clone ID: PAT_MRT3847_24834C.1.pep
MNCLRNLSRFSVLPFETPVTRHRKNLPLSLGFVNNSRQYPTMALKAASGSIPSADTSSADKEEEKSETYSHNMTEAMGAVLTYRHELGMNYNFIRPDLIVGSCLQTPEDVDKLRRIGVKTIFCLQQDSDLEYFGVDINAIREYAKTCNDIQHLRAEIRDFDAFDLRRRLPAVVSKLYKAINSNGGVTYIHCTAGLGRAPAVALAYMFWVLGYKLNEAHTLLQSKRSCFPKLDAIKSATADILTGLSKKSVTLSWEDKNCSTVEISGLDIGWGQRIPLNFDDKEGLWFLKRELPEGLYEYKYIVDGEWTCNSDELITSPNKDGHVNNFIQVLDDTSSVRASLRKRLTADDPDLTTDEQLRIKEFLEACPDED

SEQ ID NO: 202447 - protein, 309 aa, Glycine max
  unsure (1)..(309): unsure at all Xaa locations
  Clone ID: PAT_MRT3847_24835C.1.pep
MNCLQNLSRFSVLPFDTLVTRHRKNLPLSLGFVNNSHQNLTMALKAASGSIPSADTSSADKEEEKSETYSHSMTEAMGAGKLXWNISNYGNKPSFCLVRSILTFLVLTYRHELGMNYNFIRPDLIVGSCLQTPEDVDKLCRIGVKTIFCLQQDPDLEYFGVDINAIREYAKTCNDIQHLRAEISRDFDAFDLRRRLPVVVSKLYKAINSNGGVTYIHCTAGLGRAPAVALAYMFWVLGYKLNEAHTLLQSKRSCFPKLDAIKSATADILTGLSKKSVTLSWEGSNCSTVEISGLDIGWGQTKSEKIIYL

SEQ ID NO: 202448 - protein, 45 aa, Glycine max
  Clone ID: PAT_MRT3847_24836C.1.pep
NSARAKRFNKEQKYKHLRVQNFPSRNPIKLVNSALLGAYTFDRIP

SEQ ID NO: 202449 - protein, 75 aa, Glycine max
  Clone ID: PAT_MRT3847_24837C.1.pep
YEYKYIVDGKWTCNTDELVTSPNKDGHVNNFIQVLDDTNRVRASLRERLTGDDPDLTTDERLRIKEFLEACPDED

SEQ ID NO: 202450 - protein, 65 aa, Glycine max
  Clone ID: PAT_MRT3847_24838C.1.pep
WKKKKLLYKGVKDLMLGDEGKGIHPRIGKLKDACADALKDLGPLQEHFPHLALNWRTEFQDGHPV

SEQ ID NO: 202451 - protein, 81 aa, Glycine max
  unsure (1)..(81): unsure at all Xaa locations
  Clone ID: PAT_MRT3847_24839C.1.pep
HLIERTCADLKDEIAGLVDSTCDIEDAQKDLRNRGKGLAFKKSSLTAYQGLLALAHCPTKLDVIELXCETDFAARIDILQP

SEQ ID NO: 202452 - protein, 47 aa, Glycine max
  unsure (1)..(47): unsure at all Xaa locations
  Clone ID: PAT_MRT3847_2483C.1.pep
XFRXPFXSMFHYXSIXXXXLXFXXHFXXXXVYFSRVEFXVXLXVRLX

SEQ ID NO: 202453 - protein, 58 aa, Glycine max
  Clone ID: PAT_MRT3847_24840C.1.pep
SQYSLIYEGFGYMIVSNVSLTTHLLFRAYTGSNTYLLKQTDQIKSNQGNAWSHNSTAH

SEQ ID NO: 202454 - protein, 57 aa, Glycine max
  Clone ID: PAT_MRT3847_24841C.1.pep
QGKYKKPFLFKLPIYLGGVPYFQQIFVNSKHFNLSSLLRDHFNIPMTINFILFWEKS

SEQ ID NO: 202455 - protein, 84 aa, Glycine max
  Clone ID: PAT_MRT3847_24842C.1.pep
QPPHSLPPSRATDHHIHLLPNMAHVHVRPYRYPHYQIKEIEDHVDSMLQQGLIQPSTSPFSSPVLYMKKNDGSWRFCGDYHALN

SEQ ID NO: 202456 - protein, 192 aa, Glycine max
  Clone ID: PAT_MRT3847_24843C.1.pep
MESKPGQTIKLLCSYGGKILPRATDGELRYAGGHTRVLTVARSISFSELMVKLSEFCGSSVILRCQLPKGDLETLISITNDEDLASIIEEYDRASLKLAHPLKIKAVLSPPKSTKKTSPVPSSASSSATHSPSGSPHTSTESLPYAAFHRIGRHNRPPVVYAIGAAKACCYTQFDGSPRFLYRGPHCNYYCH

SEQ ID NO: 202457 - protein, 87 aa, Glycine max
  Clone ID: PAT_MRT3847_24844C.1.pep
LQLSLFFFILVFSLPSSPGSFPLFLILVFSLSSLGSFTLFLCFQFIFSVFFFKLYSIFLILLCFQFLVSVFNSSSPFSLHYRYFFFF

SEQ ID NO: 202458 - protein, 81 aa, Glycine max
  Clone ID: PAT_MRT3847_24845C.1.pep
SLNYRHVLPPFPIPSQVLIKLKTPSPAQALTLPWQKWARPLPDLAHSMLKNYPLSIDKVHAAKHFIPQLLKFSLFMDVLTL

SEQ ID NO: 202459 - protein, 274 aa, Glycine max
  Clone ID: PAT_MRT3847_24846C.1.pep
MLLSTSNLQFSRWTFFKHLTPRKFKLAPPLCQHKSVATLSHFGILTSRQKDQIHLYVETLLQWNKRMNLTAVREVNEVMERHVEDSLAILPPLSDCYRSHCSASCDKLSLVDVGTGAGLPGVVLAIARPEWDVTLMESMNKRCVFLEHVVGVIGSSNIKIVRGRAESLGQNPCFREQFDIAVARAVAEMRILAEYCLPLVRVGGLFIAAKGHDPEDEIKKAESAIQKVGASLLQVCSVESQSPYGQRTAVVCSKDRPTPMKYPRDPGTPAKEPL

SEQ ID NO: 202460 - protein, 69 aa, Glycine max
  Clone ID: PAT_MRT3847_24847C.1.pep
AKTIKMFNLLINLRLQRITHKGTKHLYGFSFKKIKIQNFGGSSWEFFELKFIFPFNKGATIIEFLSSKI

SEQ ID NO: 202461 - protein, 161 aa, Glycine max
  unsure (1)..(161): unsure at all Xaa locations
  Clone ID: PAT_MRT3847_24848C.1.pep
GSRVPQGPLPLPLALPPSRPVALFKKKAAPPKKAAAAAPAHDEPAQWYGPDRSFFGGGVPAPTSPPKYTPXTRGRGGPPPPTPRPPPPSPPPPPPPPPPPPLPRPPPPPPPPPPPPPPPPPPPPPPPPPPPRPPPPPSPPPPPPPSPTPPPPPPPPPPPPP

SEQ ID NO: 202462 - protein, 84 aa, Glycine max
  unsure (1)..(84): unsure at all Xaa locations
  Clone ID: PAT_MRT3847_24849C.1.pep
LASAHASGTRGAFIKVKTSSIRWMEREILSLRTLDHPHRMNLEGILTSQLSNSIHLGXGYMEHDLAGLVGSGDINATISHVPGE

SEQ ID NO: 202463 - protein, 319 aa, Glycine max
  unsure (1)..(319): unsure at all Xaa locations
  Clone ID: PAT_MRT3847_2484C.1.pep
MDKENTNGPLHFDLNTGAKIPSVGLGTWKAPPGVVGDAVIAAVKAGYRHIDCARIYDNEKEVGEALKTLFSTGVVQRSEMFITSKLWISDCAPEDVSKALTRTLADMKLDYIDLYLMHWPFRTKLGSRGWNPENMAPLCLPETWNAMEGLFASGQARAIGVSNFSTKKLQDLLGYAKIPPAVNQVECHPVWQQPALHNLCKSTGVHLTAYCPLGSPGSWVKGQVLKEPLLKEIAEKLHKSPAQVALRWGXLQSGHSVLPKSVNESRIKENLSLFDWCIPPELLSKLSQIHQQRLLRNESAVHETCSPYKNLEELWDGEI

SEQ ID NO: 202464 - protein, 22 aa, Glycine max
  Clone ID: PAT_MRT3847_24850C.1.pep
CLKSKPGHFRKPKRTRPPGREF

SEQ ID NO: 202465 - protein, 64 aa, Glycine max
  Clone ID: PAT_MRT3847_24851C.1.pep
HSRHPHARKLGLGLEAMILIIIKKRRSITAGVPATEFIYQGHGPIDDGSMKYYYNQNKPLYKKQ

SEQ ID NO: 202466 - protein, 219 aa, Glycine max
  Clone ID: PAT_MRT3847_24852C.1.pep
MKLSCNGCRILRKGCGEDCAIRPCLEWINTPQAQANATLFLAKFYGRAGLVNLIDSAPQHNGPAVFKSLLYEACGRIANPTFGSVGLFWTGEWAQCQAAVDAVLAGSQIKVVGASDSQGIATHGDEHVAQILGIRHVSKDAEMDHVKGRAKKIKRSRTVIKPKPQVSSIDSAAMLKLTWSREPGRSEGDSEETVEAMLVSQNKPSRNGGVEMDLDLTLG

SEQ ID NO: 202467 - protein, 44 aa, Glycine max
  Clone ID: PAT_MRT3847_24853C.1.pep
IKLYQNVIIMNALAHARLHMLTLYQKKAINLRVILDKKFNAILP

SEQ ID NO: 202468 - protein, 63 aa, Glycine max
  Clone ID: PAT_MRT3847_24854C.1.pep
KRYKGAFFYKSPKKKGFLKKNKIWGIFFFFRGFFRELVSRPSHKGGLYLGGGPKPTFWEGFGF

SEQ ID NO: 202469 - protein, 44 aa, Glycine max
  unsure (1)..(44): unsure at all Xaa locations
  Clone ID: PAT_MRT3847_24855C.1.pep
MSCCGCKCGCGSACKCGNCCRCCXMYPDLSDSESTTSETLGMGV

SEQ ID NO: 202470 - protein, 48 aa, Glycine max
  Clone ID: PAT_MRT3847_24856C.1.pep
YGCEKTTEGILEMYKEAGLFDPVARPVKVTRAYDKRYLPSRTCLAHSY

SEQ ID NO: 202471 - protein, 306 aa, Glycine max
  Clone ID: PAT_MRT3847_24857C.1.pep
MDLLSISPSHPLPSSIRTLSSNPKPPISSSFFFIPKPHSRFSKTPPRCVFTPASPIPSKNTNFGSQFRNPTSLTFELSSPQTPSTAARGAEGDVMGLLLRERIVFLGSSIDDFVADAIMSQMLLLDAQDPTKDIRLFINSTGGSLSATMAIYDAVQLVRADVSTVALGIAASTASVILGGGTKGKRFAMPNTRIMIHQPLGGASGQAIDVEIQAKEVMHNKNNITRIISSFTGRSFEQVQKDIDRDKYMSPIEAVEYGIIDGVIDRDSIIPLMPVPERVKSTLNYEEISKDPRKFLTPDIPDDEIY

SEQ ID NO: 202472 - protein, 161 aa, Glycine max
  Clone ID: PAT_MRT3847_24858C.1.pep
MDLLSISPSHPLPSSIRTLSSNPKSPISSSFFTPKPHSRFSKPSKTPARCVFTASPIPSKIPNFGSQSRNPGLTFELSAPQTPSTAARGAEGDVMGLLLRERIVFLGSSIDDFVADAIMSQLLLLDALDPTKDIRLFINSTGGSLSATMAIYDAVQLVRAD

SEQ ID NO: 202473 - protein, 85 aa, Glycine max
  unsure (1)..(85): unsure at all Xaa locations
  Clone ID: PAT_MRT3847_24859C.1.pep
FNDLLIRYNYEKVLFHARARRMLIQSLKNLASLCVXYGNDNLNTVHEYVKPYFINPKQKSFLSGDNITLTDELDKTCATLQIQKS

SEQ ID NO: 202474 - protein, 75 aa, Glycine max
  unsure (1)..(75): unsure at all Xaa locations
  Clone ID: PAT_MRT3847_2485C.1.pep
KCSLRGLPFLSRNSSXFKVVASGGQKIKTDKPYGINGGMALREGVDASGKKRKGKGVYQFVDKYGANVDGYSPIY

SEQ ID NO: 202475 - protein, 161 aa, Glycine max
  Clone ID: PAT_MRT3847_24860C.1.pep
VIVCRRDRRRGLVGRVAIDCRESGRRLLPRKHEQLLARRLGRNHALLEKILSQLALVPSLQGSGAASLKVRLRLARGTCAPGSSRVGILEDGLADLFQRLRVAHLDALLLEERKGLLEGPVFVHGLVFAKQFRVGAEAHGHGGPYEGVRELHVGVGDASGK

SEQ ID NO: 202476 - protein, 41 aa, Glycine max
  Clone ID: PAT_MRT3847_24861C.1.pep
PYLTTQGRADLTPTAHVNYLSTLENGTRVHELGGPEVVKWE

SEQ ID NO: 202477 - protein, 86 aa, Glycine max
  Clone ID: PAT_MRT3847_24862C.1.pep
YSVFSLFKFQVGIRTLNFKGSALAAVHHCLSPLSCQFDQCDHTGWGVISRLACPQIHVAFHHHHYTCFFPTRESHIPFLCQPLAST

SEQ ID NO: 202478 - protein, 78 aa, Glycine max
  Clone ID: PAT_MRT3847_24863C.1.pep
PRVRKKKKKKKKKKKKKKKKKKKKKKKKKKKKKKKKKKKKKNKKKKKKKKKKGAPLLKIQILQPRESKELFFFWGPQI

SEQ ID NO: 202479 - protein, 92 aa, Glycine max
  Clone ID: PAT_MRT3847_24864C.1.pep
STAQKGECGTDPTRQQFEVEDLGLVKRCNALRLVIISFESSLSHILPIQHSHPSIHTYTHLIAYHFSHGVLAHPQGSSSTCSMTYRFLAWLV

SEQ ID NO: 202480 - protein, 61 aa, Glycine max
  Clone ID: PAT_MRT3847_24865C.1.pep
IFSYFPDFVGKEVIAELKNDLSIKRTLQSVDQFLIMKLYSTSVANHEQYPHMLCVKNCLIR

SEQ ID NO: 202481 - protein, 150 aa, Glycine max
  Clone ID: PAT_MRT3847_24866C.1.pep
DESATPTTRARNPKGKGNKNTSEHPPTAKETGRRPGKGTNTHPPATMPEQSKEAGGPATPGEETNEKADGTAGPQAEHKKENGKRAPKRKHNRGKTGDGGNEAPGTKKTNNGKGGAEATKAGRRAPDKAPTEPGQSGKRSAELTTTAEVQ

SEQ ID NO: 202482 - protein, 125 aa, Glycine max
  unsure (1)..(125): unsure at all Xaa locations
  Clone ID: PAT_MRT3847_24867C.1.pep
LNSRPERPHALIEMYYDLVSGGTENHPVGESLKNKETDGSRVEKVLXAVHIASNKNTVPGDMSAMLPVLIXTGTPALTPIGSVEEDFVKVAXLLDASVQLAVKIKGQSTRTKLXDFLTAIQSSST

SEQ ID NO: 202483 - protein, 55 aa, Glycine max
  Clone ID: PAT_MRT3847_24868C.1.pep
IYVKSSPRKGLIYDNQGIQTLLGMKNMQILAFPVIECHLLDSVSLLGLTSFYGKP

SEQ ID NO: 202484 - protein, 54 aa, Glycine max
  Clone ID: PAT_MRT3847_24869C.1.pep
FSMTPLLTPMLFLLSKLTLFIHNSIHWLFSLPNLLYLSFTDYSISSFLPTLMLP

SEQ ID NO: 202485 - protein, 98 aa, Glycine max
  Clone ID: PAT_MRT3847_2486C.1.pep
KKKNKKKKKKKKKKEKKKKKKKKKKKKKKKKKKKKKKKKKKKKKKKKKKKKKKKKKKKRGGPPLLLLLPPGFFWGPVLWGGPAFLYWGDFESWGQTGI

SEQ ID NO: 202486 - protein, 106 aa, Glycine max
  Clone ID: PAT_MRT3847_24870C.1.pep
DFQGIMVAQRGRCPYLHFITVGGCCCDAVKSCNTCIYQIEADDPQNTLSSFFLSALIIGNSRSYRQKGHERFVLSRILNFRTLGLLKSSLDVNDFRLWLIYGIFIG

SEQ ID NO: 202487 - protein, 137 aa, Glycine max
  unsure (1)..(137): unsure at all Xaa locations
  Clone ID: PAT_MRT3847_24871C.1.pep
SEKCVKRRVGGHLYGFPINGRLDLYLGGGIPVLTAVLTGVKPFGFRISLAINNLNRHNSLKSFGGTVGIGTVLKLVPVVLTFKPVNCLLPDRPVRIVFTPLLLRSELVILFRTRMARLYSLNSCALASNXPGFNDVT

SEQ ID NO: 202488 - protein, 39 aa, Glycine max
  Clone ID: PAT_MRT3847_24872C.1.pep
CPKHIENHDMLTQAFTHLLLTTSNTNQHFNAFQTHPNHL

SEQ ID NO: 202489 - protein, 83 aa, Glycine max
  unsure (1)..(83): unsure at all Xaa locations
  Clone ID: PAT_MRT3847_24873C.1.pep
MLLFIVEWSGEVRNISYSPDSKSVSVVYRVTLYGTDAEIFMVLLXVDDXXYGDPVQKAEAIAFRRACARFGLGLHLYHQEDAS

SEQ ID NO: 202490 - protein, 42 aa, Glycine max
  Clone ID: PAT_MRT3847_24874C.1.pep
TYVDARSRRRAHIHARARTRMRASAYRHIDVCVHAYVNTCVY

SEQ ID NO: 202491 - protein, 51 aa, Glycine max
  Clone ID: PAT_MRT3847_24875C.1.pep
RRLMFIFHLLIELGEVEKRFYFWTICYEKRVFFWLLSPPKCLVKLVRPVLF

SEQ ID NO: 202492 - protein, 107 aa, Glycine max
  Clone ID: PAT_MRT3847_24876C.1.pep
CSQGNKVLIDTFSGATNFVPPAAFPEDFSPFPAEFPEGIISLSPRPLVPAPLESSTFFPGIPSPGFPGFDSPLGQHFLGFLGFSTRKGNFPAFVPAGVSFFIMVKSF

SEQ ID NO: 202493 - protein, 96 aa, Glycine max
  unsure (1)..(96): unsure at all Xaa locations
  Clone ID: PAT_MRT3847_24877C.1.pep
MCRLRIGQSESRRYPMEHYNRLSGLDMPHKYARTTASTDNTELREMAPWLRAXKLAGKPDMILERRGSRGQTRSSNPDDHEELLENERNCREDPRS

SEQ ID NO: 202494 - protein, 115 aa, Glycine max
  unsure (1)..(115): unsure at all Xaa locations
  Clone ID: PAT_MRT3847_24878C.1.pep
RFAISTDFFHTAGATLASEKKLSNPMRGIKVLKLDLNISDEESGDRLTRAAKEPEXLMAKRTQISKARDTDRSFGIRRNEKIACYVTDRGDMAMQLYKNDSNAKEYELIRKNYND

SEQ ID NO: 202495 - protein, 84 aa, Glycine max
  Clone ID: PAT_MRT3847_24879C.1.pep
SHFIWLQDRPTKKPNSANSSMNIFASLFLKNVEVEFPKEYRFHFLWLQDRPNRKPNNSNSYMNISASLFLENVELEFPEGSSRV

SEQ ID NO: 202496 - protein, 79 aa, Glycine max
  unsure (1)..(79): unsure at all Xaa locations
  Clone ID: PAT_MRT3847_2487C.1.pep
MMGSRGLFGWSPPHIQPLTPVSEVSEPPESPSPYLDLGAETSATQSMEVEEEMEEADEIEPPXDAVPFXRLFACADHLD

SEQ ID NO: 202497 - protein, 39 aa, Glycine max
  Clone ID: PAT_MRT3847_24880C.1.pep
STRPNASERTTKGGVRRSTLLCTGHPICCSNHSLTLDLT

SEQ ID NO: 202498 - protein, 75 aa, Glycine max
  Clone ID: PAT_MRT3847_24881C.1.pep
YFYHHLLILALTILAALQAVHDVLRSSRIHAHIGLINLLATIPLIQGTSHPRSVARISSSIRLQCADRRRIHYCP

SEQ ID NO: 202499 - protein, 36 aa, Glycine max
  Clone ID: PAT_MRT3847_24882C.1.pep
QSWGCYGGFMILSQVYLSLLYFSFSQSFKVSVPFKR

SEQ ID NO: 202500 - protein, 108 aa, Glycine max
  unsure (1)..(108): unsure at all Xaa locations
  Clone ID: PAT_MRT3847_24883C.1.pep
XXEXXKQSRXERKSRKAXXKRGPKPXTGXXRXTXKRTKXXXXXNXKPXXXKRPXXETXXXXGEAKXEDXSXQXQTQXXQQXRXPXXGXXTAKQEEXXXAAAQXEEEGE

SEQ ID NO: 202501 - protein, 86 aa, Glycine max
  Clone ID: PAT_MRT3847_24884C.1.pep
CFLCSGEEPIFHMRGGMMFYVTVTVFATVAPGVIKMGTTGTSDIVVFSGLKLGFGPRRSGTSGPGGRKTPTLLTPGHRQILPTGGA

SEQ ID NO: 202502 - protein, 92 aa, Glycine max
  Clone ID: PAT_MRT3847_24885C.1.pep
YIYHYNTSIKMETISQESGMIKGVEVLFFEEAEIQKMRGNTPIFAAMGPLSVLYFKDYNRFVLRLNDWRYPLLRRLNILALTRTLFSPVPTV

SEQ ID NO: 202503 - protein, 93 aa, Glycine max
  unsure (1)..(93): unsure at all Xaa locations
  Clone ID: PAT_MRT3847_24886C.1.pep
FKPPQLSVLPPHPRHHQTCFFSSNLFFSSTGSMFTSSPAAHVSDRSIYSTSRATATCVRSQRFQPVRVDERVAARVDARGVAAEIPXAAPRGV

SEQ ID NO: 202504 - protein, 50 aa, Glycine max
  Clone ID: PAT_MRT3847_24887C.1.pep
DYLTEALWLVSVYLKATSGRPLHTNELFKSVILSGPVTDTCHSFHYCGSS

SEQ ID NO: 202505 - protein, 222 aa, Glycine max
  Clone ID: PAT_MRT3847_24888C.1.pep
SRSRTSIPDPDAEKPEDWDEDMDGEWEAPQIANPKCESAPGCGVWQRPMIDNPNYKGKWKPPMIDNPNYQGIWKPRKIPNPDFFEDLEPFRMTPFSAIGLELWSMTSDIFFDNFIISGDRRVVDDWANDGWGLKKAADGAAEPGVVGQMLEAAEERPWLWVVYILTVALPVFLVILFCCSGKKQSNAMEYKKTDAPQPDVKDEEGKKESSSRIPSLRTRACD

SEQ ID NO: 202506 - protein, 32 aa, Glycine max
  Clone ID: PAT_MRT3847_24889C.1.pep
PPSGPKIKPFLFLFFYPLLALKLKLALKIPSV

SEQ ID NO: 202507 - protein, 75 aa, Glycine max
  unsure (1)..(75): unsure at all Xaa locations
  Clone ID: PAT_MRT3847_2488C.1.pep
FGLLVLMQKLANKCMLFLKCNSRSSVPSCTQHSTHPYSVVWHKFXSNIKVKVFFLSTIQTNLIFRIKKKRTKAGW

SEQ ID NO: 202508 - protein, 36 aa, Glycine max
  unsure (1)..(36): unsure at all Xaa locations
  Clone ID: PAT_MRT3847_24890C.1.pep
RXPCXRVTRLVKATAXIYLYXTXATVYLTLLAXRRP

SEQ ID NO: 202509 - protein, 70 aa, Glycine max
  unsure (1)..(70): unsure at all Xaa locations
  Clone ID: PAT_MRT3847_24891C.1.pep
RRKMFDKPKTRCFTILPMEVNLVVRQKFLNSARLILKKRDKLSCQDGINPYSMEWTGXANRLLRKGNDIL

SEQ ID NO: 202510 - protein, 44 aa, Glycine max
  Clone ID: PAT_MRT3847_24892C.1.pep
VKEETEVESYCDRLSYYYRQIYGIRDDTDNAIAFDETKVFGVAE

SEQ ID NO: 202511 - protein, 259 aa, Glycine max
  unsure (1)..(259): unsure at all Xaa locations
  Clone ID: PAT_MRT3847_24893C.1.pep
KPENAPVRGGALGVLPDVLLSRRSPVSPSLLEASSAVDPAKISGPCAQSSXFEPFCIGPACQVPCFSPRIRPPAAKARKLKTDLAAQLRSLPQLVAEPTDARSNSFVGTHEYLAPEIIKGEGHGAAVDWWTFGVFLYELLYGRTPFKGSNNEETLANVVLQGLRFPDTPFVSIQARDLIRGLLVKEPENRLGSEKGAAEIKQHPFFEGLNWALIRCAIPPELPDLCEFGVSEMTLQSQGKGVKYVECNAAGELVEFELF

SEQ ID NO: 202512 - protein, 36 aa, Glycine max
  Clone ID: PAT_MRT3847_24894C.1.pep
LWISKANIHSKIHLHQSQHSSKHEHLVPHLENRGFA

SEQ ID NO: 202513 - protein, 86 aa, Glycine max
  unsure (1)..(86): unsure at all Xaa locations
  Clone ID: PAT_MRT3847_24895C.1.pep
RLEAPFLSDLCHFSRDFPVNTDRVXGLFPHAPVSFVAVVRPALFTYQMGVVMVETPGICVGPTLLDPGLEKVCPNLKPLLFTPIFP

SEQ ID NO: 202514 - protein, 54 aa, Glycine max
  Clone ID: PAT_MRT3847_24896C.1.pep
MGAPIAAHNPRFMPSLAILRECPFISSPRPFSRHFKVWSTHLASFNSLGEFFDN

SEQ ID NO: 202515 - protein, 224 aa, Glycine max
  unsure (1)..(224): unsure at all Xaa locations
  Clone ID: PAT_MRT3847_24897C.1.pep
MENNQQQGAQAQSGPYPGGAGGSAGAGAGAGAGAAPFQHLLQQQQQQLQMFWSYQRQEIEHVNDFKNHQLPLARIKKIMKADEDVRMISAEGPILFAKACELFILELTIRSWLHADENKRRTPQKNDIXAAITRTDIFDFLVDIVPRDETKDPPALVGATASGVPYYYPPNGQPAGMMIGRPAVDPATGVYVQPPSQAWQSVWQSAAEDTPYGTGAQGNLDGQS

SEQ ID NO: 202516 - protein, 62 aa, Glycine max
  Clone ID: PAT_MRT3847_24898C.1.pep
KFREKYIIYMNRLYFSIYRTHMSISLTYRPCCSSQVDHISIFLLYIRIMLSFQVKYRLSASR

SEQ ID NO: 202517 - protein, 58 aa, Glycine max
  Clone ID: PAT_MRT3847_24899C.1.pep
DTYQYKSIADLVGKTFTHPVVKLEIVFELVVLHVDYCSKDILLVYEAAAQHSKDRKSA

SEQ ID NO: 202518 - protein, 238 aa, Glycine max
  Clone ID: PAT_MRT3847_2489C.1.pep
MCWLLLPDELWRRILEIGIESNGFSYKDLCCVSISCRRLHRLSSEEPLWNRLLFSDYPQSQSHPSSSSSSSSSKSLYRLRFERDKERRIAAHRRAVLRKESQVAEHSRRLKDMKTRLAQETTKATQTAQDLSNLRRLRQAFVALNVWQPEVVRGRQKQMVEQSVVPAECRIHALEMEFKLCKQQILGLEKFYKDEKRRLDTAKEELASMKYHPVQEHKPTSGGENEHVKRKKLKICNS

SEQ ID NO: 202519 - protein, 55 aa, Glycine max
  Clone ID: PAT_MRT3847_248C.1.pep
TAGDEYQCCRLEMGPDICFDSKKSLRCFVFLSKLKGFSPIPLLIKDDLSCLLISI

SEQ ID NO: 202520 - protein, 75 aa, Glycine max
  unsure (1)..(75): unsure at all Xaa locations
  Clone ID: PAT_MRT3847_24900C.1.pep
FVAGNCRILEENSSRGRAADLCHMLVCGATVWTESALLAXMIPYVSESSAKIIFLSNSLTSMMFTVWSKQDPFIH

SEQ ID NO: 202521 - protein, 89 aa, Glycine max
  unsure (1)..(89): unsure at all Xaa locations
  Clone ID: PAT_MRT3847_24901C.1.pep
LFQIRILSEYGLPLVQVGGLHFVTKGNVPKDSFNKPXSAIHKFGALYMQVGPVPLKSPYGLQIXLVISKDRPTPIKYPRDPGSPGKKPL

SEQ ID NO: 202522 - protein, 50 aa, Glycine max
  unsure (1)..(50): unsure at all Xaa locations
  Clone ID: PAT_MRT3847_24902C.1.pep
SSPFXVTGCDGASLNYXTXLPFEWRVVTETYGVCVNIFLGFFXVCXDFTN

SEQ ID NO: 202523 - protein, 88 aa, Glycine max
  Clone ID: PAT_MRT3847_24903C.1.pep
FGACKGAKWDPLSWELFFPKKGGGPKKGFKKGGFEGGKQTSGALGFLIGNPKQFTVFEIFLGIFQDFENGGKIFKPAFFVSQGIARFF

SEQ ID NO: 202524 - protein, 85 aa, Glycine max
  Clone ID: PAT_MRT3847_24904C.1.pep
GVDCKGFRELANLIYRVCTIGLPKWSFIHFEQYCLIFTWVHFRVACFFRDFLFLLRGEFYSSVLVREVYIPATWGVEVISTRVLG

SEQ ID NO: 202525 - protein, 58 aa, Glycine max
  Clone ID: PAT_MRT3847_24905C.1.pep
HASVRLREDYRRGTEKTFNLWFCELRLVDSNLRSWKRYINSKDVLNVLPRFQFCVSNV

SEQ ID NO: 202526 - protein, 31 aa, Glycine max
  Clone ID: PAT_MRT3847_24906C.1.pep
LVIIIFIIHLPYCFLYFRIRVTNINFCILLQ

SEQ ID NO: 202527 - protein, 140 aa, Glycine max
  Clone ID: PAT_MRT3847_24907C.1.pep
VLKKGCFLTGPFWISFFCGGKNPLSCPAPEKSVFWDAFFSSGKPFPLVSSFFFPKVFEPLCFCFSLFFPLENPLFLPWGAWKKNPFSGILCRVPLLDLAPFFGCSLVLPNFFSPGFLLSCPPPFCLLSLPLFYCAWVFFF

SEQ ID NO: 202528 - protein, 73 aa, Glycine max
  Clone ID: PAT_MRT3847_24908C.1.pep
DVVLKRVLYICCNQIITCFGWKIDGNFWLVICFVISVSNCVKDSKRCTLVERQKYILDINLLLIFEESMCCNG

SEQ ID NO: 202529 - protein, 45 aa, Glycine max
  Clone ID: PAT_MRT3847_24909C.1.pep
FVTVESMDAALGETRSRTQEPSMFELAQEAGVTTMQPLVLQYMSG

SEQ ID NO: 202530 - protein, 118 aa, Glycine max
  Clone ID: PAT_MRT3847_2490C.1.pep
MCWLLLPDELWRRILEIGIESNGFSYKDLCCVSISCRRLHRLSSEEPLWNRLLFSDYPQSQSHPSSSSSSSSSKSLYRLRFERDKERRIAAHRRAVLRKESQVAEHSRRLKDMKTRLA

SEQ ID NO: 202531 - protein, 90 aa, Glycine max
  Clone ID: PAT_MRT3847_24910C.1.pep
SGLWDYLNEAAITTFSVLGLFSSQAAAILSTLLAAEVIPTTVRGRGLGLIMALGALGGLSGPAQRLHMGHGAFLQHVVLAACALLCILSI

SEQ ID NO: 202532 - protein, 263 aa, Glycine max
  Clone ID: PAT_MRT3847_24911C.1.pep
MAGDEEKLTIVMFPWLAFGHMIPNLELAKLIARKGHQVSFVSTPRNIQRLPKPSPNTLINFVKLPLPKIQNLPENAEATTDIPYDVVEHLKVAYDALQEPLKRFLESSKPDWLFYDFVPFWAGSIASKLGIKSAFYSICTPPFSGFLGPPSSLMGKDSLRQKPEDFIVSPPWVPFPTTVAFRYFEIMRIVDSLSAENNTGVSDAYRYGASAENCDIVVIRGCTEFQPEWFQVLENIYRKPGLPIGQLPSTDPVGVRIPTRGGG

SEQ ID NO: 202533 - protein, 82 aa, Glycine max
  Clone ID: PAT_MRT3847_24912C.1.pep
IALPTGIGIAIALFTGSAIGYMLAIGCDIGFLLAIGFGKHPFNSDYSSCPFRLGAAKSAFIALPFVFGSFPGIAVLAVPEGA

SEQ ID NO: 202534 - protein, 66 aa, Glycine max
  Clone ID: PAT_MRT3847_24913C.1.pep
QRNTGTNYHKPVTSNSFLTSIDTHPSTPTDYRPVASAFYTTSFRSATAVPIVQSHIPDLPQLLIAV

SEQ ID NO: 202535 - protein, 62 aa, Glycine max
  Clone ID: PAT_MRT3847_24914C.1.pep
PVGGKENKKTLFKETHKGVFFSKAKFPLGVPKTHPKTGGVFGVFKRVPPFIIVLGGNAPKSF

SEQ ID NO: 202536 - protein, 36 aa, Glycine max
  Clone ID: PAT_MRT3847_24915C.1.pep
LLELRFDFSTGVKIKITSLTKCVLDLVPPIKICRIN

SEQ ID NO: 202537 - protein, 36 aa, Glycine max
  Clone ID: PAT_MRT3847_24916C.1.pep
ITFLSKRYQTNVWHTYDVECSNETINPIYTTLNLTH

SEQ ID NO: 202538 - protein, 101 aa, Glycine max
  Clone ID: PAT_MRT3847_24917C.1.pep
PLERPLFFFFFFFFFGMSDINMILLSLKHIYYQYRSKLDWSQQTFLYVVSCCLGLLHPHPLLSTFLKWCSYFSQNMQKCIECDRLHGNQLITLISIHSNMI

SEQ ID NO: 202539 - protein, 37 aa, Glycine max
  Clone ID: PAT_MRT3847_24918C.1.pep
LYVKSQYLNTMGSLLIVVTLLHRARFNLYFITKKNTS

SEQ ID NO: 202540 - protein, 114 aa, Glycine max
  unsure (1)..(114): unsure at all Xaa locations
  Clone ID: PAT_MRT3847_24919C.1.pep
DEDGYFAELYGYKWTSLCLHTTTMLIASSVGIVAGVSYAIHSGYQSGGPLLGRLFSAIXIIDHLFPLLKGLLXEQYRTPTIVIVXAVPVASIYSLLRAKIDPFTCVYNKFTNGQ

SEQ ID NO: 202541 - protein, 130 aa, Glycine max
  unsure (1)..(130): unsure at all Xaa locations
  Clone ID: PAT_MRT3847_2491C.1.pep
SDGQYQLMPLDDRLLLELQSIGLYPDILPDLAEEDDAINEDIVKLEIALYEQNGSQKNNLDKIDRAVHERMDEATQKIDQAAFDHLIEIAYIKRFACRGSNNSKVQFIKCLYXLLRFSQRTLARCTDMKK

SEQ ID NO: 202542 - protein, 136 aa, Glycine max
  unsure (1)..(136): unsure at all Xaa locations
  Clone ID: PAT_MRT3847_24920C.1.pep
SVSSVGPQPVSMWSDFRLRHVIVEGGPWQVSRLVPLARKRVMLLQCQTQLLPNDGXKCSNKSLVARPARVTLQGFRHQVASKAECVVCHKSMNFFSCPRFCSSRWQMMSNLTPLFSCTNNKVLYGCCETMIGTRLS

SEQ ID NO: 202543 - protein, 206 aa, Glycine max
  Clone ID: PAT_MRT3847_24921C.1.pep
LYFYLVNSHLTPRPILLTRNRESQDNVRGRIGGDTEKSEAGELYSKKLAKFVGKRLKSERAASIWTSTLQRTILTASPIVGFPKIQWRALDEINAGVCDGMTYAEIKKNMPEEYESCKKENLTYRYPRGESYLDVIQRLEPVIIELERQRAPVVVISHQAVLRALYAYFTDRPLKEIADIEMPLHTIIEIQLGVTGVEEKRYKLMD

SEQ ID NO: 202544 - protein, 122 aa, Glycine max
  unsure (1)..(122): unsure at all Xaa locations
  Clone ID: PAT_MRT3847_24922C.1.pep
MVSCEDQYGEKLPLVQPDPVVLEINRLQNQLKEKEKELATCQGEIKALRSTEALKDKAIEELRNGVSKLDERLRISEDHLKQKNLEIKXLTDEKKNALASQYAAEATLRRVHANQKDEDFVQ

SEQ ID NO: 202545 - protein, 194 aa, Glycine max
  Clone ID: PAT_MRT3847_24923C.1.pep
ASSPKAPPPQIPIPQPPKPSPVSPPPLPPPPVASPPPLPPPKIAPTPAKTPPSPAPAKATPAPAPAPTKPAPTPSPVPPPPAATPAPAPVIEVPAPAPAPVIEVPAPAPAHHRHRRHRHRHRHRRHQAPAPAPTIIRKSPPAPPDSTAESDTAPAPSPSLNLNAAPSNHQQGRNIWATAGLAIIVLLAVTGYSC

SEQ ID NO: 202546 - protein, 261 aa, Glycine max
  Clone ID: PAT_MRT3847_24924C.1.pep
TYHSGRAPWSPRDSKRSRIDGPLPVDEGPFPLRNIDDRGLALEQTYGIDPAIDGGGSGPYVNIQGKSHLGPVSSRITAGVHGVAQPDIDHIWRGVIAKGGTPVCRARCVPIGKGIGTELPDVVDCSARTGLDILTKHYADAIGFDIVFFLPDSEDDFASYTEFLRYLSAKNRAGVAKFVDNTTLFLVPPSDFLTRVLKVTGPERLYGVVLKFPPVPSSAPMQQPSHLRVPTTQYMQQNPPSQTEYGLIPVKEEHILPMDYN

SEQ ID NO: 202547 - protein, 61 aa, Glycine max
  Clone ID: PAT_MRT3847_24925C.1.pep
FPKGPIQRGVGYLKRPFFPDSILVSRGGEAPLANQQNIYNCLKKPPQKKKFKFQNPSKIFS

SEQ ID NO: 202548 - protein, 48 aa, Glycine max
  Clone ID: PAT_MRT3847_24926C.1.pep
GCPGVYGKGAFPGNVGDFLVDSTPGASSNVKGANGRKALVPALEDPFR

SEQ ID NO: 202549 - protein, 104 aa, Glycine max
  Clone ID: PAT_MRT3847_24927C.1.pep
TALAISTDEPTTTELDRRNTCMMGQYFFPDVWIDDCPRNPITSSLLSVPCVFAHQCSRQRTSCSLLSYNAFISASNSTSSSAQCCLHCPCNDLSASRKAAQSLR

SEQ ID NO: 202550 - protein, 62 aa, Glycine max
  Clone ID: PAT_MRT3847_24928C.1.pep
RRCSAENIEETSLLGRSREVLSQSESRTSFEAAFVIHYHSGIPAPHAALEGHRLLENAHLRR

SEQ ID NO: 202551 - protein, 132 aa, Glycine max
  unsure (1)..(132): unsure at all Xaa locations
  Clone ID: PAT_MRT3847_24929C.1.pep
ENAHVPEKKLHSFKKVSRSMGYGDNDITLXSCSSGSRGYHRACGXTMRYMEVTGLSAEVXREQISIVASVTLCSNISGRILATLXLSPTAAGDELSDXFYTDKDNIFESLARRIXTLRDAFYTIKGGTCNKA

SEQ ID NO: 202552 - protein, 54 aa, Glycine max
  Clone ID: PAT_MRT3847_2492C.1.pep
ARGLSFSCKDKLRFGTSFDTGINTQDPPDKSVIFFLVGVEKNKIFLFTPHKKKE

SEQ ID NO: 202553 - protein, 149 aa, Glycine max
  Clone ID: PAT_MRT3847_24930C.1.pep
QRASFGIGTFNSFWAYTTPIIGAIIADEYLGRFNTIFIAIAFSILGHIFLIISALPSVLASGKAIAPFILGVITLGFGTGAFKANISPLIAEQYKQTKPRVIKDPKTGERVISDPNITISRIFLYFYMFINIGSLTGQISMDYVEKYVG

SEQ ID NO: 202554 - protein, 73 aa, Glycine max
  Clone ID: PAT_MRT3847_24931C.1.pep
KDYSESLDKLRCFQRACKGMCSDIFKTFCSTWLDIFVKNIGTPHGFSWNPCPSVKKMPFELALIPLISFPHNF

SEQ ID NO: 202555 - protein, 171 aa, Glycine max
  Clone ID: PAT_MRT3847_24932C.1.pep
MATDCNCNKGFADSYMLLKPEDASFFDLFRVLFKGNLSQRNFVESHADDDALDESLGHRWLIVISILAQKLLQLVAKPLSLFGSCVEFLLNLVALNGGVFSIVLNFLGGKLVLPNPESENYLSFIGNLDIRAKLEDAVQREDSKYYPALSMMASKACYNNAAYLKTTVEDY

SEQ ID NO: 202556 - protein, 48 aa, Glycine max
  unsure (1)..(48): unsure at all Xaa locations
  Clone ID: PAT_MRT3847_24933C.1.pep
TAPQSVIKHDTFLKFHQNSKTPFQKYVKFKKNKKXXQHKKXKXNXKNT

SEQ ID NO: 202557 - protein, 48 aa, Glycine max
  Clone ID: PAT_MRT3847_24934C.1.pep
PPPYVLKTSINGVVTVQTSSVGLRHDSTNSLLERDTPSIRPLFTIQIY

SEQ ID NO: 202558 - protein, 60 aa, Glycine max
  Clone ID: PAT_MRT3847_24935C.1.pep
SRIGPRIHPRIRPRIRSRFLLHKIFNWVTAPFHTLILYQIPNFKYAHSITYNNYNDAIIE

SEQ ID NO: 202559 - protein, 132 aa, Glycine max
  Clone ID: PAT_MRT3847_24936C.1.pep
ETFFFFFFFFFFFFFFFFFFFFSKKKAGGFLNWKRAPKEKREKLTLRPLSHGGCKSKKKTQNSEGGVKGGGKRPFFFKEGGKKGAQGVKNNKYRRREKPGLGLNVKTPERGGARPGFKIQWAKRKKGGNNLG

SEQ ID NO: 202560 - protein, 46 aa, Glycine max
  Clone ID: PAT_MRT3847_24937C.1.pep
WQIWISRDKLRQRHAAFLAVFCSTSAVTNQHSQELAPLCRFFFFFP

SEQ ID NO: 202561 - protein, 201 aa, Glycine max
  unsure (1)..(201): unsure at all Xaa locations
  Clone ID: PAT_MRT3847_24938C.1.pep
MSDFGSMEVNNSAITGVGNDPIGSYWDWDDDDRGMEMDIQALLSEFGDFGDFFENDVLPFGEPPGTAESQALMLSAPDCGDVNSSPGGVIDVPGQILLPVGFPSFESFNPPPSTSIEECLNKSQDNLNNSMSLCPTNQTQLLYTREFDHIMKAEAMMTFAPEFGAVDTPTCELSTTLFXSPYFPKSRKAKSSNSSSNNYLY

SEQ ID NO: 202562 - protein, 59 aa, Glycine max
  Clone ID: PAT_MRT3847_24939C.1.pep
HIFAITITVKTITHQVESSHTIDTVKAVIKDAEGVRSDQHRLILAGKLLEDRRTLSEYS

SEQ ID NO: 202563 - protein, 126 aa, Glycine max
  unsure (1)..(126): unsure at all Xaa locations
  Clone ID: PAT_MRT3847_2493C.1.pep
PRRAPTRAKEWVPRTYWVWNPQNPFVLNRRMGKLTLPQGTYRGVKRMPVSIGGGAGAKNAVLMNMPNADLSMRXYVRGDLVSEVDRMTATYIKXTASISIALGNLSDDTMDFEDYHHKLVQLAEIH

SEQ ID NO: 202564 - protein, 57 aa, Glycine max
  Clone ID: PAT_MRT3847_24940C.1.pep
SLSLLFVLPCPFFRFGVSFCPSWLWLLPLLFECLMRFRLACPLLESVGVVFPYSFNP

SEQ ID NO: 202565 - protein, 56 aa, Glycine max
  Clone ID: PAT_MRT3847_24941C.1.pep
DRNSIESTFSDLKSTINLPAEASNTEEAGLASTLHHMITLIILFSFFLPILSSSDA

SEQ ID NO: 202566 - protein, 133 aa, Glycine max
  unsure (1)..(133): unsure at all Xaa locations
  Clone ID: PAT_MRT3847_24942C.1.pep
NLTPLWSIDLKGMVNGAVETCKESFHRFDKYLNFSNPLISNNFSPDACGWAFGMNMFDLKEWKKRNITGIYHXNEDITLWKIGTLPPXLITFYKRXNGNYKPWLNQAFSKYKSYWSRYAVFDNPYLRVCNLSE

SEQ ID NO: 202567 - protein, 46 aa, Glycine max
  Clone ID: PAT_MRT3847_24943C.1.pep
MKQHKIVALTFVSGKIGLPVAKVKDNSYSAFQSIDPVLCQFRQNPL

SEQ ID NO: 202568 - protein, 60 aa, Glycine max
  Clone ID: PAT_MRT3847_24944C.1.pep
VSVEGKTKLGLGGTKYKIRQVKLAHTINHLGSTSSLVMTSWITPTTMHRMFLGIKGIHTH

SEQ ID NO: 202569 - protein, 90 aa, Glycine max
  unsure (1)..(90): unsure at all Xaa locations
  Clone ID: PAT_MRT3847_24945C.1.pep
PKPSIXPXVXTLGTXPXGKTGARQKNGPKYXTRSWAVPLAFPRKXXLXRSSLMLTFPTSGADGPHFHGXCQPRMGERESHGRXLLPFLKL

SEQ ID NO: 202570 - protein, 231 aa, Glycine max
  Clone ID: PAT_MRT3847_24946C.1.pep
RMEEIGFNISHLYGLTETYGPGTFCAWRPEWDLLPHEERSKMKARQGVPHVALEEIDVKDPSTMESVPSDGKTMGEVMFRGNTVMSGYLRDLKATKEAFKDGWFHSGDLAVKHSDGYIEIKDRLKDIVVSGGENISSVEVETVLYSHPAVLEAAVVAKPDDHWGQTPCAFVKLKEGFDLDALEIINFCRDHLPHYMAPKTVIFQDMPKTSTGKIQKFVLREKAKAFRGNQA

SEQ ID NO: 202571 - protein, 142 aa, Glycine max
  unsure (1)..(142): unsure at all Xaa locations
  Clone ID: PAT_MRT3847_24947C.1.pep
ARNTVAPWLWWEQYGDSAPGLQXVAIRILSQVCSXFSFHRQWSTFWQILSEKRNKIDRETFNDLVYINYNLKLARQMSAKSSEVDLLQFDDIDMTAEWVEENETASPTQWLDRFGPALDGNDLNTRQFGSSIFGANDPIFGL

SEQ ID NO: 202572 - protein, 171 aa, Glycine max
  Clone ID: PAT_MRT3847_24948C.1.pep
FLLFFFFFFLLFFFFFFFFFFFFFFFFFFFFFFFFFFFFLFGPLSRNIQNPSEGGGNPKIGERTLKGKHFFKKGGEKKPGEKRGKKVSGEKLGSLKNSQKKKNRKKKRETLGGQKRDPTHKNMGGANPPVSKRKTRGTQGKNNSPNPRGKGVFVFTPWGFFFFTRENGQSC

SEQ ID NO: 202573 - protein, 65 aa, Glycine max
  Clone ID: PAT_MRT3847_24949C.1.pep
LTSRAVVFFVFIHIRVRTERTTTMVRGLLNKQESRYLSEAGTTAAQLNMPTENPTRTNFLNRGAH

SEQ ID NO: 202574 - protein, 51 aa, Glycine max
  Clone ID: PAT_MRT3847_2494C.1.pep
WLRLWLVKKKMDSARSWLQKFQPRDKLRASTRNKDDTNGTNEIPNVPMADT

SEQ ID NO: 202575 - protein, 128 aa, Glycine max
  Clone ID: PAT_MRT3847_24950C.1.pep
MMGARRRCILATLAFLMLMGIAVYFRLWAIHYNLSSDDTQLLRQQFDIANREAMDESAEWRLRYDQEVDRTKKCLQELQVFQESSQKGQDASDINHKLAILQKENAVLLERLETLKRELEEERLKCSS

SEQ ID NO: 202576 - protein, 155 aa, Glycine max
  Clone ID: PAT_MRT3847_24951C.1.pep
MLVVGLGSQQRYTEEKSEEQTSHDRGIMGARRRRSILATLAFLMLMGIALYFRLWAIHYNLSSDDTQLLRLQFDIANREAMDESAEWRLRYDEEVDRTNKCLQQLQLFRESSQKGEDASDINHELAILQKENAVLLERLETLKRELEEERLKCSS

SEQ ID NO: 202577 - protein, 88 aa, Glycine max
  Clone ID: PAT_MRT3847_24952C.1.pep
SRARPTPSENPNQSILLFWFGFAKGFDFSAAENLEIALRGILLLLQQRFVLPRGWHHCAQSQNPRQTNHPNPLKIHPKLGFVLHYGTV

SEQ ID NO: 202578 - protein, 90 aa, Glycine max
  unsure (1)..(90): unsure at all Xaa locations
  Clone ID: PAT_MRT3847_24953C.1.pep
GPRPIXPSSEVSEFAPPYSQFTLKSLDRKENLLKLGSRNFFLGPRKPAPPVENGVTPSFASCAKKAKKKREGYGGGGGGFAWFKPIQFIM

SEQ ID NO: 202579 - protein, 35 aa, Glycine max
  Clone ID: PAT_MRT3847_24954C.1.pep
FKGFSRFFLYSVISVLDSRYSRCSTMSRHQCFDRS

SEQ ID NO: 202580 - protein, 170 aa, Glycine max
  Clone ID: PAT_MRT3847_24955C.1.pep
MLTIMASRKNHFTSRSHRFLPVASDIHDSVSLTMDLESAFEFDESEIYNSARANNSFEFRRSLHGRGSNSSAKKKPSSSSGDPASVPVNIPDWSKILGDEYRRKNNFHSDNDDDNESYNDERSGRVPPHEFLARNRVASFSVHEGVGRTLKGRDLSTLRNAIWAKTGFQD

SEQ ID NO: 202581 - protein, 60 aa, Glycine max
  Clone ID: PAT_MRT3847_24956C.1.pep
LFSTRLKPPRSCQIITGAMLTKHYLISSKLPFSNHLYYTYYPLVVFSLFFHISFTYYKTF

SEQ ID NO: 202582 - protein, 174 aa, Glycine max
  unsure (1)..(174): unsure at all Xaa locations
  Clone ID: PAT_MRT3847_24957C.1.pep
YTNYTLETLQSGKRQCKAALQKELGLPVREDVPLLGFIGRLDQQKGIDLIAEAIPWIVGQDVXDILLMPSRFEPCGLNQLYAMNYGTIPVVHAVGGLRDTVKPFNPFEESGLGWTFDSAETNKLINALGNCLLTFRQYKQSWEGLQRRGMTQDLSWDNAAQQYEEVLVAAKYQW

SEQ ID NO: 202583 - protein, 203 aa, Glycine max
  Clone ID: PAT_MRT3847_24958C.1.pep
MTESTPHINPNGVKIAKTVLMPGDPLRAQYIAENFLENVEQFNTVRNMFGYTGTYKGKEVSVMGSGMGIPSIGIYSYELYHFFDVDTIIRVGSCGALQEDVNLYDVIIAQAASTNSNYVDQFNIPGHFAPIADFNLVAKAKKAADEIGAISHVGLYLNAIHANKKALGIFTVSDHILRDEATSAEERQTSFTQMMEIALEIAE

SEQ ID NO: 202584 - protein, 34 aa, Glycine max
  Clone ID: PAT_MRT3847_24959C.1.pep
TGQDHGCESRQEALVYSPPTCCKVDGYRGIKLYQ

SEQ ID NO: 202585 - protein, 66 aa, Glycine max
  Clone ID: PAT_MRT3847_2495C.1.pep
ANFSLLTNLFHFSFLFPSVVSAYGPNKPNDICQVEYSEAEKILDSFRRLVRSLAEVLEFRNKQVSV

SEQ ID NO: 202586 - protein, 771 aa, Glycine max
  unsure (1)..(771): unsure at all Xaa locations
  Clone ID: PAT_MRT3847_24960C.1.pep
MASMGSLPFLVEANADSTLMMMMLQNRNHKFSSSKFNTVNASSLVRGWGRGRVKHRCSSRGLLCLVEKNKHISALGKSSGTSEDKDESEEVLHATIEKSKKVLALQRELLQQISERTKLVSSINSESTPEIGGNSISYEHSDESLSSDSISVNSGTYQCSYKHQSSXYKIRLETLLSFLAKIRKVSYAVIEQKMDKGEDDSVXKASPRLYFDEQLNSKRYETITPDTLTSEIPRSTETSNRKIEILEALSESSTKEVANEGDNVESKGENPPPLAGANVMNVILVAAECAPFVKTGGLGDVAGSLPKALARRGHRVMVVVPRYSHYADAQDIGVWKRYKVDGQDMEVTYFHSYIDGVDFVFIDSPNFRHLQDNIYGGNREDILKRMVLFCKAAAEVPWHVPCGGVCYGDGNLAFIANDWHTALLPVYLKAYYRDHGLMKYTRSVLVIHNIAHQGRGPIDDFRYTDLPEHYIDLFKLYDPVGGEHFNIFSAGLKAADRIVTVSHGYAWEIKTSEGGWGLHGIINENDWKLRGIVNGIDTKDWNPKIDVHLKSDGYTNYTLETLQSGKRQCKAALQKELGLPVREDVPLLGFIGRLDQQKGIDLIAEAIPWIVGQDVQLVMLGTGRPDLEDMLRQFESQHRDKVRGWVGFSVKMAHRITAGADILLMPSRFEPCGLNQLYAMNYGTIPVVHAVGGLRDTVKPFNPFEESGLGWTFDSAETNKLINALGNCLLTFRQYKQSWEGLQRRGMTQDLSWDNAAQQYEEVLVAAKYQW

SEQ ID NO: 202587 - protein, 121 aa, Glycine max
  unsure (1)..(121): unsure at all Xaa locations
  Clone ID: PAT_MRT3847_24961C.1.pep
LMYRQTSTLDVIGYSDSDFAYYVDSCKSTSGCIFMMAGGAISWRSVTQNLAATSTMEADFVSCFEATSHGVXLKSFISGLKIVDTISRHLRIFCNNSVVVFMAKNNKSGNPSKHIAIKSLV

SEQ ID NO: 202588 - protein, 92 aa, Glycine max
  Clone ID: PAT_MRT3847_24962C.1.pep
GRPSFFFLTPRPMERGLSHTPYGSQYPLLNCSGFDLTGSCPTNIQDHRSCPTSDKSPQLLPKGSTRIRGFGPERTSGAICVDRAHRTAKFTL

SEQ ID NO: 202589 - protein, 46 aa, Glycine max
  unsure (1)..(46): unsure at all Xaa locations
  Clone ID: PAT_MRT3847_24963C.1.pep
RXKATDDXXILTHERQNLGKRDPQLNHDRQKNXPPAXPLLSWGSWG

SEQ ID NO: 202590 - protein, 82 aa, Glycine max
  Clone ID: PAT_MRT3847_24964C.1.pep
AYDTRETDPLADLQNMYNSTHKGTTLGALMMGVPGAVAGLNADGMKHGRMAWETVLQPAIAPAGEGCGANGTVLEDMAHAAK

SEQ ID NO: 202591 - protein, 46 aa, Glycine max
  Clone ID: PAT_MRT3847_24965C.1.pep
ELRVNAKPHIETSRVSPIQHNEASASACSANIYIWHNLDIMEVDPA

SEQ ID NO: 202592 - protein, 541 aa, Glycine max
  unsure (1)..(541): unsure at all Xaa locations
  Clone ID: PAT_MRT3847_24966C.1.pep
PITHGILTSFSYSQIALFYAAVLAGLLHRFPVSFSQHTAGQIRNRKSGPSAGTKSXQGESITFADIAGVDEAKEELEEIVEFLHNPDRYVRTRLGARPGVLLVGLSGGXLTGIAWVADGKDVALHISCSASEFVELYVGMGASGVRDLFARADREAPSIIFIDEIDAVAESRDGKFRIVSNDEREQTLNQLLTEMDGFDSNSAVIVLGATNSSDVLDPALRRPGRFDRVVMVEAPDRIGREAILKVHVSKKELPLANVDLIDGIACMTTGFTGAELANLVNEAALLSGRQNSIVVEKKDFIQDVEKSTAGIEKKTAELRKCENCKTARHEAGHAVVGTAVANLLPGQPRVEKLSILPMSGGALGFTYTPPTNEDRYLLFIDELHGRLVTLLGGRAAEEVVFSGRVSTGALDDIRRATDMAYKAIAEYGLNQTIGPVSIATLSSGGIDESGGSAPWGRDQGHLVDLVQKEVKTLLQSALEVALSIVRANPTVLEGLGAHLEEKEKVEGEELQKWLRLVVAPTELEIFIDGKQGSLLPLQTGS

SEQ ID NO: 202593 - protein, 82 aa, Glycine max
  unsure (1)..(82): unsure at all Xaa locations
  Clone ID: PAT_MRT3847_24967C.1.pep
PRVFPRVRRDVFGAEGDFITSPEVSQMFGEMVGVWVMCLWEQTGXPHGVTLVALGPGRGTFMVDLLRGASMFKTFIVSLHVH

SEQ ID NO: 202594 - protein, 54 aa, Glycine max
  Clone ID: PAT_MRT3847_24968C.1.pep
IYYKLTMMWTAYGYISSIACDRKPRRTSGKEFHSTERGAQSHYKKKKKLTSPRA

SEQ ID NO: 202595 - protein, 46 aa, Glycine max
  Clone ID: PAT_MRT3847_24969C.1.pep
PDMLRVLLEGAGRAEPAGRDTHYLTSVMETDMIAPIRIHESQRLDD

SEQ ID NO: 202596 - protein, 44 aa, Glycine max
  Clone ID: PAT_MRT3847_2496C.1.pep
FSIAEKVDVVAVVVVDRDHQNYNIAVADRNLKPFLFHTILVLLF

SEQ ID NO: 202597 - protein, 34 aa, Glycine max
  Clone ID: PAT_MRT3847_24970C.1.pep
NWRLLTPQLLGAPCRILRKLKIESHLPWTRFEEP

SEQ ID NO: 202598 - protein, 71 aa, Glycine max
  unsure (1)..(71): unsure at all Xaa locations
  Clone ID: PAT_MRT3847_24971C.1.pep
KXRYRPXXFXXXXXXXXSLXAXPAKXFERPLXPNLXLXXXXQGKAFLXSGXEXXXNXXLEPNSXLTYACMR

SEQ ID NO: 202599 - protein, 52 aa, Glycine max
  Clone ID: PAT_MRT3847_24972C.1.pep
ATTAAAGGGREGHNPLQESFEAHRSPGDDKPGCYGRSWEASELRVKSWDDLE

SEQ ID NO: 202600 - protein, 116 aa, Glycine max
  Clone ID: PAT_MRT3847_24973C.1.pep
TLTRPLDGRFSGPVKSPGHCGPLNARPTMVNSRSPRLTRPLDDRLESPMGNSPYNKVRADAADYQEDYAMCPPLFEDLSPTQGTIMMWYLFSHGLLLYYSTWMESDNNVFWGKNDQ

SEQ ID NO: 202601 - protein, 81 aa, Glycine max
  Clone ID: PAT_MRT3847_24974C.1.pep
AGFLLGTPSPTSRSQFWGLYLQKRGNKGGSKNSCRGRGVVKTPKVYRVSGGVMSWVSADQRPQGGISPGLIKKRGGLKELE

SEQ ID NO: 202602 - protein, 55 aa, Glycine max
  Clone ID: PAT_MRT3847_24975C.1.pep
TPSSICGWCRAEEDDLLRSQKVVEEHSEEAKQIWFLIEEVAEKTQFRKRGDGVKL

SEQ ID NO: 202603 - protein, 52 aa, Glycine max
  Clone ID: PAT_MRT3847_24976C.1.pep
DCCRHTLPDHYTTPELIAEFVQPTLWSLYSSFSIANPPLHNLQFSIITTESF

SEQ ID NO: 202604 - protein, 447 aa, Glycine max
  Clone ID: PAT_MRT3847_24977C.1.pep
VDLVEQCRTYKQRVVNLVNSASDESLLCQGLTLNDDLQRVLAKHESIASGTSAQNPAEKPKPAPTGALVDVDDPLVDIGDTSKQTDVRSSSSAGAGSQTLNQLMLPAPPTSNGSVPPAMVDPQVDLLSGEDYNSPKAETSLALVPLGEQQPASPISQQNALVLFDMFSNGSNAPISVNTQLINVAGQTSPLAPQFQQQTFISQGLFYPNVSVPNVGSPRYEQSPFAQSTGPSWNGQVAQQQQPPSPVYGTASGGSFPPPPWEAQPTDNNSPVAGSQYPQPLQVSQMIMTSIQSGTHPQGPQAMGHDQAVGMYMQPHAGHMSTINNHVQSNQLGLYRQHIQGAAGPYMGMVSHQMHNSPVASMYPQQMHGNQFGGYGYGQQPGVQYLEQQMYGLSVRDDGAPKNSYQVSSPSYVPPGKPSKPEDKLFGDLVNMAKVKPKPTPDQTGSM

SEQ ID NO: 202605 - protein, 71 aa, Glycine max
  Clone ID: PAT_MRT3847_24978C.1.pep
TPPLWAHKNKYRPLSPVAEFSYLRFKFAALGSFGLLGGTLGGGTPGPLFLPLFSSALYGKFFWSSYKKNQD

SEQ ID NO: 202606 - protein, 180 aa, Glycine max
  Clone ID: PAT_MRT3847_24979C.1.pep
FGSRVFTDVCIGWSGSMGVDQVLEKSALFHRANYSGLNLSGVWVVGGCGYPLLDWVLVPYTQQNLTWTQHAFNEKIGEVRRVAKGAFGRLKGRWGCLQKRTEVKLQDLPFVLGACCVLHNICELKNEEMDPELLENIDDDGDYAEVMEPEVALRSVSSLKARDAIAHNLLHHGLAGTSFV

SEQ ID NO: 202607 - protein, 182 aa, Glycine max
  unsure (1)..(182): unsure at all Xaa locations
  Clone ID: PAT_MRT3847_2497C.1.pep
LFLEEKSNVVKANCFTQTLKFVIQVAKAIQGLLPVPGAKAHESVRREFEVMEKKKSAIDKKADTMVRRELRGELGFWFGQTMAFMRLTFWELSWDVMEPICFYLTSXYCMAGYTFFLRTSKEPSFEGFYQVRFSSKQKHLMKLHNFDIEKYNQLRAACSPTTMPPKFDPSIALPVDNSSIHQ

SEQ ID NO: 202608 - protein, 58 aa, Glycine max
  Clone ID: PAT_MRT3847_24980C.1.pep
AGPYLRLSRFQGGQAVPKKYFLGLYGVTTHSLQQIPVTVGFPSIPLSRHRVLSERSPS

SEQ ID NO: 202609 - protein, 124 aa, Glycine max
  unsure (1)..(124): unsure at all Xaa locations
  Clone ID: PAT_MRT3847_24981C.1.pep
YTINFEAFPHKLVQFGEIQEVPFFNFSHEEFLTSRLTHXPPATTLSADESSYLYAMVHDTLVSTIPIDFAIDVFLTTINYFHAFGXLNPGISGSLLLGTIPPSISHHXVCNQLATVIPPPFFDS

SEQ ID NO: 202610 - protein, 153 aa, Glycine max
  Clone ID: PAT_MRT3847_24982C.1.pep
MGFTGELVRSVFSKNRSDGSHENKVRRNSAKNRRMLSVRSFLCGDEFNSVLAENDSASVKSSEVTVSQSVHEGLLNDEGDTESEETVENVAQNRPSSNSKKSLNEEEAAVLIQSAFRGFLLRRQNGEIKSQTGKDEFNLVTESPDKKSIVHIN

SEQ ID NO: 202611 - protein, 136 aa, Glycine max
  Clone ID: PAT_MRT3847_24983C.1.pep
KKTVLIFCSMVPNKTLSAFKNLVPQRGVLEFCFWQKAPPWQMEPPPPLLNLQKAMEMALLLLMWIPIPPVPPPKNIRVILRVMFLFPLVPLIPLAKPKMTPFPWAWVLALAGTIFFHPPLYFSNHVWGLTPPCNVP

SEQ ID NO: 202612 - protein, 114 aa, Glycine max
  Clone ID: PAT_MRT3847_24984C.1.pep
MYVGQLKFFNGQAPDGIKSFGSSLCMASISLGNYVSSMLVNMVMIITARGQNKGWIPENLNTGHMDRFFFLLAGLAAFDFVLYLFCAKWYKNINIEDSDMGDQEEELEDVNSKV

SEQ ID NO: 202613 - protein, 88 aa, Glycine max
  Clone ID: PAT_MRT3847_24985C.1.pep
TNNHILLVIFIINNIMIYSYHMITLLIIYGYHLNTTLFKLYYQNQILILHYSYHLHLSLLHYSSLKTKFLHTFNKITLLLTYLFYITQ

SEQ ID NO: 202614 - protein, 372 aa, Glycine max
  Clone ID: PAT_MRT3847_24986C.1.pep
FFITAWNCLLISIYLHENKIFSNATLLLTILPCSALNELTNNHGEWRYQGNGKVIPKSGSTGYTEWFLSKDHLQVGDVVRSRKPSNACRPQNMDIPEGTVVGLERNADHGFALVRVHGIHDPVKIHMSTLERVTFGLVAGDWVRLRDENEKHSLVGILHAVNRDGRVAVGFLGLQTLWNGNSSELEIAESYCIGQFVRLKDSLSSPRFEWRRKRGGASAAGRISWILPNGCLVVKFPGMLPFGNEPSTYLADPSEVEVVEFKTCPGMIEKYQHVEDHHWAIRPVLIAIGLFTALKLGISVGKKVRRNNKVTAIETETQYLDGQNQNAATSATTTTTTKKPSTSSATIPVSSMWVPAVANMIFKESVTSSNGR

SEQ ID NO: 202615 - protein, 92 aa, Glycine max
  Clone ID: PAT_MRT3847_24987C.1.pep
HAVRLDFYTPNLLLHLSPSLSSLYSTLLDFWSTSLTSRRFHDPPGLPLDFNFLSGSPLLLALLFCLLRHCFLIPLHTPRFPFKPSCHLATDF

SEQ ID NO: 202616 - protein, 77 aa, Glycine max
  unsure (1)..(77): unsure at all Xaa locations
  Clone ID: PAT_MRT3847_24988C.1.pep
RKLLYPXXMKPXLREIFXLFXXLPSARWGEAKTDRTTITXVWXKGKDAXLKNFPSPGQAENTEXSIYEKFHGTSWES

SEQ ID NO: 202617 - protein, 57 aa, Glycine max
  unsure (1)..(57): unsure at all Xaa locations
  Clone ID: PAT_MRT3847_24989C.1.pep
XAYDRQCDEAXKIFAEYHKCLCYYVNQAMDSQRSGVDSSVEMAKSEKEAVYSTVKGS

SEQ ID NO: 202618 - protein, 104 aa, Glycine max
  Clone ID: PAT_MRT3847_2498C.1.pep
RPLFFWFVPLGGPGGGFIFGPGAFWVGSVLDLSFGPPGFFSFFFGQIFFCHFKRKKVSPRNHFWKFLGPPPRRRKKGFFFLQRGKIRGFPVLPRGGVKVPFFPW

SEQ ID NO: 202619 - protein, 131 aa, Glycine max
  unsure (1)..(131): unsure at all Xaa locations
  Clone ID: PAT_MRT3847_24990C.1.pep
ADPDSGLSVSGNRTGELWIRVPCLMKGSFSNDQSSTSSLDSYXWFRTRDISSIAHDGSISIVDLLKELITYXGYQVPPSXLEVTLLNYTVIXDAAILPYTDMEATHNLMAYVVTRAGSILSETHNTDYDAR

SEQ ID NO: 202620 - protein, 76 aa, Glycine max
  Clone ID: PAT_MRT3847_24991C.1.pep
IPTFGRTPSRVEAKLPLSTQPLTLLLRRRVTNPVGYGMVVEVTVDLTDQIGGKHDDLFDLLLVCEVVCSILRSSLR

SEQ ID NO: 202621 - protein, 39 aa, Glycine max
  Clone ID: PAT_MRT3847_24992C.1.pep
IRNNVIMSIRIVAQSVKTAITARGNSLVADGIGSRARLG

SEQ ID NO: 202622 - protein, 101 aa, Glycine max
  Clone ID: PAT_MRT3847_24993C.1.pep
TFLPWPSHSVLPLYLIKHPDPNTAAQRHIIVSEGTTRAGDPEPRLHHATATAPAPQGESPNLGAPLSQSLNAASNRSTIAKNEGTCGAAWKTGRTTAHHCD

SEQ ID NO: 202623 - protein, 86 aa, Glycine max
  unsure (1)..(86): unsure at all Xaa locations
  Clone ID: PAT_MRT3847_24994C.1.pep
VXFCXXDGXKVXWGITXNVLNTXXXXGXHXXQXAXXXALNEXCXALTAFTIXXXTTRNXIKSQMIRLHDRHTRKLXRDSXEQXHXX

SEQ ID NO: 202624 - protein, 31 aa, Glycine max
  Clone ID: PAT_MRT3847_24995C.1.pep
CSRVFFYGDAAFTIYFIVPHSFNPSITYIIL

SEQ ID NO: 202625 - protein, 95 aa, Glycine max
  unsure (1)..(95): unsure at all Xaa locations
  Clone ID: PAT_MRT3847_24996C.1.pep
MNMKVLVLIVATVWMAYECHGXDYHKFPLEMKTGFGGQYRNQVGYARWRLGVEANNVIKRQTVPAAXEXYITDYVLRDLYRSDSKTVNQNAYLYA

SEQ ID NO: 202626 - protein, 79 aa, Glycine max
  Clone ID: PAT_MRT3847_24997C.1.pep
ENQNYHTCVRVCLKENVLERTPHCSSQTTPSILHPYLHYFHPTNDTFHPSIISHYQHNDIAYGHQVSFKSYFLGYIYLP

SEQ ID NO: 202627 - protein, 100 aa, Glycine max
  Clone ID: PAT_MRT3847_24998C.1.pep
MERARRLANKAILKRLISSAKVNSHSRSLSSISHSFSLPKPENPIGNNRKLSHNVPSRFISLDALKPSDTFPRRHNSATSEEQSKMAHTCGFDRLDSLID

SEQ ID NO: 202628 - protein, 167 aa, Glycine max
  Clone ID: PAT_MRT3847_24999C.1.pep
MAETLEFNDIFQEVKGSMNDGRLRLSRQGIIFKNSKTGKVDNIQAGELTEGIWRRVALGHGLKLLTKNGHVYKYDGFRESEFEKLSDFFKTHYRLELMEKDLCVKGWNWGTVKFGGQLLSFDIGDQPVFEIPLSNVSQCTTGKNEVTLEFHQNDDAEVSLMEVRFYV

SEQ ID NO: 202629 - protein, 45 aa, Glycine max
  Clone ID: PAT_MRT3847_2499C.1.pep
KGAGYTSEKPLDAKVLNMIQIHTHLFIIYDINIIYCKVCLWFWIF

SEQ ID NO: 202630 - protein, 62 aa, Glycine max
  Clone ID: PAT_MRT3847_249C.1.pep
NYHPINYGPGYRTCRVCGNTHGLIKKHGLMCYKQCFPFNAKETDFIKYGLKSCCHLLTNIMF

SEQ ID NO: 202631 - protein, 45 aa, Glycine max
  Clone ID: PAT_MRT3847_24C.1.pep
QIIHKVIIIRVANHTQIIITLVIEGRKNELMLIVWRTCIKSFWVS

SEQ ID NO: 202632 - protein, 101 aa, Glycine max
  Clone ID: PAT_MRT3847_25000C.1.pep
HVCPSLEAPKEDIGEDRMNSSAGFGDASADGRSVSPTKESPSCSMLDAEKPYSSSNRVMSAFPEANTQRVGKFETDLMAPPPMGLSPEVDDLSMGDFISET

SEQ ID NO: 202633 - protein, 84 aa, Glycine max
  unsure (1)..(84): unsure at all Xaa locations
  Clone ID: PAT_MRT3847_25001C.1.pep
YCPMTCWISCKDDTSNIFQMDSIANFGGLHMKLMKAVRKFSSTIRIRIENRCYSIQLILRDWRTKFYSVTTDLXDFGQTNMACK

SEQ ID NO: 202634 - protein, 316 aa, Glycine max
  Clone ID: PAT_MRT3847_25002C.1.pep
MALPYPFSYLLFLLLILLSSLPNISQATSRAPNRMLALVQNQPLVLKYHKGPLLKGNITLHLLWYGTFTPTQRSIVIDFLESLTSTSSPGSPSVSTWWQTTESYRGGPCTLVVGNQILDETYSLGKSLKNDHLVALASNPKLNSAPGDRVIHVILTAADVAVEDFCMNQCGTHGRGKNGNSEKIAYAWVGNSVTQCPGQCAWPFHQPLYGPQTAPLVAPNGDVGVDGMVINLATVLAGAVTNPFEDGYYQGPASAPLEAVSACTGIFGKGAYPGYAGNVLAENATGASYNAVGVRGRKFLLPAMWDPLTSTCKTLV

SEQ ID NO: 202635 - protein, 199 aa, Glycine max
  Clone ID: PAT_MRT3847_25003C.1.pep
NPLGPGKVVHHTQSVFKPLCKLFNPPPETLGAAALALHYANVIIVIEKLAASSHLIGLDARDDLYNMLPRRVRASLKAKLKPYTKTLASSSSSSIYDPSLAEEWNEAMSSILEWLAPLAHNMIRWQSERSYEQQSFISRTNVLLVQTLYFANQEKTEEVITELLVGLNYVWKYGRELNAKALAECGSFRVDNEYPNLNG

SEQ ID NO: 202636 - protein, 143 aa, Glycine max
  Clone ID: PAT_MRT3847_25004C.1.pep
FFFLLNIIAVLFYNCKSARFRERKFYFYFQLIVYFYRDTSVRDLRASSGDLVRIGNSNEMLNSVVNQDKETDMNHQNKKDNFGSDAPHFQSGVLRTNCIDCLDRTNVAQYAYGLQALGRQLHAMGLTDVPKVDPDSSIAAGRL

SEQ ID NO: 202637 - protein, 45 aa, Glycine max
  Clone ID: PAT_MRT3847_25005C.1.pep
MKVVGDKHSTSSKPRRRITERDVPLSQNEISKTMLEREREKEAYV

SEQ ID NO: 202638 - protein, 73 aa, Glycine max
  Clone ID: PAT_MRT3847_25006C.1.pep
GQNIIKQIKKKKKHQMLHEETERTKSITKLKQIDTNNPQNRFPQPHPITVSNKSTKNQQQHNFKNNNLIKITR

SEQ ID NO: 202639 - protein, 57 aa, Glycine max
  Clone ID: PAT_MRT3847_25007C.1.pep
RIQGRDGRPLTGDQLITMGALIPPPPHQWSWTAFSSASATHSPTSLPAPTTLSCKNT

SEQ ID NO: 202640 - protein, 55 aa, Glycine max
  Clone ID: PAT_MRT3847_25008C.1.pep
RAQSEAKAKGFLYVSYLDCVHKKYLEEDGSCYIFGAKGNIIISSSIKGTILPRIT

SEQ ID NO: 202641 - protein, 45 aa, Glycine max
  Clone ID: PAT_MRT3847_25009C.1.pep
PTRPARRRQKGTAARRRQKGDHKIILDHHQPFSTPFRLIQVHFRI

SEQ ID NO: 202642 - protein, 63 aa, Glycine max
  Clone ID: PAT_MRT3847_2500C.1.pep
VLRIHNLLFIIFPFRDLEVIANFQYFLQSSNGVIIFLLIMAIYTFYIFLKLPCYCLIKKYIIY

SEQ ID NO: 202643 - protein, 60 aa, Glycine max
  Clone ID: PAT_MRT3847_25010C.1.pep
NQCASLGIVLLLATVTAINDEAVTSPAEDSAPRSALSLRRFSARFRLSPPQHHHSRRTTR

SEQ ID NO: 202644 - protein, 170 aa, Glycine max
  Clone ID: PAT_MRT3847_25011C.1.pep
MASADVEFRCFVGGLAWVTGNDALEKAFSIYGDIVESKVINDRETGRSRGFGFVTFASEQSMKDAIAGMNGQDLDGRNITVNEAQTRASRGGGGGGGFGSGGGYNRGSGGYGGGGGGGGYGGRREGGYNRNGGGGGGGYGGGRDRGYGGDGGSRYSRGGEGGGSDGNWRN

SEQ ID NO: 202645 - protein, 118 aa, Glycine max
  Clone ID: PAT_MRT3847_25012C.1.pep
FSCFFFCFGSDASRFCVQVINDRETGRSRGFGFVTFASEQSMKDAIAGMNGQDLDGRNITVNEAQTRASRGGGGGGGFGSGGGYNRGSGGYGGGGGGGGYGGRREGGYNRNGGGGGGG

SEQ ID NO: 202646 - protein, 82 aa, Glycine max
  unsure (1)..(82): unsure at all Xaa locations
  Clone ID: PAT_MRT3847_25013C.1.pep
GVVCVWFKFRYLCWFRFVFLWFSFLTYNSSCVYSRSNEMIVRNYRVQKKKKKKKKKKKKGGAVLKIQTFVPGPSNEIXGFLG

SEQ ID NO: 202647 - protein, 363 aa, Glycine max
  unsure (1)..(363): unsure at all Xaa locations
  Clone ID: PAT_MRT3847_25014C.1.pep
MSKNQIYDIMSQMKSLIEQNQQQAKQILIQNPMLTKALFQAQIMLGMVQAPQTVPKVQPMVPQNNLQSVQPTQKPNIQPAPLLPGLGGAQDQAGVSQTQIPLRKHQNQPSVPVSSAVPALSHQSQPMAAQSLTMPQQPKGHLAPQVALASLPQSSQLPNIPSPSLHSLSQPLHPTQMSTASSHLQHPLLTPGFPHMPLPPQIRQPAMPTFHPQYPPQMGANLGFQHAGASHNLSQSMFHPGTKPPXASVGSTFPQGLPSQKSSQPPFQVGKVPSGXEFDNIAENALQVDKGASRMPGPSDNLAHLSGPPGPPYLVSVQMGAANQPLRPPALTPGMKKALLQQVMSLTVYPTIIPTSKRTYEFS

SEQ ID NO: 202648 - protein, 53 aa, Glycine max
  Clone ID: PAT_MRT3847_25015C.1.pep
LAPHTICRGTCQRDLSICLHYSYTTLVLSPMCKSTLYPMGIDPLKNSSLMCYS

SEQ ID NO: 202649 - protein, 347 aa, Glycine max
  Clone ID: PAT_MRT3847_25016C.1.pep
YLPEGLHSSATLYFEIFVRFLLFNQAQIMLGMVQAPQVVSKVRPMVSQSNQQSVQLIQKPNIQPAPLLPGHGGAQDQAGVSQTQIPLRKHQNQPSVPISSAVPAMSHQSQPMAAHSLPMPQQHKGHPTPQMAPVSLPQSSQLPNVPLPSLHQTQMATASSQLQQPLQTSGFPPLQPPLPPQIRPTALPTFHPQYPPQVGANMGFQHAGTSHNLPGSMIHPGTKPSASVGSTFPQGQTPLPGQPSSQPPYQVGNMPLGPDFGNQAGNAMQVDRGSSWLPGPSENLAHLSGPPGQMSAAANQLLRPPGLTPEMEKALLQQVMSLTPEQINLLPPEQRNQVLQLQQMLRQ

SEQ ID NO: 202650 - protein, 50 aa, Glycine max
  Clone ID: PAT_MRT3847_25017C.1.pep
VFAWGKGWFYFLASKYELVWSIFFLYQLVLWIFPVRTRFFCGPTILHVFF

SEQ ID NO: 202651 - protein, 103 aa, Glycine max
  Clone ID: PAT_MRT3847_25018C.1.pep
VPKVQPMVSQNNQQPVQPTQQPNIQPAPLLPGHGGAQDQAGVSQTQIPLRKHQNQPSVPVSSAVPAARHQSQPMAAHSLPMPQHPKGHPTPQMPLVALPNHHN

SEQ ID NO: 202652 - protein, 69 aa, Glycine max
  Clone ID: PAT_MRT3847_25019C.1.pep
CRVIGESRGSAYVTMASINSLPLPASISFISSASQKGIAERDAEMSLGGTVKSAYAIFHCSASYFYRTR

SEQ ID NO: 202653 - protein, 64 aa, Glycine max
  unsure (1)..(64): unsure at all Xaa locations
  Clone ID: PAT_MRT3847_2501C.1.pep
KTMNVYEPSHQISMRERTLXSNGNLSAPMPLIDETDMKCDSQPEDACHAILREAXNYDQEANKP

SEQ ID NO: 202654 - protein, 47 aa, Glycine max
  Clone ID: PAT_MRT3847_25020C.1.pep
LIHLELCGGGICMSRGLVGLVVRPGIYHNDYIIKDPMVRLKETGSWA

SEQ ID NO: 202655 - protein, 113 aa, Glycine max
  Clone ID: PAT_MRT3847_25021C.1.pep
MSKNQLYDIMSQMKNLIEQNQQQARQILIQNPMLTKALFQAQIMLGMVQAPQVGSKVRPMVSQNNQQSVQPTQQPNIQPAPLLPGHGGAHDQAGVSQTQIPLRKHQNQPSVPI

SEQ ID NO: 202656 - protein, 64 aa, Glycine max
  unsure (1)..(64): unsure at all Xaa locations
  Clone ID: PAT_MRT3847_25022C.1.pep
MSTKRGGKAKPLKKPKSDKKDYDKIDVXTCQTKKEEEKALTELQATAQQKGSFGGSGLKKRGKK

SEQ ID NO: 202657 - protein, 68 aa, Glycine max
  unsure (1)..(68): unsure at all Xaa locations
  Clone ID: PAT_MRT3847_25023C.1.pep
TILRCDLSTNYLTEGNFRASVDLQITPRITGMIXMVATDGITENTGIXLACAINSSSRVHANSDIDTN

SEQ ID NO: 202658 - protein, 70 aa, Glycine max
  Clone ID: PAT_MRT3847_25024C.1.pep
KINSLSTLLNISVNISDEIIIQQYISHITYLLNISEQTIIHQYISHSIMQPILHNFHIRKDYFYYWCYNK

SEQ ID NO: 202659 - protein, 65 aa, Glycine max
  Clone ID: PAT_MRT3847_25025C.1.pep
LALCYGSATCNDPPSTKQLFTYWLHSCEPYGGCHCIAHVCFSFAKMASVDLLLCLCRRTCHIIQQ

SEQ ID NO: 202660 - protein, 107 aa, Glycine max
  Clone ID: PAT_MRT3847_25026C.1.pep
EIPPLSGYSPLINRISYRKASMRSCVYLSRGSLTHGRRKISDSNFMKSMIVASSIRRPQEYQMAILSRSPSAVHPINVWKFISPIAKISRPEKPKYTIKISTPHKVR

SEQ ID NO: 202661 - protein, 145 aa, Glycine max
  unsure (1)..(145): unsure at all Xaa locations
  Clone ID: PAT_MRT3847_25027C.1.pep
LDFRFPGGFLIHGLWVSPTTNXFNTYDKDXNAEALALSPDVRAVGDPNGALRDIRNLDSFSLLDWFLSKGGTLLSITKWWDPVGYALGSIDCDNMRDRWMLTIFVLFXATKTEVYLLRMLEVAPDVHMSGPIRKYIFDRGGRFHL

SEQ ID NO: 202662 - protein, 89 aa, Glycine max
  Clone ID: PAT_MRT3847_25028C.1.pep
KYGSFAHKRTLFFWCNCPLSQKTIFRALLLIFRKGNRKKLMRGVIPKKKYPYFWVTAQKRRKKKKCWPLKKTRYARRFFLNPPLETPAL

SEQ ID NO: 202663 - protein, 35 aa, Glycine max
  Clone ID: PAT_MRT3847_25029C.1.pep
STRARKVKPLLYCHLNSIHWQSFYNIITGITHTLP

SEQ ID NO: 202664 - protein, 496 aa, Glycine max
  unsure (1)..(496): unsure at all Xaa locations
  Clone ID: PAT_MRT3847_2502C.1.pep
MVMGAFRHFEPVSKCSTENRFNQTVASDLDGTLLVSPSAFPYYMLVAIEAGSFLRGLVLLGSVPFVYFTYIFFSETAAIKSLIFIAFAGLKVKDIEMVASSVLPKFYTEDVHPESWRVFNSFGKRYIVTASPRVMVEPFVKTFLGADKVLGTELEATKSGRFTGFVKEPGVLVGEHKKXLCVKEFQGNLPDLGLGDSKSDYDFMSICKEGYMVPRTKCEPLPRNKLLSPIIFHEGRFVQRPTPLAALLTFLWLPIGIILSILRVYLNIPLPERIAWYNYKLLGIRVIVKGTPPPPPKKGQSGVLFVCNHRTVLDPVVTAVALGRKISCVTYSISKFTEIISPIKAVALSREREKDAANIKRLLEEGDLVICPEGTTCREPFLLRFSALFAELTDRIVPVAINTKQSVFYGTTVCGHKLLDPYFVFMNPMPTYEITFLNQLPKELTCSGGKSAIEVANYIQRVLAGTLGFECTNLTRKSKYAMLAGTDGTVPSKEKA

SEQ ID NO: 202665 - protein, 48 aa, Glycine max
  unsure (1)..(48): unsure at all Xaa locations
  Clone ID: PAT_MRT3847_25030C.1.pep
SHAFVQIPDTXHEINTDSWFQVGFEMTTGINNAFVLGYSGTIMGPLGW

SEQ ID NO: 202666 - protein, 57 aa, Glycine max
  Clone ID: PAT_MRT3847_25031C.1.pep
NTFQEYNNSMFDSLLTFNFLVLKTVFQHNSKLLSSQFFIKIYSVSKIISKTSTCFKL

SEQ ID NO: 202667 - protein, 67 aa, Glycine max
  Clone ID: PAT_MRT3847_25032C.1.pep
QPFSHSQPYGTLSLFLFFFIPFCALQFIMYNFMLPFSFLLGEICVKSPSKCCILLLLDLPLTKVPTL

SEQ ID NO: 202668 - protein, 89 aa, Glycine max
  Clone ID: PAT_MRT3847_25033C.1.pep
MTTVVPTSEENAALSVVRFASEIAWADASLEVAEPQIIRLCMEAEEFFVMGKRFVLASLMITTSAELVSTVVSETYKSSIFTIICILVT

SEQ ID NO: 202669 - protein, 246 aa, Glycine max
  Clone ID: PAT_MRT3847_25034C.1.pep
MSRGSGGGYDRHITIFSPEGRLFQVEYAFKAVKAAGITSIGVRGKDSICVVTQKKVPDKLLDNTSVTHLFPITKYLGLLATGMTADARTLVQQARNEAAEFRFTYGYEMPVDVLAKWIADKSQVYTQHAYMRPLGVVAMVLGIDDEYGPQLYKCDPAGHYFGHKATSAGLKDQEAINFLEKKMKNDPSFTYEETVQTAISALQSVLQEDFKATEIEVGVVRKDNPEFRVLTTDEIDEHLTAISERD

SEQ ID NO: 202670 - protein, 63 aa, Glycine max
  Clone ID: PAT_MRT3847_25035C.1.pep
CTVSYCSLKKKKKKKKKKKKKKKKKKKKKKKKKKKKKKKKKKKKKKKKKKKKKKKKKRIAPPN

SEQ ID NO: 202671 - protein, 225 aa, Glycine max
  Clone ID: PAT_MRT3847_25036C.1.pep
IRTIPDVIGVVIQAKVAFARIVKFLEAPELQSVNITQRCLNENKRGSILIKSADFSWEDNVSKPTLRNINLEVRPRQKVAICGEVGSGKSTLLAAILREVPNTQGTTEVHGKFSYVSQTAWIQTGTIRENILFGAAMDAEKYQETLHRSSLLKDLELFPHGDLTEIGERGVNLSGGQKQRIQLARALYQNADIYLLDDPFSAVDAHTATNLFNVTKTSFLQVLHL

SEQ ID NO: 202672 - protein, 107 aa, Glycine max
  Clone ID: PAT_MRT3847_25037C.1.pep
MGFSEKPQVEESDSTRKWVIAGIPSRAPLKPIFTTKEEEKDEEGDLEECSTTPKGEEAKIPTTLKCPPAPRKRKPSLKCNYRGGGAREFFTPPDLETVFIRHVERTS

SEQ ID NO: 202673 - protein, 70 aa, Glycine max
  Clone ID: PAT_MRT3847_25038C.1.pep
CFFCCYFFFLKTLPSDLTKCQKDHPQDNKLQGLCLCCCRTSSKTKEFENKIILFFESHKFITDPLLHLST

SEQ ID NO: 202674 - protein, 169 aa, Glycine max
  Clone ID: PAT_MRT3847_25039C.1.pep
MAWRKGCEEVANSKPLFLTIYTVVIIGIVVSSFFVFSAIYSTNPPSAQSSAWLSSISSDETRVTDQTLKVSRSAAVLIVPTPSPGSQNEWPTSIWDDPPPNKKMPPLEDFRLTKKLVQQRVKDNAVIVTFGNYAFMDFILTWVKQLRDLGVSNFHVSITHQQLETKRQY

SEQ ID NO: 202675 - protein, 221 aa, Glycine max
  Clone ID: PAT_MRT3847_2503C.1.pep
MVMGAFGHFEPVSKCSTENRSNQTVASDLDGTLLVSPSAFPYYMLVAIEAGSFLRGLVLLASVPFVYFTYIFLSETAAIKSLIFIAFAGLKVRDVEMVACSVLPKFYAEDVHPESWRVFNSFGKRYIVTASPRVMVEPFVKAFLGADKVLGTELEATKSGTFTGFVKKPGVLVGEHKKVALVKEFQGNLPDLGLGDSKSDYDFMSICREGYMVPRTKCEPL

SEQ ID NO: 202676 - protein, 109 aa, Glycine max
  Clone ID: PAT_MRT3847_25040C.1.pep
FDDHTFHNNRRTECLMDTFSFIASEKPKLFKLNRTCLVIGSKLEQSTLMFPKHHHVTNAPHCHWRRVHPTIHRVDQREFTSRLNRVEALFNVRKLHNLAQLRRLRLRAL

SEQ ID NO: 202677 - protein, 282 aa, Glycine max
  Clone ID: PAT_MRT3847_25041C.1.pep
MSPFDSPQTTADSSLSMSTSTSPSGGDALLKWGHRKRSRLSRAAIEDSSSSVHTNNRRITHTVPPNLSMPPPPLVSSTASSGRGRKHNSPRNLEDPSLGGSESPSRSQGSNPVVSRSAAAPKLSSCGMERSSRRMLSSGSAKCQKPSGFSTTQEASERLNNSSHASVQSEKEGGVATAPATSSLAANGNKVTVGVIQWPKIYIALSRKEKEDDFLAMKGTKIPQRPKKRAKNVDRILQCCFPGMWLSELTKSRYEVREKKSVKKQKRSRGLKGMENLDSDSE

SEQ ID NO: 202678 - protein, 81 aa, Glycine max
  Clone ID: PAT_MRT3847_25042C.1.pep
TQLDQQEFPSQEVTSPYLHKYRKTLLLQQERETESPTFRVQPSVIAGPGCCWSEIGSSGPKRPVQGRPLALITPVCCANSL

SEQ ID NO: 202679 - protein, 189 aa, Glycine max
  Clone ID: PAT_MRT3847_25043C.1.pep
MCTVVSSSVLVGWLSSSCSKTKGSVGNGISHLSPATRAISVLATAMAKDVWTRTSSSNTSRQRSRRQQYWDRSVDMEELLAAIGQTQNEDELYAVMSPYNGRQLSMRFMVSLLSREPDWQRALALLDWINDKALYSPSLFAYNVLLRNVLRAKQWHLAHGLFDEMRQKGLSPDRYTYSTLITSFGKHGL

SEQ ID NO: 202680 - protein, 94 aa, Glycine max
  Clone ID: PAT_MRT3847_25044C.1.pep
KFQKNYLISQATQITLKLHQKFTIVMYLTDTLDEMVHKRTLSPDLEIHVLIQFDKFMTEALETHVKNKVFIKGHLHTYRCCDNSLTFILQNALF

SEQ ID NO: 202681 - protein, 71 aa, Glycine max
  Clone ID: PAT_MRT3847_25045C.1.pep
IHVCIVHLSQISNPSHLSSTLSFASRILNLMFAQIINISLSTAISYSSTVKIIGRRFHHLVFHIKMRESCG

SEQ ID NO: 202682 - protein, 70 aa, Glycine max
  unsure (1)..(70): unsure at all Xaa locations
  Clone ID: PAT_MRT3847_25046C.1.pep
VKAWVYIYFFPRGVQESKLPKRKYHTLRERGVRXNTKGGLPMGLVLRRTFNLHNRSKEKGAIKAQAMAHY

SEQ ID NO: 202683 - protein, 84 aa, Glycine max
  Clone ID: PAT_MRT3847_25047C.1.pep
GVSMCAQRKNPPSLYCVGGFQYSVSGGFFIHRAGGYVKTSLFMTPGSQKFLQPPLGANFPSLIRAGRVSLLAKCLLMFGCLHSY

SEQ ID NO: 202684 - protein, 116 aa, Glycine max
  Clone ID: PAT_MRT3847_25048C.1.pep
MFEAHVLHLLRSYLGEYVHGLSTEALRISVWKGDVVLKDLKLKAEALNALKLPVTVKAGFVGTITLKVPWKSLGKEPVIVLIDRVFVLAHPAPDSRTMKDEDREKLFEAKLQQIEE

SEQ ID NO: 202685 - protein, 27 aa, Glycine max
  Clone ID: PAT_MRT3847_25049C.1.pep
LNKVNFGLIDISHVFTTLCPRMMVNNH

SEQ ID NO: 202686 - protein, 48 aa, Glycine max
  Clone ID: PAT_MRT3847_2504C.1.pep
QRTPEFELHHPAQTTPTVFSKFLFFFLIFSLSTQLRPPRGSTNFFWLG

SEQ ID NO: 202687 - protein, 121 aa, Glycine max
  Clone ID: PAT_MRT3847_25050C.1.pep
ASKNQWVSSWVETIPPPGFALANSPPFPLSAFKRSIFLSLSLNSISSTWTPRHSNSRSLLAPSPGACSFAQSYSRALSRLSLCTAPYPSSISEPSLPSPPTSTASPASRASPSAPVPPYSE

SEQ ID NO: 202688 - protein, 69 aa, Glycine max
  unsure (1)..(69): unsure at all Xaa locations
  Clone ID: PAT_MRT3847_25051C.1.pep
KPDPSFCSKVDLDLGNYERFIDIKLTRDNNITTGKIYQXSVIDKERKGDYLGKTVQVVPHITDAILEPN

SEQ ID NO: 202689 - protein, 58 aa, Glycine max
  Clone ID: PAT_MRT3847_25052C.1.pep
MGIIRSTFSFIAGTAFGVYLAQNYQIPNIRKLADTALLQAKQIEEKYRKSKKKGGDDD

SEQ ID NO: 202690 - protein, 50 aa, Glycine max
  Clone ID: PAT_MRT3847_25053C.1.pep
KSPQKVAGRLTLLTVLFSTRYFMAFRQSPFHLTLLKGPPLLNCFNCLARA

SEQ ID NO: 202691 - protein, 67 aa, Glycine max
  Clone ID: PAT_MRT3847_25054C.1.pep
LSKKPVHPPLGPDRKVSQSSATRASSCSCHQAGPQLFHSHCPIGMHTDNNTPTNARFLFLKKKKNPR

SEQ ID NO: 202692 - protein, 67 aa, Glycine max
  Clone ID: PAT_MRT3847_25055C.1.pep
WSGAYDIIKCKIVAQSLDEYSDWEQNLPARVASSYAEGRRLEKDLQFSEFVYLLAIWEFFANTSTRK

SEQ ID NO: 202693 - protein, 76 aa, Glycine max
  unsure (1)..(76): unsure at all Xaa locations
  Clone ID: PAT_MRT3847_25056C.1.pep
MASNKVIATILXXSXXAYSTXSFTXACXTCHPKPTPSPPPLSGKCXKXTLKXLGVCADXXGLXNVAGGSXVSSKCC

SEQ ID NO: 202694 - protein, 381 aa, Glycine max
  unsure (1)..(381): unsure at all Xaa locations
  Clone ID: PAT_MRT3847_25057C.1.pep
SALFDKMNRQALVAMHEVMEVQTVNAGPPATRSHRTAXYLVPPLLLPNHRPDAPQVTPAEIIEHIKPILTAHATLAILGDVINPDIDRRISEHVLRMHRFRSAVDGGEAALDGSSRYGREDEADMDSSVFVKYNRMLHGKKTGRGQKRDTLTIKFLKKFIHYAKHRIQPELTDEASENIATAYAELRNASSNAKTGGTLPITARTLETIIRLSTAHAKLKLSREVSKSDVEAALKVLNFAIYHKELTEMEEREQERERELDRKRKADHDENDGPDHGPKDRRGPKDKRRSTSTDAMDVDDNSATHAAVGPTPERIEEFNSLFNQHMHANRLEQITIANLGNVINRGQDPPPYSAADILLLLERLQDDNRVMITDGVVHMIS

SEQ ID NO: 202695 - protein, 110 aa, Glycine max
  Clone ID: PAT_MRT3847_25058C.1.pep
MVPDQGPKDTTGPKDKTRSTSTHAMDVHDNSAAQAAVGLTPERIQEFNSLFNQHMHANRLDQITVVNLVNVINRGEDPPSYSAADVLLLLERLQDANRVMITDGVVHMIS

SEQ ID NO: 202696 - protein, 92 aa, Glycine max
  Clone ID: PAT_MRT3847_25059C.1.pep
AVPDLAFSIFVGSLLFLREHPEHSLNPPCSPIEQVLINEVCPPSSHQLNGEVLHSSFDWLHSMPVFTSQIHEFVSIAHRASSASLDGEVKRY

SEQ ID NO: 202697 - protein, 215 aa, Glycine max
  unsure (1)..(215): unsure at all Xaa locations
  Clone ID: PAT_MRT3847_2505C.1.pep
MEWPACTDEYEKLIIRMNTPRXDSARRHGILLDAVEVLADLNLSIKKAYISADGKWFMDVFHVTDQNGNKIIDESVLKYIEQSLGNIHYGRTNLSNGLTALELTGTDRVGLLSEVFAVLADLQCDVVESKVWTHNGRIASLIYVKDSSSGSAIEDSQKINKIELRLRNVLKGDNDIRSAKISFSMAVMHTERRLHQLMFVDRDYERTPILKLTSD

SEQ ID NO: 202698 - protein, 64 aa, Glycine max
  unsure (1)..(64): unsure at all Xaa locations
  Clone ID: PAT_MRT3847_25060C.1.pep
MMQFWCXKKKKKKKKKKKKKKKKKKKKKKKKKKKKXKXXKKKKKGGGRFKEPKFTSRGWQRKSF

SEQ ID NO: 202699 - protein, 54 aa, Glycine max
  Clone ID: PAT_MRT3847_25061C.1.pep
LCFNIHVSYRSMGYRSMMRNTSNNIDPWHLIGNMREQWSFTTLFNKVELITYRI

SEQ ID NO: 202700 - protein, 78 aa, Glycine max
  Clone ID: PAT_MRT3847_25062C.1.pep
GGPPPPGFGPLASFDLARCGGFGGPPTPPGGARGGNLPRDGPGTPQPQNKKKKKKKKKKKKKKKKKKKKKNKKKKRKT

SEQ ID NO: 202701 - protein, 290 aa, Glycine max
  Clone ID: PAT_MRT3847_25063C.1.pep
MEALSLPINTLTNSSAKQHIYLSASSNYASVSSSLQLNPSLPTRPLTLRKSAVRVQAENEDFELKQMRDMAAARKRWEALIRDGKIKVLTPREAGYAVQLSSKPLLDVRPSNEHKKAWVRASTWIPIFDVDNKLDFGTIPRKVTSFVMGGWWSGMPTLSYDSQFLAKVEEKFPKDAELIVVCQKGLRSLAACELLYNAGYKNLFWVQGGYEAAEEEDLIVEGPMPLKFAGIGGVSEFLGWTDQQRAAAAKEGWGYRLVFSARLIGLILVVDALYIGAQQIGRYLQDIRTH

SEQ ID NO: 202702 - protein, 78 aa, Glycine max
  Clone ID: PAT_MRT3847_25064C.1.pep
APNSIYYLLLWENFFKFKPKPKIRGKGGYPIFPHINPEAQGLHYFLPPQGFRAPQLQKKDFAGNYEFWQTNPPTGRNN

SEQ ID NO: 202703 - protein, 39 aa, Glycine max
  Clone ID: PAT_MRT3847_25065C.1.pep
NRLKPYFPQKAGINWVLYKFIGTQNVLQFVSRQINWCRF

SEQ ID NO: 202704 - protein, 100 aa, Glycine max
  unsure (1)..(100): unsure at all Xaa locations
  Clone ID: PAT_MRT3847_25066C.1.pep
EEARRRLELDDVCSAVYAHTFTDLFKECAMGALKSKTEGLGTHHVYSLHGEDLIXVIRDGMIHQSRKYDDLLACGMDLSAIVAAHDTYMVLVEQGADLTG

SEQ ID NO: 202705 - protein, 97 aa, Glycine max
  unsure (1)..(97): unsure at all Xaa locations
  Clone ID: PAT_MRT3847_25067C.1.pep
QGGYEAAEGEDFIVEGXXPLKFSGIGGVSEFLGIWLQISDFIIISSWTDQQRAAAAKDRRGYRLVFSARLIGVFLVADALYFGAQQIGRYLQDIWTH

SEQ ID NO: 202706 - protein, 123 aa, Glycine max
  unsure (1)..(123): unsure at all Xaa locations
  Clone ID: PAT_MRT3847_25068C.1.pep
MGHIKSRMTKFTILLISRLLCIAQTCSASKWXDQQDTCRRQLQGVNLTLCEKHIMDKIQGRGRXIDDDDDDNHILRSMRGIFSYITRNHXIHDDEQKIAXMQNCCTEMSELRNAKCDCIAPHK

SEQ ID NO: 202707 - protein, 361 aa, Glycine max
  Clone ID: PAT_MRT3847_25069C.1.pep
GTWLTGSFNLTSNFTLFLHHGAVILASQDPKEWPIIEPLPSYGRGRERLGGRHISLIHGNGISNVVITGQNGTVDGQGRMWWELWWNRTLEHTRGHLLELISSDNVLISNLTFRNSPFWTIHPVYCSNVVVKGMTILAPLNAPNTDGIDPDSSTNVCIEDNYIESGDDLVAIKSGWDHYGITMAHPSTNIIVRRISGTTPTCSGVGIGSEMSGGISNITIENLHVWDSAAGVRIKSDKGRGGYITNVSISDIRMERVKIPIRFSRGSNDHPDDGWDPKAVPRFKDILISNVVSVNSTKAPVLEGVEGSSFEGLCFKNITLHGVALSARWRCEYVSGFATEVFPVPCPELRNNSYSSWCSAS

SEQ ID NO: 202708 - protein, 118 aa, Glycine max
  unsure (1)..(118): unsure at all Xaa locations
  Clone ID: PAT_MRT3847_2506C.1.pep
IFTYEDENTSPVGPATLYKDLDTDADKNISKGVENFRRVENLEGKGGPGTIKKISFAEDGESKIVLHKIETDDEANLGYSYIAEGGDGVPDTVEKITFXYKLGAGANRGAAVKIKVKY

SEQ ID NO: 202709 - protein, 75 aa, Glycine max
  unsure (1)..(75): unsure at all Xaa locations
  Clone ID: PAT_MRT3847_25070C.1.pep
PSXSPSVRPPSRXLYAPLATLGLVLSPPLLFLKSQTPPQRSSVPHSSTSFVGPPPHVSTSLLSPSPEYHISPSAG

SEQ ID NO: 202710 - protein, 97 aa, Glycine max
  unsure (1)..(97): unsure at all Xaa locations
  Clone ID: PAT_MRT3847_25071C.1.pep
AHTITNLTYAKDLINILYAXNGPDSTAITAGDGDKNMILGRRMFVSPSYYITVISTNGPXSASYLKKRINGFARTITTSSTLYRLLKKWTVLSFEAP

SEQ ID NO: 202711 - protein, 81 aa, Glycine max
  unsure (1)..(81): unsure at all Xaa locations
  Clone ID: PAT_MRT3847_25072C.1.pep
LTRGAENVVEFTVLPVKRPREEEDGTYGVSFDAVSALPYDPHYPDISAVIPGWFYKICPLXPMEAHALKMEKSLFQGMPDY

SEQ ID NO: 202712 - protein, 78 aa, Glycine max
  Clone ID: PAT_MRT3847_25073C.1.pep
RMERAAEKGKAIAAAVEGVEKHWGTSDSNTSFIETLREQIFKPSLSTIIPEHSKLVTVSPTDSVLTTTKKRLNFVQVV

SEQ ID NO: 202713 - protein, 145 aa, Glycine max
  unsure (1)..(145): unsure at all Xaa locations
  Clone ID: PAT_MRT3847_25074C.1.pep
RVLNVKPLRTLVPVFPSPSNXASSSTPQGGAPFVCVSPSGPFPSGVAPFYPFFISPESQRLSEQNAQTPTSQRVAAGPISTAVPINSFRTPTGAANGDVGSSRKNARSRGQITDEDGHSNVEIEEIDADPFCRLLAAVSSRIPSR

SEQ ID NO: 202714 - protein, 91 aa, Glycine max
  Clone ID: PAT_MRT3847_25075C.1.pep
LGPGFRCIPPGGVLGLWPVLGSGFWLFLLQVLGPALCFIPRSLQVCCPRSYWVPRRCFLALFCSSSTILAWPLPNTLASPLSQRRGICDTA

SEQ ID NO: 202715 - protein, 37 aa, Glycine max
  Clone ID: PAT_MRT3847_25076C.1.pep
LLFNYLYYVFSCIVLVSTIIIFSSSFSANKLFHFYFF

SEQ ID NO: 202716 - protein, 79 aa, Glycine max
  Clone ID: PAT_MRT3847_25077C.1.pep
QQMKEGEIIWIKQTSAKLITMITNELFFQLRMLEYVLSSFKRINGRAHQKNKVKQKNSIIKGSNNKFIFWRICSLCGCF

SEQ ID NO: 202717 - protein, 92 aa, Glycine max
  Clone ID: PAT_MRT3847_25078C.1.pep
FTVKEKGVTGLKAETSVKELALNERQRRRIKSAVESKALVPSVEVRTKTGLGLGGWNSPSISVTIVCGDVTMRQLQKGDPPLCSITLLKWYF

SEQ ID NO: 202718 - protein, 75 aa, Glycine max
  Clone ID: PAT_MRT3847_25079C.1.pep
CCSSINLGMYEAASSDPRKPSAPATGFPVSYSTSTTEAEVYSYSYGPVVVPVPPPHPKPIVEWSTGLCDCFSDWG

SEQ ID NO: 202719 - protein, 78 aa, Glycine max
  Clone ID: PAT_MRT3847_2507C.1.pep
PQKCDLSYLRRMLDKKDSTCYSYKKPMKGSQLIIHGKESLLDHPKKMLMKDLLIEGIWAYNLIYMYGVSVQLQSHSCK

SEQ ID NO: 202720 - protein, 182 aa, Glycine max
  unsure (1)..(182): unsure at all Xaa locations
  Clone ID: PAT_MRT3847_25080C.1.pep
LEYLNLPIEHKQCFAYCAIFPKDESIGKQYLIELWMANGFISSNERLDVEDVGDQVWNELYQRSXFFQDIETDEFGKVTSFKMHDLVHDLAQSIAEDVCCIAEDNRVTTLPERIHHLLDHRSMWNVYGESKNSVLLHPVKSLRTYILPDHYGDQLSPHPDVLKCLSLRVLDFLKQETLSSSI

SEQ ID NO: 202721 - protein, 78 aa, Glycine max
  unsure (1)..(78): unsure at all Xaa locations
  Clone ID: PAT_MRT3847_25081C.1.pep
NKGGGGAFCLKIKEINIKRGGKESLLLTILKIFNSFPLNPLVHRVSRSCDXVNISFPLFPIFHCPPFSKLPLLKSPPL

SEQ ID NO: 202722 - protein, 205 aa, Glycine max
  unsure (1)..(205): unsure at all Xaa locations
  Clone ID: PAT_MRT3847_25082C.1.pep
SPIEDEALLKLVERTAPQTRTVISTNIPSRAGKSCPLIGRIQLTPQDEHRTSTPXKDEGGGGSLARFGNKRATIARLIXDRTDNAIKTHWNESLKHKCACFMKDSDEGGCGSARTLKRSLSARAGRTTPGSPFGSDYIESSAPGVRSVLYFDACNREPKLLDTWKLRQRMTMPTRPDPLVHCHCLSPVGRRLKMQIPQLPCRRRH

SEQ ID NO: 202723 - protein, 196 aa, Glycine max
  unsure (1)..(196): unsure at all Xaa locations
  Clone ID: PAT_MRT3847_25083C.1.pep
MQSKSNLDCFLRRTTPVVPSQFLPKHEIRNLNRLWHPWEREAVEYFTLGDLWNRFHEWSAYGAGVPITLSNGETLVQYYVPYLSAIQIFTSNTFREETESCECETRDSYSDSXREESESDKLWRWDGTSSEEGGSEHDCLWHMNDRLGHLYFQYFDRSTPHGRVPLMDKITXLAERYPGLMSLKSGXIFSPASWMG

SEQ ID NO: 202724 - protein, 63 aa, Glycine max
  Clone ID: PAT_MRT3847_25084C.1.pep
RLMNVKYTLCVRKRDIDDFIFPLLWMLFQFQTLQQYLSVKEKFSTSLFNGEKKILYNKNDWWI

SEQ ID NO: 202725 - protein, 61 aa, Glycine max
  Clone ID: PAT_MRT3847_25085C.1.pep
RWYLSLYKNLHSRHFLYTCGDGLLSTYMPKPLTSVTRVNIALHESIPGLAHFVHPFREIMF

SEQ ID NO: 202726 - protein, 58 aa, Glycine max
  Clone ID: PAT_MRT3847_25086C.1.pep
NTQILDMRLFKRVLSFLSSTFYHTCNQSQKHDHLIGKIERNKLQGYSTITLLLMYCNS

SEQ ID NO: 202727 - protein, 89 aa, Glycine max
  unsure (1)..(89): unsure at all Xaa locations
  Clone ID: PAT_MRT3847_25087C.1.pep
HLLLPCRSRMAICRRDGRRVECGIPSGFTITVICISIINEMLIQYSYEKLLRHAKAANVXLPCFKNFASLCVXGDDDLIGVHDXVKPYF

SEQ ID NO: 202728 - protein, 138 aa, Glycine max
  Clone ID: PAT_MRT3847_25088C.1.pep
NHMAEFTENMQLQSNIRPSQFPFLEIDPSMELLNQFLGMNQHVLENSNLIPMHNLVPFSCDTFLGPQEPECPGNLEENFPAHVNHDALTIALPIFQAENEIHEGKKRKSMDLPETSSANSTPAVSESGSKIKHVNSFG

SEQ ID NO: 202729 - protein, 80 aa, Glycine max
  Clone ID: PAT_MRT3847_25089C.1.pep
SLAYIGHFPAYSLECLHRLTCTQSHTCIRQRKTEKIIKKMLWQCCMTGYTRQIRELWRLNRDTNVGPHRVIEQLCCAWPL

SEQ ID NO: 202730 - protein, 74 aa, Glycine max
  Clone ID: PAT_MRT3847_2508C.1.pep
MEWPACTDEYEKLIIRMNTPRVVIDNSVFSSATLVKVDSARRHGILLDAVEVLADLNLSIKKAYISADGKWFMD

SEQ ID NO: 202731 - protein, 619 aa, Glycine max
  unsure (1)..(619): unsure at all Xaa locations
  Clone ID: PAT_MRT3847_25090C.1.pep
AIPLAKYVKAVYHTRVSVGMRFRMLFETEESSVRRYMGTITGISDLDPVRWQNSHWRSVKVGWDESTAGDRQPRVSLWEIEPFTTFPMYPSPFPLRLKRPWLPGLHSFHGMKDDDFGPKSTLLWLRDPDRGLPSLKFLGIGINPWMQPRFDLTIXNMQTDMYQAAAVQDIRSFDPSSKQSASLLPFQQPQNFPNRTAALMQAQMLQQSQPQQIFGNTQENQHSPQSQAHLQQHLQHQHSFNSQHHHHHQQQQQRQQHQVVDNQQISSAVSTMSQFVSAPQPQSPPMQVISSMCQQQNFSDSNGNTVTTIVSPLHSILGSFPQDETSHLLNLPRTSSWIPVQNSSGWPSKRVAVDPLLSSGASQCVLPQVEQLGQPQSTMSQNAISLPPFPGRECSIDQEGSNDPQNHLLFGVNIEPSSLLMPNGMSSLKGVCGNNGSSTLPYQSSNYLNTTTRTDSSLNHGMTPNIGDSGFLQCLEEAGQGNPLNKTFVKVYKSGSFGRSLDITKFSSYHELRGELARMFGLEGELEDPVRSGWQLVFVDRENDVLLLGDGPWPEFVNSVWCIKILSPQEVQQMGNNGLELLNSFPIQRLSNGICDDYVSRQDPRNLGTGITTVGSLDY

SEQ ID NO: 202732 - protein, 48 aa, Glycine max
  Clone ID: PAT_MRT3847_25091C.1.pep
VIAFPCTSSVSIVFSQVIYLHSNRSNLFLLLALLYSIQSCILAVIQVT

SEQ ID NO: 202733 - protein, 172 aa, Glycine max
  Clone ID: PAT_MRT3847_25092C.1.pep
MEVVVQSPSSPNMDTFDFGGNMGSIFQSVPSSPKGFGNYYLSAPASPSRMSELYTEFEYYSSASPSSFEAGNKIDDDDEDENNNDYSFAFYVNRDQSDKSSRSAEELFDGGKIKPLNESSRATSVAEQKRGRERERSSSSTRTTKLSSSNSGVRTVARSLSPYRKSWEVEQQ

SEQ ID NO: 202734 - protein, 51 aa, Glycine max
  Clone ID: PAT_MRT3847_25093C.1.pep
EDRFVSDIVSSVSSSHVLLIVFFLQAYNSGTHHIYPYNRIIREFGVFVPKE

SEQ ID NO: 202735 - protein, 84 aa, Glycine max
  Clone ID: PAT_MRT3847_25094C.1.pep
FDSHDHLLGCFGYGSKSRIPILSIAIIIIMCRFTRSVRDHGLFFLRVLFHSCSFSFTLHSTTLPNGSNFYAAMVGPNSGSSFIR

SEQ ID NO: 202736 - protein, 40 aa, Glycine max
  unsure (1)..(40): unsure at all Xaa locations
  Clone ID: PAT_MRT3847_25095C.1.pep
FLYKHSTTNCECVYGDLNPILRAEHYVGKKGWSLVTVCXS

SEQ ID NO: 202737 - protein, 116 aa, Glycine max
  Clone ID: PAT_MRT3847_25096C.1.pep
TDGHLSRFPSKCLRHSNGIFARKQVPATMAGKFGLGESLLPCKVEEDHHTEQGFMAGIRVTYQPVVLESNRSPCLEIEEGPPGMNKKVYQTRSSSDKEKAKYMVWTNEMDKCLTKV

SEQ ID NO: 202738 - protein, 267 aa, Glycine max
  Clone ID: PAT_MRT3847_25097C.1.pep
KQWDCCTDCRGYCMLAREEERTKGSKLGIRLEGKWPFRRVYGIQEPVAVALSAVNLAMQFHGWVSFFILVYYKLTLRPDKKTYYEYTGLWHIYGILSMNAWLWSAVFHSRAVELTEKLDFSSAVALLGFSLILAILRAFNVRDEATRVMISAPLIAFVTTHIMYLNFYELAYGLNRIVCTGMVVVQLLIWAIWAGASNHPARWKLWAVVVGGGLAMVLETYDFPPYMGYVDAHALWHATSIPLTFFWWGFIRDDAEFRTTAMLKKVK

SEQ ID NO: 202739 - protein, 55 aa, Glycine max
  Clone ID: PAT_MRT3847_25098C.1.pep
ITVPVSVYSCISSEIMGFLPSKGFVLSPGFSFLFWVRLVSQALKALYVRLKCLRF

SEQ ID NO: 202740 - protein, 112 aa, Glycine max
  Clone ID: PAT_MRT3847_25099C.1.pep
MGNETRKLSDEYEVSEVLGRGGFSVVRKGTKKSSSDTKTHVAIKTLRRVGTASNSNNPSGFPRPKGGEKKSTAAMMGFPTWRQVSVSDALLTNEILVMRRIVENVSPHPNVI

SEQ ID NO: 202741 - protein, 93 aa, Glycine max
  Clone ID: PAT_MRT3847_2509C.1.pep
SGIRLELLINSTTTLPVFSNVINNPNVITPPPSSSNFIQQQPITPHLEPNLEKRNSVAAMMEMIFRVAVMQPIHIDPESIKPPKRMNVNISKD

SEQ ID NO: 202742 - protein, 445 aa, Glycine max
  unsure (1)..(445): unsure at all Xaa locations
  Clone ID: PAT_MRT3847_250C.1.pep
MAGGGGGDRPPWKEAAPPRPTITLPPRSGSMESLFNGGFSPGPMTLLSGFLGDGDDGKSFSQLLAGAMSSPVAGAVAAGVMDSPGLFSSSQVSFGMTHQQALAQVSAQASQANSNMHIQAEHSLTQAPAAASNTTQQLMPPLTSDSWAAMTESIDHSHSEQRLQSSLLNVDKPADDGYNWRKYGQKQVKGSEFPRSYYKCTNPNCPVKKKVERSLEGHVTAIIYKGEHNHQCPHPNKCSKDTMTSNENSNMQGNVDSTYQGTSTNSMSKMDPESSQATADRLSGTSDSEEVADHETEVDEKNVEPEPKRRKAEVSXSDPASSHRTVTEPRIIVQTTSEVDLLDDGYRWRKYGQKVVKGNPYPRSYYKCTTQGCNVRKHVERTYEGKHNHDVPAAKTNSHTMASNTASQLKSHNTNPEKHNFGSRGMGGNEQQPVARLQLKEEQIT

SEQ ID NO: 202743 - protein, 441 aa, Glycine max
  Clone ID: PAT_MRT3847_25100C.1.pep
MLQIRLSKAPASEGSAGLKLSPVETVTVACPDHLVLADLPVAKGIGAATVASRVKTLGRRSRRQLGERVHFCVRCDYPITDYGRLIHCVHAYCLDFAVRDDSMCYLCDDRIQKIQTIKMMEGILICAAPHCLKSFLKKADFESHIQDSHGNLLRPNADKEDGNESEAQSVRQSTASDSTARGPQRPVFSPGSNSQQHDLEDKSRRQTPREQPPSRQTQQPKPPYYGQQQHPSDTMSASVGGGQQGFHQQIFDMQHPPQDPSQFADRQQAVGPEAPFPEYPAMHPAQPSNVPLLVTSNPMLNPPMTFGYPPYLNERAQPFYGAPYDMPRQDSGSDIGGDQSSLVGFPQGVPNGPNFPGNYPQPWNSGMGGVPFEQAQGGMVVDPREGKGILAPQPMPLPPPPPPPSHMSYGKQNYYSGELGHDGQSYGGWQHDTRDSFGSQG

SEQ ID NO: 202744 - protein, 163 aa, Glycine max
  unsure (1)..(163): unsure at all Xaa locations
  Clone ID: PAT_MRT3847_25101C.1.pep
MLQIRLSKAPASEGSAGVKLSPVETVTVACPDHLVLADLPVAKGIGAATTASLVKTLGRRSRRQLGERVHFCVRCDFPIAIYGRLIPCEHAFCLDCARSDSMCYLCDDRIQKIQTIKMMEGILICAAPHCLKSFLKKXDFESHIQDSHGNPLRPNADKEDGNE

SEQ ID NO: 202745 - protein, 82 aa, Glycine max
  Clone ID: PAT_MRT3847_25102C.1.pep
MIKRGIRKKDTILVEKHIIREFNGEERLMGGVDDARLWIRGAQPWTHTTNHWVDGKKEFDLCSIHIPEHTLMWPDLIQKPKM

SEQ ID NO: 202746 - protein, 204 aa, Glycine max
  Clone ID: PAT_MRT3847_25103C.1.pep
GPGAFFGNGGSLVKMGGPFSRLDELIFVGGPLSPLFSKFFGGGSPPMFGPVVFPGRPNGTGFFPPLVGLEIRVFFGRVFAPRGGAPGGAKALGFFFPPPFFFFSFGPGGAGQLPLFFSKSPFFFFFPGFPHFPGVPGFLFFGFGGFCLFFPPPNPLGGGGGLSPEKKGGGGFRLKKKKKKKKKKKKKKKKKKKKKKKKKKKKKG

SEQ ID NO: 202747 - protein, 57 aa, Glycine max
  unsure (1)..(57): unsure at all Xaa locations
  Clone ID: PAT_MRT3847_25104C.1.pep
LIKFSNERAPFDIGSIVHKCRDYLGNGCCTKRGLNXVALSLLVFSTFRMPIDSFSWI

SEQ ID NO: 202748 - protein, 84 aa, Glycine max
  Clone ID: PAT_MRT3847_25105C.1.pep
ILYYFVCTVHSPPNNAQDKKLFCNLQIFFVLFSLCYALVCIKCTLWCTIESASFSRNVEKNVQLLHCTHIRGLTLHIYQGSQLC

SEQ ID NO: 202749 - protein, 82 aa, Glycine max
  Clone ID: PAT_MRT3847_25107C.1.pep
SPKAHTKRKKTDSTKDNEDDAKTSHPLDNNPCEAATRKYGWSANMERIMQTQTLTDASKQEYMFFKRATEDNPRKPRTKETR

SEQ ID NO: 202750 - protein, 392 aa, Glycine max
  unsure (1)..(392): unsure at all Xaa locations
  Clone ID: PAT_MRT3847_25108C.1.pep
DRERGMGNHRFKLSDMIPNAWFYKLRDMGKGRDSRKQNTTPSRKKKQTSPPSTTHSSIRNQPHQQNNNNPRKSYYFTRDLKISPSNTPKTISPPRKSTKQRTKKRTPTRTPKLVSSSGCSCRTTLESMWTKSDSPQDEHSSSSPFDTSPESQSPEFRTDRVLLPFSSSFDEMVSLSTTSCASCRLNTNKNKNNTTNDTIIDVDKNSIARKDNKLDGYYNYNTNNGYDDTFSELELPPIITKPSSKLLKKRELKQGSLKVRIVKEQDSAMKEQRNHHGSLRRLSVSSPGVRLRIHSPRIAGRRGRKSVSSSSTRQVPXSRRSLSESFAVVKSSFDPQKDFMESMVEMIVENNIRASKDLEDLLACYLSLNSDEYHDLIIKVFKQIWFDLTQPR

SEQ ID NO: 202751 - protein, 60 aa, Glycine max
  Clone ID: PAT_MRT3847_25109C.1.pep
AKKQETFTIFSYKWQGEHMAQKANQHCTRDQNKSIQEHYEAINSTNPCDYIKNIHKSIIK

SEQ ID NO: 202752 - protein, 53 aa, Glycine max
  Clone ID: PAT_MRT3847_2510C.1.pep
SSSAQQRNSFQILIHCIPILSTLGRVGFKCSASTPNDLDSISKPPRLGFETLA

SEQ ID NO: 202753 - protein, 61 aa, Glycine max
  Clone ID: PAT_MRT3847_25110C.1.pep
FYLIVIFTSQKLDDILPYSYNYDVPHVNRSDYHLIDIAQDGFLSLLTENCNTNVDLKLSTD

SEQ ID NO: 202754 - protein, 85 aa, Glycine max
  unsure (1)..(85): unsure at all Xaa locations
  Clone ID: PAT_MRT3847_25111C.1.pep
MPITYISVGRPKQATHPHTLQAALTEFISTFIFAFADSRSCITYNXLTDDLAATPAXLMSASIMHAFSLFVAVSVRTYISGRHIN

SEQ ID NO: 202755 - protein, 70 aa, Glycine max
  Clone ID: PAT_MRT3847_25112C.1.pep
CSAIPIFLNQDTECPNSGNCYLHHGYCVHIVVVISTGFSHLFTHRTTSVSSFSAPLSQSFFIFGGFFSRT

SEQ ID NO: 202756 - protein, 200 aa, Glycine max
  Clone ID: PAT_MRT3847_25113C.1.pep
QINQLGRLKHLSLVRSQEFQITYFRRVNDLGLLLMADKCANMESICLGGFCRVTDTGFKTILHSCTRLYKLKVTHGTHLTDLVFHDISATSLTLTHVSLRRCNLLTNHAVLSLASNKVLKILDLRDCRSLGDEALQAIGTLPRLKILLLDGSDITDAGLLYLRPSVISSLYALSLRGCKRLTDKCITALFNGCCVLELRD

SEQ ID NO: 202757 - protein, 76 aa, Glycine max
  Clone ID: PAT_MRT3847_25114C.1.pep
SVVAELGFLILLVLFFFFMSQFLFALLLVLEISVVSCSSFQVWECIVYMHDLEPCATLQGCCSGREGPDSHRSQRA

SEQ ID NO: 202758 - protein, 131 aa, Glycine max
  Clone ID: PAT_MRT3847_25115C.1.pep
MTGIVVCVYVVFSLLQTDTASVLLEAIGYIRFLQGQIEALSSPYLGNGSKNMRNPQSQQVHGERNSVFPEDPGQLLNDNGLKRKGAPNQDAKDKPSDLKSRGLCLVPVSCTQHVGNENGADYWAPAYGSGF

SEQ ID NO: 202759 - protein, 52 aa, Glycine max
  Clone ID: PAT_MRT3847_25116C.1.pep
DRQLHDPVVSHDRPSHRVVFPSRALDMYYTIFFGAMQSLLSLLDSIITYSVC

SEQ ID NO: 202760 - protein, 486 aa, Glycine max
  unsure (1)..(486): unsure at all Xaa locations
  Clone ID: PAT_MRT3847_25117C.1.pep
MAQPSTRIGLAGLAVMGQNLALNIAEKGFPISVYNRTTSKVDETVERAKQEGNLPVYGYHDPEAFVHSIQKPRVIIMLVKAGAPVDQTIKTLSAYMEKGDCIIDGGNEWYENTERREKSVAELGLLYLGMGVSGGEEGARNGPSLMPGGSFGAFKYIKHILLQEAGKSQYSGXCVTYIGNGDYLLLSEKDDLXSRFDSLQMNGGHXYFQYSAGWKSIDSLXSDLMAWKXRELLSFLIEVTEDIFGIKDDKGDGYLFDKVLDKTGMKGTGKWTVQQAAELSIAAPTIEASLDARFLSGLKEERVEAAKVFKSGGIGDIVTDQPVDKKKLVDDVRKALYAAKICSYAQGMNLIRAKSIEKGWDLKLGELARIWKGGCIIRAIFLDRIKQAYDRNPNLANLLVDLEFAKEIIDQQSAWRRVVCLAINSGMSTPGMSASLAYFDXYRRERMPANLVQAQRDYFGAHTYERVDIEGSYHTEWFKLAKQSRI

SEQ ID NO: 202761 - protein, 404 aa, Glycine max
  unsure (1)..(404): unsure at all Xaa locations
  Clone ID: PAT_MRT3847_25118C.1.pep
TSPGSPYSAAAAPTSSSATSRTSSRIGSRGYLKGLERRKEIIDHQSAWRRVVCLAINSGISTPGYFRDRILFLTVLQSPNMEQLRTDIWGYIMGNERLDANYVVPQWMPQFKCRSEAQTLIVXDDVWTLSVVDQLMCRIPGCKFLVVSRPKFQTVLSYEMELLIEEDALSLFCHHAFGQKSIPLAANENSVKQVVTECGRLPLALKVIGASLRDQTEMFWLSVKNRLSQGQSIGESHEINLIDRMAISINYLPEKIKECYLDLCCFPKDKKIPLDVLINMWVEIHGIPETEAYAIVIELSNXNFLTLLKEARAAGTYSSCFEISVTQHDELRDLALNLRNHESIDERRLLVMPKKENGMPKEWLRYRQKPFEAQIVSIHTGEMKEMDWCNLEFPKAEVLTITTP

SEQ ID NO: 202762 - protein, 105 aa, Glycine max
  unsure (1)..(105): unsure at all Xaa locations
  Clone ID: PAT_MRT3847_25119C.1.pep
MAQPSTRIGLAGLALMGQNLALNIAEAGFPISVYNRTTSKVDETVERAKQEGNLPVYGYHDPEAFVHSIXKPRVIIMLVKAXAPVDQTIKTLSAYLEXGDCIIDG

SEQ ID NO: 202763 - protein, 94 aa, Glycine max
  unsure (1)..(94): unsure at all Xaa locations
  Clone ID: PAT_MRT3847_2511C.1.pep
SSLNQFKTKLYVFWANTPKKNVCDFKVKGNWLDRSCVVYAGESNHMVAQMLKKPPVQSILVGKNQFRVPVYPPLDXALVGAPIVILADINEDEK

SEQ ID NO: 202764 - protein, 97 aa, Glycine max
  unsure (1)..(97): unsure at all Xaa locations
  Clone ID: PAT_MRT3847_25120C.1.pep
GLKFLILFIFLLGWGCYLINMKNILPIRASLPRAVVRGLETARGHAMAVGTQMLRSRXIGAAYTWGHLAGFPQSQSNRLPCWGSHTCKEISSGWCSL

SEQ ID NO: 202765 - protein, 58 aa, Glycine max
  Clone ID: PAT_MRT3847_25121C.1.pep
INHYDTVIFTLLLPNSLSKSLLDCSFSNLFDLYFLILIHATLPCSIHASAHASAQTYS

SEQ ID NO: 202766 - protein, 511 aa, Glycine max
  Clone ID: PAT_MRT3847_25122C.1.pep
MAQPSTGIGLAGLAVMGQNLALNIAEKGFPISVYNRTTSKVDETVERAKQEGNLPVYGYHDPEAFVHSIQKPRVIIMLVKAGAPVDQTIKTLSAYMEKGDCIIDGGNEWYENTERREKEVAELGLLYLGLGVSGGEEGARNGPSLMPGGSFEAFKYIEDILLKVAAQVPDSGPCVTYIGKGGSGNFVKMIHNGIEYGDMQLIAEAYDVLKSVGKLSNEELQSVFSEWNKGELLSFLIEITADIFGIKDDKGDGYLVDKVLDKTGMKGTGKWTVQQAAELSIAAPTIEASLDARFLSGLKEERVEAAKVFKSGGIGDIVTDQHVDKQKLIDDVRKALYAAKICSYAQGMNLIRAKSIEKGWDLKLGELARIWKGGCIIRAIFLDRIKQAYERNPNLANLLVDPEFAKEIIDYQSAWRRVVCLAINSGISTPGMSASLAYFDTYRRERLPANLVQAQRDYFGAHTYERVDIEGSYHTEWFKLAKQSKKLDYCISANQDFPNKCNIFCSDCMLS

SEQ ID NO: 202767 - protein, 85 aa, Glycine max
  Clone ID: PAT_MRT3847_25123C.1.pep
TGRLLYKTLSKGKTEQEKITDQEYFRANIFSLSTISNNRTGGSSLISKPLFCPSQQIYFSSFLKNRKDQILWPLYRGWNRNLKIP

SEQ ID NO: 202768 - protein, 123 aa, Glycine max
  Clone ID: PAT_MRT3847_25124C.1.pep
KATIGDYLGQHEEFPLAVMDAYVDSMKFSGFKFDTAIREFLKGFRLPGEAQKIDRIMEKFAERYCADNPGLFKNADTAYVLAYAVIMLNTDAHNPMVWPKMSKSDFVRMNARDDPDECAPKEL

SEQ ID NO: 202769 - protein, 43 aa, Glycine max
  Clone ID: PAT_MRT3847_25125C.1.pep
SFDTFVTKNKITYIFPYHDYYLAFMYGLTRLELSQRTVLEKGK

SEQ ID NO: 202770 - protein, 75 aa, Glycine max
  unsure (1)..(75): unsure at all Xaa locations
  Clone ID: PAT_MRT3847_25126C.1.pep
TXSTFXQNWGXXXXSNCILWQGEXQVXNTXXCXFYTLDVXNTWCXXLXHPSQAXICXATFKIAXYIXXSXFIXRX

SEQ ID NO: 202771 - protein, 152 aa, Glycine max
  Clone ID: PAT_MRT3847_25127C.1.pep
MATSWSCYLLALLLFMSTIVSESRVARKDLGLDLGGLGVGLGLGLGLGIGGGSGSGAGAGAGSGGSGSGSGSSSSSASSSASSSSSSGSGGSGAGSEAGSYAGSRAGSGSGRSQGRGGGGGGGGGGGGGGGSGYGHGEGYGHGEGYGQGGGD

SEQ ID NO: 202772 - protein, 74 aa, Glycine max
  Clone ID: PAT_MRT3847_25128C.1.pep
MAASFASASSKLILFPHSTSCSLISTPFRSSTNTHKLSPLSYSFLHPTTFLRRTPYSTTTPTLTAPVTPTTSRT

SEQ ID NO: 202773 - protein, 57 aa, Glycine max
  Clone ID: PAT_MRT3847_25129C.1.pep
SSLTSHISSLRGRLDSEFGFGFGFKPFYLFSLAAPTAAFLSYSKHCFLVLVFFCLVL

SEQ ID NO: 202774 - protein, 86 aa, Glycine max
  unsure (1)..(86): unsure at all Xaa locations
  Clone ID: PAT_MRT3847_2512C.1.pep
VVIGXXXNIHXVPVRSEKKNLKGELXLXKHLLAFFXGLLSXFXXXTATNHXKFVFGXFIXXXXIXLFFVQFITSXSNRFPKXMNPS

SEQ ID NO: 202775 - protein, 49 aa, Glycine max
  unsure (1)..(49): unsure at all Xaa locations
  Clone ID: PAT_MRT3847_25130C.1.pep
CWDSXSTIVSFGVVLFSQGYYPLVSKLFTMFLSCKQVAQLVTPAMFSRN

SEQ ID NO: 202776 - protein, 235 aa, Glycine max
  Clone ID: PAT_MRT3847_25131C.1.pep
MAEQDKVILHGMWASPYAKRVELALNFKGIPYEYVEEDLRNKSDLLLKYNPVHKKVPVLVHNGKAIAESMVILEYIDETWKDGPKLLPSDSYKRAQARFWCHFIQDQLMESTFLVVKTDGEAQQKAIDHVYEKLKVLEDGMKTYLGEGNAIISGVENNFGILDIVFCALYGAYKAHEEVIGLKFIVPEKFPVLFSWLMAIAEVEAVKIATPPHEKTVGILQLFRLSALKSSSATE

SEQ ID NO: 202777 - protein, 46 aa, Glycine max
  Clone ID: PAT_MRT3847_25132C.1.pep
IKRCKHGGNPIVSDQRLEAWCLICTANGCYSTESTCTLAGTEMLAM

SEQ ID NO: 202778 - protein, 164 aa, Glycine max
  Clone ID: PAT_MRT3847_25133C.1.pep
REEIYKTTGCTASAGIAGNMLMARIATRTAKPNGQYHITTEKVEDHLCQLPINALPGIGYVLQEKLKKQNVHTCGQLRMISKASLQKDYGMKTGEMLWIYSRGIDNRLVGGFQESKSVGADVNWGVRFKDIKDCEHFLINLCKEVSLRLQGCGVQGRTFTLKIK

SEQ ID NO: 202779 - protein, 57 aa, Glycine max
  Clone ID: PAT_MRT3847_25134C.1.pep
YVTIEYDACTIPHDCGPLFGDENGNLKRTVGFHVALFSTRLLFAALIPYLDPTVRAK

SEQ ID NO: 202780 - protein, 294 aa, Glycine max
  Clone ID: PAT_MRT3847_25135C.1.pep
LYDLQDRLGLNQPSKVVDWLLNAAKHEIDELPPLPIPPGNFTLGYPSLVSCNEVSTSREGSGQNTLLWKPKPGEIMVSDHDKANWMNRREGDDDDDNNHNNSNGDKQGSNNNCHGGALVLPNNLLPTRPNHPSFLGLMNTMPSLGYQWEPNSSAADVNVQWQNHGFFNQTDVHSIDVVPFPSTLALSTGNSTSTTTTSQILVCPPPPGATTQPYFPSSHFATMEMNARQINHYQMLSSSSHQNLLANSLNHPSSQQLMSQSGKAPFSLRIRPKLFHSPNSSESHSQKDQDFPSK

SEQ ID NO: 202781 - protein, 340 aa, Glycine max
  Clone ID: PAT_MRT3847_25136C.1.pep
VYGQLHMPKEADRLFWSMRKMGIQPNVVSYNTLLRVYGEADLFGEAIHLFRLMQSKDVQQNVVTYNTMINIYGKTLEHEKATNLIQEMKKRGIEPNAITYSTIISIWEKAGKLDRAAILFQKLRSSGVRIDEVLYQTMIVAYERAGLVAHAKRLLHELKRPDNIPRDTAIAILARAGRIEEATWVFRQAFDAREVKDISVFGCMINLFSKNKKYGNVVEVFEKMRVVGYFPDSDVIALVLNAFGKLREFDKADALYRQMHEEGCVFPDEVHFQMLSLYGARKDFVMVESLFEKLDSNPNINKKELHLVVASIYERADRLNDASRIMNRMNQKANRSHYHA

SEQ ID NO: 202782 - protein, 56 aa, Glycine max
  unsure (1)..(56): unsure at all Xaa locations
  Clone ID: PAT_MRT3847_25137C.1.pep
KXEWDLDLXXRXILHNGLRLLXXVDEXLXRXPIKTNAXXAMRKGXXXXNXRXKGIX

SEQ ID NO: 202783 - protein, 48 aa, Glycine max
  unsure (1)..(48): unsure at all Xaa locations
  Clone ID: PAT_MRT3847_25138C.1.pep
NLEKVSQTTDFWGESSVPMAXRSTPPXFKRVSGLGVHFKSEAITALNL

SEQ ID NO: 202784 - protein, 46 aa, Glycine max
  Clone ID: PAT_MRT3847_25139C.1.pep
TNTGTLSYLVFIMIMSIDTQRDLIHLYAGVSLYIDNEHVTRIDDCL

SEQ ID NO: 202785 - protein, 189 aa, Glycine max
  Clone ID: PAT_MRT3847_2513C.1.pep
MNRVIKKTVSNICALKVPRKSFCSTEGVKVAGCSIPEVSNDHEKKQAISKVIPQYDIAIVGGGMVGMALSCFLASNPMTKQLSVAIIDSNPALGSSLHIKKEDPPDPRVSTVTPASISFLQDAGAWKYVEQNRHAYFNTMQVWDYTGLGYARYHARDVNKDFLGCVAENKVLHNALLSCVKDSDFKTTI

SEQ ID NO: 202786 - protein, 78 aa, Glycine max
  Clone ID: PAT_MRT3847_25140C.1.pep
YLNVLGSSHDYINKHQDVFLSIEKKATCKDSNAIKILVYVTSPSADYDLLLLCKHSIWSRQNFQGSHLCIAWMRFLLD

SEQ ID NO: 202787 - protein, 127 aa, Glycine max
  unsure (1)..(127): unsure at all Xaa locations
  Clone ID: PAT_MRT3847_25141C.1.pep
MFLAKPLHYLLIVKVDAIQACGGQKTADGRRFRSGAGIVWXLLXVREPKVFKEIMKKAKEFEKQFRQPTVMQRPASKKEDSSQGVPFSFSGRDLGNVSDSDILASQMQNQHQPATSEEKPMSVHDRL

SEQ ID NO: 202788 - protein, 53 aa, Glycine max
  unsure (1)..(53): unsure at all Xaa locations
  Clone ID: PAT_MRT3847_25142C.1.pep
CYXKLQANVNNSLTAIMNSQLCFLHNVNIIMIAIDAINCHFKFCFFKLQPPPL

SEQ ID NO: 202789 - protein, 44 aa, Glycine max
  Clone ID: PAT_MRT3847_25143C.1.pep
YKFYFSLRYLKIMTQGEYEPPFSKGQINIKGVTPLVICLKKSTH

SEQ ID NO: 202790 - protein, 88 aa, Glycine max
  unsure (1)..(88): unsure at all Xaa locations
  Clone ID: PAT_MRT3847_25144C.1.pep
VRPTLPEALGLGFPXLFSRTGVKSGEAVCXEAGLKILRGGGLDSLGTPSLFLAQSFLAFWATQFICMGAVEVSRFAGGPFGKVICPNF

SEQ ID NO: 202791 - protein, 41 aa, Glycine max
  unsure (1)..(41): unsure at all Xaa locations
  Clone ID: PAT_MRT3847_25145C.1.pep
LYCPENKSDLSSLLCQGFKLRKPNLCHNSYLFSXMPEIRFP

SEQ ID NO: 202792 - protein, 65 aa, Glycine max
  Clone ID: PAT_MRT3847_25146C.1.pep
SASLSISRSSFPFSSSHRSASKESYPARPCIRFISYLNAAIPVLDIFYAPNPVIRDTELRTNGFL

SEQ ID NO: 202793 - protein, 76 aa, Glycine max
  Clone ID: PAT_MRT3847_25147C.1.pep
SCFFNEANKFSCGAFPGIPKFGSCSVLRCLISQTASLRFHVFLLPFSSKKLCSYNYLSLKFFVCAFLNGGHILHDL

SEQ ID NO: 202794 - protein, 55 aa, Glycine max
  unsure (1)..(55): unsure at all Xaa locations
  Clone ID: PAT_MRT3847_25148C.1.pep
GVXKKXPYTNPFLXXXXNITXPTXXQSIKNFPPHNTKFNNXYSLXIIQPSKKGDK

SEQ ID NO: 202795 - protein, 79 aa, Glycine max
  Clone ID: PAT_MRT3847_25149C.1.pep
HKKSLHPQGFKKRSGTMLSASTLNCLGSLLRLQLWLHLSTIAIFRNIKDCGKTVALDDCIVTTIPAALIYNFRQYQVTR

SEQ ID NO: 202796 - protein, 137 aa, Glycine max
  Clone ID: PAT_MRT3847_2514C.1.pep
MEIFSVLSEPFLVALAVTALCFLFALFALLRSSFSLPRRFTLPRKHHCACTSNSDAAAVPYLNGGRTEMLEPSPVPAPAVLTERRMGSSMMEELVPEITTHALSYLDYPSLCRLSMTNSLMRKAANDDNAWKALYHK

SEQ ID NO: 202797 - protein, 183 aa, Glycine max
  Clone ID: PAT_MRT3847_25150C.1.pep
MGFQEVVLMTSYPFDPSKRKGYLSWDDYFMAIAFLSAERSKDPNRQVGACLVSQDGVILGIGYNGFPRGCSDDKLPWAKKSRTGNPLETKYPYVCHAEVNAILNTNHASAAGQRLYVTMFPCNECAKIIIQSGVSEVIYFVEKRLENSDTAYIASHKLLSLAGVKVRKHQPLMNEIHLKFEEH

SEQ ID NO: 202798 - protein, 99 aa, Glycine max
  unsure (1)..(99): unsure at all Xaa locations
  Clone ID: PAT_MRT3847_25151C.1.pep
XXKGRXCXRLATPXRXKESCXKSFTSXAYXLVTLXRRXXLXLLLXXCHRYXXHXXLXISXXPSLVFRRXXRRRWXMXLRXCXVXXFGIXPNSXXLRIXK

SEQ ID NO: 202799 - protein, 248 aa, Glycine max
  Clone ID: PAT_MRT3847_25152C.1.pep
SLLSHHRRDSRGDTFHLLAPPLPIPAFPLLVLEFTRRPSSKFPGSVRDMDEKAKKKGRKDEVMNINVADDKEVQFLDDNQESKMKKRKKDDSSLNGIQELVFSKPSKKMMKDNRLKSNKGKDDDQGKLMMKKKLSAENQHVDHNEFKSNEDKDDGQYKKEEEEEKKKKKKKKKKKKLSEESKSKEYNEFESNDGGDDGKGKKKCVSVYAFRLHSLLFCFHGFFSFTKEHSRFIFAFISCSGVSSLINF

SEQ ID NO: 202800 - protein, 93 aa, Glycine max
  Clone ID: PAT_MRT3847_25153C.1.pep
PHAKSSLNGTVSSPRDPVDSSKRKGYISWDDYFMAIAFLSAERSKDQVGACLVSQDGVILGIGYNGFPRGCSDDKLPWAQKSRTGNPLKTKYP

SEQ ID NO: 202801 - protein, 75 aa, Glycine max
  Clone ID: PAT_MRT3847_25154C.1.pep
TLRDTGADLSWSVKRITTIALKRKALVSYVAKIWVPRKGNASQRFLLQIKTGQGPRTPAVKCPSWRLAVAAHTTV

SEQ ID NO: 202802 - protein, 156 aa, Glycine max
  Clone ID: PAT_MRT3847_25155C.1.pep
KMLLRSSSAPILTSLLHYSKESSSEPEHILNLPKTASALSLSQNLVEIDLKKSSSPKRKNRVPLSSVPKNQQSKKIKERDEGKDPQQKTCMKAKSSIQELFSSLDLDKGLLDHEERGSGKKDSWLQTSVMGGGMGSDGGWILVVGCNGSGRGSGGG

SEQ ID NO: 202803 - protein, 121 aa, Glycine max
  Clone ID: PAT_MRT3847_25156C.1.pep
PKKRLLQNLMVLIKQRKLASTWVFHHIKHTQVYNSYKRLPKKWNTLFSTISYFLPLTRTLGTRISRITAIHVATLSNQSLSIFFISLGSFPILSTTRTSACITITLVWICLSLAVLRTATP

SEQ ID NO: 202804 - protein, 53 aa, Glycine max
  Clone ID: PAT_MRT3847_25157C.1.pep
FIIGFFNCVSWVQGLTRPRQILRFKNAYKDTYKLSSNKVLKSVAKIEFTFFFR

SEQ ID NO: 202805 - protein, 110 aa, Glycine max
  Clone ID: PAT_MRT3847_25158C.1.pep
PRTHLSHHLIIILLPQLDVERFIVPISLGPKDLHFALTRPLKGTRGGASTFRFSGLWRRGAAAPVEGKRARRRRSGGGRKFGGNWRSGEERERRNRNGNGKGKSEGEKSN

SEQ ID NO: 202806 - protein, 95 aa, Glycine max
  Clone ID: PAT_MRT3847_25159C.1.pep
WFIQIVIKKKAWRAALNTCNIFFFRDCLVMIQINVPRLETIVTCSDATNARYRVKHLAYHECRKILLLLEFWNLRQYMLHTGHKRCIAIERKTFS

SEQ ID NO: 202807 - protein, 52 aa, Glycine max
  Clone ID: PAT_MRT3847_2515C.1.pep
QATQGRVKTWADQNHYIMKSVKSPVRERDILTLHTTARESRSGLSTGLTTKN

SEQ ID NO: 202808 - protein, 143 aa, Glycine max
  Clone ID: PAT_MRT3847_25160C.1.pep
IIHSFILQHQPDSDESISDDDVFPNNAPSLHPTNKQELPLLVRLDILRGISNQNLNGKGNTSSFEKPLEDEVRMPDFNEGEVGANSTDEENNSADGVLIKVHIEYFSSDLSAIYSVISINLVIEVKLAPLILVGPLIWCVLDC

SEQ ID NO: 202809 - protein, 81 aa, Glycine max
  Clone ID: PAT_MRT3847_25161C.1.pep
KTPPKMLVILNPRSGRGRSSKVFHGIVEPIFKLAGFRLEVVKTTSAGHARNLASSVDISSCPDGIICVGGDGIINEVSTLF

SEQ ID NO: 202810 - protein, 111 aa, Glycine max
  Clone ID: PAT_MRT3847_25162C.1.pep
GRVGGRVGGRVGGRVGFHTFSPVDVCSTFRTWYSKEYYIFAVIRLLHVLGGKLTAIFGWLKKKNKRIKKNKKKYKKKNWVAILKKTILLAAYFRDQIFQKLAAKTNLLLCW

SEQ ID NO: 202811 - protein, 83 aa, Glycine max
  Clone ID: PAT_MRT3847_25163C.1.pep
SVSVLIRHPFGVGAMRAGSFSSLIFDMSFKVALKQLSCKHESCQSGTIGASNSFPQLVVSHRRVRQMRVIHKQSIVRKLGGGG

SEQ ID NO: 202812 - protein, 258 aa, Glycine max
  unsure (1)..(258): unsure at all Xaa locations
  Clone ID: PAT_MRT3847_25164C.1.pep
DVMLRRYSKARSAAAGGGSLNGDISSNSKXVPNMELYEKRVQELSKHIEESKKNADQLLEELRVKQKQEEKMQEELDDLKESLKADKQNLDAVTSDRNRLLSLCNEKDKELQAAILDKRNMESRMSKLNNAVIENTAKKDLANAGNRQVTQKLEDELKVCKYELLSANETIKSLKSEKLVLEQKLSALQTRNAGEISSLQWKLEQERKVVKSEAYELERKIEGCRQELLIAKATISMKDSELDALQNNLKDLGLLWLK

SEQ ID NO: 202813 - protein, 55 aa, Glycine max
  Clone ID: PAT_MRT3847_25165C.1.pep
DFWWELYWIRVPCKNKFKKTWYSLSPNPRWLCKKPCFLGSSRLLNSKKGKMFGII

SEQ ID NO: 202814 - protein, 58 aa, Glycine max
  Clone ID: PAT_MRT3847_25166C.1.pep
NEWDLGSTAPLTLTIPRGVFKNGAKAYSLPIGGYCTKRLPVWLIHLTRVTNRTCLCGA

SEQ ID NO: 202815 - protein, 488 aa, Glycine max
  unsure (1)..(488): unsure at all Xaa locations
  Clone ID: PAT_MRT3847_25167C.1.pep
LEILLTASTNKLSVTHDEAEDYASLIMKFLDKKNKGYIEISQMGSLFKATNLSNSKAHSPMKQVSSVGSSTHNVLHNTSGDFCEEQQEPMSRTEVLFRTYWRRAWIVLVWLLACLGLFVWKFVQYRHRSGFEVMGYCLPTAKGAAETLKLNMALVLLPVCRNTITWLRKHRPINSVVPFNDNINFHKLIAGGIVVGVILHGGTHLACDFPRISESAGSIFRQTIAAGFGYHRPTYTQILATTEVASGIGMVVLMGIAFALAAKWPRRRSPVLPVSLRRVTGYNTFWYSHHLFVLVYALLIIHSMFLFLTDKLMEKTTWMYIAFPVLLYAGERIFRALRSGSLEVFFMXASLYPGKVLYLKMQKPEGFKFHSGMYIFIQCPQISPFEWHPFSLTSGPQEDYLSVHIRTLGDWSYQIYDLFQEAVLSRSQGCPKLYIDGPYGSAAQDHVKYDILVLIGLGIGATPFISILKDVVKGVQTTQNDHVSFLIG

SEQ ID NO: 202816 - protein, 82 aa, Glycine max
  Clone ID: PAT_MRT3847_25168C.1.pep
MLTPKLFILFFACLLIIAPNLSPNPNGVEATQVLTIHKGYTKRQVYSTLGLVCKCCDGKGGECTSTWEDDACSNLVCKPWKY

SEQ ID NO: 202817 - protein, 59 aa, Glycine max
  Clone ID: PAT_MRT3847_25169C.1.pep
CNTLYPRELRYQYLHTLTFFYINIRGLRCVFLMFQIRSLLLNSVYFTHHILVCTPCKHI

SEQ ID NO: 202818 - protein, 56 aa, Glycine max
  Clone ID: PAT_MRT3847_2516C.1.pep
NTVLKFKLQRLDVCPKVPCEVGQQDVHVMTLKKYLMVQQLPSPYDKLAFYFFFFVC

SEQ ID NO: 202819 - protein, 61 aa, Glycine max
  Clone ID: PAT_MRT3847_25170C.1.pep
PRVREFLDIILIKLLNPRIVIEKLEKKNGLVRSIDICQRICHIGESEITKVKTNPRKAKQW

SEQ ID NO: 202820 - protein, 91 aa, Glycine max
  Clone ID: PAT_MRT3847_25171C.1.pep
LNGGQAGGLFLFGFPGQNAQCFKGAWGLKEFEAYPPHHGPVGAGFSKKKQRGAKISAPGFLGPKNPPGADRFKEGEPPHLKGPRPRWQGKG

SEQ ID NO: 202821 - protein, 102 aa, Glycine max
  Clone ID: PAT_MRT3847_25172C.1.pep
IRPTDVIEYTKLPEKKLFRTRTHVTEKLPDTSCNTPWGHCIYFTAWRPGVNLHAYQSSSQSTLETGDSICESHLHTCIYPKLLMLYLNACIADTGLEHPLDK

SEQ ID NO: 202822 - protein, 520 aa, Glycine max
  unsure (1)..(520): unsure at all Xaa locations
  Clone ID: PAT_MRT3847_25173C.1.pep
FSGLLHLCYQIFYRRFIKGYASIAAPLTKLLAKDQFQWTSTAQQAFDALKHTLCSAPVLGLPDFSQPFVAETDASGVGMRAVPSQCXFSKAFSPKLLRSSTYVRELAAITAGVKKWRQYLLGHSFVILTDHRSLKELMSQAIQTPEQQIYLARLLRFDYSIQYRAGKSNATADALSRIPENCSGQLLALIMPHLVFMEDLKAELHCHPAYLELRXSILDNPAAHPQYSTIVDFISQKHRIWLPKGFSFIPLLLEEFHSTPTGGHMGITKTLARVTQNFMWQGIKDDVRSFILYCLHCQQTKYNHRKSPDLLCPLPVLARPWEDLSLNFIGGLPSFRGFSIILVVVDRFSKGVHLGMLHSNHTASTVAHLFLDIVVKIHGMPHSLVFDRDPLFLSKFWQELFKLFGTKLRMSSAYHPQSDGQTEVLNRVNEQYLRSFVHQRPSSWGKFLLWAEWSYNSSIHTTTEMAPYEVTFGKPPPPIPHYLFGTSNIDAVDDFFTSCEAVFALARKKLLKAQQTMKHF

SEQ ID NO: 202823 - protein, 90 aa, Glycine max
  Clone ID: PAT_MRT3847_25174C.1.pep
RALIAEYIATLLFLYLSGLPVIGYKHHTDHADARGGVGILGIAWAFDGMIFILDYCTAGISGGHIHPGVTFGLILAHKVSLIRAIMYMVT

SEQ ID NO: 202824 - protein, 174 aa, Glycine max
  unsure (1)..(174): unsure at all Xaa locations
  Clone ID: PAT_MRT3847_25175C.1.pep
FIKGIKEEVILSPTHTLSLIATEEEHXHIKSTNFNLLSTESHTIFALTIENSPYNKNNEREXVTLSQLNLINLTNSKSSKTKTTNIRKRQRSYINKTLLTLKTIISKLTXNRATRIPYKNSKLTKLLDSSLRKHKHISLMYTVTPSSSDTKYTHNTLXFIQATKRIKIQTSHTQ

SEQ ID NO: 202825 - protein, 67 aa, Glycine max
  Clone ID: PAT_MRT3847_25176C.1.pep
DIFKFLISRWRLEKLEGFPAEGKRAQDFVCGLAPRIRKFQKRAYERARKINPHGVKFSWIFNKKLHL

SEQ ID NO: 202826 - protein, 469 aa, Glycine max
  Clone ID: PAT_MRT3847_25177C.1.pep
MATLLRKLCESATMKRSGSHSHPHPLPSSEQARPSSPLGAFDPLPADILMQIVRLLGPKHAARLCLVSKSWRSLVSDNALWAHFLQTHHPHSPLFAETALSSGYPLPTLPAQNSPRVSFQHAYALRERVPPSVVIDGGSGYCKFGWSKGASPSGRFATFLEFGNVETPMYTRLRHFFSTIYNRMQVKPSSQPVVVSIPICHYDDTESAKASRQQLKEAIYVVLFDMNVPAVCALNQGTLALYAANQTSGIAVNIGFQVTSIVPILNGKVMRKVGVEVVGLGALKLTGFLREQMQQNNISFESLYTVRTLKEKLCYVAVDYEAELLKDTQASFEAVEGLFTLSKERFQTGEILFQPRLAGVRAMGLHQAIALCVDHCYSAELAGNNDWYKTVVLSGGTACLPGLAERLEKELHSLLPPYMSNGIRVIPPPFGVDTAWFGGKIISSLSTFPGPWCTTKKQFRQKSKLNRIW

SEQ ID NO: 202827 - protein, 58 aa, Glycine max
  unsure (1)..(58): unsure at all Xaa locations
  Clone ID: PAT_MRT3847_25178C.1.pep
FIIMASEALWNVISTKEPVSLVQNITDAEVASRDLIKXAYARGSSDNITWVVARFDLS

SEQ ID NO: 202828 - protein, 159 aa, Glycine max
  Clone ID: PAT_MRT3847_25179C.1.pep
MGNCSSSDSTQVATAKLVLQDGRLQEFSYPVKVSFLLQKYPACFICNSDEMEFGDVVSAIDEDQVLQPGQLYFALPLSRLRHPLQPHEMAALAVKASSALMKTADKCGSRRKQILFSNEYDSNPKRVSPALAAGGGRGRTTAGAGGKGGFAALLSSIPE

SEQ ID NO: 202829 - protein, 49 aa, Glycine max
  Clone ID: PAT_MRT3847_2517C.1.pep
GELRLQNKVHLGGTKARNLNLGNFRRRLQYTSKLTRGSHLIILAATKQP

SEQ ID NO: 202830 - protein, 44 aa, Glycine max
  Clone ID: PAT_MRT3847_25180C.1.pep
GFIIESVGDFTNVAVFDGVLLPMRFLELFVAHGEAVHYDNYGSI

SEQ ID NO: 202831 - protein, 67 aa, Glycine max
  Clone ID: PAT_MRT3847_25181C.1.pep
ACDIKHALSERQLMIGIHLFTVCCMFSFKLLRQIVYHYNGRDHLAVTQAVSVCVEYGRGDCTTIIVG

SEQ ID NO: 202832 - protein, 153 aa, Glycine max
  unsure (1)..(153): unsure at all Xaa locations
  Clone ID: PAT_MRT3847_25182C.1.pep
MTKTAGGRKGREKTQNPSHPRHTQPGGAQKQHHNQARRHPKSATTKTQHRTRRATTETNTNPPRRPSEPNQNQPDTNPRKTKPAPPEPQPAPEPKTQARPPHTPDTQRARTREDNRXEKDEPPNAPEADAQRGGKAPTPEDRAPEEDAGKSER

SEQ ID NO: 202833 - protein, 73 aa, Glycine max
  unsure (1)..(73): unsure at all Xaa locations
  Clone ID: PAT_MRT3847_25183C.1.pep
KIAPGEDIHPLVCDHGTGLVKAGFAXGDDSPRGXFPTIGGLPRHTGVMVGMGQKDAYVGXDEAHSQRGILTLK

SEQ ID NO: 202834 - protein, 202 aa, Glycine max
  unsure (1)..(202): unsure at all Xaa locations
  Clone ID: PAT_MRT3847_25184C.1.pep
MILCLASRPILMAPKFGLEDGSHSNFDATLVLATMLISQLHEGAASEPPVGATGTHPHTEERNASHMLQENCRANVSFEPPSDHTRIWSDLSANANIGMDDFXEREILRETILNDEVHLKILVISTMQISGVASVPGGKPTDPGEPPEEAHGPAAQDAGQEPGEAMPQHHRSNWVDAEEDDEDEQDEDEQDIQPTPPYYEEH

SEQ ID NO: 202835 - protein, 60 aa, Glycine max
  Clone ID: PAT_MRT3847_25185C.1.pep
MTQGKIVEAAEAHKTLEDFDPPKKRKRNKYAFACAVLASMTSILLGYGETNIVNDGPKFS

SEQ ID NO: 202836 - protein, 75 aa, Glycine max
  Clone ID: PAT_MRT3847_25186C.1.pep
MVIEGGFPLLEMFRLWVYSRESSKFRYGGDHALSATASGLSEYGSKHALSARFTLNAPLGFFMNLLHAKLDLTTK

SEQ ID NO: 202837 - protein, 114 aa, Glycine max
  unsure (1)..(114): unsure at all Xaa locations
  Clone ID: PAT_MRT3847_25187C.1.pep
ALSSGARAALQGVKFADRGFLRETVRQMSXVLRPAPEDKESEWSHLNDAWCYNMQMQDAYFGNMENVILESTLLRTEDAHQWRRTDFCRIEGLQRADEPTIVQFEEPHSLHQTM

SEQ ID NO: 202838 - protein, 77 aa, Glycine max
  unsure (1)..(77): unsure at all Xaa locations
  Clone ID: PAT_MRT3847_25188C.1.pep
NPHFTQLNHLSSHPPFSIYLNNXXSLTNLPSQQLLILNXNNTHPLSXSLISSLIIFTHNITSTLSITLSTSPFSYFP

SEQ ID NO: 202839 - protein, 86 aa, Glycine max
  Clone ID: PAT_MRT3847_25189C.1.pep
DAPPEGGSGKFPNALDFFDRDKKGLISAGGVPLGVNRLGLKWSVGESPHMIKSVNPPGEGWVNFEEFKTIMAPPKNRGGAPKGPVP

SEQ ID NO: 202840 - protein, 96 aa, Glycine max
  Clone ID: PAT_MRT3847_2518C.1.pep
RPLTGRRARDTLPRASVDCICEFLIGFVPGCALPNMAESNPVCAGDRLWELSALRALNASLDTRILDRGLNVRSKRNLRDAHNCVHDEGHARDKQR

SEQ ID NO: 202841 - protein, 162 aa, Glycine max
  Clone ID: PAT_MRT3847_25190C.1.pep
SARGLCRILVVADSAFSGLEKTKHAVALLKALNAFEDVEHSKNSKKIRPGNGKSRNRRYVLRRGPLVVYDEAGPLTLAFRNLPGVEVQHVSRLNLLSLAPGGHLGRFIIWTKGAFARLDSLFGTYKKAAPEKVGYRLPRNKVTNGDLARIINSDEVQAVVRP

SEQ ID NO: 202842 - protein, 60 aa, Glycine max
  Clone ID: PAT_MRT3847_25191C.1.pep
AALCSARIIKKVPDLAENFVNPATALLREKHHGVMITEVQLCTELCKISSEALEHVRKAS

SEQ ID NO: 202843 - protein, 144 aa, Glycine max
  Clone ID: PAT_MRT3847_25192C.1.pep
MGNTCAPTQYASKGGNHSWQSTVNIVHLDGKLQQLKESIKAWKVLSENPNCYICCSESMYVGSPMPPLAPSEELQLGLIYFLVPIPKSRIPLSLQDLGALAIKANAALAAAATPNNNYPILKPSSQKKFRTHPTFSNVSMGYSH

SEQ ID NO: 202844 - protein, 58 aa, Glycine max
  Clone ID: PAT_MRT3847_25193C.1.pep
SFRFNCLLKQKPSPFSQILLKLEILPFFESYCDQIYIAAYSIGVGPVPWPIMSEVCII

SEQ ID NO: 202845 - protein, 135 aa, Glycine max
  unsure (1)..(135): unsure at all Xaa locations
  Clone ID: PAT_MRT3847_25194C.1.pep
QLLAATVFCDGGHTASYYRRMYWRGNLXEPLLRKDNELHLGDEISDDASLLSALENNKHWEQARNWAKQFEANGAXWRYASHHVTESXAESMVAEWKEFLFDVPKKKVALWNHCHTLFIRYFLPFSLSLGYFFLN

SEQ ID NO: 202846 - protein, 68 aa, Glycine max
  unsure (1)..(68): unsure at all Xaa locations
  Clone ID: PAT_MRT3847_25195C.1.pep
YKYDSLYYSIARCMINCHNAIVVXXVNLKIVPFACNLVISPVHVYFCVPLNRKGWGCTTSRYITSPPP

SEQ ID NO: 202847 - protein, 133 aa, Glycine max
  unsure (1)..(133): unsure at all Xaa locations
  Clone ID: PAT_MRT3847_25196C.1.pep
MGIAVGGVDLLSEKAAMMRECLQKSETITDNVVTILGSFDHRLSALETAMRPTQIRTHSIRKAHENIDRTLKAAEVILAHFDQYRQAEAKILKGPHEDLENYLEAIDKLRSNIQVFGSKKXFKSSDGIVVHAN

SEQ ID NO: 202848 - protein, 51 aa, Glycine max
  Clone ID: PAT_MRT3847_25197C.1.pep
IDGAPTYIPLYLSKLKGYTRPTGCKAVAESIRTVHHKFHYTVQDGLDAIQM

SEQ ID NO: 202849 - protein, 98 aa, Glycine max
  unsure (1)..(98): unsure at all Xaa locations
  Clone ID: PAT_MRT3847_25198C.1.pep
MSMSTDGQVITSNGGVSWEEAKPLATEELEGVPPQVDKVPTKRLYTSSGHTDADSWKAAGQTAXRPGILGDEAKRDAESEGEAVDDLIPXDHAVPVLT

SEQ ID NO: 202850 - protein, 478 aa, Glycine max
  Clone ID: PAT_MRT3847_25199C.1.pep
HPLAAGLAVATLHACYGNELKQFISGITELTPDAVQVLRAADQLEKDLVQIAVEDSVESEDGGKAIIREMPPYEAEGAIANLVKIWIKTRIDRLKEWVDRNLQQELWSAQANQEGYAPSSVEVLRIINETLDAFFQLPIPMHPALLPEVMNGLDRCLQYYVIKAKSGCGSRNTFLPTMPALTRCTIGSKFQGFGKKKDKSPNPQKRNPQVATNGDSSSGIPQLCVRINTLQWILGEFDVLEKRIITLLRNSESAHVEDFSNGLAKKFELFPAACLEGIQQLCEAAAYRIVFHDLSQVLWDGLYVGDPASSRIEPFLQELERKLMFISDTVHERIRTRIITEIMRASFDGFLLVLLAGGPSRSFTRKDSQIIEDDFKFLKELFWANGDGLPSELIDKFSTTARSILPLFRTDTETLIEQFKRLTMETYKSSARSKLPLPPTSGQWNPSEPNTLLRVLCYRNDESASKFLKKAYDLPKKL

SEQ ID NO: 202851 - protein, 42 aa, Glycine max
  Clone ID: PAT_MRT3847_2519C.1.pep
WFYGMPPSPQEGKRFLHIPLWAAKPAPFNKGYLISRWRPLRY

SEQ ID NO: 202852 - protein, 93 aa, Glycine max
  Clone ID: PAT_MRT3847_251C.1.pep
RSYYKCTTQGCNVRKHVERASTDPKAVITTYEGKHNHDVPAAKNNSHTMASNTASQLKSHNTNPEKHNFGSRGMGGNEQQPVARLRLKEEQIT

SEQ ID NO: 202853 - protein, 83 aa, Glycine max
  Clone ID: PAT_MRT3847_25200C.1.pep
MAKSCKLDGSCNQSISSRKYSDLYGTRPMTCNKSISHRSFTFGGLASWQTLIILLLDGEDVINTGKGMQAMSTRIHMEGHTWI

SEQ ID NO: 202854 - protein, 118 aa, Glycine max
  unsure (1)..(118): unsure at all Xaa locations
  Clone ID: PAT_MRT3847_25201C.1.pep
CFFKDETNGAGPHSSEEPPAKEDQERPKWTDARLRHRIAPQYTEVQAQTDTNWSKLSLDDGETPKGSMSDLKXIDSIKLRFPKTQVGGTMLRSDLLPNYLTEGNLRARVXLQRTHALK

SEQ ID NO: 202855 - protein, 84 aa, Glycine max
  Clone ID: PAT_MRT3847_25203C.1.pep
VYRLVDCATQQCYLGNYLIFEFNKSIYLTVMNYKIPLQGCEIAKKSQRDSRARSLRNVCGCLLNTLEFYTKKIGIILHLHLLRK

SEQ ID NO: 202856 - protein, 67 aa, Glycine max
  unsure (1)..(67): unsure at all Xaa locations
  Clone ID: PAT_MRT3847_25204C.1.pep
KRDAPCSGAIKPGGGRGTLSSDRTLGSALHARYWRXLPAFLGTFVRYSRQAVHGGLPQGARFMAERG

SEQ ID NO: 202857 - protein, 79 aa, Glycine max
  Clone ID: PAT_MRT3847_25205C.1.pep
STIHFTLHRTFEPNSTEIGLGVNTYSSGLSAQSTSFSFFFGFIKLLRVSRVFYMILQTGWCRMGEAISYLPLRIMRLHI

SEQ ID NO: 202858 - protein, 59 aa, Glycine max
  Clone ID: PAT_MRT3847_25206C.1.pep
LHTWGIVPPNAQVRRDDFPGSCVCKCIHIIHCISISSSHRNGHIISAFVTYHIHALHFA

SEQ ID NO: 202859 - protein, 54 aa, Glycine max
  Clone ID: PAT_MRT3847_25207C.1.pep
GAPSGNSQIDVILRLSSVSDENQFQNTVNCVPNTVQECKIQHEHFSRAARAARA

SEQ ID NO: 202860 - protein, 223 aa, Glycine max
  Clone ID: PAT_MRT3847_25208C.1.pep
MNRVVDEMERNGFAVESVCYNMVLSTYGIHGEHVEMVRWLRRMSNSGVPFSVRTYNSVSNSCPSITRMTRDLSKLALLSISELKEGLEGGEGMVVRELLLLGSCGILEEVMVWDSSEVKLDLHGFHLASAYLIVLLWLEEMGRRLNDSNYGVPAEFTVVCGLGKHSSVRGESPVRVLVQKMMVKMGSPLKVDRKNNGCFIAKGKAVKNWLSQFNNNKSSFTQH

SEQ ID NO: 202861 - protein, 110 aa, Glycine max
  unsure (1)..(110): unsure at all Xaa locations
  Clone ID: PAT_MRT3847_25209C.1.pep
MKLNIANPSTGSQKLIEIDDDKKLRIFYDKRMSAEVAGDALGDEFKGYVFKITGGNDKQGFPLKQGVLVQGRVRLLLKQGQSCYRERRHGQRKRKSVRGXIVGPDLAVLN

SEQ ID NO: 202862 - protein, 38 aa, Glycine max
  Clone ID: PAT_MRT3847_2520C.1.pep
NMVKEAWLLVLSWVCIVSEHECVRVRKAGILADFDVSL

SEQ ID NO: 202863 - protein, 132 aa, Glycine max
  Clone ID: PAT_MRT3847_25210C.1.pep
PKKPWTTTTNKTTTPSLAFSTTPTTVYSPLLPPAPLPPPTTTLPLPKTTPSLTETTPPSMPSHNSLFQLCASTTLGSPNPPPSPNAAPASSASSASPRRRLPPPQSPDQPPLTIAPTLPHRRLDSPIEIRHT

SEQ ID NO: 202864 - protein, 55 aa, Glycine max
  Clone ID: PAT_MRT3847_25211C.1.pep
SMVLPLHNLEGCKSCVCPREIFKFLGPIPIRFSDRISVPQPTGCYKSRELHGALY

SEQ ID NO: 202865 - protein, 57 aa, Glycine max
  unsure (1)..(57): unsure at all Xaa locations
  Clone ID: PAT_MRT3847_25212C.1.pep
SHLLYPALNLDIYNIILTVVYQKMLFSLSLSVVLLFFQSSLAGTKGWHXXKXIFFLI

SEQ ID NO: 202866 - protein, 42 aa, Glycine max
  Clone ID: PAT_MRT3847_25213C.1.pep
RIKLSLDYIYGTLLTLLLETLTNLSSETYPFLFSHQLKPFMT

SEQ ID NO: 202867 - protein, 70 aa, Glycine max
  Clone ID: PAT_MRT3847_25214C.1.pep
YLLRTQMALPIIKGNYFFMRSLITSTNSTICDINLMMTGFIIFLTLIMEYSKKLKMILSHLKVLKCIPSL

SEQ ID NO: 202868 - protein, 165 aa, Glycine max
  unsure (1)..(165): unsure at all Xaa locations
  Clone ID: PAT_MRT3847_25215C.1.pep
PKPRPALGKGKKKGGPGQAMGGPRAKANXKGPTVQGTTPGRGGPRKNKNGGDPFPGKKLGRPIPRLGNAKNPIGNRGAPPKGGGATKKTKHPRVHRGKKKTPPPGEKAQAPKNPNRALKKNWEWGKRPGLGLKKTPKAWKHLQNIGGTIKEKWGLGRVRPHGAGK

SEQ ID NO: 202869 - protein, 61 aa, Glycine max
  Clone ID: PAT_MRT3847_25216C.1.pep
WHVLGLGYDLKIDTRLIESAAVIPFNGNMKPWLKLAIGRYKPLWDKYINQSHPHLQDCATS

SEQ ID NO: 202870 - protein, 53 aa, Glycine max
  Clone ID: PAT_MRT3847_25217C.1.pep
ASGFYRFYKVPFQVFLLSLRTLTLNLKVVLPLEVFDPWSNHLARIKNRLSGIF

SEQ ID NO: 202871 - protein, 64 aa, Glycine max
  unsure (1)..(64): unsure at all Xaa locations
  Clone ID: PAT_MRT3847_25218C.1.pep
MSRRMVREPNEENETLRPAIRDGXHVLSVDRILASYNDTSIHVTDLTGRETLFTITAGKNVKAY

SEQ ID NO: 202872 - protein, 107 aa, Glycine max
  Clone ID: PAT_MRT3847_25219C.1.pep
PINNPSLSTSIRSKFGLQKRVTFHSCEIFLHRCTLICHESWVSAIHSHPLHVLIHSICDYHNATHRKLHYRGIVFKRTLNSLSCYSRGLRLLPGTIHWMRIRHVYLL

SEQ ID NO: 202873 - protein, 89 aa, Glycine max
  unsure (1)..(89): unsure at all Xaa locations
  Clone ID: PAT_MRT3847_2521C.1.pep
PXXVRAHFXYSXQFSFLSNXSFFNEAGIPNFFLSQVFKTLNFPSFPMGLRRTHWRGGTRFRTWHRRAFPGGKGGTQTWSPGLENLGTQT

SEQ ID NO: 202874 - protein, 52 aa, Glycine max
  Clone ID: PAT_MRT3847_25220C.1.pep
LVHLTLHIPNKKIVKFFFTKLFIYVTSCKHIITSIKVDSDLHHQNLCGVCHI

SEQ ID NO: 202875 - protein, 63 aa, Glycine max
  Clone ID: PAT_MRT3847_25221C.1.pep
ATSEHHRQPVPIVAVLYFRYVSSTRSDPLLHYHISEFSCIHRLSHRVWHSSGVDFLSLHRHVL

SEQ ID NO: 202876 - protein, 51 aa, Glycine max
  Clone ID: PAT_MRT3847_25222C.1.pep
FDSVLNRAYTVGAWQQVICDQRLTISTRWNIVDLGIRGHECSSSMNITRNL

SEQ ID NO: 202877 - protein, 69 aa, Glycine max
  unsure (1)..(69): unsure at all Xaa locations
  Clone ID: PAT_MRT3847_25223C.1.pep
GSCCKCWTDCGCCKMYPYLTYTEASTTESIAMGATPSKTXSEWAEMGVPAENDGCKCGPNCSCNPCTCK

SEQ ID NO: 202878 - protein, 72 aa, Glycine max
  Clone ID: PAT_MRT3847_25224C.1.pep
PKSTLNFIIFLPVLISNHRGIFFILSETALLPLRLHNTTLLPVTSTPQTNRSTLKGAPRCTIYSPNRNSPKP

SEQ ID NO: 202879 - protein, 117 aa, Glycine max
  Clone ID: PAT_MRT3847_25225C.1.pep
GRWAPPLAPPAFTPLVSGLYVGGQLGGEIFFDRGPPLPLFPPGFIGLPLREGWGPPGSGPGFPGCSPGAEHFFFQSGPPAFLLWFLFRMVLSPADLIGKFVARLKTKKKKKEKKAWK

SEQ ID NO: 202880 - protein, 45 aa, Glycine max
  Clone ID: PAT_MRT3847_25226C.1.pep
VQMPNDELEDPISVINSRDAAARYGGIMIMNYPKPQTRLGRSFKP

SEQ ID NO: 202881 - protein, 70 aa, Glycine max
  Clone ID: PAT_MRT3847_25227C.1.pep
VTPLTIYKLRGIYIISCSPHVVAHLTKKLILDYFFPFIMCMLERWTGSYIDSRYDGAYDHEVFSQVGCVL

SEQ ID NO: 202882 - protein, 107 aa, Glycine max
  Clone ID: PAT_MRT3847_25228C.1.pep
KIPVHIQGKKPGLICRGGFQFLQRQGALKGKGLEEGLHLSLNNYLVDAHVYNKKCIHQIENHLPFSMPFEDKTSKVPQLTWKDSDTNVFVGKIFLPKTQHQMLILEK

SEQ ID NO: 202883 - protein, 41 aa, Glycine max
  Clone ID: PAT_MRT3847_25229C.1.pep
LGPWAQKSTLRFMRTLGPSLAALAQSSNPKVLDTLGFFPRH

SEQ ID NO: 202884 - protein, 45 aa, Glycine max
  unsure (1)..(45): unsure at all Xaa locations
  Clone ID: PAT_MRT3847_2522C.1.pep
NLPYLIICKFQSWSYAGXLQKLDKVLAFNNLLISFKNHPDVDRFA

SEQ ID NO: 202885 - protein, 67 aa, Glycine max
  unsure (1)..(67): unsure at all Xaa locations
  Clone ID: PAT_MRT3847_25230C.1.pep
PYSTGLTPFYIAPXDLSRREYDGKVLDVCSCWVTLYVKSFGAYSFEDPEDPRYFITTLHLILNGHIF

SEQ ID NO: 202886 - protein, 247 aa, Glycine max
  Clone ID: PAT_MRT3847_25231C.1.pep
MYIASMGRSFKDSLKLLEADIHHANTLASDFPREYDGACLQMRMSYSPAAHLFLFLVQWTDCNLAGALGLLRILIYKVYADGTTTMSTHERKASIREFYAIIYPSLVQLQKSVADTEDKKQKAVCMERYRKRDDEEHRQPSDIDIEREEECGICMEMNSKIVLPDCNHVMCLTCYHEWRTRSQSCPFCRNSLKRVNSGDLWVFTDNRDVVDMATATRENLRRLFMYIDKLPLVIPDFLFDTYDSHLR

SEQ ID NO: 202887 - protein, 75 aa, Glycine max
  Clone ID: PAT_MRT3847_25232C.1.pep
MRDGEFNGDTKLLEENENLREMMKKLLEAGNEQLSVITNLTGRVKDLEKKLARSRSKRVKTKRYRPATSKMSCMK

SEQ ID NO: 202888 - protein, 53 aa, Glycine max
  Clone ID: PAT_MRT3847_25233C.1.pep
RSNKCLHDSCETSSVSTLYACLITLSCIAFLFCATNTQLLATTQLHCTKLSLS

SEQ ID NO: 202889 - protein, 134 aa, Glycine max
  unsure (1)..(134): unsure at all Xaa locations
  Clone ID: PAT_MRT3847_25234C.1.pep
KPGPGFKRAFGMFKNDGPLLYDVGXTNFSQQFPTTRVIPAPNTFGWWETKTGVFNAQLQANIYYACSQGINWGPIHPGGFCFKPNPIASHGAFAMNFYYQTFGKNQWNCVFFQXATLTSQNPSSNGCISPGGSP

SEQ ID NO: 202890 - protein, 44 aa, Glycine max
  Clone ID: PAT_MRT3847_25235C.1.pep
AFDDGLSNCHCLISCMVIVSPFYVHMLAFMPVFFFRLRKALNRC

SEQ ID NO: 202891 - protein, 47 aa, Glycine max
  Clone ID: PAT_MRT3847_25236C.1.pep
GPRERPCLLGSTRDKHAKTACQPGSSRKDSDLAGVRASHQLQNEFNY

SEQ ID NO: 202892 - protein, 75 aa, Glycine max
  Clone ID: PAT_MRT3847_25237C.1.pep
RINDREPVIRVNPLLVACGYTHIIPPVVKGNCPDAIGICGLFLLTISEVIQMILATKINFNKQVRQRPLRHALEP

SEQ ID NO: 202893 - protein, 78 aa, Glycine max
  Clone ID: PAT_MRT3847_25238C.1.pep
LTFSSLSSFSPLLLSHGTTVLVGLQRCKQPCHSSGSKLPCFSAFCCCSLASPFYMVFTFMLIFLFLISASSWICLFVW

SEQ ID NO: 202894 - protein, 474 aa, Glycine max
  Clone ID: PAT_MRT3847_25239C.1.pep
NNTVHVHWKGAAEIILARGSNYIDYNGIEKSLDEDRSKLEKIIQGMAASSLRCIAFACMKISEDIDYNDKEKVHQILRKDGLTLLGIVGLKDPCRPDVKKAVETCKLAGVSIKMITGDNIFTAKAIATECGILDLDGHVNAGEVVQGVEFRNYTEEERMEKVEKIRVMARSSPLDKLLMVQCLKKKGHVVAVTGDGTNDAPALKEADIGLSMGIQGTEVAKESSDIVILDDNFNSVATVLRWGRCVYNNIQKFIQFQLTVNVAALVINFIAAVSSGDVPLTTVQLLWVNLIMDTLGALALATERPTKELMEKRPVGRTEPLITSIMWRNLLAQALYQIAVLLVLQFKGKSIFNVNGKVKDTLIFNTFVLCQVFNEFNSRSMEKLNVFQGIHKNHLFLGIVGITLVLQVLMVELLRKFADTERLTWEQWGICIVIAAVSWPIAWITKLVPVSDRTFFSHHVKWVKLWVFKIKHLF

SEQ ID NO: 202895 - protein, 81 aa, Glycine max
  Clone ID: PAT_MRT3847_2523C.1.pep
LVLYATSGRMAVVQSHVPLASPVTIGVFPVLFIIRPLLTMYTVLGSATSSNYPIADLVNDGEAGFAIYPEDFQQIRAWAAC

SEQ ID NO: 202896 - protein, 80 aa, Glycine max
  Clone ID: PAT_MRT3847_25240C.1.pep
KGYTGACNTYPKEAETICKNGYIAIKRRACMGEEGTTFKTGKHGHRQSHCVGSDKCTVKTLEDIEPSSHNCDGPHESCTD

SEQ ID NO: 202897 - protein, 143 aa, Glycine max
  Clone ID: PAT_MRT3847_25241C.1.pep
APALVGEVGLGADLVRLDGKAMCSPGFSCDSAFQVTYIVRGSGRAQVVGADGRRVLETTVKAGNLFIVPRFFVVSKIADSDGLEWFSIITTPNPVFTHLAGSIGTWKALSPAVLRAAFNVDAGLEQLFRSKRNADAIFFPPPN

SEQ ID NO: 202898 - protein, 65 aa, Glycine max
  Clone ID: PAT_MRT3847_25242C.1.pep
GQYIDSLHIFRHCLTHAFLITFNTKEHYFAFQSHPNHIQFSTYFSATIENIALLDTPSTLVTAPS

SEQ ID NO: 202899 - protein, 137 aa, Glycine max
  Clone ID: PAT_MRT3847_25243C.1.pep
MKLNALSNNNNNTVYRNVGPLGPFTGYATILKSSRFLRPCQQLLDEWCCQSGSKFAKRGICDVPEWVSRDVSSASTCATALNVDESAAKGGGNSGASSSVLYCSIENNNNNNNNNNNNNNNNNSADGGAASSFCLSS

SEQ ID NO: 202900 - protein, 75 aa, Glycine max
  Clone ID: PAT_MRT3847_25244C.1.pep
QMNSLLERGWKKLLAELVIFNSAPDLVCQTKPYNLSFFAMGGQNRTMPQHKINLLEKNGQLFFWNCIQESLVTLQ

SEQ ID NO: 202901 - protein, 49 aa, Glycine max
  Clone ID: PAT_MRT3847_25245C.1.pep
GVSIKVLVDDGHMLVVDLDQPSIWKFLWRTGTISIYVLVHQNRTDHSVR

SEQ ID NO: 202902 - protein, 110 aa, Glycine max
  Clone ID: PAT_MRT3847_25246C.1.pep
MATNIAIGIDLGTTYSCVGVWQNDRVEIIANDQGNRTTPSYVAFTDTERLIGDAAKNQVAMNPTNTVFDAKRLIGRKFSEPAVQSDMKHWPFKVIAKEGDKPYIVVDYKN

SEQ ID NO: 202903 - protein, 72 aa, Glycine max
  Clone ID: PAT_MRT3847_25247C.1.pep
GSHHGLQTQHWSRFLKNHGTTFLVRAKNPNGPSFPKVGSNPWGQFKPPGVVWPHGKQPAKKAFLPRKAWATV

SEQ ID NO: 202904 - protein, 452 aa, Glycine max
  Clone ID: PAT_MRT3847_25248C.1.pep
MATTDNHVKEFTIDDESSPRAILETPVSGTESDNSGSSESFSSVSPEKSPAVTGKEVPKEGYVQQLKSMIDVFKFKSVRKLTAVPLFSVGNDISRKGLTKKLARIRSAEDGIDIGAIPTKPSWRNFDYEELVAATGDFSYENLIGKGGHAEVYKGYLPDGQVIAVKRLMKNEKDAADRAGDFLTELGIIAHINHPNATRLVGFGVDCGLYFVLQLAPHGSLSSLLFGSECLDWKIRFKVAIGVAEGLHYLHKECPRRIIHRDIKASNILLNENFEAEISDFGLAKWLPSKWTNHVVFPIEGTFGYLAPEYFMHGVVDEKTDVFAFGVLLLELITGHRAVDSNSRQSLVIWAKPLLDTNNVKDLADPRLGEEYDLTEMKRTMLTASMCVHHASSKRPYMNQVVLLLKGEETIIEPKKNLVAQKSLMLEACDLEDYTCSSYLKDLNRHRQLIME

SEQ ID NO: 202905 - protein, 109 aa, Glycine max
  unsure (1)..(109): unsure at all Xaa locations
  Clone ID: PAT_MRT3847_25249C.1.pep
PLXXSYXFXFXXTXXYXXXSXSLXXXXXXXLXXXXXXXXXXXXLXXSXCXVXXSYSLPXPXLTPXXTXCXPHNMXVXXXLXTXESXXXTYLEVAHLSXXXCYXXXLXLP

SEQ ID NO: 202906 - protein, 36 aa, Glycine max
  Clone ID: PAT_MRT3847_2524C.1.pep
LCTCIPYDIIHLGKMFIIFSFQLPRPYFLFHFYFFS

SEQ ID NO: 202907 - protein, 92 aa, Glycine max
  Clone ID: PAT_MRT3847_25250C.1.pep
DSVCLTAICSIPKSGTLHIRVASECHIFKHQHLFPGKSAEKEGSTYGLSSQVAIWGPYFTPFNTIQLLDLDISQGPLMAIAPEGPDVGCLVL

SEQ ID NO: 202908 - protein, 106 aa, Glycine max
  Clone ID: PAT_MRT3847_25251C.1.pep
GGELIHFRPHTLGIGLKLSHSDQMLLSRVPICGILMIPVSSIPSYLTGKCSSMRIKSKGSMKFLVFCTDYLVVFILVENNFSWFFVGSWFSNNVECLQQFFKPFQM

SEQ ID NO: 202909 - protein, 85 aa, Glycine max
  Clone ID: PAT_MRT3847_25252C.1.pep
FWGNPKGGEPLTKAVWILPGLRGLWKTIFSPLKNYQLREFPLKFFPQGGSPPLLIVFPFSTQNFLEPNQKPGFFGAGLTCPKKNF

SEQ ID NO: 202910 - protein, 57 aa, Glycine max
  Clone ID: PAT_MRT3847_25253C.1.pep
NQVFKRLHMLYRRPPSKIHDIHRENQNVSFRNSKVHIPKRADPYALASHPRNHFVYL

SEQ ID NO: 202911 - protein, 43 aa, Glycine max
  Clone ID: PAT_MRT3847_25254C.1.pep
QLKWYYCMAVWHYGIPWSSFIPTPSSTRKTCHCKISYPTYDTS

SEQ ID NO: 202912 - protein, 583 aa, Glycine max
  Clone ID: PAT_MRT3847_25255C.1.pep
VSDALSGGRMEDDKLAALNQLRNIFGLGKREAEAISLDVTSKVYRKRLAQAVADGELEMADSKAAFLQNLCDELHFDPQKASELHEEIYRQKLQKCVADGELNEEDVAALLRLRVMLCIPQQIVETAHSDICGSLFEKVVKEAIASGVDGYDAEIQKSVRKAAHGLRLTREVAISIASKAVRKIFINYIKRARAAGNRTESAKELKKMIAFNTLVVTNLVEDIKGESSDISSEEPVKEDITQTDDEEWESLLTPTHASDGCEMTAEGGKPGQTEITLKDDLPERDRTDLYKTYLLYCLTGEVTRVPFGAQITTKKDDSEYLLLNQLGGILGLSSQEIVEVHRGLAEQAFRQQAEVILADGQLTKARVEQLNNLQKQVGLPQEYAQKIIKSITTTKMAAAIETAVTQGRLNMKQIRELKEADVDLDSMVSENLRETLFKKTVDDIFSSGTGEFDTEEVYEKIPSDLNINKEKARGVVHELAKGRLSNSLIQAVSLLRQRNQQGVVSSLNDLLACDKAVPSQPVSWEVPEELSDLYTIYLKSNPTPENLSRLQYLLGINDSTAAALREIGDRLLNTTAEEEKFVF

SEQ ID NO: 202913 - protein, 90 aa, Glycine max
  Clone ID: PAT_MRT3847_25256C.1.pep
MLDQVQHPTIMDKVAGQLHLRSGGSGIRSYEGAYCHPTMYQRPSFGNHSNAGLQNPGIASCKASMDFAGGSTTVFPVFFAAPTKKGPFSY

SEQ ID NO: 202914 - protein, 106 aa, Glycine max
  unsure (1)..(106): unsure at all Xaa locations
  Clone ID: PAT_MRT3847_25257C.1.pep
VSPKKXAFQVKSGVWADSXSRGLIDLNITAPKKVSLVDVGIVGGLSDGSDEREKGPPPSFYMGRAMGSGSGLGMGRSGFTPSQPIAGDDFFSNLGNQQHQFGGFQK

SEQ ID NO: 202915 - protein, 75 aa, Glycine max
  Clone ID: PAT_MRT3847_25258C.1.pep
GLEDPPTFWCRSYYHILVDTWANDENVRKALHVREGTKEEFLRCNRTMAYTTTRLNTVEFYRNLTNANLEALVYW

SEQ ID NO: 202916 - protein, 54 aa, Glycine max
  Clone ID: PAT_MRT3847_25259C.1.pep
MGTVWTSMIVLLRCLNRSSVLGEDPYIYYISNVTYGTIAPLGDNQQGIVINGHF

SEQ ID NO: 202917 - protein, 48 aa, Glycine max
  Clone ID: PAT_MRT3847_2525C.1.pep
GFHKFNPPNCSPLKVSISHYMSQSDKHSVLVINKQVWPTRASYPVLRF

SEQ ID NO: 202918 - protein, 52 aa, Glycine max
  unsure (1)..(52): unsure at all Xaa locations
  Clone ID: PAT_MRT3847_25260C.1.pep
NPQXRDMDXLLSSVDXNEGAXLLPHXNXKAXVILVINEGDANIELVGIKEQQ

SEQ ID NO: 202919 - protein, 564 aa, Glycine max
  unsure (1)..(564): unsure at all Xaa locations
  Clone ID: PAT_MRT3847_25261C.1.pep
MDFMKVFDQTVREIKREVNLKVLKIPEIEQKVLDATDNEPWGPHGTVLAEISQATKKFTECQIVMNVLWTRLGETGKDWRYVYKALAVIEYLVAHGSERAVDDIIEHTFQISALSSFEYVEPSGKDVGLNVRKKAENIVSLLNDKDKIHEVRNKAAANRDKGIWADSXSGGLIDFNITSPKKVSSSDVGSGKYGGDGSREREKGPPPSCDMGRAMGAGAGLGMARPASAPAQPVASFKKGSARSASKSXDKSSGLSKSSTNANNYGSVSSQSSSVPANSTEDDMDDFDPRGTSTKTSAGNSNQVDLFGQDLIGDLMDAPTSVPVEKPATSNVPEVDLFADAAFVSAEPHVDKGAISQPQAEVDLFSSQPAIPTVTPTVDLFSIPEPAVQPDTKSEKSVPMNNSTIDPFAAVPLNNFDGSDIFGDFTSQSDSVSSQPSNNVFSDGKHDNVTGKSLADSKVSPKKDAFQVKSGVWADSLSRGLIDLNITAPKKVSLADVGIVGGLSDGSDEREKGPPPSFYMGRAMGSGSGLGMGRSGFTPSQPAAGDDFFSSLSNQQYQFGGFQK

SEQ ID NO: 202920 - protein, 40 aa, Glycine max
  unsure (1)..(40): unsure at all Xaa locations
  Clone ID: PAT_MRT3847_25262C.1.pep
XVMXRFGXLSLSLXLRMXXVEDTXLTIPMTSTSSDLXXEH

SEQ ID NO: 202921 - protein, 76 aa, Glycine max
  unsure (1)..(76): unsure at all Xaa locations
  Clone ID: PAT_MRT3847_25263C.1.pep
VXXSIXNXXVQXXARXRGXXRRXCERXXCXFVGWFXLRDRNRALXSRXSRLAAGSXGSSXEYTEAYGTNVACVSXI

SEQ ID NO: 202922 - protein, 135 aa, Glycine max
  unsure (1)..(135): unsure at all Xaa locations
  Clone ID: PAT_MRT3847_25264C.1.pep
XLNXHGXXNXXITHXXNKXXXXILCSXWLXXCWPXXXVTXEXXXXISXLCXTRXXLHXXXXMXDIXLSNAXXPXXXXXPXAXIXRVXXXEXXXXXSXNXIPPSVXXRHREXYXTGKXFXAXXXCKXXGCXXXXXX

SEQ ID NO: 202923 - protein, 40 aa, Glycine max
  Clone ID: PAT_MRT3847_25265C.1.pep
SVLSGTVVDKVVAELESCGFQCFIAGIGGGGVEINFGVSS

SEQ ID NO: 202924 - protein, 67 aa, Glycine max
  unsure (1)..(67): unsure at all Xaa locations
  Clone ID: PAT_MRT3847_25266C.1.pep
GRIECPRIQLGVCSVGLIXAQLVHCFNWELPMGISPNDLDISEKFGISIPRCKPLLAIPTYRLVNKA

SEQ ID NO: 202925 - protein, 81 aa, Glycine max
  Clone ID: PAT_MRT3847_25267C.1.pep
RRFYPYLGTCKVGVYILRSGQASRLLHHFAAEYPWQVSARDQTHPGVIMADQMAYALMNDDCNAVLIELSEGSSIRDVDYD

SEQ ID NO: 202926 - protein, 48 aa, Glycine max
  Clone ID: PAT_MRT3847_25268C.1.pep
MNLAKGVGGNIDKSQVLSAVEKYEKYHASYGGQEEERKAKYLSPYQHN

SEQ ID NO: 202927 - protein, 59 aa, Glycine max
  Clone ID: PAT_MRT3847_25269C.1.pep
PPPLGKLVSLIKGRANIIPGQRSKVAEAPHIVITCNNKWSQRRVTIKNWRPRRLAENYL

SEQ ID NO: 202928 - protein, 225 aa, Glycine max
  unsure (1)..(225): unsure at all Xaa locations
  Clone ID: PAT_MRT3847_2526C.1.pep
MNNPSSPSPCAAFADFYEQWFEELQSLMQQLRGEGRKEEVMEKVMWHHQNYYVAKSAAAXKDPLNVFLSPWATTLERSLHWITGWRPTTAFHLIYTESSLMFESHIIDILQGLRTGDLGDLSPSQFRRVSDIQCDTVKEENAITEELSEWQDSVSEMMGPGANINDKIGRLVCIIKKADDLRLRTLRSVVGLLSPQQAIEFLIASAELLVGIRGWGLNHDRPRGR

SEQ ID NO: 202929 - protein, 41 aa, Glycine max
  Clone ID: PAT_MRT3847_25270C.1.pep
NKVYLNYILQRNEAMVAQPVRAKLVTYNSAISPPLLQTKLI

SEQ ID NO: 202930 - protein, 82 aa, Glycine max
  Clone ID: PAT_MRT3847_25271C.1.pep
GVTYYLQTWVIEKKGPVFLAMATPLALIMTIFSSAVLLGEIITLGSLLGGIALVIGLYCVLWGKSREQMPKASLDLEEASSG

SEQ ID NO: 202931 - protein, 50 aa, Glycine max
  Clone ID: PAT_MRT3847_25272C.1.pep
TIFLMTPKLLYQSACHVIRKENYIDILKLISVLEWACNCHPLILDHALRM

SEQ ID NO: 202932 - protein, 74 aa, Glycine max
  Clone ID: PAT_MRT3847_25273C.1.pep
LPPNTTPWGQSEPCYPPHITYQSVPSLIVYYSLYGHVNTMAREVHQMAAAKTTLLASLCFMSGVLWTFKIKIIR

SEQ ID NO: 202933 - protein, 102 aa, Glycine max
  unsure (1)..(102): unsure at all Xaa locations
  Clone ID: PAT_MRT3847_25274C.1.pep
VFVLTSSYTPTPXLESVPQLDRRLIVAYXGRTCYVAHHVKQTQEKHVLEGISSFDDKLHSRSAKVSYTKARFVRGKTSTYDIIGAGXHSLEDFSGKEDQEKP

SEQ ID NO: 202934 - protein, 58 aa, Glycine max
  unsure (1)..(58): unsure at all Xaa locations
  Clone ID: PAT_MRT3847_25275C.1.pep
AHKVILTYERSSIHFCFPTSVYRCFRTTPRLCISSQSSIVYKILLWPVLDXEASDFQC

SEQ ID NO: 202935 - protein, 162 aa, Glycine max
  Clone ID: PAT_MRT3847_25276C.1.pep
RVAQFSLTYFGYCMENGKYTVKLTFAEIQFSNDNTYSSLGRRLFDIYVQGALFRKDFNIEGETHVAQKPYILSLYNVNVTDNILEIQFYWAGKGTTRIPVSGVYGPLISAFSIVSDSKPCTDQKNVRHKIIVGVGFGVTALCLVIIIVGIFWWKGYFKGIIR

SEQ ID NO: 202936 - protein, 96 aa, Glycine max
  Clone ID: PAT_MRT3847_25277C.1.pep
PRNKSDAISDITDHLPSPIIGAIGTRKFLSLGQHGMRNQPPSLPRVPYHAHRISVRPAYDQHRIQYKWALDMRTGGRGSWPSASRIQSSGPPHVSS

SEQ ID NO: 202937 - protein, 63 aa, Glycine max
  Clone ID: PAT_MRT3847_25278C.1.pep
WGTKTGAVHLCRLHNGMTNAVAVHCAQVRIPYYICALLGCFFSTTPLASTVEGSVISSIFTFS

SEQ ID NO: 202938 - protein, 97 aa, Glycine max
  unsure (1)..(97): unsure at all Xaa locations
  Clone ID: PAT_MRT3847_25279C.1.pep
PQHATPPHTHPTRAVHHTQSNHPTPLRAPPHSQPPSHQRATSSRLMXPPRPPTSNLQPLIVVXCPLXNSWVCFWYLXYRIFLGIXWYNLXKQYXFPX

SEQ ID NO: 202939 - protein, 44 aa, Glycine max
  Clone ID: PAT_MRT3847_2527C.1.pep
YMSLSNIYFVVSFFSNLNPIMSTESIGLTYKFNYCLMLRHPRHV

SEQ ID NO: 202940 - protein, 70 aa, Glycine max
  unsure (1)..(70): unsure at all Xaa locations
  Clone ID: PAT_MRT3847_25280C.1.pep
KGGGGEIPNQKPGGEXRAPGGERKKPGGTEGKTNSGRRGPHKKGGKKRKXGGIKGKTGGAKRGTKQTAMA

SEQ ID NO: 202941 - protein, 56 aa, Glycine max
  Clone ID: PAT_MRT3847_25281C.1.pep
VTKPFRHYHSSRTKSDESLVAAFLVLIRTFPSAVAIYEAARFFCLDCALHVFTFLE

SEQ ID NO: 202942 - protein, 87 aa, Glycine max
  Clone ID: PAT_MRT3847_25282C.1.pep
GRWSFVNYLNLDCRLLVYQKGFKMSWNPHMEVHYNTISYPYNTAGSFIEYFEGLTYEHVNFIFSGASHAQESSYPSNSSFYKFGLSE

SEQ ID NO: 202943 - protein, 248 aa, Glycine max
  Clone ID: PAT_MRT3847_25283C.1.pep
MSWNSRMEAHYNTISYPYNTAGSFIEYFEGLTYEHVNFIFSGASHAQESSYPSNSSFYKFGHCEPENNSYYRYSHGYEVNHHEPLVDEYRRPSENSLTINEQSPAVSTEWVEGGNTDTQDNSIECPRRHHSNSNDYQVIWQDNIDPDNMTYEELLELGEAVGTQSRGLTQEQISSLPVSKYKCGFFLRKKSRDERCVICQMEYRRGDKRITLPCKHVYHASCGNKWLSINKACPICYTEVFADKSKHK

SEQ ID NO: 202944 - protein, 128 aa, Glycine max
  unsure (1)..(128): unsure at all Xaa locations
  Clone ID: PAT_MRT3847_25284C.1.pep
RIDCRLLVWQKGFKMSWNPHMELHYNTISYPYNTAGSFIEYFEGLTYEHVNFIFSGASHAQESSYPSNSSFYKFGISEPVNTSYYRYGHGYEVNHHEPSVDEYRRPSENSLXINEQSAAVSTEWVEGG

SEQ ID NO: 202945 - protein, 389 aa, Glycine max
  Clone ID: PAT_MRT3847_25285C.1.pep
MEDQNASSNGLGKVFHKVKPYLAMMSLQFGYSGMYIITMVSFKHGMSHWVLSVYRHIVATLIMAPFAFVLERKIRPKMTLPVFLRLAALGFLEPVLDQNLYNMGMKNTSTTFASATVNVMPAITFIMALICRLETVNLRKIPSVAKVVGTAVTVSGAMVMTLYKGPALQFIKGQAATHHESGNSTQPSEQNWVLGTVELIASCGGWASFFILQSFTLKMYPAELSVTAWICFLGIFEGAIATLIFERDMSVWSIGMDSRLLACVYSGVVCSGMAYYVQGVVTRERGPVFVTSFSPLCMIITAALGSIVLAEQVYMGSVIGAIIIVSGLYTVVWGKSKDKLNNKTNEGNSEGHELPIKDGTKSGSDIFDSIEINVPSGAGKNVLLPSART

SEQ ID NO: 202946 - protein, 110 aa, Glycine max
  Clone ID: PAT_MRT3847_25286C.1.pep
CIHLWRGQSLGYSRVLGWLLSVAKSIICSELMLKRIKFGTRKLNGMLNLAALRPILMLFTRGVDNSREQKKSNIYVVIRISTTCVFRKYVLLKVSFRKRARLLKKKKKGR

SEQ ID NO: 202947 - protein, 76 aa, Glycine max
  Clone ID: PAT_MRT3847_25287C.1.pep
ISVAKSLIDFSYCWTDWTDHTRGSWEPQFCITTSYSLCVLFSFVTPPAEMVAYWQHLVAVDRTVAQRVIKKKKKKK

SEQ ID NO: 202948 - protein, 204 aa, Glycine max
  Clone ID: PAT_MRT3847_25288C.1.pep
MSWNPHMEVHYNTISYPYNTAGSFIEYFEGLTYEHVNFIFSGASHAQATRKIHNSKESSYPSNSSFYKFGLSEPENTSYYRYSHGYEVNHHEPLVDEYRRPSENSLTINEQSAAVSTEWVEGGNTGTRDNSIECPRRHHSNSNDYQVIWQDNIDPDNMTYEELLELGEAVGTQSRGLTQEQISSLPVSKYKCGFFLRKKSRDER

SEQ ID NO: 202949 - protein, 235 aa, Glycine max
  unsure (1)..(235): unsure at all Xaa locations
  Clone ID: PAT_MRT3847_25289C.1.pep
MEDQNASSSGLGKVFRKVKPYLAMMSLQFGYSGMYIITMVSFKHGMSHWVLSVYRHVVATLIMAPFAFVLERKIRPKMTLPVFLRLAVLGFLEPVLDQNLYNMGMKNTSTTFASATVNVMPAITFIMALICRLETVNLRKIHQRGQGWLEPAVTVSGAMVMTXYKGPAPSVHKGTSSNPPXESGSSTQPSEQNWXVLGTVELIEGVGGWASFFILQSFTLXKYPAELSVTAWDCF

SEQ ID NO: 202950 - protein, 70 aa, Glycine max
  Clone ID: PAT_MRT3847_2528C.1.pep
LRQGSPASAPVEPAENRIVVEEAAIAESQISYLSLPSTSIINERAPLAGLFVSYMVHEPRWVLECVLSLL

SEQ ID NO: 202951 - protein, 31 aa, Glycine max
  Clone ID: PAT_MRT3847_25290C.1.pep
CGMGPPGQSFSDQMRDRIILWSAGNCPRAEF

SEQ ID NO: 202952 - protein, 70 aa, Glycine max
  Clone ID: PAT_MRT3847_25291C.1.pep
RSHFRHYHSSRTKSDEALVAAFLVLIRTFSLCRCGPRSREILLPRLRSSCDSASLSNQVFYSFGLHFRSS

SEQ ID NO: 202953 - protein, 134 aa, Glycine max
  unsure (1)..(134): unsure at all Xaa locations
  Clone ID: PAT_MRT3847_25292C.1.pep
IGMDSRLLVXVYSGVVCSGMAYYVQGVVTRERGPVFVTSFSPLCMIITAALGSIVLAEQVYLGSVIGAIIIVSGLYTVVWGKSKDKLNKTKEGNSEGHELPIKDGTKSGSDIFDSIEINVASGAGKNVLPSART

SEQ ID NO: 202954 - protein, 137 aa, Glycine max
  unsure (1)..(137): unsure at all Xaa locations
  Clone ID: PAT_MRT3847_25293C.1.pep
KKWRVIRIIFRGDDILMYTMAEVRTTRNSFWAVFTLLGSLALMFVAISTYLAMDLXFISEKITDYLFYXDSIYTTFIPQGATMALYGIAALFSSLHLASIIFXDIYRGFDIFNXKRKKALFDRWGLPAKNCWIILEI

SEQ ID NO: 202955 - protein, 85 aa, Glycine max
  unsure (1)..(85): unsure at all Xaa locations
  Clone ID: PAT_MRT3847_25294C.1.pep
ERDDDDEDDDELMHKVMGRILGSVVVSVGVPMALGLLLGELKGEHEENAALDAPLWTPXLTTVATFVAIALGTVYAGLYAGLEGD

SEQ ID NO: 202956 - protein, 84 aa, Glycine max
  Clone ID: PAT_MRT3847_25295C.1.pep
FLQYSSCLQQPMPIACTSCNSKGHTECKWCGGTGFFIIGDNVLCEVPSRNTSCVVCRGKVLFMMKKTNLNPQMLLPNLITSLFI

SEQ ID NO: 202957 - protein, 39 aa, Glycine max
  Clone ID: PAT_MRT3847_25296C.1.pep
SDEDLAAQSAFVHEEFIGKQNVSKESVADQDIGLMRTEC

SEQ ID NO: 202958 - protein, 120 aa, Glycine max
  Clone ID: PAT_MRT3847_25297C.1.pep
MVQRLTYRKRHSYATKSNQHRVVKTPGGKLVYQTTKKRASGPKCPVTGKRIQGIPHLRPAEYNRSRLHRNRRTVNRAYGGVLSGSAVRERIIRAFLVEEQKIVKKVLKIQKTKEKQALKG

SEQ ID NO: 202959 - protein, 47 aa, Glycine max
  Clone ID: PAT_MRT3847_25298C.1.pep
TAITGCRILLPVNEASVLDFKKYSIASYFLGLDFLRVIVSLSVLSRD

SEQ ID NO: 202960 - protein, 175 aa, Glycine max
  Clone ID: PAT_MRT3847_25299C.1.pep
MAKWIFFPIIFFVVFVASTFLLEINLSRITRTTIFKTIIIFNKQQPQFPLNCTDGNLAKTCSSYYPTTFDLDDDSSTTSCPNYFKWIHEDLKPWKSKGITRDMVERGKNVSHFRLVIVNGKAYVEKYDKVYQTRDVFTIWGILQLLRLYPGKIPDLDLMFQCGDKPVCVKKRFLR

SEQ ID NO: 202961 - protein, 61 aa, Glycine max
  Clone ID: PAT_MRT3847_2529C.1.pep
MKLVVVKLDLHDDKAKQKAMKSVSSISGIYSISMDMKEKKLTVEGDINPVNVVSKLRKTWH

SEQ ID NO: 202962 - protein, 64 aa, Glycine max
  Clone ID: PAT_MRT3847_252C.1.pep
FGSTSPRVSFFQMLVSPFLTIIMNFLSKGLECLWPVFLRVGICMPPYVLLGVVMFTFLDVNSRV

SEQ ID NO: 202963 - protein, 257 aa, Glycine max
  Clone ID: PAT_MRT3847_25300C.1.pep
MASMARGAKRRHSIISRKMLILFSASLSCVVVLVICSLFRFHSPKPPISISISRVVFDGPPKIAFLFLVRRNLPLDFLWDAFFQNVDVSRFSIYVHSAPGFVLDESTTRSQFLYGRQISNSIQVLWGESSMIQAERLLLAAALEDPANQRFVLLSDSCVPLYNFSYVYNYLMVSPRSFVDSFLDAKEGRYNPKMSPKIPREKWRKGSQWITVVRKHAEVIVDDDVIFSVFKKYCKRRPPIDTSKGKLNLKLQKQHNC

SEQ ID NO: 202964 - protein, 52 aa, Glycine max
  Clone ID: PAT_MRT3847_25301C.1.pep
EHIPSIHHTSSLHSLRSASNELYLMSQRSAKTVSILKPRRAKTQVTPHADHY

SEQ ID NO: 202965 - protein, 62 aa, Glycine max
  unsure (1)..(62): unsure at all Xaa locations
  Clone ID: PAT_MRT3847_25302C.1.pep
WAVPNIYKRPLCSCSLLALIKFCRIKPSVILMYNNMLGPRSMFVCFDNKWRLPDLIIXXXYF

SEQ ID NO: 202966 - protein, 142 aa, Glycine max
  Clone ID: PAT_MRT3847_25303C.1.pep
LVPPNPVNYGGPCQLFCVKAFFAALPIWGEEKTANLLLHKFQWGPAFLSLNGGFLRASSQCPNRAGIIFVQKGWVSQKSPIPRAPPDSGVSPPESGDKIQDFSHFEDGLPPLGKTLFLLGIVPSDEKREKIPFSSLRLRVWK

SEQ ID NO: 202967 - protein, 218 aa, Glycine max
  Clone ID: PAT_MRT3847_25304C.1.pep
ALVSLALFGAYVSRAGIKTVNVMTPKVFIGLIVGAMLPYWFSAMTMKSVGSAALKMVEEVRRQFNTIPGLLEGRAKPDYANCVKISTDASLKEMIPPGALVLLTPLIAGTFFGVETLAGVLAGSLISGVQVAISASNTGGAWDNAKKYIEAGTTPHAVSLGPKGSDAHKAAVIGDTVGDPLKDTSGPSLNILIKLMAVESLVFAPFFAAHGGLIFKLL

SEQ ID NO: 202968 - protein, 44 aa, Glycine max
  Clone ID: PAT_MRT3847_25305C.1.pep
GHHHMATVPLCLTFYRLLVALPRSLVFPASLPLRRFLSPPPPPS

SEQ ID NO: 202969 - protein, 87 aa, Glycine max
  Clone ID: PAT_MRT3847_25306C.1.pep
NLTPLFTTSYNTPSPVFLCFASSRVPSSYIFFPHFSSVPISHNCILSSNISIVPRSDSFVHESSLFWGVCDLHYSRVNINGDWEEPV

SEQ ID NO: 202970 - protein, 67 aa, Glycine max
  Clone ID: PAT_MRT3847_25307C.1.pep
TLIAGQKDSFKTEWCRKWWLKNDRGRTTVLYTKSCCRLLVSGMSIYMGCLCEAIIGGILRMYIRCTF

SEQ ID NO: 202971 - protein, 56 aa, Glycine max
  Clone ID: PAT_MRT3847_25308C.1.pep
QTRPPQTSINYYIHFFFYKFISNSSNQHLLNFSTSINNTKTIKTTYIFPHLFKYTI

SEQ ID NO: 202972 - protein, 65 aa, Glycine max
  Clone ID: PAT_MRT3847_25309C.1.pep
YSNPNISAQGKQFNKKEKGEKKRKITEEFSRVLNQNSVEIQHNRRKRISINSAQNEKLCKLGIIQ

SEQ ID NO: 202973 - protein, 76 aa, Glycine max
  unsure (1)..(76): unsure at all Xaa locations
  Clone ID: PAT_MRT3847_2530C.1.pep
KHKXRAEREVKVEEERTMVRDKKKERKICKSGYEQNYKTMKPFIQKSLYIIGHDCRFAGQSIVQLKLLRPTTKYEK

SEQ ID NO: 202974 - protein, 57 aa, Glycine max
  Clone ID: PAT_MRT3847_25310C.1.pep
HIHLKEERYRRCKIYSIHYSFKKKMDNMYKMLTQIIICMGANSYQQHHVGPPALLSE

SEQ ID NO: 202975 - protein, 35 aa, Glycine max
  Clone ID: PAT_MRT3847_25311C.1.pep
KSVVVKKQKQFACVSIQERCRKLTLIMRHMEIKWK

SEQ ID NO: 202976 - protein, 63 aa, Glycine max
  Clone ID: PAT_MRT3847_25312C.1.pep
MINSLCGGDEILMCERTHLLLPCCQRMAICKKDAWRVECRILNEIPLTAMSNRIFSGVLIGYR

SEQ ID NO: 202977 - protein, 381 aa, Glycine max
  Clone ID: PAT_MRT3847_25313C.1.pep
MADAGAEGASSSTVGQIDVFWHEGMLKHDTGNGVFDTGMDPGFLEVLEKHPENSDRVKNLVSILKRGPISPYISWHLGTPAKIPELFSFHTPEYINELVEVDKEGGKQLCGGTFLNPGSWDAALLAAGTTLSAMKHLLNGDGKVSYALVRPPGHHAQPSQADGYCFLNNAGLAVQLALDSGCKKVAVIDIDVHYGNGTAEGFYRSNKVLTISLHMNHGSWGPSHPQSGSVDELGEGEGYGFNLNIPLPNGTGDKGYVHAFNELVVPSIQKFGPDMIVLVLGQDSNAFDPNGRQCLTMEGYREIGRIVHLLAKRHSAGRLLIVQEGGYHVTYSAYCLHATLEGVLNLPMPLLADPIAFYLDDETFSVQVIEAIKNYQKDKVR

SEQ ID NO: 202978 - protein, 75 aa, Glycine max
  Clone ID: PAT_MRT3847_25314C.1.pep
VSTLFTPTFGFGMNDGYIEYELPRGCYLIQHPQSEQTIDPFVGCEGCFCLPFESQIVHNQWCLKKVQIYFYWEVL

SEQ ID NO: 202979 - protein, 128 aa, Glycine max
  Clone ID: PAT_MRT3847_25315C.1.pep
MLDSVLLALFLPCLGMSAVFIVYMCLLWYATNHHSDPALPAKPVSDTGISPSQLDKLPRITGKDLLMGNECAVCLDEIGTEQPVRVVPGCNHAFHLECADTWLSKHPLCPLCRAKLDPSLFSSSQNPC

SEQ ID NO: 202980 - protein, 403 aa, Glycine max
  unsure (1)..(403): unsure at all Xaa locations
  Clone ID: PAT_MRT3847_25316C.1.pep
MGSGNILPSSGSSDMSISELREKHHWELENLTLTTQPLKTLKFFTLAVIQYIKKTAIYLLAKGGWVMLFSVAVGTLGIVLMTLGCLHEKHLEELLEYFRFGLWWVALGVASSIGLGSGLHTFVLYLGPHIALFTIVAVQCGRVDLXGLPLLMPVYYSQVPLSSILPQVQLEAILWGIGTAIGELPPYFMLEATLWGIGTADAMEELDSEEGQHACPVGEVLSGIKCWFLSHSQHLNFFTILVLASVPNPLFDLAGIMCGQFGIPFWKFFLATLIGKAIIKTHIQTIFIISVCNNQLRDWIENEFIWVLSHIPGFASVLPRVTASLHAMKDKYLKAPHPLSPNKQGKKWDFSFASVWNTVVWLMLMNFFVKIVNATSQRYLKKQQETQLAALTEKSTPTDSDAQ

SEQ ID NO: 202981 - protein, 60 aa, Glycine max
  Clone ID: PAT_MRT3847_25317C.1.pep
FSTEDKLVSFLDRIHCPFYLCCFFNLSHLNLFGRGGGRIMRITCQIRIGCNFCISGESHT

SEQ ID NO: 202982 - protein, 123 aa, Glycine max
  Clone ID: PAT_MRT3847_25318C.1.pep
MRAIMGSGNIRPSSSGCSHLSISELREKHHWELENLTLTSQPFKTLKFFTLAVIQYIKKTSLYLLAKGGWVMLFSVAVGTLGIVLMTLGCLHEKHLEELLEYFRSGLWWVPLGVASSIGLGSG

SEQ ID NO: 202983 - protein, 283 aa, Glycine max
  unsure (1)..(283): unsure at all Xaa locations
  Clone ID: PAT_MRT3847_25319C.1.pep
AFKIFISEQVDAAIIEVGLGGKEDSTNVIKEPTVCGITSLGMDHTEILGDTIGQIASHKAGIFKPKVPXFTVPQPPEAMDVILERAKELMVPLEVTEPFDREQMKGLELGLSGDHQFYNAALAVSLSRCWLQRTGNWGKKYQKDSNLPDEFIRGLSTAHFSGRAQIVYDSSPNSDCSEILSKNCGGELIFYLDGAHSPESMETCAKWFSNAVKRYEISSHSSFEVENAEESLENGHFLHESKTLEQLEKSFRRILLFNCLDVRNPHILLPRLVNTCASSGIYF

SEQ ID NO: 202984 - protein, 120 aa, Glycine max
  Clone ID: PAT_MRT3847_2531C.1.pep
DCIRYSMILTMMCTNIWRIQLLVLIKLWRRSGMILLQELINCWRRKTKRKEKLARKLGCLSINGLKNHMFLSVISYVISADHMDLFHYRARLLDGEKCSEGEIGCSNFCLSWSWLERLYC

SEQ ID NO: 202985 - protein, 47 aa, Glycine max
  Clone ID: PAT_MRT3847_25320C.1.pep
PFLIVRREKLDGLKTMMEVGICKQLPHLSILSVIMLSLLNSFLHFDQ

SEQ ID NO: 202986 - protein, 49 aa, Glycine max
  Clone ID: PAT_MRT3847_25321C.1.pep
KNELGQGRSWGLINIHFFPSWTPNTIAFGPSTTHGLRSQANFGRAPGTF

SEQ ID NO: 202987 - protein, 107 aa, Glycine max
  Clone ID: PAT_MRT3847_25322C.1.pep
ARLGFRSGPIAILLCETVNLLIAGSKCFTVWRSAKTREASILCHGTCHISGRLLICSFKLCFCFCGSWFVGITSLSLGAVFCSQMRCWSRILHVVYPFCVRWAIKLS

SEQ ID NO: 202988 - protein, 75 aa, Glycine max
  Clone ID: PAT_MRT3847_25323C.1.pep
GNFYLQPFLLGGIPPLQFYRPRVQFCLPGDAKKTGNLIQGEKNEPQGKTILQHKDKFFREKHLTPHLLVNSKKKP

SEQ ID NO: 202989 - protein, 140 aa, Glycine max
  Clone ID: PAT_MRT3847_25324C.1.pep
MASLSSLVLLLAALILSPQVLANYENPPVYKPPVEKPPVYKPPVEKPPVYKPPVEKPPVYMLPVEKPPVYKPPVEKPPVYKPPVEKPPVYKPPVEKPPVYKPPVEKPPIYKPPVEKPPVYKPPYGKPPYPKYPPTDDTHF

SEQ ID NO: 202990 - protein, 49 aa, Glycine max
  Clone ID: PAT_MRT3847_25325C.1.pep
LGLALRHSPSMESKFMSWQDFPMHDKTKSVRLFIIRLDMNNGALATCYG

SEQ ID NO: 202991 - protein, 89 aa, Glycine max
  Clone ID: PAT_MRT3847_25326C.1.pep
ASLSSLVLLLAALILSPQVLANYENPPVYKPPVEKPPVYKPPVEKPPVYKPPVEKPPIYKPPVEKPPVYKPPYGKPPYPKYPPTDDTHF

SEQ ID NO: 202992 - protein, 219 aa, Glycine max
  Clone ID: PAT_MRT3847_25327C.1.pep
ASLSSLVLLLAALILSPQVLANYENPPVYKPPTEKPPVYKPPVEKPPVYKPPVENPPIYKPPVEKPPVYKPPVEKPPVYKPPVEKPPVYKPPVEKPPVYKPPVEKPPVYKPPVEKPPVYKPPVEKPPVYKPPVEKPPVYKPPVEKPPVYKPPVEKPPVYKPPVEKPPVYKPPVEQPPVYKPPVEKPLIYKPPVEKPPVYKPPYGKPPYPKYPPTDDTHF

SEQ ID NO: 202993 - protein, 395 aa, Glycine max
  Clone ID: PAT_MRT3847_25328C.1.pep
MAHCSLFLSLRRNSGLACLLNRTRFVSSGAVSSDLVEESVEGVDDDLRSRIFRLRLPKRSATNVLQKWVLQGNPVTLSQLRDISKELRRSQRYKHALEISEWMVSHEEYELSDSDYAARIDLTTKVFGIDAAERYFEGLPLATKTAETYTALLHSYAGAKLTEKAEELYQRIKDSNLSFDALTYNEMMTLYMSVGQFEKVPSVVEELKQQKVSPDIFTYNLWISYCAAILNIDEVRRILDEMSHGAGSNESWIRYLNLANIYISVGHLDNASSNTLVETEKRITQRQWITYDFLIILYGGLGSKDKLDQIWNSLRMTKQKMISRNYICIISSYLMLGHTKEVGEVIDQWKQSTTTDFDMLACKKIMVAFRDMGLAEIANNLNMILIEKNLSLGSD

SEQ ID NO: 202994 - protein, 230 aa, Glycine max
  Clone ID: PAT_MRT3847_25329C.1.pep
MASLSSLVLLLAALILSPQVLANYENPPVYKPPTEKPPVYKPPVEKPPVYKPPVENPPIYKPPVEKPPVYKPPVEKPPVYKPPVEKPPVYKPPVEKPPVYKPPVEKPPVYKPPVEKPPVYKPPVEKPPVYKPPVEKPPVYKPPVEKPPVYKPPVEKPPVYKPPVEKPPVYKPPVEKPPVYKPPVEKPPVYKPPVEKPPIYKPPVEKPPVYKPPYGKPPYPKYPPTDDTHF

SEQ ID NO: 202995 - protein, 40 aa, Glycine max
  Clone ID: PAT_MRT3847_2532C.1.pep
SCKHIIRDNIILILHCTIMLWALIMCCGVGSHRLHRMSFA

SEQ ID NO: 202996 - protein, 141 aa, Glycine max
  unsure (1)..(141): unsure at all Xaa locations
  Clone ID: PAT_MRT3847_25330C.1.pep
IQSLQDTVAQFTIMNYTTEELSGSEDGSHIFEAIGLLIGTEDVLPEKQSDYLSSLLSPLCQQVEALLINAKLLNAEETNAKIAVIQQIIMAINSLSKGFSERLVTASRPAIGIXVKQTLDVLLSXVFVIFPKVEPLRNKVT

SEQ ID NO: 202997 - protein, 40 aa, Glycine max
  Clone ID: PAT_MRT3847_25331C.1.pep
PNYLATPQRPSFSAIRPRCPSDPHVLSFLNGLLINQPIFS

SEQ ID NO: 202998 - protein, 42 aa, Glycine max
  Clone ID: PAT_MRT3847_25332C.1.pep
LVGGLPFFFFFKKCSLWIVYSLINERYLNDKNYYFSRNKMVP

SEQ ID NO: 202999 - protein, 65 aa, Glycine max
  unsure (1)..(65): unsure at all Xaa locations
  Clone ID: PAT_MRT3847_25333C.1.pep
KDRCLTVEDKATWQALIWERLHDSTNNEFLRREYSTSTFYFILFGLFLKFKMLALQNKERQXEFV

SEQ ID NO: 203000 - protein, 136 aa, Glycine max
  unsure (1)..(136): unsure at all Xaa locations
  Clone ID: PAT_MRT3847_25334C.1.pep
TPPTHXHXTHHPXXQTXXXQXTXHXTXPHXXXPXTXXXXHSRXQTTXPXPXHXRXXXHXXXXXHXXXXXXXXXXXXXATAHXRTXXXXQHXYXXXXXAXXXHQQSXXXAPTXHXXXXRXXXNXXPXXXNTXQXPXX

SEQ ID NO: 203001 - protein, 40 aa, Glycine max
  Clone ID: PAT_MRT3847_25335C.1.pep
RVWNARVLDNQLPLIFGEVMAQTNRTWPTAPTRPEALFGG

SEQ ID NO: 203002 - protein, 63 aa, Glycine max
  unsure (1)..(63): unsure at all Xaa locations
  Clone ID: PAT_MRT3847_25336C.1.pep
AEITKGADEKSKWISDEKFSKWVGTCKTKAKSCKISKEWTQNPPNMVTKDSSYGKKKKKKKKX

SEQ ID NO: 203003 - protein, 177 aa, Glycine max
  Clone ID: PAT_MRT3847_25337C.1.pep
MASVIPRCLPPPIPIAHRRKAQVVKSCHQNESSASAHTDHSSNPKELRVTVSRRNCLSCLCSTIVLISDCAMPIFLPKASAADGNGIMEKPVCRNCLGSGAVLCDMCGGTGKWKALNRKRAKDVYEFTECPNCYGRGKLVCPVCLGTGLPNNKGLLRRPEARKLLDKMYNGRLLPNS

SEQ ID NO: 203004 - protein, 97 aa, Glycine max
  Clone ID: PAT_MRT3847_25338C.1.pep
CMVVSVHTQILFLLRWVGYWFCRFAVSYPSCRVVSMVCPVLSVAVVLSCSSVLFQMCHCCVFWCVIRACVLSVVLLLVLCPFGSCLLSGGCSCLSVL

SEQ ID NO: 203005 - protein, 47 aa, Glycine max
  Clone ID: PAT_MRT3847_25339C.1.pep
SLNAKERSGYSVSRQCDSVTTRLGNAESNPPNRNNYPLKARIKRHLR

SEQ ID NO: 203006 - protein, 57 aa, Glycine max
  Clone ID: PAT_MRT3847_2533C.1.pep
MNHSNGTLYNKICTTHKPCCDSGTYYRHQIGNFKCELHLGVWTKPHRATKLYLGCDS

SEQ ID NO: 203007 - protein, 108 aa, Glycine max
  Clone ID: PAT_MRT3847_25340C.1.pep
MARNVGLNMIGYSTIAMVFIIGVTKATEYMVGDNFGWNVASYESFYMDWARTKRFHVGDKLIFSWSGEHSLGIRKDDIYYENCNTSLEGGLTYIFNGATINYTIGSTP

SEQ ID NO: 203008 - protein, 85 aa, Glycine max
  Clone ID: PAT_MRT3847_25341C.1.pep
YSLKKKGFSLYMCDTCGVTEPVISLNYYCKYTFGVHQVHPISHQPSLPSLLWISSLDCMAKFVHIQTFETNFMLRSDGNCPYAYV

SEQ ID NO: 203009 - protein, 141 aa, Glycine max
  Clone ID: PAT_MRT3847_25342C.1.pep
MYEMKKGKKGKVHSTLLPRVRGRVGSEKRRGFASHRTEMNSITRSGSLSIILVVFFSLHFILGFSDDSSPASKDATKTEPHAGRSTSAIVIIVLIVLVFFSLFSFVLFKLWRKKKREEQYARLLKLFEEDDELELELGLRD

SEQ ID NO: 203010 - protein, 501 aa, Glycine max
  Clone ID: PAT_MRT3847_25343C.1.pep
GLDAEDIALLFEAIKPALQDAEGVMQKKAYKVLSIILRSSSNDFVSSKFEELRQTMVEVLPCHFSAKRHRLDCLYFLIVHVSKSKDDMEHWRDIFLTEIILALKEANKKTRNRAYDILVEIARAFADEESGGNRESLNNFFQMVAGHFTGETPHMISAAAKGLARLAYEFSDLVLTSFKLLPGTLTLLRNNSRNHFKAKVKLLLGMLVTKCGLEAVKAVMPEEHMKLLSNIRKIKERKERNRSAKSEETRSHFSKATTSRQSLWNHTKIFSDFDGDSGNSNAEYMISRGSKAFLHPKSAASSFRSNIRLKKNLPEHLSDQSDDEPLDLLDRKKTRSALKTSEHLKRKSRLDDEVEVDSEGRLIIHEEGEWKKEKHADDDFDSRSERDSHISAKSGTKAQKRRKTSDSGWAYTGKEYASKKAGGDVKRKDKLEPYAYWPLDRKMMSRRPQQRAAARKGMASVVKMTKKLEGKSASGVLSINSLKLKRAHKKGSKENKKTARA

SEQ ID NO: 203011 - protein, 68 aa, Glycine max
  unsure (1)..(68): unsure at all Xaa locations
  Clone ID: PAT_MRT3847_25344C.1.pep
HLTLLYVNTKCIYENTFFTSLSMVSYFTQPPHTSLLRRTDIIKSSKISFIHHPXRLLTHTSSPNQPPL

SEQ ID NO: 203012 - protein, 190 aa, Glycine max
  unsure (1)..(190): unsure at all Xaa locations
  Clone ID: PAT_MRT3847_25345C.1.pep
TVRFNFFQVKLLLGMLVTKCGLEAVKAVMPEEHMKLLSNIRKIKERKERNRSAKSEEARSHFSKATTSRQSMWNHTKIFSDFDGDSGNSDAEYMISRGSKASLHPKSAASSFRVQYQXKKNLPEHLSDQSDDEPLDLLDRQKTKSALKMSEXSQKKSRLDDEGELDSQGPLIIHEETGNGGRKNMPDEDF

SEQ ID NO: 203013 - protein, 57 aa, Glycine max
  Clone ID: PAT_MRT3847_25346C.1.pep
FCQIITFLGTNYYSQKKLYNCHIFIIAGMLLFDQIVSSFGPITIHINNFILTSMQFN

SEQ ID NO: 203014 - protein, 44 aa, Glycine max
  Clone ID: PAT_MRT3847_25347C.1.pep
DPNVSPAVRIRENPLDRITVHCQQELRQLAHNHYAAINTLSEQI

SEQ ID NO: 203015 - protein, 59 aa, Glycine max
  Clone ID: PAT_MRT3847_25348C.1.pep
PACQPVNSPTIIRRRKKKTKIICVLFRPSMAVTLRDYDYCLLYFWARCQGNNSLRFCFF

SEQ ID NO: 203016 - protein, 383 aa, Glycine max
  unsure (1)..(383): unsure at all Xaa locations
  Clone ID: PAT_MRT3847_25349C.1.pep
MAPDAAAAAAANGKKRRRYLPHNKAVKKKGSYPLRPGVQGFFITCDGGREHQASREALNILDSFYEELVDGEKELPSKPLNKKITFADSDSSSSDGEEEEEEEEEEEEEEEALXDGDEEKGDKKPKLDTSSDDNASHDDGAGEKSDPHNVDEPHTQEENKTCDNKGDNGNLKTTKGTADDLPAVKQCCKTNVPACNFSDKVEHKSIDKLIEEEFKELGDKNKRRFVKLDSGCNGVVFVQMRKKDGDRSPKDIVHRIVTSAASTGKHMSRFILRILPIEVSCYASKEEISRTIKPLVEQYFPVETQNPLKFAVLYEARANTGVDRMEIIDAVAKSVPGPHKVDLKNPDKTIVVEIARTVCLIGVIEKYKELSKYNLRQLTSRKD

SEQ ID NO: 203017 - protein, 127 aa, Glycine max
  unsure (1)..(127): unsure at all Xaa locations
  Clone ID: PAT_MRT3847_2534C.1.pep
ATRTNKNPKNAVDGEEANGIRQILYIHSSHTLKHQQPKTEYAAQEYEEIYEEVEEEEEEDDEDQENEEGEEEXQAEYDILKQQQPQQLDEYDMTISKLLETHCKDQLMKLLCDTVDNHRDVDERIRH

SEQ ID NO: 203018 - protein, 377 aa, Glycine max
  Clone ID: PAT_MRT3847_25350C.1.pep
MAPDAAAANGKKRRRYLPHNKAVKKKGSYPLRPGVQGFFITCDGGREHQASREALNILDSFYEELVDGEHSSVKELPSKPLNKKITFADSDSSSSDDDDDDDEEEEVQEGDEEKGDKKPKLDTSNDDNTSHDDGVPEKSDPHKVDEPHTQEVDETCDNKGANDNLKTTKGTADGLPAVKQCCKTNVPACNFSDKVEQKSIDKLIEEEFKELGDKNKRCFVKLDSGCNGVVFVQMRKKDGDRSPKDIVHRIVTSAASTGKHMSRFILRILPIEIACYASKEEISRAIKPLVEQYFPVETQNPHKFAVLYEARANTGVDRMEIIDAVAKSVPGPHKVDLKNPDKTIVVEIARTVCLIGVIEKYKELSKYNLRQLTSRKD

SEQ ID NO: 203019 - protein, 219 aa, Glycine max
  Clone ID: PAT_MRT3847_25351C.1.pep
MRERNKGVEDQAYTNDMDCYYYSTSEFTPCKKHPSSSSSVGICAYCLKDRLVKLVCSDCGEQRLSSCSCSDEMVSSHRNSCTVEVGGVGRVSFLIENENNNESTPVVLQHLNHNKANKEEEEDEVLGLRRSSSSCVEIKRHHHGGGGGFWKIGKLFRKKKEKGDRSVVGFDERNNEAWVVDHQGGVSRSRSLCSFRGGGLFGSEDGGDSVLSGANDLSS

SEQ ID NO: 203020 - protein, 99 aa, Glycine max
  unsure (1)..(99): unsure at all Xaa locations
  Clone ID: PAT_MRT3847_25352C.1.pep
PWSWNDHLPQNNNVYPPQLFPSFSPQVLCNNSFSFYYIYIYTQKPSLTFHFLSLALMMXWFLTGIVPESSSLLWTPQRPPLPLTCNSFAFFSTLIGLEM

SEQ ID NO: 203021 - protein, 86 aa, Glycine max
  Clone ID: PAT_MRT3847_25353C.1.pep
MVLGSQLTMKMADTAFRRELSTAKLVDGAGQPWESSRSVGQMTSMSSSTVKKKPKNGARSSWSVGSRKWGFYRILVCVLCGCRIRA

SEQ ID NO: 203022 - protein, 55 aa, Glycine max
  Clone ID: PAT_MRT3847_25354C.1.pep
SSREHRWNYYFTLNSCTRRQCHSFFMQFLHEEVLECDALGGDYERYKIDTGVFRR

SEQ ID NO: 203023 - protein, 226 aa, Glycine max
  Clone ID: PAT_MRT3847_25355C.1.pep
MMKKNNLSCCVLLHFLCCCLLLPALVLSHHIHGNPASNIFDIINKNLTDQKLPRLNDSPGLGCMALQYVELCKGNCTDNNVVNCKPPEDDFTEVFAPNCGVELPTFGTITGHIVGCQRKYLEPSLAFSEVLIKDEKSLSLLKNKSHTEVGVGLVGLHKGPFFWCVLFSNGKTNSTFVLENHGAGIQQKKGCYSGSTTPCSRGQKSRVAFFNIFFMCYVSILLFKLW

SEQ ID NO: 203024 - protein, 71 aa, Glycine max
  Clone ID: PAT_MRT3847_25356C.1.pep
EKLFFKGPKDLSPPKGVSSKPPGKENLLRRGLTIVGTIGAQRGVFLGGPKGERRPFKFPNPRENIRGFFPL

SEQ ID NO: 203025 - protein, 225 aa, Glycine max
  Clone ID: PAT_MRT3847_25357C.1.pep
HASALAGNPANDIVDIINKNRTDEKLPRLNDSPGLGCMALQYVELCKGNCTENNVVNCRPPEDDFTEVFAPNCGVELPTFGTITGHIVGCQRKYIDNCGVELPTFGTITGHIVGCQRKYIEPLLVFSEVLIKDKKSLSLLRNKSHTEVGVGLVGLHKGPFFWCVLFSNGQTNTTFVLENRGAGIQQKKGCYSGSTTPCSGGQKSSVAFFNIFFMCYVSILLFKLL

SEQ ID NO: 203026 - protein, 101 aa, Glycine max
  Clone ID: PAT_MRT3847_25358C.1.pep
VKHLRSIESIVIAKMDGTTNEHPRAKSDGFPTLLFFPAGNKSSDPIPVDVDRTVKDFYKFLRKHASIPFQLQKLASTTKTASESSDVKESQSSTTEVKDEL

SEQ ID NO: 203027 - protein, 65 aa, Glycine max
  Clone ID: PAT_MRT3847_25359C.1.pep
RNYSNSLKLELEPLFRIKSNQEKLQKEKQWAPDLRLSLSQRDGNNDGKTDHCRETQEINTKLSLS

SEQ ID NO: 203028 - protein, 50 aa, Glycine max
  Clone ID: PAT_MRT3847_2535C.1.pep
FLFFIGFVSLAQHETSTMVPRSRSFLWLAGLWILALAQAESHFKCFDSVI

SEQ ID NO: 203029 - protein, 88 aa, Glycine max
  Clone ID: PAT_MRT3847_25360C.1.pep
GLQLVHRVQLLGVLGVVAHQIKGISSRHYFVTQQQLALLRKKKKYPINKREQLRAEEKGYLSDGSMVNYYCSDRKRREMRRKEREESE

SEQ ID NO: 203030 - protein, 107 aa, Glycine max
  unsure (1)..(107): unsure at all Xaa locations
  Clone ID: PAT_MRT3847_25361C.1.pep
XKLXHAYVISEFXXRFSRIPXXXYRCXXXTAXXVXXXRXXXXXXXPXXRRLRRLRXAXESXXAXSXXVLLPVXXXVEHAMDMXGDVIXDNXHWXXQXDSRTXHEVLX

SEQ ID NO: 203031 - protein, 87 aa, Glycine max
  Clone ID: PAT_MRT3847_25362C.1.pep
AIAILCHTPLSQLPQSELSFYCKIIYCPRVLKCACVLSFYLIASSISDLCDEQASTIVRGYGYELVPIHPLILFSELFFILVLKPQW

SEQ ID NO: 203032 - protein, 47 aa, Glycine max
  Clone ID: PAT_MRT3847_25363C.1.pep
DSSIMINIKYLDPKVPFYVPNSRFWILNRFAECILSARVGVRVRRPS

SEQ ID NO: 203033 - protein, 98 aa, Glycine max
  unsure (1)..(98): unsure at all Xaa locations
  Clone ID: PAT_MRT3847_25364C.1.pep
MVQCLDGLKHLCAALINCCDADSSKQPTGLENPEVLARETVXEEFQLALFKTNKKESLFADRVFDSFDTKHNGILDSEEXARALSVFHPNAPIDDKIE

SEQ ID NO: 203034 - protein, 125 aa, Glycine max
  Clone ID: PAT_MRT3847_25365C.1.pep
MVQCLDGLKHLCAALINCCDADSSKQPTGLENPEVLARETVFSVSEIEALYELFKKISSAVIDDGLINKEEFQLALFKTNKKESLFADRVFDLFDTKHNGILDFEEFARALSVFHPNAPIDDKIE

SEQ ID NO: 203035 - protein, 89 aa, Glycine max
  Clone ID: PAT_MRT3847_25366C.1.pep
TPTGRTRDSRREDEPGNARGFPLKHAVKRGAPGSISVAPTKGPPHRMGGGRLAVARHRRQPTLYLFFCDLSWFVFIFPLLFLFFFFFLT

SEQ ID NO: 203036 - protein, 226 aa, Glycine max
  Clone ID: PAT_MRT3847_25367C.1.pep
MVQCLDGLKHLCAALVNCCDADSSKQPTGLENPEVLARETVFSVSEIEALYELFKKISSGVIDNGLINKDEFQLALFKTNKKESLFADRVFDLFDTKHNGILDFEEFALALSVFHPNASIDDKIEFSFQLYDLKQQGFIERQEVKQMVVATLAESGMNLSDDVIESIIDKTFEEADTKHDGKIDKEEWRNLVLQHPSLLKNMTLQYLKDITTTFPSFVFHSQVDDT

SEQ ID NO: 203037 - protein, 134 aa, Glycine max
  Clone ID: PAT_MRT3847_25368C.1.pep
GVSIRSHPGCRCVLCCSLSTLLTGISNQRLWRPLPLTFCSVPFLGLELPSRPYVACHAANANRCCYASLNYALFAGCGAFGTWYANLCGSWSAGAVLCCATAIVSYHQSVRLGRNTNNTATPATHHPIITAPCP

SEQ ID NO: 203038 - protein, 62 aa, Glycine max
  Clone ID: PAT_MRT3847_25369C.1.pep
QYTLGSYVTLFKKKIKITPSKLTKRMLKRVDNTRSYLCKWTLKQITNIVVHTYSFCSDWSNQ

SEQ ID NO: 203039 - protein, 71 aa, Glycine max
  unsure (1)..(71): unsure at all Xaa locations
  Clone ID: PAT_MRT3847_2536C.1.pep
FKALPGDIFLGKASFGGLPFRFSDCSSPKPGGVFGPFGCGPIQNPFXKPPFVFKVGEISALVDSPRGVPLF

SEQ ID NO: 203040 - protein, 75 aa, Glycine max
  Clone ID: PAT_MRT3847_25370C.1.pep
LGLRRTVWLSFPGPFLERVTRPLFTFVSVAGFSARGFISAFARRALDRLSCYPLCGLRGFSFAVMVDDSLRLACL

SEQ ID NO: 203041 - protein, 88 aa, Glycine max
  Clone ID: PAT_MRT3847_25371C.1.pep
FQFLGSTTIVFTSFIFPAANVFRDKHWILKTKDPVMAKVVIVLAVRTNGISIWANFNCSGDCPLLTLMMLYYTQFFSNWGIFLVNFFK

SEQ ID NO: 203042 - protein, 100 aa, Glycine max
  Clone ID: PAT_MRT3847_25372C.1.pep
WLLLMRIKTNLLRRTCGPKSGLRTKAIVFIRRPRTLRICHSGALAVLQRKIPHHLFATWSNPSSASFYTGLLAFYIGIAIFSSLISLDTSLPALFSLTTP

SEQ ID NO: 203043 - protein, 43 aa, Glycine max
  Clone ID: PAT_MRT3847_25373C.1.pep
TNKMLIKRQTSNKFLNKDHLQKKVERCQLHVFEYTKITFQSNL

SEQ ID NO: 203044 - protein, 89 aa, Glycine max
  Clone ID: PAT_MRT3847_25374C.1.pep
FCHGLGRPWIFILSSLVLTPVAERVSFITKQDASYTDATVGGLMNATCGNVTELIIPIAALRRNKIAVVEYSLMSSILSNLLLVLGTSL

SEQ ID NO: 203045 - protein, 48 aa, Glycine max
  Clone ID: PAT_MRT3847_25375C.1.pep
GHGLMSNSVMVVIRRVLLTQWLVQNVLQRCTLNWKLMNAKDVRLAQQP

SEQ ID NO: 203046 - protein, 66 aa, Glycine max
  Clone ID: PAT_MRT3847_25376C.1.pep
LVFMTSGLVQFFFMTVSWLKTHCCGFTCKGRISPIFHKTLTPVGRASSPYEEFSAKKEAALEKPSF

SEQ ID NO: 203047 - protein, 56 aa, Glycine max
  unsure (1)..(56): unsure at all Xaa locations
  Clone ID: PAT_MRT3847_25377C.1.pep
IKLCPSSEMIGHKTRALQIDPRSPPPPEVNVALILPAALXNFRSCVGQRQNXTHVH

SEQ ID NO: 203048 - protein, 112 aa, Glycine max
  Clone ID: PAT_MRT3847_25378C.1.pep
MVKGRQGERVRLYVRGTILGYKRSKSNQYPNTSLIQIEGVNTKEEVGWYAGKKMAYIYKAKVKKDGSHYRCIWGKVTRPHGNSGVVRAKFKSNLPPRSMGARVRVFMYPSNI

SEQ ID NO: 203049 - protein, 112 aa, Glycine max
  Clone ID: PAT_MRT3847_25379C.1.pep
MVKGRQGERVRLYVRGTILGYKRSKSNQYPNTSLIQIEGVNAKEEVAWYAGKKMAYIYKAKVKKNGSHYRCIWGKVTRPHGNSGIVRAKFKSNLPPKSMGARVRVFMYPSNI

SEQ ID NO: 203050 - protein, 162 aa, Glycine max
  Clone ID: PAT_MRT3847_2537C.1.pep
MDSKQFDRASRKVRVVARIRGFSVGPEANSEPSASRAVEWVSVNRENLDDVTISFGDQSSSRYLVDYCYKEDEDNELIYSREVKPLVSAAFDGHNCTVIAHGARGSGKTHIIQGSAERPGLAVLAITEFLSVTEQNGKSIAGLSLRLIIRSDPWVYKFQRSP

SEQ ID NO: 203051 - protein, 71 aa, Glycine max
  Clone ID: PAT_MRT3847_25380C.1.pep
PLKAWGVVFNRRTMPNFFRENFSVWVPPPPIISGVKALIATLFLGPLKKGRKKVLCCSHSLMVGAGNGPPF

SEQ ID NO: 203052 - protein, 76 aa, Glycine max
  Clone ID: PAT_MRT3847_25381C.1.pep
EGRGISGNSFGRGRKEGGKQVSSHQQQEKQSDDSEVDSNNQRGRGRGRGRGRGGGRNNHYQKDRAMKKHFSGMSGY

SEQ ID NO: 203053 - protein, 222 aa, Glycine max
  unsure (1)..(222): unsure at all Xaa locations
  Clone ID: PAT_MRT3847_25382C.1.pep
SRANLPDRSILDKKDEKDTSKTAAMILQYEYEDEYDDSFDDLGLSVADSGSGNSWATGGNSVKNAPDSKWGSRKRPQYFVKDGKNYSYKVAGAVAVANSDEASLVTQAAIRXYIGLGCGGNPPFGAVKKVMDSYKKDDNQSQASEMEGRGISGNSFGRGKKERGKQVASHQQQEKQSDDSEVDSNNQRGRGRGRGRGRGGGRNNHYQKDRAMKKHFSGMSGY

SEQ ID NO: 203054 - protein, 511 aa, Glycine max
  Clone ID: PAT_MRT3847_25383C.1.pep
NISEDRSLELKRLTSSVAHLSLVDSTVTQASTSDRVKSFQTDEDPSLVELLFQYGRYLLISSSRPGTQVANLQGIWNKDLEPVWDGAPHLNINLEMNYWPALPCNLSECQEPLFDYISLLSVNGSKTAHVNYQANGWVAHSKSDIWARTSAGQGDVVWALWPMGGAWLCTHLWEHYAYTMDEDFLKYKAYPLMEGCVSFLLSWLIEDSEGYLETNPSTSPEHYFIAPNGEPACVSQSSTMDVAIINEVFSTFLSAAEVIGRTKDNIVGEVRKAQPRLRPINIAQDGSIMEWVKDFKDPEVHHRHLSHLFGLFPGHTITFKETPALIEAAEKSLYKRGEEGPGWSTTWKTACWARLQNSSNAYKMIKHLINLVDPDHERPFQGGLYSNLFAAHPPFQIDANFGFAAAVAEMLVQSTLSDLFLLPALPWEKWPNGSLKGLKARGGTTVNIYWREGDLQEVGIWSEDQTRTTLRKRIHYRGTMVTADLVSGLFYKFNGQLKCLNTCSLSEMPCS

SEQ ID NO: 203055 - protein, 131 aa, Glycine max
  unsure (1)..(131): unsure at all Xaa locations
  Clone ID: PAT_MRT3847_25384C.1.pep
RIVKGKPISMGGGAGAKKAILMNVPNAGLSMWRYSVGEMGFQDPKMTAPSIKCTVYFLIGYTNLPDDTFNXEAFTHKLYQGGKIDEKGFLNYYHEEFFSDGATYGRTTTTLWAEEGPYLHAYGHDFLDVYK

SEQ ID NO: 203056 - protein, 51 aa, Glycine max
  Clone ID: PAT_MRT3847_25385C.1.pep
KTTKRYIIYINHLFYTMGTLVIIFFPIHNHFYPCKAFCFTFISSPTLTITF

SEQ ID NO: 203057 - protein, 148 aa, Glycine max
  Clone ID: PAT_MRT3847_25386C.1.pep
MASAAAALTLRTRAAALLSPTAPTALAVRSASKKTGGSSKNLGGKSRGKHYGIKKMEGHYVHAGNILGTQRQFRWHPGAHVGLGKNKCLYALEEGIVRYTKEVYVPNPKNSEAVNLVTSLPKGAVLYKTFVHVVPAKPEGTFKLVDML

SEQ ID NO: 203058 - protein, 76 aa, Glycine max
  Clone ID: PAT_MRT3847_25387C.1.pep
ISTTQLFIYRVVVGLLMPTRLGYPLSKSLWFMIFVSFVNSHLPGSCAFTYISSIVIGHLPTTPIICSPSPPPPPPP

SEQ ID NO: 203059 - protein, 47 aa, Glycine max
  Clone ID: PAT_MRT3847_25388C.1.pep
LMGRLVHLWRCMNHNLLWLLRYPFLCVPPKISYCCYLRLAPGRQLIP

SEQ ID NO: 203060 - protein, 87 aa, Glycine max
  Clone ID: PAT_MRT3847_25389C.1.pep
FPDRPTPPSGRKNTRQGYNSMTTGDSLISHSLSISIYLMFQLSQRALIYLFELQSRPQQVDRIAIHSHDFSLHYITPLVYSHHHCDI

SEQ ID NO: 203061 - protein, 56 aa, Glycine max
  Clone ID: PAT_MRT3847_2538C.1.pep
LKRPIQSNRAWHVVDVECIHFCGWIHQPGVMSFMPQHQRLSLSGVLRHYMVMLSAT

SEQ ID NO: 203062 - protein, 129 aa, Glycine max
  unsure (1)..(129): unsure at all Xaa locations
  Clone ID: PAT_MRT3847_25390C.1.pep
LARLHAPGRTGRTDPRGFIIVRARFPKGRWVRGTTLEYGLNGVWSHVLNEYCEKEVQXIPKKIDARWIHTVHTKFNEGQGQMYTKLNGWTMEEGLPSNGSMRDLQSTQCMNCTLQKRQYEDPCLRSDLL

SEQ ID NO: 203063 - protein, 46 aa, Glycine max
  unsure (1)..(46): unsure at all Xaa locations
  Clone ID: PAT_MRT3847_25391C.1.pep
FHQCCCNXXXXXXXXTCLAVSNSLINCHCXLCLETLQXCIYTFLKL

SEQ ID NO: 203064 - protein, 244 aa, Glycine max
  unsure (1)..(244): unsure at all Xaa locations
  Clone ID: PAT_MRT3847_25392C.1.pep
PTRPAMCRTWEVLARKKNDLGELPLPMAIYVVSGDEDGERGGAPVVCIEDASKRCFEFSSGLAAWTPLLLLVPLVLGLDKVNPRYIPLLRSTFXFPQSLGIMGGKPGASTYIIGAQNEKAFYLDPHDVQQVVNISGDTQEPTSTSSYHCNIMRHIPLDSIDPSLAIGFYCRDKDDFDDFCSQASKLAEESNGAPLFTVTQSRSFSKQVTSNDVSGDNTGFQEEDFPGMDRGNDTGTNEDDWQLL

SEQ ID NO: 203065 - protein, 94 aa, Glycine max
  Clone ID: PAT_MRT3847_25393C.1.pep
CGLFANAMFLLCFSHSQSMFISSMDPKFFMQYLAALLMFYAFKPNLLWENGSPVARSLSRTDETLFVSEVGISTVSGLFLASNVSLPHYQKEFV

SEQ ID NO: 203066 - protein, 66 aa, Glycine max
  Clone ID: PAT_MRT3847_25394C.1.pep
FTPQIYTAIINTLSPYNCAMTFPTLQLQEAFAVAPGGDARGCSLLDPAFHFSFLWTCLICFSLHFK

SEQ ID NO: 203067 - protein, 55 aa, Glycine max
  Clone ID: PAT_MRT3847_25395C.1.pep
PRVRPRVRIRAAAFFFFFFFFFSRHPNFTLFEGSFFPWSLFTMMFNMGVAFNSHS

SEQ ID NO: 203068 - protein, 204 aa, Glycine max
  Clone ID: PAT_MRT3847_25396C.1.pep
EDNAVFKGNYPLLAQLPIDMRPVLAPCRHNKIPISVRQAQLYRLTERLLRNTNLAVIRRTADTELAVADAVNIEKEVADRSNSKLVYLNLSSQELLHRTNNTKTNVATDTSPSASSAMLTDQQSELNTDDLSTEAEVETALKNAGLLSDSPPSSPHESRETCNSDMSGPDNILELDSHPDLDIYGDFEYDLEDEDYIGASVTKV

SEQ ID NO: 203069 - protein, 74 aa, Glycine max
  unsure (1)..(74): unsure at all Xaa locations
  Clone ID: PAT_MRT3847_25397C.1.pep
HGGFLLGRRSFTWRPGEXVRYEDIVEFLEKVAKIAEVDELTVEERNLLSVAFKNVIGASRASWRIISSIEQKEE

SEQ ID NO: 203070 - protein, 86 aa, Glycine max
  Clone ID: PAT_MRT3847_25398C.1.pep
LLFAFFDKRIIKDAKSFGREPTISLDRHHNRPPSMYVQTTWTPNSTKEMQGSKGRGWKRCPSHRPSPKTRGREKKGPKLPLRKQAF

SEQ ID NO: 203071 - protein, 63 aa, Glycine max
  Clone ID: PAT_MRT3847_25399C.1.pep
GMCFHFVTSRGASIFLVIVNLHQRLTAKACLLMNISQARGACLRPYRDFFNQQAGPSVVFSQP

SEQ ID NO: 203072 - protein, 50 aa, Glycine max
  Clone ID: PAT_MRT3847_2539C.1.pep
LLGNIQEALLTGFVAVPFRRLQYPYQHMVGFLCLLIHTDGILMKKVNSKR

SEQ ID NO: 203073 - protein, 60 aa, Glycine max
  Clone ID: PAT_MRT3847_253C.1.pep
MPSWWGKSSSTKKKANKESFINAFHRKFKIPSEGKPNSRSGGSRRHSNDSISEKGAQSPP

SEQ ID NO: 203074 - protein, 106 aa, Glycine max
  unsure (1)..(106): unsure at all Xaa locations
  Clone ID: PAT_MRT3847_25400C.1.pep
RSTRISNTPKHFTDFHCYNVTNTDKVTYPIQHHLDYSTFXSHKHYICQISENHEPQTYSQAIQHKPWQETISAELMAMKLNNTWTIVPLPQGKKPISCKWDFKLKL

SEQ ID NO: 203075 - protein, 117 aa, Glycine max
  unsure (1)..(117): unsure at all Xaa locations
  Clone ID: PAT_MRT3847_25401C.1.pep
KLVGEEDSAEGNKARPVYENXKKGPWAKEIPLEEFXKVLEKKRKALPAPKIXARKVGLQGFGSLQPLFTKKENGGVFFXLGFAKDKGQNALGKGGKPPKGVPALPVWLLMGANARAL

SEQ ID NO: 203076 - protein, 84 aa, Glycine max
  Clone ID: PAT_MRT3847_25402C.1.pep
PPVSTAFPGRNDKNRHSPLPISGSRRSLAKYSSIVDESLLEQDSCTSTEDRSVPPPHQRETSISSWIKSLWHQASLSMVPFSFH

SEQ ID NO: 203077 - protein, 118 aa, Glycine max
  Clone ID: PAT_MRT3847_25403C.1.pep
MATKPLTTEAIALTEKKMDMTLDDIIKMSKNTKNKKPRRVLNKSQKFSNNFTQDKSAKVQRYMESRSSLRQGALAKRRSNFQGNQFPAAVEVARKAVTAPLHNRVPNRNRVANWNKTR

SEQ ID NO: 203078 - protein, 175 aa, Glycine max
  Clone ID: PAT_MRT3847_25404C.1.pep
MSFEDSSKKHQSVGPWGGNGGSRWDDGIYSGVRQLVIVHGTGIDSIQIEYDKKGSSIWSEKHGGSGGRKTDKVKLDCPNEFLTKIHGYYGSSNQRGPNLVRSLSFESNKKTYGPFGVELGTYFSVPLTGAKIVGFHGRCGWYVDAIGVYLKFLKQPNPSKLWLIPELHYYHSENL

SEQ ID NO: 203079 - protein, 59 aa, Glycine max
  Clone ID: PAT_MRT3847_25405C.1.pep
LLILWHHENNLGRHCFHNLPLFDDDNPEIKRMHTILCYRSLIPFSPFLYEFMLNFKVLK

SEQ ID NO: 203080 - protein, 139 aa, Glycine max
  Clone ID: PAT_MRT3847_25406C.1.pep
RHPLLHWEEKQRMSLVKWAEHCYEKGILSEIVDSELKGQIKPQCLHKFSEVALSCLLEDGTQRPSMKDIVGMLDLVLQLQDIAVNYEDSSSHSTVRLSDCSENTGLSTTIDGDGSYGRMESFVLIPDDVFSETKNPKGR

SEQ ID NO: 203081 - protein, 100 aa, Glycine max
  unsure (1)..(100): unsure at all Xaa locations
  Clone ID: PAT_MRT3847_25407C.1.pep
MRDTTTIQNSLLNKLEFEYLPKKAELVEGMDDEVGKIFEKFTFTDASASEDTDTKDGLEDNAPTXKKVNSDPEEEETDNEQKEKGLLDRKKKLDRKIKNC

SEQ ID NO: 203082 - protein, 64 aa, Glycine max
  unsure (1)..(64): unsure at all Xaa locations
  Clone ID: PAT_MRT3847_25408C.1.pep
MGLKNNMVVLKVCLXVLLFLVEGLLFFLRLSKLGLLMKRDHHQHSSDHCSXXPCCDQCPCTMAN

SEQ ID NO: 203083 - protein, 347 aa, Glycine max
  unsure (1)..(347): unsure at all Xaa locations
  Clone ID: PAT_MRT3847_25409C.1.pep
REFGLIRLEGMKYEGSAAGSGKVYVYDGVYRIVDCWFDVGRSGFGVYKFKLWRIEGQAKMGSAILKEARNVRRSELDLNPTSXDVSNRKENVAVRLFNDIDANYDPLQYEYLVKTNFPQFVFHQSGRGTGCECADGCVEGCFCAMKNGGDFPYNQSGILLRGKPLVFECGPFCRCPPHCRNRVTQKGLKNRLEVFRSRETGWGVRSMDLIQAGAFICEYTGVVLTREQARLLTMNGDSLIYPNRFTDSWAEWGDVSLIDSNFVRPSYPSIPPLDFAMDVSRMRNVACYMSHSSTPNVLVQFVLYDHNNLMFPRLMLFAMESIPPMRELSLDYGVADEWTGKLSICNE

SEQ ID NO: 203084 - protein, 74 aa, Glycine max
  Clone ID: PAT_MRT3847_2540C.1.pep
ANTRGTALNRDGSFSHLRAWNKSPRYLISRLPELLPTLLSTISYGKEKHSMSWPQTPRIILFNTLGLYAEHSGI

SEQ ID NO: 203085 - protein, 43 aa, Glycine max
  Clone ID: PAT_MRT3847_25410C.1.pep
TSRRLAENSEAASKSPLRKKAYVPQSASSWLKQTHLVQELQRA

SEQ ID NO: 203086 - protein, 61 aa, Glycine max
  Clone ID: PAT_MRT3847_25411C.1.pep
IFPGKPGKGHKFLPLPPKKKKTPLGPNKKSPFPRAFAHFLNKVPPKVFFPKNVKLAQCNKN

SEQ ID NO: 203087 - protein, 131 aa, Glycine max
  Clone ID: PAT_MRT3847_25412C.1.pep
QDWCVENRQHGVERIPTPMIPISPNEVAELLMQVKASARGLDQYGCLKLVQKLKRWGGESERNKRCIVDNGAPVALASSFDAFANDSVERNVVVLEEILSALNWMFPLQLEAHKSLGSLASLRCMSWFLKH

SEQ ID NO: 203088 - protein, 210 aa, Glycine max
  Clone ID: PAT_MRT3847_25413C.1.pep
FPYQQPPSHPSMNPPQLQSSLGHHVEEPPYPPQNYPPNVRQPPSQSPTGPPPPQQFYGTPPHAYEPPSSRSGSGYSSGYGTLSGPAEQYRYGGPPQYAGTPALKPQQLPTASVAPSGGSGHPQLPTARVLPQAIPTASAVSGGSGSAGTGGRVSVDDVVDKVSTMGFPRDHVRATVRKLTENGQSVDLNAVLDKLMNDGEVQPPRGWFGR

SEQ ID NO: 203089 - protein, 93 aa, Glycine max
  Clone ID: PAT_MRT3847_25414C.1.pep
SEKQGPICPGYHKHQTCSCKSKRFCRVFNGITTPCCSIKAVHLFSNLHCRRLEMRIDESPGPPALPPHHTVLMPVNLLWDLTTICRQSGHRRP

SEQ ID NO: 203090 - protein, 76 aa, Glycine max
  Clone ID: PAT_MRT3847_25415C.1.pep
ISSPLTKVMFLWEQSLQTLLRCVLHSFPLLYSFLVFLRAFSVFCCRCMIGASLWTFSKMINPKKITKKNKKKKKKR

SEQ ID NO: 203091 - protein, 591 aa, Glycine max
  unsure (1)..(591): unsure at all Xaa locations
  Clone ID: PAT_MRT3847_25416C.1.pep
MYRFATSLASKARIARSSTQQIGSRVSWNRNYAAKDIKFGVEARALMLKGVEELADAVKVTMGPKGRNVVIEQSFGAPKVTKDGVTVAKSIEFKDKVKNVGASLVKQVANATNDVAGDEYXGREHFNCLAGTTCATVLTRAIXFTEGCKSVAAGMNAXMDLRRGISMAVDAVVTNLKSRARMISTSEEIAQVGMISANGEREIGELIAKVMEKVGKEGVITISDGKTLYNELEVVEGMKLDRGYISPYFITNDKNQKCELEDPLILIHEKKISSINAIVKVLXELALKRQRPLLIIAEDVESDALATLILNKLRAGIKXVCAIKARGFGEKRNSCQQDLADLTGGGLITEERWLNLEKWDLRWLNEXKSTGDSLNNTAKQDRGTXKISSEDNLMXIRSGIXNRSLEYEKXSVIEMXAKLLGGVAVEKNGVATYAQVCEKSCSLNSXIKHLRFGYKRXILHCGCLLFLIGEQVINKLQSLXLSKKIWSWMVLASXKKFVITIESNVIVEGAGVDGKLLERGNHDLGYDAAKGEYVDMVKAGIIDPLKVIRTALVDAASVWSLMTTTEAVGSELPNDKKDTPAMAGGMGGMGY

SEQ ID NO: 203092 - protein, 61 aa, Glycine max
  Clone ID: PAT_MRT3847_25417C.1.pep
SQIRVRSCEHVTYVRLRLQTVKDYKRIIVDLSISSSTSQAGISLSCTCSIRPVFIMAGGVL

SEQ ID NO: 203093 - protein, 335 aa, Glycine max
  Clone ID: PAT_MRT3847_25418C.1.pep
MYRFATSLASKARIARSSTQQIGSRVTWNRNYAAKDIKFGVEARALMLKGVEELADAVKVTMGPKGRNVVIEQSFGAPKVTKDGVTVAKSIEFKDKVKNIGASLVKQVANATNDVAGDGTTCATILTKAIFTEGCKSVAAGMNAMDLRRGINMAVDAVVTNLKSRARMISTSEEIAQVGMISANGEREIGELIAKAMEKVGKEGVITISDGKTLYNELEVVEGMKLDRGYISPYFITNDKNQKCELEDPLILIHEKKISSINAIVKVLELALKRQRPLLIIAEDVESDALATLILNKLRAGIKVCAIKAPGFGENRKAGLQDLAVLTGGAVSLLF

SEQ ID NO: 203094 - protein, 54 aa, Glycine max
  Clone ID: PAT_MRT3847_25419C.1.pep
RSLPSTRAYHLGCRFRPQDARSAKQRLANNKHWLIQSWSSVLLALSMTVLFHSK

SEQ ID NO: 203095 - protein, 33 aa, Glycine max
  Clone ID: PAT_MRT3847_2541C.1.pep
AQAGPLSLLIPWATLSNTLTSLNNLDYSMLLSI

SEQ ID NO: 203096 - protein, 577 aa, Glycine max
  unsure (1)..(577): unsure at all Xaa locations
  Clone ID: PAT_MRT3847_25420C.1.pep
MYRFATSLASKARIARSSTQQIGSRVSWNRNYAAKDIKFGVEARALMLKGVEELADAVKVTMGPKGRNVVIEQSFGAPKVTKDGVTVAKSIEFKDKVKNIGASLVKQVANATNDVAGDGTTCATILTKAIFTEGCKSVAAGMNAMDLRRGINMAVDTVVTNLKSRARMISTSEEIAQVGTISANGEREIGELIAKAMEKVGKEGVITISDGKTLYNELEVVEGMKLDRGYISPYFITNQKNQKCELEDPLIIIHEKKISSINAIVKVLELALKRLGPLLIVAEDVESDALATLILNKLRAGIKVCAIKAPGFGENRKYGLQDLAVXTGGQLITEELGLNLEKVDLEVFGSCKKITFSXDDTVILDVGTRGRTRGERSEQIRSAIENSTSDYDKEKLQERLAKLSGGVAVLKIGGASEAEVGEKKDRVTDALNATKAAVEEGIVPGGGVALLYASSELDKLQTANFDQKIGVQIIQNALKTPVHTIASNAGVEGAVVVGKLLEQNDPDLGYDAAKGEYVDMVKAGIIDPLKVIRTALVDAASVSSLMTTTEAIVSELPKDDKDVPAMGGMGGMGGMDY

SEQ ID NO: 203097 - protein, 113 aa, Glycine max
  unsure (1)..(113): unsure at all Xaa locations
  Clone ID: PAT_MRT3847_25421C.1.pep
HSYAHAADAPDSNDNLDLLVSIDLMLLHGASKAFANKIAVNDKLALANTQEFFAGNFPEDSWLPMCGNCLYPVSELPSQAXLLMLTCGLYMGGXPTTARTSCSINSASLYVDT

SEQ ID NO: 203098 - protein, 370 aa, Glycine max
  Clone ID: PAT_MRT3847_25422C.1.pep
MGIPHDRSLGKWIPQDRKDEMILKLVPRVRELQNQLQEWTEWANQKVMQAARRLSKDRAELKTLRQEKDEVERGKKEKQSLEENTMKKISEMENALSKASAQVERTNADVRKLEVENAALRKEMEVAKLQAAESATSCQEVSRREKKTQMKFQSWEKQKSLFQEELMNEKHKLAQLQQELEQAKVQQQQVEARWQQAAKAKEELLLQASSIRKEREQIEESAKSKEDMIKLKAEENLHRYRDDIQKLEKEIAQLRQKTDSSKIAALRRGIDGNYVSSFMDVKSMALKESRATFISEMVSNLNDYSLIGGVKRERECVMCLSEEMSVVFLPCAHQVVCTTCNDLHEKQGMQDCPSCRSPIQRRIFVRFART

SEQ ID NO: 203099 - protein, 107 aa, Glycine max
  unsure (1)..(107): unsure at all Xaa locations
  Clone ID: PAT_MRT3847_25423C.1.pep
PSLDLAKVLLQMFTARKMAKAIFANSGXQANDTQVKLVWCYNKAPGRPXMKKPIARAKSYHGSTLIASSLSGLPALHQIYDMPAPFVLHTDWPHYRLHHLPGETDEE

SEQ ID NO: 203100 - protein, 173 aa, Glycine max
  Clone ID: PAT_MRT3847_25424C.1.pep
MPADRHVAEALDRARTHHVLRATDAEFEVISHEGTNTVDIRTRCCQCRGWQLYGLPCAHAVAALLSIRQNVHRFTESCFTVATYRKTYSQTIHPIPDKSLWKELSEAEGDVNASNANQLQLQIAINPPKSLRPPGRPRKKRVRAEDRGRVKRVVHCSRCNQTGHFRTTCAAPI

SEQ ID NO: 203101 - protein, 43 aa, Glycine max
  Clone ID: PAT_MRT3847_25425C.1.pep
PLFRPKLKFEEQYIHHIIIICLLHLSSSSLNFQTNFWHLIACN

SEQ ID NO: 203102 - protein, 109 aa, Glycine max
  Clone ID: PAT_MRT3847_25426C.1.pep
MAMGEWVENPHAESALSNILPCVDQRTTNKTLFQSKQVVTNIVSIVNRFIYDTADASPAQGSMNYYNQSGPAMPPLCYPFDSQFRERQCTPQEVSSANASLVYFFYVHF

SEQ ID NO: 203103 - protein, 67 aa, Glycine max
  Clone ID: PAT_MRT3847_25427C.1.pep
SNTQMKSQHIYLSMGVTWCNQMQRTIFFPSSFHSSHNAFFLEPKKDTQNLKKKIQKKKEKNEEDISS

SEQ ID NO: 203104 - protein, 54 aa, Glycine max
  Clone ID: PAT_MRT3847_25428C.1.pep
HAFDGCEKTPEGSGKDKKAGAGLKFAFCHLFGILLHFFFFISLIGLRANPLNHM

SEQ ID NO: 203105 - protein, 77 aa, Glycine max
  Clone ID: PAT_MRT3847_25429C.1.pep
GIRHEDQYPPIKRLLGYSSIPPPPIFFVVSKILLSHSFINGISLKVTSFSITYFPPQWILDLLQSPLAILGSCKCNL

SEQ ID NO: 203106 - protein, 89 aa, Glycine max
  Clone ID: PAT_MRT3847_2542C.1.pep
IEGLKSSLCHFTEEIADTGDGRSEVLVYFYQFMFLSFPSRRILILVTCKDICLCSTFNHISLQAPLYNLLNQFCSLFCANACIWITQLF

SEQ ID NO: 203107 - protein, 73 aa, Glycine max
  Clone ID: PAT_MRT3847_25430C.1.pep
KKFFIKEGDFSLNFFFKFISPHVKGEKKNPPLSKKKNPPQFFVFMHKKICSPFYLFFPEIFPFNKGGGTILFP

SEQ ID NO: 203108 - protein, 63 aa, Glycine max
  Clone ID: PAT_MRT3847_25431C.1.pep
KMGRLACWRNLIVVTVLSGLGIAPKGTVDVYEMLFMTADYLTTGGDSGIFSPLRMFLCIKPHD

SEQ ID NO: 203109 - protein, 67 aa, Glycine max
  unsure (1)..(67): unsure at all Xaa locations
  Clone ID: PAT_MRT3847_25432C.1.pep
XXVACTRTXAREFGSSSPXXSFSYGXXXDNYSXHQXXAXSXLKXXXVXRXIXXXSXIXLSXXVXXXX

SEQ ID NO: 203110 - protein, 49 aa, Glycine max
  Clone ID: PAT_MRT3847_25433C.1.pep
TYALLVFLDFFYQYKWWGYLMVKIFKVFPKKMVPFPFCGKFWFLFRGGG

SEQ ID NO: 203111 - protein, 63 aa, Glycine max
  Clone ID: PAT_MRT3847_25434C.1.pep
LTQPKLFIIRCMPKPPSVNYLTIASFDPFKQLITKHVLGIPIIIQLQTTIISDTILNFNLICN

SEQ ID NO: 203112 - protein, 140 aa, Glycine max
  Clone ID: PAT_MRT3847_25435C.1.pep
STIDHSRGPWFQRRCSSDEEAKSAAAAAVMLEPGPPYLKRAGLLAGTSEDFRDGGAFPAIHAAQDPLDLGGAKYRSKPGSKMLPATADANGNDAYDAIARQHENARYIVYTQHKDLIPKFLKNDEDDDDRVSDCEAHKQI

SEQ ID NO: 203113 - protein, 98 aa, Glycine max
  Clone ID: PAT_MRT3847_25436C.1.pep
HFWVCFPGVHIGAKCVYSQLEVCQVGQSMLGLLTQLHEIEFFWLAFSSSDFCCLVKNVNYYSYELPFTATFFVIRSSFFFFLEMYVLEFKNHTFLFVE

SEQ ID NO: 203114 - protein, 79 aa, Glycine max
  Clone ID: PAT_MRT3847_25437C.1.pep
MNKNKAGASLDSLMSSFNARITQLQELVIARNMYPASGVEDLSAVDAAVSAMELQVKAIKDRLREEALAIPKTKKLIDA

SEQ ID NO: 203115 - protein, 79 aa, Glycine max
  unsure (1)..(79): unsure at all Xaa locations
  Clone ID: PAT_MRT3847_25438C.1.pep
MIIVNLLVIDMTTVNIEVIAAAMEIIGDAYEIXGFLAFVNHGISIELMDTVEKLTIEHXLKTMVPRFRDMVARSGFESV

SEQ ID NO: 203116 - protein, 97 aa, Glycine max
  Clone ID: PAT_MRT3847_25439C.1.pep
VHIPSLDGCQDPTHLHRPMALRHYVIPLLLMHRQLSVIPILKSTIIYYKNKNAFLQHFRSHYYSCSVVPEFIALDNDEYIFLKLHKNLNNQYFYSLE

SEQ ID NO: 203117 - protein, 60 aa, Glycine max
  Clone ID: PAT_MRT3847_2543C.1.pep
PTVLEAMADDTIYSVAKSLLCLPILTESMMPAFDDITDPHLIPMDSEHGYRRSPALHDIL

SEQ ID NO: 203118 - protein, 184 aa, Glycine max
  Clone ID: PAT_MRT3847_25440C.1.pep
MSQQLGFAIELYLDPALENQVLKAWNVLARRQISTHLIEMESRPHITLFSAPFLEPSKLESLLKGFASKHDPLPLTFSSLATFPNDPDNLLFLAPTPSLSLLHLQSQLCDAIRKEGLEIGDDYAFNSWIPYCSVAHHVPKNRMPEAFSLLRELKLPVSGYAMDIALVQFSPVREIFSFVLGNNS

SEQ ID NO: 203119 - protein, 106 aa, Glycine max
  Clone ID: PAT_MRT3847_25441C.1.pep
MTAGIEKNNIRTINTVDTYEIYIFPVLPKVHPDIGISMNVMFIMNSFINDVFNKLAQHASRLPLYNWKPTITSRDIQTSVRLVLPDELCKLAASECTKESTKITSS

SEQ ID NO: 203120 - protein, 67 aa, Glycine max
  unsure (1)..(67): unsure at all Xaa locations
  Clone ID: PAT_MRT3847_25442C.1.pep
AXIXXXDLLQIPXGARTMXXLRLXXRVGXQXVXXXLTGXGSXPLYXLMEDAXTAEISRVQXXQWLKY

SEQ ID NO: 203121 - protein, 81 aa, Glycine max
  Clone ID: PAT_MRT3847_25443C.1.pep
TFAITDELTVLKAQRCKVATTLAFKISAAENFMDEAQQKEAILNEHVIRLKKEIKDCESDLPSLQDDKKKCIAETIGYKKM

SEQ ID NO: 203122 - protein, 108 aa, Glycine max
  Clone ID: PAT_MRT3847_25444C.1.pep
SGREDKNEPSPTQMKLEDNTREGQILKSGGKARRNEPPTTQRKLSAFSWMWYTMWKIMAKEWKEIDKLWRKKEMHNLAKELVNLLAQKDYSWRNTAIARDRTVSMGRS

SEQ ID NO: 203123 - protein, 485 aa, Glycine max
  Clone ID: PAT_MRT3847_25445C.1.pep
MAHQWVLNAPEPPSMLRQVVDNVKETLLPHPNPNTFSYLRNQPFSKRAFALLQNLFPILASLQNYNAQKLKCDLMAGLTLAIFAIPQCMGNATLARLSPEYGLYTGIVPPLIYAMLASSREIVIGPGSVDSLLLSSMIQTLKVPIHDSSTYIQLVFTVTFFAGIFQVAFGLFRFGFLVEHLSQATIVGFLAAAAVGIGLQQLKGLFGIDNFNNKTDLFSVVKSLWTSFKNQSAWHPYNLIIGFSFLCFILFTRFLGKRNKKLMWLSHVAPLLSVIGSSAIAYKINFNELQVKDYKVAVLGPIKGGSLNPSSLHQLTFDSQVVGHLIRIGLTIAIISLTGSIAVGRSFASLKGHSIDPNREVVSLGIMNIVGSLTSCYIASGSLSRTAVNYNAGSETMVSIIVMALTVLMSLKFLTGLLYFTPKAILAAIILSAVPGLIDLNKAREIWKVDKMDFLACTGAFLGVLFASVEIGLAQLQGLFPQMQR

SEQ ID NO: 203124 - protein, 77 aa, Glycine max
  Clone ID: PAT_MRT3847_25446C.1.pep
QSPTFPVAPPILYPPVFSPKMSRPTNSLFFFLSSKTNPNPYTTLIPGTETQKRNGHPLLDHRFSLYMNRNPNRTLFY

SEQ ID NO: 203125 - protein, 86 aa, Glycine max
  unsure (1)..(86): unsure at all Xaa locations
  Clone ID: PAT_MRT3847_25447C.1.pep
RLRRXLEXQKMXXXSAIXXXVNDHDVNPSGQXASPGAGXXYSLPXVXGSAPXSQSAVLSGNLFAPXXTXXSFPSXFLXALEFFLAG

SEQ ID NO: 203126 - protein, 330 aa, Glycine max
  unsure (1)..(330): unsure at all Xaa locations
  Clone ID: PAT_MRT3847_25448C.1.pep
TIFLCPWRLSQHSRTDPPPAMVQPPLLVSDPFAKDAILAWFHGEFAAANAIIDALCGHLAHLAASSDYDAAFAAIHRRRLNWIPVIQMQKYHSIADVTLELRRVAEKKXEHEAAKKSESSFIEEGKLLARPPSRRDAKRAPSREEWRGRPPQIKLREKETAENGGNDGDDDAAPEYDSPDSEITDSGSQEMQPSVMNTNICSNHEECEGRSSQIKLTKGFTAKESVKGHMVNVVKGLKLYEDVFSESEICKLTDFVNEIHAAGQNGELSGETFILFNKQMKGNKRELIQLGVPIFGQIKDDTKNNIEPIPALLHDVIDHLIQWKLIPEYK

SEQ ID NO: 203127 - protein, 61 aa, Glycine max
  Clone ID: PAT_MRT3847_25449C.1.pep
LIQKDTRFGKLYSIDYPPTKSTHIYITYPSTPNIYPINDNNLKNQGRGKKKKFNFSDRTFY

SEQ ID NO: 203128 - protein, 48 aa, Glycine max
  Clone ID: PAT_MRT3847_2544C.1.pep
FSFYHLDGTPAPRFRHPTATRLERNRVRLVIATSLQRTASAIASASTI

SEQ ID NO: 203129 - protein, 334 aa, Glycine max
  Clone ID: PAT_MRT3847_25450C.1.pep
KFNQRNVAKCASRMGQCFSSTYATVEVAANEVNSMLPDVERNNYIFSDGIGVITHDLAREVAEKLKLDNVPSAYQIRYAGFKGVVASWPAKGDGVRLSLRPSMNKFQSTHNILEICAWTRFQPGFLNRQIITLLSALGVPDEVFWQMQEAMLLKLNQMLVDADIAFDVLTKSCAEHGNAAAIMLSCGFSPLTEPHLRGMLTSTRAAQLWGLREKSRIFVSSGRWLMGVLDESGVLEQGQCFVQVSTPSLENCFSKHGSRFSETKNLHVVKGFVIIAKNPCLHPGDVRVLEAVDAPDLHHLNDCLVFPQKGDRPHTNEASGSDLDGDLYFVTWDE

SEQ ID NO: 203130 - protein, 42 aa, Glycine max
  Clone ID: PAT_MRT3847_25451C.1.pep
LFCLKAETGAFLLYKQELLYGELLIQVAKSLILVHSPFAQIP

SEQ ID NO: 203131 - protein, 40 aa, Glycine max
  Clone ID: PAT_MRT3847_25452C.1.pep
IQYESKCAKGQNSLLFQYLYRIIIAKWACLMNVFPWRFMT

SEQ ID NO: 203132 - protein, 72 aa, Glycine max
  Clone ID: PAT_MRT3847_25453C.1.pep
VEIFHIYMIFFAPRLALCKIEELVLTNMPFELGFLSPPSLISFLLFLTCLSANAVNYLIIVPLIKVYHIAAV

SEQ ID NO: 203133 - protein, 56 aa, Glycine max
  Clone ID: PAT_MRT3847_25454C.1.pep
LGILGPYRQNRTQIFQYLEIIYITLLVANLSTERQFLCKLVLTFPCNLIFMNILCS

SEQ ID NO: 203134 - protein, 59 aa, Glycine max
  unsure (1)..(59): unsure at all Xaa locations
  Clone ID: PAT_MRT3847_25455C.1.pep
MMESLIKCDFFDGEWVKDDSYPLYERGSCYIVENSFIXIQNGRPDKDFQTYKWKPKGCN

SEQ ID NO: 203135 - protein, 112 aa, Glycine max
  unsure (1)..(112): unsure at all Xaa locations
  Clone ID: PAT_MRT3847_25456C.1.pep
NPAGTVQPGIMLNQSYSSQPLNYGAMGNHLAQQQLLATMANFQHLNNVNKNDGGTAQNAGSNGKTPLPDIFQSKFSTQAPSSMINSSKKEVTXEFKFIADHLATACDSRRVI

SEQ ID NO: 203136 - protein, 59 aa, Glycine max
  Clone ID: PAT_MRT3847_25457C.1.pep
MNFRTLNRKLTMAQPASLTRIGLAGLAVMGQNLALNIAEKGFSIFVYNRTASKVDETAR

SEQ ID NO: 203137 - protein, 93 aa, Glycine max
  Clone ID: PAT_MRT3847_25458C.1.pep
GSCNCVTLSSFRNNGAFEDGVEGNDDGAIDLALALWFLFHMMWVTHGYPVGCVILYAFLLLGHVRIRLLGRVVRLLCKTEFSAGHEVKCLILQ

SEQ ID NO: 203138 - protein, 64 aa, Glycine max
  unsure (1)..(64): unsure at all Xaa locations
  Clone ID: PAT_MRT3847_25459C.1.pep
KHQAPLAPLALAWGFPQGGGVVPFPGPTKIXNLGSNIGAFPVKLSKKNLKEIFWGVPLGYVAGG

SEQ ID NO: 203139 - protein, 57 aa, Glycine max
  Clone ID: PAT_MRT3847_2545C.1.pep
PILDRQRHTHHVAVVPVVRPSRRRACLPLAGDRHSHLSHGVPPSTKRALPRSLTGRA

SEQ ID NO: 203140 - protein, 124 aa, Glycine max
  unsure (1)..(124): unsure at all Xaa locations
  Clone ID: PAT_MRT3847_25460C.1.pep
EFSCEKPEEGEAGLRQRIYPQCKEDDAHYGTRMLKKDMDDDETAKGSMFEXKISQCKICTFEKHKMEEPLLRRDRLVNYRTEGICXARDELQGTHRLEGMIKXMEVTESILENTRIGMACTMNS

SEQ ID NO: 203141 - protein, 120 aa, Glycine max
  Clone ID: PAT_MRT3847_25461C.1.pep
PRVRTCNTKVSEAAASGYWWEGCRINYEECRVRHIMVSKISDTRGEAWVSAFNEQAEKIVACSADELDKLKSEQGDIDGYQKKLKEATCVPHLFKVSVTHNEYNNEKRQRITVRTCCSNQ

SEQ ID NO: 203142 - protein, 85 aa, Glycine max
  Clone ID: PAT_MRT3847_25462C.1.pep
RDWKVKMAFGAKNGVCFPFFFFITFLVICSATARSPIFFSNDEASSMVGRSLKVINLQDYGEPTANHGHDPWKGASWGGNGGRKG

SEQ ID NO: 203143 - protein, 60 aa, Glycine max
  Clone ID: PAT_MRT3847_25463C.1.pep
ASRGATPITYSQTLSKQDGVHAMMSRATKSRAPSGPSLVSGTADAGCTESRATEPNCALS

SEQ ID NO: 203144 - protein, 82 aa, Glycine max
  Clone ID: PAT_MRT3847_25464C.1.pep
SCLTTRHVSVIRGVNHSDFEWFLSVRALSEVSPNLVIVLRGRSVVKCIIYRAPLVLLGKYVVALQRDRHVKNEGISVRSFFF

SEQ ID NO: 203145 - protein, 296 aa, Glycine max
  unsure (1)..(296): unsure at all Xaa locations
  Clone ID: PAT_MRT3847_25465C.1.pep
MMKNDREKGNEVDQSYIQQHHSLSMPMMFSGFNREKEMSAMITALTRVVCGDYSLVHHNIDNTNSAIVGGGGGDDVSNMASGSMPPSSTSLSHGGNSVLKRRREDDNTSDFLRGGSFPAILTTAEGSSTIRRRRANTVYDYEYRREKVKVGEGXEASRKYRGVRQRPWGKWAAEIRDPLKARRVWLGTFETAEDAARAYDQASLRFRGNKAKLNFPENVRLRHTETLQGSRASSNFYDNSYSHVHDLPVSLYDQTTMASSSTISMTSPQAPPSIYPTHLLPAWSSGYAYNSSSSSA

SEQ ID NO: 203146 - protein, 64 aa, Glycine max
  Clone ID: PAT_MRT3847_25466C.1.pep
YLYLLRILNNLPKAYHLTMLSFYISPSVFRVANLESCSITSYDCCYLLPLYDNEVAMSVYDFTF

SEQ ID NO: 203147 - protein, 42 aa, Glycine max
  unsure (1)..(42): unsure at all Xaa locations
  Clone ID: PAT_MRT3847_25467C.1.pep
VRXGTXXLFXXLKILQXSXLXNKPSXHTXSTPIPXXTYXXXN

SEQ ID NO: 203148 - protein, 133 aa, Glycine max
  unsure (1)..(133): unsure at all Xaa locations
  Clone ID: PAT_MRT3847_25468C.1.pep
XXEXXXXLXQYATEGSSSGGGGRGYEAQRYRSGSYGGHDFRNVTEPEVQNYNCYNTNGNAVQFVESYTADDASYVDTSYDIQNSNIDCSFECLHIASSGSYNHTDSCELNGGGGRVEEDGPRGYASIVATGWD

SEQ ID NO: 203149 - protein, 151 aa, Glycine max
  Clone ID: PAT_MRT3847_25469C.1.pep
MADTGDDNGVTYLHGDLDLKIIEARHLPNMDIFSERLRRCVTACDTIKFHSDAPAAADGDGGSQRTRTHHHRRIITSDPYVTVSVPQATVARTRVLKNAQNPVWKEQFHIPLAHPVVDLEFRVKDDDVFGAQSMGTVKVPARRIATGAKIS

SEQ ID NO: 203150 - protein, 66 aa, Glycine max
  unsure (1)..(66): unsure at all Xaa locations
  Clone ID: PAT_MRT3847_2546C.1.pep
RKVRIXRHEFVPIYSDIKKRNAPVRQQTPIYITSKDQRRKEREEKVKKKKLLQRKEDKSKAAIKGV

SEQ ID NO: 203151 - protein, 83 aa, Glycine max
  Clone ID: PAT_MRT3847_25470C.1.pep
MEKKVLILCCVVAFLGLLSAATSFGAEATRIKVSQVHFVAPNQCTYPRSPALPLGLTAALALMLSQIIINVGTGCVCCRKNSQ

SEQ ID NO: 203152 - protein, 54 aa, Glycine max
  Clone ID: PAT_MRT3847_25471C.1.pep
RLLVFLDIYCSQGEKCDPEDTPVPQSEQDSSSPPTAQDQPVSDDAKLGPAVPLL

SEQ ID NO: 203153 - protein, 54 aa, Glycine max
  Clone ID: PAT_MRT3847_25472C.1.pep
TTTPPCRTQPLPFSSSETLLFLIFLFFEFKEIHYKYGERERGGKVLTDLSQHHR

SEQ ID NO: 203154 - protein, 163 aa, Glycine max
  unsure (1)..(163): unsure at all Xaa locations
  Clone ID: PAT_MRT3847_25473C.1.pep
MDRSYLPVAAAAVALVLVCCSGLCRGERLGARECEDLGFTGLALCSDCNALSEFVKDQELVEDCRKCCTEDSDDSISKLTFSGAIIEVCMRKLVFYPEVVGFLEEDKDDFPYVETRYSYGSPPKLIMLDXKGEQKETIRIDNWKREHIRQFLXEKVKPVKLDS

SEQ ID NO: 203155 - protein, 74 aa, Glycine max
  Clone ID: PAT_MRT3847_25474C.1.pep
FPFLAKEWVHFMNSSLWNQQALLDANQLALLDATPLSNKSYTLTSNVILHYGVTQFNTLNTKNLDFHRILFSHL

SEQ ID NO: 203156 - protein, 101 aa, Glycine max
  Clone ID: PAT_MRT3847_25475C.1.pep
ELMQGNRYTNKLRRGLQRMVGSMSDNNDCCGRHAYSRGIVAYTTAGTAQLRARAPERFKYSHFLRMAPPPADLLLRHWNLPLCRQQQLCPELRLLWAKRFH

SEQ ID NO: 203157 - protein, 180 aa, Glycine max
  Clone ID: PAT_MRT3847_25476C.1.pep
MQHRNLTSGRPSGTDGSDYSYRMVVDSRYQLVAKGKKRLSLYFITEAVLLLIGVTLTYLPGIEADAPNTVAYSSVIVSVVSLIIGNIGRRRSRSGLLRFYAAVSSIAMLLLIASLAQQHLLLKAIQDSKLWKTGKYDVNELSHFQIGLLLYMVTLSVLKLCTVNAVASLLFNMAPPKKTS

SEQ ID NO: 203158 - protein, 547 aa, Glycine max
  unsure (1)..(547): unsure at all Xaa locations
  Clone ID: PAT_MRT3847_25477C.1.pep
FYTFPHSPAVATCEPIYLTKNELAWNGSASNVNVNGPTMKGLAKIQIDNMHTWVKVXVNDQFLSCKPLKRFXAAIEDVRAYHSLFMHKDVVXRPTPEELGEFXGLPDYTIYNAGXFPGNGYTHYMTSSTSIDVNLARSDNDHPHGTQYAGEMKKGLFSVMHYLMPKRQIXLSLHSGCNMGKDGDVALFFGLSGTGKTTLSTDHNRYLIGDDEHCWGDNGVSNIEGGCYAKCIDLSREKEPDIWNAIRFGTVLENVVFDEHDREVDYSDKSVTENTRAAYPIEYIPNAKLPCVGPHPKNVILLACDAFGVLPPVSKLNLAQTMYHFISGYTALVAGTEEGIKEPQATFSACFGAAFIMLHPTKYAAMLAEKMQKHGATGWLVNTGWSAGSYGNGSRIKLQYTRKIIDAIHSGSLLNAEYKKTEIFGLEIPTEVEGVPSEILDPMNTWSNKKAYKETLLKLAGLFKNNFETFTNYKIGKGNNNLTEEILAAGPIFSRQCYATCCNTPLLVNYQLCCMLTHGCFVLWLLVSPFFYNPNGSLCSLFYYCLF

SEQ ID NO: 203159 - protein, 120 aa, Glycine max
  Clone ID: PAT_MRT3847_25478C.1.pep
IQSSRFLSSFSAPDMPGDNFDAVQDFHVHQHLFTISSSRTGRSNTLTPSNLDQLFSAKISSSARHSDPQWSSVFPLIHKSTIMNLFQQLERWLSPMNTSVYSPRNCEHSLLQAPFAVSSP

SEQ ID NO: 203160 - protein, 169 aa, Glycine max
  Clone ID: PAT_MRT3847_25479C.1.pep
FNTASITIASSRPTSIKEPQATFSACFGAAFIMLHPTKYAAMLAEKMQKHGATGWLVNTGWSAGSYGNGSRIKLQYTRKIIDAIHSGSLLNAEYKKTEIFGLEIPTEVEGVPSEILDPVNTWSNKKGYKETLLKLAGLFKNNFETFTNYKIGKGNNNLTEEILAAGPIF

SEQ ID NO: 203161 - protein, 325 aa, Glycine max
  unsure (1)..(325): unsure at all Xaa locations
  Clone ID: PAT_MRT3847_2547C.1.pep
GSSLDYLYREHGIIHSDLKPENVLLVSTIDPAKDPVRSGLTPILERPVGNINGGGVTSLIEKKLKRRARRAVAKISGRSSPIGGIEAPKSDRNLDGIDVRCKVVDFGNACWADKQFAEEIQTRQYRAPEVILQAGYSFAVDMWSFACIARDRHSWRSSPPVLXLAAGSKKDSKAKILSTCPFDLATGDMLFTPKGGQGFSEDEDHLALVMELLGRAPRTVATGAAQSKDFFDRHGDLKRIRRVKFCPLDKLLTDXYKFSVNDAQEFSEFLLPLFDFAPEKRPTARQCLQHPWLNYMESPPNEMRNESAVEKVDVGMSNLKIRVEK

SEQ ID NO: 203162 - protein, 63 aa, Glycine max
  Clone ID: PAT_MRT3847_25480C.1.pep
RVVKIYRCAWFVLFKFCGCAFMWLLDWLCSMYSDSYGSFTVSRPYAVPLASGLTPLPPVGHLN

SEQ ID NO: 203163 - protein, 76 aa, Glycine max
  Clone ID: PAT_MRT3847_25481C.1.pep
LQHPPIDFFYRSNNFYIESVDIEAELEKDSSAVHLILPPSSPPRHRFEYDYYADSHDKPDILGSCRGLNFYTTRET

SEQ ID NO: 203164 - protein, 63 aa, Glycine max
  Clone ID: PAT_MRT3847_25482C.1.pep
ERLSRRWARFSAPTFIEVSIFKISLRRFSSRVFFPQGKQDSWCHSPPCASARFFIVYYARFFQ

SEQ ID NO: 203165 - protein, 82 aa, Glycine max
  Clone ID: PAT_MRT3847_25483C.1.pep
FPSLVKSCMVLGTFCVKIKFLHLLKCLTFNISIVSQTQPRPPFSIQSKSNQHQVSLSSATIINDKDQTSEVAGSAIKIHQDV

SEQ ID NO: 203166 - protein, 113 aa, Glycine max
  Clone ID: PAT_MRT3847_25484C.1.pep
RTVWGTFSGPEPLKYWGQVNQTQRGLRSGRFYQNQAPKCGKTFPANAQKEFESPVSRMMKTKRAFFPKNGSPDCDEFRSPQIYSLSAGGTSNLEGYKKKFGATTTTSTSLAPG

SEQ ID NO: 203167 - protein, 64 aa, Glycine max
  Clone ID: PAT_MRT3847_25485C.1.pep
KKKEGLPKNHSLMGTLGGHKQTFFCQNGEGLQQGFKRWGACDQGLISILGHKNVHLRREIRKAF

SEQ ID NO: 203168 - protein, 114 aa, Glycine max
  Clone ID: PAT_MRT3847_25486C.1.pep
MVIYSFLKSFVPAQVVYIKHCLPYFCSQDERRKKIVEMGGAQELLNMLSTAKDDRTRKEALHALDALSQSDEALASLHHAGAISVIRSAPNSLEDAEVEGFKLSLMKRFQDLKI

SEQ ID NO: 203169 - protein, 88 aa, Glycine max
  Clone ID: PAT_MRT3847_25487C.1.pep
LCDMNRPPLLTTLNKTSLDPDLTFHLHPLWNQLTFWVELHIKLRYCHQRDSLLLLFVLSNLFHPLYYDTPLVPTILLAGETKLLTIPH

SEQ ID NO: 203170 - protein, 148 aa, Glycine max
  Clone ID: PAT_MRT3847_25488C.1.pep
MMHMTLYWGKKVTILIDSWKTDSWTSYVLSLLACLVVAAFYQYLENRRIRLKLLAGDRRPLPAPEIRTPLLRWGVAGGDNARLGVKFAEAVLFGVNSAIGYLLMLAIMSFNGGVFLAIVVGLTIGYFFFRNEGEDDALVVDNNSCACA

SEQ ID NO: 203171 - protein, 83 aa, Glycine max
  Clone ID: PAT_MRT3847_25489C.1.pep
LNDLCTRSRERFIKFRFLTRETSTRFWTCPPMNLKTCAELTLVECYNTPQPVSPKTLSENCPLQRTRPLLTRSAHLVTPTFGS

SEQ ID NO: 203172 - protein, 97 aa, Glycine max
  Clone ID: PAT_MRT3847_2548C.1.pep
GDIKFYFQMAKIASTAPFFEQGGKTNYLIKMGQGQKLQHWGGPLKTLDKLGTFVFTQKTRAGPNKPLKKPPGDILIYKKTLTKLKTLIFKGKKKNFF

SEQ ID NO: 203173 - protein, 95 aa, Glycine max
  Clone ID: PAT_MRT3847_25490C.1.pep
SLTRGILLAIRDHISHKTQSCTKSNPHFFQRLHQSQPTFPLSCHTVLDLHFLHLLHNLPLISLYPFWAFPLLLHSLLCRLWSPVVVMPLCCLQDP

SEQ ID NO: 203174 - protein, 60 aa, Glycine max
  unsure (1)..(60): unsure at all Xaa locations
  Clone ID: PAT_MRT3847_25491C.1.pep
MTDLLAPEYYCQNAQIFEDKHLSNTVRSQSDNRETLEHSYRQSLGHPEPXSNGRPHGNSQ

SEQ ID NO: 203175 - protein, 165 aa, Glycine max
  Clone ID: PAT_MRT3847_25492C.1.pep
EVLQSVDRSVTPWLVAAWHSPWYNSYASHYQEFECMRLEMEELLFRYRVDIVFNGHVHAYERMNRVFIFTLDPCGPVYITVGDGGNIEKVDVDHADDPGKCPSAGDNIPEFGGVCKSNFSTGPAKGNFCWNKQPEWSAFRESSFGHGILEVKSSDSEPFHFYFYC

SEQ ID NO: 203176 - protein, 102 aa, Glycine max
  Clone ID: PAT_MRT3847_25493C.1.pep
TRRILCEKETHGSFGLRKVTFIETMEEAVERECPAVGGCADMLVLSARDGIDSLGGPHFPLKTGIKDGGRSKADVVELFLPDHNECVSAVIDNVGAVGIDTR

SEQ ID NO: 203177 - protein, 131 aa, Glycine max
  Clone ID: PAT_MRT3847_25494C.1.pep
HGEQGQKIHGCTDSHSNTPNFEHMRSIVPDSFEYSQCDDYKTNQEILSSDIVEAGRSSFNKEMCSQQLLGHDLTNGTITCHASGLDFKDMPQNCDVCIPESVLDDMSPKDLIIYERSDDACLHVKENPAHV

SEQ ID NO: 203178 - protein, 65 aa, Glycine max
  unsure (1)..(65): unsure at all Xaa locations
  Clone ID: PAT_MRT3847_25495C.1.pep
HXSSEFGSRSCWAIATLPPHCEPAHLSLYRARRYSLRQSGRTLHKLAIPLRPQWLKLKRDQSFLL

SEQ ID NO: 203179 - protein, 85 aa, Glycine max
  Clone ID: PAT_MRT3847_25496C.1.pep
MTHFKIDIISDTVCPWCYVGHKRLTRAITQHQRTHPNDTFTTTWHPFYLDPTVPTPGEDKQARYERRFGASRMAMMNQRLAQLGR

SEQ ID NO: 203180 - protein, 111 aa, Glycine max
  Clone ID: PAT_MRT3847_25497C.1.pep
TNLLPQSLHIFIHFGPSSLLNSFKIVSPRGVHMIPVSSGPEPTFSTIATVTAMSAITIGSTIACPIVGQLPFTVSIATLSSGTLILNAGPVTTVRTLNVVSQTPLAVLCVH

SEQ ID NO: 203181 - protein, 38 aa, Glycine max
  Clone ID: PAT_MRT3847_25498C.1.pep
VRASVEEAMSTSPTPLTVLRHIHRSFYSILCGCALSCL

SEQ ID NO: 203182 - protein, 64 aa, Glycine max
  Clone ID: PAT_MRT3847_25499C.1.pep
LMSYISINVKIPVITVHDMIWTTISSHLPCNIRIMIRFDLNFDPDSIHHNPKYLTYFIQHLLYR

SEQ ID NO: 203183 - protein, 53 aa, Glycine max
  Clone ID: PAT_MRT3847_2549C.1.pep
NKYNRRADSRLLGDPNNHTITEPAGASMLPTTPAFTACQEHVLSISFKYAQAL

SEQ ID NO: 203184 - protein, 72 aa, Glycine max
  Clone ID: PAT_MRT3847_254C.1.pep
TPPTPPTKPKNLFSTHILPPPPLIDLLPPKINSRPVPQTYPFFLYTIPLKPSPNIRHTFFSCKIFIPSQFPT

SEQ ID NO: 203185 - protein, 135 aa, Glycine max
  unsure (1)..(135): unsure at all Xaa locations
  Clone ID: PAT_MRT3847_25500C.1.pep
CDLLSTIFFALFLGCAFTISYLPSATAQFELDTDDDPIQNGGSYYLLPVLRGKGGGIEVDSTGNEMCPITAEQSPTELDQGIGLGSTCTLHALFIVVGYTLSIKSESLAAITLSARMXTECAIVDREGLQADKLA

SEQ ID NO: 203186 - protein, 441 aa, Glycine max
  unsure (1)..(441): unsure at all Xaa locations
  Clone ID: PAT_MRT3847_25501C.1.pep
MEEETSDAMNLDLNLGPGPEPETGPMSNEAVNLDDWIGEPLQRISEAVRRARQRWRWRHLPLPHPEFHAHFPTEATRHFQIPPEARNISVELNHFLVNSGNGSALQAGEGSVAAEERMEEVPKACDNVNGVAEDXTSQKKEDVEKGSGNDGDFFDCNICLDLARDPVVTCCGHLFCWSCLYRWLHLHSDAKECPVCKGEVTLKSVTPIYGRANNVRGPEEDSALKIPPRPQAKRVESLRQTIQRNAFALPVEEMIRRLGSRIELTRDLVQPPEPDAARETAERTTSLLRFLTAQGIRREHQNLVAPPEDVMGLAQNNVNTSEAGDPRTRVQSHLLRRTQSHRATLSTLSSALTSAERLVEAYFRSNPLGRNQEQPPPPVDDRDSFSSIGAVINSESQLDTAVEIDSMVSLSTSSSRRRNDASRVSDVDSGDSRAPRRRRLN

SEQ ID NO: 203187 - protein, 162 aa, Glycine max
  unsure (1)..(162): unsure at all Xaa locations
  Clone ID: PAT_MRT3847_25502C.1.pep
MEEETSDAMNLDLNLGPGPEPETGPISNEAVNLDDWIGEPLQRISEAVRYRARQRWRWRQLPLPPPEFHAHFPTEATRHFQIPPEAHNISVELNHFLVNSGNGSALQAGEGSVAAEERMDEVPKACENXNGVAEDEASQKKGDIEKGSGNDGGLFLIVTCLD

SEQ ID NO: 203188 - protein, 115 aa, Glycine max
  Clone ID: PAT_MRT3847_25503C.1.pep
MEEETSDAMNLDLNLGPGPEPETGPMSNEAVNLDDWIGEPLQRISEAVRRARQRWRWRHLPLPHPEFHAHFPTEATRHFQIPPEARNILRGIEPTFWSIFGNGNALQAGEGSVAA

SEQ ID NO: 203189 - protein, 45 aa, Glycine max
  Clone ID: PAT_MRT3847_25504C.1.pep
TQFLHHTFLQRMLQLTINDRAFFLIDLRSEHRHCITDNDRQHYRV

SEQ ID NO: 203190 - protein, 64 aa, Glycine max
  Clone ID: PAT_MRT3847_25505C.1.pep
SQTLTFDLGESLAGATVVAVLSGCFIFVDPTLALNAGGPYDHEVTRGLDLAGTDFIGRTLIILD

SEQ ID NO: 203191 - protein, 123 aa, Glycine max
  unsure (1)..(123): unsure at all Xaa locations
  Clone ID: PAT_MRT3847_25506C.1.pep
FSPFGALFFFPPRGFFFAFWVPGLPRXGGFGPWFSXFGFFVXALVXGXGPLXXLAVXLAXXVXXXAWAXAXXFXSACXXXXXXXCXLLXVFXFVFGXXXVXXXXFXFCXFSCXSXSPLLXLAF

SEQ ID NO: 203192 - protein, 80 aa, Glycine max
  Clone ID: PAT_MRT3847_25507C.1.pep
PTSRIMPPTSLAFGFSIDAILKFSFNSSNCKARTELNNPPSLHTQCQNTRTGERAMAFGAARCARTPAVGTCQNYSSPET

SEQ ID NO: 203193 - protein, 277 aa, Glycine max
  Clone ID: PAT_MRT3847_25508C.1.pep
MALTLQRALSELLTLIAILSIFLVIPSFCFNPKKLYNASYYSPSSSDWSPAVATWYGPANGDGSEGGACGYGNAVGQPPFSSLISAGSPLIYDSGKGCGSCYEVKCTGNSACSGNPVKVVITDECAGCGSDAQYHFDLSGNAFGAMAISGQDENLRNAGKINIQHRRIECNYPGRSIAFHVDSGSNQEYFATLVEYEDGDGDLAKVELKEALDSGSWDSMQQSWGAVWKFDKGSPLRAPFSIKLTTLESGQTIVANNVIPAGWTPGQTYRSIVNFAT

SEQ ID NO: 203194 - protein, 68 aa, Glycine max
  Clone ID: PAT_MRT3847_25509C.1.pep
HRLALSTERERHLPADTSESHIRTSMPEKLHSASASQPRRTPSTRIPLTFRGDPLRITRRLYRLLNTA

SEQ ID NO: 203195 - protein, 70 aa, Glycine max
  Clone ID: PAT_MRT3847_2550C.1.pep
HSRIASQDYEQLACSKGESNYLADPVITTYFGTIQWLLHTHSESQYSKTDFQNVDYRGPSPTSDGFNARL

SEQ ID NO: 203196 - protein, 78 aa, Glycine max
  Clone ID: PAT_MRT3847_25510C.1.pep
SCFSDEGCSFSLSSSQGWCDIRACAGCSATSATLTNFTAASQVGNVSYTLIEVTITEKLQRSILAIGAKARGEITRGI

SEQ ID NO: 203197 - protein, 56 aa, Glycine max
  Clone ID: PAT_MRT3847_25511C.1.pep
KTDKLNIYFLINYNAKKINLNYKQPSALLHKIWYKTRKTNAYGSILNLPNNKKPPY

SEQ ID NO: 203198 - protein, 57 aa, Glycine max
  Clone ID: PAT_MRT3847_25512C.1.pep
GKNTTREGVPAKHYHFNMSMQQQFTNLENVVHPYRIGAALYDYQHWQPHYKWEGLSC

SEQ ID NO: 203199 - protein, 81 aa, Glycine max
  Clone ID: PAT_MRT3847_25513C.1.pep
RLRVRYTPQPFNDVHDHYICQTYLRYHSLYKTCYTNFTPAPKGNGFGNFKARRHEGVGDPNALSKPDGGKLVVLVGTDLER

SEQ ID NO: 203200 - protein, 74 aa, Glycine max
  unsure (1)..(74): unsure at all Xaa locations
  Clone ID: PAT_MRT3847_25514C.1.pep
TRVRHQHSHSMDGSIHLEMLLSAASADDDVSGGIDTKKAMSADKLAELALXDPKRAKRIWANIQPAARSKERKM

SEQ ID NO: 203201 - protein, 77 aa, Glycine max
  unsure (1)..(77): unsure at all Xaa locations
  Clone ID: PAT_MRT3847_25515C.1.pep
VAKIKTMVSAETMNIPYGLCFKVYAKVIEVEGPCGKSVRDFKHLNLNFELITDENGXLKLNVDACFSSRKTSSAIHT

SEQ ID NO: 203202 - protein, 69 aa, Glycine max
  Clone ID: PAT_MRT3847_25516C.1.pep
EAPTAAVFFPTFPRGWLSLRGNTRHPLEARTGPTFSPARTALMALLLEAHYRGTRVHVVPRSPSQQHSG

SEQ ID NO: 203203 - protein, 82 aa, Glycine max
  Clone ID: PAT_MRT3847_25517C.1.pep
DSLHYMNHKTFFDTVKSQNFIIFLKKIEILTSCFSSKSLTGHSSSKLEVESRAANVWQRENTSLRVATRYLHLLGWFGGSSW

SEQ ID NO: 203204 - protein, 46 aa, Glycine max
  Clone ID: PAT_MRT3847_25518C.1.pep
ANIYIIEVFHAIIIIPCNQCIGRLVFSACPVSVQLKIYPPWLLKNV

SEQ ID NO: 203205 - protein, 47 aa, Glycine max
  Clone ID: PAT_MRT3847_25519C.1.pep
TFNEDGDPLSSVHFTSQCEVKFISILYVFAFSPYFKAYIFDPVTKPM

SEQ ID NO: 203206 - protein, 52 aa, Glycine max
  Clone ID: PAT_MRT3847_2551C.1.pep
LILAQSQKSKLILAQVVLILEVYKTPTNFFFLFKINYSVQYLVVYIFFFFGS

SEQ ID NO: 203207 - protein, 56 aa, Glycine max
  unsure (1)..(56): unsure at all Xaa locations
  Clone ID: PAT_MRT3847_25520C.1.pep
IADETICKELKPLESEFDEEEKICDAISEEHEHHFGRPKSRXEALHFLNELGWLFQ

SEQ ID NO: 203208 - protein, 57 aa, Glycine max
  Clone ID: PAT_MRT3847_25521C.1.pep
ARGGREVWREKNLPSSVIILGLSTRKIIVWPKFHHFRSQKASFSGLEDNPNHLDLCI

SEQ ID NO: 203209 - protein, 105 aa, Glycine max
  Clone ID: PAT_MRT3847_25522C.1.pep
EKANDHSERFWTGWRRGGAIGGRPSGRRGGEHSVQPETAPLVGGHSAAALSPFRRRFAAVLETFIWLIYFHQTKGLLLAADAQNGGGTFSLEGGRGILDFHRKKN

SEQ ID NO: 203210 - protein, 75 aa, Glycine max
  Clone ID: PAT_MRT3847_25523C.1.pep
QSMGDDIFDGEDMECMEEAYEMVVVYTYFSTALFVDTDNDDVFTFHTHVVEFNYNESLFFSLITLPYPYTIHLKH

SEQ ID NO: 203211 - protein, 88 aa, Glycine max
  Clone ID: PAT_MRT3847_25524C.1.pep
RLELPTATITLHSVIAPAYLAITGCLSLTLVPAVARPMACAPRAPTSLLARGRGASSSPSLLVTRAIDVNEFLGDFGARDPFPAELES

SEQ ID NO: 203212 - protein, 347 aa, Glycine max
  Clone ID: PAT_MRT3847_25525C.1.pep
MKSLQVGQAQQDSDGSDKVSDKSIVVPNKFIAIADSFKGEHSWFIAPQIPTDFSIQVQETTYNVHKYPLISKCGYIGRLEIQPLISNSGNVLNLENFPGGSETFETILKFCYGLPIDFSPDNIAALRCASEFLEMTEELEDGNLISKSEAFLTFVVLSSWKDTITVLKSSENLSPWAENLQIVRRCCDSIAWKASKDELTSEDAAPNQESWWFNDVAAFRIDHFMRIISAIRAKGTKPETIGKCIMQYAKRWLPGMEVELEGLRGYGHEKCNLQFSIFSGKKKESSGNSKEQRTIIESLISIIPPQQDAVSCKFMLQLLKMAMMYSVSPALTTDLEKRVSLVLEDAE

SEQ ID NO: 203213 - protein, 88 aa, Glycine max
  unsure (1)..(88): unsure at all Xaa locations
  Clone ID: PAT_MRT3847_25526C.1.pep
EPPRDQQQHKTLLSQTGIITAXLSAYTLTPAGCPHRHCHRFDIATPLLVIFTPSCPAALGCPGCFWLLFRGLGWLPLWLSWITTTFGN

SEQ ID NO: 203214 - protein, 220 aa, Glycine max
  unsure (1)..(220): unsure at all Xaa locations
  Clone ID: PAT_MRT3847_25527C.1.pep
METPSSTARRITRSQIASNNNIPVSRKKNEDCPEKSVSKTRQRSSVQQQERCALVDISNDSPIAGLANGKDIIETPLSSMAKKKRVKKTMKTPGSGEXEEEAVISKLSMEIVAPFLKLANSSPMSLLAPTPANTPQVPNLSEVALVSPPSSVVEEQLISRVVNEIFEGKKNENAECEKSVITRSLLLDFSDKSRVSECSSEVTYEVTQGSVGSRGSTEDD

SEQ ID NO: 203215 - protein, 116 aa, Glycine max
  Clone ID: PAT_MRT3847_25528C.1.pep
SQTLFPLSLTKRLQDHSHSHSIQNLQLPFLPILKIPNSNKKWHLPFGNPSPSLKPPLSSSSSSPSPPTAGTATTTTTTTRTPEATPPQTPCSVFDSRKRVVFDRYFFCYFVSGVSP

SEQ ID NO: 203216 - protein, 355 aa, Glycine max
  Clone ID: PAT_MRT3847_25529C.1.pep
METPSSTARRITRSQIASNNNIPVSRKKNEDCSEKSVSKTRQRSSVQQQERCALVDISNDSPIAGLANGKDIIETPLSSMAKKKRVKKTMKTPGSGEALLRGQVKTLLQRVEEEAVISKLSMEIVAPFLKLANSSPMSLLAPTPANTPQVPNLSEVALVSPPSSVVEEQLISRVVNEIFEGKKNENAECEKSVITRSLLLDFSDKSEVSECSSEVTYQEVTQGSVGSRGSTEDDGASIWSIQVNASTHDEDEDDEEMGEEEEEEEEDYCEDAEECYDYVGGLSLEELCAGMNNISVNENKGCGKHTRFVYDSEDEIVEKVVECCAESDVMRLKGLPTPKGKHLRFPQEEENSSDL

SEQ ID NO: 203217 - protein, 51 aa, Glycine max
  unsure (1)..(51): unsure at all Xaa locations
  Clone ID: PAT_MRT3847_2552C.1.pep
SXLCVESSTXDCMXHKXEKFXECTXXHXXXXTLYFFFLGVSQXLXHQFGIX

SEQ ID NO: 203218 - protein, 43 aa, Glycine max
  Clone ID: PAT_MRT3847_25530C.1.pep
FLEEISLSKHYCNLYQSGRIQSCSLVLSVEISFAYIIFKSKMF

SEQ ID NO: 203219 - protein, 73 aa, Glycine max
  unsure (1)..(73): unsure at all Xaa locations
  Clone ID: PAT_MRT3847_25531C.1.pep
GKGGLQTSIAATAVAQLAVREXQSAPRGNTSRRCALTEKGTQMMKVYIMDGPKRPCGALSGRTAVKTPSSLAR

SEQ ID NO: 203220 - protein, 71 aa, Glycine max
  Clone ID: PAT_MRT3847_25532C.1.pep
RQLRALLTLCLPRELQLMLTYQRPKRTRLTPVAPAHQNTTCWVLTTTLLFLRRCREPDPHRRCGWYNLRGR

SEQ ID NO: 203221 - protein, 134 aa, Glycine max
  Clone ID: PAT_MRT3847_25533C.1.pep
TDIQHGYIYIRKNGLSLEKDYPDRGDKGKRDSHKKNAIVTIDGHRWVPTQLEEAFKQGIANHPVAVPISAYYYEFQYYTSRVFKGICCSKLNHALLLEAYGSKKDLDYLIAKNLYHDKWGENVYIRIQRKLITL

SEQ ID NO: 203222 - protein, 96 aa, Glycine max
  unsure (1)..(96): unsure at all Xaa locations
  Clone ID: PAT_MRT3847_25534C.1.pep
TSAVSDVFLPSDNYPYWLAHMEDGHSVYFTVPDDFHMKGMTLCVXYLSTPXDTXIECLNXVSMVNYTKGTIQIFKRDTVISFNDEDWQGIISHLGP

SEQ ID NO: 203223 - protein, 127 aa, Glycine max
  Clone ID: PAT_MRT3847_25535C.1.pep
MTSASNEEGLRKSKSRALKIYNNLKKVKQPISPGGKLSNFLNSLLATGGSVKKTKTYDDTKAPKSGQDSTCSSASSFSRSCLSKATPSSSKDKLRDGVKRTVRFYPVSVILNEDSRPCGHKCLYEED

SEQ ID NO: 203224 - protein, 65 aa, Glycine max
  Clone ID: PAT_MRT3847_25536C.1.pep
KGHKKSNIIFYFSLNRGIIFMPEKTSIYSFFLKKFWLPNGHLFLKKKKIENPGVEGPDFSPLAFT

SEQ ID NO: 203225 - protein, 120 aa, Glycine max
  Clone ID: PAT_MRT3847_25537C.1.pep
LAPTQLRVHHFNNASFSLFSGTPSSVLYICSVQNQKPTHYFGFKLDLILASKKEAVLMANRWWAGSATVKPSEQDNGDNNGTPTNSGNSNTNVNAVLEDDANTNERDGEEQTLSGGRRPR

SEQ ID NO: 203226 - protein, 64 aa, Glycine max
  Clone ID: PAT_MRT3847_25538C.1.pep
KRGGLQIFVKTLTGKTITLEVESSDTIDNVKSKIQDKEGIPPDQQRLIFAGKQLEDSRTLSDYN

SEQ ID NO: 203227 - protein, 63 aa, Glycine max
  unsure (1)..(63): unsure at all Xaa locations
  Clone ID: PAT_MRT3847_25539C.1.pep
XAAXXQNXACRXEFXFLILNNTLXQXXKPAXTSSSEEXXPLCIRLGMXXXRXLTQGELAIXAX

SEQ ID NO: 203228 - protein, 83 aa, Glycine max
  Clone ID: PAT_MRT3847_2553C.1.pep
SIISLKVVFLGLRMGRALITLNFYQSKRLTILFLLSLFGIETKSPFCAYAQSLLDHVCCPYVSTSLGQRKNITTEIVFKLQIP

SEQ ID NO: 203229 - protein, 63 aa, Glycine max
  Clone ID: PAT_MRT3847_25540C.1.pep
AEYKKTFQSNSTRAKIRSINLQNKTSQCQKENSWFLMEEEKALHLPSAGLSSIVTCTSSLKKI

SEQ ID NO: 203230 - protein, 58 aa, Glycine max
  Clone ID: PAT_MRT3847_25541C.1.pep
SLFYLFSDVRCWVSWYLTSLNCLVKWGKVAFQSIHWQGIFKSSLPTSQGQGSPVLIFF

SEQ ID NO: 203231 - protein, 140 aa, Glycine max
  Clone ID: PAT_MRT3847_25542C.1.pep
LKEAEAAQLKATQLQESNERLDLSLSSLESENQVLCQKALEESKNEVLFEEFEILKDQIANLQSENESLRSQAAAAALERKVHPGKIEPVHSAAALEQNVHPERIEPGQEVAVVEMMQVQPRVIADNTTAPVPCRYVRLH

SEQ ID NO: 203232 - protein, 103 aa, Glycine max
  unsure (1)..(103): unsure at all Xaa locations
  Clone ID: PAT_MRT3847_25543C.1.pep
VFSVWSLSALLCSSFLVLPVCAAFLSFLSLFPPSAFLLXXXLXXCFPXLCFCXVLFSLXLFXPLRWVGSGPPLLVAPPCXCLFPSHPNPLLVPRSXLPSARLL

SEQ ID NO: 203233 - protein, 72 aa, Glycine max
  Clone ID: PAT_MRT3847_25544C.1.pep
PGRPTRPIFYSAGWLSRSNCIFPNSTCYKDTHNLHARMHALPLTKSLCFTLETQKRQTRTGQSVNSTYPNCD

SEQ ID NO: 203234 - protein, 177 aa, Glycine max
  Clone ID: PAT_MRT3847_25545C.1.pep
MEGEGRRREGGERETATAAATRKVVEGADQRRYKGIRMRKWGKWVAEIREPNKRSRIWLGSYSTPVAAARAYDTAVFYLRGPSARLNFPELLIGEGAAALTGGCDMSAASIRKKASEVGARVDALQATLHHHHHHVVPPRQLLSASCGGGSGDFAVRVVDLNKMPEPESSDCEWNVN

SEQ ID NO: 203235 - protein, 168 aa, Glycine max
  Clone ID: PAT_MRT3847_25546C.1.pep
RRQKGYKQVCEELVQAQNQALLLSCESLEETKIVNASLKREEILRKFAAEEKTKYLKGMKELEEAKNKFSKESYERQMAELDVLRGSIERRRIVDTLLSNDRRYRKYTMDEIKLATNFFAEDLIIGEGGYGKVYKCNLDHTPVAVKVLHQDAVNRKEEFLKEDEILSQ

SEQ ID NO: 203236 - protein, 79 aa, Glycine max
  unsure (1)..(79): unsure at all Xaa locations
  Clone ID: PAT_MRT3847_25547C.1.pep
SIAFAEEKKIPELLKTFPSATXYLEAMVSFXKVTPXQKQEVQNSGLEIYSWDDISQVGRNQSLTLTIIRKSYICPISCS

SEQ ID NO: 203237 - protein, 80 aa, Glycine max
  unsure (1)..(80): unsure at all Xaa locations
  Clone ID: PAT_MRT3847_25548C.1.pep
ICEFQKCKKMMKRKIHFKRLVRLVDEKLKSDLXYKEVCIGFIEGCXKYXHEGLFENCELGAIKDKRVSFMFKEIQLDCRI

SEQ ID NO: 203238 - protein, 41 aa, Glycine max
  Clone ID: PAT_MRT3847_25549C.1.pep
IFPIPLILSRLYHDQRPGPILTLLTHFCFSPGQYSKPCQCS

SEQ ID NO: 203239 - protein, 42 aa, Glycine max
  Clone ID: PAT_MRT3847_2554C.1.pep
QGLLIKVIDRALMVRTQNVKYNNDYFCNFFAQNTTMIISCHF

SEQ ID NO: 203240 - protein, 98 aa, Glycine max
  Clone ID: PAT_MRT3847_25550C.1.pep
PKCPRGQGPPPWREAGIKMFPHLEPGGRAPKSRKWVKLVHYLKGKGLGGIKPGFFPLILYGLKNGPIFLVANPREGEGELFFFGFEKFIPVSPRRRLV

SEQ ID NO: 203241 - protein, 121 aa, Glycine max
  Clone ID: PAT_MRT3847_25551C.1.pep
LLGSRCSSLLVSSGVCRRGFAFLFFFSFSLSVLVFPSLVSPRSLCVFVRCAAGPSFAVSWVVASRVARGVGLCSYRVRSPCGLAGCLSSTVPRVCAFLASIHRSRGSAGRSGPVRGGSSFP

SEQ ID NO: 203242 - protein, 153 aa, Glycine max
  unsure (1)..(153): unsure at all Xaa locations
  Clone ID: PAT_MRT3847_25552C.1.pep
YGCEKTTEGLVANHRLNFQIRQQSSHFLRGFQQLIQKDWIDMFNEHELQXDIDDLRLHTNYAGGYHGEHYVMEMFWEVLKGFSLENRKKFLKFVTGCSRGPLLGFRYLEPMFCIQRASGNAAEESLDRLPTSATCMNLLKLPPYTSKEQLETK

SEQ ID NO: 203243 - protein, 155 aa, Glycine max
  unsure (1)..(155): unsure at all Xaa locations
  Clone ID: PAT_MRT3847_25553C.1.pep
GIFKDFMENITRAAFDVQYGLFKXDHLLYPNPGSGMIHEQHFQFFHFLGTLLAKAMFEGILVDIPFATFFLSKLKQKXDSRSLLLYFRHNYLNDLPSLDPELYRHLIFLKHYKGDISELELYFVIVNNEYGEQTEEEXLLPGGRNLRVTNENVIT

SEQ ID NO: 203244 - protein, 827 aa, Glycine max
  unsure (1)..(827): unsure at all Xaa locations
  Clone ID: PAT_MRT3847_25554C.1.pep
PWSCKIVEYLIXRMQFAXLNEINLTGKDNSKNYFSIGKGLSLVRVLIAVICHVGHKLCICSQMNPXYRFESQFINIPFFWPLLANLXQVFATYNLNHCYIHQMAMKGQILIKFLSNKIRSIFSSHSFMMEYMLETAGMDLSYLNFTFDMAEDIEEVIILFLMALRSSKKFSNTFSYYASKHXKICDNEVMEIALDRKLEQQIYNAINPRFLLQLTNILFKEISSVNGSDYGPNDRDVTAVDGVCGFLNVTFNKLPLERIMTVLAYRTELFPTLWNFMKRCHDILKLXLHYKGLPVMPLRNHLTDYQHRLLMLMIVDNXEFYEQDKPLSLKNIRSLIIILRQVLWQLLWVNHITSANSVKSVPVSSASKGQSVQTIQQRVCIVVSELLSQLQDWNNRRQFTSPSNFHADGVNDLFSSQAVIENTRANEILKQAPFLIPFTSRVKIFSSQLAAVRQRHGPQAVFSRNRFRIQRDHILEDAYNQMSQLTEDSLRGSIRVTFVNEFGVEEAGIDGGGIFKDFMENITRAAFDVQYGLFKETADHLLYPNPGSGMIHEQHFQFFHFLGTLLAKAMFEGILVDIPFATFFLSKLKQKHNYLNDLPSLDPELYRHLIFLKHYKGDISELELYFVIVNNEYGEQTEEELLPGGRNLRVTNENVITFIHLVANHRLNFQIRQQSSHFLRGFQQLMQKDWIDMFNEHELQLLISGSLDSLDIDDLRLHTNYAGGYHNEHFVMEMFWEVLKGFSLENRKKFLKFVTGCSRGPLLGFRYLEPMFCIQRASGNAVEESLDRLPTSATCMNLLKLPPYTSKEQLETKLLYAINADAGFDLS

SEQ ID NO: 203245 - protein, 104 aa, Glycine max
  Clone ID: PAT_MRT3847_25555C.1.pep
QGRGVWNCQFWGLGCGQPPQSPCLMPLHRAFFICHLGGSPFGKAVWAFSLRGERGRCKRGFVHRRLEGCAPRLFRLVRPEISPFGFFLTTSIIMFLRSPARKLK

SEQ ID NO: 203246 - protein, 111 aa, Glycine max
  unsure (1)..(111): unsure at all Xaa locations
  Clone ID: PAT_MRT3847_25556C.1.pep
RFLHPQHKQQRAGARETRGGYGTASAPKTDATDPEQKKSAREDIKEPLNSKSCQPIHIRTGRHEAGTYNKRTEDWPLRGGANGSXRSEAELKHGAKAGPTNAAEHTQRNKD

SEQ ID NO: 203247 - protein, 76 aa, Glycine max
  Clone ID: PAT_MRT3847_25557C.1.pep
LFKTIIQLHEEKIISLAKVNTITDTNTRTTKILFRHVITSNRNIRVITSNRNIRQYTTTTITPYPTRWGRLHGSTS

SEQ ID NO: 203248 - protein, 126 aa, Glycine max
  unsure (1)..(126): unsure at all Xaa locations
  Clone ID: PAT_MRT3847_25558C.1.pep
MIPLNGWKNSSFCSVYSSRTHVIRIFIFVYLFKILIFCYLNPGGPNISKASTHKCGYHNAVVFETXVPMVIPGRRLSAMIFLGPTYYQRLKHMVDDKIHSRGRGPVQILTKQPAEGRSRDGGLRFG

SEQ ID NO: 203249 - protein, 139 aa, Glycine max
  Clone ID: PAT_MRT3847_25559C.1.pep
ALLAIPHPRYPGLTYAFLFAIPAGVYPPIIGILSWVGNNLAPTWKRSVGMALLISIGNLGGAIGSNIFLEAQAPKYWLGYGFCLGILLAGIVATLFLRLAYGSLNKKRDQMTEAEVREQYSEEELLAMGDKSPLYRYVV

SEQ ID NO: 203250 - protein, 430 aa, Glycine max
  Clone ID: PAT_MRT3847_2555C.1.pep
MGNWWLGRTTRVGYSYRSEFLIRWMTSSKRVQDRSKKKRVHDLEVTTEKWKIASKIIYLMELLKQEPEMVIAVRSLEHHRRQINLPKPHRVSDFLRKTPNLFELYKDQKGVLWCGMTSKAENLMEQQQRVIEEHADKVAEHVTRFLMMSLDKRLPLEKIAHFRRDFGLPLDFRVHWVHMYPQHFRVVKALDGVEFLELVSWNPDWAITELEKKVVTEKTATTNTPGMLSIPFPLKFPANYKRVYRYYGEKIQHFQEMSYLSPYADARGLKAGSLEFDKRAVAVMHELLSFTIEKRLVTDHLTHFRWELVMPQKLMRLLLKHCGIFYVSERGKRFSVFLTEAYEGSELIEKCPLVLWKEKVLGLVGYRGRKKKFEVCSDDGSDVEDHDGLVCDQRDSEVGDLHVQIEPRGTLDYEDPLLGDDSEMDVGEIT

SEQ ID NO: 203251 - protein, 99 aa, Glycine max
  Clone ID: PAT_MRT3847_25560C.1.pep
LTIQTTLSETSRYYGRYYKKGPSRALLNWLDHRPSQDQELFACWEAKYMRILRDRPDTDWGALKWDRDHSPDLQFGHGLCGGPINSLPVNGQGINAAIK

SEQ ID NO: 203252 - protein, 217 aa, Glycine max
  unsure (1)..(217): unsure at all Xaa locations
  Clone ID: PAT_MRT3847_25561C.1.pep
MDISQRKRTLLKIIVLGDSGKFSQQYKATIGADFVTKEIQVDDKLVTLQIWDTAGQERFHSLGAAFYRGADCCVLVYDVNIHKTFDTLNNWHDEFLKQGDMNDPEAFPFVLLGNKVDVDGGNSRRMTLRYESILIKFYIQIFEPFHXKVTEKKARDWCASRGNIPYFETSAKEGYNVEEAFLCVAKIALENEHDQDIYFRGISEAVSEAEQRSGCAC

SEQ ID NO: 203253 - protein, 57 aa, Glycine max
  Clone ID: PAT_MRT3847_25562C.1.pep
KPTQNRNGDINESPSTNPDTVTGEETHDRWFRSYILHFRIVLAKVILKNSSLIVSAI

SEQ ID NO: 203254 - protein, 89 aa, Glycine max
  Clone ID: PAT_MRT3847_25563C.1.pep
PVLFTGFVLLCTARSALVCFPGLLFESVTPFFVVVHSHQVFLFNYSWRSAHTACSINPPCIPHSAQVGLKFSVRLSQNLVIFPGTHFAV

SEQ ID NO: 203255 - protein, 85 aa, Glycine max
  Clone ID: PAT_MRT3847_25564C.1.pep
YLLYQSGGWIKFTTKQTKKCNKSKGTLFGQKILTPHFQNFQPSLAPKKGKKKFLQHSKNSRNMASLGPPLGREEKTLAKSCWWFT

SEQ ID NO: 203256 - protein, 124 aa, Glycine max
  Clone ID: PAT_MRT3847_25565C.1.pep
NANVVSAMKEFGIKKVVIMQAFGVGASWPNMACLLRGLMSKTNMSYPYDDPNMTDQKVRKRGVTYVMVRPSRLVETNVESVKEWPQNGKGVPIMASPSRRSVARFLVTAAEESQWDNSAPVISN

SEQ ID NO: 203257 - protein, 386 aa, Glycine max
  unsure (1)..(386): unsure at all Xaa locations
  Clone ID: PAT_MRT3847_25566C.1.pep
MRSLACETKTEFEFDEASSEIVPYVVIFFFHFLKIGCSPTWSSIVKAASFLDRPFKYRVGNDEISVFYDNWLGDGPICDCMDYVHISDTQLLIRDVLVNGQWSWGKFYSIIPDEVKNKMTSLVMDDNSYDIIIWGQLKSGIFTAKSAYEXWIHEPANHSNFPGDWNWVWKLQTPENIKHFTWLILQNSLPTNFFRTKRHISFDPFCCRCGLEDESIIHLLRDCSEAREIWSHINMYADTDFFAMNGDTWFVTQLKXHGVHFACVCWFIWKAGNVEVFEDQVWSAWYTLALLQGSTKVNNTPSHRLVAWTPPVADFVKVNVDGSSXGNPRMSGIGGILRDSNGKWLTGFSSCGGITTNMTAELLAILHGLRVAWNSGFKRVICETDL

SEQ ID NO: 203258 - protein, 90 aa, Glycine max
  unsure (1)..(90): unsure at all Xaa locations
  Clone ID: PAT_MRT3847_25567C.1.pep
VINXQLQXASXXXPLLHSVXXXQPNXLLKHNYKDHXXXHXPSSXSXYWHXTCCSQDIQXQQXXXLXSPQAITRVXMFLPRRFSCSASSTF

SEQ ID NO: 203259 - protein, 302 aa, Glycine max
  Clone ID: PAT_MRT3847_25568C.1.pep
MGFPANGASAAQPLNFLIYGRTGWIGGLLGSLCRAQGISFHYGSGRLENRASLETDIALLKPSHVFNAAGVTGRPNVDWCESHKVETIRTNVVGTLTLADVCRDHGLILINYATGCIFEYDSDHPLGSGIGFKETDSPNFTGSFYSKTKAMVEDLLKNYDNVCTLRVRMPISSDLLNPRNFITKITRYEKVVDIPNSMTILDELLPISIEMGKRNLTGIWNFTNPGVVSHNEILEMYRDYVDPNFTWNNFTLEEQAKVIVAPRSNNELDAAKLKKEFPELLSIKDSLIKYVFEPNQKVKAQV

SEQ ID NO: 203260 - protein, 48 aa, Glycine max
  Clone ID: PAT_MRT3847_25569C.1.pep
MILFGGCESSIPFLDEIFITQFAHIPLTRGSFVWSLLQPRSTAIIDHK

SEQ ID NO: 203261 - protein, 63 aa, Glycine max
  Clone ID: PAT_MRT3847_2556C.1.pep
FCLVILFINFTAEGAESFKSKYRETAEQYRQQGLSFLVRDVKSTKGSFQYFGVKEDQVPLITV

SEQ ID NO: 203262 - protein, 195 aa, Glycine max
  Clone ID: PAT_MRT3847_25570C.1.pep
MRIEILEEEFEEEGMRNSIRCCISCILPCGALDVIRIVHSNGRVEEISGTIKASEIMKAHPKHVLKKPSSPSTQDGVVPKIVVVPPDADLQRGKIYFLMPLPSPPSEKNSSHRQRSSSGKKKRKEPHNDNRNNNNNNNNNNATSVATLLASNERYLTEVLSDKVSTQRDRTRGRVAVWRPHLESIFESPSLPDNM

SEQ ID NO: 203263 - protein, 155 aa, Glycine max
  unsure (1)..(155): unsure at all Xaa locations
  Clone ID: PAT_MRT3847_25571C.1.pep
SKNCFLGVKKGLPNQKNTIXAHGRKDPNEPTGFSFQFCNITADSDLVPWVSSTQSYLGRPWKSYSRTVFMQSYMSEVIRGEGWLEWNGIFALNTLYYGEYMNTGAGAGLANRVKWPGYHPFNDSNQASNFTVAQFIEGNLWLPSTGVTYTAGLIL

SEQ ID NO: 203264 - protein, 45 aa, Glycine max
  Clone ID: PAT_MRT3847_25572C.1.pep
FCRHSVTLGLVNVNSDLICRILHMSPTMLCPSSHLLKGTFFFHTT

SEQ ID NO: 203265 - protein, 39 aa, Glycine max
  Clone ID: PAT_MRT3847_25573C.1.pep
RISLLVLLKRYLKLKKKVIIYHAHTIITLNKILFNSWTR

SEQ ID NO: 203266 - protein, 59 aa, Glycine max
  Clone ID: PAT_MRT3847_25574C.1.pep
GPPLFFFFFFFFLSIARGPFILCSKNDSYLLTRKAQVWRAVIYRCERDDQQQCGVSGSR

SEQ ID NO: 203267 - protein, 42 aa, Glycine max
  Clone ID: PAT_MRT3847_25575C.1.pep
DCFYNMPYSSFILITVMIQKLLHDTNIYNNIKIHFKFFQNLI

SEQ ID NO: 203268 - protein, 135 aa, Glycine max
  Clone ID: PAT_MRT3847_25576C.1.pep
KGLVVPWGSPLKVFAPRAVGFFFPPWGWNSHLKPLGLGVPPIANPCWSDQGPPPKFFPHFWKKGFPPPLFEKNFLGGEVFNLFLKRFLVWAQGFKPPPLPWEPFFVRAPPEGGGFFENFLEFPHLLFPLKAWPCF

SEQ ID NO: 203269 - protein, 356 aa, Glycine max
  Clone ID: PAT_MRT3847_25577C.1.pep
MASTSITTLSIYSHSQPKFLNLLQHPLIHTRNKSTSITFKPAIVRATLFSTLTCSHTHSTPSSNLPPIRALTKFLSEKVAFFLIGSFLLSGCFSKRPAFAETAPSVGSGAVLEEKMNPTEEKNEEEKSEEEVEEMWEGILENYPKNVEALKVVLYGKIRKGKSKEAVKFVEDLIAAEPNEVEWRLLLALCYETMGQLSKAKKLFREILKKRPLLVRALHGLAMAMHKNHEGPAVFEMLNNAQELASRENRVTEERNIRILIAQMHVVQGNLEEGLKRFQELIDQNPRDFRPYICQGIIYSLLGKNEEAAQQFETYQTLVPEEFPQRRFLDDVAIAAKRSSLEQFKKEFRDQFSYRK

SEQ ID NO: 203270 - protein, 56 aa, Glycine max
  Clone ID: PAT_MRT3847_25578C.1.pep
RLNQLVIQIGQSLCSQPGYAGAEWPSTPPGADSGPSVSSAKEPPGDVIDADFSGSK

SEQ ID NO: 203271 - protein, 74 aa, Glycine max
  Clone ID: PAT_MRT3847_25579C.1.pep
HMVWIGFSCFTLVRSRISIIKYGALFWNHLFCSLLRVLGTCWASSLRIDTSLKCFIFPSNLWIEVLMCYIIYTI

SEQ ID NO: 203272 - protein, 81 aa, Glycine max
  Clone ID: PAT_MRT3847_2557C.1.pep
GLLLPKRQLHFLPEQFLKQKPPLQKQRRQQKRLRQQKLIRRVHKLLQMFQRNQRKGENPPKGSKLNGSFKNFTLGKINPGL

SEQ ID NO: 203273 - protein, 80 aa, Glycine max
  Clone ID: PAT_MRT3847_25580C.1.pep
VKLQDLPLVLGACCVLHNICELKNEEMDHELLKNIDDGDDDYVGEVMEPEVAMRSVSSLKARDAIAHNLLHHGLAGTSFV

SEQ ID NO: 203274 - protein, 33 aa, Glycine max
  Clone ID: PAT_MRT3847_25581C.1.pep
TLGNLPFRRNPRFSSHKSLFSSPFSGFGVKITD

SEQ ID NO: 203275 - protein, 42 aa, Glycine max
  unsure (1)..(42): unsure at all Xaa locations
  Clone ID: PAT_MRT3847_25582C.1.pep
XIXAXSTLEAXTTKXXGXEXTXXQRFXXRAAVTTPRMNGVXV

SEQ ID NO: 203276 - protein, 57 aa, Glycine max
  unsure (1)..(57): unsure at all Xaa locations
  Clone ID: PAT_MRT3847_25583C.1.pep
MKIKVRCFFFATIFVAWQFHSYHMFPLRMNTCYCARYSEVKCASWKLCFXSHNIFGF

SEQ ID NO: 203277 - protein, 361 aa, Glycine max
  Clone ID: PAT_MRT3847_25584C.1.pep
MALSVCSMNINPIALAAPSFSFKSLKFPSFWPTQKVKMGPLSVSPMGFGTWAWGNQLLWGYQESMDNELQQIFNLAMDNGINLFDTADSYGTGRLNGQSEKLLGRFIREFQEQKGSQREIVIATKFAAYPWRLTPGQFVSACRASLDRMQIEQIGIGQLHWSTANYAPLQEFALWDGLVAMYEKDLVKAVGVSNYGPKQLLKIHDYLKDRGVPLCSAQVQFSLLSTGKDQLEIKSICDSLGRSSGAYSPLGLGMLTGKYSSSKLPSGPRALLFKQILPGLDPLLSSLREIANKRRKTMSQVAINWCICKGTVPIPGVKTIKQAEENLGALGWRLSSDELLQLEDAANESPRRMIQNIFQTR

SEQ ID NO: 203278 - protein, 211 aa, Glycine max
  Clone ID: PAT_MRT3847_25585C.1.pep
MQMSRFTQFRALLRGTTSHQRSPLRHPAVADSSFASKPSVSNASAFRASSPVFHPQQRLGNSTFRFFSSNFDKGFAQKVFDKPAAAVTSAFSRYREAIGLQIEAFFKRNTLFLWGAGGVVLCAVLWRILFGIANLFVGLSEGMAKYGFLALSSAIVAFTGLYIRTRLTINPDKAYRMAMTKLNTSAGILEVMGAPLSGTELCCESMLCPTR

SEQ ID NO: 203279 - protein, 243 aa, Glycine max
  Clone ID: PAT_MRT3847_25586C.1.pep
MEDPNQAPEGSSQKKMGRGKIEIKRIENTTNRQVTFCKRRNGLLKKAYELSVLCDAEVALVVFSTRGRLYEYANNSVRATIERYKKANAAASNAESVSEANTQFYQQESSKLRRQIRDIQNLNRHILGEALGSLSLKELKNLEGRLEKGLSRVRSRKHETLFADVEFMQKREIELQNHNNYLRAKIAEHERAQQQQSNMNMSGTLCESLPSQSYDRNFFPVNLIASDDQQQYSRQDHTALQLV

SEQ ID NO: 203280 - protein, 242 aa, Glycine max
  Clone ID: PAT_MRT3847_25587C.1.pep
MEDPNQAQEGSSQKKMGRGKIEIKRIENTTNRQVTFCKRRNGLLKKAYELSVLCDAEVALVVFSTRGRLYEYANNSVRATIERYKKANAAASNAESVSEANTQFYQQESSKLRRQIRDIQNLNRHILGEALGSLSLKELKNLEGRLEKGLSRVRSRKHETLFADVEFMQKREIELQNHNNYLRAKIAEHERAQQQQSNMMSGTLCESLPSQSYDRNFFPVNLIASDDQQQYSSQDHTALQLV

SEQ ID NO: 203281 - protein, 216 aa, Glycine max
  Clone ID: PAT_MRT3847_25588C.1.pep
MQLQPTLSTLYLSLLLTITLTSPTLAAQSKPQDLVRSSCVHARYPRLCLRTLSNYPGPANTPLDVARAALRVSLAHTRRASKFLHALSHGGAAAMSKRQRSALRDCNEQISDSVDQLRRSLDELQHLRSETFKWQMSNALTWVSAALTNGDTCLDGFGGNARPDVKRRVTDVARVTSNALYMINRLGQSRTGKPKPKPKPRSRPQPRSASSTEKLN

SEQ ID NO: 203282 - protein, 528 aa, Glycine max
  Clone ID: PAT_MRT3847_25589C.1.pep
PRVRQSPGIYYRSELDPSGISVYTGTIISDWGGRLELEIDRKARIWARVSRKQKISILVLLSAMGLNLSEILENVCYPEIFVSFLNDKDPKKIGSKENAILEFYRQFACVGGDPVFSESLCKELQKKFFQQRCELGRIGRRNMNQKLNLDIPQNNTFLLPRDILTAADHLIGMKFGMGILDDINHLKNKRIRSVADLLQDQFGLALVRLENMVRGTICGAIRHKLIPTPQNLVTSTPLTTTYESFFGLHPLSQVLDQTNPLTQIVHGRKLSYLGPGGLTGRTASFRIRDIHPSHYGRICPIDTSEGINVGLIGSLAIHARIGSLGSIESPFYEISERSTAAKDDRRAPSRDEYYMVATGNSLALNRDIQEEQTVPARYRQEFLTIAWEQVHLRSIFPFQYFSIGASLIPFIEHNDANRALMSSNMQRQAVPLSQSEKCIVGTGLERQVALDSGVSAIAEHEGNIIYTNTDRIFLFGNGDTLSIPLTIYQRSNKNTCMHQKPQVRRGKCIKKGQILADGAATVDGELAL

SEQ ID NO: 203283 - protein, 65 aa, Glycine max
  Clone ID: PAT_MRT3847_2558C.1.pep
ERKNKKDLSKENNKRPSSPKGKIPFSVSKPNLKTAEVIGGFQSFHPSDIYLGEKAPKNVKIQGIW

SEQ ID NO: 203284 - protein, 79 aa, Glycine max
  Clone ID: PAT_MRT3847_25590C.1.pep
CRADCRHCRYRSSCKCRNRYCGCNMYSHMNYTESTTNVTLVIGVGPVNAQFDGAELGVCAENDCCKCGPNCSCYPCTCK

SEQ ID NO: 203285 - protein, 109 aa, Glycine max
  unsure (1)..(109): unsure at all Xaa locations
  Clone ID: PAT_MRT3847_25591C.1.pep
WKIHRDPRVWQEPSAFRPERFFPSDAVDVKGQXNFELIPFGSGRRSCPGMSFALQVLHLTLARLLHAFEFATPSDQPVDMTESPGLTIPKATPLEVFLTPRLPAKLYAC

SEQ ID NO: 203286 - protein, 43 aa, Glycine max
  unsure (1)..(43): unsure at all Xaa locations
  Clone ID: PAT_MRT3847_25592C.1.pep
XLRFRKSCFXICSTNSLILQTFAFNTIVMQNDKVQQNLVLENS

SEQ ID NO: 203287 - protein, 68 aa, Glycine max
  unsure (1)..(68): unsure at all Xaa locations
  Clone ID: PAT_MRT3847_25593C.1.pep
FEARDLFXGHYKIIIQNNQXPLRPLLFXTTKNKTXXTXPFKLNXNTLXNPHTRESTFTKXIKKKFLPS

SEQ ID NO: 203288 - protein, 36 aa, Glycine max
  unsure (1)..(36): unsure at all Xaa locations
  Clone ID: PAT_MRT3847_25594C.1.pep
SCFSCHILLIXSCYLXSXLQSLIVYQSYWAVEVEGK

SEQ ID NO: 203289 - protein, 68 aa, Glycine max
  Clone ID: PAT_MRT3847_25595C.1.pep
KVIQPGMFVRVGATLGVHNVALNFMCPANSSRRNKVIMAMGGYTNPSKKALADMRAVPPIEEFLLFKF

SEQ ID NO: 203290 - protein, 50 aa, Glycine max
  Clone ID: PAT_MRT3847_25596C.1.pep
KPNLRGVYFMHNLLLGCNLNKMQSANLQKWSPLYFMTPVPSYMIKCLLVC

SEQ ID NO: 203291 - protein, 50 aa, Glycine max
  unsure (1)..(50): unsure at all Xaa locations
  Clone ID: PAT_MRT3847_25597C.1.pep
MRNHGKAIYSAGNWIRGTXQAIDHLGXRLQGGYYIHKQLSRHRTLMNIFA

SEQ ID NO: 203292 - protein, 61 aa, Glycine max
  Clone ID: PAT_MRT3847_25598C.1.pep
VSPTRTLTCTICNSSQWIRFPEVFMRAPIEQQIGHVLVLVVVVIQFARYLCKEPVMIISGD

SEQ ID NO: 203293 - protein, 98 aa, Glycine max
  Clone ID: PAT_MRT3847_25599C.1.pep
VYEESERKWTQPTAPVPSCISSHLTAFKFREYGGSKYELELTKYILKNAKVLKTVTVKMAKWLEPNKTSHAMTKLDSLLSSSKYCRLANYQILCQDFP

SEQ ID NO: 203294 - protein, 74 aa, Glycine max
  unsure (1)..(74): unsure at all Xaa locations
  Clone ID: PAT_MRT3847_2559C.1.pep
PPDLTAPCFISPPALWYAMPMIWRSLHMSLIDTLXHIPFDICWHGYMSRCCIGNASGPSVHRLEKKCRGADTKH

SEQ ID NO: 203295 - protein, 71 aa, Glycine max
  Clone ID: PAT_MRT3847_255C.1.pep
NMLVRIPSKHNLESISMIKIYVTHTKLKEKTFDLGCRGEEYDDAIKKPEKVSRKVKESQGISMSERNTKGK

SEQ ID NO: 203296 - protein, 208 aa, Glycine max
  Clone ID: PAT_MRT3847_25600C.1.pep
MATYTKSTIVKGVKSSAQDVSSKPKIDSLALKKKLNTSIKRPPDSNLKSVTTTVTKSEVKSKPVTASSASSKTITTTTTTKTKVREKKVYSLPGQKHDPPEQKEPLRIFYESLSKQMPTSEMAEFWLMEHGLLSPEKAKKAFEKKQRKQKELRTGTPVKLSKPPTKTATSQKQQQVSKNGDIKAKKRIVNESDDDDDDFILSHKRRKW

SEQ ID NO: 203297 - protein, 287 aa, Glycine max
  Clone ID: PAT_MRT3847_25601C.1.pep
MEGRDEDVRVGANRYGERQPIGTAAQTQDAKDYREAPPAPLFEPRELTSWSFYRAGIAEFVATFLFLYVTVLTVMGVAKSPSKCSTVGVQGIAWSFGGMIFALVYCTAGISGGHINPAVTFGLFLARKLSLTRTVFYMIMQCLGAICGAAVVKGFQSNQYERLGGGANTLNKGYSKGDGLGAEIVGTFILVYTVFSATDAKRNARDSHVPILAPLPIGFAVFLVHLATIPITGTGINPARSLGAALVYNKDQAWDNHWIFWVGPFIGAALAALYHQIVLRAIPFKSK

SEQ ID NO: 203298 - protein, 95 aa, Glycine max
  Clone ID: PAT_MRT3847_25602C.1.pep
PRVRKTQLILQQLKHQIRKGIPIIGAGAWTGISAKFEEAGGVDLIVLYNSGRFRMAGRGSLAGLLPFSDANAVVLDMANEVLPVCLYFFTCSMTL

SEQ ID NO: 203299 - protein, 84 aa, Glycine max
  Clone ID: PAT_MRT3847_25603C.1.pep
MTALVTLGPPGALHSFLSAPSRSHREPPLPIGFLSSALSSRPQFLMHRLLFRDVEFHISFFMNAQTVHVHIRVFHGIPSANKQL

SEQ ID NO: 203300 - protein, 98 aa, Glycine max
  Clone ID: PAT_MRT3847_25604C.1.pep
MEHPDVYVDGLRIHEEADMEFNIPEPTENEHKTYHFLLKPLKESKRIKRAGGQATEVHFKRCIRNWGLELKAELRKPIGRGGSRWLRDGADKKEWSAP

SEQ ID NO: 203301 - protein, 111 aa, Glycine max
  unsure (1)..(111): unsure at all Xaa locations
  Clone ID: PAT_MRT3847_25605C.1.pep
CLPIRTKAPASTRDALPYRSTLGLITRPVASSDEIQLHIYPCINFHDXITRLRGQIKKLKNVAXRYAHKSXFQTNYLEHAQMVMIQAQALVKNNLRRLNTSIFKNASNNIV

SEQ ID NO: 203302 - protein, 101 aa, Glycine max
  Clone ID: PAT_MRT3847_25606C.1.pep
PETSQKLRKEQRNKKRNAHTRTRMFARCTAHCASFQFIEYPTPVLLFLCTLSYQIFELLTVLELSCQYIVTSVIAWCFIVSAVTEQPTALLRKCVREKYKL

SEQ ID NO: 203303 - protein, 83 aa, Glycine max
  Clone ID: PAT_MRT3847_25607C.1.pep
GISTLIKQLHSLHHPHLNSLYGNPPGMPPTPPTPPKFTPRPPDKPAPVTSFSSLAATSEEMKRSMASRPKISNAIFLFESIFQ

SEQ ID NO: 203304 - protein, 168 aa, Glycine max
  Clone ID: PAT_MRT3847_25608C.1.pep
GISTLIKQLHSLHHPHLNSLYGNPPGMPPTPPTPPKPVFEKPPPTPPPKPGKMPGNPVPGNPVPGNPVPGNPVPGNPGPPENPGKPGNPRKLGNPGKKRGKPLLKPKRKPGPPPMPPKPPKFTPRPPDKPAPVTSFSSLAATSEEMKRSMASRPKISNAIFLFESIFQ

SEQ ID NO: 203305 - protein, 43 aa, Glycine max
  unsure (1)..(43): unsure at all Xaa locations
  Clone ID: PAT_MRT3847_25609C.1.pep
LALKNKIVFLFSLLQWLSVSSSKDLVSLHESYINQHFLXXXXX

SEQ ID NO: 203306 - protein, 99 aa, Glycine max
  Clone ID: PAT_MRT3847_2560C.1.pep
TNNFFKKGGKRKFFKKKRPPPLQKKSRWPTKQNSTKLPSPPFSPYSPRQNFFCTPGIFPPLGFKKPLTPLKKSTPPPLHDYYCLKPPRCLQRLQKPPFS

SEQ ID NO: 203307 - protein, 42 aa, Glycine max
  Clone ID: PAT_MRT3847_25610C.1.pep
LGGISVKELPAGNISLSVAKFMTNESRNPYRNKLCRRKGQEH

SEQ ID NO: 203308 - protein, 43 aa, Glycine max
  Clone ID: PAT_MRT3847_25611C.1.pep
ARGCGVNIPYKISNSTNCATYVKLTTHSICFILISSHISFKIS

SEQ ID NO: 203309 - protein, 58 aa, Glycine max
  Clone ID: PAT_MRT3847_25612C.1.pep
EKMGQDSLGCASYRNSLIVFKRCEMNYSPVSLYNVASLWVGVYFWFFTVQWAGLLLTP

SEQ ID NO: 203310 - protein, 102 aa, Glycine max
  Clone ID: PAT_MRT3847_25613C.1.pep
MVGGLLGSLLLKPLFFNRNKACSRKREEIMGSKNTSQSHASYLEDSTRFVFLPELGFVQKEFNALQQLALFCHNHLENPRHISFRFDHAVSVCLTLGIWQKI

SEQ ID NO: 203311 - protein, 84 aa, Glycine max
  Clone ID: PAT_MRT3847_25614C.1.pep
MVALPSVEVRHDGRECVICKEEMGIGRDVCELPCQHLFHWMCILPWMGKRNTCPCCRFRLPSDDVFGEIQRLWEVLVKMTAKDS

SEQ ID NO: 203312 - protein, 53 aa, Glycine max
  Clone ID: PAT_MRT3847_25615C.1.pep
LQPEFLSLLVCKLMSSSYLTRQHSWLHDIIELIASYKCKYCSRCTLLNFLGKL

SEQ ID NO: 203313 - protein, 65 aa, Glycine max
  Clone ID: PAT_MRT3847_25616C.1.pep
PRVRSAARRLQKGHFLFHLISIFWGSLKLRHCFPPFKLWLGCWILLFGIAIFFLYIFIHFLCGHL

SEQ ID NO: 203314 - protein, 74 aa, Glycine max
  Clone ID: PAT_MRT3847_25617C.1.pep
LIYMGVRNEGARVVPATALETKLSNTAMDDPSPMIEFKKRGVSSHTPMASSTITTDCPLSRATKESQGVLSELH

SEQ ID NO: 203315 - protein, 126 aa, Glycine max
  Clone ID: PAT_MRT3847_25618C.1.pep
MFVEQPVADISTDIEAVEPFIGMEFNSREEAREFYIAYGRRIGFTVRIHHNRRSRVNNQVIGQDFVCSKEGFRAKKYLHRKDRVLPPPPATREGCQAMIRLALRDRGKWVVTKFVKEHTHKLMSPQ

SEQ ID NO: 203316 - protein, 144 aa, Glycine max
  unsure (1)..(144): unsure at all Xaa locations
  Clone ID: PAT_MRT3847_25619C.1.pep
HPPIWAIEFLGISFGGPQRSIPGAPRKNKHPGGAFVPLGCFEGPGSFPGPRAWGLWXGRPALWAFVGFCVPPSGFSRPGLFGLFWVPLWVSPGPPPLGPFFFPLWFWPWEEHFRFLFLWPPVFFLAPFCPASGCPVGPLVGCSL

SEQ ID NO: 203317 - protein, 221 aa, Glycine max
  Clone ID: PAT_MRT3847_2561C.1.pep
EVMDMEEISELNLDGFSSSHEVLESEQKNMGTQRILVSDHTNGYQYSAEEADSFVIDMDSFSSGINKDSTKANSRITLQRSLSRKGSQRGGDRKVNGNVTLHDRDTAPTTCSPKAALAGSCTAEKSAVVAVGSTHHSTNTQVHHQITITASNMCTTTTPTTESKCITRRNSFKRSSSWLLDPKRVLLFFATLSSMGTMLLIYFTLTLSKQNADEYGGDWQQ

SEQ ID NO: 203318 - protein, 58 aa, Glycine max
  Clone ID: PAT_MRT3847_25620C.1.pep
QKGRESIKETATNIGASAKGGMDKTNATGQQKAEIMTALDPVQNELSTQHKEAHMNQA

SEQ ID NO: 203319 - protein, 50 aa, Glycine max
  Clone ID: PAT_MRT3847_25621C.1.pep
PLPKAGFLKTGRFSFFFFFFFLKGDNYYKIFYPYEKNLRMQCEVLIIEEG

SEQ ID NO: 203320 - protein, 69 aa, Glycine max
  Clone ID: PAT_MRT3847_25622C.1.pep
LNFFPDSERVKRPFPNLVKDMMYFDLSLRTEVENAELLIFPSKLLPIQCRRFQEKYYLWGVFKAKKPSL

SEQ ID NO: 203321 - protein, 59 aa, Glycine max
  unsure (1)..(59): unsure at all Xaa locations
  Clone ID: PAT_MRT3847_25623C.1.pep
NRKPFVKGEILGGKILALFCLSINQTSTXIVLIHSLSYIPNLSLVNIIIPQSSFSPQKN

SEQ ID NO: 203322 - protein, 40 aa, Glycine max
  unsure (1)..(40): unsure at all Xaa locations
  Clone ID: PAT_MRT3847_25624C.1.pep
TSSFINTHPRVRALHIHCNKYXSYSHPSLPXLSLPLVPNS

SEQ ID NO: 203323 - protein, 49 aa, Glycine max
  Clone ID: PAT_MRT3847_25625C.1.pep
KTHFTSSFTKEPYVLVFGKLRTLFKTMAFFTKLALGLLISFLFIHAFLT

SEQ ID NO: 203324 - protein, 130 aa, Glycine max
  Clone ID: PAT_MRT3847_25626C.1.pep
SLLFSSLSLQFIFLSFFNNEREREKRSSVQFNSPLSFPNPIATSILLHFSLFSLSDNNYFVVTNSLTGVASSRFVPSPESVRFPFEGLTAPTPMSVYLVIGSSSSIIGFRSCFTNRARLRCPAKILFATG

SEQ ID NO: 203325 - protein, 78 aa, Glycine max
  Clone ID: PAT_MRT3847_25627C.1.pep
RTWYPACDGYLYLPEHHIPDANGFKGSYLPHIRKLSSWLITVTNAVPTENYHAPTWLTYLTAPDLSRWCAQTCGAGLP

SEQ ID NO: 203326 - protein, 67 aa, Glycine max
  Clone ID: PAT_MRT3847_25628C.1.pep
HMQEHSSLYECDEADKHSAMRTTNYFLHDIQTPQVLIRLCTTLSSLYDPHDYVCIDSIVVLHLIPPQ

SEQ ID NO: 203327 - protein, 152 aa, Glycine max
  unsure (1)..(152): unsure at all Xaa locations
  Clone ID: PAT_MRT3847_25629C.1.pep
HKAAGAFGGIRIWSRPQIPVPFPSPAGDITILAGDWFKLDHRRLRRLLENGHNLPFPDGLLINGRGWNGNTFTVDQGXNLTASGPRPNPQGSYHYGLIKPSRTIMLANSAPYINGKQRYAVNGVSYNEPDTPLKLADYFNIPGVFYVGSIPT

SEQ ID NO: 203328 - protein, 142 aa, Glycine max
  unsure (1)..(142): unsure at all Xaa locations
  Clone ID: PAT_MRT3847_2562C.1.pep
LKFLSVIASSANLVSNFLFLSFAPILGFIIHTTNYLIRSILISGISHCCQSLPYSSAFCLLIVRVKYISNIVPMLDKVAKRRRTLLGSRSHEEGRLKLFLRVINLLSLGVGXGGAHVTGSNSNLMMNLCVCGMMCGPYCHHR

SEQ ID NO: 203329 - protein, 76 aa, Glycine max
  Clone ID: PAT_MRT3847_25630C.1.pep
MCKLLDINKVHWGQILSHVGLGSLFNLIRFIFITKYVSGGCNFVFNQIRLIVNMLRSFELEMYSQITQVCMACIRC

SEQ ID NO: 203330 - protein, 549 aa, Glycine max
  Clone ID: PAT_MRT3847_25631C.1.pep
MRPCKCKCNVLSALILLVTFLFIASSVHCEDPYRYLTWKVTYGDIYPLGVKQQGILINGQFPGPQIDAVTNDNLIINVYNYLREPFLISWNGLQHRRNSWQDGVYGTNCPIPPGRNLTYAIQVKDQIGSYFYFPSLGMHKAAGAFGGIRIWSRPHIPVPFPSPAGDFTILAGDWFKLDHRRLRRLLENGHNLPFPDGLLINGRGWNGNTFTVDQGKTYRFRISNVGLTTSINFRIQGHSLKLVEVEGSHTLQNSYSSLDVHLGQSYSVLVTADQPVKDYYMVVSTRFTRRILTTTSVLHYSYSKTGVSGPVPPGPTLDIASSVYQARTIRWNLTASGPRPNPQGSYHYGLIKPSRTIMLANSAPYINGKQRYAVNGVSYNEPDTPLKLADYFNIPGVFYVGSIPTYPNGGNNAYLQTSVMGANFHELVEIVFQNWEDSVQSWHIDGYSFFVVGYGSGQWTADSRVQYNLRDTVARCTTQVYPRSWTAIYMALDNVGMWNIRSENWGRQYLGQQLYLRVYTPSKSWRDEYPVPKNALLCGRASGRRTRPF

SEQ ID NO: 203331 - protein, 79 aa, Glycine max
  Clone ID: PAT_MRT3847_25632C.1.pep
DTVARCTTQVYPRSWTAIYMSLDNVGMWNIRSENWGRQYLGQQLYLRVYTPSKSWRDEYPVPKNALLCGRASGRRTRPF

SEQ ID NO: 203332 - protein, 77 aa, Glycine max
  Clone ID: PAT_MRT3847_25633C.1.pep
KTPQSSIYMISISSTAVSIRSLADLNARTIIQSTYSAKDSASQATRFYIINAYLKDIVVTLMATSAITILASNTMAI

SEQ ID NO: 203333 - protein, 48 aa, Glycine max
  Clone ID: PAT_MRT3847_25634C.1.pep
AFLVGFFICTTLAKVVFWFNVTDFVIYERSCPIKKKKKKKKKKKIKPP

SEQ ID NO: 203334 - protein, 91 aa, Glycine max
  Clone ID: PAT_MRT3847_25635C.1.pep
KAFFSISVTPSISTGILRFLTTFLTVNSLKGLFPKKTILLNGSTKNFFPNGKGFFPTLTVLINTFPPTMFLVKEIRFPFQVHPTKSQYSST

SEQ ID NO: 203335 - protein, 72 aa, Glycine max
  Clone ID: PAT_MRT3847_25636C.1.pep
KREVPTNVQNCVGLPSKKKNVIVALPHQILKNVQYLPLGFRLKKEVFPPLFLAQIYLWDGPVEPSRAPFFHG

SEQ ID NO: 203336 - protein, 54 aa, Glycine max
  Clone ID: PAT_MRT3847_25637C.1.pep
FPLFIFRGYYKCSSMRGCPARKHVERCLEEPTMLIVTYEGEHNHPKLPTQSANA

SEQ ID NO: 203337 - protein, 46 aa, Glycine max
  Clone ID: PAT_MRT3847_25638C.1.pep
MESESLIWGDKLTQTGLSIVGFHGALPEERNLRQKFMVDVDAWMDL

SEQ ID NO: 203338 - protein, 105 aa, Glycine max
  unsure (1)..(105): unsure at all Xaa locations
  Clone ID: PAT_MRT3847_25639C.1.pep
SARSSRIGSRAEVKEDLTAEEAFESKKHKLAELGNALLTDPESNIKFLKETMQISKDNDXYRIRLPTEKELEMKVSKTVRKMRYYESSLLSAYKVHINAQVLRLL

SEQ ID NO: 203339 - protein, 142 aa, Glycine max
  unsure (1)..(142): unsure at all Xaa locations
  Clone ID: PAT_MRT3847_2563C.1.pep
GSSVTRIFVCAQLALQAAQEASQAKTARDLSHELHEADATLEELPAMVAKRFRKPSTEEKRXLEIALTRMPPEDPSTALEIVXQNNPSFPATAEXVELDMDAHNESTLGRIKPSCSGGSYHVAGPRTSRNPCGGHMSISPHS

SEQ ID NO: 203340 - protein, 45 aa, Glycine max
  Clone ID: PAT_MRT3847_25640C.1.pep
INLYATGLVSEFNLCADNHLRQHEVKPISPPRYNTAQYTAIMPRY

SEQ ID NO: 203341 - protein, 57 aa, Glycine max
  unsure (1)..(57): unsure at all Xaa locations
  Clone ID: PAT_MRT3847_25641C.1.pep
LXYRPIWXIDXKPVTWGYVSALIRESLCETSLYIWLWLYFCHYREAGADGLVVLSFV

SEQ ID NO: 203342 - protein, 85 aa, Glycine max
  Clone ID: PAT_MRT3847_25642C.1.pep
SRDPPGYRNVEHGSKAATFARTGRSSGNISNPPLTQYLETFSSEPFALEQPRLLIPLRYYARLLSPTARALNRHRGPDTHRQKPA

SEQ ID NO: 203343 - protein, 65 aa, Glycine max
  Clone ID: PAT_MRT3847_25643C.1.pep
KGVPSFWSEINFLKFLKKKKKPFDTLFFGTFQIMNAQWRSKREQKKEFNHVLKPPKTHLKRDLPF

SEQ ID NO: 203344 - protein, 56 aa, Glycine max
  Clone ID: PAT_MRT3847_25644C.1.pep
NLTIPIIFKAPQEKDSQKKEGKMVFMKTNQQIDPKPSLGAKFLNCFKLTQNSFEIQ

SEQ ID NO: 203345 - protein, 93 aa, Glycine max
  Clone ID: PAT_MRT3847_25645C.1.pep
MAASSSSASLFGFREEDQNQMKQQHSLTPSSSTTPAAPPPQKKKRNQPGTPYPDAEVIALSPKTLMATNRFICEVCNKGFQREQNLQLHRRGH

SEQ ID NO: 203346 - protein, 82 aa, Glycine max
  unsure (1)..(82): unsure at all Xaa locations
  Clone ID: PAT_MRT3847_25646C.1.pep
DLYFENSNYSSIWTLGFIKMRKRQVLKHSIAIVSMLVCVCCFFIVSVTVFKLPEAPRKDRQMGFYPTIRSRKVSLQDXNLGK

SEQ ID NO: 203347 - protein, 281 aa, Glycine max
  Clone ID: PAT_MRT3847_25647C.1.pep
MGRHSCCYKQKLRKGLWSPEEDEKLLRHITKYGHGCWSSVPKQAGLQRCGKSCRLRWINYLRPDLKRGTFSQEEENLIIELHAVLGNRWSQIAAQLPGRTDNEIKNLWNSCLKKKLRQKGIDPVTHKPLSEVENGEKAAEVSNELNLLKSESSKSDSASYEQRTSISPKAYAPEMDGSCSSKIEINFVTNNNCYNKDLFLDRFMSSSRQESYTTSCQPSDLMGNFPIQMSYATNDHCLPNDSNSSHWFSQTGRSFDMNTDVSFQCRCHFYQSYTYNQLVSS

SEQ ID NO: 203348 - protein, 385 aa, Glycine max
  Clone ID: PAT_MRT3847_25648C.1.pep
TAARRRQKGNYLRPDLKRGTFSQEEENLIIELHAVLGNRWSQIAAQLPGRTDNEIKNLWNSCLKKKLRQKGIDPVTHKPLSEVENGEKAAEVSNELNLLKSESSKSDSASYEQRTSISPKAYAPEMDGSCSSKIEINFVTNNNCYNKDLFLDRFMSSSRQESYTTSCQPSDLMGNFPIQMSYATNDQCLPNDSNSSHWFSQTGRSFDMNTEFPFNAAVTSINPTPTTNLFLPNNSFCYKPSLAVPSDNVSIPYGSHYWEASASNNSNSSTELRSSSPLNIFSSWGLADCGTSTTKEAQIHMMENHNTEEAKWDEYLHNPISMLASSVQNQAPESLCNDIKTSMHLVPDTLGAMLPHNHTKQQEQSQTSSFFSKDIQKLRAAFGHM

SEQ ID NO: 203349 - protein, 75 aa, Glycine max
  Clone ID: PAT_MRT3847_25649C.1.pep
MSCCGGTWGCGSSCRCGTGCGGCIISPNLCSTESTPPEPLVMGVAPVKAQLGVAEMGVPPWNDGFNFGPNCSCNP

SEQ ID NO: 203350 - protein, 105 aa, Glycine max
  Clone ID: PAT_MRT3847_2564C.1.pep
TDSTPVLSGGEPIELLPLVTNALRNTDRPVGPGPVALWSTHDRFLSGRMALPFPVTATYLGKFLTLANSFAGPRIEQSRISSDSTPPDPTAITGIIIVFTVPGDF

SEQ ID NO: 203351 - protein, 121 aa, Glycine max
  Clone ID: PAT_MRT3847_25650C.1.pep
AGLGKISSDERARDHALEHSHGSSSSHNKGIEDEISVQDARAIKYQALEISASKSRFSREPLVPRVQVVLPSEPSQLDLMCSLLAAPRSVSNAPRWSIMIFHHSQPGSEHVVPVYRHFDKC

SEQ ID NO: 203352 - protein, 100 aa, Glycine max
  unsure (1)..(100): unsure at all Xaa locations
  Clone ID: PAT_MRT3847_25651C.1.pep
ARNSARXXXXXXXXXTGSSSXXXWXAXXXHGXLXXSNNAXYAXDGGIXXIXMXXXRXGXCXWXGYXXKCXRXHXPSVLXTSPQRNAAXAAXXYXRSXXXL

SEQ ID NO: 203353 - protein, 89 aa, Glycine max
  Clone ID: PAT_MRT3847_25652C.1.pep
YHTMPHDVLGSIVDFRKPNIFLKWFTQQWQIPQQFIFIHAFHRTVSLARRCMVTPSIQGSQLCQISTVVHPPSRLPHAFTSLCINKKHR

SEQ ID NO: 203354 - protein, 186 aa, Glycine max
  Clone ID: PAT_MRT3847_25653C.1.pep
MNYHSRADSARGAPMLMYSSGNPTNIANPIKDASARVDIKTSSGRLTLFETTLCEKISWEKLEARKSLDPLGYLRAYNEKDIQLICCQSEASTLWLVPPIVQARFIKSLRWNMDITFSWEFIRDRPKGKEAVKYELTILEQDLPKSSEVTKVFNGSSNSFTVFNIYPRYFRVTGSGDVPSLNSRWS

SEQ ID NO: 203355 - protein, 47 aa, Glycine max
  unsure (1)..(47): unsure at all Xaa locations
  Clone ID: PAT_MRT3847_25654C.1.pep
RPDHHPFYXAQIQIPVQLHRHRWCTFFRRLFRSRNSSEHCFFLANLQ

SEQ ID NO: 203356 - protein, 56 aa, Glycine max
  unsure (1)..(56): unsure at all Xaa locations
  Clone ID: PAT_MRT3847_25655C.1.pep
KHIDYVINRPXTVICSLKRILASAETHEHPRQKQQXNEYDRKSQGQERELLDPEWN

SEQ ID NO: 203357 - protein, 97 aa, Glycine max
  Clone ID: PAT_MRT3847_25656C.1.pep
MAKRLIPCFNRILVEKIVPPSKTSAGILLPEKSSQLNSGKVIAVGPGSRDQAGNLIPVSVKEGDHVLLPEYGGTQIKLDDKEFHLFRDEDILGILHD

SEQ ID NO: 203358 - protein, 86 aa, Glycine max
  Clone ID: PAT_MRT3847_25657C.1.pep
RRKLGIRLEESICIQKMVNHVSNYSPLFIILVLLVKGQIEVQGDLCVKALNYCETQDDCKLKCIAPRKDGFAYCDNTHTCSCFFYC

SEQ ID NO: 203359 - protein, 228 aa, Glycine max
  Clone ID: PAT_MRT3847_25658C.1.pep
MVSLRRRRLLGLCSGNSSFVTPLPLYCENLSGFENSNQQAKPKSEQPALSDDASNPDSNNAVQEEPGSSNASGSSSSKEQLIQQITGPPIKRRKRHRRKNLHNQEQCIMRGVYFKNMKWQAAIKVDKKQIHLGTLGSQEEAAHLYDRAASMCGREPNFELPEEEKRDLSKFKWDEFLAMTRQAITRKKHKRRLSPGPGNSHDMLPLSKDDWDTKQGVIEDAEQETSVS

SEQ ID NO: 203360 - protein, 100 aa, Glycine max
  unsure (1)..(100): unsure at all Xaa locations
  Clone ID: PAT_MRT3847_25659C.1.pep
KHGTHQFFFHKNGGVTASWPKSYLCPCHGDFFSXFSIFPYQIFGLPTLCIARTLKKDIYQLYSSYFFFFPPFLNYPTVYFFILFYFIIYQIRVSFCGLCE

SEQ ID NO: 203361 - protein, 60 aa, Glycine max
  Clone ID: PAT_MRT3847_2565C.1.pep
KGTRRVVDMAKKNLRDLNAVDLNGKKVLVKDDLNIPVDDNQNIAVDTIIHAVLTSIKDII

SEQ ID NO: 203362 - protein, 84 aa, Glycine max
  unsure (1)..(84): unsure at all Xaa locations
  Clone ID: PAT_MRT3847_25660C.1.pep
MERGARWHRRWENMIANSCEMXDNENMSDALAPELVXSTASVEILTRCHITTSNCXNSQVILYRRTQTVPMTVDQXPDRQDVLL

SEQ ID NO: 203363 - protein, 74 aa, Glycine max
  unsure (1)..(74): unsure at all Xaa locations
  Clone ID: PAT_MRT3847_25661C.1.pep
LLSXASILQLTLPRLTSTLHGITLDLPIIITLLLTLIMTADILAKNLTPITLPIITITLNTIRNAPYNVPFSSH

SEQ ID NO: 203364 - protein, 33 aa, Glycine max
  unsure (1)..(33): unsure at all Xaa locations
  Clone ID: PAT_MRT3847_25662C.1.pep
EKNNAQVXXTLTISNNELHFVDPIPIYSSVFPH

SEQ ID NO: 203365 - protein, 90 aa, Glycine max
  Clone ID: PAT_MRT3847_25663C.1.pep
LPTIFFFLVRLSLGYNGFMNNCKFFSPNNCVKLVLGSSVGVLVSVFFLSLPPLVQLLMLSLPQQALRPLPHCLFKGLPGLKKKMGRTILG

SEQ ID NO: 203366 - protein, 143 aa, Glycine max
  Clone ID: PAT_MRT3847_25664C.1.pep
SLKLGMTIPTAFRIALETWSSWVDREINKNRTRIFFRTFEPSHWSDLTRWICNVTQYPTLETNGRDQSLFSDTILQVVKNVTIPINVLHVTSMSAFRSDAHVGNWSDNPSIQDCSHWCLPGVPDMWNEIILSQLFTEFEIPSQ

SEQ ID NO: 203367 - protein, 77 aa, Glycine max
  Clone ID: PAT_MRT3847_25665C.1.pep
HMTNIFKGPRKKKSSPTAYTNPGFCNCQWFRVELKTYLVHKRAFKFSSGNNNATTTKGNEDRPKERFSRKGCFHLYC

SEQ ID NO: 203368 - protein, 89 aa, Glycine max
  Clone ID: PAT_MRT3847_25666C.1.pep
SSHGSLLYFQLLNPPIQESWLTLMTQSINVPALLTEHTPDQQTESHNINKIDPHDHCSTNNWIKNDRFLMASYFQSFGYYLETWHRLSF

SEQ ID NO: 203369 - protein, 49 aa, Glycine max
  Clone ID: PAT_MRT3847_25667C.1.pep
PVPPGCEKTTEGVGLILSSQIEEPVGAKGPPSVPPKKGKKYKKGIKVLR

SEQ ID NO: 203370 - protein, 266 aa, Glycine max
  Clone ID: PAT_MRT3847_25668C.1.pep
MAETKLSSFKDKRWSLHGMTALVTGGTRGIGYAIAEELAEFGAAVHICARKQQDIDKCLEEWNKKGLPITGSACDVLSRDQRENLMKNVASIFNGKLNILINNAGTTTPKNLIDYTAEDVTTIMETNFGSSYHLCQLAHPLLKASGYGSIVFISSIAGLKALPYSSVYASSKGAMNQFTKNIALEWAKDNIRANAVAPGTVKTVLLDSIMKAAAEADKAVEYIVSQTPVGRLGDPEDISPLVVFLCLPAASYITGQIITADGGYII

SEQ ID NO: 203371 - protein, 58 aa, Glycine max
  unsure (1)..(58): unsure at all Xaa locations
  Clone ID: PAT_MRT3847_25669C.1.pep
SMEYIXXIXLXYHTPPIELLXVVPVFXVXXAHXXYICGXXXXLXTXSFHHIDAPTYWN

SEQ ID NO: 203372 - protein, 70 aa, Glycine max
  Clone ID: PAT_MRT3847_2566C.1.pep
LKGIPWPGLSPPEDKKTNGPFWGGEILGSFPPCFHVKSLESKIFVPPVMWEFQVWFLPPQKNFIPPICKC

SEQ ID NO: 203373 - protein, 83 aa, Glycine max
  Clone ID: PAT_MRT3847_25670C.1.pep
DAPKLVKNHRPHSSFLEKKRWGFFGRTQLFFWNWLHWEKTFHWHIKKPPLKQGFFVCQPLIFYNPGDLFFPQIQPLWIEQFPT

SEQ ID NO: 203374 - protein, 106 aa, Glycine max
  unsure (1)..(106): unsure at all Xaa locations
  Clone ID: PAT_MRT3847_25671C.1.pep
MPCFPYLNVKALKRIFRREFGASSFPYTCISANCFDTYFWTYLLDPFHNATDVSIYGXDKHKXVLNYKXYIVIFTVNTRTDPITCNRLVIYCPHKIIILQIDLTSF

SEQ ID NO: 203375 - protein, 81 aa, Glycine max
  unsure (1)..(81): unsure at all Xaa locations
  Clone ID: PAT_MRT3847_25672C.1.pep
NRIFKKTKDAFITFQGVLERKFYXEIEGFLNQGQVSPKGRGSSLYKKNEGLAIMSRLAKNRVPQSEFGFGGRSINFGQVYM

SEQ ID NO: 203376 - protein, 41 aa, Glycine max
  Clone ID: PAT_MRT3847_25673C.1.pep
ATTRTHFNVADLTIALNEDNTPHLVNALKSKIQSLAGQHSD

SEQ ID NO: 203377 - protein, 131 aa, Glycine max
  Clone ID: PAT_MRT3847_25674C.1.pep
DRAESSELQSFSDSLRSRLNAVSMRYKESISKGTRGWKERLFSHSSSMSELGSETRRREMKAGIASVSRLMESLETSENNRAVGTSLSNQNHIEDSSMGGVSNQNNVEASGEKSSHDDNTPAACSASSHLN

SEQ ID NO: 203378 - protein, 346 aa, Glycine max
  Clone ID: PAT_MRT3847_25675C.1.pep
EEKPLISLVYSFYVARIEHLFAEELHTPDSFLVIFNGLILGKHRRPLRFATAIRKLRRAGKIGEFVSVYVNEKQHCVYLASDGGRVCRPLVIADKGISRIKQHHMKELMDGVCTFDDFLRDGLLEYLDVNEENNALIALYEGDATSETTHIEIEPFTILGVIAGLIPYPHHNQSPRNTYQCAMGKQAMGNIAFNQLRRMDSLLYLLVYPQRPLLTTKTIELVGYDKLGAGQNATVAVMSYSGYDIEDAIVMNKASLDRGFGRCIVMKKYNAIIQKHSNDTSDRILRPNRTADTAGRMQILDDDGIAAPGEILRPYDIYINKQSPIDTRTPKTGSAANLPDSAYRSN

SEQ ID NO: 203379 - protein, 98 aa, Glycine max
  Clone ID: PAT_MRT3847_25676C.1.pep
CCDSAEYALLATVFLPKHPMRRSAGVSTARLKVVLTRLSWPWQPCARANTASIKLGPSHYHPFHARATYVPESSAGDTPVTTQELGALTGLWILLSSD

SEQ ID NO: 203380 - protein, 50 aa, Glycine max
  unsure (1)..(50): unsure at all Xaa locations
  Clone ID: PAT_MRT3847_25677C.1.pep
MLQMCEWMLVLMEKKHVYSNCVYLASDXGRXCRSLVIADKGISRIKQHHM

SEQ ID NO: 203381 - protein, 171 aa, Glycine max
  unsure (1)..(171): unsure at all Xaa locations
  Clone ID: PAT_MRT3847_25678C.1.pep
MENMRLMRKHNTTHTCMANNSHTPSSSLAMHKGSHMISKTKPKIRIIHIFAPEIIKTDVENFRELVQKLTGKPSGENLKYFCNNKKNKAIARTRVVAKREELESYSSESGMSEDHHNNTVKINNNNNNNNNGXNSSGGYLXGFSDLEGVISEIWGGSFASFGWESHDARVR

SEQ ID NO: 203382 - protein, 105 aa, Glycine max
  Clone ID: PAT_MRT3847_25679C.1.pep
MGSLPLTSSKPFFTQLHWFSSDRTRTLSLNQRVKVFASRSRNEGEKEPPKFDSYDLMELKFGRLLGEDPKLTLAKIMGRKVNPDASYLDIEKAFYKNKIRSIRIN

SEQ ID NO: 203383 - protein, 128 aa, Glycine max
  unsure (1)..(128): unsure at all Xaa locations
  Clone ID: PAT_MRT3847_2567C.1.pep
FLSYLKLFHYMKIPPSFRYSFSRDXTLLTTLLNLSFTFSIFYIINYICIYYKFHHNIPFTYPNYIFTFHTSIIYILILPNILFLPFLLYINLIFLFLILTLLXIPILLLIKIFPXKKFIPLINIPFIT

SEQ ID NO: 203384 - protein, 51 aa, Glycine max
  Clone ID: PAT_MRT3847_25680C.1.pep
TDSPLLYKVMQAPFSQNELHVELCNKNLTSKTFLMCTCHPPSMIIKTQDTR

SEQ ID NO: 203385 - protein, 111 aa, Glycine max
  Clone ID: PAT_MRT3847_25681C.1.pep
HELQVSFFWLNYQKLPSTQVKCRKLFCGFNIQQLNSLDLLLHMCKWFNLHYSAQFDKFRALSCLIRTTTIFLQLTLYPFSNRFYPNMVNSTRIQILNFLAIIVTWKKWATM

SEQ ID NO: 203386 - protein, 73 aa, Glycine max
  Clone ID: PAT_MRT3847_25682C.1.pep
CGGISSRKKKRSHNADRRFGRFSTTAGARRLKKGTIGAMKLLLQVQRKSLKPHSKSTITDNAISLKQSVFCSS

SEQ ID NO: 203387 - protein, 228 aa, Glycine max
  Clone ID: PAT_MRT3847_25683C.1.pep
LLGEGSLFGGTIQFTQVLEKAGQFTTFIKLLKASQIADRINSQLNNSNQGLTVFAPTDNAFSSLKAGTLNSINSQDQMQLIQFHILPTLYTISQFQTASNPLHTQAGNSDDGEYPLNVTTSGNQVNVTTGVVDTTVSNTIYSDNQLAVYQVDKVLLPMKLFGATAPAAAPAEAPAPSKPEKNVRAGAADASSGSSGSSVDASNAVSLNRKTVKGFIMTVAIIVSCLWM

SEQ ID NO: 203388 - protein, 93 aa, Glycine max
  Clone ID: PAT_MRT3847_25684C.1.pep
SEVGSSDMFFSLLTRLLIETSPRSQGTPLYLDLPTGTAITSIMISLMQPYDILSKRDRDEASVIQGMYNGITYYVDKYRANVISYRPLYDDID

SEQ ID NO: 203389 - protein, 64 aa, Glycine max
  unsure (1)..(64): unsure at all Xaa locations
  Clone ID: PAT_MRT3847_25685C.1.pep
QSTALFIIFISTFHDETKSLLTAGSLYKTLXTYSYNYIPNAIKTFKSVENLYMNKTPRTIKNIT

SEQ ID NO: 203390 - protein, 133 aa, Glycine max
  Clone ID: PAT_MRT3847_25686C.1.pep
TASNPLHTQAGNSDDGEYPLNVTPSGNQVNVTTGVVDTTVSNTIYSDNQLAVYQVDKVLLPMKLFGATAPAASPAEAPAPTKPEKNVRAGAADSPSGSSDTSADASSAVSLKRHTVEGVTFVAAVVVMIVSCF

SEQ ID NO: 203391 - protein, 131 aa, Glycine max
  Clone ID: PAT_MRT3847_25687C.1.pep
ASNPLHTQAGNSDDGEYPLNVTTSGNQVNVTTGVVDTTVSNTIYSDNQLAVYQVDKVLLPMKLFGAMAPAASPAEAPAPTKPEKNVRAGAADSPSGSDTSADASSAVSLKRHMVEGVTFVVAVVAMVVSCF

SEQ ID NO: 203392 - protein, 41 aa, Glycine max
  Clone ID: PAT_MRT3847_25689C.1.pep
TLNVRLEILMNQSSAVIPNHPQRHELSSALEKHACSLSVAR

SEQ ID NO: 203393 - protein, 138 aa, Glycine max
  unsure (1)..(138): unsure at all Xaa locations
  Clone ID: PAT_MRT3847_2568C.1.pep
RETPALKEKEELFANVNGLKAQLQRQPIDTTQVFXKTKLCLNTKHVDPPKKKVDKASLSVFKTIPVPAKKVVPMATDQVNIXPVGDKERSDIQGPKARIIYVKEVAPXTDGNSLDIPVVNQPGTNPPHEQGGNFFHQP

SEQ ID NO: 203394 - protein, 164 aa, Glycine max
  Clone ID: PAT_MRT3847_25690C.1.pep
MSSDRNIGVALDFSKGSKIALKWAIDNLLRNGDILYIVHIKPSGGSEFRNLLWSTTGSPLIPLSEFREKEVMHHYEVDTDAEVLDLLDPASREKQVTVVAKLYWGDAREKIVEAVGDLKLDSLVMGSRGLGAIQRVLLGSVTNYVTTNASCPITIVKDSAPSTN

SEQ ID NO: 203395 - protein, 105 aa, Glycine max
  Clone ID: PAT_MRT3847_25691C.1.pep
MTNYIYSLGLTLQFTTIQVASWGAYLLSRDILAVSFAPRDTHEAQVQFALERGVPALIGVLASIRLPYPSRSFDMAHCSRCLIPWGQNEGIYLNEVDRVLRPGGY

SEQ ID NO: 203396 - protein, 69 aa, Glycine max
  unsure (1)..(69): unsure at all Xaa locations
  Clone ID: PAT_MRT3847_25692C.1.pep
CSHCKHSPLSVVAXLVLSRASPPVSLXGFPNVRXKEKGLXLHSKVLXXYASFSIHRKSFVNPNGDDVQN

SEQ ID NO: 203397 - protein, 167 aa, Glycine max
  Clone ID: PAT_MRT3847_25693C.1.pep
YKKKKKKKKKKKKKKKKKKKEKKEKKRKAGGKGKRVTKKKNRPPKSKKKKARGAERGNNQRKKRKGPGPKEQAKTPTREKNEPPPHPPEKGERQIGEKGGAPFRQANGQKVTAGGPPPLKEKKQAGHARYPQPPKSREEGGQQRPPQGAKTGGEGGKNRRTPNTPPP

SEQ ID NO: 203398 - protein, 350 aa, Glycine max
  unsure (1)..(350): unsure at all Xaa locations
  Clone ID: PAT_MRT3847_25694C.1.pep
DGGEAAPGAAEGGLVLRTDTETGKPQGVAVRNSGGEEPNAAKLAAAASSSRKNSQNSARTSGDSSDGGGGGGGIPRISEDVMGALSAFQQTFVVSDATKADYPILYASAGFFKMTGYKSKEVIGRNCRFLQGADTAARRRQKGAKIREALQAGKIYCGRLLNYKKDGTPFWNLLTISPIKDEDGKVLKFIGMQVEVSKHTEGSKEKTLRPNGLPESLIRYDARQKEKATSSVTELLQAMKRPRALSESASRPSIRKSGSRSSDEEKLEQEQEXDKEKAQKTLRRISESGASFXASPIGSGNRISMERISELPENKHRNSQRRSFMGFRRKSQSNDESMDXEVIEDESSES

SEQ ID NO: 203399 - protein, 60 aa, Glycine max
  unsure (1)..(60): unsure at all Xaa locations
  Clone ID: PAT_MRT3847_25695C.1.pep
VAQIDRDRDFPLRTGREREPWGERRNRRLRFRPNRRLRXHVQRLTALVTGEKRLYRSMRK

SEQ ID NO: 203400 - protein, 75 aa, Glycine max
  unsure (1)..(75): unsure at all Xaa locations
  Clone ID: PAT_MRT3847_25696C.1.pep
HHVCINFVVFNKKINLMCYFLFLVKSLMMIYCNFLFQVHNSEKSKPXTAIRNADMKCXYQDCATATVCIAHCKPI

SEQ ID NO: 203401 - protein, 73 aa, Glycine max
  Clone ID: PAT_MRT3847_25697C.1.pep
MLDTYFKCGSVRSARLVFKGMSSRNVVSWNTMIDGYAQNGESEEAFATLLKMLDEGVEPQTVSMMGALHACAN

SEQ ID NO: 203402 - protein, 59 aa, Glycine max
  Clone ID: PAT_MRT3847_25698C.1.pep
KELDNNIVQIQFTKKNVKENKISNHLNFLQRLQRESPEQHCKLKHNTFTKQHTFLDDKC

SEQ ID NO: 203403 - protein, 69 aa, Glycine max
  Clone ID: PAT_MRT3847_25699C.1.pep
GSSTRAHMAHILPFIEPQEDPEDRGLTSITKCTIHYAASVAKHSYCHVPSSWRPMHVLILRRWAMTDKH

SEQ ID NO: 203404 - protein, 82 aa, Glycine max
  unsure (1)..(82): unsure at all Xaa locations
  Clone ID: PAT_MRT3847_2569C.1.pep
MASASASLLKSSLVLDXFECVKGQTLRQPSAASVVRCNPTTPSGLTIRAVSYADELFKTAKTVASPRRGILAMSESTAPCSK

SEQ ID NO: 203405 - protein, 71 aa, Glycine max
  unsure (1)..(71): unsure at all Xaa locations
  Clone ID: PAT_MRT3847_256C.1.pep
KEPKFLKTGDAGFGKMIPPNPMVVNXFSESPPLGRFAVRAMRHPVAVGVLKTVEKKAPPGAKVPKAAQKKK

SEQ ID NO: 203406 - protein, 148 aa, Glycine max
  unsure (1)..(148): unsure at all Xaa locations
  Clone ID: PAT_MRT3847_25701C.1.pep
MLKMHIFDMTLTAKTITLEVYSXHTIYNVKYKIQDMDGNPPHQQCFIFGGKQFEDGRTLADNNIQKEYTLHIXLRLRGGMQMIVKTLTGKTITLEVXSSDTIDTVXAEIQDKEGIPPDQHRLIFAGKQAEGGXTLADYNIQKESTLHL

SEQ ID NO: 203407 - protein, 93 aa, Glycine max
  unsure (1)..(93): unsure at all Xaa locations
  Clone ID: PAT_MRT3847_25702C.1.pep
MHMIMGYERVRVLFLLFLIPLPTVLGWGKEGHYATCKIAQEYLSEDALFAVKQLLPDSAQGDLAAVCSXWADEVGHTHRYHWSSXLHYVDHRI

SEQ ID NO: 203408 - protein, 70 aa, Glycine max
  Clone ID: PAT_MRT3847_25703C.1.pep
TNRKGLFVGKKDHKALLMEKRVMFSMQFARGHDSLFPLLSTPRFKEQTLSSGSQFFQENGALDNPPEDPK

SEQ ID NO: 203409 - protein, 60 aa, Glycine max
  unsure (1)..(60): unsure at all Xaa locations
  Clone ID: PAT_MRT3847_25704C.1.pep
SVAPSCFAVAWGLLFLLAVAVLGSLALGGGVSSCAXRRICAPRVRPRVRKRIRGRVSRTG

SEQ ID NO: 203410 - protein, 38 aa, Glycine max
  Clone ID: PAT_MRT3847_25705C.1.pep
FKDQWLTMALTGGFGRIPIYGIPVLVNNAEKGSAIAPQ

SEQ ID NO: 203411 - protein, 94 aa, Glycine max
  Clone ID: PAT_MRT3847_25706C.1.pep
PLGLRLETSDSAETGTVPGCDAAAALRVRKIGFSETDHVSPPTVDFMLNLPPEETSAAATTDRSDPPQNPATSTVDNTLPLLDCSKPHAIALVI

SEQ ID NO: 203412 - protein, 27 aa, Glycine max
  Clone ID: PAT_MRT3847_25707C.1.pep
NEILNFIKFVGYPHYFHLHFTEIKIVS

SEQ ID NO: 203413 - protein, 123 aa, Glycine max
  unsure (1)..(123): unsure at all Xaa locations
  Clone ID: PAT_MRT3847_25708C.1.pep
ESQPPPHPPEPQHPGPPTRPLTRGEPGDGEERTLTPGTTAEEANNKQIDEPEKRDPTXEGTERPKDEKPPRSKKPDKPKTRRNTTTPKEQNQADRQKQTNNARQNTKKTDKQSRQGATNQNPT

SEQ ID NO: 203414 - protein, 262 aa, Glycine max
  unsure (1)..(262): unsure at all Xaa locations
  Clone ID: PAT_MRT3847_25709C.1.pep
HASAQKVPLYTPTFECLLEQQIVKLELPVGTSLYGTGEASGELERTGKRVFTWNTDAWGYGPGTTSLYQSHPWVLAVLPNGEALGILADTTRRCEIDLRKESTIQFVAPSSYPVITFGPFASPTAVLISLSKAIGTVFMPPKWSLGYHQCRWSYLSDQRVLEVAKTFRKKSIPCDVVWMDIDYMDGFRCFTFDKERFRDPMSLVKDLHYSGFKAIWMLDPGIKQEEGYFVYDSGSKNDVWVQKADGTPYXGEVWPGPCVFPD

SEQ ID NO: 203415 - protein, 86 aa, Glycine max
  Clone ID: PAT_MRT3847_2570C.1.pep
PKLEWWVCSCYMLFDAIDLVLIPASSSAFMKTYWRHTKHFIPNRFRPKRLDILTGPYAPSWLFNHCPSPTFLNTKKLSSHPPKRGT

SEQ ID NO: 203416 - protein, 70 aa, Glycine max
  unsure (1)..(70): unsure at all Xaa locations
  Clone ID: PAT_MRT3847_25710C.1.pep
FNSMAVILHRNDRENPGVNQNNPLEKHAPFDKRRXNKKAPPERPYQEMQAPKGKWDLPWKNQMNPGGVGG

SEQ ID NO: 203417 - protein, 89 aa, Glycine max
  Clone ID: PAT_MRT3847_25711C.1.pep
KITAGYLNLRGGGKNKFSLFRNKTKVEKKKRAHPTKTQGKTWGWPRNKGKEPKNLPRPLSWDSNKRMACKKANPWAKHTCEGSQARLQK

SEQ ID NO: 203418 - protein, 199 aa, Glycine max
  Clone ID: PAT_MRT3847_25712C.1.pep
PTRPPTRPLILALVIVCCFCQCLSSGNDTITPGQFIRDPHTLTSANSAFKLGFFSPQNSSNRYLGIWYLSDSNVIWVANRNQPLKKSSSGTVQISEDGNLVVLDSNKRAVWSTNLTHNIATNSTAKLLETGNLVLLDDASGQTTWESFRHPCHALVPKMKFGSNQKTGEKIRITSWRSASDPSGGYYSTTLEHPNTPEM

SEQ ID NO: 203419 - protein, 385 aa, Glycine max
  Clone ID: PAT_MRT3847_25713C.1.pep
NKQREENPGTQPRTKTKQLKMEHDEDEEPPLAVQIQGNDESVSQQSSSVGVTLITGYLGSGKSTLVNHILNSQHGKRIAVILNEFGEEIGVERAMINEGDKGALVEEWVELANGCICCTVKHSLVQALEQLVQRKERLDHILLETTGLANPAPLASVLWLDEQLESEVKLDSIVTVVDAKNLRFQLDEHRGSSSFPEAYFQIAFADIIILNKVDLVSVESSGALEELEVEIHNINSLAEIIHSVRCQVDLSKILNRQAYDTARATQLEALLEESRSLSTKKLHDSDVRTICICETRMINLDKTRIWLEEILWEKKYDMDVYRCKGVLSVQNSDQLHTLQAVKELYEIVPSRKWEKEEKRINKIVFIGHNLKEDILINSFRDRATC

SEQ ID NO: 203420 - protein, 80 aa, Glycine max
  Clone ID: PAT_MRT3847_25714C.1.pep
RHSVSPVAQTLSRDGRHQLNVQSSFTQACPVSHLSEHSSWTLEGADLLSGLRDSSHLRESHTLACPPCCTQKGRKVIDRE

SEQ ID NO: 203421 - protein, 98 aa, Glycine max
  Clone ID: PAT_MRT3847_25715C.1.pep
KCQGIQRVFRTMPRNPPIKSLFTRKLPRTLWDTNYHCLPVQCRLCFLQGRHSWVSATLGDPSLESVFAFWKLRPLWRSFEAAVSLNQNYGGQKRLLSG

SEQ ID NO: 203422 - protein, 113 aa, Glycine max
  Clone ID: PAT_MRT3847_25716C.1.pep
LLIFTAQGVVFDAFFVWDLLWPKSAHRFVGHPEEEAGISYTQHLNAIESGKVENVRAPAIAIDGWRLPKDATLKEEVTVICGGEAHHRDVNHFACDIHHQGKELKEAPAPIGY

SEQ ID NO: 203423 - protein, 53 aa, Glycine max
  Clone ID: PAT_MRT3847_25717C.1.pep
NYCPRWLSQVRLKQQSLKEWDWDPCHGQRKEVALRVHKSLVVAINVVNMTSNF

SEQ ID NO: 203424 - protein, 46 aa, Glycine max
  Clone ID: PAT_MRT3847_25718C.1.pep
LKFISMRNRAQFLGSSTALALLKLNEPILSLVIVEYFRLNGLSLNL

SEQ ID NO: 203425 - protein, 105 aa, Glycine max
  Clone ID: PAT_MRT3847_25719C.1.pep
ALKHILNELRDWQKDPPISCTAGPVAEDMLHWHATVMGTADTPYAARVYLGTIHFPPDCSLTPLEDAYRTNVYHLIINSNRSHCLVILEEQREHALTITSGLDSI

SEQ ID NO: 203426 - protein, 83 aa, Glycine max
  Clone ID: PAT_MRT3847_2571C.1.pep
SEFKISESTGSESIIISKLLVHNLKLAASMFLTMVHINKKFNFIKNLTTMRLCPESSNNISNPKESNREGKVNLILSDACADA

SEQ ID NO: 203427 - protein, 62 aa, Glycine max; identical to SEQ ID NO: 164557
  Clone ID: PAT_MRT3847_25720C.1.pep

SEQ ID NO: 203428 - protein, 295 aa, Glycine max
  unsure (1)..(295): unsure at all Xaa locations
  Clone ID: PAT_MRT3847_25721C.1.pep
ASLASEQFLLDFVDQTAFMEYFKVAWLPKLEMWLSTMRNFPLASLEASGALEAYHVKLKAXLFDDSHLGALQRVDWLVPKLTTELHSSCWLDRYADESDSFQNVKEKYIASTSWHRALQIPDYAVSLDDKDHLFAKVVSQKDSSLTHIVWNPGSEFAFCDCSWSMQGNLCKHVVKVNMICENLKGYQPSMSFRSFQEVLMDLWKKPVDDSFALDLSLAWTHQMLDQIQKQVELNNSTDIGTVVNNMPLKWVSKKGRTYIGKPSSSLALPHGSSNTKSVVVYNKKNRKRKRLSRLR

SEQ ID NO: 203429 - protein, 48 aa, Glycine max
  Clone ID: PAT_MRT3847_25722C.1.pep
FTEGGGATLHILSFSVLLAGRSNWPLTGHDYVHGTETISSVEANQMTT

SEQ ID NO: 203430 - protein, 84 aa, Glycine max
  Clone ID: PAT_MRT3847_25723C.1.pep
CPNKPTGNQVGSPKLKKGEFCLAEITLRNRRVLFHSVSVTSHGEFHHCAPFYDSFASVRLTFVQAGMSIFLMERIRRFLVMLQS

SEQ ID NO: 203431 - protein, 178 aa, Glycine max
  Clone ID: PAT_MRT3847_25724C.1.pep
FSKAILNASGISIGQIAGNGVELSISGQANGTALLCLMVDPAIKISAAFKTADFAASATTTDGILSTTLNPLALNVTNIHNRLCASISLASKPVQYFPIFRLNAWTTAHVLDGYSALQRTCFYIALSSYVLLWLMSGYRLVHFWLYFFLIHRNPRLRVQHSFTLTILGIILALLFASY

SEQ ID NO: 203432 - protein, 43 aa, Glycine max
  Clone ID: PAT_MRT3847_25725C.1.pep
GSYITHVTTITHSISSVRITTLRVATVNSPYTSWPSTISCRTP

SEQ ID NO: 203433 - protein, 72 aa, Glycine max
  unsure (1)..(72): unsure at all Xaa locations
  Clone ID: PAT_MRT3847_25726C.1.pep
MINSTKETDFPLKQEGLSSSDHEKAKAPSSSSSSQWLKLKDPRIVRVSKAFGGKDRHSKVCTXLRGLRDRRV

SEQ ID NO: 203434 - protein, 73 aa, Glycine max
  Clone ID: PAT_MRT3847_25727C.1.pep
WCIDLWCNQVYYFMPPNQVLQSHTFNHKKFVFAYDLHIHLFTMRCIANQVCTLLLTHGTYTRIRILMIKKKVK

SEQ ID NO: 203435 - protein, 40 aa, Glycine max
  unsure (1)..(40): unsure at all Xaa locations
  Clone ID: PAT_MRT3847_25728C.1.pep
VSHQLPSTIKIRXNYSTHLLKGNGPRSLSXLHAYCPINSL

SEQ ID NO: 203436 - protein, 64 aa, Glycine max
  unsure (1)..(64): unsure at all Xaa locations
  Clone ID: PAT_MRT3847_25729C.1.pep
GKHTVLEDLHDAXSFXXXXSSFCKLIVPVGLPSLSKSKASRFLHXEDAKIXHSSXXYAAALQLH

SEQ ID NO: 203437 - protein, 29 aa, Glycine max
  unsure (1)..(29): unsure at all Xaa locations
  Clone ID: PAT_MRT3847_2572C.1.pep
MNNSSLXDHFQVQRLKLQQNXIPMLLKAG

SEQ ID NO: 203438 - protein, 212 aa, Glycine max
  Clone ID: PAT_MRT3847_25730C.1.pep
KNLLLLDISHNKIRGGLVRTIKELVSLKHLVLSNNPIGGDLLGVKWENFQNLEALDLSNIGLEGSVPKSMAKMKRLRFLDLSNNDLCGSLSRSLEKLPCLTALHVNGNNLTGRLEFSERFYMKMGMRFAAWNNTNLCCMAKPTTHEMPYGVKPCVQKNITISEGVSTVKMSEGNYEDSFVVASLGGSGFYYGLWCLFTVNGVLYVFLWDMLF

SEQ ID NO: 203439 - protein, 346 aa, Glycine max
  Clone ID: PAT_MRT3847_25731C.1.pep
MNWVRGEPLGSGSFATVNIAIPTNTSTQFLSSTAVKSSYVHTSSMLKNEKEILDCLGASPYVINCFGDDHTVENGEEYYNIFLEYAAGGSLADQVKKHGGRLPESYVRRCTRSLVEGLKHIHDNGYVHCDVKLQNILVFQNGDVKIADFGLAKEKGEKQGKLECRGTPLFMSPESVNDNEYESPADIWALGCAVVEMLTGKPAWDVRGSNIWSLLIRIGAGEELPKIPEELSEEGKDFLLKCFVKDPMKRWSAEMLLNHPFVNGETVSFQKVNEPLPLPSPSPRTHFDLTHWASTVTALLPSSPDSDEWHMWESGSSCSPENRLRRLVTVQTPANWSESDGWTSVR

SEQ ID NO: 203440 - protein, 55 aa, Glycine max
  Clone ID: PAT_MRT3847_25732C.1.pep
NVGYGHNSAPTNPACKVRIASHLYTLFWPTSRCGTKPLNHHPQGCTSGNPQRGRN

SEQ ID NO: 203441 - protein, 79 aa, Glycine max
  Clone ID: PAT_MRT3847_25733C.1.pep
AKFNRLEIGRRMMHGKHETQNCAHWYISRRYVPITVHTDILYEYVRQRCSVMHLARILQRLFLCLPSDTVRYALLCVIV

SEQ ID NO: 203442 - protein, 159 aa, Glycine max
  Clone ID: PAT_MRT3847_25734C.1.pep
MKPFKILHMHLLHSLLLFNIILCSSIPQHNHANFCGNIKTQTPFLDSNSSMLDNITLCISQNLYLRTSLGLFHVSSLDNNDGGHDQGYKVGTRLSVDIPRVPEICQGCEKPNGNCGAGLNCLCHPKECKDKVISKAGIKSTASAFFSMLSLIGSVTVAY

SEQ ID NO: 203443 - protein, 60 aa, Glycine max
  Clone ID: PAT_MRT3847_25735C.1.pep
GWAPHPASKNKILQIYFNLKHIFPHQISLKNLNLIFKSEFPLILKKPPYFFLFFLNTLKN

SEQ ID NO: 203444 - protein, 58 aa, Glycine max
  Clone ID: PAT_MRT3847_25736C.1.pep
SIHSLYLLGVTSWQFFSVQPCQLKLDFSVDFLLTHVSLTLSCNSFSQAMCKCRTLIFL

SEQ ID NO: 203445 - protein, 177 aa, Glycine max
  Clone ID: PAT_MRT3847_25737C.1.pep
LKKQQKEFQHYTQSPVFLSEGTLHPYQLEGLNFLRFSWSKQTHVILADEMGLGKTIQSIAFLASLFKEGVSPHLVVAPLSTLRNWEREFATWAPHMNVLMYVGSAQARSVIREYEFYFPKKQKKIKKKKSGHLISESKQDRIKFDVLLTSYEMINFDTASLKPIKWECMIVDEGHRL

SEQ ID NO: 203446 - protein, 93 aa, Glycine max
  Clone ID: PAT_MRT3847_25738C.1.pep
ELVFPVALLWSDTIAGLQRCSSTPESSGFIIGRDHRVSSMRRAITVSKGHGIRKGRRTSDVTGFQSYHEIAIGFLLGSEGIRELLSERAIAYD

SEQ ID NO: 203447 - protein, 50 aa, Glycine max
  unsure (1)..(50): unsure at all Xaa locations
  Clone ID: PAT_MRT3847_25739C.1.pep
XFFFXXGCWVNKTTRLAGGELYYLRVLTILFSIKIPLLLCLGYRFRLIWV

SEQ ID NO: 203448 - protein, 66 aa, Glycine max
  Clone ID: PAT_MRT3847_2573C.1.pep
KIPDAIGNLHSLEDLNLRGNKFVTLPNTIKQLSKLKYFFYLLCSKFKYLSLESCLNVLGSVTNLNI

SEQ ID NO: 203449 - protein, 73 aa, Glycine max
  Clone ID: PAT_MRT3847_25740C.1.pep
VERGRFVESSEATYSGILHGGTTAKMLDVINNLNDTYFQIGGILPGTLGAAKIVSQSVQGSNFYRGGQHMLID

SEQ ID NO: 203450 - protein, 156 aa, Glycine max
  Clone ID: PAT_MRT3847_25741C.1.pep
MIKIESCAKGDLNIVSSLEDTSTNNNMSKCRALVAVPAINMEALAVVPFWRKSGNPDFAQRRIRRPFSVLEVEALVQAVEKLGTGRWRDVKQRAFDHAKHRTYVDLKDKWKTLVHTARISPQQRRGEPVPQELLDRVLAAHAYWSQHQCKHQLKPL

SEQ ID NO: 203451 - protein, 85 aa, Glycine max
  unsure (1)..(85): unsure at all Xaa locations
  Clone ID: PAT_MRT3847_25742C.1.pep
PAXXXIXSYSSPPRQXAMVPLHVLETHPIPKWWSPPPTXXGXRLIATXXVAXXXXVFAXGRCRXPSQXXXLXXVAAPVXDFGXXX

SEQ ID NO: 203452 - protein, 158 aa, Glycine max
  Clone ID: PAT_MRT3847_25743C.1.pep
MTTNSSLPSGVHKEKHILFEIGNSERQLWALIHSKGPVHSDVQVLYHNIRSSYEREILNNHTHSELQEVEYSLWKLHYKHIDEFRKIIKKSSDNDNHIQAFKSFLLEAAEFYQTLIVKLRKHYGVPEEALFHKKCVSTSFEPEPLQKCQYLCHRCLVC

SEQ ID NO: 203453 - protein, 85 aa, Glycine max
  unsure (1)..(85): unsure at all Xaa locations
  Clone ID: PAT_MRT3847_25744C.1.pep
MVFHVRNPDLCAHFRLSRLSIDYVNVFFEDRFYDGWENRWVXSEWKEDQNVAGEWNDNSGQRNGNANDIGNHVSDDYIFEGNSTD

SEQ ID NO: 203454 - protein, 283 aa, Glycine max
  unsure (1)..(283): unsure at all Xaa locations
  Clone ID: PAT_MRT3847_25745C.1.pep
MKTLVMDTTNSSTPRPQPQPQDSSSSKRHFHWTNKVGNEDPQLLPTSETMSKIIEEDTNTKEEEEQQEPEDDKAVPLPGPAATSQAAATKRKLQAVAISRLRSVLTVFSKNRSNLPFGLGSRVVXGTLFGYRRGHVHFAFQKDPTSQPAFLIELATPISGLVREMASGLVRIALECDKDRDSEKKKTLRLLQESVWRTYCNGKKCGFATRRECGAKDWDILKAVEPISMGAGVLPNSDGADGEVMYMRARFERIVGSRDSEAFYMMNPDSNGAPELSIYLLRV

SEQ ID NO: 203455 - protein, 50 aa, Glycine max
  Clone ID: PAT_MRT3847_25746C.1.pep
FLFFFFFFFFFFFAGHCFRQSPPRQRAFFFKERGLPFWPFIPSPFPPGLG

SEQ ID NO: 203456 - protein, 38 aa, Glycine max
  Clone ID: PAT_MRT3847_25747C.1.pep
LKEKAYITVTMTNAKLPTPVIPIHNVFLESKHMYPRSD

SEQ ID NO: 203457 - protein, 63 aa, Glycine max
  Clone ID: PAT_MRT3847_25748C.1.pep
RSNCIIRGNRAMQFIIAIDCQSSFMSFVRRPVSSFGMQIIQCIQWSLLHVQFLCRKMDARVLV

SEQ ID NO: 203458 - protein, 522 aa, Glycine max
  Clone ID: PAT_MRT3847_25749C.1.pep
MISLIKNKINHLAPPTARDSSLLLLPLSSKHTSSTMAAPSSETKSPSSSNTQLPLKPIPGSYGMPFFGAISDRHNYFYHQGRDKFFATRIEKHNSTVIRTNMPPGPFISSDPRVVALLDGASFPILFDNDKVEKLNVLDGTFMPSTKFTGGFRVCAYLDTTEPNHALIKQFFLNVLAKRKDSFVPLFRNCLQESFAEIEDQLSKNTKADFNTVFSDASFNFMFRLFCDGKDPSQTNLGSKGPKLVDTWLLFQLAPLATLGLPKIFNYIEDFLIRTLPFPACLTKSGYKNLYEAFKTHATTALDEAEKLGLKRNEACHNVVFTAGFNAYGGLKNQFPYVLKWLGLSGEKLHADLAREVRRVVNDEGGVTFTALENMPLVKSVVYEVMRIEPAVPYQYARARENLVVSSHDASFEVKKGEMLFGYQPFATRDPRIFEDAEVFVPRRFVGEGEKMLKHVLWSNGRETEEPSASNKQCPGKNLVVLLCRLFLVELFLRYDTFEFEYTQAGFGPTITIKSLTKASTI

SEQ ID NO: 203459 - protein, 63 aa, Glycine max
  unsure (1)..(63): unsure at all Xaa locations
  Clone ID: PAT_MRT3847_2574C.1.pep
IXXYSGGGYNLTKKNIFTIYCNIFFHNQILHYFFYDTLRHWTLMTIPRCFESQTLVPLRETPL

SEQ ID NO: 203460 - protein, 160 aa, Glycine max
  Clone ID: PAT_MRT3847_25750C.1.pep
MAATKPLLTDLASTIDRVPSNFIRPIGDRPKLHQLHSSLASIPIIDLQGLGGSNHSQIIQNIAHACQTYGFLQIVNHGIQEEVVSKMVNVSKEFFGLPESERLKNFSDDPSKTTRLSTSFNVKTEKVSNWRDFLRLHCHPLEDYIQEWACNPPSFREDVA

SEQ ID NO: 203461 - protein, 57 aa, Glycine max
  Clone ID: PAT_MRT3847_25751C.1.pep
DNFHLGVLLTFFLYVKKYWSFGLIGRSLLLKKIIVVGLSLDINCMFCCELFESKDKD

SEQ ID NO: 203462 - protein, 93 aa, Glycine max
  Clone ID: PAT_MRT3847_25752C.1.pep
MENLLGLLRIHVEKGVNLAIRDVVSSDPYVVIKMGRQVPRIEMRKKIGEKTLLQGFPLHKGFLLSQRDNAQSTNDKIPLSPILLSLFISNKPL

SEQ ID NO: 203463 - protein, 49 aa, Glycine max
  Clone ID: PAT_MRT3847_25753C.1.pep
NLFFFFFFFFSACIHPKISIHFCKKLEILAMKDLPLAIKIRKLFNSLYS

SEQ ID NO: 203464 - protein, 97 aa, Glycine max
  Clone ID: PAT_MRT3847_25754C.1.pep
RKKLTKFETQSNRVKGLSFHKQRPWILASLYSGVIQLWDYRMGTLIDRFDEHDGPVRGVHFHNSQPLFVSGGDDYKIKVWNYKMHRCLVTLLGHLDY

SEQ ID NO: 203465 - protein, 213 aa, Glycine max
  Clone ID: PAT_MRT3847_25755C.1.pep
SQPHYNLNLQSISVNGQIVPIAPAVFATSNNRGTIVDSGTTLAYLAEEAYNPFVNAITALVPQSVRSVLSRGNPLSGYSVFSNVDIFPQVSLNFAGGASLVLRPQDYLMQQNYIGEGSVWCIGFQRIPGQSITILGDLVLKDKIFVYDLAGQRIGWANYDCSLPVNVSASAGRGRSEFVDAGELSGSSSLRAGLHMLINTLFLALFMHITLIL

SEQ ID NO: 203466 - protein, 160 aa, Glycine max
  Clone ID: PAT_MRT3847_25756C.1.pep
QPVGNRRGGYWAGLLYLHPPTLKNSSENSPHAITAHTNTKLKFFSRRRFQKQQNTAGPMELEVKARQQHMTEPEGTLLCIGNNSVSGQDRQQADFQVKGTLIYHETDNSKASEAQTIWNKAKELGMTWELDQQKIIERIEEMEERDLKEAHRLGDRDKRS

SEQ ID NO: 203467 - protein, 103 aa, Glycine max
  Clone ID: PAT_MRT3847_25757C.1.pep
PETYFPTIVFFFFGNYCQKKGNKRRGKGAGVTGQLKGTQVFMDSPRGVTSPFGALEGAKQTLRASQTIIKKPPLGAWARAGTGSLNLTKGRSGGKMGNPFLRG

SEQ ID NO: 203468 - protein, 105 aa, Glycine max
  Clone ID: PAT_MRT3847_25758C.1.pep
KGRATISPALEASIDYQLKILTVGITYGGPALLHYKDQFKEAIFLAFDSPSWKVNGAADHLLRSLLGSQIHYYPINQYNCVLRHPDAVALEEWISTKDSSLMKGD

SEQ ID NO: 203469 - protein, 156 aa, Glycine max
  unsure (1)..(156): unsure at all Xaa locations
  Clone ID: PAT_MRT3847_25759C.1.pep
YASALTHSLLGLFFSPLASSSIIAIISKLTKTWGFSSSSSPYFSSLQPLSRCDADLGCCWFSLVIDFSCVGGDQESVVNFAFFADPCVCVILKNQSNGRRSRSETHVQVLQQELSLWKILGWPHEVTCHXQCFNRGREAFIFQQQWLRMRFCIRRD

SEQ ID NO: 203470 - protein, 144 aa, Glycine max
  unsure (1)..(144): unsure at all Xaa locations
  Clone ID: PAT_MRT3847_2575C.1.pep
PPPDLVIVINPYSDFAALTIXLLHDNEAEWLXLLKDGKWIPVXPLSNAFVIKRGDMVEILTNGXYRSIXHLRIDDSEEERISIVMFHRPEKTKDIWPAPNLHTPEXPALFKRIGDADDLDGFLIRELRGLSYMDVIMIQYEIGR

SEQ ID NO: 203471 - protein, 79 aa, Glycine max
  Clone ID: PAT_MRT3847_25760C.1.pep
TGRATNPQATSPDQRRRQLWPQLRGGWSSSTPRTRSRQCQARRPRPHEAISLPYRPDDRQCIVSSRLAGWPQGPHLDPT

SEQ ID NO: 203472 - protein, 164 aa, Glycine max
  Clone ID: PAT_MRT3847_25761C.1.pep
GSRTRSLSDLMLTIDTPFLTPVASSPLKCCSLPLDPLHSYKHQGFNPLFESSVELEYNRFRSSPPPKFKFMRDAEEKLHRKLMEEARRKAVDNNNVQECGVKDCSNETLATDFRDGSFLKFIQTTEHKQPQQYLPQFPSGSSQILPLASSPTTLRPLEKASIVH

SEQ ID NO: 203473 - protein, 39 aa, Glycine max
  unsure (1)..(39): unsure at all Xaa locations
  Clone ID: PAT_MRT3847_25762C.1.pep
HISCVVTNGMDLPKRIHNIXKIPFTSHNKISSIILRTPP

SEQ ID NO: 203474 - protein, 63 aa, Glycine max
  Clone ID: PAT_MRT3847_25763C.1.pep
GSLQRSLALFVIIWITKEGSSALQNLASLFAPWPNIFLCNTWSPYLDTEGDHDNANLSKTFDR

SEQ ID NO: 203475 - protein, 69 aa, Glycine max
  Clone ID: PAT_MRT3847_25764C.1.pep
FLVREHFFLFHHKKYICSERTHPSTLKIEGSFIDFSCSTKSDPRSNPTNIEIILQSDIRTSSSQSPCNM

SEQ ID NO: 203476 - protein, 35 aa, Glycine max
  Clone ID: PAT_MRT3847_25765C.1.pep
IKTKSCPHYCNFPINYYPLLNQHISYSQTTIIPPH

SEQ ID NO: 203477 - protein, 64 aa, Glycine max
  Clone ID: PAT_MRT3847_25766C.1.pep
PLTPGPMPYWNAHSLNYISCLAPAHKRPQMTLPIFITTEDYRNACMSALTKTLREDGLYTTWTI

SEQ ID NO: 203478 - protein, 243 aa, Glycine max
  unsure (1)..(243): unsure at all Xaa locations
  Clone ID: PAT_MRT3847_25767C.1.pep
VRVLSQSFKPPEDQEGGAXSXRKXTPSFHCFHSECIIRWWKWLQNSNKVDSSNTDSAAAHRNQDNPKKTEESVGNCPVCRKPFLAKDLDHVLALVGSYSSQLSSDNEELNEEEKLLQSEDEINRRQKYEAILNLQKENSGLIEPKKEMVILPGMYLPQPVAMPSSTPTKESDEPQQKDPLAVVPEKHAGGTSNSSIPSSSRQRNFGARRQKARSDNHSSSTARNPRKPAQQQWVRRDNPSNKP

SEQ ID NO: 203479 - protein, 186 aa, Glycine max
  unsure (1)..(186): unsure at all Xaa locations
  Clone ID: PAT_MRT3847_25768C.1.pep
VMGGICSRKRDEHEHVVEDELHRGVSGRYCRSGSTKWMRARSLRAKPNHCAGGGTCPSLMDLCINKMREDFHKYNSFSILPRDISQQIFNELVDSHCLTQLSLEAFRDCALQDIDLGEYVGVSDDWMDVISSQGLSXLSVDVSGSQVTDNGLRFLKDCSNLQXLTLNXCDQFSEYGLKHISGLSNL

SEQ ID NO: 203480 - protein, 88 aa, Glycine max
  unsure (1)..(88): unsure at all Xaa locations
  Clone ID: PAT_MRT3847_25769C.1.pep
IPPKNIPALKKDGLPLFKTLGFKPGPLKKKKPEFGVKIKNKIPFVPHPPEGKRPMVXPQRGEKIFKAEEKVAKPRATGTSPKKALGGF

SEQ ID NO: 203481 - protein, 57 aa, Glycine max
  Clone ID: PAT_MRT3847_2576C.1.pep
NTLKVRINLYSYKVLSTHLRDHGMTYQHSGCLLQVVQWMLNTFGGLILAQFAWSKTA

SEQ ID NO: 203482 - protein, 62 aa, Glycine max
  unsure (1)..(62): unsure at all Xaa locations
  Clone ID: PAT_MRT3847_25770C.1.pep
NSARGLRKLCIKGCPVSNAGIAAFASGCPNLVKLKVRKCXKVNGELVEWLHKNRSPLMLSIN

SEQ ID NO: 203483 - protein, 67 aa, Glycine max
  Clone ID: PAT_MRT3847_25771C.1.pep
PLILQPTSGVLGSCGAKASQHKRRTQIKYNVLRLQQPSLNHHYKSFETVSTYQDCNKKYVPNAVPKP

SEQ ID NO: 203484 - protein, 105 aa, Glycine max
  Clone ID: PAT_MRT3847_25772C.1.pep
LRLIACNICFFQELTLALMVMLRLMGKQRAEAESSRQVDHPHDKNGLWLANKTSSCYGYGLLSVTYAPNGRCYDPNQAGYFSRQPHQCLLCQALRTLCFLCRNLH

SEQ ID NO: 203485 - protein, 69 aa, Glycine max
  Clone ID: PAT_MRT3847_25773C.1.pep
YTLICTFGTTSLLSAIPPVLKITGLISLDGTTGNHPTGSLLFPNAREYSHRKSSDEDDILDGYFGELGA

SEQ ID NO: 203486 - protein, 166 aa, Glycine max
  Clone ID: PAT_MRT3847_25774C.1.pep
PRVRGNCSSSDSTQLATAKLLLQDGRLQEFSYPVKVSFLLHNYPACFICNSDEMEFHDVVSPIHEDQVLQPGQLYFALPLSLLRHSLQPHEMAALAVKASSALMKTAHKCGSRRKQILFSNEYDSNPKRVSPTLAADAGTVHRRGRATGASGGKGRFAALLSSIPE

SEQ ID NO: 203487 - protein, 125 aa, Glycine max
  Clone ID: PAT_MRT3847_25775C.1.pep
RLGRTGREDKEGEGVLLIAPWEEYFLDEIKDLPLQNFPLPDINPHTKLKIENSMAKIDNDIKEAAYHAWLGYYNSIREIGREKTTMAELANRFSESIGLQRPPALFRKTAIKMGLKDIPGIRIRK

SEQ ID NO: 203488 - protein, 161 aa, Glycine max
  Clone ID: PAT_MRT3847_25776C.1.pep
MASLCALNYPPARRDDSVVEDYHGVKIADPYRWLEDPDAEEVKEFVAKQVQLTDSVLQKCETRGKLRETITKLFDHPRYDAPFRRANKYFYFHNTGLQPQNILYVQESLEGEAEALLDPNTFSEDGPVSLSTLSVSEDAKYLAYALSSSGSDWTTIKVMRI

SEQ ID NO: 203489 - protein, 78 aa, Glycine max
  Clone ID: PAT_MRT3847_25777C.1.pep
LKLRFPTNREGFTYTKYPRSPTYCQPSKILFFLYKLVTTWEPTNNQKIWQGLCSQTFYTSLGWKMLVHTYLLFSPTFY

SEQ ID NO: 203490 - protein, 120 aa, Glycine max
  Clone ID: PAT_MRT3847_25778C.1.pep
GLKSFYNVAPRVFKKTQVIPPFPENRSLCSLTHIFAGGYAAGYYSYKWAKVLSADAFSAFEDAGLDNDKAVKETGRKFRETILALGGGKPPLDVFVQFRGREPTPDALLRHNGLLQVAAS

SEQ ID NO: 203491 - protein, 115 aa, Glycine max
  unsure (1)..(115): unsure at all Xaa locations
  Clone ID: PAT_MRT3847_25779C.1.pep
HSSXHPSGHSSSHASXYNLVYTLRGETAPXIXHPLFFIPFSYALTLLLLFLPSILFSNFYLIHNTLNLQLFFLSYSYTPHSIFLYPNLFFLFNLSPSFFIKTLFFLFSTLITFFF

SEQ ID NO: 203492 - protein, 110 aa, Glycine max
  Clone ID: PAT_MRT3847_2577C.1.pep
FPPGFKRLPIGEAGTPPGTGSEIPGWPPGSFNSKRGRVTFFRWPFRGGGFPKRGKKILKVLLVLPPKEVKKGSFLKKVKPYVFFPERVNRANHPRWYGPESPPPPMGVRS

SEQ ID NO: 203493 - protein, 45 aa, Glycine max
  Clone ID: PAT_MRT3847_25780C.1.pep
FHQVQVFCPCDGCVKLMVAPFFFSMFGNGPLLYKVRPISIMNPRL

SEQ ID NO: 203494 - protein, 75 aa, Glycine max
  Clone ID: PAT_MRT3847_25781C.1.pep
RPTLQHQLKALKSSPQLQHKLPLVLPRISNTSKALNFHHFSVPNFPMDTSKPPPLKRRCLVHLLSCEERLAFGLR

SEQ ID NO: 203495 - protein, 62 aa, Glycine max
  Clone ID: PAT_MRT3847_25782C.1.pep
KFFQTCPFNILTPPDFNPTWKILIFRGTCLVPLGLKATLAIFFPPFPFPPTTPYLFRPSNRL

SEQ ID NO: 203496 - protein, 64 aa, Glycine max
  Clone ID: PAT_MRT3847_25783C.1.pep
ACCYNFGNICVLWVTVLEVPSRTDHWVCWAMYHRGGMCHLDDWSSSVQCTHVTLCACSLRIVHI

SEQ ID NO: 203497 - protein, 121 aa, Glycine max
  Clone ID: PAT_MRT3847_25784C.1.pep
SATGSATEGSANPVFAESVAVYLLIWGVMVFIYMLGSLRTNVTFVILFFTLNVAFFLLAAGYFRIGEGRDPTSLLRAEGAFAFVTCICGWWIMLALVLESTGMPFSVPLGDLSGYLAKKNV

SEQ ID NO: 203498 - protein, 96 aa, Glycine max
  unsure (1)..(96): unsure at all Xaa locations
  Clone ID: PAT_MRT3847_25785C.1.pep
GXQNXGDKAARGQGPKGRTAEHHRHKDRETTAXTAPQEAGDGTKTQAPAGGHAEXAGLFHHMLHELKGREPGTNPASQGRGSKANLWAPNSSRDTA

SEQ ID NO: 203499 - protein, 72 aa, Glycine max
  Clone ID: PAT_MRT3847_25786C.1.pep
HSNSVTRPQTPKDSSNWPLLSYVWASTLLLDLCMSFPVMKENLKGRERNIYERESGTGITHMGRTYSQPVIL

SEQ ID NO: 203500 - protein, 67 aa, Glycine max
  Clone ID: PAT_MRT3847_25787C.1.pep
KIQILHFTSKNVNTTSPNRPYRFVQIPPLWKTVHIHSSPLLKRFMIIARKGLTKLCKTLSLVLLLCT

SEQ ID NO: 203501 - protein, 45 aa, Glycine max
  Clone ID: PAT_MRT3847_25788C.1.pep
RWSSNRLRYRINNSYGSTEISCTKHVIVNHVYTSSSRMDITKLEW

SEQ ID NO: 203502 - protein, 103 aa, Glycine max
  Clone ID: PAT_MRT3847_25789C.1.pep
KKAEGHLVLIRSNLKRILILINLSPPTPPQCWKNKKSSPTIISKAFQAHPLFFTLHLEKMIFNLWDDYHSWMNLQVAPLHLKLLRLHENDPPLEMKMKFHFYH

SEQ ID NO: 203503 - protein, 90 aa, Glycine max
  unsure (1)..(90): unsure at all Xaa locations
  Clone ID: PAT_MRT3847_2578C.1.pep
YIPFSLCIALPLASRCRCFVKTRTGKTISREVYSSDTIDNVKAKIQDKEGIPPDQXRLMFAGKLLEDGRTLADYNIQNESTRHLVLLLRG

SEQ ID NO: 203504 - protein, 140 aa, Glycine max
  unsure (1)..(140): unsure at all Xaa locations
  Clone ID: PAT_MRT3847_25790C.1.pep
LSFLTAGNLRACVFLPLTHSLKGLIKMVATVAIPENTWIAWACAMNRSFRGRSRCVINTIWSQDCEXWNPACTKATTMSCIPNPCSDAWSLEFLKRTEFNCDMIXDTGRDCTPXQDVHATIDWFISSQEKFARTYCVLNL

SEQ ID NO: 203505 - protein, 311 aa, Glycine max
  unsure (1)..(311): unsure at all Xaa locations
  Clone ID: PAT_MRT3847_25791C.1.pep
MDVIKTQQISSRPIEKVVVHPLVLLSIVDNYNRVAKDTRKRVVGVLLGSSFKGTVDVTNSYAVPFEEDDKDPSIWFLDHNYHESMFSMFKRINAKEHVVGWYSTGPKLRENDLDIHGLFNDYVPNPVLVLLVVVPKELGIPTKAYYAIDXSVKENATQKSQKVFXVHVPSEIAAHEVEEIGVEHLLRDVKDTTISTLATEVSAKLTALKGLDARLKEIRSYLDLVIDGKLPLNHEILYHLQDVFNLLPNLNVADLIKAFAVKTNDMMLVIYLSSLIRSVIALHNLINNKMLNKEHERAEDSKTVTVPSAAA

SEQ ID NO: 203506 - protein, 72 aa, Glycine max
  unsure (1)..(72): unsure at all Xaa locations
  Clone ID: PAT_MRT3847_25792C.1.pep
XXPEFWVLQWENWGDYLFVXMTXXXKFSLRKWKGNVVCGNPFGRRWRPMPEYMXGNTDLLLVRALSRFFVHR

SEQ ID NO: 203507 - protein, 70 aa, Glycine max
  Clone ID: PAT_MRT3847_25793C.1.pep
KKEKFGSGMEQNGGSLKDAFFIFDPDKNGLISAKELQKVLINLGGDKCSFKECQRIIKRVYKNGNGFVDF

SEQ ID NO: 203508 - protein, 99 aa, Glycine max
  Clone ID: PAT_MRT3847_25794C.1.pep
LLWILCFLFFVVENSIYAVIYLSQTTMSIELCKYYFLAGPKKKGTHSPKRLRTPIIWLGKSWGLGCLPYEISKDRKWKKNGLYYLGDQILQNFFFMPEL

SEQ ID NO: 203509 - protein, 31 aa, Glycine max
  Clone ID: PAT_MRT3847_25795C.1.pep
PVEVKFKLSGVAPSRTGVILVVKDNTISKRH

SEQ ID NO: 203510 - protein, 205 aa, Glycine max
  Clone ID: PAT_MRT3847_25796C.1.pep
MTYLQHKGPPHPPPPLLPLHLLQIPVLKMTAKWYLIVCVVAIWAVDLGSSSHHARAPAPAPSVECSNLVLTLSDCLTFVSNGSTVTKPQGTCCSSLKTVLNTAPKCLCEAFNSSAQLGLAINVTKAVTLPAACKLSTPSAANCGLSATPAAAPGPSPTSATATIGTPGGAPSSTPGNAASALIPISAGSSIVCLLVALSLISLSE

SEQ ID NO: 203511 - protein, 39 aa, Glycine max
  Clone ID: PAT_MRT3847_25797C.1.pep
DKSNSCYFLSIKIIINVKLYLIFSTCMLHLYEGTLLMSL

SEQ ID NO: 203512 - protein, 135 aa, Glycine max
  unsure (1)..(135): unsure at all Xaa locations
  Clone ID: PAT_MRT3847_25798C.1.pep
MDTSLVFTVRRREPELIAPAKPTPREVKLLSDIDDQDGLRFQIPVIQINRHDPSMAGKDPVEVIRKALARTLVFYYPFAGRLREGRDRKLMVDCTGELGVLFIEADADVTLKHFGDALXPPFPCWEELLYDVPGS

SEQ ID NO: 203513 - protein, 98 aa, Glycine max
  Clone ID: PAT_MRT3847_25799C.1.pep
ESREAEKKRRRQVIRLRLCWYRRQHSPRCATPDQPVFACFHVRELVMQQHFASFKAVYGTKERVDLLVHSRADLVCVRGVVHELGVLIAWATLRSKIF

SEQ ID NO: 203514 - protein, 70 aa, Glycine max
  Clone ID: PAT_MRT3847_2579C.1.pep
GKLRRCGSKKFKCEIVRELFLRIGKVLVYKYMLKGMKAFNKVCKYELKMFDFFYNMSSCVFGFCMYINLV

SEQ ID NO: 203515 - protein, 47 aa, Glycine max
  Clone ID: PAT_MRT3847_257C.1.pep
CVIGWSVRIQISVSIDLPLQLSILWGAFEQQWCTQQQSLRRESRSGN

SEQ ID NO: 203516 - protein, 109 aa, Glycine max
  unsure (1)..(109): unsure at all Xaa locations
  Clone ID: PAT_MRT3847_25800C.1.pep
QTFLDAFVNIELGKCDCPGSDHDHDHGHTYQIFPLRMKTVHGGHYIPAVCCRYQRIGXEGPLMLXWTTVPHDCQGCIGNYMLGXQYRSDSKIVDQQAYFYPKTLTITDK

SEQ ID NO: 203517 - protein, 83 aa, Glycine max
  Clone ID: PAT_MRT3847_25801C.1.pep
GNLGIIAPLPLGFIVGAHILLGGAFFGAAMNPPVTFGPPVVSWTWTNPWIYWAGPLIGGGIPALVYKVVFFSPPPEQLPPPDY

SEQ ID NO: 203518 - protein, 64 aa, Glycine max
  Clone ID: PAT_MRT3847_25802C.1.pep
RYRLCRKRFKRWAKNTFCAIGTVKKHVGPLDTDSEVSALVSTVFNYLSCSAPANFKCQAPELKS

SEQ ID NO: 203519 - protein, 107 aa, Glycine max
  unsure (1)..(107): unsure at all Xaa locations
  Clone ID: PAT_MRT3847_25803C.1.pep
LNQKFDPFKGRVSPFRFFPPGGGGMLAHFLAHLPSWLKVREKNPSGEGVEFVANKVEVFLAEGNLVXPPNCLKKSVRGPQTPKIFPGWVSQPKTRVIFEQAGGVFQS

SEQ ID NO: 203520 - protein, 152 aa, Glycine max
  Clone ID: PAT_MRT3847_25804C.1.pep
PPQKVFFLSGGHTMGPLFFFFFRPCFKQLPVFSPPLAKKKKLLPLKKTTLPPGVVFFIIKGWRAIFFFPSPWLKKTPPFGVDPPFASPRALPYSFTPFFFLVFLRENLFSQERNFASFLPPFLPPPLKKNFSPPKFCSNIFRLELPPGPGFS

SEQ ID NO: 203521 - protein, 52 aa, Glycine max
  Clone ID: PAT_MRT3847_25805C.1.pep
KFLIYTPDPYQIIPNHAAIIAYLTDEWHHSDGVRVTDVGMQRNDSGFVQTRL

SEQ ID NO: 203522 - protein, 151 aa, Glycine max
  Clone ID: PAT_MRT3847_25806C.1.pep
MSVEEMQSQKRNVFDAETASSLVKELRDNFGSGRTRSYEWRVSQVKALLKAVVDNEEQIVDALRSDLAKPPLETIVYEVGMFKNSCEVILKELKQWMKPEKVKTSIRTFPSSAEIVPEPLGVVLVISAWNYPILLSLDPVVGAIAAGMLWF

SEQ ID NO: 203523 - protein, 172 aa, Glycine max
  Clone ID: PAT_MRT3847_25807C.1.pep
MAFKKTLAQRLLNITKISNYRISSSVVRSPNPTKPDIAPDPGDSRRFLHKRASVLPPELRPPLPAGSLLQRLREMDIARSRIRLDGLAPPETEQTVAPEHVRKVLRAVQIETVKSKLRKIPQSCISYSEFIRMCSENCSDQEQAMSVAKMLDESASVIIIGDVVFLRPEQKM

SEQ ID NO: 203524 - protein, 31 aa, Glycine max
  Clone ID: PAT_MRT3847_25808C.1.pep
LWAGQICVDCMSLMYLKPVYRNVFCINSVCN

SEQ ID NO: 203525 - protein, 85 aa, Glycine max
  Clone ID: PAT_MRT3847_25809C.1.pep
TFEEMLGDNEHCFCLRHLYNTFNKRFGGGIVMGDLMMGATRATYHEAYLEKMAQLKEINEAAHKYLVDIGEQHWSKHAFKTYAKC

SEQ ID NO: 203526 - protein, 46 aa, Glycine max
  Clone ID: PAT_MRT3847_2580C.1.pep
TPTSSFSPYAVALQALAQTRRKETSMNSRSWTTTSTNAPSSVMLPP

SEQ ID NO: 203527 - protein, 53 aa, Glycine max
  Clone ID: PAT_MRT3847_25810C.1.pep
QLRCLYPTNNMYPFCKAPCWSFCLDTTHFIAEEYSSCLTTFTLILLASYVIND

SEQ ID NO: 203528 - protein, 65 aa, Glycine max
  Clone ID: PAT_MRT3847_25811C.1.pep
CDEMEQKVSKNSIFNWWKSKMIIEGFTKCVTSYSIHRRYTRRVSSRHKELKRKEWEKELVEQICV

SEQ ID NO: 203529 - protein, 65 aa, Glycine max
  Clone ID: PAT_MRT3847_25812C.1.pep
KVRASFSPCKDVVVENPGKPAKITEELSEKYHGGVTRDRYGEPDKPCHLQESPGLILGSVIVDMW

SEQ ID NO: 203530 - protein, 40 aa, Glycine max
  Clone ID: PAT_MRT3847_25813C.1.pep
SVRNWLIKRDHRAVSENNWTVAGPLYYLLPPCEAELRFNS

SEQ ID NO: 203531 - protein, 59 aa, Glycine max
  Clone ID: PAT_MRT3847_25814C.1.pep
FSFLKFIVLSMYVLKGVELFLHSCLNIEILINNYLINNRFDKKKYLLLIFFCKTRYIIT

SEQ ID NO: 203532 - protein, 111 aa, Glycine max
  unsure (1)..(111): unsure at all Xaa locations
  Clone ID: PAT_MRT3847_25815C.1.pep
SPAKAAVLLKSHGLNRVXFYQTHALVLTAFGNSGMKGVVAMPNELFANAVAGQSLTDAGVQTNICKYXPATQNKAIALGYEVFVGPNHTTKFSCSAMKNGYSXLVKYSLDK

SEQ ID NO: 203533 - protein, 108 aa, Glycine max
  unsure (1)..(108): unsure at all Xaa locations
  Clone ID: PAT_MRT3847_25816C.1.pep
GMSEMLVNPINFNGATRPDPSASSPASFKSEALFSKKKATPSPSKKAAAAASCXHDELAKWYGXDRRIFSPEGLLDRNKVPEYFTRKDLGXYGYEPYGLNNEAEKYVK

SEQ ID NO: 203534 - protein, 61 aa, Glycine max
  unsure (1)..(61): unsure at all Xaa locations
  Clone ID: PAT_MRT3847_25817C.1.pep
MPSKGPLQSVQVFGRKXTATAVAHCKRGNGLIKVNGXPLEMIEPRTLQYKLLEPVLLLGKE

SEQ ID NO: 203535 - protein, 40 aa, Glycine max
  Clone ID: PAT_MRT3847_25818C.1.pep
RESHAYAAEDTYRKKISSPINEVPVGMSIHKISKNMPLHF

SEQ ID NO: 203536 - protein, 265 aa, Glycine max
  unsure (1)..(265): unsure at all Xaa locations
  Clone ID: PAT_MRT3847_25819C.1.pep
MLLTLCIGTVFSGLGHSLSSVVTRVAAIFVFASFSSLLSIARVPALKKEIKVRFIIGVDGPKHVRLEEMREKHSLQDRVEMLGAVQHVQVXSVLIYGHIFLNSSLTEAFCIAILEAASCGLLTVSTRVGGVPEVLPDEMIVLAEPDPGDMVHAIQKAISMLPKIDPXAMHNRMRELYNWHDVAKRTEIVYDRAFKCSNQNLLERLSRYSFNIAWAGNLFFLVMTNGFLLWRLLELWQPADDIEEVPDFTLPCSCDEKMLEKNSVK

SEQ ID NO: 203537 - protein, 85 aa, Glycine max
  Clone ID: PAT_MRT3847_2581C.1.pep
NSSSLPGDPLESTCRINTYFTRPTRTSETSIRISHEGGHRRVTLSLPTFLAIDCIPLLSADQYVVLCTNDPLTGNCEHRRRKFVV

SEQ ID NO: 203538 - protein, 450 aa, Glycine max
  Clone ID: PAT_MRT3847_25820C.1.pep
LYHLDSVSALLMMVTLKRLASTGYTLIVTIYQSSTEVFGLFDHICLLSNGNTLFFGETLACLQHFSNAGFPCPIMQSPSDHFLRAINTDFDRIIAMCKNWQDDNGDFSSVNMDTAVAIRTLEATYKSSADAAAVETMILKLTEKEGPVLKSKGKASNATRIAVLTWRSLLVVSREWNYYWLHLTLYMLLTLCIGTVFSGLGHSLSSVVTRVAAIFVFVSFCSLLSIARVPALLKEIKIYACEESNQHSSTLVFLLAQLLSSIPFLFLISISSSLVFYFLVGLEDQFSLLMYFVLNFFMTLLVNEGLMLVVATLWQDVFWSVLTLLCIHVAMMLSAGYFRVRNALPGPMWMYPMSYIAFHTYSIQGLLENEYLGTSFAVGQVRTISGFQALQNVYNISPDTNSKWKNLLVLFLMAIGYRIFVFILLFFSVGRKISLRKCFKCNNRDTTDTS

SEQ ID NO: 203539 - protein, 93 aa, Glycine max
  unsure (1)..(93): unsure at all Xaa locations
  Clone ID: PAT_MRT3847_25821C.1.pep
MRELYNWHDVAKRTEIVYDRAFKCSNQNLLERLSRYLFXGAWAGKLFFLVMIVGFLLWQLLELWQPADDIEEVPDFTLPCSCDEEMLEKNSVK

SEQ ID NO: 203540 - protein, 55 aa, Glycine max
  Clone ID: PAT_MRT3847_25822C.1.pep
YKIISIKTQINQSINKNINSHYCYISPPTSRHYPIYILNCAVITNYLSLLSSSRR

SEQ ID NO: 203541 - protein, 53 aa, Glycine max
  unsure (1)..(53): unsure at all Xaa locations
  Clone ID: PAT_MRT3847_25823C.1.pep
VDRCHQNTRXGQFYACKQCHNTGLSVGEGDLTLFSLSENQYVFFLMYKYPSIQ

SEQ ID NO: 203542 - protein, 51 aa, Glycine max
  unsure (1)..(51): unsure at all Xaa locations
  Clone ID: PAT_MRT3847_25824C.1.pep
EKRFEVEREXILWLQDNLKLSWEIKILITWHGNENQAKYGITIFSTSLFQE

SEQ ID NO: 203543 - protein, 67 aa, Glycine max
  Clone ID: PAT_MRT3847_25825C.1.pep
VGYENAVAFTALSSQNPGVITIANAVFGSKPPISDEVLAKAFQVGKNIVVSLQKQFGSNNKVNREHN

SEQ ID NO: 203544 - protein, 152 aa, Glycine max
  unsure (1)..(152): unsure at all Xaa locations
  Clone ID: PAT_MRT3847_25826C.1.pep
NSAREENGEAGGNLLALVDQHAAHVRIPLEQLMIDSYEKQQAHGSGRKKLLSSTLIPPLEITVTEEQRRLLXDTSDSLVLVGKVPLCFVEREANELRRGRSTATNSIVEEFIREQLELLQTTGCIQGTLPLTVQNVLASQACHGAIKCNDGP

SEQ ID NO: 203545 - protein, 103 aa, Glycine max
  Clone ID: PAT_MRT3847_25827C.1.pep
MQLDDWVLCRIYNKKGAIEKQQPAPPPPSGVHKIECYEMEDVKPEYTAADCLYFEASDSVPRLHTTESSCSEQVVSAEFASEVQSERKRQGNSEFSYNYMDAT

SEQ ID NO: 203546 - protein, 70 aa, Glycine max
  unsure (1)..(70): unsure at all Xaa locations
  Clone ID: PAT_MRT3847_25828C.1.pep
LGFLDSXYFXRLXKVGDNWREPLVDPCINFSPSNCRKSLILYTXGXFXTXFTXEWYXASSSCPXVTCCIQ

SEQ ID NO: 203547 - protein, 40 aa, Glycine max
  Clone ID: PAT_MRT3847_25829C.1.pep
TTFDNNPLSTSISLGPALLLGVYHTMDYCQKLFIANLLFM

SEQ ID NO: 203548 - protein, 49 aa, Glycine max
  Clone ID: PAT_MRT3847_2582C.1.pep
KNLVLGLDGVLKMVGTSYGFYQLQSPVVNLEYLSYLDWCPNVFSFFGPY

SEQ ID NO: 203549 - protein, 83 aa, Glycine max
  Clone ID: PAT_MRT3847_25830C.1.pep
IPNQCGEVLLREAHAPGPYFSRPLPLWGRFLKIYPLRFFEVAGFPPSLLFSGPEKMLPHSDNIQYVVVWVVCSPLVAVLIIAC

SEQ ID NO: 203550 - protein, 58 aa, Glycine max
  Clone ID: PAT_MRT3847_25831C.1.pep
DGCPLLQDSEWDGVFLQKMNILEDPSTRKCLENFILWLGRLDRNWFTYWARSSCLNRW

SEQ ID NO: 203551 - protein, 111 aa, Glycine max
  Clone ID: PAT_MRT3847_25832C.1.pep
GMVYAHKATLLVGLYLDAISTGAAGSKSLDLYGKRILNRDLDPGFFVNHFVKDLGICLKECQNMGIALPGLALAQQLYVSLRAHGEGNLGTQALILVLERLNNVTLPPSNT

SEQ ID NO: 203552 - protein, 130 aa, Glycine max
  unsure (1)..(130): unsure at all Xaa locations
  Clone ID: PAT_MRT3847_25833C.1.pep
PVRKTGHHPPVLPPVRLIFLRDEVEAGPQPERGLGKPRKLTTLQTMDEGERSTLPKTLSMPTTPTTERTATTPTTPGSARKADNDWRSVFHPGSNSATKTISAHKFDKPVANTPTDXDWLYSGETRSRHR

SEQ ID NO: 203553 - protein, 95 aa, Glycine max
  unsure (1)..(95): unsure at all Xaa locations
  Clone ID: PAT_MRT3847_25834C.1.pep
LFPLFYSRSLPPFWPGSSIQFPSFSPPPPPLSXPPPRAREGVSSPPPSPEKVGPPIVPWDGFFRKTPATPGVYYLPLFEKQVSAKLSTQGKSGGQ

SEQ ID NO: 203554 - protein, 82 aa, Glycine max
  Clone ID: PAT_MRT3847_25835C.1.pep
IFAKCVVCIVQHIKTINDYVINNVEIGVTEVGFNEICEDILVSIMIAKYRCSLLWCCCVHKVNILGSHEIDRSEGGFIGESV

SEQ ID NO: 203555 - protein, 89 aa, Glycine max
  Clone ID: PAT_MRT3847_25836C.1.pep
HKQPTEPGVLPVEYEIPSTGRGIFLLLQLPAVVVVSQVSILTTMQSVSIHTIFLSLNHINNSNKHNQKNQRLKTVHLKIAITMSRFNRP

SEQ ID NO: 203556 - protein, 109 aa, Glycine max
  Clone ID: PAT_MRT3847_25837C.1.pep
MDAIQTEKIYVAVGNDVQDGYKTLNWALKKWNSHPISIVILHLTHNSTKDYVHTPFGKLPARSVSEEKLQILKKDEPDKINQLLFKDIAFWGKGPAEILGGEKFDEPIP

SEQ ID NO: 203557 - protein, 546 aa, Glycine max
  Clone ID: PAT_MRT3847_25838C.1.pep
MGNCCSQGNVADGPADDSAAANDKGEANQQGSNNHANDNNDNSTNPTTAPTTTSKPPPTVTPPTSKPSKPAAMGPVLGRPMEDVRATYTIGKELGRGQFGVTHLCTNKATGQQFACKTIAKRKLVNKEDIEDVRREVQIMHHLSGQPNIVELKGAYEDKQSVHLVMELCAGGELFDRIIAKGHYTERAAASLLRTIMQIIHTFHSMGVIHRDLKPENFLMLNKDENSPVKATDFGLSVFFKEGETFKDIVGSAYYIAPEVLKRKYGPEVDIWSVGVMLYILLSGVPPFWAESEHGIFNAILRGHIDFTSDPWPSISNAAKDLVRKMLTTDPKQRLTSQEVLNHPWIKEDGEAPDKPLDNAVLNRLKQFRAMNQFKKVALRVIAGCLSEEEIMGLKEMFKGMDTDNSGTITIEELKQGLAKQGTKLTEQEVKQLMEAADADGNGTIDYDEFITATMHMNRMNREEHLYTAFQYFDKDNSGFITTEELEQALREYNMHDGRDIKEILQEVDGDNDGRINYDEFAAMMRKGNPEVMTKKRRDSLPLPLP

SEQ ID NO: 203558 - protein, 44 aa, Glycine max
  Clone ID: PAT_MRT3847_25839C.1.pep
LIIPSYLHKTGRDVRISYKTIPQSSVLGCFLMLFLLTTAPGLNK

SEQ ID NO: 203559 - protein, 247 aa, Glycine max
  unsure (1)..(247): unsure at all Xaa locations
  Clone ID: PAT_MRT3847_2583C.1.pep
LEVTDDEDELVNSFLVYDEEFVINEERRHCFVNSSTQPKSLRRVYNESSGNWFRLQSGHISSGEYPALKMFKSSHDVVRGGPSRLALNQKANKEKKESIIQDDLWAVETSSCDSTADEPIEISSSPSTPTRLKNQYHLRPENLILQRTVAGRPQTQKVSNNAVSHLEVQKELLTVKSEKDQKNAQNTSSRGNLKNKSQQSSDVNNNGSFFYMEMTSNQSLFPRSVYLVNVVIGILXXIVISWDVLSC

SEQ ID NO: 203560 - protein, 304 aa, Glycine max
  Clone ID: PAT_MRT3847_25840C.1.pep
MCGGAIIADFIPRRGGRRLTASELWPNSFGKDGDFDFDYSHIADQQRSTLKMSPPPKASEQVENKPVKRQRKNLYRGIRQRPWGKWAAEIRDPRKGVRVWLGTFNTAEEAARAYDREARKIRGKKAKVNFPNEDDEYSIQARHPIPPLPFTPQTQNPPLYQQQYRCDLNIAPKNLNFEFGYDLNHAGAFPSHVDAVNADSVVVSGDENSGLASGSEGAYSTTEFMGSSQNGNGYLGVTAMEKNEKETEVIEAQEEKNKVQELSEELMAYENYMKFYRIPYYDGQSTAPPNNVQESLVGDLWSFD

SEQ ID NO: 203561 - protein, 70 aa, Glycine max
  unsure (1)..(70): unsure at all Xaa locations
  Clone ID: PAT_MRT3847_25841C.1.pep
LXXGANKNDSCWYVTVVHNGVQKGGVQRPCQVQTTRKECPSNMRKLTTGPGNKRMRPQWGAPRRPCPYPN

SEQ ID NO: 203562 - protein, 43 aa, Glycine max
  Clone ID: PAT_MRT3847_25842C.1.pep
GSLRNKLLGTYMSTVNFFFYISTVNFGLTSYTFYSKKYVISIT

SEQ ID NO: 203563 - protein, 100 aa, Glycine max
  Clone ID: PAT_MRT3847_25843C.1.pep
ERMYQISTEKFLNYDIPIRNIDFYFPCIPLTFEKVLVLINAHPMFFNSSYPKPGGRHPSRFKGKNSIEKTELYSLPWGWGGGGISPQTGRELIAPPCPLF

SEQ ID NO: 203564 - protein, 64 aa, Glycine max
  Clone ID: PAT_MRT3847_25844C.1.pep
FNRVIIVDVLGPWSCPWRLYSDQGDMHLLSHKWGEGPDNATAKRFHTPEINSRSLSMSRICMVE

SEQ ID NO: 203565 - protein, 142 aa, Glycine max
  Clone ID: PAT_MRT3847_25845C.1.pep
TKSRFSHSFALNSTVGSRRSRTFRTSGISAAFVRRKCSLFFISSVSSAPAAAAAAAVATSSASLASLVFSSTLCILARPISVAFANGNSVGFTSSAGIHDFLYRRFSSAPANTASRSRAAVSAATISHVPLKKQSIAGTYLR

SEQ ID NO: 203566 - protein, 71 aa, Glycine max
  Clone ID: PAT_MRT3847_25846C.1.pep
GSRSHVVLKHSLQAQPAAKIFLVKRRLITTTTTMMFTISPGWSIFLYIPFGWANFLNISFPHFIYIYIVCS

SEQ ID NO: 203567 - protein, 123 aa, Glycine max
  Clone ID: PAT_MRT3847_25847C.1.pep
LRYLEKVVLFGSNKQRMEAWDNGGLMIHDALRAAQIEGISRRMIGMIRGISKLPTYKRKFRQIVKALVTHSLEKDVSERALVTHHSVDVLDVSEKALVTRYLEKDPSGRSSRSIVSVASDEIA

SEQ ID NO: 203568 - protein, 58 aa, Glycine max
  Clone ID: PAT_MRT3847_25848C.1.pep
PPPVAVVTIVTGGEFSMQLTCPRGSSTLEGQGALTILSHDISNTSFTMLNLRQLNILE

SEQ ID NO: 203569 - protein, 249 aa, Glycine max
  Clone ID: PAT_MRT3847_25849C.1.pep
DPASGTELLTVKHRIVHNCPKLSLTSTTTLRELCANIPYSDFENIGLSPLDFVYSICNMIESDEVSRRSGTNELPSSQINEKSENDFIGNIPGSEAQAAATSTNSEPNKRPTPSPLDNCQRETHSHELVDGQSTSQSYFTDQQRPLGKTESAIGIPQHEQNPAPENTSPFQMNLEDPSTSKSKPPSPQVNDNNQFVLGSITETVREHKQFESRVTVFETGECPELERENKRTSNLQKLEQKLSPISSPT

SEQ ID NO: 203570 - protein, 150 aa, Glycine max
  unsure (1)..(150): unsure at all Xaa locations
  Clone ID: PAT_MRT3847_2584C.1.pep
APFLGVAAPFRGFXRALRAGGSGLLAAWLLFFVGXGGPSFPQGLALLRALXGVFGLPLGVCGPGAPLAGFCPVALPFFAAAALGLPPLPWCFRGSVVWFSLPLPFRAFCWGVFLSLLPGGPACPVVFVGFCWCCPPLPGVFPLAVAHVLK

SEQ ID NO: 203571 - protein, 63 aa, Glycine max
  Clone ID: PAT_MRT3847_25850C.1.pep
HHTPLFIFSITDRAPISVNSLRSSAISYLISNLLIFLVFTSAHFFAFNILNFLFQHPKANFHN

SEQ ID NO: 203572 - protein, 82 aa, Glycine max
  Clone ID: PAT_MRT3847_25851C.1.pep
QCGKGGCYARLFKWVTPGFFESRRCKKSASEMKLGVSYRRVIAFVCSGLLAWFFLYFFFFFFFFFFFFFFFFFFFNHGLKKQ

SEQ ID NO: 203573 - protein, 215 aa, Glycine max
  Clone ID: PAT_MRT3847_25852C.1.pep
HCPRSRNHLSRSPSNNSSKAWDDASLDSGSDQVGSCTTKDMLGALYLQYSENSPPYQRVPFSEKITELAKSHPGLMRLKSVDISPTSWMAVSWYPIYSVPCHKNKRDQTSFLTFHSLSSFQDCASKYDEIHTGNNKSCLIDWRSIVGEKCKKKERGCMSLSPFGLATYKMRKNIWLNPYNNNQVVTDLYNAADWWLKHINADHPDFNFFTRQPTL

SEQ ID NO: 203574 - protein, 259 aa, Glycine max
  Clone ID: PAT_MRT3847_25853C.1.pep
MNSLDITTVEKPHAVCIPYPAQGHITPMLKLAKVLHFKGFHITFVNTEFNHKRLLKSRGADSLNGFPSFRFETIPDGLPESDVDATQDTPTLCESLRKTCLVPFRNLLAKLNHSRHVPPVSCIVSDGVMSFTLIASEELGIPEVFFWTISACGLLCYLHNGQLVKKGLVPLKVLQEECGRAKHASAIILNTFEALEHDVLEALSSMLPPVYPIGPLTLLLNHVTDEALKTIGSNLWKEDRECLKWLDTNEPKSVIYVNF

SEQ ID NO: 203575 - protein, 87 aa, Glycine max
  Clone ID: PAT_MRT3847_25854C.1.pep
STINEAQDPNMTPCGLLFLGIGLRGFRLILVLLWPGLFELLVAIGGFCYTGYLVDYLARCLVAIPLPSRPGDRTLDSSIEIARRCSV

SEQ ID NO: 203576 - protein, 51 aa, Glycine max
  Clone ID: PAT_MRT3847_25855C.1.pep
RLIPHYLTNVTSRLVLLYFGYTPPYLSLTLHLDICNHSLYTNNIPSLYIMN

SEQ ID NO: 203577 - protein, 60 aa, Glycine max
  unsure (1)..(60): unsure at all Xaa locations
  Clone ID: PAT_MRT3847_25856C.1.pep
LARTPGVKASYLGESGSRRHTYDHHRVGGVYPMPHFMHTYQLWKRCIWSXPAALLVRSGY

SEQ ID NO: 203578 - protein, 59 aa, Glycine max
  Clone ID: PAT_MRT3847_25857C.1.pep
QMKRGFNPEEIYSHFQSIHFAPAPNYEKVGLSYQSVVLGSKKYKPQFITADLVQFPLYF

SEQ ID NO: 203579 - protein, 495 aa, Glycine max
  Clone ID: PAT_MRT3847_25858C.1.pep
MGTRKWPPLIIALAFCLMAMSVSAEDKPYYGQPSNYYPHPMPPPYQQVNPPYYYKSPPYYYKSSPPPSPSPPPPYVSKIPPYYYKSPPPPSPSPPPPYVYKSPPPPSPSPPPPYVYKSPPPPSPSPPPPYIYKSPPPPSPSPPPPYVYKSPPPPSPSPPPPYVYKSPPPPSPSPPPPYVYKSPPPPSPSPPPPYVYKSPPPPSLSPPPPYVYKSPPPPSPSPPPPYVYKSPPPPSPSPPRPYVYKSPPPPSPSPPPPYVYKFPPPASPSPPPPYYYKSPPPPSPSPSPPYIYKSPPPPSPSPPPPYYYKSPPPPSPSPPPPYVYKSPPPPSPSPPPPYIYKSPPPPSPSPPPPYVYKSPPPPSPSPPPPYVYKSPPPPSPSPPPPYVYKSPPPPSPSPPPPYIYKSPPPPSPSPPPPYVYKSPPPPSPSPPPPYVYKSPPPPSPSPPPPYVYKSPPPPSPSPPPPYIYKSPPPPSPSPPPPYHPYLYNSPPPPVY

SEQ ID NO: 203580 - protein, 442 aa, Glycine max
  unsure (1)..(442): unsure at all Xaa locations
  Clone ID: PAT_MRT3847_25859C.1.pep
MSVAADDKPYYGQPSNYYPHPTPPTYRQINPPYYYKSPPYYYKSPPPPSPSPPPPYVYKSPPPPSPSPPPPYIYKSPPPPSPSPPPPYVYKSPPPPSPSPPPPYVYKSPPPPSPSPPPPYVYKSPPPPSPSPPPPYIYKSPPPPSPSPPPPYVYKSPPPPSPSPPPPYVYKSPPPPSPSPPPPYVYKSPPPPSPSPPPPYIYKSPPPPSPSPPPPYVYKSPPAPSPSPPPPYVYKSPPPPPSSPPPPYVYNSPPPPSPSPPPPYVYKSPPPPSYLPHMSPPPPSPSPPPXYIYKSSPPPSPSPPPPYVYKTPPPPSPSPPPPYVYKSPPSSSPSPPSPYVYKSPPPPSPSPPPPYVYKSPPPPSPSPPPPYVYKSPPPPSPSPPPYYDXKSPPPSSSSPPPYYDNXSPPPSSSSPPPYYYKSPPPPSPSPPPPYYDKSPPPP

SEQ ID NO: 203581 - protein, 42 aa, Glycine max
  Clone ID: PAT_MRT3847_2585C.1.pep
LNSNKGAAVNAIFCFYSSQIYLNLHNFIRIVAILLHRVNKYF

SEQ ID NO: 203582 - protein, 87 aa, Glycine max
  unsure (1)..(87): unsure at all Xaa locations
  Clone ID: PAT_MRT3847_25860C.1.pep
VTCAYTASHSMHKRARFGMWSYGARILCLLHVTTRSAVXSIWSIGSSASGATEDSRSCLLKVRCLSAGSHWCSSAMDVSLAFVFSYL

SEQ ID NO: 203583 - protein, 369 aa, Glycine max
  Clone ID: PAT_MRT3847_25861C.1.pep
MQNPAAHAAASFAATFWPYANAETSADSPVCTPDFPSRQIGSPPSVTAIAAATVAAATAWWAAHGLLPLCGPLHTAFACPPASATTVPSMIIDESPQKTERGEIKPQNPPLQDQIPDPEHSEAQHSAPKSPAVSSSKSEDRGDANLDTSPKATNHEMNQAISENPDSNKMKGRKPVDRSSCGSNTTSSSEETELLEKDEKEKEEPKTPDANVLDTELSNRRSRSISNLTDSWKEVSEEGRLAFQALFSREVLPQSFSPTHHLINKDNQIDSIKDNELNTDYKDEDLESKKCSSICDGVQKNLLFVKDNNEEEGLLTIGLGPGKLKTRRTGFKPYKRCSVEANENRIGTACIQGEEKGPKRLRLNGEAST

SEQ ID NO: 203584 - protein, 83 aa, Glycine max
  unsure (1)..(83): unsure at all Xaa locations
  Clone ID: PAT_MRT3847_25862C.1.pep
RRNAXPVRKXLXFXLXDGXXPXXFXXFXFFXFFXXFFFXFFFFFFQIKNPPSYNPNRREKQDFWLAFFFLLGGPLFFILLQKG

SEQ ID NO: 203585 - protein, 384 aa, Glycine max
  Clone ID: PAT_MRT3847_25863C.1.pep
REFQVRETVRDVAFLHNELFFAAAQKKYPYIYNREGTELLFLQEHGPVLRLQFLENHFLLASINKFGQLRYQDVTMGSMVGNFRTGLGRTNVMQVNPFNGVVSLGHSGGTVTMWKPTSASPLVKMLCHHGPVSALAFHSNGLLMATAGKDKKIKLWDLRKFEVLQTLPGHANTLDFSQKGLLACGNGSLIQILRDVSGTQNYSKYMTHSMVKGYQIGKLVFRPYEDVLGIGHSMGWSSILTPGAGEPNFDSWVANPFETSKQRREKEIRSLLDKLPPETIMLDPSKIGTVKPRREKPTKQEREAEIEADVEAAKGKKLKKKTKGRNKPGKRVQKKQEAVARVKRPYLEQKIQEEESISRKKQKTREGVELPKSLQRFVRKKASS

SEQ ID NO: 203586 - protein, 675 aa, Glycine max
  Clone ID: PAT_MRT3847_25864C.1.pep
EAFVKGVPIGQALDIDIPPPRPKRKPNNPYPRKTNVGGAPTLHSGARHGKPLISIVSSLGKQALGLEKEPLPEKHDVDLRPSTVKENKDQSCSKVFTILQEAPCSSVSSANKNSTSILVPLRNSCALRKFIPSVKDVITQDETNDSFVTDDLENQKLEIDDGKHTQKSNGTCKVSKSENSGASELVQTEKTDGLNCALTIEGVQGNQNYPRHVPVHVVDGNLGTSTQNPSPDMVFQDSIFQPKGGVNGQPNLVTISATSNISESQNNTARSSIHQSFPPCPTFTQDDYHSFLQVSSTFSSLIVSTLLQNPAAHAAASFAATFWPYANAETSADSPMCTPDFPSRQIGSPPSVTAIAAATVAAATAWWAAHGLLPLCAPLHTAFACPPASAIAVPLMNIDESPQKTEQEEIKPQNSSLQDQILDPEHSEAQHSAPKSPAVFSSKSEERGDANLNTSPKATNHETNQVISENPDSNKMKGRKPVDRSSCGSNTTSSSEETELLLKDEKEKEEPKTPDANILDTELSNRRSRSINNLTDSWKEVSEEGRLAFQALFSREVLPQSFSPTHDLINEDNQIDSIKDNDQNTDYKDEDLESKKCSSNSDGVQKNLLFVKDNNEEEGLLIIGLGPGKLKTRPTGFKPYKRCSVEANENRIGTACNQGEEKGPKRIRLNGEAST

SEQ ID NO: 203587 - protein, 49 aa, Glycine max
  Clone ID: PAT_MRT3847_25865C.1.pep
RESATARQKVEMVRVAEDIDQWSKNYTALTPLWFLERAAQVHPTRDSLL

SEQ ID NO: 203588 - protein, 575 aa, Glycine max
  Clone ID: PAT_MRT3847_25866C.1.pep
GSPNARVSSANKNSTSISVPLRNSCALREFIPSVKEVITRDETNESFVTDELENQKLEIDDGKHTQKTNDTCEVSKLENSGASELVQTEKTDGRNCALTIDGVPGNQNYPRHVPVHVVDGNLGTSTQNLSPDMVFQDSIFQPKGGVNRQPNLVTNSATSHISECQNNAARSSIHQSFPPSPPFAQDDYHSFLHMSSTFSSLIVSTLLQNPAAHAAASFAATFWPYANAETSADSPVCTPDFPSRQIGSPPSVTAIAAATVAAATAWWAAHGLLPLCGPLHTAFACPPASATTVPSMIIDESPQKTERGEIKPQNPPLQDQIPDPEHSEAQHSAPKSPAVSSSKSEDRGDANLDTSPKATNHEMNQAISENPDSNKMKGRKPVDRSSCGSNTTSSSEETELLEKDEKEKEEPKTPDANVLDTELSNRRSRSINNLTDSWKEVSEEGRLAFQALFSREVLPQSFSPTHHLINKDNQIDSIKDNELNTDYKDEDLESKKCSSICDGVQKNLLFVKDNNEEEGLLTIGLGPGKLKTRRTGFKPYKRCSVEANENRIGTACIQGEEKGPKRLRLNGEAST

SEQ ID NO: 203589 - protein, 104 aa, Glycine max
  unsure (1)..(104): unsure at all Xaa locations
  Clone ID: PAT_MRT3847_25867C.1.pep
XXXYXXXYYXXXXXLXXKXXXXLQHXYXXXVXXXXXSXXPXVXLXXXXXXXXXTXXLLXXXCXHXXLXTXYXXLXXXPXXPSXXQXXFXXXXPKSSXPXRXXNS

SEQ ID NO: 203590 - protein, 89 aa, Glycine max
  Clone ID: PAT_MRT3847_25868C.1.pep
LVRHLTTSSWADCEGLCQNNCSCWGALYSNATGFCYMLDYPIQTMVGTGDGSKVGYFKVKKEERGKNRVWIRVGVVVTVLVGVGVIIIG

SEQ ID NO: 203591 - protein, 72 aa, Glycine max
  Clone ID: PAT_MRT3847_25869C.1.pep
TFPTLDGLHNPLPRSQFLSQDHPLLTHHFPLKQQVHHHKTAPTHEVLKPHAKFNILEMMGGRGLCNGEKGIQ

SEQ ID NO: 203592 - protein, 49 aa, Glycine max
  Clone ID: PAT_MRT3847_2586C.1.pep
NMNKCYLISISLDLIMHIFFLSYFLDLIAHIFFYHVYYFYSSNLIELLS

SEQ ID NO: 203593 - protein, 153 aa, Glycine max
  Clone ID: PAT_MRT3847_25870C.1.pep
MEVKSRAPGKIILTGEHAVVHGSTAVASSIDLYTYVSLHFSTPSDNEDSLKLKLQETALEFSWPITRIRAAFPESTAQLSSTPNSCSVENAKAIAALVEELNIPEAKLGLASGVSAFLWLYSSIQGFKPATVVVTSELPLGSGLGSSASFCVA

SEQ ID NO: 203594 - protein, 107 aa, Glycine max
  Clone ID: PAT_MRT3847_25871C.1.pep
VEIESESESENSESESPSSDSGSGSSSSSSDSSSDSEDTDDDDKDDDVEVEEGEISGSDEEKMVSWSMADEDDDEDGDVGGGPIRSKNELQVFFYLFILFFNFRFIY

SEQ ID NO: 203595 - protein, 121 aa, Glycine max
  unsure (1)..(121): unsure at all Xaa locations
  Clone ID: PAT_MRT3847_25872C.1.pep
QQMGFLADLIVDELQEQLMEELDYTLQPXTIGDHIDKIKNYPTVKIPEAYKQSFGQRLLVMEWIDGIHHTNPHATSEACVDLQXSLTIEECAGTQQLMESRLYKGDPFPTNIEAMRERRAA

SEQ ID NO: 203596 - protein, 93 aa, Glycine max
  unsure (1)..(93): unsure at all Xaa locations
  Clone ID: PAT_MRT3847_25873C.1.pep
VRRKTEGAGKGRTNMRRTVKSDTQNICYGPNRSKDLGPFSEQIASYLTGENRGNYGWDTXGLSSDPETITRYPELXVIHSTPSMLVALDCTFP

SEQ ID NO: 203597 - protein, 34 aa, Glycine max
  Clone ID: PAT_MRT3847_25874C.1.pep
ALKMALFTFSAIPVVWPASIDRTCLARNQNYRLE

SEQ ID NO: 203598 - protein, 63 aa, Glycine max
  unsure (1)..(63): unsure at all Xaa locations
  Clone ID: PAT_MRT3847_25875C.1.pep
MGRKFFVGGNWKCNGTXKEVKKIVTTLNEAKVPGEDVVEVVVSPPFVXXPVVKSLLXPDFQRH

SEQ ID NO: 203599 - protein, 72 aa, Glycine max
  Clone ID: PAT_MRT3847_25876C.1.pep
HCYQSRDVSMLLTLAVSSEERVSLSRPLESTFSYLPELMQHSPARVVREDRPHVGSFIVAKNLCKLQWKLDL

SEQ ID NO: 203600 - protein, 98 aa, Glycine max
  Clone ID: PAT_MRT3847_25877C.1.pep
RFAFPLLSSLAPTNGRVRPRGGPHPCAYIAICFSCFCLFVCFPISLFTFFSPFFLHLVSWAGWDLHSCSPGPRQSPTLSFWHQSLPSFSHRAWLGRGA

SEQ ID NO: 203601 - protein, 86 aa, Glycine max
  Clone ID: PAT_MRT3847_25878C.1.pep
SLHISVRVFSRSNAFGILSAFPNSRKNYTVRRFTRFSARYKNKYLEMRHLHFPALYIHTLKYIRSFAVLNFIMGKSGTKASPPVVP

SEQ ID NO: 203602 - protein, 49 aa, Glycine max
  unsure (1)..(49): unsure at all Xaa locations
  Clone ID: PAT_MRT3847_25879C.1.pep
NTLIYRVQGPDGVPWXYWKTMGLSLNCAFLLFGSVIQLIACARDIYFIK

SEQ ID NO: 203603 - protein, 71 aa, Glycine max
  unsure (1)..(71): unsure at all Xaa locations
  Clone ID: PAT_MRT3847_2587C.1.pep
GGVALPVTFGNPCFVWLKANKPKKYRATWALIWFLGTLAAALSADIGRAQFXVILELGENVSFFDPQKSHI

SEQ ID NO: 203604 - protein, 339 aa, Glycine max
  Clone ID: PAT_MRT3847_25880C.1.pep
LGPTNQWRVRLPQPQETKPTATTTTETTPSETSNSNTNNKISSRKCKGTRPPDNNKFRYRGVRQRSWGKWVAEIREPRKRTRKWLGTFATAEDAARAYDRAAIILYGSRAQLNLQPSGSSSQSSSSRSSSSSTQTLRPLLPRPSGFSVNFPFNTATVPYPYNNSHNYTYSPPVLCPNDNHNNNIVQVHHPHHHRCPEELVQVQVAHTLSTSYQHNSESDVGLGVNNNVFVVDGSIRSTSYQRHGFLDSNNNHVHVQVQHGVLLNQQQQQHQNGVVVEGVNNSPVVGSVASAMDAFSVDPDLALVGTMGLGSFSPFWSMANEDDYTGSLWDYNDPFFFDL

SEQ ID NO: 203605 - protein, 103 aa, Glycine max
  Clone ID: PAT_MRT3847_25881C.1.pep
MSASGGRGSQEEEKKPSDQGAHINLKVKGQDGNEVFFRIKRSTQLKKLMNAYCDRQSVDFNSIAFLFDGRRLRAEQTPDELEMEDGDEIDAMLHQTGGGHKFL

SEQ ID NO: 203606 - protein, 75 aa, Glycine max
  unsure (1)..(75): unsure at all Xaa locations
  Clone ID: PAT_MRT3847_25882C.1.pep
MASILHYFLAXSLSCSFLFFXSDSVTPTKPINLVVLPVQNDGSTGLHWANLQKXTPXMQXXXLVDLNGKSFWXTC

SEQ ID NO: 203607 - protein, 44 aa, Glycine max
  unsure (1)..(44): unsure at all Xaa locations
  Clone ID: PAT_MRT3847_25883C.1.pep
RWVVFCECLGAVPFQFLICLXVXAPVLSVVLSLVTPVCRVSQPV

SEQ ID NO: 203608 - protein, 57 aa, Glycine max
  Clone ID: PAT_MRT3847_25884C.1.pep
LTNYRPPTEILQKKRKKKLGKKKNNWMKFNKFNGGENNGILNYCFFKERSIFLFSIK

SEQ ID NO: 203609 - protein, 185 aa, Glycine max
  unsure (1)..(185): unsure at all Xaa locations
  Clone ID: PAT_MRT3847_25885C.1.pep
MEDSFRVRAERAFGSLPIPASSSLNSLWSLTEDEIQNTPSNRTPKPKPKPKTKPQSQSYSFSSSRVQLEKDLNDFDDDEEEEPRGPSKPPDYDDEQWQIKAGIGRDCTLDYEEEEDQYDKQAIGKENLGDRLYMKDINDDGVEISSCNVFPTSFRDLVRDPRANHLAARIXLKQDDEAAAKKIDA

SEQ ID NO: 203610 - protein, 102 aa, Glycine max
  unsure (1)..(102): unsure at all Xaa locations
  Clone ID: PAT_MRT3847_25886C.1.pep
YKLSLLQGTYQRVKRTPLSIGGGAGAKNAIVMSMPNAVLTRWRCSVGDMDMLVSKRTASYIXRTGSVFMALGCLADDTIRVVAWPRKLLQFGELQICCLVIF

SEQ ID NO: 203611 - protein, 420 aa, Glycine max
  unsure (1)..(420): unsure at all Xaa locations
  Clone ID: PAT_MRT3847_25887C.1.pep
MEDSFRVRAERAFGSLPIPSSSLNTLWSLTEDEINNSPSNRTPKPKPKPYPSSSSRVQLQKGLHDLDDDDDDDDEEEEEPRGVSKPPDYDDEQWQIRAGIGRDCTLDYEEEEDQYDKQAIGKENSGDRVYMKDLNDDGVEISSCNVFPTSFRDFVRDPRANHLAARIXLKQDDEAAAKKIDALHVSEKSAPDIGGGSGSDVINPKSILKSKDNLSEPRDVRKRVRFDSECDDSGNDDDGLEGRTRDVRMKTSSMEEATASDQLSKSKEFDSAVPDYIRNPSRYTRYTFDDSPSDMDDKSNKEACMSFLLQLKGSNAAKRTGPQEDEALEDLPSVTFISKKKSGDANMCDSEMVSKPKLDAGTEAMNKRAFPVGIAASDSENSDACAMEEDEPEVKDIKKSSQKVNRQYRKKAQENLEEPV

SEQ ID NO: 203612 - protein, 35 aa, Glycine max
  Clone ID: PAT_MRT3847_25888C.1.pep
INKYINFIIKKLKRRKVLESSSGLPNKPTVQSHIR

SEQ ID NO: 203613 - protein, 461 aa, Glycine max
  Clone ID: PAT_MRT3847_25889C.1.pep
MAVQNSLQITRSGSGGYDDDGRAKRTGTLWSAVAHIITAIIGAGVLSLAWSTSQLGWIAGPVCLLFCAIVTYVSSFLLSDCYRTLDPVTVKRNYSYMDAVRVYLGNKRTWLAGSLQYLSLYGVSTAYVITTATCLRAILKSNCYHKEGHQAPCKYGDVVYMMLFGLVQVIMSFIPDLHNMAWVSIVAAIMSFTYSSIGLGLGITTVIENGRIMGSLTGVPASNIADKLWLVFQAIGDIAFAYPYTVILLEIQDTLESPPPENKTMKKASMIAILITTFFYLCCGCFGYAAFGNQTPGNLLTGFGFYEPYWLIDFANACIVLHLVGGYQIYSQPIYGAVDRWCSKRYPNSGFVNNFYQLKLPRLPAFQLNMFRICFRTTYVVSTTGLAILFPYFNQVIGVLGALGFWPLAIYFPVEMYFVQRKIEAWSRKWIVLRTFSFICFLVSLVALIGSLEGIISEKLS

SEQ ID NO: 203614 - protein, 68 aa, Glycine max
  Clone ID: PAT_MRT3847_2588C.1.pep
SRAAALFFFFLRSSQTITWILTYDYNTETIQPCLINATNPRTGLGSPIFITTIDIHAHAKETWNLYKD

SEQ ID NO: 203615 - protein, 110 aa, Glycine max
  Clone ID: PAT_MRT3847_25890C.1.pep
FFSSIFIRFFSLNFQSFSFKISLLISRIMRPAVEGSMAERFDDCEKEKKKKKRRSNRRSKQNPPSSSASEVNDAQGLSPDSWKIGTPTHASPSLGNSLYQVNVCSSNEQG

SEQ ID NO: 203616 - protein, 121 aa, Glycine max
  Clone ID: PAT_MRT3847_25892C.1.pep
STLCASTSNPKMHLLMIRAMSMKMGNTLRKMRFKPIVVVCRGLGNEIRSKTPKMWGFFHTETKITFRDFEGVWGNMGQFSRAGIGEFKGLKFRGHITVLLTRSPAIIKDVERFGAMIGMQF

SEQ ID NO: 203617 - protein, 63 aa, Glycine max
  unsure (1)..(63): unsure at all Xaa locations
  Clone ID: PAT_MRT3847_25893C.1.pep
ILVLPPIIPGTLWSAVAHIITAIIGXAGVLSLAWSTSQXLGWIAGPVCLLFCALVTYVPFFLL

SEQ ID NO: 203618 - protein, 58 aa, Glycine max
  unsure (1)..(58): unsure at all Xaa locations
  Clone ID: PAT_MRT3847_25894C.1.pep
NLGIIAPITNGFIVXHHISMGGAYLWTGRSPXATFGPAVMRCTWTNQWMYWVSSPNGS

SEQ ID NO: 203619 - protein, 370 aa, Glycine max
  Clone ID: PAT_MRT3847_25895C.1.pep
MTAGAAIAMAEPGANSSLLPAVTQFFLKVQTVIGPYGVNLLWTFFMADGMSIDPKILVSNFPVNNGVLGLLICRKTILVCLIKIFLGISLISVIRVGLLLAPGGEFAFVAFGETVNYGIMSSQLSSLLFLVVGISMAITPWLAAGGQLIASRFEQNDVRSLLPVESETDDLQDHIIICGFGRVGQIIAQLLSERLIPFVALDVRSDRVAVGRALDLPVYFGDAGSREVLHKVGAERACAAAITLDTPGANYRTVWALSKYFPNVKTFVRAHDVDHGLNLEKAGATAVVPETLEPSLQLAAAVLSQAKLPTSEIAATINEFRSRHLAELTELCEASGSSLGYGFNRIMNKPKSPSPDSLDETPVSEGTLAI

SEQ ID NO: 203620 - protein, 76 aa, Glycine max
  Clone ID: PAT_MRT3847_25896C.1.pep
GSSSSESARDLFGWHSIALRSQNWQKSYNLLERTQKSRKKELRLVLYKLTAAMSSTKTAILIKSSIMTVNNEARSL

SEQ ID NO: 203621 - protein, 113 aa, Glycine max
  Clone ID: PAT_MRT3847_25897C.1.pep
RAESARAARADRHLLLFGDSLLSQCTNELHYLRSVNQLHSHWFDHHALSFNSQTLSSPSLSLYSVETVPHGCESLLHRRRSQTLLHQPWRRQRRRWQGPLFLPRVEGFPGDRG

SEQ ID NO: 203622 - protein, 505 aa, Glycine max
  unsure (1)..(505): unsure at all Xaa locations
  Clone ID: PAT_MRT3847_25898C.1.pep
MAMANKEREKKFFFVGSLVNYAAELKLLLATLFLLCGVATLLQFLPSRFTISSSDLRFCISRVSLTPPPPSTPPPPFTSLSTPPTPLSSTQKHLPNGTIKRVFNPHGSAAYNFITMGAYRGGLNTFAIVGLSSKPLHVYGKPTYVCEWIPDLPSLQNSSKPIITKGLKYLPDWGYGHVYTVVVVNCTFNGTAVNGDNTGGKLVLHASTSGAGDTGFNVTDRIEVLHEAPGALNASLFMSKPKYDYFYCGSSLYGNLNPQRVREWIAYHVRFFGPKSHFVIHDAGGVHEEVLEVLKPWMELGFVTLQDIRDQERFDGYYHNQFMVVNDCLHRYKFMAKWMFFFDVDEYIYVPPKTTIKSVLHSLSEYDQFTIEQMPMSSKICLSEDYGKTYRXCFVEKLVYRDSITGIRRDRKYAVQPRSLYATGVHMSMDLSGKTTHKTEGRIKYFHYHGTISERRETCKILVNTTQVTQNKIPYVMDTTMRDTAGVIKKFELKMIGTRLQKTRQ

SEQ ID NO: 203623 - protein, 103 aa, Glycine max
  Clone ID: PAT_MRT3847_25899C.1.pep
EGSVVGSLVAAGPVMVIAATFANATYERLPLDEDDEGPSSVAGAQGGGSSPPPPLGIGSSGGGQLQGGMPDPSSMPLYNLPPNGGVGQVGHEALAWAHGRAPF

SEQ ID NO: 203624 - protein, 258 aa, Glycine max
  unsure (1)..(258): unsure at all Xaa locations
  Clone ID: PAT_MRT3847_2589C.1.pep
VFLVLFLFHVGDRHFYTVFPGIFLFSLDKLIRIIQSSPKTCMVSARIFPGRALELILPKDPGMKYNPTSVIFLKIPTISHLQWHSFSIISSSRADDHILSVIIKCEGWWTNSLYDLIHAELDKTADKRKGIPIAIEGPYGPASLDFLRYDTLLLVAGGSGITPFLSILAEADSATNKSRFPSRXQLVYVIKKAQDFCLLHPISHLLLNQSTEKFHLNLKLFVTQETQAEVGIRELLNEFFKVRNPAVNSMSKYAAYGP

SEQ ID NO: 203625 - protein, 55 aa, Glycine max
  Clone ID: PAT_MRT3847_258C.1.pep
QLPIVLPDRGNITHRTDCHASHIHGSALRRYAGVPDWRHSCLMLDIMQPLLVSLT

SEQ ID NO: 203626 - protein, 163 aa, Glycine max
  Clone ID: PAT_MRT3847_25900C.1.pep
LGERKTLQSQECDRLDLADDCQLGEKSKDTPIAPCSSKKRRFITGDYDLKQYFGNSNEHSSSASQSAQGGVDLRHKDGVASDSLELIRQKGNLPDDFVPSVGDETKGSAFLAQVRDKLSAAEYINFVGYMKALKTKTMKISEVLQCISRLFTGPDRLPLLKRF

SEQ ID NO: 203627 - protein, 192 aa, Glycine max
  Clone ID: PAT_MRT3847_25901C.1.pep
MDSNACLPHLLVLAITLVLVSHAMGDSAKDKQKCAESLTGVATCLPYLGADAKAPTADCCSCLTQAMKTNKKCVCLILKDSPSVVFSQPFNMTIAAGLPSLCKTPDNLSQCSALLHLDPKSPEAQAFNEIGQKSNGGSLRPSPTPSAEGSSQNGRKQGTDETATAKKNSASYIGKRLLESLVAVAGLLIWLS

SEQ ID NO: 203628 - protein, 167 aa, Glycine max
  Clone ID: PAT_MRT3847_25902C.1.pep
MKGSLYVADAHMLATSSLSMSNKANNPFVLPCQTLVSHSSVRDLSFKVSISWPYHASCIVQRQKNSNNSGFVVVGCAKWGLEAEMKPQEDDEEKGRSRMARFRHKCGERKGVVALLEWLEREAIMGEDVGKEPTDYNRRAQIFDRSSQVFQALKELNNDVFPQEYSK

SEQ ID NO: 203629 - protein, 63 aa, Glycine max
  Clone ID: PAT_MRT3847_25903C.1.pep
RVVLTMKYVAAIVLFNVYKYAALVIALNFSVTAAFVVSRKSHLGSDGTVIHLCFCHSMMHSVD

SEQ ID NO: 203630 - protein, 59 aa, Glycine max
  Clone ID: PAT_MRT3847_25904C.1.pep
FDRANRINRVCIAINPPKFVKDLSEYSFEPVEIQLDLAMGEEQVTVKLNKERDSRFGLR

SEQ ID NO: 203631 - protein, 76 aa, Glycine max
  Clone ID: PAT_MRT3847_25905C.1.pep
DDELHLCLSQAYALMAPARTHSHPMATPITPWPLARYQCPSPIAGVTVLARFALLSVVALLEQLIKIEACYENSLW

SEQ ID NO: 203632 - protein, 75 aa, Glycine max
  Clone ID: PAT_MRT3847_25906C.1.pep
YFGESYCSGTQDYIVNQNKFYKEWKIFWIVQKEIGCIKKDGFQKDNIFGMRWFGCTFVPGQEKREMTGKKASARI

SEQ ID NO: 203633 - protein, 76 aa, Glycine max
  Clone ID: PAT_MRT3847_25907C.1.pep
PMMFLAILNASPKRPACSGSLPWMLRPPHFQQCYDQQHHHQHPQSLGTPRRSEYDPSSKPIKGVFGPRSSDVAMDL

SEQ ID NO: 203634 - protein, 85 aa, Glycine max
  Clone ID: PAT_MRT3847_25908C.1.pep
LQDKPVQAALSNMLKDVNEHPMVWHRAVKLLGSIADDQCVALLREFWADPEPHVSQSCQVALSMLEFERSGKSFEFLFMRTPTVH

SEQ ID NO: 203635 - protein, 269 aa, Glycine max
  Clone ID: PAT_MRT3847_25909C.1.pep
SASAESGSGILQTPNYVAQQWQTDRLGAGLSSLDQDRPDKLAASAQSLSIPLVAQQFLPSSASPGAFPGSMAIPSSVQPANQAPGAHLLPLPSSDTPEQLPPYPLFPPGLIPGMVRKMQIGSGVPYSPLSPLDIPTIIPPSTVPPSEILQRVSKFFKEIGEVNPSEGPMNSDSRDEDDEYDREYEREPPIRKGGACIPPPPTLQVDPETGTYADGSVERKPGSSGSGRLGLGATANPNEVSQYDDVYTSYRKHRSTNYHSSMSARAATR

SEQ ID NO: 203636 - protein, 29 aa, Glycine max
  Clone ID: PAT_MRT3847_2590C.1.pep
SAISAYVIFCSCQTALNINKTATFPTLKL

SEQ ID NO: 203637 - protein, 129 aa, Glycine max
  Clone ID: PAT_MRT3847_25910C.1.pep
VDGNRGAAALFVKVSMDGAPYLRKVDLRNYTMYQELSSALEKMFSCFTLGQCGSHGAPGREMLSESKLKDLLHGSEYVLTYEDKDGDWMLVGDVPWDMFIDTCKRLKIMKGSDAIGLAPRAMEKSRSRC

SEQ ID NO: 203638 - protein, 114 aa, Glycine max
  Clone ID: PAT_MRT3847_25911C.1.pep
MDGAPYLRKVDLPNYTTYRELSSALEKMFSCFTLGQCGSHGAPGREMLSESKLKDLLHGSEYVLTYEDKDGDWMLVGDVPWDMFIDTCKRLKIMKGSDAIGLAPRAMEKSRSRC

SEQ ID NO: 203639 - protein, 87 aa, Glycine max
  Clone ID: PAT_MRT3847_25912C.1.pep
LERAYRESKITRMLQDSLRGDSKILLISCLNPSFCQDTIYMVSLASRSCHWIHRASLDSTKISASSAKQMVNSHKNQIPKSVSGTAK

SEQ ID NO: 203640 - protein, 80 aa, Glycine max
  Clone ID: PAT_MRT3847_25913C.1.pep
FKLEPGFLSPEPPRSPGYSHGPLWPLWKPPMFGCPNASQGLKELPKVKIAYPPGFIRIIGFDNVSQGQGISFFPPKPPGF

SEQ ID NO: 203641 - protein, 411 aa, Glycine max
  Clone ID: PAT_MRT3847_25914C.1.pep
MFGTSSIAFLSSRYHSSQSLATNSPSLTTVQVFGRKFCGGNGFHGVKVTSVVATQLNSAQQAQKIAFNESQRPVYPFSAIVGQDEMKLCLLLNVIDPKIGGVMIMGDRGTGKSTTVRSLVDLLPEIKVVAGDPYNSDPEDPEFMGVEVRERVIKGEQLQVVFSKINMVDLPLGATEDRVCGTIDIEKALTEGVKAFEPGLLAKANRGILYVDEVNLLDDHLVDVLLDSAASGWNTVEREGISISHPARFILIGSGNPEEGELRPQLLDRFGMHAQVGTVRDAELRVKIVEERARFDKNPKVFRDSYKAEQEKLQQQIASARSFLSSVQIDRDLKVKISKVCAELNVDGLRGDIVTNRAAKALAALKGRDKVSAEDIATVIPNCLRHRLRKDPLESIDSGLLVLEKFYEVFR

SEQ ID NO: 203642 - protein, 61 aa, Glycine max
  Clone ID: PAT_MRT3847_25915C.1.pep
QEKYMKNSRGVPLFTCIWLPFSSPKGLVLLCHGYWMECTGFMKECGVPRTCAQYAGLGMDY

SEQ ID NO: 203643 - protein, 61 aa, Glycine max
  Clone ID: PAT_MRT3847_25916C.1.pep
TVYLRSRSCAVVLTPYRWFPALAVVKFCKTWYLIVGLLNKMLLLRYHSWYKVRLMGTRLML

SEQ ID NO: 203644 - protein, 185 aa, Glycine max
  unsure (1)..(185): unsure at all Xaa locations
  Clone ID: PAT_MRT3847_25917C.1.pep
MASTFGASSITFLSSRYYSSQSLATDSPSLTTVQIFGRKFCGGGNGFHSVKGRSLFPVASVLATQLNSAQQAQKIAFTESQRPVYPFSAIVGQDEMKLCLLLNVIDPKIGGVMIMGDRGTGKSTTVRSLVDLLPEIKVVAGDPYNSDPEDPEFMGVEVRERVXKGEQLQVVSSKINMVDLPLGAT

SEQ ID NO: 203645 - protein, 29 aa, Glycine max
  Clone ID: PAT_MRT3847_25918C.1.pep
ELIGKVGMYMPMVTFKTLSSTYFLSTTNK

SEQ ID NO: 203646 - protein, 137 aa, Glycine max
  Clone ID: PAT_MRT3847_25919C.1.pep
TRIAQLVATIIAVYAYISFGKIRGIGWRWAGVIWLYSIIFYVPLDIIKFTVRYGLSGEAWKLIFERKTAFTYKKDYGKEERAAKEENGRGSSLIAEKARRRAEIARLGEIHSLRGHVQSVLRLKNFDQNLIQSAHTV

SEQ ID NO: 203647 - protein, 158 aa, Glycine max
  unsure (1)..(158): unsure at all Xaa locations
  Clone ID: PAT_MRT3847_2591C.1.pep
GGRPFFFFFYPLFFLFFFFLFFSGPWFFFFFLLEQKKKNQNKTQNGPSKPKYWGPPGPPHILDPSPPPFFSFPFLNKPFPQPGRVSPTKGPLPPXQKLDPPQKLGAPVKPPNKRLNNQKPPPKAQNPNPGGTSHVAWTPIPPPNHLPPPKKHLKDQLP

SEQ ID NO: 203648 - protein, 33 aa, Glycine max
  Clone ID: PAT_MRT3847_25920C.1.pep
HSKTMRSELNKTLRRKIHRAPCLEMTFEAYSGN

SEQ ID NO: 203649 - protein, 236 aa, Glycine max
  unsure (1)..(236): unsure at all Xaa locations
  Clone ID: PAT_MRT3847_25921C.1.pep
MASQVCKSASRAARSLLSSRFHSQGRALGAAAAVSLSSKVPLFLRKXGSGNGSASSSSSSSWISGALALPAAAYMFQDQEVQAAELERTFIAIKPDGVQRGLISEIISRFERKGYKLVGIKVVIPKKEFAQRHYHDLKERPFFDGLCDFLSSGPVIAMVWEGQGVISYGRKLIGATDPQKSEPGTIRGDLAVVVGRNIIHGSDGPETAKDEIKLWFKPEELVSFTSNAEKWIYGAN

SEQ ID NO: 203650 - protein, 55 aa, Glycine max
  Clone ID: PAT_MRT3847_25922C.1.pep
GSGTIRGDLAVVVGRNIIHGSDGPETAKDEIKLWFKPEELVSFTSNAEKWVYGVN

SEQ ID NO: 203651 - protein, 60 aa, Glycine max
  Clone ID: PAT_MRT3847_25923C.1.pep
ADLMIFSSAVTTVNLAGAGLVALFTGLKSMAGFPTSMTIIDISSIASIGGLVRCGQVWPP

SEQ ID NO: 203652 - protein, 69 aa, Glycine max
  Clone ID: PAT_MRT3847_25924C.1.pep
RVTFFSHNLANIAPFIWRPKTNMSWVLYKQIIQPSHIISGGTTLKSLRFFMKNKNNLSNNLTIFDGGKG

SEQ ID NO: 203653 - protein, 66 aa, Glycine max
  Clone ID: PAT_MRT3847_25925C.1.pep
WHGNYRIGVGVTKLRQPHRPKSKSLFLGHRLRISPFWGEPQCSERRLFGDSHPPRVDRVFALGGGE

SEQ ID NO: 203654 - protein, 70 aa, Glycine max
  Clone ID: PAT_MRT3847_25926C.1.pep
IHCSSVYIEFSTTSSNDSFFWHVALEEKTKRKWNLILTELCHLSRQDEIKVDCYVAGHLFLPAHSTKSCR

SEQ ID NO: 203655 - protein, 38 aa, Glycine max
  Clone ID: PAT_MRT3847_25927C.1.pep
MAISTQTFTYLSNNLHYPNSSKYRNHKLLNHFQEQPPS

SEQ ID NO: 203656 - protein, 328 aa, Glycine max
  unsure (1)..(328): unsure at all Xaa locations
  Clone ID: PAT_MRT3847_25928C.1.pep
LNRGGNALAGSSNLALMTSAVSLRRPPGTVVPAHVRGELNTAIIGLGDDGGYGGGWGPLGALRKVLRGWRNXLGVCCLAAQWPQLVSAQSLLLLLPFVGPLLDSLPGQPAFPSFGGGYVFAVSVHRVQLLLQVLSVKRFHQQQQPQQQNSNPAPVELSQSEISEICDYFSRRVASEPYDASRVAXFITVLTLPVAVLREFLKLIAWKKGLSQAQVGDVVSAQKPRIELCLENHSGLNMDENSESSSAFRSNIHYDRLHNSVDFALTDVLDSAHIPHVNAAGGAAWLPYCVSVRLRYSFGESPNVSFIGMNGSHGGRACWLRVDDWEKC

SEQ ID NO: 203657 - protein, 172 aa, Glycine max
  unsure (1)..(172): unsure at all Xaa locations
  Clone ID: PAT_MRT3847_25929C.1.pep
KTDQVVIVFGAGPVGLLCMAVAKALGARRVIAVDIQQERLDFAKGYVATDIFVPEPRGKDETPDAYCSRMSELILSSLNIPALGPGGIDLAIEATGAPSCVQMGIHVLKPTGTYVQVGMGSNMTVPVPLFDVITKQLNVTGSFRYGAGDYPLAISLVERGXVDLKPLVTQRY

SEQ ID NO: 203658 - protein, 103 aa, Glycine max
  Clone ID: PAT_MRT3847_2592C.1.pep
TASLSRSPWPESQHGRGQFIAQYNTPIWIVKRNDGLWLIIAARKLECESVGVTAHSFKGECQRAFVQDISRPRVQVRLECTHALSRYVYLVVLYCNIMFMWCV

SEQ ID NO: 203659 - protein, 62 aa, Glycine max
  Clone ID: PAT_MRT3847_25930C.1.pep
SYPKFWSFISKTQIINIDKKIISFYLISKEKQTQSYILNKYYYFTKKNIYILTKDGKQKAIV

SEQ ID NO: 203660 - protein, 67 aa, Glycine max
  Clone ID: PAT_MRT3847_25931C.1.pep
INPSVFVVLCVICLSFCYLSRLYFECLFYLLCFLRRIVFFRNWCFWLSSLSVFLGGFSSKFFKFCYS

SEQ ID NO: 203661 - protein, 109 aa, Glycine max
  Clone ID: PAT_MRT3847_25932C.1.pep
CLFVFQTRRKEGFASPPKGAFSKIEVQKKKKNLGFKAVSLIPHLLLQVYKIQHELVDKDLWLRVSLFHSLKGGFFLGFYQRLYYFWSFGHTGNKKFSFGKRLLDFTPPF

SEQ ID NO: 203662 - protein, 233 aa, Glycine max
  Clone ID: PAT_MRT3847_25933C.1.pep
GSRLFSTGDAMWRLLICDMNVSLACAMDGDPSSSLGSDGIADGCSSVQTESQSKLETKGPELSLPSPCKSVSSGSQPKKSSVEGNTGLDKSKNSQILVGPSEKEAANSGRDSIDKSSSTSGTSQSPLVEEKCGNIRKVHSSSTKRDYILRQKSFHMEKGYRTYGSKGSSRGGRLNGLNGLILDKKLKSVCEPTTINLKSASINISKALGVDVTQDNLNADSSFNDGPSSPHCI

SEQ ID NO: 203663 - protein, 337 aa, Glycine max
  Clone ID: PAT_MRT3847_25934C.1.pep
FLLVSKLIFFFSKFAAATDTINQFESLEDNTTLVSNDGTFELGFFIPGSTSPNRYLGIWYKNIPIRTVVWVANRETPIKDNSSKLNITPEGSLVLLNQNKAVIWSANPTTKGVVVVAQLLDSGNLVLRDEKDTNPENYLWQSFDNPTDTFLPGMKLGWDLKKGLNTVLTAWKNWDDPSPGDFTDITLRTNYPEEVMWKGTTKYWRSGPWDGTKFSGNPSVPSNAIVNYTIVSNKDEFYATYSMTDKSIISRIVMNQSLYVRQRLTWNTDSQTWRVSSELPGDLCDHYNTCGAFGICVAGQAPVCKCLDGFKPKSPRNWNQMNWNQGCVHNQTGAQAS

SEQ ID NO: 203664 - protein, 35 aa, Glycine max
  Clone ID: PAT_MRT3847_25935C.1.pep
HHIISYNIHMVKKIKIKHNYYSIKVKSYDLGFGGP

SEQ ID NO: 203665 - protein, 70 aa, Glycine max
  Clone ID: PAT_MRT3847_25936C.1.pep
GLQHFFLKAITAFSIHLEIGVGLNSQHEHFQVPSFCVSLQVQGSFSYTEHLEKAPGKCNELSCIEGNNSL

SEQ ID NO: 203666 - protein, 33 aa, Glycine max
  Clone ID: PAT_MRT3847_25937C.1.pep
LNILYLLPHTIMGNIPEYITVFRLSNLFFKHLI

SEQ ID NO: 203667 - protein, 120 aa, Glycine max
  unsure (1)..(120): unsure at all Xaa locations
  Clone ID: PAT_MRT3847_25938C.1.pep
TRFVCVAYEDSFEDVSXGAPLNGVEGWYYMARISLATSEGFPHMLXSKAAKKAKGXLAPGDGEELTLIPVAIVVEAYLKLMEYLVTCVPTLGDMVCPKVEKLSGPRNGDTPNTRWSPILP

SEQ ID NO: 203668 - protein, 77 aa, Glycine max
  Clone ID: PAT_MRT3847_25939C.1.pep
GQPQHHSPLCTEAATFKNCCHAGEGNRSFALNMNKLCILEKNSHLVVSNGFSSRQQQKMLVIYPQTSLQSVWMLQVF

SEQ ID NO: 203669 - protein, 52 aa, Glycine max
  Clone ID: PAT_MRT3847_2593C.1.pep
VLYRGIYFVKYIKQTLTHFSCLYKNTNDISYTNLWRCNLTKYNHYLFIKNKI

SEQ ID NO: 203670 - protein, 95 aa, Glycine max
  Clone ID: PAT_MRT3847_25940C.1.pep
MCHPGPKAAPGPGPVSSPSNTVESEKGLMEEAYSYRVSKIGSSPPSCEHKCYGCTPCEAIQVPSTSSWRSHLGLQYTNYEPESWKCKCGPSLYSP

SEQ ID NO: 203671 - protein, 67 aa, Glycine max
  Clone ID: PAT_MRT3847_25941C.1.pep
MLIIDPKVPQSPLCCLLPILFLAWYIFTRVIKAKNGFGQFILYPTFHSQLLFRHLIIAPALRLHRIE

SEQ ID NO: 203672 - protein, 49 aa, Glycine max
  Clone ID: PAT_MRT3847_25942C.1.pep
PFAVGEQILFELNRIFSGTQAHSVISLIHNILAFRELERLQRIKSKCYT

SEQ ID NO: 203673 - protein, 37 aa, Glycine max
  Clone ID: PAT_MRT3847_25943C.1.pep
PTRPIYIYIYIYIYIYIYIYIYIYILFSLYILSLSYV

SEQ ID NO: 203674 - protein, 28 aa, Glycine max
  Clone ID: PAT_MRT3847_25944C.1.pep
GLPSNSIYMFTTINKGANVPDQGKDHKK

SEQ ID NO: 203675 - protein, 363 aa, Glycine max
  unsure (1)..(363): unsure at all Xaa locations
  Clone ID: PAT_MRT3847_25945C.1.pep
MSDMDPSKKVADRYLKREVLGEGTYGVVYKAIDTHTGQTVAISKIRLGKQKEGVNFTALREIKLLKELKDPNIVELIDAFPHKGNLHLVFEFMETDLEAVIRDRNIFLSPSDTKSYLQMTLKGLAYCHKKWVLHRDMKPNNLLIGSNGQLKLADFGLARMFGSPDRRYTHQVFARLYRATEGLFXHSYXNPGVDVWAAGCIFAELLLRRPFLQGTSDIDQLGKIFSAFGTPTASQWPDMVYLPDYVEYQYVPAPPLRSLFPMVTDDALDLLSKMFTYDPKARISVQQALEHRYFSSAPLPSDPDKLPRPAPKRESRTSDFNLQEGPTVLSPPRKSRRVMPGRDGFEGSSLQADKVDASFGDFN

SEQ ID NO: 203676 - protein, 159 aa, Glycine max
  Clone ID: PAT_MRT3847_25946C.1.pep
MSLRQRGLCCVFDIRNNVRSLRLPSCSTRIRNFHAPNNSNSPLQSLTRGKSRRMISKPISAALPAPPPLDLTENNVKQVLEDARKELGQIFDSSVGITGVVELADLDGPFVKISLKGRFWHKRSTVLARVANYLKQRIPEILEVDIEDEKQLDDSPENF

SEQ ID NO: 203677 - protein, 93 aa, Glycine max
  unsure (1)..(93): unsure at all Xaa locations
  Clone ID: PAT_MRT3847_25947C.1.pep
XXXRGGGGVNHFXKPGVRGGVHTRGRGMGXGGLKCESVGGVHFIFIFLRRRSLTCVSEGXHSYWARLFFLFIVCVFKHSLYKFGDLFLCAGIL

SEQ ID NO: 203678 - protein, 42 aa, Glycine max
  Clone ID: PAT_MRT3847_25948C.1.pep
VWLTVSPHVNTNDVNQDLNMHATVPLEDVDLEFPEECRFHIV

SEQ ID NO: 203679 - protein, 52 aa, Glycine max
  Clone ID: PAT_MRT3847_25949C.1.pep
VIRADHQGPDRGAGLKGRPFTLLFTLRHPVGRPGVGVSGSGHLQAPLLEAWI

SEQ ID NO: 203680 - protein, 160 aa, Glycine max
  unsure (1)..(160): unsure at all Xaa locations
  Clone ID: PAT_MRT3847_2594C.1.pep
RPKNRXXNXEQTKEYLTGEFPGDYGWDTAGLSADPETFARNRELFVIHSRWAMLGALGCTLPEILDFFFVKFGEAGGXNVCAQNFTEGGRDYLGKPNQIHAQSILDIWDGQVELMGLEEGDRVGGGPIGEGLEPNDRGGAYETLGLGDDPDELTKWKSRN

SEQ ID NO: 203681 - protein, 172 aa, Glycine max
  Clone ID: PAT_MRT3847_25950C.1.pep
MAEEHRCETPEGHLLCANNCGFFGSTATMNLCSKCYGAIRLKEQEEASTKSTIETALSSSSLKPSFSTSPPTLVDVLIESPPPSLAEVAVTVAVEASSSISTSSGSVAQPNRCATCRKRVGLTGFKCRCGLTFCGAHRYSEKHACGFDFKTVGREEIARANPVIKAEKLRRI

SEQ ID NO: 203682 - protein, 43 aa, Glycine max
  Clone ID: PAT_MRT3847_25951C.1.pep
DIGGEDKHYMGAPFHSVDLYVKRIDGQSGHIRKTLGRTVHVLA

SEQ ID NO: 203683 - protein, 251 aa, Glycine max
  Clone ID: PAT_MRT3847_25952C.1.pep
RLREDDRRGNNEMWMVDHQGGVSRSRSLCSFRGGGIFRSEDGGDSMLSGARSSISAARSSGVNMVESGRRNGYSEADPRRSGFDGVERRDFLFEHNYESGSDLKGGVKKGGLMDGGGDGGGFYGGVNRRVFSLRESDFKGMDESSFIDLKLDYSSESKHEFSAAKMSNNMGGDTFSSFRNGNFMPHDVGGGSYGGLVGDGVLTNGGSCRITVNDRGIKRGRKSMKGWRWIFRYHSNWGSSRKRDEDFMFKA

SEQ ID NO: 203684 - protein, 202 aa, Glycine max
  unsure (1)..(202): unsure at all Xaa locations
  Clone ID: PAT_MRT3847_25953C.1.pep
MAGKSGKGRNRKGSHNASSASEPPVHSNVPVKDNVEVTLESAKTDAADAAGNSTVANPEVKENETTTEGSQQKQGDLQLYPVSVKTQTGEKLELQLNPGDSVMDVRQFLLDAPETCFITCYDLLLHTKDGSTHHLEDYNEISEVADITTGGCSLEMVPAFYDDRSIRAHVHRTRELLSLSTXHASLSTSLALQNEIAQNKGA

SEQ ID NO: 203685 - protein, 85 aa, Glycine max
  Clone ID: PAT_MRT3847_25954C.1.pep
MVLIPWVSGFACPFVPFLPAACILINTYLLIDLGVGTWLRVSVWMLIGVLVYLFYGRSHSSLLHAIYVPSAYADEIHRSQAIHLA

SEQ ID NO: 203686 - protein, 72 aa, Glycine max
  Clone ID: PAT_MRT3847_25955C.1.pep
GIALSGHMENQRDRQYKTVVEAYDYLKSTMKSLNFVPSLGQSSPVIRPTVCNVRSEASYQGQWSGLQLLASS

SEQ ID NO: 203687 - protein, 372 aa, Glycine max
  Clone ID: PAT_MRT3847_25956C.1.pep
MKISILFITIFSCGFLGNVVSNASPLPYEAIFNFGDSISDTGNAAHNHPPMPGNSPYGSTYFKHPSGRMSNGRLIIDFIAEAYGMPMLPAYLNLTKGQDIKKGVNFAYAGSTALDKDFLVQKRINIEEATFSLSAQFDWFKGLKSSLCTSKEECDNYFKNSLFLVGEIGGNDINALIPYKNITELREMVPSIVETIANTTSKLIEEGAVELVVPGNFPIGCNSAVLAIVNSEKKEDYDQFGCLIAYNTFIEYYNEQLKKAIETLRKNNAHVKITYFDYYGATKRLFQAPQQYGFSSGKTETFRACCGKGEPYNLSFQILCGSPAAIVCSDPSKQINWDGPHFTEAAYRLIAKGLVEGPFANPSLKSPPFKIA

SEQ ID NO: 203688 - protein, 69 aa, Glycine max
  Clone ID: PAT_MRT3847_25957C.1.pep
SPTPFITRDTISPKDFLMHLVLLMVAHELMGHCLIGFYQKRLKFGFERILGSVLCHPHTVFVIYEPPKI

SEQ ID NO: 203689 - protein, 87 aa, Glycine max
  Clone ID: PAT_MRT3847_25958C.1.pep
HQVCHQKKALELQISPQPHPLKPQEHVQPQQLEEPVKEQQQVVVSLILTQPFWFVLLSFFFSYETQKTLAHKSGKTLQKGGTTLSLN

SEQ ID NO: 203690 - protein, 104 aa, Glycine max
  Clone ID: PAT_MRT3847_25959C.1.pep
APSPSILLSSLYDLISFHFICNLQLPTWFWLPISGGYCVVELFFILFCWNLSRNGQSSKPLVLSTYFWLISFNICFWFLRFFILVTHVGSCCYGKKSPLSIYFC

SEQ ID NO: 203691 - protein, 63 aa, Glycine max
  unsure (1)..(63): unsure at all Xaa locations
  Clone ID: PAT_MRT3847_2595C.1.pep
XLIIIYSMYVYEICLAPHTPSTKVIDASMSSTNGIQGARHIHICMHDVTQLNMQLTNKMHECN

SEQ ID NO: 203692 - protein, 74 aa, Glycine max
  Clone ID: PAT_MRT3847_25960C.1.pep
SVTIITPQICTTLFKTHSILGISPWFYQPTQFHRPKHKTLLITSYSHHIHFHYYIIFHFTILTPHTHTPTTQHN

SEQ ID NO: 203693 - protein, 75 aa, Glycine max
  Clone ID: PAT_MRT3847_25961C.1.pep
NWYWHNIPRLVFGSILFKFLSISAGGPHQSNPESELQTHTLLSVGSFFFDNESSKLQLFKASSSVILLKNCIKLS

SEQ ID NO: 203694 - protein, 75 aa, Glycine max
  Clone ID: PAT_MRT3847_25962C.1.pep
GALFRLCSEDSIQRGEGIVTIRASLRLLMCPPPAPNQLASNRGGTQGHRVKVVCLRKTPRMDLGLLLGVREMYQQ

SEQ ID NO: 203695 - protein, 362 aa, Glycine max
  Clone ID: PAT_MRT3847_25963C.1.pep
MVHLSCSDFLPSFLLLRLTLLILLVSSKTKGLVKLPADVSVPAVFVFGDSVVDTGNNNNRTTSFARSNFPPYGRDFQGGIPTGRFSNGKVPSDLIVEELGIKELLPAYLKPNLQSSDLITGVCFASGGSGYDPLTSILESSMPLTGQVDLLKEYIGKLKGLVGEDRAKFILANSLFIVVAGSSDISNTYRTRSLLYDLPAYTDLLVNSASNFLTEINELGARRIAVFSAPPIGCLPFQRTVGGGLEKRCAERPNNLAQLFNTKLSKELDSLNRNFPNSRNVFINVYDPLLDIITNHQKYGYKVGDTGCCGTGRIEVAILCNRFDSSCPNVQDYVFWDSFHPTESVYKRLINPILQKYLYQFK

SEQ ID NO: 203696 - protein, 162 aa, Glycine max
  unsure (1)..(162): unsure at all Xaa locations
  Clone ID: PAT_MRT3847_25964C.1.pep
FKLMSNDMWAAPEDKASFWPHLHSGMCNNLAMQEAHIANLKNVLRELYSHTSEEACQLMXKALSHTEWMQKAAAPTIAQIEESHSMHRIMNAPDSKDNIDLLPRIDLVXVQGAGLAYSNKMVHDDKLAVANTQELFDGKXSADSWLPMFGVDLSLRHYLQSR

SEQ ID NO: 203697 - protein, 47 aa, Glycine max
  Clone ID: PAT_MRT3847_25965C.1.pep
PSELSLPDRLSYSSSLILPSKLLVSKLSPIRPISLWPSIRLCLLFSD

SEQ ID NO: 203698 - protein, 56 aa, Glycine max
  Clone ID: PAT_MRT3847_25966C.1.pep
STCYQTRTSFYFVTLEPKYEPCNACQHLVKKINKYKQYIYKCVGVCVCIFFDRTQN

SEQ ID NO: 203699 - protein, 43 aa, Glycine max
  Clone ID: PAT_MRT3847_25967C.1.pep
LLLVASDALDITIRILDSSSFLTMLAVPFKNPRSSIILYTYKV

SEQ ID NO: 203700 - protein, 190 aa, Glycine max
  unsure (1)..(190): unsure at all Xaa locations
  Clone ID: PAT_MRT3847_25968C.1.pep
GFLLSYSSSRCVYLMVYVDDIVITGNDQGKIAQLKGHLFSHFQTKDLGKFEYFLGIEVAQSKDGIIISQRKYALDXTGMSDCRPIDSLMDPNKKLLPNQGKPYSDSERYRILVGKLIYLTITRPNISFVVGVVSQFMQSPHNDHRDAVIRILRYIKRTPXQGLLYEDKGNTQIVGFCDANWAVSPIDRGS

SEQ ID NO: 203701 - protein, 96 aa, Glycine max
  unsure (1)..(96): unsure at all Xaa locations
  Clone ID: PAT_MRT3847_25969C.1.pep
KLITAGDLAADPINXEAFPHKXLKPNGEIHERVKLESSHEEFIKTWSTHVRTATTMLADEWTYFYAKEHDSSPNTIPCDFVIGVKVTTLNNMRAYG

SEQ ID NO: 203702 - protein, 69 aa, Glycine max
  Clone ID: PAT_MRT3847_2596C.1.pep
KLFCPDPLVKKKTTRGGTQKNLTKKCFQKNPPRGSFSQPKKQWVCFEKKGPSFYPWSLPHVRSCNLLSG

SEQ ID NO: 203703 - protein, 163 aa, Glycine max
  Clone ID: PAT_MRT3847_25970C.1.pep
MSESEERATLTWRKIPILLKSSPNDVVLVPPTSPRKNDAVTGFFAPTSGTRCKFASVSVAERKFDKEFAPTAAQLLQHPLAVVALVPKDAALFLAGALAGAAAKSFTAPLDRIKLLMQTHGVRVGHGSAKKAIGFIEALTVIGKEEGIKGYWKGSLPQVSIIR

SEQ ID NO: 203704 - protein, 54 aa, Glycine max
  unsure (1)..(54): unsure at all Xaa locations
  Clone ID: PAT_MRT3847_25971C.1.pep
LLWLGLGTPLIIVLXLLHCFFSKLKKAVVIIFIDFFVFHLIIHLCILISLFIFL

SEQ ID NO: 203705 - protein, 90 aa, Glycine max
  Clone ID: PAT_MRT3847_25972C.1.pep
MDKVNTTNNSNSNSNSNSNNNCGFMSCDKLDRVANWVGANVASAFFASLERCSCINLSIKDNEDDTNNDDRPLFLSHPTTPFSSNSNVHS

SEQ ID NO: 203706 - protein, 41 aa, Glycine max
  Clone ID: PAT_MRT3847_25973C.1.pep
IKFRTEFLKLFNIIKIKYYCKCDFLSSALVSVTYGDFTEEV

SEQ ID NO: 203707 - protein, 110 aa, Glycine max
  unsure (1)..(110): unsure at all Xaa locations
  Clone ID: PAT_MRT3847_25974C.1.pep
CLHILSYPGTFKLTLQFTEDYPNKPPTVRFVSRMFHPNIYADXFICLDILQNQWSPIYDVAAILTSIQTLLCDPNPNSPANSEAARMFSENKREYNRRVREIVEQSWTAD

SEQ ID NO: 203708 - protein, 74 aa, Glycine max
  Clone ID: PAT_MRT3847_25975C.1.pep
CLHILSYPGTFKLILQFTEDYPNKPPTVRFVSRMFHPNIYADGSICLDILQNQWSPIYDVAAILTSIQVLSCIV

SEQ ID NO: 203709 - protein, 86 aa, Glycine max
  Clone ID: PAT_MRT3847_25976C.1.pep
NEKVPRLTPRKIIQPSNYFHEMIRNSRSGEIRNSNDLSHLVVQILQKFHIKSSIVLQHSAFLRSISLFLINILTQIDGLKYCTGPG

SEQ ID NO: 203710 - protein, 72 aa, Glycine max
  Clone ID: PAT_MRT3847_25977C.1.pep
RAADTRNVRILCNNSAFTESGMETAKNKFDKFSILSVGQFWAKESPHHGIIGHFLMFKHLIQCSIMSTYNIS

SEQ ID NO: 203711 - protein, 114 aa, Glycine max
  Clone ID: PAT_MRT3847_25978C.1.pep
MKPKASVNRPPTPDVVENVPEREPTLQELINIKLIETGEKERLMELLRERLVDCGWKDEMETLCRAVVKKKGRSNVTVDELVHVITPKGRVSIPDSVKAELLQRIRTFLVSAAL

SEQ ID NO: 203712 - protein, 130 aa, Glycine max
  unsure (1)..(130): unsure at all Xaa locations
  Clone ID: PAT_MRT3847_25979C.1.pep
MMAHCVFPVNALPTPSPCFHSKVGKQWPQGFALSVRPTNPKRLSSACKVRATLGASDKSIGIPNQWYNVIADLPVKPPPPLHPKTYEPIKPDDLSPLFPDEVNQTKRIASEKFRDXPDEVPDGYKLWRPT

SEQ ID NO: 203713 - protein, 67 aa, Glycine max
  Clone ID: PAT_MRT3847_2597C.1.pep
VSSTIFSALFLICAFTTSYLASAISDFVLDNDSNPLENGGTYYIMSDITAFGGLTPAPTGNDRFPLT

SEQ ID NO: 203714 - protein, 131 aa, Glycine max
  Clone ID: PAT_MRT3847_25980C.1.pep
MADEAVVVPDPTQIDVKLFNRWSFDDIEITDISLADYIGVATSKHATYVPHTAGRYSVKRFRKAQCPIVERLTNSLMMHGRNNGKKLLAVRIIKHAMEIIHLLTDQNPIQVIVVEAIFAIGKILFRSMFVI

SEQ ID NO: 203715 - protein, 79 aa, Glycine max
  Clone ID: PAT_MRT3847_25981C.1.pep
HWSWVIFLTAPDLIKPGRIRVKVSYRLGHVPLSLIDLCNWSVCFLALIIWTVGIDISILLAGSILSPQGCHFHRQRHQY

SEQ ID NO: 203716 - protein, 204 aa, Glycine max
  Clone ID: PAT_MRT3847_25982C.1.pep
MADEAVVVPDPTQIDVKLFNRWSFDDIEITDISLADYIGVATSKHATYVPHTAGRYSVKRFRKAQCPIVERLTNSLMMHGRNNGKKLLAVRIIKHAMEIIHLLTDQNPIQVIVEAVVNSGPREDATRIGSAGVVRRQAVDISPLRRVNQAIYLLTTGAREAAFRNIKTIAECLADELINAAKGSSNSYAIKKKDEIERVAKANR

SEQ ID NO: 203717 - protein, 137 aa, Glycine max
  unsure (1)..(137): unsure at all Xaa locations
  Clone ID: PAT_MRT3847_25983C.1.pep
KRDCGXGSFCXPYMQKLKVSAKNDPAGSSDQADSFPIFELWESENVGQKSSRRDEDDTKAVRLDGDSVIAPSNSANNSKEPVNKWMAFAKKPGFTVDGNSATXDKSKTEDNYSRNHLKEKPSSGQNFLSEATIAERT

SEQ ID NO: 203718 - protein, 204 aa, Glycine max
  Clone ID: PAT_MRT3847_25984C.1.pep
MADEAVVVPDPTQIDVKLFNRWSFEDIEVTDISLADYIGVAASKHATYVPHTAGRYSVKRFRKAQCPIVERLTNSLMMHGRNNGKKLLAVRIIKHAMEIIHLLTDQNPIQVIVDAVINSGPREDATRIGSAGVVRRQAVDISPLRRVNQAIYLLTTGAREAAFRNIKTIAECLADELINAAKGSSNSYAIKKKDEIERVAKANR

SEQ ID NO: 203719 - protein, 56 aa, Glycine max
  Clone ID: PAT_MRT3847_25985C.1.pep
QSYILDWNLFYLLMNMRLTIDHHHHQQEKNIQYTMPFIGCIYIELLIKGFWLVKWM

SEQ ID NO: 203720 - protein, 123 aa, Glycine max
  Clone ID: PAT_MRT3847_25986C.1.pep
MSEPVADIAVIGLAVMGQNLILNMNDHGFVVCAFNRTVQKVTEFLENEAKGSRIVGAKSMEEMIKLLKKPRRVMLLVKAGKAVQEMIDRLVPLLEEGDIVIDGGNSEYHDSNLRCRELASKAF

SEQ ID NO: 203721 - protein, 168 aa, Glycine max
  unsure (1)..(168): unsure at all Xaa locations
  Clone ID: PAT_MRT3847_25987C.1.pep
SFDKDNSAAWLMKFNSEVIIFSLFSVHLTYTTRNEESSMKNARSILFSPLEATQAFGMEIVDHPSLSLARLTRMSFVYSFFFFLLQIAGLVKYLKCYKPHLTSFIYLFWEYNWKCSENGEAVAIECIKTLTSVQSFLLTVKSKIKCVKLRNLFCLCRXQGQSDPRGMQ

SEQ ID NO: 203722 - protein, 102 aa, Glycine max
  Clone ID: PAT_MRT3847_25988C.1.pep
PNGWKFVFFARFSPGPFFVFNYPLAAPEVRVPLGFFFPPAIGGPPPVLPKTFFGTPFGVAVVPPSGFKKFQIWSPLFPGGGFLFRGVFFLRIKKFSPPVSVF

SEQ ID NO: 203723 - protein, 72 aa, Glycine max
  Clone ID: PAT_MRT3847_25989C.1.pep
DLPTGKILGSNVRTLEPWPFPQYLRYTRPFTGPNLSFCEKLGPGILNMGRGFCPAFSVAAPSGGSSIPFLLI

SEQ ID NO: 203724 - protein, 77 aa, Glycine max
  Clone ID: PAT_MRT3847_2598C.1.pep
IISKSVFETTWFRFAMISMIISCDVDIVTVRSVPLISSTLPFPIMLEHESRQAPFTYTFSMPRQYTPAPKVAAENFF

SEQ ID NO: 203725 - protein, 40 aa, Glycine max
  unsure (1)..(40): unsure at all Xaa locations
  Clone ID: PAT_MRT3847_25990C.1.pep
TPPKVQGSRNLISHXFXRDTYLKILTDSVLVCVCFPEEIL

SEQ ID NO: 203726 - protein, 228 aa, Glycine max
  Clone ID: PAT_MRT3847_25991C.1.pep
MTVFHFFNCAILTFGPHAVYYSATPLSEYDTLGTSIKAAVVYLATALVKLICLATFLKVSESDSFDPYQEFLKALIGFIDVAGLYFALTQLTHRNISQNHKFQAVGLGWAFADSVLHRLAPLWVGARGLEFTWDYILQGLEANANLVLSISLAALGSLMWLRKNKPKTLIPIIYLSAGIVATMPSITSYLRRGLGWHFPKVVGFELFTSLVMAFISWQLFAACQRPSV

SEQ ID NO: 203727 - protein, 140 aa, Glycine max
  unsure (1)..(140): unsure at all Xaa locations
  Clone ID: PAT_MRT3847_25992C.1.pep
VTTLFLFLSLFTHLHAYTRVDNFTISYSFPVSPGPKFLRLFFYPAEYASFPSSNASFTDQSNQFTLLHVFNASLKAENTKTIFREYVVNVDGDSERLNLTFTPSQPNSYAFINGIEVLXMPSNLYYTSANDNGLKLVGTD

SEQ ID NO: 203728 - protein, 47 aa, Glycine max
  unsure (1)..(47): unsure at all Xaa locations
  Clone ID: PAT_MRT3847_25993C.1.pep
XXXVVLXGGXCLSNGLCSXXXNSCXSLNCLSMEPXERXFVXXLILLF

SEQ ID NO: 203729 - protein, 258 aa, Glycine max
  Clone ID: PAT_MRT3847_25994C.1.pep
MAAIVFIHIASLVSLFVATSARIPGVYTGGPWQSAHATFYGGSDASGTMGGACGYGNLYSQGYGVNTAALSTALFNNGLSCGACFEIKCDQDPRWCNPGNPSILITATNFCPPNFALPNDNGGWCNPPRPHFDLAMPMFLKIAQYRAGIVPVAYRRVPCRKAGGIRFTINGFRYFNLVLITNVAGAGDIVRVSVKGSKTAWMSMSRNWGQNWQSNAVLVGQALSFRVTGSDRRTSTSWNVAPPNWQFGQTFTGKNFRV

SEQ ID NO: 203730 - protein, 144 aa, Glycine max
  Clone ID: PAT_MRT3847_25995C.1.pep
SDHGCAPDSITYGALISGLCKQSKLDEAGRLHDAMIEKGLTPCEVTQVTLAYEYCKIDDGCPAMVVLERLEKKPWVWTVNINTLVRKLCSERKVGMAAPFFHKLLDMDPNVNHVTIVAFMTGCYESYKYALISDLSARIYKENH

SEQ ID NO: 203731 - protein, 39 aa, Glycine max
  Clone ID: PAT_MRT3847_25996C.1.pep
DVASYSSLSLVHTKKESYSSLNFIFSWDFLAFKGREIIL

SEQ ID NO: 203732 - protein, 50 aa, Glycine max
  Clone ID: PAT_MRT3847_25997C.1.pep
EDIRGCCLHAPQACNKCEELEKYWCWGTLKLCRTVYLIYIVFIVDSRSWR

SEQ ID NO: 203733 - protein, 118 aa, Glycine max
  Clone ID: PAT_MRT3847_25998C.1.pep
WSEDLGITSRCIEAVAAKVLSHPSKVSLSHSHSRRVRDDVSCNGNQSVRHNKSGNKGWWAEDLAELSIDLYWRTMIAIKSGWKIPSNLIGDALKIYASRWLPNEYKNGGHIKKQAVAD

SEQ ID NO: 203734 - protein, 35 aa, Glycine max
  unsure (1)..(35): unsure at all Xaa locations
  Clone ID: PAT_MRT3847_25999C.1.pep
LMKTSWAKAFAVVSLTQIPEFHLXLVPKMQNRMRK

SEQ ID NO: 203735 - protein, 90 aa, Glycine max
  Clone ID: PAT_MRT3847_2599C.1.pep
MSNRKFGFEGFGINRQSTYSFERSQPPQRLYVPPSARHGHDHYEDTDIDNIDFDDNNNDDGSKNNNGGGNDDDDEIDPLDAFMEGIQRRD

SEQ ID NO: 203736 - protein, 94 aa, Glycine max
  unsure (1)..(94): unsure at all Xaa locations
  Clone ID: PAT_MRT3847_259C.1.pep
FPSITLPTKKLTNPHTTXXXXXXTSHTHSFXIITIHTLSFVLXGSHGXXLTPLXLXRXXXXMEWDSNSDLSDDDAVSYVLNDDXDDAXGPLPFP

SEQ ID NO: 203737 - protein, 100 aa, Glycine max
  Clone ID: PAT_MRT3847_25C.1.pep
ILQKNLNQFCLWARLTLKEFYIRNPKMGTLVFKPKISVQKVHKNGEKARVKEPLLQFGKRNIPYLSRLKVYWSLLGPRVNMRKKLHLTPFLAQGTPPYGG

SEQ ID NO: 203738 - protein, 102 aa, Glycine max
  Clone ID: PAT_MRT3847_26000C.1.pep
LSASSSTTPKKTYTKKELHLFIFFFFFNSNLGHQNILHLYQTEAFKKPRRVNYFLAFPSLKYSVGALGPFASFSPLAIIITIPFYPLPFLIFPFAILINLSS

SEQ ID NO: 203739 - protein, 63 aa, Glycine max
  Clone ID: PAT_MRT3847_26001C.1.pep
LLRCNTELLRAHYTLNLILNNSRNLLTLDENIPPRNFNIKSLPQKISLYCLLYDTQNIFNHPL

SEQ ID NO: 203740 - protein, 148 aa, Glycine max
  Clone ID: PAT_MRT3847_26002C.1.pep
DAYRIGEFPYWFHQTWTTSLQLCISLVILFRAVGWATIASLVVIVITVLCNTPLAKLQHKFQSKLMVTQDERLKACSEALVNMKVLKLYAWETNFRSSIERLRNEELKWLSAVQLRKAYNTFLFWSSPVLVSAASFGACYFLNVPLHA

SEQ ID NO: 203741 - protein, 450 aa, Glycine max
  Clone ID: PAT_MRT3847_26003C.1.pep
MVTCPGSIIIHFFLFSAPLLSVLWSCSSVSALKPRAFILPIEKDPTTLQYSTSIDMGTPPLTLDLVIDIRERFLWFECGNDYNSSTYYPVRCGTKKCKNSSRTACITCTNHPLKTGCTNNTCGVDPFNPFGEFFVSGDVGEDILSSLHSTSGARAPSTLHVPRFVSTCVYPDKFGVEGFLQGLAKGKKGVLGLARTAISLPTQLAAKYNLEPKFALCLPSTSKYNKLGDLFVGGGPYYLPPHDASKFLSYTPILTNPQSTGPIFDADPSSEYFIDVKSIKLDGKIVNVNTSLLSIDRQGNGGCKLSTVVPYTKFHTSIYQPLVNDFVKQAALRKIKRVTSVAPFGACFDSRTIGKTVTGPNVPTIDLVLKGGVQWRIYGANSMVKVSKNVLCLGFVDGGLEPGSPIATSIVIGGYQMEDNLLEFDLVSSKLGFSSSLLLHMASCSHFRLV

SEQ ID NO: 203742 - protein, 55 aa, Glycine max
  Clone ID: PAT_MRT3847_26004C.1.pep
PRHPCHVQGSRLGKVIECLVNDDRVLCKGFGSGCKSILNKSRLNENFILPLQNHD

SEQ ID NO: 203743 - protein, 61 aa, Glycine max
  Clone ID: PAT_MRT3847_26005C.1.pep
ESGRAIPQFHQLNLEFVHFSEKETYSVYISREFLFQIGVCSPNKLIVVKPFIPKVCHQHIQ

SEQ ID NO: 203744 - protein, 45 aa, Glycine max
  unsure (1)..(45): unsure at all Xaa locations
  Clone ID: PAT_MRT3847_26006C.1.pep
FXXXIXSNXTCXRXSXIXTQXXXXXXKXXXXSETXSRIPXLLXXX

SEQ ID NO: 203745 - protein, 143 aa, Glycine max
  Clone ID: PAT_MRT3847_26007C.1.pep
RGKTRDWIVALKALMLVHRLMNDGPPLFQEEILYATRRGTRLLNMSDFRDEAHSSSWDHSAFVRTYALYLDQRLELMLFDRKGTVSAANGGGDDRFGGRDNFQSPPYEYGGGEFRGEGAYGNGMGKTRSYGDMTGIKFGREEK

SEQ ID NO: 203746 - protein, 148 aa, Glycine max
  Clone ID: PAT_MRT3847_26008C.1.pep
SEFGSSILLVGLLASGTFLYLFRPSDQPLVILGRTFSDFETLALLSAFTVFVVFLTSVGSVLVSALMLGVAVVCLHGAFRVPEDLFLDDQENSQATGFLSFLRGGGGGGYNRGGGGYGGRSGGGGGGGGYRSRDGGYGGGYGGGGGGG

SEQ ID NO: 203747 - protein, 87 aa, Glycine max
  unsure (1)..(87): unsure at all Xaa locations
  Clone ID: PAT_MRT3847_26009C.1.pep
GDFVIGVKLTTIGTVCAYGHYPGISGSLLSGTIAQSIXQITVGNQMATDRTPLNVYSIKLSFCRFSFDRLRRGIVIDVSGECITLNQ

SEQ ID NO: 203748 - protein, 89 aa, Glycine max
  Clone ID: PAT_MRT3847_2600C.1.pep
AEGLYTPQFIYCGKKATLVVGNVLPLRSIPEGAVICNVEHHVGDRGVFARASGDYAIVISHNPDNDTSRIKLPSGSKKIVPTAAKADKA

SEQ ID NO: 203749 - protein, 59 aa, Glycine max
  Clone ID: PAT_MRT3847_26010C.1.pep
SKIGLFLVLACNNGWKKAFPTDMCYYCCPSPFCPLNQPYNSAHVGSSISYIITMILMYW

SEQ ID NO: 203750 - protein, 56 aa, Glycine max
  unsure (1)..(56): unsure at all Xaa locations
  Clone ID: PAT_MRT3847_26011C.1.pep
MAPXXXXXTAPFXXFLGXAXXLVFSCMGAAYXTAKSGVXVASMGXMXPELVMXSIV

SEQ ID NO: 203751 - protein, 255 aa, Glycine max
  unsure (1)..(255): unsure at all Xaa locations
  Clone ID: PAT_MRT3847_26012C.1.pep
VGSGYIGLEFSDVYTALGSEVTFIEALDQLMPGFDPEISKLAQRVLINPRNIDYHTGVFASKITPARDGKPVTIELIDAKTKEQKDTLEVDAALIATRRXTEGGISVVEQVTGRDLVLNHPSIPAACFTHPEISMVGLTEPQAREKGEKEGFEVSVAKTSFKANTKALAENEGEGLAKLIYRPDTGEILGVHIFGLHAADLIHEASNAIALGTRIQDIKFAVHAHPTLSEVLDELFKSAKVKAEASEPIKEAVAV

SEQ ID NO: 203752 - protein, 81 aa, Glycine max
  Clone ID: PAT_MRT3847_26013C.1.pep
NSLPNDPPVGSLNNFSIFSISAFVNPEKTARFLGRKRSMNLKFVAFVQKSNFFALNLNFSPLRTSSAVKTLATFFFFFSFP

SEQ ID NO: 203753 - protein, 71 aa, Glycine max
  Clone ID: PAT_MRT3847_26014C.1.pep
NSRSLSYAMCAARIPQLEANINESTLDSNSWQKHSTAQTVNGDSTGSLKPQILQGTGLLRQCYIKRAPTNP

SEQ ID NO: 203754 - protein, 57 aa, Glycine max
  Clone ID: PAT_MRT3847_26015C.1.pep
LSSTLTGFPIPPQFPASLVLLSNLVDIVERHPHAYARPVVHDFSVIPPLPFCFFLPS

SEQ ID NO: 203755 - protein, 110 aa, Glycine max
  Clone ID: PAT_MRT3847_26016C.1.pep
AGIPGSTHASVGFWGVLLGFLGTFLVNFIKKNNVFCFILAWVSTSSILFTLRFTLRICFTCVKMAMLRSLFGFRVPFLLTCASLEAPRGFYSRGKMFLLRALACVEYEFT

SEQ ID NO: 203756 - protein, 60 aa, Glycine max
  Clone ID: PAT_MRT3847_26017C.1.pep
IYQMPWYELLCCSVVIDKLPPKSSYYAASQLLSLSDQAVKNFQAVFSHIILKAIVSFDSP

SEQ ID NO: 203757 - protein, 40 aa, Glycine max
  Clone ID: PAT_MRT3847_26018C.1.pep
VHVMNERPGHIPIEKIPEDMHGQSGWCSEVASYTLGPLTT

SEQ ID NO: 203758 - protein, 75 aa, Glycine max
  Clone ID: PAT_MRT3847_26019C.1.pep
MPRRLAAYCSIKTYIEGHIIQVPWVPIFHQKSLPGRYVPACVTVSMVSRRVYSHNTPKSIFGRVSHQKKKKKKER

SEQ ID NO: 203759 - protein, 260 aa, Glycine max
  Clone ID: PAT_MRT3847_2601C.1.pep
MGRVIRAQRKGAGSVFKSHTHHRKGPARFRSLDFGERNGYLKGVVTDVIHDPGRGAPLAKVAFRHPFRYKKQNELFIAAEGLYTGQFIYCGKKATLVVGNVLPLRSIPEGAVICNVEHHVGDRGVFARASGDYAIVISHNPDNDTSRIKLPSGSKKIVPSDCRAMIGQVAGGGRTEKPLLKAGNAYHKFRVKRNCWPKVRGVAMNPVEHPHGGGNHQHIGHASTVRRDAPPGQKVGLIAARRTGRLRGQAAATAAKADKA

SEQ ID NO: 203760 - protein, 72 aa, Glycine max
  Clone ID: PAT_MRT3847_26020C.1.pep
NIILYIIFFFIYPLLYLNTYYPNSSIFKISFFLNILKSPKFNFSLYLFIPYLSHSSIFPHSTHFFFHNKPKS

SEQ ID NO: 203761 - protein, 101 aa, Glycine max
  Clone ID: PAT_MRT3847_26021C.1.pep
NSWHNGGNLSYLAYYLQFLGHYRRYHLYARTCVLYFAATHRGSRIIIHIRLTASLSIRSVWAHVLCLPFKSRTGLAITFSCKSVCDRTLDSSIEIARRCSV

SEQ ID NO: 203762 - protein, 33 aa, Glycine max
  Clone ID: PAT_MRT3847_26022C.1.pep
MSELDDQIPTAFDPFADANADDSGAGSKDSVRI

SEQ ID NO: 203763 - protein, 80 aa, Glycine max
  Clone ID: PAT_MRT3847_26023C.1.pep
HAYGLTSVGLFSSIFYLHAAESVSHSFYASISRSHPILYSLCLTANMQGGMRSLLAHGNVIRIAVLQRVRMLNPLVQTIA

SEQ ID NO: 203764 - protein, 110 aa, Glycine max
  unsure (1)..(110): unsure at all Xaa locations
  Clone ID: PAT_MRT3847_26024C.1.pep
QSKTLTRLHSARAGVTPLMQEQLQQLARQKLSDHQGSGLGKKGKLVVIGQDCVDALQALRSAGEEVRXDAKDLAGKQRNMQNLKRKRKEEKKRLRDQRRKQKKKLKYGDE

SEQ ID NO: 203765 - protein, 225 aa, Glycine max
  Clone ID: PAT_MRT3847_26025C.1.pep
AGVKGDERNGNYNIISGTSMACPHVTAAAAYIKSFHPDWSPATIKSALMTTATPMSIALNPEAEFAYGAGQINPIKALNPGLVYDANEIDYVKFLCGQGYDTKKLRSITADNSSCTQANNGTVWDLNLPSFALSMNTPTFFSRVFHRTVTNVGSATSKYKARVIAPPSLLNIIVEPEVLSFSFVGQKKSFTLRIEGRINVGIVSSSLVWDDGTSQVRSPIVVYSE

SEQ ID NO: 203766 - protein, 130 aa, Glycine max
  unsure (1)..(130): unsure at all Xaa locations
  Clone ID: PAT_MRT3847_26026C.1.pep
KERXKEACESQRVHTXXXRARXXXKIDLAXXYHKGHIERAAINTPVQGSAADVAMCAMLEISNNMKLKELGWKLLLQVHDEVILEGPTESAEVAKAIVVECMTKPFNGENFLRVGLSVDANCAQNWYAAK

SEQ ID NO: 203767 - protein, 77 aa, Glycine max
  Clone ID: PAT_MRT3847_26027C.1.pep
KKAVNVGVDEFKDCSELSRRLYRLKRIRHAQLLLIEREKETTDKSHHLPIIHPLITTLSNINLVINEETTDNPEAIT

SEQ ID NO: 203768 - protein, 68 aa, Glycine max
  Clone ID: PAT_MRT3847_26028C.1.pep
KGELLLNFFWSLISSILSGEKKPLLIPVKNSPPILCFYAKNSLFPFLPVFPVSLLIQKGFGNILFQVI

SEQ ID NO: 203769 - protein, 76 aa, Glycine max
  Clone ID: PAT_MRT3847_26029C.1.pep
FLNIKKYNKFDPPSLFYQVIIFKNKFDNNLHFLFPIAYFYIFRNYIDFLYHSKFDLRYSSNTIRFKCYTSLKKVKF

SEQ ID NO: 203770 - protein, 260 aa, Glycine max; identical to SEQ ID NO: 203759
  Clone ID: PAT_MRT3847_2602C.1.pep

SEQ ID NO: 203771 - protein, 74 aa, Glycine max
  Clone ID: PAT_MRT3847_26030C.1.pep
FFTRICLLAFAFPQGPEILDVRRTQTMTNTMVGLRPSLSLSIPLSYSFPSSSPLSLKPHPLLLSPKPHPLLTFA

SEQ ID NO: 203772 - protein, 112 aa, Glycine max
  unsure (1)..(112): unsure at all Xaa locations
  Clone ID: PAT_MRT3847_26031C.1.pep
KFEANVVISWRDYFLRVVPTACGTAMDVNLSNVSLVFISVTFATMCXICCSNFSPSVCFCFXLETPSVKLLSIILIISVGILLTVAKETEFDFWGFVLCMLAXCMSGFRWCM

SEQ ID NO: 203773 - protein, 36 aa, Glycine max
  Clone ID: PAT_MRT3847_26032C.1.pep
KIARALRGPRHTNSYNFYGNLLIPQFIGQILLWGVL

SEQ ID NO: 203774 - protein, 52 aa, Glycine max
  Clone ID: PAT_MRT3847_26033C.1.pep
MEGVKKTLLHACFFVLANPLLNIEKNPSLKNVLQLGYNFIFFLNGLYPLLGS

SEQ ID NO: 203775 - protein, 456 aa, Glycine max
  Clone ID: PAT_MRT3847_26034C.1.pep
MGTLLPDEKSENPNALEQLQHQKDVDAGALFVLKSKGSWMHCGYHLTTSIVAPPLLSLPYAFTFLGWTAGILSLVIGALVTFYSYNLISRVLEHHAQMGMRQLRFRDMARDILGPGWGRYFVGPIQFAVCYGAVVACTLLGGQCMKAIYLLSNPNGTMKLYEFVIIFGCFMLILAQIPSFHSLRHINLVSLVLCLAYSAGATIGSIYIGDSSKGPEKDYSLKGDSVNRLFGIFNAIAIIATTYGNGIIPEIQATLAPPVKGKMLKGLCVCYLVLIVTFFSVSVSGYWAFGNESEGLILSNFVDNGKPLVPKWFIYMTNIFTITQLSAVGVVYLQPTNEVLEQTFGDPKSPEFSKRNVIPRVISRSLAIAISTTIAAMLPFFGDINSLIGAFGFIPLDFILPMVFYNLTFKPSKRSPVFWLNVIIVVAFSALGAIAAVAAVRQIVLDAKNYQLFANV

SEQ ID NO: 203776 - protein, 105 aa, Glycine max
  Clone ID: PAT_MRT3847_26035C.1.pep
RAFLRPPTRPPHFGLTAKPWLQRAHHAHATPPDRQQTDALFDARKKERTRDWPVLIGQGKTVTEMVLLGSRVTRESPRPEVHIYFWRTVSMSALNWMYVRDDILH

SEQ ID NO: 203777 - protein, 79 aa, Glycine max
  unsure (1)..(79): unsure at all Xaa locations
  Clone ID: PAT_MRT3847_26036C.1.pep
FIVLXPLLEGHNCGGTNHIYRQFPTILMKQDEFTIIIYKHLLKPIYSEKRKGHIPFHYIHKFHLTILFYKNIGQRIIVI

SEQ ID NO: 203778 - protein, 50 aa, Glycine max
  Clone ID: PAT_MRT3847_26037C.1.pep
VAVQVIGLCLPKGRCLNSLEVNSLGFYSNFNYLKTLVNGFVPLALRPSGL

SEQ ID NO: 203779 - protein, 73 aa, Glycine max
  Clone ID: PAT_MRT3847_26038C.1.pep
SRSRRECIYRSGVRSARKIDRESDCVGPSKLKKLVSRDVQNFQSRASGTDSSLKFKSILFTILSSPSVVFSQP

SEQ ID NO: 203780 - protein, 133 aa, Glycine max
  Clone ID: PAT_MRT3847_26039C.1.pep
MWNIARTLTGDNEDQEEGLLGEDSGGLCSLSTTQSMIVFAKPIKFAALFTFGNLLAVGSTAFLLGPAQQLGMMVDPVRVFATAIYLGCVVIALICALWIHSKVLTIIAIIIEIGALIWYSLSYIPFARRWFLS

SEQ ID NO: 203781 - protein, 51 aa, Glycine max
  Clone ID: PAT_MRT3847_2603C.1.pep
ASITSNVFKGHGERTLLLGDNRGVSLFIKLAFMCFSQCTVTLFNLIKSGFG

SEQ ID NO: 203782 - protein, 97 aa, Glycine max
  Clone ID: PAT_MRT3847_26040C.1.pep
MWNIARTLTGDNEDQEEGLLGEDSGGLCSLSTTQRIYGFASCLVAGLACMLLSMIDFAKPIKFAALFTFGNLLAVGSTAFLLGPAQQLGMMVDPVRV

SEQ ID NO: 203783 - protein, 69 aa, Glycine max
  Clone ID: PAT_MRT3847_26041C.1.pep
TRPFCFHQRFLLEILIVALILSSGTTTGQAFKCIGKCYRPLDCRDYCSSLGFKKFYGCILIARLCCCSD

SEQ ID NO: 203784 - protein, 83 aa, Glycine max
  unsure (1)..(83): unsure at all Xaa locations
  Clone ID: PAT_MRT3847_26042C.1.pep
THVIISTCLPRIMNXEPLKLSYLSGVEAMXLMLGSGKDYPVAEVDALRIIEEKVGRLTLGLAIISAILSELPITPSRLLDTIN

SEQ ID NO: 203785 - protein, 59 aa, Glycine max
  Clone ID: PAT_MRT3847_26043C.1.pep
PLPPPPQHPTTRGDYQPEHALRNPKPSERISTRQRSPRRRPRRRPRKPRRRGPTNPPRA

SEQ ID NO: 203786 - protein, 355 aa, Glycine max
  Clone ID: PAT_MRT3847_26044C.1.pep
ADGNPDPSDILSPVDADGHGTHTASTVAGNLVPNANLFGLANGTARGAVPSARLAIYKVCWSSSGCADMDILAAFDAAIHDGVDVISISIGGGNPSYVEGSISIGAFHAMRKGIITVASAGNSGPSLGTVTNTAPWIVTVAASGIDRTFRSTVQLGNGKNVSGVGVNCFDPKGKQYPLIMGVDAAKDSKDKEDAGFCYEGTLQPNKVKGKLVYCKLGTWGTESVVKGIGGIGTLIESDQYPDVAQIFMAPATIVTSGTGDTITKYIQSTRSPSAVIYKSREMQMQAPFTASFSSRGPNPGSQNVLKPDVATPALTSGLLYSQEVLTGLKGDTPISKFILMSGTSMACPHVAGVAS

SEQ ID NO: 203787 - protein, 80 aa, Glycine max
  Clone ID: PAT_MRT3847_26045C.1.pep
SSLSSNLISKCSLSYMQTSGTSTNEKSKQERKHTAINHNIHKKDPLWYFQSSYHTILLVSQIYIHKMTDSKEIGKRNNKK

SEQ ID NO: 203788 - protein, 77 aa, Glycine max
  Clone ID: PAT_MRT3847_26046C.1.pep
LNTLHLISYCTNGVLKTGDSGGWSIQNHSPIVVALLVRAAALSIGRTCFHEKNETLFPTEDTVTQGPNLYCRRSGPN

SEQ ID NO: 203789 - protein, 118 aa, Glycine max
  Clone ID: PAT_MRT3847_26047C.1.pep
WGPQENTHGKTPSRTKSPTHLQGEPKKKGKKKQQRGKTIQSQKKQQILHITDQKPTKRGPSLQLLGPFHQYVHHKKPREKRLKPPGHSKTTKELLNPTQILRRVKKDCQLPPMPPPNF

SEQ ID NO: 203790 - protein, 35 aa, Glycine max
  Clone ID: PAT_MRT3847_26048C.1.pep
VIKKKMAIIYSIMYLALNTIIGKNGGNSNTIYTIP

SEQ ID NO: 203791 - protein, 133 aa, Glycine max
  Clone ID: PAT_MRT3847_26049C.1.pep
MAAGPTTTSPSDRPTMVPPPMLVSDSFAKDAILAWFRGEFAAANAIIDALCAHLSASSAHDYDAVFTAIHRRRLNWIPVLQMQKYHSIADVTLELARLADRNHNSAADEHETDDKTTPSESVGNGGGGDTRGV

SEQ ID NO: 203792 - protein, 45 aa, Glycine max
  Clone ID: PAT_MRT3847_2604C.1.pep
HIRSVSLVLGLSNHHNYTDRKHETLLITSYSRHIHLHGYIILHFT

SEQ ID NO: 203793 - protein, 69 aa, Glycine max
  unsure (1)..(69): unsure at all Xaa locations
  Clone ID: PAT_MRT3847_26050C.1.pep
LKKNFFDQCKIHANHHNIECNMYFFHSINDPLFYLXLDNQKYHLTIHILISSYHHFINXNNILNMSLHH

SEQ ID NO: 203794 - protein, 45 aa, Glycine max
  Clone ID: PAT_MRT3847_26051C.1.pep
TKVCYSLWITWISATHNRLTLPSFSSQHRNPLCVMIRRHGKHSSS

SEQ ID NO: 203795 - protein, 136 aa, Glycine max
  unsure (1)..(136): unsure at all Xaa locations
  Clone ID: PAT_MRT3847_26052C.1.pep
LKWMFERTHPLLACCSRMALCXNDAWRVECGIPSGFPLTAICNIIFNEMLIIYSSEKLLLQAKAPSMFLQSFKNFVSLRVYGDDNLISGHESVKPYFRGSKMKSFVAGHNITITAGIDKTRATLQYKELAHCDALK

SEQ ID NO: 203796 - protein, 109 aa, Glycine max
  Clone ID: PAT_MRT3847_26053C.1.pep
ILKLPTKKAKEGQHFLKGLAHKTGSAAIALCANQWYPYTVGSFGSALGELKESPDTANYDAKVAGDGPVYCDEAIAKAHIVNPAIFALNHKTSLLSFIAFLATNCLSEE

SEQ ID NO: 203797 - protein, 118 aa, Glycine max
  unsure (1)..(118): unsure at all Xaa locations
  Clone ID: PAT_MRT3847_26054C.1.pep
ETKSSXXKSVQVXMKVYSVAGLHTVLRRKALVTLLCPHKXPPLXHLTEPLTLLRAQLNGCKEKKRVWCHENXPPPDXXVKTGXRMASSLPVHSRTPPSRGALRRRGTRRRGVDPRXFR

SEQ ID NO: 203798 - protein, 53 aa, Glycine max
  Clone ID: PAT_MRT3847_26055C.1.pep
SCRQHLRTVAILWGDKMSIIVPLSTIHYREEKKKQQQHTSITEKSKFVKHSRW

SEQ ID NO: 203799 - protein, 87 aa, Glycine max
  Clone ID: PAT_MRT3847_26056C.1.pep
LGGIGTIIIYMTRTSLFNLSTLILVLPRCTVLINIAKINVDIGRHVNCTMHKMFFFFKTNLTHIINNKLQNTGRHRIKQSGNSIVNG

SEQ ID NO: 203800 - protein, 108 aa, Glycine max
  unsure (1)..(108): unsure at all Xaa locations
  Clone ID: PAT_MRT3847_26057C.1.pep
ACADVEFQCFGXGLAWATDHHALYKAFCQFVDMVKSKVINDCATGRSRGFGFVTFATXQAMRDAIEXMNGQNLHSLNITEIDANSRWKGGRGGRRRATEEGGGGYRGW

SEQ ID NO: 203801 - protein, 79 aa, Glycine max
  unsure (1)..(79): unsure at all Xaa locations
  Clone ID: PAT_MRT3847_26058C.1.pep
AALQWSWKTILLXLGYLVFELTPRHSSLWKPSLFWVQADAPXPSAILATILLFLLRNTTHQILVIELLPEGVNSPVSNV

SEQ ID NO: 203802 - protein, 247 aa, Glycine max
  Clone ID: PAT_MRT3847_26059C.1.pep
LRLVSAPPSFSLFSCRATASTALPPPTPTPTPTPAPTLISSIPQSPPLTCALHCPHFQSCSGCTHEFNLHRPVILDDATNFFRKHGVSDFTFDTCKLWGWRCRAKLAVRGSSTKLLIGLYEEGTHNVVDIPQCQAHHPNINAAVELLRRGIIEIGVEPYIEDEGTGDLRYVQMAVTTYNTSLSAAQRYKNGKVQVTLVWNSRNENSPGSDKLNALANFLWKNGGQRSRLHLIHSVWANFQTSTNNII

SEQ ID NO: 203803 - protein, 169 aa, Glycine max
  Clone ID: PAT_MRT3847_2605C.1.pep
WLYREYIRFMVERDGSAKGIVFGQFTSFLDLINYSLHKSGVSCVQLNGSMSLAARDAAIKRFTEDPDCKIFLMSLKAGGVALNLTVASHVFLMDPWWNPAVERQAQDRIHRIGQYKPIRIVRFVIENTIEERILKLQEKKELVFEGTIGGSSDALGKLTEADLRFLFVT

SEQ ID NO: 203804 - protein, 62 aa, Glycine max
  Clone ID: PAT_MRT3847_26060C.1.pep
KFLASKKGKLTPLLKYLWVKQTGGQKRIHSELDDPNNWPRKNLMKKFILGVDVGGGDLYPRF

SEQ ID NO: 203805 - protein, 56 aa, Glycine max
  Clone ID: PAT_MRT3847_26061C.1.pep
EAKMLIEEIEIILFSKKGNPLTNENEVRFHGGFQFHYFRNKEAKCSYIIWDYLISC

SEQ ID NO: 203806 - protein, 40 aa, Glycine max
  Clone ID: PAT_MRT3847_26062C.1.pep
IYRHLVYDRDSGPLPIISGLAAQIACFEQKGLLSMTHDLI

SEQ ID NO: 203807 - protein, 141 aa, Glycine max
  unsure (1)..(141): unsure at all Xaa locations
  Clone ID: PAT_MRT3847_26063C.1.pep
AINLASNLDNKINKAEVLSTGQNYEKYHIYYRSQQKERKSNYTNMINEYYNLVTSFYNCYXKKSFHCAPRXKEESLGESIKRHKHLLTSQLRLNPGQKSVNMXSKLEDHXREISGCNLTSVTEWNNNEYQITRREELNLIA

SEQ ID NO: 203808 - protein, 50 aa, Glycine max
  unsure (1)..(50): unsure at all Xaa locations
  Clone ID: PAT_MRT3847_26064C.1.pep
PPPPPPPPPPPPPPPXXXKGPRVVSFINLKYFWGAQLPKIYRACPPFFFV

SEQ ID NO: 203809 - protein, 295 aa, Glycine max
  unsure (1)..(295): unsure at all Xaa locations
  Clone ID: PAT_MRT3847_26065C.1.pep
MAFPPSHTFMFQTHEDHDPHQLHLRSTSTSLNAFPSFPPHHFQGGGAGAGGFMMKRSMSFSSIEKNNHKNKCDEVHGDDALSDEGSQLLGEKKKRLSQEQVKGLEKSFELGNKLESREENASLAKAPLGXLQPKLDLHIGSRSRRARWKTKQLEKEYEVLGKLFEAVKADNDSLKAQNQKLHAELQTLKSRDCSETGTVISLKKETEGSWSNGSNNSSEINLDLSRTPVMNSPVSSSLNGKTLLPTSLKPTSITQLLQCSSRSDLQDESFCNMFHNIDEQQNFWPWPDHQQHQFH

SEQ ID NO: 203810 - protein, 289 aa, Glycine max
  unsure (1)..(289): unsure at all Xaa locations
  Clone ID: PAT_MRT3847_26066C.1.pep
MATINLSSATTSLFQSKHRTKRIPRLPTIARITNHIEGTHLNSPNGSPILGNANNSLEVPSNNYISLHSSDVRRKTKIVCTIGPSTSSRDMIWNLAQAGMNVARLNMSHGDHASHLQTIDLVKEYNSQFQDKVVAIMLDTKGPEVXGDVAQPILLKEGQELCFTTMRGVSTHDTVSVNYDGFVNDVEFGDVLLVDGGMMSLAVKSKTKDLVKCEVIDGGELKSRRHLNVRGKSATLPSITDKDWEDIKFGVDNQVDFFAVSFVKDARVVHELKHYLKSHNADIHVIVKI

SEQ ID NO: 203811 - protein, 159 aa, Glycine max
  Clone ID: PAT_MRT3847_26067C.1.pep
VSYYRSSGEGVPFKWEMQPGIAKEQQPREDLPPLSPPPALLSLGLPKPCIPDTKPSTRSRLRFWKKRVKRGKSKKSSSSSHDCFHEDDDVIGLDILDCNSDSESNSMASPRGSSFSSWSSMSFMKSPTTTIRKVYRRPSTLGCFPMHVTRVFVSIARRD

SEQ ID NO: 203812 - protein, 47 aa, Glycine max
  Clone ID: PAT_MRT3847_26068C.1.pep
QMLSDQTSNRFKIYLKYQTESSNNFTRAYYLLRAMREHSGSFALMLV

SEQ ID NO: 203813 - protein, 103 aa, Glycine max
  unsure (1)..(103): unsure at all Xaa locations
  Clone ID: PAT_MRT3847_26069C.1.pep
LLHVSVSIFLPCSQTSISSLIPSHLSPSALRGRDITPFTPYRTQPATGDEFLPTRHLLFQQEXNLWTDVPLVTTSLQKIVLQNLHXLVLADRAAYFKHSQAIP

SEQ ID NO: 203814 - protein, 54 aa, Glycine max
  Clone ID: PAT_MRT3847_2606C.1.pep
RSCCPLYLLLDPPPQFNFFFLYSMKSVLIIFFFFEIGFFYVLSLALLCKLLPYS

SEQ ID NO: 203815 - protein, 125 aa, Glycine max
  unsure (1)..(125): unsure at all Xaa locations
  Clone ID: PAT_MRT3847_26070C.1.pep
KVREFVVSYKLVYREENMNLSVFVVAAVLLVTWPCHGTCXYRFPLRVKIGYGERSSEVXCTCFKLAVAAYNIXAFNTIPEQCVESSLDYINGDHFKSDANTVYQRAFVYASEREVYHIDIFIFGI

SEQ ID NO: 203816 - protein, 50 aa, Glycine max
  Clone ID: PAT_MRT3847_26071C.1.pep
SVVVNTAEKSNQRTHVSYNDDEHPYTRYSVSISFVLLSFVWKIKSCAKGA

SEQ ID NO: 203817 - protein, 76 aa, Glycine max
  unsure (1)..(76): unsure at all Xaa locations
  Clone ID: PAT_MRT3847_26072C.1.pep
QXQNXRLAAEDFLPKPAKGQTDKEGWNPPGKGEAPQTQTNSGKSDXTPRQXKEHASDANTDNFLAKEDKKSPKTTI

SEQ ID NO: 203818 - protein, 35 aa, Glycine max
  Clone ID: PAT_MRT3847_26073C.1.pep
AALTKFRQNTRERGHRCFHEKVRYQGRKILTEQRP

SEQ ID NO: 203819 - protein, 51 aa, Glycine max
  Clone ID: PAT_MRT3847_26074C.1.pep
VIVSSGRGSSLYTHRAKDSIHCLHQACQTTPMLEPHALGIESLCVCPRFVR

SEQ ID NO: 203820 - protein, 69 aa, Glycine max
  Clone ID: PAT_MRT3847_26075C.1.pep
CFVRLFVRQNPRKYSESTQDKQENKENMHKVHIISYGYARTADRIPVTPCLSNLYMVSFLPTEQGTMLK

SEQ ID NO: 203821 - protein, 71 aa, Glycine max
  Clone ID: PAT_MRT3847_26076C.1.pep
NDSPKEKLVASCCAFYFVLFCVEINLFGIVLCFMNYLMGEEGEEVVRKQGQRGVDGDKCFLWRDLKDDIDC

SEQ ID NO: 203822 - protein, 41 aa, Glycine max
  Clone ID: PAT_MRT3847_26077C.1.pep
SGFARHTGVLGLRRRGTHPGAQQAIGVVGTRGSIPGFSVPV

SEQ ID NO: 203823 - protein, 322 aa, Glycine max
  Clone ID: PAT_MRT3847_26078C.1.pep
MKRLSSSDSSSALMTICPSTEEHSPRNSQHMYGREFQSMLDGLDEEGCVEEPGYQSEKKRRLSVDQVKALEKNFEVENKLEPERKVKLAQELGLQPRQVAVWFQNRRARWKTKQLERDYGVLKANYDALKLNFDTLDQDNEALRKQVKELKSRLLQEENTGGSGVSVKEEIITRPADSEDKTMEQSKSDPSSETSNINPSSESEEDHLNYECFNNNDDCVGGTAASLLQVDFKDGSSDSDGSSAILNEDNMYSPLKFNNCSISTSPSSSSMMNCFQFQKPYHHHAQYVKMEEHNFLSADEACNFFSDEQAPTLQWYCPEQWS

SEQ ID NO: 203824 - protein, 322 aa, Glycine max
  Clone ID: PAT_MRT3847_26079C.1.pep
MNYLMGEEGEVVRKQGQRGVEEHSPRNSQHMYGREFQSMLDGLDEEGCVEEPGYQSEKKRRLSVDQVKALEKNFEVENKLEPERKVKLAQELGLQPRQVAVWFQNRRARWKTKQLERDYGVLKANYDALKLNFDTLDQDNEALRKQVKELKSRLLQEENTGGSGVSVKEEIITRPADSEDKTMEQSKSDPSSETSNINPSSESEEDHLNYECFNNNDDCVGGTAASLLQVDFKDGSSDSDGSSAILNEDNMYSPLKFNNCSISTSPSSSSMMNCFQFQKPYHHHAQYVKMEEHNFLSADEACNFFSDEQAPTLQWYCPEQWS

SEQ ID NO: 203825 - protein, 72 aa, Glycine max
  Clone ID: PAT_MRT3847_2607C.1.pep
SYNSTAPKHYLSTLHASINAEMVSNIVNVSHGTDNMIVMLTIGCYFCCYYSSSHAQSSGRRVVVVVVVGTGW

SEQ ID NO: 203826 - protein, 44 aa, Glycine max
  Clone ID: PAT_MRT3847_26080C.1.pep
FFFFFWPPPLIIFPQGERLGLNQQPLIQGLTETGPTPYGPLKKN

SEQ ID NO: 203827 - protein, 154 aa, Glycine max
  Clone ID: PAT_MRT3847_26081C.1.pep
MKRLNSSDSSTALMTIFPSSSTEEHSPRNSHHMYGREFRSMLDGLDEEGCVEEPGHQSEKKRRLSVEQVKALEKNFEVENKLEPERKVKLAQELGLQPRQVAVWFQNRRARWKTKQLERDYGVLKANYDALKLNFGTLNQDNEALRKQIKELKS

SEQ ID NO: 203828 - protein, 322 aa, Glycine max; identical to SEQ ID NO: 203823
  Clone ID: PAT_MRT3847_26082C.1.pep

SEQ ID NO: 203829 - protein, 140 aa, Glycine max
  unsure (1)..(140): unsure at all Xaa locations
  Clone ID: PAT_MRT3847_26083C.1.pep
WPNALRSRFSYCLLPWLDLGHIYLYFERPQIPAQKXGHFVPFINRPXHIDRLPKXRRHLQPFIKIAKLPFPRIDHLPXGALSAMDIPSKRNCVLKRAYEGLQXTVCKLLNTTNPDWVLHECSPARVIPIAESYILTCAHY

SEQ ID NO: 203830 - protein, 76 aa, Glycine max
  unsure (1)..(76): unsure at all Xaa locations
  Clone ID: PAT_MRT3847_26084C.1.pep
GSPPRQEAAGAPKEPXQKKRSAPPPQRXXPLXXAPGPGACVGXGLSGRRFLFARLMRFFGREPLLPAGGGSRASLP

SEQ ID NO: 203831 - protein, 322 aa, Glycine max
  Clone ID: PAT_MRT3847_26085C.1.pep
EFDAIHSDKARRLLEDFRIGELMTTDYTSDSEPDNSMHGDSESTHLAPIKEITTPRPQRKVALNSREKISCKLVSKTYISHNTRLFRFALPSEDQLLGLPVGKHIFLYATIGDKLCIRAYTPTSSVDEVGFFDLLIKVYFKGVHPKYPNGGLMSQHLDSLSIGSMLDVKGPLGHIEYTGRGNFMVHGKQKFAKRLAMLAGGTGITPIYQVAQAILKDPEDHTEMHLVYANHAEDDILLMEELDAWAKTHCDRFKVWYVVGIAKEGWQYSVGRITESIMREHLPKSSSDALALTCGPPPMIEFAVQPNLEKMGYDIKNDLLVF

SEQ ID NO: 203832 - protein, 62 aa, Glycine max
  Clone ID: PAT_MRT3847_26086C.1.pep
HTKSSCTRPLRASLGAIKEARVMVGTGKGPDLVFEIRSVPIQSPAPPPLNLALCQKRKSVMV

SEQ ID NO: 203833 - protein, 45 aa, Glycine max
  Clone ID: PAT_MRT3847_26087C.1.pep
RKKKYKSWSNFCLVFPFTYPFNIRIPNKFNSTLFLLNLFFWIYLK

SEQ ID NO: 203834 - protein, 50 aa, Glycine max
  Clone ID: PAT_MRT3847_26088C.1.pep
ALAEGLREAACLRFGALSRILNRQERFQMKDVTSGRKHSLFPPFCRHLTA

SEQ ID NO: 203835 - protein, 40 aa, Glycine max
  Clone ID: PAT_MRT3847_26089C.1.pep
ACTFMIRMHCSIGKGPDGKSIWFITSYIKVLLVPLTRTDK

SEQ ID NO: 203836 - protein, 56 aa, Glycine max
  Clone ID: PAT_MRT3847_2608C.1.pep
LILHDGITFYLMPFSQNPVLVMDSKFHPIEISVKFLNPNFMLISKIPKYEDQSIDC

SEQ ID NO: 203837 - protein, 90 aa, Glycine max
  unsure (1)..(90): unsure at all Xaa locations
  Clone ID: PAT_MRT3847_26090C.1.pep
SAFFPVLSSPFFWGFXPXXXPAVPLRLVPRGWSSPLGAPRLPWSSSWSXXLLWLRXGXXLXPXGGASXVPVRPLVFAXXAPLXXFVFFSF

SEQ ID NO: 203838 - protein, 53 aa, Glycine max
  Clone ID: PAT_MRT3847_26091C.1.pep
FQTVIRERELGMVLLRGKLCISGFCPSSLKFFKVVYRARILKSTGIVHNERAA

SEQ ID NO: 203839 - protein, 356 aa, Glycine max
  Clone ID: PAT_MRT3847_26092C.1.pep
MRLLSIITTSLTLFFLLLFLSIELQAYTPEDNFTISCGTTGIVFDGQRTWTGDADTKYLSGGQGSTVLTQAATQDPSVNQVPYTTARLSPSQFNYSFPVSAGPKFVRLFFYPADYPSFPRTDASFSVQSNGFTFLKGFNASLNADAEATKTIFREYVVNVNDGENLILSFTPSQPNSYAFINGIEVLSMPSDLYYTSATDSTGFKFLGSTTLYSVETRFALQAEYRIKMGGQEISPLNDTGLFRKWAGDEEDYLIKQNPQNNDLSSNTDGKMNITVNPDYVAPKELYRTARNMGTNATLNKISNLTWEFPVDSGFTYVLRLHFCELDPNINKDGDRVFFIYIASQLAENHADVMQW

SEQ ID NO: 203840 - protein, 54 aa, Glycine max
  Clone ID: PAT_MRT3847_26093C.1.pep
MDSRVQIGSSISALIARIAYDENVVGFVLDGVGNGDIRRNTMYLIVDSNSTVMQ

SEQ ID NO: 203841 - protein, 46 aa, Glycine max
  unsure (1)..(46): unsure at all Xaa locations
  Clone ID: PAT_MRT3847_26094C.1.pep
NNYFIFFAFXNYVYLMFNKKKMFQKPLKTKIKPPLFAKMKIKKLFC

SEQ ID NO: 203842 - protein, 58 aa, Glycine max
  Clone ID: PAT_MRT3847_26095C.1.pep
IRTWHAFIYFWVKLDFGLSLEDPNIEKWAKLLVFTLELGPRSNPLWGNQIKIESKSTC

SEQ ID NO: 203843 - protein, 40 aa, Glycine max
  Clone ID: PAT_MRT3847_26096C.1.pep
NVWVLTFRDFGMMVCKDSFPNVVWNLPSPMEIIVYPYVPP

SEQ ID NO: 203844 - protein, 152 aa, Glycine max
  unsure (1)..(152): unsure at all Xaa locations
  Clone ID: PAT_MRT3847_26097C.1.pep
PRFRLDNTKANMMAQILSVRQSVEGDTELKTDGEKHEGEYITGSNISAGENNLVQTHVEAQEDIACDIASDMRTAKGRQNSTAKAAGALERAIDSIIGSYXSTDCAILGAETXDATYDTAPGNAVGGLFVAPMTSRRATLADTFAHTSAHIE

SEQ ID NO: 203845 - protein, 113 aa, Glycine max
  Clone ID: PAT_MRT3847_26098C.1.pep
PFKGSNNEEPLANVVLQGLRFPEHPNVSFQAKDLIRGLLVKEPETRLGSEKGAAEINQHPFFEGLNWALIRCAVPPELPDFYDFGVSDMVNPQGKGAKYLECKVGEHVEFELF

SEQ ID NO: 203846 - protein, 48 aa, Glycine max
  unsure (1)..(48): unsure at all Xaa locations
  Clone ID: PAT_MRT3847_26099C.1.pep
WDLNHILLLPFXPVTLSGPSHTQDQISWTRFTLLPSPAHVRHNPSLTT

SEQ ID NO: 203847 - protein, 70 aa, Glycine max
  Clone ID: PAT_MRT3847_2609C.1.pep
RFRHQEIALSFSSCTINLRYLARILLNRVAPMSSNFLQIGIWVGLNPPSSPLWFRENFNGAYIFSGCHLF

SEQ ID NO: 203848 - protein, 74 aa, Glycine max
  unsure (1)..(74): unsure at all Xaa locations
  Clone ID: PAT_MRT3847_260C.1.pep
LVVSHLSIAVNCYQEQLPNHLPVLVARKNLVIRKVCLFSIIKSSYRESLPESAKLPFYDVKRFESSKSVIRXWR

SEQ ID NO: 203849 - protein, 46 aa, Glycine max
  Clone ID: PAT_MRT3847_26100C.1.pep
YKITFTYPSHYVQDLFSPPHKRMPLCVVITELSDLSQCPLLSSRAE

SEQ ID NO: 203850 - protein, 61 aa, Glycine max
  unsure (1)..(61): unsure at all Xaa locations
  Clone ID: PAT_MRT3847_26101C.1.pep
VSQFXCVISLSRTKKGTSKIFTSSSSSSSSSGAVRHSCVICEMRIIQSHALALVTAPLATT

SEQ ID NO: 203851 - protein, 232 aa, Glycine max
  Clone ID: PAT_MRT3847_26102C.1.pep
MIQFDHVDYSYHRKQPVLKDINISIQRGEKIGVLGESGAGKSTIGSLILGQLKPTKGKISIDSGKVLPIFQHATESFDRQFTIEQSLREPLLFYRQLIRQNIKNIILNYLIEFNLSTDLITKFPQEVSGGQLQRLNIIRSLLAQPDILVCDEITSNLDVMAEQNVINILLNEKNIQNKTLIVISHDLSVLQRLTNRIIVIKDGQIVDDFKSKDLFSHKRHPYTKLLIQTYEY

SEQ ID NO: 203852 - protein, 204 aa, Glycine max
  unsure (1)..(204): unsure at all Xaa locations
  Clone ID: PAT_MRT3847_26103C.1.pep
GSSWRTKQSSVQLLGAMAYCAPQQLSQCLPKIVPKLTEVLTDTHPKVQSAGQMALQQVGSVIKNPEISALVPTLLKGLSDPNEHTKYSLDILLQTTFVNSIDAPSLALLVPIVHRGLRERSADTKKRAAQIVGNMCSLVTEPKDMIPYIGLLLPEVKKVLVDPIPEVRSVAARAIGSLIGGMGEEXFPDLXPWLXDTLESDNRM

SEQ ID NO: 203853 - protein, 141 aa, Glycine max
  unsure (1)..(141): unsure at all Xaa locations
  Clone ID: PAT_MRT3847_26104C.1.pep
AKLPLLIKLAWGRIIDQALLESKEYATEDDVDFDRKAARAIGRCAIKLERAXERCISARXELIQIKVNNVDQEAIIVIKDILRRDPNTLESIIVTLCESIETLDEPRAKAXMIWIIGDSAERIDHAYEPLESFLENFPEEP

SEQ ID NO: 203854 - protein, 200 aa, Glycine max
  unsure (1)..(200): unsure at all Xaa locations
  Clone ID: PAT_MRT3847_26105C.1.pep
MEAAVRTFXALSESSECAGGWGPFCERCCVEPRAPEWGFAQKGEYLRGKVGATFIRERXAIKRGGEEVKVRSNAIGGLGQKVPEEGXAMXEGAPVAGNNVXDHPGVRQGFLXQNGVRDIEGDELPRLVYVCRERRAGYEHHKKAWAXSALVRVXXIITNAPYVLSVELDHYINNNKXLXEXHGFMSGPTSGEKICDVQVP

SEQ ID NO: 203855 - protein, 63 aa, Glycine max
  Clone ID: PAT_MRT3847_26106C.1.pep
TVMRNTERSHLPFYSLPVCVLRLPRLCVGRALGRHGSPVKRYLRTSDSAGISLAAPTFAEGAA

SEQ ID NO: 203856 - protein, 83 aa, Glycine max
  Clone ID: PAT_MRT3847_26107C.1.pep
EVLLTGTCWATGMPGAAFRFLGWKHKSSLLVHKQAHPREEVAQVELALAPQERLPFHLRKKAVLQEEAPLPRLSDTTCCCGSE

SEQ ID NO: 203857 - protein, 120 aa, Glycine max
  unsure (1)..(120): unsure at all Xaa locations
  Clone ID: PAT_MRT3847_26108C.1.pep
NTVSTSEPARFISIEGTPDYDXRVKNPQKAHVRTITPKLDTLIDLLVIHILSRHACDEIYLGERETPNSTTDKTALKAYKKTGSKLTGLEXIITAWNSDTCLINRTAPDQLPYTVLHRSR

SEQ ID NO: 203858 - protein, 130 aa, Glycine max
  unsure (1)..(130): unsure at all Xaa locations
  Clone ID: PAT_MRT3847_26109C.1.pep
NTSRGDTHLGGEDFDNRMVNHFVQEFKRKNKKDITGNPRALXRLRTSCERAKRTLSSTAQTTIEIDSLFEGIDFYSTITRARFEELNMDLFRKCMEPXEKCXGSKMDKLCYDLPCGGLQDSKFNTVQTFN

SEQ ID NO: 203859 - protein, 87 aa, Glycine max
  Clone ID: PAT_MRT3847_2610C.1.pep
QGEKGGSRPFFGTWFLWRGSFFLFTKKNSRGKGGAHFFFFTPPFSFPNFFFFPGEKETGWGFIEPPSFYSSPSFLGMEYNPRLAPPT

SEQ ID NO: 203860 - protein, 67 aa, Glycine max
  Clone ID: PAT_MRT3847_26110C.1.pep
YGCEKTTEGDATMVVPRRHFLVFSLTLISIIFQTHGALSEESIIKVTRGLATGEELIHLHLFYHDVL

SEQ ID NO: 203861 - protein, 183 aa, Glycine max
  Clone ID: PAT_MRT3847_26111C.1.pep
LELERRELQLDVEATALEQEKDEASKVRLQLVREELTKLREQLKPLRMQHDAEKGRVDELRSLKNKIESLRTKAALAERDKNLALAADLKYGAIPELEKKIAQMEAALEEKKSEEKEGDKLLSEVVGPEKIAEIVARWTGIPVSKLTQTEKERLLKLSDQLHRRVVGQSEAVDAVAEAVLRSR

SEQ ID NO: 203862 - protein, 169 aa, Glycine max
  Clone ID: PAT_MRT3847_26112C.1.pep
LFEIDQQLKFYFVLILHSSLTLRECVEKLQLLKTPEERQRRLEEIPEIHVDPNMDPSYESEEDANEVDDKRQENYMRPRGSTAFGRRGRDIVSPRSGSISNDSWSGTRNYSNVNHELGRNLSNKGFSIKGDNASNANEALNDAQLHRGRDRESQLSNSWERQKLSSTLE

SEQ ID NO: 203863 - protein, 119 aa, Glycine max
  Clone ID: PAT_MRT3847_26113C.1.pep
LSVYSFYRQYVVFMPCLDTESSPNLTYEQSDFLFWTIIGTASRTCAKNPTIFPALAKHIISMAFLSPLSESGAWNIVQGLLLVLNWPFPKADGGVDIIFPLTGLLLHVAMMYGMHNPVS

SEQ ID NO: 203864 - protein, 62 aa, Glycine max
  unsure (1)..(62): unsure at all Xaa locations
  Clone ID: PAT_MRT3847_26114C.1.pep
AAXAPETRVHRLPHEGNSRCARVRVRANASVRGGKGDGRNGGGNGTCGRRRRRERRKSATST

SEQ ID NO: 203865 - protein, 274 aa, Glycine max
  Clone ID: PAT_MRT3847_26115C.1.pep
LGYTTTSAKKAPKGSSHDDTTGPYITQYGGPGPKNDPKESSNLDHTEAFKTGFFALDDLYVGNVMTLQFPIQDVSQFLPRKEAESIPFSISQLPSVLQLFSISEDSPEANAMRDTLEQCEAEPITGETKICATSLESMLEFIGTIIGSETKHNILTTTLPTASGVPLQKFTILEVSEDINAAKWVACHPLPYPYAIYYCHFIATGSKVFKVSLGSENGDDKIEALGICHLDTSDWSPNHIIFRQLGIKPGKDAVCHFFPIKHLMWVPKPLQATM

SEQ ID NO: 203866 - protein, 27 aa, Glycine max
  Clone ID: PAT_MRT3847_26116C.1.pep
VGLKEFMRVHLDECMSFGSCSASRGSG

SEQ ID NO: 203867 - protein, 89 aa, Glycine max
  unsure (1)..(89): unsure at all Xaa locations
  Clone ID: PAT_MRT3847_26117C.1.pep
FXASXCXXXWXXXXXLPLALPFLFAXXXGXFFRSXCXFSFVPPPRPXAXFXPXCPLGXFXXXFXRXWXXXXXXXXSWXWXXXXFLCSFS

SEQ ID NO: 203868 - protein, 173 aa, Glycine max
  Clone ID: PAT_MRT3847_26118C.1.pep
SAPSIRANGRFNAQMTAELLRKAMKGFGCDKSKVIQALVNCNNAQRQEVIRTFKQMYGKELIPELKSELTGDFEHLIIALMELPAVYDAAQLRRSMEGLGTKEHILIEIMTTRPNAQIYAVKMAYRQMYNSDLERDIIGETSGYFQRLLISLCSGARDEQMHTDPIKANQDAQ

SEQ ID NO: 203869 - protein, 55 aa, Glycine max
  Clone ID: PAT_MRT3847_26119C.1.pep
TEMLYPFKGFFACPKRMFVIDRSRNSFHRLVFHYWITAIPVTLCMVIAICDLVLA

SEQ ID NO: 203870 - protein, 145 aa, Glycine max
  Clone ID: PAT_MRT3847_2611C.1.pep
VMTSLVDMYAKCGNIEDARGLFKRTNTSRIASWNAMIVGLAQHGNAEEALQFFEEMKSRGVTPDRVTFIGVLSACSHSGLVSEAYENFYSMQKIYGIEPEIEHYSCLVDALSRAGRIREAEKVISSMPFEASASMYRTLLNACRV

SEQ ID NO: 203871 - protein, 64 aa, Glycine max
  Clone ID: PAT_MRT3847_26120C.1.pep
PNPPLRVRLRPQYYYHLSLPSLVFYLTKGFFYMSPMKIRMSSIKCPGKSPLSFISIPIALFFFF

SEQ ID NO: 203872 - protein, 90 aa, Glycine max
  Clone ID: PAT_MRT3847_26121C.1.pep
DGPDGARIVLIDVSCSFDRPHRIGGWRTIGAGSLQSVTRVGAFLAVVEPFHEGRAPVCCAVGLDYTPSCHVEWSLLYNANSVLARIRARA

SEQ ID NO: 203873 - protein, 63 aa, Glycine max
  Clone ID: PAT_MRT3847_26122C.1.pep
RPVPKKQLKGHFILTRFLHSGVIYRVTFSLFNYPDLKCVMAANVTESNISTQRLSWDVTLRQH

SEQ ID NO: 203874 - protein, 254 aa, Glycine max
  unsure (1)..(254): unsure at all Xaa locations
  Clone ID: PAT_MRT3847_26123C.1.pep
MPLPEKDKEKRSSAPGKSLNAWKEKRNWEDILSSPFRISSRLPYSPSLSRKSAERVRTLHDKLMSPDKKKKTTSDLKREAEEKHARAMRIRSELENERVQKLQRTSQKLNRVNEWHADRHMKLREGMYARHQRSESRHEAFLAQVVKRAGDESSKVNEVRFITSLNEENKKLMLRQKLHESELRRAEKLQVLKSKQKEDLAREEAVLERRKXIEAEKLQRLAEIQRRKEEAQVRREEERKASSAAREARAIEQL

SEQ ID NO: 203875 - protein, 97 aa, Glycine max
  Clone ID: PAT_MRT3847_26124C.1.pep
AIFFLVFLTKNVFKKMSCYPVLNEPVWVGQKSIAFPRDATFGKCSQLVAMFFQCRNLFGRESFPCKTKFPCVFLTPLGKKLPGDWITPSTKKAVEVP

SEQ ID NO: 203876 - protein, 38 aa, Glycine max
  Clone ID: PAT_MRT3847_26126C.1.pep
IQLSSYGLSNEETLASAPNRSWVVNLASMSIISTGILL

SEQ ID NO: 203877 - protein, 62 aa, Glycine max
  Clone ID: PAT_MRT3847_26128C.1.pep
ALSVVVVRCIVYEDLRLTSLCLEFIVRNGLRSERGTSASSRSTWVKQRGGRGRHIRVCHAIM

SEQ ID NO: 203878 - protein, 45 aa, Glycine max
  Clone ID: PAT_MRT3847_26129C.1.pep
APINFLGPQTNPCVRRRGPRLDRDLDRASFKEEDPVRRYEVWQLK

SEQ ID NO: 203879 - protein, 51 aa, Glycine max
  Clone ID: PAT_MRT3847_2612C.1.pep
CPITIEYPGILHVYLFFKGLQYFETLWVSHSILNQEHELYVTYCEYRCLIR

SEQ ID NO: 203880 - protein, 47 aa, Glycine max
  Clone ID: PAT_MRT3847_26130C.1.pep
WHYVGVYEQLYIGRRGLSCPFEQLLVLIKALFRKSAITTNPIIARVK

SEQ ID NO: 203881 - protein, 150 aa, Glycine max
  unsure (1)..(150): unsure at all Xaa locations
  Clone ID: PAT_MRT3847_26131C.1.pep
DARAHGEGFYRIVQLFPLPIGGGAGAKNANLMNMPNAVLSTWRYFAGDLAYEASKKTSPYIKCTASYSIAFGNLADDTINLEAFSHKLXQPVEIQEKVXLKFSHEELLTACSTQVRSAQLCLLMGXPYLYAMVHDSSCXTIPSDFVIGVS

SEQ ID NO: 203882 - protein, 74 aa, Glycine max
  Clone ID: PAT_MRT3847_26132C.1.pep
ISAFVPSQGGWQAHFNIYGNLLLAYIQDILWLRVMLCKIIVKLGSSQGLYLLPVYVCGMHNYDSQVLNGVIFFC

SEQ ID NO: 203883 - protein, 49 aa, Glycine max
  Clone ID: PAT_MRT3847_26133C.1.pep
AIITRCIRVPYHCRQSLTGLCPFERTIFFARDIRTCKACRSTKFLQNTH

SEQ ID NO: 203884 - protein, 435 aa, Glycine max
  Clone ID: PAT_MRT3847_26134C.1.pep
LLFAIPKLTLVFTKTASVGAMLGYVTYIDFMNNMGHCNFEVVPKWLFDIFPPLKYLMYTSSAHSLHHTQFRTNYSLFMPLYDYIYGTTDKASDKLHESALKQEEEIPNVVHLTHLTTPESIYHLRLGFAYLASKPYTSKWYLCLMWPVTAWSMILTWVYGRTFIVEGNRFDKLKLQTWAIPKYSLQYFMQSQKVAINTMIEEAILDADRKGIKVLSLGLRNQGEDLNIYGGLYVSRHPKLKVRVVDGSSLVVAVVLNSIPKGTTQVLLRGKLTKIAYALAYTLCQQGVQVAALYEDDYVRLKKSFNSSETNLAFTKSSTQTTWLVGDGLTEEEQLKAPKGTLFIPYTQFPPRKYRKDCFYHCTPAMLAPCSVENIHSCEDWLPRRIMSAWRIAGIVHSLEGWTEHECGHTMHNIDNVWHSTLQHGFQPLPVPINE

SEQ ID NO: 203885 - protein, 87 aa, Glycine max
  unsure (1)..(87): unsure at all Xaa locations
  Clone ID: PAT_MRT3847_26135C.1.pep
GVGILGGAWTFGGMTFIPGYCTAVISXGDHTNPAATLGLLLALRASLIIAITFMVAXCLRAISGAGLVKDFQTDYYIMCGGVTPPPN

SEQ ID NO: 203886 - protein, 90 aa, Glycine max
  Clone ID: PAT_MRT3847_26136C.1.pep
KKLLATPHKNIIIGQKCLGTKSANSTLLTQKVFGGFFPKKRIFKLPGKKHSFSGNGSGARIFTRQLKNYFWLTLPQKREVAPEVGPNSGV

SEQ ID NO: 203887 - protein, 55 aa, Glycine max
  unsure (1)..(55): unsure at all Xaa locations
  Clone ID: PAT_MRT3847_26137C.1.pep
NYPPPPXKSICVVRSPYHVKGQXSVMARGTQEVHNSSGGSTWMSSVTRQCQRPGS

SEQ ID NO: 203888 - protein, 69 aa, Glycine max
  Clone ID: PAT_MRT3847_26138C.1.pep
LGMFAFLSKISKQQFLTEHLAPGEENETMELGLEKSQTLRTLFFRTISIGIKNNALKKKQIRYHSGNMH

SEQ ID NO: 203889 - protein, 93 aa, Glycine max
  Clone ID: PAT_MRT3847_26139C.1.pep
GVQIHFWLCGAPIQGHNGLQAQLKACLAWILFGSKAAMLIIIFFTISVLRRNDLYMQSAFCMIVSIYKTPKIFLWEGIIIFMCSHVPDVVLHM

SEQ ID NO: 203890 - protein, 75 aa, Glycine max
  Clone ID: PAT_MRT3847_2613C.1.pep
QCSSVLQGAHVCEVCCDLVFNVLFFFITALVSVLPSLYVYNLRHFRTSCTNINIRAKKVSQAQKVIVTNVKPKTK

SEQ ID NO: 203891 - protein, 54 aa, Glycine max
  Clone ID: PAT_MRT3847_26140C.1.pep
LTVLYAIQYIHSTFNGLHTILIVITLSFEFFAILLIRLSYSYITNIPCSSNRSK

SEQ ID NO: 203892 - protein, 99 aa, Glycine max
  unsure (1)..(99): unsure at all Xaa locations
  Clone ID: PAT_MRT3847_26141C.1.pep
ASSMISSPAVTTVNLAGAGMVAPFTGLKSLAGLPTKKTYYDITSLAYTGGXLHCMHVWPPVGRKKFDTLFYLPDLDYAQLAYVLKYLLANGWIPCYEFE

SEQ ID NO: 203893 - protein, 78 aa, Glycine max
  Clone ID: PAT_MRT3847_26142C.1.pep
MYELSTVGIYLRCCLCDHRVTRIKERYFSRTAKTLLRLCMSFKNNTALQISDYCKDRTTESESVSEHFGLIMKRGLFN

SEQ ID NO: 203894 - protein, 63 aa, Glycine max
  Clone ID: PAT_MRT3847_26143C.1.pep
YFLLYLIMTSLCEKFWEEDKRKLSLTMTFQPLPLHNFIFNYYGYCFCLYDHKKNSFSSVLNFK

SEQ ID NO: 203895 - protein, 385 aa, Glycine max
  unsure (1)..(385): unsure at all Xaa locations
  Clone ID: PAT_MRT3847_26144C.1.pep
MGSVCEERWITVTITTVALVIASSAPLLLAACPYTSIFSFGDSLADTGNLYFSPYPPTNHCLFPPYGETFFHHVTGRCSDGRLIIDFIAESLGIPRVKPYLGIKNIGRWSVEEGGANFAVIGATALDFSFFEERGISIKTNYSLTIQLNWFKELLPTLCNSSTDCHEVVGNSLFLMGEIGGNDFNYPFXNRSVAEVKTYVPYVIRAITSAVNELIGLGARTLIVPGNLPLGCSINYLTIYETMDKNQYDQYGCLKWLNEFAEYYNQKLQSELDKLRRLHSHANIIYADYYNATLPLYRDPTKFGFTGLKVCCGMGGPYNYNTSADCGNPGVSACDDPSKHIGWDSVHLTEAAYRIVAEGLIKGPYCLPQINTLCLMNVSSGYFNS

SEQ ID NO: 203896 - protein, 72 aa, Glycine max
  Clone ID: PAT_MRT3847_26145C.1.pep
MHHYRPLPKSILLTGACKAVYAEHPLHKETQLTTKISHRIDLLNSSYTPIRTPPNLLTISLSTSTSNRPMRP

SEQ ID NO: 203897 - protein, 104 aa, Glycine max
  unsure (1)..(104): unsure at all Xaa locations
  Clone ID: PAT_MRT3847_26146C.1.pep
LPXSSTLTHLPTSNSQNLDYLPTHFTSPTQQQSIPFHNAFSPTFPATKQHIIPSNSSLFLCHVPLVAAFIVHRLYSRKHRSTHREPLPAPPVLLVTGETRVSRN

SEQ ID NO: 203898 - protein, 104 aa, Glycine max
  unsure (1)..(104): unsure at all Xaa locations
  Clone ID: PAT_MRT3847_26147C.1.pep
MTGSLPYSHIGSRDQIIFMVGRGYLSPDLSXIFSNCPKAMRRLLTDCLKFQREERPLFPQILATIELLQRSLPKIERSASEPSLHRTQADELPACLLSAARLVP

SEQ ID NO: 203899 - protein, 115 aa, Glycine max
  unsure (1)..(115): unsure at all Xaa locations
  Clone ID: PAT_MRT3847_26148C.1.pep
HQTCRRHNRLLITHRLVILGYHETLIPYLTRINSIASAKAYATRTNLFLKDDGTXKPIAIALSKPHTDGYNLKPESIVILATTKGVNRTIWISITAHIIANDYGYHQVMSHRLYT

SEQ ID NO: 203900 - protein, 39 aa, Glycine max
  Clone ID: PAT_MRT3847_26149C.1.pep
GEKGVFFYKILESVVRLVFLRIPSHCLDGYYIYWIRSYE

SEQ ID NO: 203901 - protein, 50 aa, Glycine max
  Clone ID: PAT_MRT3847_2614C.1.pep
MNTLWLVEGPLAGFGPLRFFNCGRGPPSLSFWGVFFWVIRRGEIVCVRAF

SEQ ID NO: 203902 - protein, 38 aa, Glycine max
  Clone ID: PAT_MRT3847_26150C.1.pep
EYQPDFLLQAPFVHCFFLSYFQSSKLPISLSLNKPESD

SEQ ID NO: 203903 - protein, 313 aa, Glycine max
  Clone ID: PAT_MRT3847_26151C.1.pep
MAQSFGQTEINWDKLDKTRFYVVGAGLFTGVSVALYPVSVVKTRLQVATKDAVERNVFSVAKGLLKTDGIPGLYRGFGTVITGAIPARIIFLSTLETTKVTAFRMLEPFRLSETSQAAIANGVAGMTSSLFASVFVPIDVVSQKLMVQGYSGHAQYSGGLDVVRQVLRTDGIRGLYRGFGLSVITYAPASAVWWASYGSSQRFIWRFLDHGAKYDEVAPSMQKIMLVQATGGIIAGATSSCITTPLDTIKTRLQVMGHENRSSIKQVAKDLINEDGWRGFYRGFGPRFFSMSAWGTSMILTYEYLKRVCSKDE

SEQ ID NO: 203904 - protein, 40 aa, Glycine max
  Clone ID: PAT_MRT3847_26152C.1.pep
FRVIRGLYRGFGLSVITYAPASAVWWASYGSSQRFIWRLI

SEQ ID NO: 203905 - protein, 74 aa, Glycine max
  unsure (1)..(74): unsure at all Xaa locations
  Clone ID: PAT_MRT3847_26153C.1.pep
MASKXILKELKDLQKXPPTSCSAGPVTQNMFPRPPTIMRPPDSPYAGAAPPRTTHVPLXYPCKTPKVAFKHHIF

SEQ ID NO: 203906 - protein, 106 aa, Glycine max
  unsure (1)..(106): unsure at all Xaa locations
  Clone ID: PAT_MRT3847_26154C.1.pep
MDGILETHGCRGLEPXTDGVPGKVAGLGQKASGAMLRTQASRGKPVIATVKTAGPGHLPHQDGKQPWAVSPGVTGGVSKDAVNGFKGQSGSDXLALRVSAVKAGLS

SEQ ID NO: 203907 - protein, 76 aa, Glycine max
  Clone ID: PAT_MRT3847_26155C.1.pep
ALVWGSIRPLSDLVGKVFGFSPESHVGKLPKDTPPGFFRPNGKDASKKLIDLGLEFPPVGPILKDPVESFKSRGYV

SEQ ID NO: 203908 - protein, 37 aa, Glycine max
  Clone ID: PAT_MRT3847_26156C.1.pep
FRKFSCVSAHIPANFHPICEHLPLSKTLKTPRVTLSI

SEQ ID NO: 203909 - protein, 88 aa, Glycine max
  Clone ID: PAT_MRT3847_26157C.1.pep
GGPLSGKNTPPWNQEWEGKNPPFFYPKFTPTFWEKKKPGTSKARKSFLFFKKEFPLYPPNIPKNNFPKGETLLKETPKGVGGPFFKTK

SEQ ID NO: 203910 - protein, 304 aa, Glycine max
  unsure (1)..(304): unsure at all Xaa locations
  Clone ID: PAT_MRT3847_26158C.1.pep
IIITTRHREVAESCRTSSLVQVHELQPLTDDKSFEAFCKTAFGSELDGHCPNNLKGISTEIVKKCEGLPLAIVATGGLLSCKSRDAREWQRFSENLSSELGKHPKLTPVTKILGLSYYDLPYHLKPCFLYFGILPEYYEVGCGRLILQWVAEGFVKSDEAAQTLEEVAEKYLNELIQRSLVQVSSFTKCGKIKRCRVHDVVREMIREKNQDLSFCHSASERGNLSKSGMIRRLTIASGSNNLXGEVXESSNIRSLHVFSDDELSESLVKSMPTKYRLLRVLQFEPXSICMNMFRALKVWGTYHF

SEQ ID NO: 203911 - protein, 63 aa, Glycine max
  Clone ID: PAT_MRT3847_26159C.1.pep
PKVMGLMKPRGAKFIRSSTLRFGSFDSIEPRSVDQLSAVDFRLYGVGGPVNEDALNDSSVSVH

SEQ ID NO: 203912 - protein, 76 aa, Glycine max
  Clone ID: PAT_MRT3847_2615C.1.pep
IRTSSTMEKWPDIIFYPLRAMLCHYFLHQNAVIRYCSCRHGSSTFYQFLHSTQLANAIHCDLKINNSGFEAKKRQG

SEQ ID NO: 203913 - protein, 104 aa, Glycine max
  Clone ID: PAT_MRT3847_26160C.1.pep
GSGSSAFGHSRSVHMDDSLDITPSQAESNSQSTKKRVRGPTCLKKLRLKRVRDHMIPGEFDQSTGNAKGPNRREFNNYEAFLARSKLSILHEDLGSCRGRARRI

SEQ ID NO: 203914 - protein, 59 aa, Glycine max
  unsure (1)..(59): unsure at all Xaa locations
  Clone ID: PAT_MRT3847_26161C.1.pep
ENIGMLILGRVLLGFGGGCTNQAAPXXLSETAPPQRRGACSTGSQLVLGGGALPGGGIN

SEQ ID NO: 203915 - protein, 83 aa, Glycine max
  Clone ID: PAT_MRT3847_26162C.1.pep
MAKAFLTSVPLFLLLAVSSSVVAEELETLPPSYPHPHSSTQAPFHPPVSASYPHHHHHHHPSSQAPAPVHTPISSTYHNYPFY

SEQ ID NO: 203916 - protein, 67 aa, Glycine max
  Clone ID: PAT_MRT3847_26163C.1.pep
PSMCKHKHFEWAPALKLLLQPTRTRSRGLTHVPTVGLTSSYTPTTLLEFVMLKTEGFLRYFLEGWLT

SEQ ID NO: 203917 - protein, 128 aa, Glycine max
  Clone ID: PAT_MRT3847_26164C.1.pep
TKRNSIQKSSLLSPATQTTTVDHGPSCSFHAIVSVSTLKQQSYLTTLVPSTVLIAWNAVVTITIILIMVERTVSAGSTIKVVSKKSLCGFFTMTTLLFMLSWLSVLRSTRSEASPNSNLFSSLQQLRF

SEQ ID NO: 203918 - protein, 53 aa, Glycine max
  Clone ID: PAT_MRT3847_26165C.1.pep
NNQIHFTKRKRASFQFSSRFCPVVLPLIGLNVVYSKNWLHLKNWKLARFLLVK

SEQ ID NO: 203919 - protein, 63 aa, Glycine max
  Clone ID: PAT_MRT3847_26166C.1.pep
RDRYAVGAKYWADPFNSISRRYQPCPLLSLLYNSRVRLWTHTGGLGGGRCRPTVTGPWTVRSR

SEQ ID NO: 203920 - protein, 43 aa, Glycine max
  Clone ID: PAT_MRT3847_26167C.1.pep
IGNTLLYISSLTKWVYPYKCDIFGAGSQSAGYVTAREDQENLH

SEQ ID NO: 203921 - protein, 191 aa, Glycine max
  unsure (1)..(191): unsure at all Xaa locations
  Clone ID: PAT_MRT3847_26168C.1.pep
MALHFKTCIFSFKPHQIMTTKAQLSQSFNPAKLDSLHIANKWNIVQEERSSALFTKTGDLISINHSDKLEVVKNEFMNTVGENSLRGLYMIDAMQRLNIDYHFQEEIEEFLRRQYVNSTTIAGGYYGDDIHEIALRFRLLRQQGFFVPEEVFHKFTNKEGKFNQXLGENIKGMVELYEASPLGIAXEDTLA

SEQ ID NO: 203922 - protein, 57 aa, Glycine max
  Clone ID: PAT_MRT3847_26169C.1.pep
WETGSINRDITRLERVLIRTCRLHQPRMLVQATGTLCAYKHRQITEKVIIILTISTN

SEQ ID NO: 203923 - protein, 74 aa, Glycine max
  Clone ID: PAT_MRT3847_2616C.1.pep
VLSHRHSLGTARGASRCEGTVSRHQARHRVAQLSSRIASLGRFHNERLQLSLVVQGFGPHIRGVLYVSALKLRA

SEQ ID NO: 203924 - protein, 90 aa, Glycine max
  Clone ID: PAT_MRT3847_26170C.1.pep
MGESSGSQCSKTSPSNIDEDDEGESEANEDQSKQNNNGGSSSNSTVEENEKKIRPYVRSKMPRLRWTPDLHLRFIHAVQRLGGQERATPK

SEQ ID NO: 203925 - protein, 137 aa, Glycine max
  Clone ID: PAT_MRT3847_26171C.1.pep
DAEAYPEASKSVLQILWDVVTYGQGRQWGKARISALEALAQYEVPQLENSIPDFKKMNLELFFSETNPKVLKAMEEFHVKLITYEHINRRRVVKEKRVTGSKIEKLMDVFPQVIFSSGVINKARRVPGGFLYVFLPS

SEQ ID NO: 203926 - protein, 101 aa, Glycine max
  Clone ID: PAT_MRT3847_26172C.1.pep
PYIFSCCLNSITGMVSGWCSRCVRSLVKREQGIFILERMFCHYLNSVTSMVSGWYSRCVRSLVKREQGIFILERLLFRPREKKPKNKVLSDSETVQVLYLL

SEQ ID NO: 203927 - protein, 491 aa, Glycine max
  Clone ID: PAT_MRT3847_26173C.1.pep
RFRHIYRGQPKRHLLTSGWSLFVNAKKLVAGDSCIFVRGESGELRVGIRRAAENLSNISQSSSLISGHSMQLGILTNASNAVGNRTMFLVYYRPWTNPFEFIVHLQTYLKSTLQDYPIGTRVQMQHEVEESLRRLAGTIIGNEDIDSIRWPGSAWRRLKVQWDAIVEDKMHPERVCPWWIEPLESAKEKKQVPALPTKKKGHALLNQRSLPGISGFGKNDVHQNSAGPSSQTRRADGDLQGQDYSGLSPPQPLQRAPSTDIIRPSKVPIRGSRFGKENRNQHPFLKQDPLHKSLGRSMSLTHEDLSITSSNLTSIGSESLGMPSTESRGENDAPFGQPGSSSTFKLFGVNLIDSSPEIPSVNFVDLNKTSSLPSSPPMGVAPGKTCKKCRCVNNRSCTKVLKLGNALGRAVDLARFNGYTELIAELDSMFDFQGTLISGGSGWHVTCLDDEGDMMQLGDYPWQDFLGVVQKMIICPKEGTDNLKPGSSANP

SEQ ID NO: 203928 - protein, 97 aa, Glycine max
  Clone ID: PAT_MRT3847_26174C.1.pep
MAMPSGNAVMPEKLQFPGGGGGSEIHYRQQWFVDERDGFIGWLRSEFAAANAIIDSLCHHLRCVGEPGEYDMVVGAIQQRRCNWTQVLLMQQSFSVS

SEQ ID NO: 203929 - protein, 273 aa, Glycine max
  Clone ID: PAT_MRT3847_26175C.1.pep
FMGTISSVQVADPILWPDSPWRLLQVVWDEPDLLQNVKCVNPWLVELVSNMPTFNLSAYSPPRMKQRFLQDPYFQVINQLPMPSFSSNLLNYTNSLCTIQDSNSSGGIQGARHAQFGLSPSDFPFNKLPADMLLGGFSRLDHAAAQPIRPPCGTYKNNTTTKANVGISCLLTVGNPGQNFKESNETKAPHILLFGKLIQTEQKSSNTSSANTNGNSVSEGNSHKTSNASDGLGFGLHQGSPIENNSDGGFPWYKDQHKSDLGTDNVNTLCIAL

SEQ ID NO: 203930 - protein, 72 aa, Glycine max
  unsure (1)..(72): unsure at all Xaa locations
  Clone ID: PAT_MRT3847_26176C.1.pep
ESHMPSSRIMLCKLASPCQLLVNASHDLPPVLCQSSVWSCGIPGSVGEYTTSDRSRLFMPLSISSLEPNSXL

SEQ ID NO: 203931 - protein, 62 aa, Glycine max
  Clone ID: PAT_MRT3847_26177C.1.pep
TRAGKKKTGRGEKILFRNGVKHQEQSPLIRFCTKWTGKEVKQPPRKNFPSREAAKENPLKGR

SEQ ID NO: 203932 - protein, 70 aa, Glycine max
  unsure (1)..(70): unsure at all Xaa locations
  Clone ID: PAT_MRT3847_26178C.1.pep
MSMCLNTRRTLFATEYCPSFYRDLKLFVRNLPFSVDRSRLAXLFESAMNVYVVEVIYYKTTVMSTSAWFF

SEQ ID NO: 203933 - protein, 45 aa, Glycine max
  Clone ID: PAT_MRT3847_26179C.1.pep
KNQEKDSYPTCMVQKIVIYKNRIFVDACIGQHCLRVIHHIDFNYR

SEQ ID NO: 203934 - protein, 49 aa, Glycine max
  Clone ID: PAT_MRT3847_2617C.1.pep
IALFTITAPIITWPTCTNHTAVATHSTLLLVSPAKAECENVSYYNNDSN

SEQ ID NO: 203935 - protein, 116 aa, Glycine max
  Clone ID: PAT_MRT3847_26180C.1.pep
MSDDMLIHFSSNSSNQSDQSLPTKIAKLEARMVGKGSSTTAQQSGWSSVSVPSAGKLGGAAENLAEPSTSSDSDDDNGGEFLIQANTQKRQKFQEDGSASVFERVEVVTDAGQMSL

SEQ ID NO: 203936 - protein, 66 aa, Glycine max
  Clone ID: PAT_MRT3847_26181C.1.pep
ESLIEQNSSRNKYLEHKLLRCIVLVTDCLQIEECMIVYMNLFLVILIRVIMFMVIEMNKNPSIPNH

SEQ ID NO: 203937 - protein, 109 aa, Glycine max
  Clone ID: PAT_MRT3847_26182C.1.pep
CIFFFFFCHISYLISNLTIELTNQKERRFLETLKQSLSRLSLVLHNWASRTYLSHKNSKSSCNRGRNSCKKGFILQSCKLFLSTATVTKIILTNCSLLSFIKICWNHWL

SEQ ID NO: 203938 - protein, 73 aa, Glycine max
  Clone ID: PAT_MRT3847_26183C.1.pep
LHYWISLRITASQIWVRPPYLVQIEGLIHPKGILHPEEPLFYRLISIPPSGKEARQLIFSPQGVVKTRETAPA

SEQ ID NO: 203939 - protein, 45 aa, Glycine max
  Clone ID: PAT_MRT3847_26184C.1.pep
YGCDRRQKGVLVCDCPLLRLFHLASVFCVHVCSITQLKTTCCCRN

SEQ ID NO: 203940 - protein, 109 aa, Glycine max
  Clone ID: PAT_MRT3847_26185C.1.pep
SSFITMSLTRFSAVTLRKGACLRTLHSTLSVSKDLVQDLYMKEIRAYKAPAVAADAHESVVRKFSEPSKPSMPSLVSELQATLPAYIAHEPSYVTPTAKSVEGSDTEGQ

SEQ ID NO: 203941 - protein, 100 aa, Glycine max
  unsure (1)..(100): unsure at all Xaa locations
  Clone ID: PAT_MRT3847_26186C.1.pep
PTPVPYGLAXKNVQKGGMLKRKERILQIFCSMPEHCSALLSRKMSQCCEREDLTSVSVAEPVCSTTHPCCGEHRNGRPRSAHVSLSCGPRTACVLGLTST

SEQ ID NO: 203942 - protein, 86 aa, Glycine max
  Clone ID: PAT_MRT3847_26187C.1.pep
GVLHVCDVPLGLDDSRGSDVSGNNESSFNMVMGYKMVEVGSWVSNIWGFSPKVVGLASLGANKWPGGPKEGNGDPMLGFCESNPAV

SEQ ID NO: 203943 - protein, 46 aa, Glycine max
  Clone ID: PAT_MRT3847_26188C.1.pep
LHNNSQTRTHLRNSVLSMVHQSTVTRNLISAPKQNYPLLPHIIDVI

SEQ ID NO: 203944 - protein, 76 aa, Glycine max
  Clone ID: PAT_MRT3847_26189C.1.pep
RKLEQLCWRIPGGSAVREDFQQQELSPVAKRTSLKSAVNSYANLWTGPIKQYMNLVSRLWVDDVEDEVEVLYASKA

SEQ ID NO: 203945 - protein, 210 aa, Glycine max
  unsure (1)..(210): unsure at all Xaa locations
  Clone ID: PAT_MRT3847_2618C.1.pep
TSFFDSAIIFIQSVGVEREGSASDPMAGVSLYKPKSYXNSLSYALQDGKIRLEIDFPRPLPSNISSYKGSSDEFIDANVQLALAVVQKLKKETRTRSLQKEIHTYFHVLPDKPEGRASXLFKAALHSIDGITIGSLDDXPAGPVTSFFRSVRNTLDFDFEDDNEGRWQSTEPPSLYIFINCSTRELAYIEKYVCRFRPSGLPSQRFAVPL

SEQ ID NO: 203946 - protein, 77 aa, Glycine max
  unsure (1)..(77): unsure at all Xaa locations
  Clone ID: PAT_MRT3847_26190C.1.pep
RPGGLSWSPRAGSPSCLAVPVGRCGSXSAAGLWPXSRCARASSASSPLLPPCLFVLPRAGSWGVRVPGPGPRACRLS

SEQ ID NO: 203947 - protein, 84 aa, Glycine max
  unsure (1)..(84): unsure at all Xaa locations
  Clone ID: PAT_MRT3847_26191C.1.pep
RMMIAPDSKDNIDLLLSIDLXGLQRACNAFPLKMVFDXDKLALPNTHXLIDGNFPVDSWLPSIVNMVYPGSHLLXEAVFVHATC

SEQ ID NO: 203948 - protein, 116 aa, Glycine max
  unsure (1)..(116): unsure at all Xaa locations
  Clone ID: PAT_MRT3847_26192C.1.pep
GALMTXMLKMLRSVPHTGEYGREYESRSKRDTIMGLMRLLNGVIAIIGVAMRGLPAPIGPKKVKKVVQLGEWDGFQAQSNMNLEIQGKKNASLESNTPARSPSPPAQKKRSVKNMP

SEQ ID NO: 203949 - protein, 74 aa, Glycine max
  Clone ID: PAT_MRT3847_26193C.1.pep
ILTNIKQGSLPDRKVFSLISNHHKCRERKRIVKEVKSCFSSLPRNQSAPERSLTLEKECIVYRLSGRIIYFKIL

SEQ ID NO: 203950 - protein, 153 aa, Glycine max
  unsure (1)..(153): unsure at all Xaa locations
  Clone ID: PAT_MRT3847_26194C.1.pep
FVFCACTTSYLPLSIADFVLDNEGSAVEKGGTYYILSHITIYGGVRAAPTXNERCPSSVVYPRNELHQGIATVISYSHPIGFIAEGHALSLKFDVFALIMLCGGMSTESSAAEDLSEGPADKIAENNDVLEGXLRLDRVSDDERHYYSLVSCA

SEQ ID NO: 203951 - protein, 111 aa, Glycine max
  Clone ID: PAT_MRT3847_26195C.1.pep
HDPPVPKDPDVFTPPRFPAGSNPSSFLPFGMGGRTSLGKTLVKPLMLVFFPRFFPHSKWKGVGFAPSIQKRALFSKLKRGFPVRLIFKKGAKNKPLCQDKDFPFPPIGMRA

SEQ ID NO: 203952 - protein, 94 aa, Glycine max
  Clone ID: PAT_MRT3847_26196C.1.pep
SSYVMVQLQVVGHQKLISMIFFRMYYRVPNQSYSLLARVLDPILKYLDRKSREFIFTMFESQDMRRALIQIYLVGGWMLLSFSINFSHIDSEKN

SEQ ID NO: 203953 - protein, 137 aa, Glycine max
  unsure (1)..(137): unsure at all Xaa locations
  Clone ID: PAT_MRT3847_26197C.1.pep
GCLCCVLAKTRILHKRTLEKIRTAIPTIFINGETVXGYNIRFTGWDGRGHDKILSLRRLYLQNTQGLISAVDLSHRKRDXDSYDKLYRTLNDDELIDADMVVIAIKQDLPNAPNAAHITDNLGLHSLRQRHWYIQST

SEQ ID NO: 203954 - protein, 44 aa, Glycine max
  Clone ID: PAT_MRT3847_26198C.1.pep
TPRKSRESMAFISQIAPRTNGGNDTFPWQGSYQQYPILGSLEGL

SEQ ID NO: 203955 - protein, 99 aa, Glycine max
  Clone ID: PAT_MRT3847_26199C.1.pep
TSSSTSIDLRSVSSDNPTEPTPFPPSFSPSTLSASTTPTSSTFSATSVSSSIGVSSATASHCSSEFGVLIALLLDLPGVFFFTDFALLALPNDFCSRGD

SEQ ID NO: 203956 - protein, 64 aa, Glycine max
  Clone ID: PAT_MRT3847_2619C.1.pep
PTRTDDLIITIPNDSIVKPQVQYIIHITSISLSSISYLSSSDCTTMTISLKTATYLELNTLTTP

SEQ ID NO: 203957 - protein, 44 aa, Glycine max
  Clone ID: PAT_MRT3847_261C.1.pep
LEEFHHASARRFFGFLLKSMGLGANQTNLQIETFKRIGKDLKLN

SEQ ID NO: 203958 - protein, 200 aa, Glycine max
  unsure (1)..(200): unsure at all Xaa locations
  Clone ID: PAT_MRT3847_26200C.1.pep
EKFDVFKELETGNFTFIRSIMRTRNADSASKSATPKKTPPKKSPAAKRTTATKTRATKKNELSPAPDSNPDQSPRFQVSFIHDDVVIVEQKSLGSASSAKSVKKKTPGRSRSKAINTPNSEEQCEAVADETPIEDDTEVAEKVEDVGVVDADNVEGEKEGGKGVGSVGLSDETDRKSMEVDELVXKVCESVGKENDVMES

SEQ ID NO: 203959 - protein, 407 aa, Glycine max
  Clone ID: PAT_MRT3847_26201C.1.pep
FMAREILILRHLDHPNVVKLEGLVTSRMSCSLYLVFEYMDHDLAGLATSPTIKFTESQVKCYMHQLLSGLEHCHNRHVLHRDIKGSNLLIDSEGILRIADFGLASFFDPNHKHPMTSRVVTLWYRPPELLLGATDYGVGVDLWSAGCILAELLAGKPIMPGRTEVEQLHKIFKLCGSPSDEYWKKLKLPHATIFKPRISYKRCIAETFKNFPASSLPLIEILLAIDPAERQTATDALHSEFFTSKPYACEPSSLPKYPPSKEMDTKLRDEEARRLRAAGKANAAGVKKSRPRDRGGRGISVPDSNAELQANIDRWRLVTHANAKSKSEKFPPPHEDGTLGYPLGSSHHMDPIFDPPDVPFSSTNLSYPKANFQTWSGPLVEPSVDAPRRKKNMAGNGHRQSKKDSYR

SEQ ID NO: 203960 - protein, 76 aa, Glycine max
  Clone ID: PAT_MRT3847_26202C.1.pep
YSKILVLHELIDYQSYDSRQFTNTIDISYDKRILSSNSNTKCEAFLLDISPSPPMEENMKCEQVRLICESMMNIDL

SEQ ID NO: 203961 - protein, 85 aa, Glycine max
  Clone ID: PAT_MRT3847_26203C.1.pep
HPTQRFVDARVVYVHLADYHGRCLYFFPVNVRGRGFFCLYPFLGWYFFIKRLSFFFSSILDHNPFFGPFIKNLFLLGHIFSFGGM

SEQ ID NO: 203962 - protein, 91 aa, Glycine max
  Clone ID: PAT_MRT3847_26204C.1.pep
MGFRLSGIRKTSFSANKFASSKVMDVPKGNLAVYVGDKMRRFVIPVSYLNQPLFQDLLSQAEEDFGYHHPMGGLTIPCSEDVFQHITSCLN

SEQ ID NO: 203963 - protein, 47 aa, Glycine max
  Clone ID: PAT_MRT3847_26205C.1.pep
RCVCYLRLGMSDNLLIISVWYSSGTEIFFIQPWFLYSRYKDSKGVFL

SEQ ID NO: 203964 - protein, 42 aa, Glycine max
  Clone ID: PAT_MRT3847_26206C.1.pep
THDHDRDLIKRVSYYFCVFNSASLSILLTRQSIPKILPHFSK

SEQ ID NO: 203965 - protein, 44 aa, Glycine max
  Clone ID: PAT_MRT3847_26207C.1.pep
KAGIPYPFYIMPRFWGPNSFPIGYPTRPFFFPPYFKNRGISFLG

SEQ ID NO: 203966 - protein, 93 aa, Glycine max
  Clone ID: PAT_MRT3847_26208C.1.pep
HQEAPVVIVGNNKATMGGFFLHKIFSDDFFNNYNVLFSPQPDEDQCWGIGVIIIHHDEATRFLVFYNNPLLVLFFQLLNKSPLNKKHGLFSRR

SEQ ID NO: 203967 - protein, 90 aa, Glycine max
  Clone ID: PAT_MRT3847_26209C.1.pep
GVWPRTKESNSEGNPAARNRFGKGSSKKVHKLSDFEGQLRLPFHFSGRTENQQRLMLPGGRFGLNILTLQKLGFIRVIFFNQPLPLKKTC

SEQ ID NO: 203968 - protein, 50 aa, Glycine max
  Clone ID: PAT_MRT3847_2620C.1.pep
KLFFQQRLTFNHTNSRDSHAVSYSSMVNSCTNNSVLLKRNQSTICTSSSG

SEQ ID NO: 203969 - protein, 180 aa, Glycine max
  Clone ID: PAT_MRT3847_26210C.1.pep
VKGITEYVSYAAIENLVLGQASRHGFIRFKSSTPSNILKGAPDFCTVYVISKGRISSVRSAARTAPHASPLLRHIQILHDENARESEISSKYNRASIKPSSWQSESMKQSQLGRRINLSGRSCMDFPESDSDISFVSSEKPNSVRSSSVFYDYFDLHARNPRTSTSLNHSLGSTRMRPKF

SEQ ID NO: 203970 - protein, 75 aa, Glycine max
  Clone ID: PAT_MRT3847_26211C.1.pep
IDDVCEACGAVGPQDTSSPLHGSCQAKAKCSGDEACVIGTKFQNLYFDGRESADVLLQENDGDKVVDVLVADMVL

SEQ ID NO: 203971 - protein, 52 aa, Glycine max
  Clone ID: PAT_MRT3847_26212C.1.pep
LHGNLLAPMRSSLRERYIKQISLISRLHSYAWHNESATLPKALLGANAGGPY

SEQ ID NO: 203972 - protein, 204 aa, Glycine max
  Clone ID: PAT_MRT3847_26213C.1.pep
HASGGRGGRGQGRDRGGCGRGRDSGGCGRGFGHRSGSRDYFNGDDNDGSSFPSSNWGSGSRDSPDDSFGAGKSWEVRGSGEGNGGRQGRGRGRGRGSRGSQGDGQGRVPWGGNSHERGGYSDGNSDSGWGQGQDQGRGSDGNGQGRGRWGGNNSNEERNKDEESRGNGSWGFGNAGSGNENSGWGKNATPSDGSGWGGTGGSSW

SEQ ID NO: 203973 - protein, 78 aa, Glycine max
  Clone ID: PAT_MRT3847_26214C.1.pep
ILGSQISSIFVLIIIDQFYCKEVKHFFHIEKQIITIRYTHLRKLIAEDFFFFSLFFFIFLSHFVLPHPIIQWTTYIAC

SEQ ID NO: 203974 - protein, 41 aa, Glycine max
  Clone ID: PAT_MRT3847_26215C.1.pep
IFVTSTFLTVQTTFLSSFPSSANSIFRILFLTSFSKQSFLL

SEQ ID NO: 203975 - protein, 44 aa, Glycine max
  Clone ID: PAT_MRT3847_26216C.1.pep
VRKLGIRLEHWVSCLVSHSVTECDTGFPAWCFCYNFMMVGMLYC

SEQ ID NO: 203976 - protein, 216 aa, Glycine max
  Clone ID: PAT_MRT3847_26217C.1.pep
MSKLQSDALREAISQVVSNSKEKNRKFTETIELQIGLKNYDPQKDKRFSGSVKLPHIPRPKMKICMLGDAQHVEEAEKIGLDYMDVEALKKLNKNKKLVKKLAKKYHVFLASEAVIKQIPRLLGPGLNKAGKFPTLVTHQESLESKVNETKAMVKFQLKKVLCMGVAVGNCTMEEKQIFQNVQLSVNFLVSLLKKNWQNVRCLYLKSTMGSAIRVF

SEQ ID NO: 203977 - protein, 82 aa, Glycine max
  Clone ID: PAT_MRT3847_26218C.1.pep
QQLLALEERMGTVSTALTEETLSECLKKSVYQSSPSDNEAESCNEPKDDTKCSICQVSLSRFEPFKALRLSLSTIMALTYFP

SEQ ID NO: 203978 - protein, 114 aa, Glycine max
  unsure (1)..(114): unsure at all Xaa locations
  Clone ID: PAT_MRT3847_26219C.1.pep
KQLVPPFGMFDLGPGALXDSPAQSGVFLGMWARTSLSEKLVEALFVAVKSFSVGAFEMALGPIRGPRGAFAKIVGVFLGRGPMFGGDFRVFLSGFVEIPVENGGPPSTPSPVVV

SEQ ID NO: 203979 - protein, 79 aa, Glycine max
  unsure (1)..(79): unsure at all Xaa locations
  Clone ID: PAT_MRT3847_2621C.1.pep
XGPVEGGSEQIIFXKNXAXIXLLVXXXYCXTXXIXXXAXNXGEXXRGDRIENXHVFEMRXPPDXKXXLSAXSXXKXRVG

SEQ ID NO: 203980 - protein, 52 aa, Glycine max
  Clone ID: PAT_MRT3847_26220C.1.pep
VQKPRMCFTVKAASESMLRGSETEESIGSSTQEYMTLLERTPFISPNQLPTR

SEQ ID NO: 203981 - protein, 481 aa, Glycine max
  Clone ID: PAT_MRT3847_26221C.1.pep
MASSSLIRLRRTIRALSGVSQSFSATHAASFSSPIRCGVSWSLQSPKGVVQPRSFRSSSISLLSFRSSQRQSNIPDEIGPDTILFEGCDYNHWLIVMEFKDKDNKPSPEDMVRVYEETCAKGLNISLEEAKKKMYACSTTTYIGFQAVMTEEESKKFEGLPGVVFVLPDSYIDPVNKQYGGDQYINGTIIPRPPPVQYGRNQGRRDWNKSPGQYNRHENPMPRPQGNPSFNSQGPMPGGGRNYGPSQNYPPQQNYGQATQNYPPQQNYAQASQNYPPQQNYGQASQNYPPQQNYGQASQNYPPQQNYGMTSQNYPPQQNFGQASQNYPPQQKYGQAPQNYPPQQNFDQAPQNYPQQQRYGPSSPQYAQQQSFGPPGQGERRNYMPQQNIGRPGQGERRDPVPRHGASEARGDTFTPSYVQDFKSAYKEEFEQAELGNHPAKEQTGSQQRYPPSGPGFYWRGKILIVIWDMWAACIKVLITF

SEQ ID NO: 203982 - protein, 125 aa, Glycine max
  Clone ID: PAT_MRT3847_26222C.1.pep
MASSSLIRLRRTIRTLSGISHSLSATHAASFSSPIGCGVSWSLQSPKKGVVQSRSFRSSSISLLSFRSSQRQNNIPDEIGPDTILFEGCDYNHWLIVMEFKDNNKPSPEDMVRVYEETCAKGLNI

SEQ ID NO: 203983 - protein, 437 aa, Glycine max
  Clone ID: PAT_MRT3847_26223C.1.pep
MSVTAGVSDTVIAIRDKLRGKIGQTKVKRYWPGKVPEWADDENEEDAAPADIRPSREAALEKAFPRHEEDAAIVRKDDRRLRRLAESRIDNREEVRADHRRIRQAEIVSTIEEEARRQEWLEFEEEDENALAERRRLIKEKLLQREQEEALPQEEEEEEEEEEEEEESEYETDSDEEYTGVAMVKPVFVPKSERDTIAERERLEAEELAFEEKRKRRLEERRIETKQIVVEEIRKDEEIQKNLEMEANIADVDTDDEVNEADEYEAWKVREIGRIKRDREDREAMLKEKEEIEKVRNMTEEERREWERRNPKPAPPPKQKWRFMQKYYHKGAFFQNESDDRAATVGSDGIFARDFSAPTGEDKMDKTILPKVMQVKHFGRSGRTKWTHLVNEDTTDWNNPWTYNDPLRAKYNDKMAAMNAPIVKPKGSRKLKDWESR

SEQ ID NO: 203984 - protein, 104 aa, Glycine max
  Clone ID: PAT_MRT3847_26224C.1.pep
GLVYSGRPSYSWPSRTCSNFLVGPALDLSLEGSPKAGCPPLLTGEWIGCLSTHGWGPLGGFAPRDPVFGPFAPGNLLPPPRFQAPYLRFVPGGKPVFYFANFRG

SEQ ID NO: 203985 - protein, 146 aa, Glycine max
  Clone ID: PAT_MRT3847_26225C.1.pep
SLLLGTLLTDEISDFKSHEYLRLAGATQMALDVLRLGFLIDFLSHASIVGFMDRAAITIALQQLKGFLGIKTFTKKTDIVSVMRSVFNAAHHGWNCKTIVIAVAFLAFLLITKYIAKKITKLFGCAAISPMISAIMSTFCVGTLCM

SEQ ID NO: 203986 - protein, 54 aa, Glycine max
  Clone ID: PAT_MRT3847_26226C.1.pep
PSPFSVRPLPLIQPRDDGKGSLALITLQEEFSGFMFVLKQNENTWFKYNVNDFY

SEQ ID NO: 203987 - protein, 65 aa, Glycine max
  Clone ID: PAT_MRT3847_26227C.1.pep
GSSSFEPNEMVTELVESIGVTYDAWSISWAVASSIWSETGSIIGQSLLRRYALLVNSSIKSRIVT

SEQ ID NO: 203988 - protein, 101 aa, Glycine max
  unsure (1)..(101): unsure at all Xaa locations
  Clone ID: PAT_MRT3847_26228C.1.pep
XXGLKRHIVGENSNRMLEXSAXMLXEXRSSNXKFSCKRNXTXXSXLXHXGTAXXXXCFXIXXKSEXXXLTEXDXALXXXXXXXLAXLXIXXPNXXXTYXXX

SEQ ID NO: 203989 - protein, 55 aa, Glycine max
  unsure (1)..(55): unsure at all Xaa locations
  Clone ID: PAT_MRT3847_26229C.1.pep
KCLACGGNCGCGSACTCGYGCXGCKMYPDLRYTESSTTETLVMGPAPVIAQCKSA

SEQ ID NO: 203990 - protein, 101 aa, Glycine max
  Clone ID: PAT_MRT3847_2622C.1.pep
MLVYQDLLTGDELLSDSFRYNEIENGMLWEADGKWVVKGAVDVDIGAYPSADGGEHDGVDDSAVNDADIADTCRLHDQPAFDNKQHVTFMKRFIKNLTPKL

SEQ ID NO: 203991 - protein, 95 aa, Glycine max
  Clone ID: PAT_MRT3847_26230C.1.pep
GKEKDNGTDSVLSSQSISSSGSEPLHSDSAETWNSPNMQQDARASKVHNRFKAPCYQNGSGSYHNHNGLQSSVYHSSSGERLEERDCSGQQLNHN

SEQ ID NO: 203992 - protein, 109 aa, Glycine max
  unsure (1)..(109): unsure at all Xaa locations
  Clone ID: PAT_MRT3847_26231C.1.pep
PFKLHPTLNGLTSHEAIQYTRLFLLDHHYPSMLXVRLVVATSINAYAMRTIRFLKHVGTLMTPAIDLTMPYPHGDQSGAFSHIILPADECVARSNSVISXAYVGVNDSC

SEQ ID NO: 203993 - protein, 76 aa, Glycine max
  Clone ID: PAT_MRT3847_26232C.1.pep
FFLLIDLFLFFAYFFVEWTRSFLIDNFRTLNLGQICLLFLKSKAYPKGLFPYKTDRQNQKIICVGVGFKIRTFLLL

SEQ ID NO: 203994 - protein, 63 aa, Glycine max
  Clone ID: PAT_MRT3847_26233C.1.pep
FPYRPTHTTTPSPTRHSQFTNSNSYTAFLNLYYSHTSIHILSLPSLKHPQYINNPFCSLPISI

SEQ ID NO: 203995 - protein, 80 aa, Glycine max
  unsure (1)..(80): unsure at all Xaa locations
  Clone ID: PAT_MRT3847_26234C.1.pep
PRSPWTGPQHDTSKHTPAQPPXXXXDSKXPPKPXPGSXGXXXXGPXXDRXDXXXNQGRDKXXAERXKKXNXTXXRTNXPP

SEQ ID NO: 203996 - protein, 48 aa, Glycine max
  Clone ID: PAT_MRT3847_26235C.1.pep
DESDKGIFSQLAQGVSGVAHGSPTVTIRGFTTNTLGKTFGTKVSSKTM

SEQ ID NO: 203997 - protein, 95 aa, Glycine max
  Clone ID: PAT_MRT3847_26236C.1.pep
QTPSQTILFLPPLELQTAMHPPLRRIRICHLCVTHLGMYLMMIQQLLEGQFIAPYLVASCQGNNECYFCVCLNHAFPLFNIWTIHKIKHCWFIKQ

SEQ ID NO: 203998 - protein, 88 aa, Glycine max
  Clone ID: PAT_MRT3847_26237C.1.pep
IFTFARMVVGPCITYVTLSANYPLLIKAMGLGLQLVSAFWFFKIVRMMKHKLTKRTTSKNGGLLTQNCNRVSNHQEGERHKNKDTSIS

SEQ ID NO: 203999 - protein, 39 aa, Glycine max
  Clone ID: PAT_MRT3847_26238C.1.pep
SCDKLIFINSCINGLNTLNLLRIEPNPYSDHTRLKCHDS

SEQ ID NO: 204000 - protein, 48 aa, Glycine max
  unsure (1)..(48): unsure at all Xaa locations
  Clone ID: PAT_MRT3847_26239C.1.pep
MDGKGEGPAIXIELGTTYSCVGERXQDRREIIDNDQLNXTTPAYERFT

SEQ ID NO: 204001 - protein, 129 aa, Glycine max
  unsure (1)..(129): unsure at all Xaa locations
  Clone ID: PAT_MRT3847_2623C.1.pep
GVAPHQFHRTTILLFGAIREKLCRHVAYYHDLLTRDELHSESFRYKESENGMLWEVEGKWVVKRAVDVDIGANPSAEGXGQDDGLDDAAMNVVDIXVDTLRLHEHIAFGKNHFVTFSNMFIKNLTPKLY

SEQ ID NO: 204002 - protein, 31 aa, Glycine max
  Clone ID: PAT_MRT3847_26240C.1.pep
DRARFRQQLLSSCDHQVNHQVCNQVELFTAA

SEQ ID NO: 204003 - protein, 69 aa, Glycine max
  Clone ID: PAT_MRT3847_26241C.1.pep
VSISCGKQTSAFLNPKSLSRKEVLQPNEVDLKVWSYKAWEIKQHKPGTCWTAGSRLNTHGAPKYRNIIV

SEQ ID NO: 204004 - protein, 34 aa, Glycine max
  Clone ID: PAT_MRT3847_26242C.1.pep
QTTHIFSIYIQTIWPTYGLRCGIGMTHEIPILLS

SEQ ID NO: 204005 - protein, 90 aa, Glycine max
  unsure (1)..(90): unsure at all Xaa locations
  Clone ID: PAT_MRT3847_26243C.1.pep
KEWDTSYVGFIVDGAKWLVDNTDIKLVXVGIDYLSVASYDYLIPSHLVFLKDREIILVEGLMLDDVPAIVVNSGRSGRYSGGAERSVPHP

SEQ ID NO: 204006 - protein, 84 aa, Glycine max
  unsure (1)..(84): unsure at all Xaa locations
  Clone ID: PAT_MRT3847_26244C.1.pep
SXXXXPLXESGXQKDXXLXVEDXXIMSXVXQNVXQXQEKXLXXGXXSXDXKXRXRLEXVSXRKAXXVSXKTXKXDIMGAGFHSS

SEQ ID NO: 204007 - protein, 809 aa, Glycine max
  Clone ID: PAT_MRT3847_26245C.1.pep
FFPRIARSVSRSSRARNFLHGDGRLGTHVGLPRTNACSEGAEGVLGFVRGYVSSARARSNGLVSNLPDFKSVAANPRIRRLFCSKAPKKKNYENFYPKEKKEVPKGNDKKYESKDNSNANTEDSGNFQEAFMKQVQNLVTPLLLMGLFLTSFSFGPREQKQISFQEFKNKLLEPGLVDHIVVSNKSVAKVYVRNTPLNQTDNEVAQGTQPAIGSGGQYKYYFNIGSVESFEEKLEEAQEALGIYSHDFVPVTYSSEVVWYQELMRFAPTLLLLGSLLYMGRRMQGGIGVGGSGGGKGARGIFNIGKAPVTKVDKNAKNKIYFKDVAGCDEAKQEIMEFVHFLKNPKKYEELGAKIPKGALLVGPPGTGKTLLAKATAGESGVPFLSISGSDFMEMFVGVGPSRVRNLFQEARQCSPSIVFIDEIDAIGRARRRGFSGANDERESTLNQLLVEMDGFGTTSGVVVLAGTNRPEILDKALLRPGRFDRQITIDKPDIKGRDQIFQIYLKKIKLDHEPSYYSPRLAALTPGFAGADIANVCNEAALIAARGEGTQVTMEHFEAAIDRIIGGLEKRNKVISKLERRTVAYHEAGHAVSGWFLEHVEPLLKVTIVPRGTAALGFAQYVPNENLLMTKEQLFDMTCMTLGGRAAEQVLIGRISTGAQNDLEKVTKLTYAQVAVYGFSDKVGLLSFPPTEGSYEFSKPYSSKTAAIIDSEVRDWVDKAYKHTIQLIEEHKEQVTQIAELLLEKEVLHQDDLLRVLGERPFKATELTNYDRFKQGFIEEEEKVVESTVDTPEEGGGSSPLEPQVVPT

SEQ ID NO: 204008 - protein, 100 aa, Glycine max
  unsure (1)..(100): unsure at all Xaa locations
  Clone ID: PAT_MRT3847_26246C.1.pep
VPPLAVCWRPLLXLLRLXSFLXMASRYIFTLCCCFGEIHTTLPRRYDDISVSRLFDMXLALRYPGDSCTNCLPVLRAQVATVGDKLGSVTVSITPSKGGD

SEQ ID NO: 204009 - protein, 91 aa, Glycine max
  Clone ID: PAT_MRT3847_26247C.1.pep
SRQYSSERRTEGGCDAFTSITPPWKTCNCWSTWCSCPCCGSKNIKIKSNSSVNKKINNKDNLKHMHALENIDDGIERIDNDNSSLTSQSKF

SEQ ID NO: 204010 - protein, 128 aa, Glycine max
  unsure (1)..(128): unsure at all Xaa locations
  Clone ID: PAT_MRT3847_26248C.1.pep
IGDNETVGHFVVIHGCTVEDEVWXGISAKILDGAGDEKNAMGAAGDLVRQNTRNASGEGXAGNSAKFLIKLTDEXIAVIYQSATNDTNLAQVHAVENGKVLXEIEXGNVLQKKLARKDEEYDYMLSVA

SEQ ID NO: 204011 - protein, 128 aa, Glycine max
  unsure (1)..(128): unsure at all Xaa locations
  Clone ID: PAT_MRT3847_26249C.1.pep
MDSETSRGASLTVKYLQMGIWWFSVMIFVGYLMVWIVMPTNIFFPHWFPDIQAKADSIYFGRQGTTILIYTFPILLIATLARLYLHLEQKRSNHNTESKVGFLGFASWKXPLLGTGPLGIITMTELSF

SEQ ID NO: 204012 - protein, 169 aa, Glycine max
  unsure (1)..(169): unsure at all Xaa locations
  Clone ID: PAT_MRT3847_2624C.1.pep
MLVYQDLLTGDELLSDSFRYKEIENGMLWEVXEGKWVAXGAGDVDIGAHPSAEGGGEDEGADDALVKVVDIVRTFRLYELPAFDRKXFVTFMKRLIMTLTPTLDAXQHELFKKHIEGATSYLLSKIKDFQFFVADSMGDDACLVFAYYKDGAADPTFLYFAYALQEVKC

SEQ ID NO: 204013 - protein, 75 aa, Glycine max
  Clone ID: PAT_MRT3847_26250C.1.pep
TWAKRNVLKSPIMAGSLGQNRGILKSHMAIDRARTKYICGEQSILLLTNQFLRVELDPNPHCDMGSQSVLDSLRH

SEQ ID NO: 204014 - protein, 71 aa, Glycine max
  Clone ID: PAT_MRT3847_26251C.1.pep
LPPGGGHESIRFPDNLVTIIFGFPSGPVGPSLLRPSPEVFFSPPGFFSWLRGVPSPGSPCPPPPRWFGPFP

SEQ ID NO: 204015 - protein, 75 aa, Glycine max
  Clone ID: PAT_MRT3847_26252C.1.pep
GKHLASPHTLENLPRRLTMMTQMLTVPLSTDRLLYHTMVTPGLQVLRAKHPWVPDLANHPASVNSVTRISCAVRE

SEQ ID NO: 204016 - protein, 129 aa, Glycine max
  Clone ID: PAT_MRT3847_26253C.1.pep
MPYITMSEIPSFFGPERRTNDFYPLYLNVWDPFHGFPGTTVLSDTHSGTGAFDNTRINWNDTAEAHVFIAHLPRLKKEDVKVNIEDEGTVLHIIDQSTLDMEDNIYTWHRLKRFIGSYLRRFRLTETRN

SEQ ID NO: 204017 - protein, 92 aa, Glycine max
  unsure (1)..(92): unsure at all Xaa locations
  Clone ID: PAT_MRT3847_26254C.1.pep
HRQSIPIQAGPTTXMNXSSLXXPTAGLFPFPKPTRTRMKTPXSSRAFSSXXRTHPLXNXXPIXXYKQXRRFXNSSGXTDAGSACHLSFTXTR

SEQ ID NO: 204018 - protein, 68 aa, Glycine max
  Clone ID: PAT_MRT3847_26255C.1.pep
LQKPATFFHRGQRSEMNELDGCRIRLAKEQGAFNAIASHTDNLCLAGCSVNLNRKPMLLPLWTGLARH

SEQ ID NO: 204019 - protein, 369 aa, Glycine max
  Clone ID: PAT_MRT3847_26256C.1.pep
MGGLASNLPLIVMVGLQIHYAALAIFTRAALLDGLSTTVFVVYRQGIATLALAPMFFSPKRRQSVKDSLGFRSFFLMFVTALVGVTANQNAYFKGLFYASSTAATAMSNLIPALTFVIAAIAGFEKVDISLRSTAKILGTVCCVAGALTMALVKGQKLLHTEFLPSIHLTGSEGDDWLLGCLLLLASSVFWSCWMILQVPIASCCPDHLLSTFWMCLFSTIQAALFALLSESDLQAWILQSPLQISCSLYAGIGIAVSFFIQSWCISERGPLYCAMFNPLATVITALISATFLQEEVYVGSLVGAVGVIAGLYIVLWGKAKEFAEIKPEAAPQSSNLQDDHDISSRIDLEQPLLSEKLSEHVTEADSKV

SEQ ID NO: 204020 - protein, 220 aa, Glycine max
  Clone ID: PAT_MRT3847_26257C.1.pep
MRTHFHSLPLIFLFTLSLLLGKTRPDPDPLQDYCVADSKSEFFINGVPCIDPDKVSSSHFVTSALSKTGNTSNQFGFSVTATTTANLPGLNTLGLVLVRVDIAGNGIVPPHSHPRASEVTTCLKGMLLVGFVDTSNRVFTQNLRPGESFVFPKGLVHFLFNSDSREPAIAISGLNSQNPGAQIASLATFASKPPIPDDILKKAFQISKGEVETIRRNLGG

SEQ ID NO: 204021 - protein, 36 aa, Glycine max
  unsure (1)..(36): unsure at all Xaa locations
  Clone ID: PAT_MRT3847_26258C.1.pep
XXLIXGXXAXXQNXXXTSXIMPSKPNSXAYVRXSCX

SEQ ID NO: 204022 - protein, 180 aa, Glycine max
  Clone ID: PAT_MRT3847_26259C.1.pep
SVFWSCGMILQVPITSCCPDHLLSTFWMCLFSTIQAALYALLSESDLQAWILQSPLQISCSLYAGIGIAVSFFIQSWCISERGPLYCAMFNPLATVITALISATFLEEEVYVGSLVGAVGVIAGLYVVLWGKAKEFAEIKPEAPQSSNLLDDEISSRIDLEQPLLSEKLSEHATEADSKV

SEQ ID NO: 204023 - protein, 141 aa, Glycine max
  unsure (1)..(141): unsure at all Xaa locations
  Clone ID: PAT_MRT3847_2625C.1.pep
MLVYQDLLTGDELLSDSFRYKEIENGTLWEAEGKCVGKGAADVHIGAHPSAEGGGEDEGVEDAADKVADIVDTFXLYEQPAFDEKQDATFMKRLMKNLTAKLDAQRHEWCTKHMEGGPNYLLSKIKDFQCSVGESMGDDAC

SEQ ID NO: 204024 - protein, 70 aa, Glycine max
  Clone ID: PAT_MRT3847_26260C.1.pep
VSLASFKAAVNSRAPSLVHHLKGPLVQKCLFGPQGHSILGRALMGSLFGRLCKSFSIVGVSKGAIWSFKG

SEQ ID NO: 204025 - protein, 72 aa, Glycine max
  unsure (1)..(72): unsure at all Xaa locations
  Clone ID: PAT_MRT3847_26261C.1.pep
VPLGRAPFSVGGXXGGLWXPWFGAFVGRVLFPMPPPCYWVFXSGPKRARLLIPSCPMFPYWCCLFWIFSVVL

SEQ ID NO: 204026 - protein, 41 aa, Glycine max
  Clone ID: PAT_MRT3847_26262C.1.pep
MASLKVAFLAAVLCMVVVSTPMAHAAITCGQVTNSLINCIP

SEQ ID NO: 204027 - protein, 61 aa, Glycine max
  unsure (1)..(61): unsure at all Xaa locations
  Clone ID: PAT_MRT3847_26263C.1.pep
CWVVYRSMHSLITAHDLLVGVVQLTSDISVISIAKIXVTFHLHFLYKCCRLILGPNGSLTT

SEQ ID NO: 204028 - protein, 107 aa, Glycine max
  unsure (1)..(107): unsure at all Xaa locations
  Clone ID: PAT_MRT3847_26264C.1.pep
ALFLARHLLSIAAKVCGAFWRPHCQEQNEMFGREAHKQLDYAECYPGGFWXGTKMIKACIYAKLEGSPTRIIDGHVLCGEVELSDLTHISGSKNLATFMLDEHQMFQ

SEQ ID NO: 204029 - protein, 47 aa, Glycine max
  Clone ID: PAT_MRT3847_26265C.1.pep
ETGARVRNAYAIYLSQRDSPEKFGLIPHSITGWHHFVIKVTTVKDEH

SEQ ID NO: 204030 - protein, 54 aa, Glycine max
  Clone ID: PAT_MRT3847_26266C.1.pep
PQWSDQKESMVSRISPIYSFPGKPPVHTITTSMQSTLSKPLTDLLKCGNMPLYL

SEQ ID NO: 204031 - protein, 130 aa, Glycine max
  Clone ID: PAT_MRT3847_26267C.1.pep
MEESKLSHNIPTGSSRKLVTSQSPPSLSLEPNEKLKNNSQECKSPNTNDKAKDPEKGHSENIGKVDDDVEETGRERLKRLREEVTMEKVNIPENWGQEPKLKDWMDYTMFDAFFPHSLIVTARDALICYA

SEQ ID NO: 204032 - protein, 70 aa, Glycine max
  Clone ID: PAT_MRT3847_26268C.1.pep
YIIFILLFQTECHTVLMINHVYTSYCLLTSIPLIQETTTRQPSKAMKETSQIQSKLSNTIGKLTHTFNFL

SEQ ID NO: 204033 - protein, 94 aa, Glycine max
  unsure (1)..(94): unsure at all Xaa locations
  Clone ID: PAT_MRT3847_26269C.1.pep
MASPVIAYVALKPAPFTVDKSSLXGLPSLSRNYSSFKVFASVKKINTYKPYKINCGMALKNRTVSSSLKRKGKCVYHFVDIHYSNVYSYIPIYH

SEQ ID NO: 204034 - protein, 241 aa, Glycine max
  Clone ID: PAT_MRT3847_2626C.1.pep
MANHDLILGQSHNLALGHDQQLVLGHDHNLGLSQNHELEMGSAHEHHLDLGQTHDHELGLGHAHDELGLEQNHEHEGDDGHTYEHEHEHELAMDQKPEHDDHDLPLPGQNHDLVLSENNDLTVSENQDLDENTALSVVQNSDMGIDSANDMDVQHPQLVAVSTPPIIQARTASPSYELSVGQEFPDVKSCRRALRDTAIALHFEMQTIKSDKTRFTAKCASEGCPWRIHAAKLPGVPTFLT

SEQ ID NO: 204035 - protein, 100 aa, Glycine max
  unsure (1)..(100): unsure at all Xaa locations
  Clone ID: PAT_MRT3847_26270C.1.pep
XXLXXXXRXXLXLYXLQXRXXMXSLHXNVXXSXXQXWQPXFSIXXSQASXFLTXVDXXXXGSXXWXXXLVPXXISXXXXAXXXIGPPTSNLXXSXXGLRL

SEQ ID NO: 204036 - protein, 69 aa, Glycine max
  Clone ID: PAT_MRT3847_26271C.1.pep
FILFSWSPSRFFFCFRASCALTLYNFIPLRGSPPSFSPPHPPILHPPPPPPPTPPPTPPPPPKIGGLIQ

SEQ ID NO: 204037 - protein, 54 aa, Glycine max
  Clone ID: PAT_MRT3847_26272C.1.pep
NCSTVGIQGIAWAFVGMTSALDHCTAGISRGHINPAVTSGLALAKKPVVTHGDY

SEQ ID NO: 204038 - protein, 90 aa, Glycine max
  unsure (1)..(90): unsure at all Xaa locations
  Clone ID: PAT_MRT3847_26273C.1.pep
MLQWDILSYDLGSFCLSHCMAHSFTVHDMHSLFLIHAFIIIPAWGALSFRANPPLLPXPSNPPKPPPPPPPPPPPPQARRHSYTCRAAKS

SEQ ID NO: 204039 - protein, 51 aa, Glycine max
  Clone ID: PAT_MRT3847_26274C.1.pep
TRSGCLKISSSKGRNEIFKYINEGYFDGPVFFYFFKRSLSLDLVDIKPVCV

SEQ ID NO: 204040 - protein, 131 aa, Glycine max
  unsure (1)..(131): unsure at all Xaa locations
  Clone ID: PAT_MRT3847_26275C.1.pep
MPKPINQQPSDYSVLSNYFESLTIPYPIIIIPNQRDMVTVEDIRNASTFPGTRQHLGLQHRHAIQAASAKTIYRDYCFRITICEHMTDRRQKRKHMCNLSMIKKRXMHRMDEFLTEYPNMRECMEPSLDER

SEQ ID NO: 204041 - protein, 176 aa, Glycine max
  unsure (1)..(176): unsure at all Xaa locations
  Clone ID: PAT_MRT3847_26276C.1.pep
SITSSASSASCSSSSASSSAPPSSSSSPLSPAWAHPSRPTHSSLEPGLPASAAQGLARAAFRSGSAAGGSESPVHYKYNPVKTIKTNVMGTLNMLGLAKRIGARFLLTSTSXVYGDPLEHPQKETYWGNVNPIGERSCYDEGKRIVETLAMDYHRGAGVEVKHMRGNPSKSGLIMG

SEQ ID NO: 204042 - protein, 56 aa, Glycine max
  Clone ID: PAT_MRT3847_26277C.1.pep
SNRANSARGRQKLLPLKLVPTGIQNNQHKKMWRMEEMTVRIIIKIASVMSSKDQIW

SEQ ID NO: 204043 - protein, 352 aa, Glycine max
  Clone ID: PAT_MRT3847_26278C.1.pep
MKQLHKQTSLNHRREEEMLGSSETSPYSPKSIKHTRSLPRSINYLLREQRLLFILVGILIGSTFFIIQPTLSRLGPPEPVHTFLPRTGLARFAGPGPRTGRVPVGIGGRRQRIVVTGGAGFVGSHLVDKLIARGDDVIVIDNFFTGRKENLVHLFGNPRFELIRHDVVEPILLEVDQIYHLACPASPVHYKYNPVKTIKTNVMGTLNMLGLAKRIGARFLLTSTSEVYGDPLEHPQKETYWGNVNPIGERSCYDEGKRTAETLAMDYHRGAGVEVRIARIFNTYGPRMCLDDGRVVSNFVAQAIRKQPLTVYGDGKQTRSFQYVSDLVNGLVALMESEHVRPFNLCNPGEFT

SEQ ID NO: 204044 - protein, 87 aa, Glycine max
  Clone ID: PAT_MRT3847_26279C.1.pep
GTTARMLLRREKKGSQRDKGENEPKNPQRASGSLWAGLPRIWGRGAHQGKKGRFTFTATEKGLSSTYPRGFSTTFGQTLAIFSASPT

SEQ ID NO: 204045 - protein, 45 aa, Glycine max
  Clone ID: PAT_MRT3847_2627C.1.pep
DFTIYEKKVNKTCLLLYYVKIDQNRNNPESCNNFFQKKCKNKSDF

SEQ ID NO: 204046 - protein, 88 aa, Glycine max
  Clone ID: PAT_MRT3847_26280C.1.pep
MLWVLGHGVPPAGRLSRHCLVMLPPLWAPGASSVIARRFSSGLISLSSIWVQLVALRCSDARRGRSGHAPLFPAKKKKKGGPFWGFPA

SEQ ID NO: 204047 - protein, 56 aa, Glycine max
  Clone ID: PAT_MRT3847_26281C.1.pep
SHCARDCVTWYLPRSPIASSRVFSLCTQSGIDTDSRSLWAAHRRDVYPPPQSCTQR

SEQ ID NO: 204048 - protein, 62 aa, Glycine max
  Clone ID: PAT_MRT3847_26282C.1.pep
QNYSATLWPAQKVIFFPLMYRTPNSRKPPYDSFHQDNKAFASGLKLRQPLLSVYLPFAHANT

SEQ ID NO: 204049 - protein, 70 aa, Glycine max
  Clone ID: PAT_MRT3847_26283C.1.pep
IKLLPVNAEMDIPPVPMFLYHRAVGLTSLASRNRVNCCGVECSYWRANLPAQDSLCFSALMCTFLITTIV

SEQ ID NO: 204050 - protein, 586 aa, Glycine max
  Clone ID: PAT_MRT3847_26284C.1.pep
MDTIKSFKGYGKVDELEQQAYQKKTRKRLIIITVSSIVLIAVIIAAIAGVVIHKRNTSSSPSSDSPPQTELTPAASLKAVCDVTQYPNSCFSAISSLPDSNTTDPELLFKLSLRVAIDELSKLSSFPSKLRANAEHDARLQKAIDVCGNIFGDALDRLNDSISALGSSGGAGKIISPASVSDVETWISAALTDQDTCLDALGELNSTAASGALREIETAMRNSTEFASNSLAIVTKILGLLSQFAAPIHHRRLLGFPEWLGAAERRLLQVNSSETTLDAVVAQDGSGQFRTIGEALKLVKKKSEKRFVVHVKEGRYLENIDLDKNTWNVFIFGDGKDKTVVVGSRNFMDGTPTFETATFAVKGKGFIAKDIGFVNNAGASKHQAVAFRSGSDRSVFFRCSFNGFQDTLYAHSNRQFYRDCDITGTIDFIFGNAAAVFQNCKIMPRQPLPNQFNTITAQGKKDRNQNTGIIIQKSKFTPLENNLTAPTYLGRPWKDFSTTVIMQSDIGSFLKPVGWMSWVPNVEPVSTIFYAEYQNTGPGADVSQRVKWAGYKPTLTDGEAGKFTVQSFIQGPEWLPNAAVQFDSTL

SEQ ID NO: 204051 - protein, 338 aa, Glycine max
  Clone ID: PAT_MRT3847_26285C.1.pep
MDQKLVSSWFHLHSSVPLSYVQPPESRPGMVEASSKRKIPVVDLGLHDRAETLKQILKASEEFGFFQVINHGVSKELMDETLDIFKEFHAMPAEEKIRESSRDPNGSCRLYTSREINDKDVVQFWRDTLRHICPPSGEFMEFLPQKPAKYHEVVAKYAQEMRTLGLKILELLCEGLGLDQNYCCGELSDSPLLLAHHYPPCPEPTLTLGAPKHRDPNLATILLQENDINALQVFKDGEWIVVEPIPYAFVVNIGLMLQIISNGRLVGAEHRVVTNSGIGRTTVAYFIRPTNKQIIEPAKPLLSSGARPIYGSITYEEFLRNFLSKGPEIEQELLLKPL

SEQ ID NO: 204052 - protein, 587 aa, Glycine max
  Clone ID: PAT_MRT3847_26286C.1.pep
MDTIKSFKGYGKVDELEQQAYQKKTRKRLIIIAVSSIVLFAVIIAAVAGVVIHKRNTSSSPSSDSPPQTELTPAASLKAVCHVTQYPNSCFSAISSLPESNTTDPELLFKLSLRVAIDELSKLSSFPSKLRANAEHDARLQKAIDVCGNVFGDALEQLNDSISALGSGAAEAGKIISPASVGDVETWISAALTDQDTCLDALAELNSTASRGALREIETAMRNSTEFASNSLAIVTKILGLLSKFDSPIHHRRLLGFPEWLGAAERRLLQVNSSETTPDAVVASDGSGQFRTIGEALRLVKKKSEKRFVVHVKEGRYVENIDLDKNTWNVFIFGDGKEKTVVVGSRNFMDGTPTFETATFAVKGKGFIAKDIGFVNNAGASKHQAVALRSGSDRSVFFRCSFDGFQDTLYAHSNRQFYRDCDITGTIDFIFGNAAAVFQNCKIMPRQPLPNQFNTITAQGKKDPNQNTGIIIQKSKFIPLGNNLTAPTYLGRPWKDFSTTVIMQSDIGSFLKPVGWISWVSNVEPVSTIFYAEYQNTGPGADVSQRVKWAGYKPTLTDVEADKFTVQSFIQGPEWLPNAAVEFDSTL

SEQ ID NO: 204053 - protein, 200 aa, Glycine max
  unsure (1)..(200): unsure at all Xaa locations
  Clone ID: PAT_MRT3847_26287C.1.pep
REGLLQFFTGCRCNVRKIDLRLPLDLNNDHLLAVAKNFDGLTSIRLQSCCLVRGGGXKXXPXHIHQHXYKLNLVNRAKVPSFNXLATTEPDLRKERKLAPTRHEMLCDKELVSMPPSCVHLIDLTGRGCRRLTSVDMASMLRSCKQLRNVDVVNCFGIDSEAVELFLKNCSRLRRMEVEGSKLSDAAKMWASSKFIEVVV

SEQ ID NO: 204054 - protein, 64 aa, Glycine max
  Clone ID: PAT_MRT3847_26288C.1.pep
ASGSLPIAKQKLVSTRQYNAKTKRRVVSKVPIPNTTLPTDPIACDRLMTIQMSCVLNHGGMTNS

SEQ ID NO: 204055 - protein, 291 aa, Glycine max
  Clone ID: PAT_MRT3847_26289C.1.pep
MTQQNVVVSDTKSGVSLTVFSTTQKPPAAPGGYISIPRRRVLKNLEINGGQRINAWVESMRASSPTHHKSTPSLSQEHNSWILHHPSALDMFDQIIDASKGKQIVMFLDYDGTLSPIVDDPDRAFMSDSMRKTVRKLARCFPTAIVTGRCKDKVYNFVRLAELYYAGSHGMDIKGPTRSSKYNKDSKAEAILCQPASDFLPMIDEVYQQLVEKTKSTPGAMVENNKFCLSVHFRCVDEKKWSELARQVKSVLKEYPKLRLNQGRKVLEIRPSIKWDKGKALEFLLESLGRF

SEQ ID NO: 204056 - protein, 169 aa, Glycine max
  unsure (1)..(169): unsure at all Xaa locations
  Clone ID: PAT_MRT3847_2628C.1.pep
TCEVYQDLLTGDELLSDSFRYKEIENGMLREVEGKRPVKGAVDVHIGANPSADGGGEDDGGDDASAKVVDIVDTFRLHEQPAFDKKQVVTFMKRFIKNLTAKLDAEQQELFKKHIEGASKYLLSKIKDFQLLVGESMGDDACLDFAYYKDGAADPTLLYFAYALXEGKC

SEQ ID NO: 204057 - protein, 60 aa, Glycine max
  Clone ID: PAT_MRT3847_26290C.1.pep
MVRKTFGFLFLLLLGVGSDVTVKRTGVIDCMTSKHGIHGRCLFDRECADVCKTDGFISGQ

SEQ ID NO: 204058 - protein, 77 aa, Glycine max
  Clone ID: PAT_MRT3847_26291C.1.pep
LSLPLCRGREASMSSMTCCGVFYRRDEGGGFLREQAVAVRSRCLFVVIGEGKMYVAAKMSAKEKRQRETPRVVAEQG

SEQ ID NO: 204059 - protein, 203 aa, Glycine max
  unsure (1)..(203): unsure at all Xaa locations
  Clone ID: PAT_MRT3847_26292C.1.pep
TASGWPSFDDIKSSSLTYSLSAEEKATVAVLQLQHRALEACQKFLVGDAGSDSDEDDEEAEDEDELVDNDSEESEEYKFFEKVFAEDGDRSGYYENNVKEGDFYCLVXMGIGKKVWTRFKDCIGLIQHSIXILRTRRKRAHRAYAQVICKVVGWDIDQMPAIVLKDLDSSLAGSRKLFVEPKNPAAGCTDDTNSNGEATNSTD

SEQ ID NO: 204060 - protein, 227 aa, Glycine max
  Clone ID: PAT_MRT3847_26293C.1.pep
MNRLSQLSSYTAAIVGSTVRLIANRSLRHRCCSFPAKPEYRGIRSFRSEFALTAARCYSAKKGRKSKAEPEVPAVVMEQEKDAFYVVRKGDVVGIYNSLADSQAQVGSSVCNPPVSVYKGYSLSKDTEEYLVSHGLKNALYTIRATDLKEDLFGMLVPCPFQEPSTKEGTSNKDVSKQRSLGVLAQDEKVIPEDPFRKQVKLEYAEVAEAPSHATRTCFVEFDGASK

SEQ ID NO: 204061 - protein, 70 aa, Glycine max
  Clone ID: PAT_MRT3847_26294C.1.pep
NFDPSSGPQAPPLNCTLLALVSFISKALESPLEEGLARDFSSSQEFYTGIKVFQWRVVQKVVPKPLKFAR

SEQ ID NO: 204062 - protein, 70 aa, Glycine max
  Clone ID: PAT_MRT3847_26295C.1.pep
LLMLLLHLIVLSLKQPLSLSLSHSNCTMLFKIKQKLILYHYEVVAFVSRLYFCSHNSVITFVLCWFWDNK

SEQ ID NO: 204063 - protein, 63 aa, Glycine max
  Clone ID: PAT_MRT3847_26296C.1.pep
TNDDLFPADNDDRFASLTTSPKVMLLVAQTMRRLRCASSSRRRNACAATCLIGFFLEQCRLIQ

SEQ ID NO: 204064 - protein, 120 aa, Glycine max
  unsure (1)..(120): unsure at all Xaa locations
  Clone ID: PAT_MRT3847_26297C.1.pep
VFALIAVRDPXKWELKFDRGLSVILYQAIVATMLRYTLTTWCVHRAGPLFCAMFKPVGIIFTVSMSAIFLGENFGLGSLIGAVIIVIGFYAVLWGNSREENKIENLESSSHNAPLLQDRS

SEQ ID NO: 204065 - protein, 107 aa, Glycine max
  Clone ID: PAT_MRT3847_26298C.1.pep
DFKLSGKIPEALKYCGNSIQRLDLASNSFSSEIPHEICTWMPFLVSIDLSSNQLSGVIPPTIDNCSYLNELVLSNNQLSGSIPFEFGNLGRLKKISVANNMLTGTDP

SEQ ID NO: 204066 - protein, 144 aa, Glycine max
  Clone ID: PAT_MRT3847_26299C.1.pep
RTFRSIILHLAYITPIFINLTQLIPQPSPHVYNHAIFSRFHWLALPHLIPPLDVAELLFLERPAVKFPYIIVPLAVNIYTPTLPLLIGFSTARLHPIPVGSACIQYVQVFLTFPLFLSVLLALLVPLCFGYGLTLCLYVRGYYR

SEQ ID NO: 204067 - protein, 144 aa, Glycine max
  unsure (1)..(144): unsure at all Xaa locations
  Clone ID: PAT_MRT3847_2629C.1.pep
LVYQDLLTGDELLSDSFRYKEIENGMLWEVEGKWVVKGAVDVDIGANPSAEGGGEDEGVDDAAVKVDDIVDTCRLHEQPAFDKKQFVTLMKRCIRNLTARLDGKHQEFSKTHIEGAAKYLLSXIIDVRIVCSGYMGDDAWLVYA

SEQ ID NO: 204068 - protein, 94 aa, Glycine max
  unsure (1)..(94): unsure at all Xaa locations
  Clone ID: PAT_MRT3847_262C.1.pep
LXVESSDXIDNVKXKIQDKEGIPXGPXNVLIFXGKQLEDGRTLADYNIQKERTLHLVXRLRGXXMQILVKTLXGXKTIXXEVESXXTMDNVXAK

SEQ ID NO: 204069 - protein, 163 aa, Glycine max
  Clone ID: PAT_MRT3847_26300C.1.pep
MPFKKPHHTSDKNYITGDDGGKFEIQPRGLNIVWGNDSRYWKIPEQGPAELIQVSWLEVSGVVNLPGVKKYRVEFEVRVKDDGFGWSGTDVLVMAKIGKTGKYTYKVTKLNPGETLNIPKSTDPLEIQVNKQSEDLHFGLYEVWSGKWKGGLEIVRALIKPLT

SEQ ID NO: 204070 - protein, 140 aa, Glycine max
  unsure (1)..(140): unsure at all Xaa locations
  Clone ID: PAT_MRT3847_26301C.1.pep
ASAASPTTFSLLHSATPSSSSTATSDCPSPSSVQSTYSLRSPPAAHAWAWPRRTRCSRRVVSARVAAVTGRRKGARGVVSMANKSVGDLSAADLKGKKDFFMADLNVPIDDDQNITDDTRIRAAIATLXHLIQNGAQVIL

SEQ ID NO: 204071 - protein, 83 aa, Glycine max
  unsure (1)..(83): unsure at all Xaa locations
  Clone ID: PAT_MRT3847_26302C.1.pep
SWELIFPKEECGPNKGFXCXSSEWANQASWPLGFLIDNPKQCPVFEILLGISQNFETAGKTFMPAFSVPRVSASFFENGEPSA

SEQ ID NO: 204072 - protein, 85 aa, Glycine max
  unsure (1)..(85): unsure at all Xaa locations
  Clone ID: PAT_MRT3847_26303C.1.pep
QDALGIGLMITVLQLARLPNIKVATVLLCCAFVYDIFXVFISPVIFQKSVMITVARGDKAGGEAIPMLLRFPRLSDPWGGYDMIG

SEQ ID NO: 204073 - protein, 58 aa, Glycine max
  Clone ID: PAT_MRT3847_26304C.1.pep
IGPGHPGSTHAVRFNLDLLQTQPVRTLGAPVQQFLLSLSPSTNHLTFGLQPFFGKKGL

SEQ ID NO: 204074 - protein, 79 aa, Glycine max
  Clone ID: PAT_MRT3847_26305C.1.pep
MEEPQCAIKKDATELVGNTPMVFLNNIVVGCVARIAAKLEYMQACCSVKDRIALSMIEDAEKKGLITPGKTVLVEYTSG

SEQ ID NO: 204075 - protein, 68 aa, Glycine max
  Clone ID: PAT_MRT3847_26306C.1.pep
SLFYGETYIFIYFAGLNKLDSYTYSPLPWILSHSRLLLKCNLVGGRLLEYDMDPPDYIWRLLEQKIPS

SEQ ID NO: 204076 - protein, 324 aa, Glycine max
  Clone ID: PAT_MRT3847_26307C.1.pep
HGEPQCAIKKDATELVGNTPMVFLNNIVVGCVARIAAKLEYMQACCSVKDRIALSMIEDAEKKGLITPGKTVLVEYTSGNTGIGLAFIAALRGYKLQVTMPSYVSLERKIILRAFGAEVYLTDPAKGIDGVIQKAEELLAKTPDSFMLNQFENPANPNIHYETTGPEIWRDSGEKIDALVSGIGTGGSIAGAGRFLREKNPDIKLYGVEPAESPVLNGGQPGKHLIQGIGAGIIPKVLDVNLLDEVIQVSSEEAIETAKLLALKEGLLMGISSGAAAAAAIKVGKRPENAGKLIVVIFPSFGERYLSSPLFESIRKEAEQMTFD

SEQ ID NO: 204077 - protein, 45 aa, Glycine max
  Clone ID: PAT_MRT3847_26308C.1.pep
VDVRSPGRRPSLMQHHEQRKQAPHRVFACFTLPRDPLLSSSRSRT

SEQ ID NO: 204078 - protein, 56 aa, Glycine max
  Clone ID: PAT_MRT3847_26309C.1.pep
SFFDNEEVLMLITTQLWVVFDTSRSRFFINANSFRMCYSERHVHTCVHPHAYGAHV

SEQ ID NO: 204079 - protein, 117 aa, Glycine max
  Clone ID: PAT_MRT3847_2630C.1.pep
MVVYHDLLTGDELLSDSFRYNEIENGMLWEVEGKWVVNGAVDVDIGAYPSAEGGEDEGVDDASVKVVDIVDTFRLQEQPAFDKKQVCTFMKRFIKNLTSKLDAKKQEFVKKHICGSY

SEQ ID NO: 204080 - protein, 60 aa, Glycine max
  Clone ID: PAT_MRT3847_26310C.1.pep
IRHLIRIRRCHRLTIGNNVSLIYEVSYMSFHGSPLTCNMLPGFNQRVIQCGLNRICIKNR

SEQ ID NO: 204081 - protein, 146 aa, Glycine max
  unsure (1)..(146): unsure at all Xaa locations
  Clone ID: PAT_MRT3847_26311C.1.pep
WTCPTRDSKACKKLKQIELADCEIYASCEPCPMCFGAIHLSRIKVRMACYSYAAEAAIAIXGFDDFIADALQGTGFYQKVTWEIKRADGXIIAEEVFEKTKEKFQMYYKKNLLTADGKWPLEFYFQQQIMFSFITLQIYIAWIICV

SEQ ID NO: 204082 - protein, 95 aa, Glycine max
  Clone ID: PAT_MRT3847_26312C.1.pep
MKMKVLVLFVATVLVTYECHGSDYQKFPLQMKTGFGGHYTNDVACDSWRLDVEAHHVLNCHTVPAACVQYKTDYFLRDHSILKSITVNHSSLLLS

SEQ ID NO: 204083 - protein, 54 aa, Glycine max
  Clone ID: PAT_MRT3847_26313C.1.pep
GGGGDRGGRGGGGLRGVQWLGCFVASPLQFCFPLRWWAGFPPVPFRVFGLRGFQ

SEQ ID NO: 204084 - protein, 50 aa, Glycine max
  unsure (1)..(50): unsure at all Xaa locations
  Clone ID: PAT_MRT3847_26314C.1.pep
LXXTGTXLQNXLKELWSLXNXLXPEVFDXKKAXNXWLXKPXQKEXPTQTT

SEQ ID NO: 204085 - protein, 78 aa, Glycine max
  unsure (1)..(78): unsure at all Xaa locations
  Clone ID: PAT_MRT3847_26315C.1.pep
VDLLRGQKSHXADVTLLPGEWDAMEKVLPAKYEEARXEEKLRNQREDFSDMVAENEKRKKRXMQEKEGKSKRNKEFKF

SEQ ID NO: 204086 - protein, 39 aa, Glycine max
  Clone ID: PAT_MRT3847_26316C.1.pep
EDGYICILRNTGILSLVSGMNYCASYPTRDESYTLVSAR

SEQ ID NO: 204087 - protein, 48 aa, Glycine max
  Clone ID: PAT_MRT3847_26317C.1.pep
RRSFSNILLNSCNTSCVVTNPSELCSRNATCASISLVETINYSLNRVL

SEQ ID NO: 204088 - protein, 160 aa, Glycine max
  Clone ID: PAT_MRT3847_26318C.1.pep
MCSSKLETTFVFSFTVSYSTSTTGAIFFTRVLTQLQLSIEVRSKGGSRTRKLCMVETNDDGYGFDGFVAHRAPTPTHRTPAPLLAWRLHRGSQRLKNVNLTINSVRTCVKLMEVCTCVIDMKLAIPLFRIQSAHHHIFLRQAPLLRFVTDDRNALILMIF

SEQ ID NO: 204089 - protein, 60 aa, Glycine max
  unsure (1)..(60): unsure at all Xaa locations
  Clone ID: PAT_MRT3847_26319C.1.pep
LELTHLLMENKDPKSWSSAHIYQSQWLQTTISDLDEKLDAMKTILKVTILQTKKAWIXNG

SEQ ID NO: 204090 - protein, 76 aa, Glycine max
  unsure (1)..(76): unsure at all Xaa locations
  Clone ID: PAT_MRT3847_2631C.1.pep
RFIKNLTPQLDAEKQELFKKPIEGATXYLLFKIKDFPFFVGESMNDDACLVFAYYKDGAADPTFLYFAYALKEGKC

SEQ ID NO: 204091 - protein, 75 aa, Glycine max
  unsure (1)..(75): unsure at all Xaa locations
  Clone ID: PAT_MRT3847_26320C.1.pep
HRETSHLSGARCSRMADXKKDDWRVTCGXIPTGLAITDXLNGMVNEMLIRYSFEKRLCQAKSPIMYIQSLQNLNF

SEQ ID NO: 204092 - protein, 75 aa, Glycine max
  Clone ID: PAT_MRT3847_26321C.1.pep
RERMVLLSVQYFLTIFTLFFTKKRKDELESTFFLFYYKKGQLCNNALKIMVCDNIIYVCVLEDQPGIPYTPPCFL

SEQ ID NO: 204093 - protein, 73 aa, Glycine max
  unsure (1)..(73): unsure at all Xaa locations
  Clone ID: PAT_MRT3847_26322C.1.pep
LLLFVLYHXVATTTMAFHDDEGADRESPQSKFQMVDSTRAFNANAGEIRVMTSHGGRIFYRHMHMGYISMEQS

SEQ ID NO: 204094 - protein, 48 aa, Glycine max
  Clone ID: PAT_MRT3847_26323C.1.pep
TLPFNQSLVFDHRCPRFLNSGLLLRQAEPAVQVQALTATFHTCSRLID

SEQ ID NO: 204095 - protein, 96 aa, Glycine max
  unsure (1)..(96): unsure at all Xaa locations
  Clone ID: PAT_MRT3847_26324C.1.pep
PSLGYFNLTLAIIEIVACGLRDTIDDYHTLNLQNSDHIDQADLHEFHITLGLCTSXIDILMLSDDFDKSQACRLAFYNETCDLTLPMNDLRVTSHI

SEQ ID NO: 204096 - protein, 39 aa, Glycine max
  Clone ID: PAT_MRT3847_26325C.1.pep
FHVRSQALLEWVIHQRLKVKPGDIVVLTARWEFTTGLAV

SEQ ID NO: 204097 - protein, 190 aa, Glycine max
  Clone ID: PAT_MRT3847_26326C.1.pep
MSQRVLVVLLLVLNYVLVAEGETADGDLTTFLSLINTWENTPPNWVGSDPCDDWVGIKCKNSHITSITLSSTGLAGQLSGDIGSLSELETLDLSYNKDLTGPLPESIGELKKLATLILVGCSFKGPIPDSIGNMQELLFLSLNSNSFSGPIPHSIGNLSKLYWLDLADNQLQGNIPVSSGDISGLDKLHH

SEQ ID NO: 204098 - protein, 40 aa, Glycine max
  Clone ID: PAT_MRT3847_26327C.1.pep
PPVRSEGYAFTAKNRERVVKRQHPSHHLRSHCPHRFSQSR

SEQ ID NO: 204099 - protein, 67 aa, Glycine max
  unsure (1)..(67): unsure at all Xaa locations
  Clone ID: PAT_MRT3847_26328C.1.pep
GPLCCTCXHCLHSCIYPLFCAQSHTSLLNLPKCPCLMRLFWLGCCIRLIGISHRPGFNKRLFSHLPV

SEQ ID NO: 204100 - protein, 146 aa, Glycine max
  unsure (1)..(146): unsure at all Xaa locations
  Clone ID: PAT_MRT3847_26329C.1.pep
DTIFLEILXDSMDLKIVQGDDIQDDEDSXFSKIVQDSIDVEIVKDFIDTKYDEDSIFSKIVQDSMDLEVVQDSIDVEDEDSIDAEDEDSIDVTSKQKPVLDIDLNLLVDCGFDLNKFPNDDDESLDEKGLKAEVRDVMKIYLPKFY

SEQ ID NO: 204101 - protein, 165 aa, Glycine max
  Clone ID: PAT_MRT3847_2632C.1.pep
YLNLELLTGDDILTNSIRYNENVTGVLTTIMVDWIVKGSHDVDIAANPSAEGGEDEGVYDSAVNAVDIDDTFRLHEQPAFDKKQTVTFMKRLIKNLTPKLDAKKQELFKNHIEGATKYLLSKINDFQPFVGESMNDDACLNFAYYKDGAADPTFLYFAYALKEAK

SEQ ID NO: 204102 - protein, 61 aa, Glycine max
  unsure (1)..(61): unsure at all Xaa locations
  Clone ID: PAT_MRT3847_26330C.1.pep
KTHQNLRNYRAIKEIRGLCLSSHLVYSITSKDIYHFFPPYNILIRPFLRRKPIILLIMYEX

SEQ ID NO: 204103 - protein, 134 aa, Glycine max
  Clone ID: PAT_MRT3847_26331C.1.pep
RKKVILNIKKGQVKRSGNIDSGGFYLKMVFPISLGSKKKTKNESLVNSGSNKVSPRTSVSDHGSKSLDKEWWKKKSLSGSGGESDSGVSSINSGSMKSSGSNNSSSSSRSNSRHEVNVSSCWPFIRRPESLSPN

SEQ ID NO: 204104 - protein, 91 aa, Glycine max
  Clone ID: PAT_MRT3847_26332C.1.pep
KTWGYQKRNIYTFNTEASLTGTNKLSFMDLIQHHESYVITLSHPLDNIGLTTYHKTCRNVSNATPCIGTNSFLSFQFIPILYKKNLDSKPT

SEQ ID NO: 204105 - protein, 344 aa, Glycine max
  unsure (1)..(344): unsure at all Xaa locations
  Clone ID: PAT_MRT3847_26333C.1.pep
MEISLGKLAFDIDFHPSDNLVAAGLITGHLHLYRYSPHTVPVRLLEVHAHTESCRAARFINGGRALLTGSPDCSILAIDVETGSTIARVDNAHESAVNRLINLTESTVASGDDDGCIKLFFIXVWDTRERSCCNSFNVHEDYISDITFASDAMKLLATSGDGTLSVCNLRRNTVQARSEFSEDELLSVVLMKNGRKVVCGSQTGIILLYSWGCFKDCSDQFTDLSSNSIDAMLKLNEDRIITGSENRIINLVGILPNRVIQPIAEHSEYPVEGLAFSHDRKFLGSIAYDQMLKLWDLDNILQGSRNKXNSSGVIDSDDDEMDLDGNKRNNGHAVGCSNKFFVDL

SEQ ID NO: 204106 - protein, 282 aa, Glycine max
  unsure (1)..(282): unsure at all Xaa locations
  Clone ID: PAT_MRT3847_26334C.1.pep
FVFLFGELLLTFILVFFLVFSFRMLEVHAHTESCRAARFINGGRAILTGSPDCLILATDVETGSTIARLDDAHEAAINRLINLTESTVASGDDEGCIKVWDIRERSCCNSFNSHEDYISDITFVSDAMKLLATSGDGTLSVCNLRRNKVQAQSEFSEDELLSVVLMKRXRFTDLSSNSIDAMLKLDEDRIITGSENRIINXFSHDRKFLGSISHDQMLKLWDLDNILQGSGNTQSNEAGAVDSDDDEMDLDDDPSKNSKGNKRKNANNGNALGGSNNFFADL

SEQ ID NO: 204107 - protein, 120 aa, Glycine max
  unsure (1)..(120): unsure at all Xaa locations
  Clone ID: PAT_MRT3847_26335C.1.pep
XXAGANPTTIFSLVLPAMIKLFKRNTNTDTCHHHRYRHPVLGLGLATREAHRPPNVLESAMLRPTAPPPSEKRVIIGSVDDVVTGLASCTESLGFESSDEIHNNNDNCCDEKENCDDEIW

SEQ ID NO: 204108 - protein, 241 aa, Glycine max
  Clone ID: PAT_MRT3847_26336C.1.pep
HASGIIYVKLYPSCIELVLASARIQKQDIDVDGFMGFEEAINRWPKEVPGIQCIWNQYIENAIHNRRIDLAKAITVRWFKCIWQVQNLPNGGKEITRTRGRTRGLGLDSKSVSDRFSSDHKQIDMMFGFLNLSLYNFLQNDKTEACIAFDKAKSTASFGGLEQCMKTYVMFLVYDAWSLKEDGSDGAIKRILELYADGSSQALLVPKVLTRKFGDNIKKPRVQHLIGNILSPVSFDCSLLN

SEQ ID NO: 204109 - protein, 276 aa, Glycine max
  Clone ID: PAT_MRT3847_26337C.1.pep
MLRKRTRSIQKNQHHTGQMAISDNAEEEDFGEQGKSTPLCNAPLLFVGMGHKGLLDCDSVKSPTSPLDFGFLSNLSNPFRTPSSLSNEGPHRSWDCAKVGLSIIDSLEECSKFSWKILQASESKKTSLCPQMITKAPKCKSYMDSAQASKSLPKDFCKITCTQNGSIFPKGESTVLFEIGETPLEHEFFGKAVSFSLDSYSPIKYLSGLTGSNFDTDSETVALKLVCSPPLSNGGSLTGSDFVPDSENFALKQIAVPPHFIGGSQNNTKFLLPSEV

SEQ ID NO: 204110 - protein, 48 aa, Glycine max
  Clone ID: PAT_MRT3847_26338C.1.pep
SLYRESAFVYTVYFLCVYTLLCLYIYCVIYIYIWGHDHMIYLKLKYNT

SEQ ID NO: 204111 - protein, 107 aa, Glycine max
  unsure (1)..(107): unsure at all Xaa locations
  Clone ID: PAT_MRT3847_26339C.1.pep
AFSDSNKDGVIYPWETLKGXLREVWTGALLCGRRTLFMNRHVSGRVLVPDXAPYIRSSIEIETVQRGTHGNDTGVYDTEXRVAPSEFEAISNMHAHAHPNASTYDEL

SEQ ID NO: 204112 - protein, 44 aa, Glycine max
  Clone ID: PAT_MRT3847_2633C.1.pep
KMVVFLRSLIGLCVFFSDNYCLCVNRISPPLKIIHCLHVLLWRN

SEQ ID NO: 204113 - protein, 167 aa, Glycine max
  unsure (1)..(167): unsure at all Xaa locations
  Clone ID: PAT_MRT3847_26340C.1.pep
GGPPFFFGAGGIPPFFSFPPGLVFETPPPGPFGPLGALGVYKPPGXFFPKRAPVISGAPRVPVFFFFPPPNPPPNREISPAKPPGTGGEPSPPXGGKNETGGPPPGGAPPGGKVPGPPHKLPFSKGGEKLGPPGFFSPPLPPFKEDLLGFFSWGGGQNMGGGPLGFF

SEQ ID NO: 204114 - protein, 98 aa, Glycine max
  unsure (1)..(98): unsure at all Xaa locations
  Clone ID: PAT_MRT3847_26341C.1.pep
LPCAINKSSTTHTPSDIYTMCXETVYXWTPACTKARTIACNDNPCSDAWSLESLQRTGSHCDMICVTGWTATPMHDVHATIEWLISSQECVRRTYCVL

SEQ ID NO: 204115 - protein, 106 aa, Glycine max
  Clone ID: PAT_MRT3847_26342C.1.pep
TEGLKREKEQKQKNQTCGKHKSNVLSHQQKPSKHDPVAQFEELDQRSDMGHILYGAKVTKLKPLAGKERKRAKGVSQFHAEEHAVKRKKKVFLLLGEEDKDIIRKG

SEQ ID NO: 204116 - protein, 226 aa, Glycine max
  Clone ID: PAT_MRT3847_26343C.1.pep
MRKAFTLQRALLRFSVALLLVASFTCATSVMAITEVSGNEVNTDGKLVNEELAKTSQQGYDKEAKFKGFFSKPIPKPISVVKPIPIPLYKSIPKSIPIVKPIPKSIPNEEEKFKGLFPKPIPIVKPIPKSIPIVKPILKPIPVVKPIPIPVYKSIPKSVPIVKPVPKLIPVVKPITKPIPTFEPESFLKPKPFFEKPVPKLPLEPKFKKPRIPHFPVQKPISTPTP

SEQ ID NO: 204117 - protein, 98 aa, Glycine max
  Clone ID: PAT_MRT3847_26344C.1.pep
RGLNLIPRKWIGFGRITSRTMYYSISHHNDEPRPWSSHLIAEHQQSKLGSSSRGARHPTRVSRIASENSIKCCNHSKSRLMTITQMIYLSECLFHLAY

SEQ ID NO: 204118 - protein, 185 aa, Glycine max
  unsure (1)..(185): unsure at all Xaa locations
  Clone ID: PAT_MRT3847_26345C.1.pep
MAIECITNIQSMSQPQKHHQEHKEDEAPLVFDASLLRHQLNLPKQFIWPDEEKPCMNVPELGVPLIDLGGFLSGDPVATMEAARIVGEACQKHGFFLVVNHGIDANLISNAHSYMDDFFXEVPLSQKQKAQRKTGEHCGYASSFTGRFSXKLPWKETLSFQYSAEENSSTIVKDYLCXTLEKEFE

SEQ ID NO: 204119 - protein, 40 aa, Glycine max
  Clone ID: PAT_MRT3847_26346C.1.pep
FNQHGKSNKPASPIRNSQLNEASSGRSGLKMSFQGKKNGA

SEQ ID NO: 204120 - protein, 84 aa, Glycine max
  unsure (1)..(84): unsure at all Xaa locations
  Clone ID: PAT_MRT3847_26347C.1.pep
RPQHGIGGNQLTKSGXGLSLPPVPPXCGRPAVDVRKGKKXSSQQXDVHSLXLLYNRYLXWXFANAKAHSTMXAQXTEIXXHIFX

SEQ ID NO: 204121 - protein, 53 aa, Glycine max
  Clone ID: PAT_MRT3847_26348C.1.pep
TRFFSSIDSRDLWNWKREAGPAYSFCIDSSWTAPRHGLNKDVYVKEAKNNKKL

SEQ ID NO: 204122 - protein, 60 aa, Glycine max
  Clone ID: PAT_MRT3847_26349C.1.pep
IYKNLQTLKKHPLYYFKQGKTNTVLFPRALTQEKRFLILSTKNPPQEPPFPLAQQKAQTN

SEQ ID NO: 204123 - protein, 39 aa, Glycine max
  Clone ID: PAT_MRT3847_2634C.1.pep
FGFALVRRVSYLNFNQLLNVIGYWACAFYLKTCNSTYYL

SEQ ID NO: 204124 - protein, 62 aa, Glycine max
  Clone ID: PAT_MRT3847_26350C.1.pep
IFHLVKTVNQTPAGWKGGEGSVLPQFGKVGDDTFTLDYKQLLYAFQAFVIWLTRFGSKHSCE

SEQ ID NO: 204125 - protein, 59 aa, Glycine max
  unsure (1)..(59): unsure at all Xaa locations
  Clone ID: PAT_MRT3847_26351C.1.pep
DYIVTTHIKKVHCGIIMNLLNMTIKIFFITAYLPLWGGGVIYISYHPFLTISNKFXPSX

SEQ ID NO: 204126 - protein, 90 aa, Glycine max
  Clone ID: PAT_MRT3847_26352C.1.pep
MISPQTKQSFGSLFLLFLVLLQKRFEMGVIVENPNSSKPIVIREVWASNLESEFEVIREVIDDYPFISMDTEFPGVVFRPHVVDPTKPYL

SEQ ID NO: 204127 - protein, 95 aa, Glycine max
  unsure (1)..(95): unsure at all Xaa locations
  Clone ID: PAT_MRT3847_26353C.1.pep
MTRVRGRILSTVHKEHDKWVPLTILSWIAKDGRILSLDQIYLHXLPIKEHXIIDTLVCSTMQDYVMKITPVPKHTWTILMTPIRYYLEVGYEFGH

SEQ ID NO: 204128 - protein, 200 aa, Glycine max
  unsure (1)..(200): unsure at all Xaa locations
  Clone ID: PAT_MRT3847_26354C.1.pep
TVPNLFNACFSSLNRGKIESXMREVLQKLEYLSSQKGDLGLKEGSGGGVGSGRKMPHKLPSTSLLSESVIYGTDDDREMVINWXISDNENCNQLSILAIVGMAGLGKTTLAQHVFNDPEMEDQCSIQAWLCVTDEHDVFKVTRTIVEAITXNELMIDXDLYMVQGRLKDKXQDRDXLLVIDDIWNEYRENCEAAQTPLKY

SEQ ID NO: 204129 - protein, 185 aa, Glycine max
  Clone ID: PAT_MRT3847_26355C.1.pep
LEPASNTKSKALFDSEEALMMVKELRVTFDCGKTRSYEWRISQLKAIIKLTEENEQQIYQALHSDLSKCETEAFVQEIAMLKNSCRIALKELKHWMTPEKVKTSIATFPSSAEIVSEPLGVVLVISAWNYPFLLSLDPVIGAIAAGNAVVLKPSEIAPATSSLLAKLLGDYLDNSCIKVVEGAVD

SEQ ID NO: 204130 - protein, 53 aa, Glycine max
  Clone ID: PAT_MRT3847_26356C.1.pep
VPPHYSLGSDYQSIFVISFHVGRSLSNVFCDSSLIGWGSLFMSPDLEFLCRSL

SEQ ID NO: 204131 - protein, 72 aa, Glycine max
  unsure (1)..(72): unsure at all Xaa locations
  Clone ID: PAT_MRT3847_26357C.1.pep
LXSQSVXXRVXXTXDDPIRXMXGXXXXLFXXXMLRXXLPGXLXXTXXXXNDGXXXXXILXAXXXXXXXXXCX

SEQ ID NO: 204132 - protein, 73 aa, Glycine max
  unsure (1)..(73): unsure at all Xaa locations
  Clone ID: PAT_MRT3847_26358C.1.pep
WDIQQVNNSAYECHRNHEGLGSXXCYKTILKDESIVETRFMHDKVAXDDSSEAPLVVXTPTKVSSISKSGKTH

SEQ ID NO: 204133 - protein, 37 aa, Glycine max
  Clone ID: PAT_MRT3847_26359C.1.pep
RVIKHLWVSELKSSVHGPVVHLFYVHLLSPLLRTHGR

SEQ ID NO: 204134 - protein, 1222 aa, Glycine max
  Clone ID: PAT_MRT3847_2635C.1.pep
REPVSTQGKKRQIQKLKFRDAFDRKIGREVYADDYTMEHTFGEAYTKKGKQKGSTRTKGMGRKSRNFIHLYGVEPENYSMIRFVDPLTGHTMDEHPRVDIRMVQQEFEEIRKDMIGEGELDRQRVYHNPGLQAYFIGKNTEEALKVDLTPHRPTLLCQNSNAIAGFPEREDELRQTGLPQVVSKSDVPRAKERVEMESKSVYKGLRDYSGISTLICQLTNSSDGHKETMFGVGYGSFIITNGHLFRRNNGMLTVKTWHGEFVIHNTTQLKIHFIQGKDVILIRMPKDFPPFGKRNLFRQPKREERVCMVGTNFQEKSLRATVSESSMILPEGKGSFWIHWITTQDGFCGLPLVSVNDGHIVGIHGLTSNDSEKNFFVPLTDGFEKEYLENADNLSWDKHWFWEPSKIAWGSLNLVEEQPKEEFKISKLVSDLFGNTVTVQGRKERWVLDAMEGNLAACGQADSALVTKHVVKGKCPYFAQYLSVNQEAKSFFEPLMGAYQPSRLNKDAFKRDFFKYNKPVVLNEVDFQSFERAVAGVKLMMMEFDFKECVYVTDPDEIYDSLNMKAAVGAQYKGKKQDYFSGMDSFDKERLLYLSCERLFYGEKGVWNGSLKAELRPIEKVQANKTRTFTAAPIDTLLGAKVCVDDFNNQFYSLNLTCPWTVGMTKFYRGWDKLMRSLPDGWVYCHADGSQFDSSLTPLLLNAVLDVRSFFMEDWWVGREMLENLYAEIVYTPILAPDGTIFKKFRGNNSGQPSTVVDNTLMVVIAMYYSCCKQGWSEEDIQERLVFFANGDDIILAVSDKDTWLYDTLSTSFAELGLNYNFEERTKKREELWFMSHKAILVDGIYIPKLEPERIVSILEWDRSKELMHRTEAICASMIEAWGYTELLQEIRKFYLWLLNKDEFKELASSGKAPYIAETALRKLYTDVNAQTSELQRYLEVLDFNHADDCCESVSLQSGKEKEGDMDAGKDPKKSTSSSKGAGTSSKDVNVGSKGKVVPRLQKITRKMNLPMVEGKIILSLDHLLEYKPNQVDLFNTRATRTQFEAWYNAVKDEYELDDEQMGVVMNGFMVWCIDNGTSPDANGVWVMMDGEEQIEYPLKPIVENAKPTLRQIMHHFSDAAEAYIEMRNSESPYMPRYGLLRNLRDRELARYAFDFYEVTSKTPNRAREAIAQMKAAALSGVNNKLFGLDGNISTNSENTERHTARDVNQNMHTLLGMGPPQ

SEQ ID NO: 204135 - protein, 37 aa, Glycine max
  Clone ID: PAT_MRT3847_26360C.1.pep
LFGKHTSISWFSTTSGSGLLEFFFGGPKIYAEMVSAY

SEQ ID NO: 204136 - protein, 79 aa, Glycine max
  Clone ID: PAT_MRT3847_26361C.1.pep
THPTLPKAHRMGIQFQYIPFWLDISLPLPATYTSSSRPSPAIPSPLMCKSLTPSTTSKPKSITMNQFLLTIYIIIFSLK

SEQ ID NO: 204137 - protein, 63 aa, Glycine max
  unsure (1)..(63): unsure at all Xaa locations
  Clone ID: PAT_MRT3847_26362C.1.pep
LAQRNTIFFYTXSTSLQFTLIVMTPPPSPLFITPLCLTFLPTPLFSTTTSFPYDDTTFITIFH

SEQ ID NO: 204138 - protein, 611 aa, Glycine max
  unsure (1)..(611): unsure at all Xaa locations
  Clone ID: PAT_MRT3847_26363C.1.pep
MGMMNVSIAGLDSQMAAERAVDVIGQGYDLCSDIRFSACKNRLIEIEKTQSRDLVFPGGVVVKNVPNSIKCDKGERTRFHSDVLPFNQMSEHFNKQISLSGKIPSGQFNIMFNMKKCWPTDAASTKNLAYDGWFITLYNVELDRTNITLSESVKKNVLXSWNPATFGEFIEKFGPKLIVGCXMGGKDVVHIKQTKNSDLQQAELQKLLKQLADERFSEASNHSSNVDPADKSRKIKDNCAKMWGFKPVPAPGRPVVTSHSKNDDIVSISVRRGGIDNGQSYSQWLSTISQSPSVISMSFVPITSLLNSVPGNGFLSHAVNLYLRYKPAIEELHQFLEFQLPRQWAPMYDDLPLGFGHKYKKSMSPSLQFTLMGPKLYVNTVKVDSGNRPVTGIRLYLEGKKSDHLAIHLQHLSEVPGALEISEDHGYDPVDEPEERGYYEPVKWSMFSHVYTAPVQYSSSRMDESTAIVTKAWFEVKLVGMKKVLFLRLGFSTVASATIRRSEWDGPSTTSRKSGFFSALMSTRLSKELQSPDQKPNKVDINSAIYNVGPPVPTRVPKMLSFVDTKEMVRGPEDTPGYWVVTGAKLCVEGGRISIKAKYSLLTILSEECLL

SEQ ID NO: 204139 - protein, 30 aa, Glycine max
  Clone ID: PAT_MRT3847_26364C.1.pep
TSNPRVCIYIIMESWKSKLCKNLVRLTTNC

SEQ ID NO: 204140 - protein, 126 aa, Glycine max
  unsure (1)..(126): unsure at all Xaa locations
  Clone ID: PAT_MRT3847_26365C.1.pep
GRVKHRCSRGLLCLVEKNKHISALGKSSGTSEDKDDSDEVLQATIEKSKKVLALQRELLQQISERKKLVSSINSETTPEIRDSISYEHSDKSLSSDSNPQKGSARRXSAFEXRKWWCCFKQLCRIY

SEQ ID NO: 204141 - protein, 121 aa, Glycine max
  unsure (1)..(121): unsure at all Xaa locations
  Clone ID: PAT_MRT3847_26366C.1.pep
SRDSLHKMLATGGKMKAWRKKIKYDLGRQAANTKLSINKAFSRIPVRGGNVKWMALRLXSCTYSLGIETDSRKTRILDVVYNALNSEFVRTQTLFNNAIRXVDAAPFTLWYLHHYGVEIAR

SEQ ID NO: 204142 - protein, 68 aa, Glycine max
  Clone ID: PAT_MRT3847_26367C.1.pep
HASDGYLVGVGKRADLPHVRFVFISPHWQRTGPTHPAFLHGPNKLVGPRPANLAGQMGQSVGLVLKEF

SEQ ID NO: 204143 - protein, 82 aa, Glycine max
  Clone ID: PAT_MRT3847_26368C.1.pep
FIICANFFSDLSNFSFLSFYSVWKSSSSPFDLQGHNFSALVFNSSTPFSIFSSSSSLVFFFPVKKKLSSFWLSLQADPTREM

SEQ ID NO: 204144 - protein, 141 aa, Glycine max
  unsure (1)..(141): unsure at all Xaa locations
  Clone ID: PAT_MRT3847_26369C.1.pep
MGTSSFLWNCTKKFITAGIVTVTVTDHFVTVIPVRGGSMSPTFNPKAGSHMGDVFDDYVLVEKFCLRNYKFSHGDVVVFRYPLNHKKTXVGGDNTASSLDSNSFGPIPLGIIRGRVTHVVWPPQRIGAVKNTPPQLDRLQE

SEQ ID NO: 204145 - protein, 39 aa, Glycine max
  Clone ID: PAT_MRT3847_2636C.1.pep
ISRTLVFLFDYLRTALGQKSCYPRWPPSKMWKTFISKLV

SEQ ID NO: 204146 - protein, 76 aa, Glycine max
  Clone ID: PAT_MRT3847_26370C.1.pep
EARIRLRISIIFCLIAPKYHRFSQALSIFSQFEWLQNPTCYLLHFFGCPHFFCSPLSSTNNPFGGLGFWSSRLSPN

SEQ ID NO: 204147 - protein, 63 aa, Glycine max
  Clone ID: PAT_MRT3847_26371C.1.pep
CFGLTLDPKTKVKGTGYRAPLIILLHSRVRGVKGKNINLCASHRLAGTVSVTFLSNPPNTCTI

SEQ ID NO: 204148 - protein, 51 aa, Glycine max
  Clone ID: PAT_MRT3847_26372C.1.pep
MHQSSNPRIPCIGQNKVTSFALMLRKAANLYNAFQFSNSTAESYLLPEHQL

SEQ ID NO: 204149 - protein, 75 aa, Glycine max
  Clone ID: PAT_MRT3847_26373C.1.pep
FLEPNPNNLNPLFTIPTSKSLFSLDHHHKRTSFQGIKQFPSNGSSAGGLFIKRDTWATKTLFYIIKQRTYDLFNT

SEQ ID NO: 204150 - protein, 275 aa, Glycine max
  Clone ID: PAT_MRT3847_26374C.1.pep
ARNSARADLMENGSLYDHLFGSAKKNLTWPIRQKIALGTARGLAYLHYGAQPSIIHRDIKASNILLDHNFEAKVADFGLAKFNPEGMTHMSTRVAGTMGYVAPEYALYGQLTERSDVFSFGVVLLELLSGRKALQTDDDGQPAALTDFAWSLVRNGSALDVVEDGVPEPGPPEVLEKYVLVAVLCSHPQLYARPTMDQVVKMLETDESVPSLMERPIPFIAGRLDIEKSALSNSGQLCSPTGYQAYTLQARRKSNTKEEEEEEEGSSVAETVTTD

SEQ ID NO: 204151 - protein, 84 aa, Glycine max
  Clone ID: PAT_MRT3847_26375C.1.pep
LSMMELREMVASLPVAAEGQAAQPSHVYLTGLLNQIKDLCPSWCLPVTPLGLVSVSSADAALASLQLLEHVRSGREARWLPRSS

SEQ ID NO: 204152 - protein, 238 aa, Glycine max
  unsure (1)..(238): unsure at all Xaa locations
  Clone ID: PAT_MRT3847_26376C.1.pep
AAAPVMLGFNNLLYSWGVAYLPISTSGILLSFQLAFTLILSAIIVKQKITFSNLNSMILITMSSAILAFNSSHEKSEGLTQKDYIIGFSCTIGASFLFSLYLPLMERIYERVYCYEMVMEMQIIMEIAATALVTGGMVYKGGFSEMREEAERVFDKGSTFYWLTVVSSVVTWQCCYMGTAGLVFLTSSVTGGVSANALLSLNVXQGGFVYHDAFNGFKIVATVLCIWSFCSYVYCMYF

SEQ ID NO: 204153 - protein, 138 aa, Glycine max
  Clone ID: PAT_MRT3847_26377C.1.pep
MMILVRPVMNRVARKCSHEQDVSPEIYICLTLAGVMLSGLVTHMIGLHSIFGGFVFGLTIPKGGEFANRMTRRIEDFVSTLFLPLYFAASGLKTDVTKLRSVVDWGLLLLVTSTASVGKILGTFAVAMMCMVLENKIK

SEQ ID NO: 204154 - protein, 58 aa, Glycine max
  unsure (1)..(58): unsure at all Xaa locations
  Clone ID: PAT_MRT3847_26378C.1.pep
HILSSAGSPHPRHRQPLEKGIYXEVDLRALNLIFDLTEVKESVFLSREKSSTFQSTKM

SEQ ID NO: 204155 - protein, 60 aa, Glycine max
  Clone ID: PAT_MRT3847_26379C.1.pep
VFNHLIQDLDKITFSFAMKLNLDNLKHLEKCKLYFCVKKNSKEMTPQNTRSKLEYSNSNL

SEQ ID NO: 204156 - protein, 111 aa, Glycine max
  Clone ID: PAT_MRT3847_2637C.1.pep
RVNPQMALENIKFNEDSNLPLNNSKTSKSLPSLCMTLCSPRSPPMNGFSSNPSMANNQKLPSSKPMSIQSPKPLPLKTSNNNLLSLATILGLPNPKFQSSVNTLVMPFPSL

SEQ ID NO: 204157 - protein, 47 aa, Glycine max
  unsure (1)..(47): unsure at all Xaa locations
  Clone ID: PAT_MRT3847_26380C.1.pep
FQAMDFGAAFQRGYWSLGPKFGREGFIGRASXGQELVQASLRLLAFP

SEQ ID NO: 204158 - protein, 52 aa, Glycine max
  Clone ID: PAT_MRT3847_26381C.1.pep
LSGAALVRLWLRIPSLSIMSISRTFSFHSYIPVSDCFYSVPIIPFYLPVSSV

SEQ ID NO: 204159 - protein, 47 aa, Glycine max
  Clone ID: PAT_MRT3847_26382C.1.pep
IYNSVSIDKDNVLKPGNCDRCWIKCRKVLEKRFKERIRVNYMVWKYF

SEQ ID NO: 204160 - protein, 93 aa, Glycine max
  unsure (1)..(93): unsure at all Xaa locations
  Clone ID: PAT_MRT3847_26383C.1.pep
MAAPPARARADYDDLTKLLLIVDRGVGKSXLXLRFFDGFFTSSFITFIGIDFKIRNLELXDGKRIXFQIWDSPVQERYSTFTTTYSRGAQGFF

SEQ ID NO: 204161 - protein, 67 aa, Glycine max
  Clone ID: PAT_MRT3847_26384C.1.pep
QLNKIHSFGDHWALFMAETVCPPHTKFKHLVDFTKLRSRSSSSYPPFLLNFCSHPLELRKLKFILMF

SEQ ID NO: 204162 - protein, 101 aa, Glycine max
  unsure (1)..(101): unsure at all Xaa locations
  Clone ID: PAT_MRT3847_26385C.1.pep
ALHTECQVLYFESWPSTVGANKPHLYNAGTNALCEHWRDHPSTELWIQQLPLLMLACXIDQDFQTELYPHSXAALASPEGCEECLVTLWEDTNVCSIQARR

SEQ ID NO: 204163 - protein, 94 aa, Glycine max
  Clone ID: PAT_MRT3847_26386C.1.pep
ITVYSFVANFLIISSPYLCDNHYSFFLNSYSGNINLHRESRIKGHMYVIIGSSVGASVLLLATIISCLYMRKGKRRYHEQGRILNSYLSCLFDI

SEQ ID NO: 204164 - protein, 79 aa, Glycine max
  Clone ID: PAT_MRT3847_26387C.1.pep
MPPLAPSEELQLGLIYFLGPIPKSRIPLSLQDLGALAIKANAALAAATPNYSYPILKPNSQKKFRTHPTLSNVSLVYSH

SEQ ID NO: 204165 - protein, 92 aa, Glycine max
  Clone ID: PAT_MRT3847_26388C.1.pep
KSIAYIYLMAGREDREKKAVFVYGGVEWYWVVSLVSGSCVVFKVFNFPSKHSSIHLLLLCHLLTHSCQLLPSKQQHQLAPNIGKNLTFSGRV

SEQ ID NO: 204166 - protein, 30 aa, Glycine max
  Clone ID: PAT_MRT3847_26389C.1.pep
YSLRLERALWNELKFIPYNSLKAYHLQYID

SEQ ID NO: 204167 - protein, 92 aa, Glycine max
  unsure (1)..(92): unsure at all Xaa locations
  Clone ID: PAT_MRT3847_2638C.1.pep
QFPKFGGAKLAPTPIRKAFKNGAFFGGGGPQRKKGKKAFSWAAPNLVAQGGPFLGNPDFPPKFXGEGPLNQPEAPPFFSQHPGGGKKKYPFF

SEQ ID NO: 204168 - protein, 68 aa, Glycine max
  Clone ID: PAT_MRT3847_26390C.1.pep
PFVPFGGSRLFFFFQLLLRSLLCFSFLLVNSLWFLPIVDMLPVIPPLPLSLFLLTVSSHGWKKGAFHV

SEQ ID NO: 204169 - protein, 58 aa, Glycine max
  Clone ID: PAT_MRT3847_26391C.1.pep
SGSAPVRHVGWVPGKSVPSPQGPSVCRRRCESEHVPIIVQIIVHRVGGGVNHDRRIHG

SEQ ID NO: 204170 - protein, 159 aa, Glycine max
  Clone ID: PAT_MRT3847_26392C.1.pep
MEGSDIYRASNSLRRSSTVWRNSGVEVFSRSSREEDDEEALKWAALEKLPTYNRLRKGLLTASHGVANEIDVSDLGTQERQKLLERLVKVAEEDNERFLLKLKERIDRVGLDIPTIEVRYEHLNIEAEAFVGSRALPSFINSVTNVVEGFFNLLHISTS

SEQ ID NO: 204171 - protein, 135 aa, Glycine max
  Clone ID: PAT_MRT3847_26393C.1.pep
MATTACFIIVSRNDIPIYEAEVGVAAKREDAAQLHQFILHAALDIVQDLAWTTSAMYLKSVDRFNELVVSVYVTAGHTRLMLLHDSRNDDGIKSFFQEVHELYIKTLLNPLYLPGSRITSSHFDTKVRALARKYL

SEQ ID NO: 204172 - protein, 137 aa, Glycine max
  Clone ID: PAT_MRT3847_26394C.1.pep
VNRPVRRRHGKLLEEGASGFLQKKLCDETQEPIKTETKGDWDLFNKIVSDGSGIDASFGSKHWVSVYLASTPQQAALMGLKFPGVDEVEEIDDVDGNSTDPFIAAAIANERELDLSDEQRRQFKKVKEEDDAIVDRK

SEQ ID NO: 204173 - protein, 52 aa, Glycine max
  Clone ID: PAT_MRT3847_26395C.1.pep
MNVVATHTTCLEGRELVAPDQDRASGEMLLIKKGGRYSQVLEQWSPPFTTST

SEQ ID NO: 204174 - protein, 102 aa, Glycine max
  Clone ID: PAT_MRT3847_26396C.1.pep
FKKILKKKKKKEKKKNLRELFVDSSQIRAFFSDVADFVFGWLGLLLSCVFPSFWSVIFACSPAFSFIIGPSISTLWPKRICSLRLFLPWVSSTFLFSKNLGW

SEQ ID NO: 204175 - protein, 42 aa, Glycine max
  Clone ID: PAT_MRT3847_26397C.1.pep
SYALCLKKKKKKKKKKKKKKKKKKKKKKKKKKKKKKKKKKKK

SEQ ID NO: 204176 - protein, 54 aa, Glycine max
  Clone ID: PAT_MRT3847_26398C.1.pep
VSILPKEFIINPADSHLIDRTLQEGALDKNNYIFKSLIFKLAYGREDHIFQALN

SEQ ID NO: 204177 - protein, 82 aa, Glycine max
  Clone ID: PAT_MRT3847_26399C.1.pep
MAGASNVQFAMDIEEWELGDSEHNPPPHLLAEEYYKEYFVTFTNHQEKVDMTGETRKRKCTRMAMALRDKANYGNPKISGTG

SEQ ID NO: 204178 - protein, 66 aa, Glycine max
  Clone ID: PAT_MRT3847_2639C.1.pep
GPKIRPLKTLNYLTTIYFFFWPRIGQIFCLKGGFCCWGNRKFGFLSTPIHLKKKILDKTILDKLGI

SEQ ID NO: 204179 - protein, 97 aa, Glycine max
  unsure (1)..(97): unsure at all Xaa locations
  Clone ID: PAT_MRT3847_263C.1.pep
ALFRLQGWGGGGGLXXYRPGDXSLSLLXVISCIVAQLAYLNALRFGLKRVFFGGFFLWGGCXPWLXFSFALHFWSNGAAHALFLRPDGFLGAFGAFL

SEQ ID NO: 204180 - protein, 56 aa, Glycine max
  Clone ID: PAT_MRT3847_26400C.1.pep
VKVAVNISEKELKSNSFYSKSLQSSKTNSYTLIRHRIRFPSPSVTTIPWSYNPMLL

SEQ ID NO: 204181 - protein, 100 aa, Glycine max
  Clone ID: PAT_MRT3847_26401C.1.pep
FSQFEGFGFNFLSGDLGLSAIWTSLREARGEIWTLLREPRPNPSWLLLMPLLSIHINKLVYCSIFLPILVFYGKMMKACVVYEGLSFSSIFLLSMHLIEL

SEQ ID NO: 204182 - protein, 88 aa, Glycine max
  unsure (1)..(88): unsure at all Xaa locations
  Clone ID: PAT_MRT3847_26402C.1.pep
PPSVESCPYGPNLPIFNWHHXDASAAPLCFVAEPLYVFAPALAIAAPPWLDYVLRIGFICRRCHAILSAEPEGPGPSPRRALSAAPDL

SEQ ID NO: 204183 - protein, 53 aa, Glycine max
  Clone ID: PAT_MRT3847_26403C.1.pep
FFLLAYRLHDISVVADERESTCTKFPVLPLLSETEETNKAWRCHRSYSAKPNR

SEQ ID NO: 204184 - protein, 108 aa, Glycine max
  Clone ID: PAT_MRT3847_26405C.1.pep
LTLSMAGAQFLNLFNSSSRSSLVKPSRPLLYNPIKNYGQASKGKHSRLMEERAPSTAEEFERVAEEKAKEAQKGVASQSLGKAIDGAEEASIGKSKVESVKNRYKGHE

SEQ ID NO: 204185 - protein, 75 aa, Glycine max
  unsure (1)..(75): unsure at all Xaa locations
  Clone ID: PAT_MRT3847_26406C.1.pep
MATTGAYIAYYSTYGHVEKGAEEIKKGSXSDERVEAELWHVPETLSEDVLGKMGAPAESDAPIITPNELPEADGL

SEQ ID NO: 204186 - protein, 147 aa, Glycine max
  unsure (1)..(147): unsure at all Xaa locations
  Clone ID: PAT_MRT3847_26407C.1.pep
KQRPRRAPDRNPRDDPRDRLPSNKXXEXGGNGEQKPPAPPPQEKRXGTAPAPXKEENTSPQRAEXEPKKKEGRTPRQRRSQRDTEAPXXEPPXPDTAQGPPQERXDRGPHREAKNRPRSRRKRGQKEHTQRERGTPHRSTTQGQEKK

SEQ ID NO: 204187 - protein, 69 aa, Glycine max
  Clone ID: PAT_MRT3847_26408C.1.pep
QIREGHYLNAAIHDSMKLFPPIQFYSKFATDDDLLPYGTFFIKGTMVTYHPYSIGRMENILGPYCLDFM

SEQ ID NO: 204188 - protein, 47 aa, Glycine max
  Clone ID: PAT_MRT3847_26409C.1.pep
CSLDSLRTNQFPSTNSIILIIPQFNYANITTFRFFLFPQNILLNTLN

SEQ ID NO: 204189 - protein, 72 aa, Glycine max
  unsure (1)..(72): unsure at all Xaa locations
  Clone ID: PAT_MRT3847_2640C.1.pep
MEVTEQAVSMRANTFPERQPIGTAAQSQDDGKDYHEPXPVPLVDATVFTSWSFYRTRIVEIVATYLFLYISV

SEQ ID NO: 204190 - protein, 80 aa, Glycine max
  Clone ID: PAT_MRT3847_26410C.1.pep
PPPLKENRKFVPGTEGAPISGGGEKSGRLGPRNQAFFPREGFGEYTPGGGRASFLNGRGGGFKNLAGEFRGGETRGQDKL

SEQ ID NO: 204191 - protein, 116 aa, Glycine max
  unsure (1)..(116): unsure at all Xaa locations
  Clone ID: PAT_MRT3847_26411C.1.pep
MAAPQARARADYDYLIKLYLIDDSEVRTSSLLVRVSDGSFTTSSITTIGIDSKIRTIELDGKRIKLQMWDTAXHERLTAITTAYYRDAIGILLVDDVSDESXFNIIRNRIRTLWQL

SEQ ID NO: 204192 - protein, 49 aa, Glycine max
  Clone ID: PAT_MRT3847_26412C.1.pep
LELKCKPKRNFQYPTKTTPQDRTAHNPEARPSRHRHDPANTAQQQLGRH

SEQ ID NO: 204193 - protein, 52 aa, Glycine max
  Clone ID: PAT_MRT3847_26413C.1.pep
EFKCEIGVNSTPVVHVQFNNCHNRDNHHQTRCKRTTQFSLQTSLTQVCICTI

SEQ ID NO: 204194 - protein, 83 aa, Glycine max
  Clone ID: PAT_MRT3847_26414C.1.pep
KKEWENSEVASSDEEKTEKKKNKNKIEDGSPELDKSEKKKKKKKDKAAAAAAEISNGKVDDSNADKSEKKKNKKKKNKDAKEE

SEQ ID NO: 204195 - protein, 107 aa, Glycine max
  unsure (1)..(107): unsure at all Xaa locations
  Clone ID: PAT_MRT3847_26415C.1.pep
LTMVDMPITPTHDYDPLTAHRHKQAAMLHRRSIAAPEPAHTRXALTLSDIHRIDVALLWTADITWENVHADATRPLLQVNIEXPTRNCLIGVDHAELYAACELTVLG

SEQ ID NO: 204196 - protein, 54 aa, Glycine max
  Clone ID: PAT_MRT3847_26416C.1.pep
HVTPHSAKDPYVIVAPISSVTMASPWVVSLVPLAKSLLFRMYHWRTLLSSSRSR

SEQ ID NO: 204197 - protein, 62 aa, Glycine max
  Clone ID: PAT_MRT3847_26417C.1.pep
MDWTLNIPLFNAHLHAYKDNLIETRESHVYDGTLLKVTSKTRTRTHQSTNTDTTSCDSKTIK

SEQ ID NO: 204198 - protein, 207 aa, Glycine max
  Clone ID: PAT_MRT3847_26418C.1.pep
LSLLFGNFVTSVVLFRLQIIIYLHYLDENKSLILKIVESQNSGKLSECAENQSRLQRNLMYLAAIADSQPQPSPMPGQYPSSGMMQQGAQYMQAQQQAQQMTQQQLMAARSSLLYAQQPYSALQQQQAMHSALGSSSGLHMLQSEGSNVNVGGGFPDFVRGGSSTGEGLHSGGRGIIGSSKQEMGGSSEGRGEGGENLYLKVADDGN

SEQ ID NO: 204199 - protein, 219 aa, Glycine max
  Clone ID: PAT_MRT3847_26419C.1.pep
MQQHLMQMQPMMAAYYPNNVTTDHIQQYLDENKSLILKIVESQNSGKLSECAENQARLQRNLMYLAAIADSQPQPPTMPGQYPPSGMMQQGAHYMQAQQQTQQMSPQQLMAARSSLLYAQQPYSALQQQQAMHSALGSSSGLHMLQSEGSNVNVGSGSGSGGGFPDFVRGVAAAPQGRVCTVVEGVSLEVASRKWGVQVKAPVKGVKTSTSKLLMMETS

SEQ ID NO: 204200 - protein, 42 aa, Glycine max
  Clone ID: PAT_MRT3847_2641C.1.pep
PIKKPGPPIKVAPSKVFLAPNQCSSYKKGQVLHPKGGTVVNG

SEQ ID NO: 204201 - protein, 49 aa, Glycine max
  Clone ID: PAT_MRT3847_26420C.1.pep
TLTLARLRDLRCFVMCTRLQERATVILPGHYDNCTGTEIKPLLRYSFLG

SEQ ID NO: 204202 - protein, 300 aa, Glycine max
  Clone ID: PAT_MRT3847_26421C.1.pep
MGSNDNFGDGIFKTRPHLADVTNLPAKRSFSLVSGDGGDLQFTKKIRLGVENLAKGKSQMQFGAHAYLNNEVLLQPKEKHTILLPFSDDTLHSFQNPSLTVEGMEEQNPLDLENFKFGKEGDGIVATDRAVESGGKDICDVENLGSPKCGAEQMPTISVSNDSNFLGLKPCSSSVTEAADLKSCTCSFCSKAGYIWSDLHYQDAKGRLSAIKKSQKEAKMIIQKFSGLENTVMHDQHRSEESLKLELSLVHQWKSLFLQMQNMYTQESSQLETSFETLKNLRENCKTDLELNDNSHHQNQ

SEQ ID NO: 204203 - protein, 60 aa, Glycine max
  unsure (1)..(60): unsure at all Xaa locations
  Clone ID: PAT_MRT3847_26422C.1.pep
GDNDGGRKHHVVGWKAMIMPXHSGGVGMCDLTIMNQACLMKIGWAFRMGDGSLWADVLRG

SEQ ID NO: 204204 - protein, 26 aa, Glycine max
  unsure (1)..(26): unsure at all Xaa locations
  Clone ID: PAT_MRT3847_26423C.1.pep
IMFYIIXXXVSHLIEYYTEVNRKLFI

SEQ ID NO: 204205 - protein, 80 aa, Glycine max
  Clone ID: PAT_MRT3847_26424C.1.pep
STGGKRPPKGVPTLLQHSQSKPSKTYFWAYFLIGEEGFQGKWWIHLWWTYYGALFGFIYHGEALNFNPNHHGLLKPDLVL

SEQ ID NO: 204206 - protein, 99 aa, Glycine max
  unsure (1)..(99): unsure at all Xaa locations
  Clone ID: PAT_MRT3847_26425C.1.pep
TSXARVRKLGIRLEXAGXIXIXTMXKXRQGXXVXXYVXGXXXGYXRSXSXXYXXXXXIQXXXXNSXVRXXXELVKAQXFXVXRXVRXRTXXGLLXXXXG

SEQ ID NO: 204207 - protein, 49 aa, Glycine max
  unsure (1)..(49): unsure at all Xaa locations
  Clone ID: PAT_MRT3847_26426C.1.pep
GGSAGKLTVKXQSKGDAQPKPDDLNIGRVXFDALFKPVEACLLDNPQSM

SEQ ID NO: 204208 - protein, 69 aa, Glycine max
  Clone ID: PAT_MRT3847_26427C.1.pep
SNFLFYLTRKNPQLPCFSFQTGSFIYIHKLSNILYKPKLMSIKRIQARTSDLFLIIYPIKKHRFISKSP

SEQ ID NO: 204209 - protein, 128 aa, Glycine max
  unsure (1)..(128): unsure at all Xaa locations
  Clone ID: PAT_MRT3847_26428C.1.pep
SHARVRKLGIRLEGAVSLQDGEVIGVNTMKVTAGISFAIPSDRLREFLHRGEKKNSXFGISGSQRRYIGVMMLTLTPSILAELQLREPXPDVQHGVLNHKDILGLPAHRAGLRPADVILAIGEKMIQN

SEQ ID NO: 204210 - protein, 138 aa, Glycine max
  Clone ID: PAT_MRT3847_26429C.1.pep
RKQKARVTERQRRQRIADNLKALHELLPNPAEGSQAYVLDDIIDYVKYLQLQIKEQSGSRLLQADSTAIPLVFHEGYGHYINQKMLNEPLEEIMGKLVEDDSAAAVQLLESKGLFLLPMALVDELSEAVQMFGGSALV

SEQ ID NO: 204211 - protein, 67 aa, Glycine max
  Clone ID: PAT_MRT3847_2642C.1.pep
QSKKKKNLRRGLMIKFSNEICPPSWMIPIINSYNFFKGIGSISYSWLFPYAPGLFHDFFTMTIKLFS

SEQ ID NO: 204212 - protein, 270 aa, Glycine max
  unsure (1)..(270): unsure at all Xaa locations
  Clone ID: PAT_MRT3847_26430C.1.pep
MLALTDSPLLIAKTFEATKIPTSTRGTVVCAAKGPRPRYPRVWKTHKKIGTISKAAKLVKSIKELSNVKEEVYGALDSYVAWELEFPLITVKKALKTLEFEQDWKRVIQITKWMLSKGQGKTMGSYFTLLNALVEDDRLDEAEELWTKLLMQYMESLPRRFFDKMISIYHKRGMHEKMFEIFADMEXELCLLGMLDKYSMIGDAFKERRREYKYLKGNAKKVKVQWESRYVRGKRVKVKVEVQNSQVNTYIERHGNVEPNSDLNKDYKIV

SEQ ID NO: 204213 - protein, 400 aa, Glycine max
  Clone ID: PAT_MRT3847_26431C.1.pep
MPLSAKISSLQRQIQRLRIVLVLLLLLAATVTACYTSLFSFGDSLTDTGNLYFISPRQSPDCLLPPYGQTHFHRPNGRCSDGRLILDFLAESLGLPYVKPYLGFKNGAVKRGNIEQGVNFAVAGATALDRGFFEEKGFAVDVTANFSLGVQLDWFKELLPSLCNSSSSCKKVIGSSLFIVGEIGGNDYGYPLSETTAFGDLVTYIPQVISVITSAIRELIDLGAVTFMVPGSLPLGCNPAYLTIFATIDKEEYDQAGCLKWLNTFYEYHNELLQIEINRLRVLYPLTNIIYADYFNAALEFYNSPEQFGFGGNVLKVCCGGGGPYNYNETAMCGDAGVVACDDPSQYVSWDGYHLTEAAYRWMTKGLLDGPYTIPKFNVSCFIGETIRDFNNYAMKYKSM

SEQ ID NO: 204214 - protein, 278 aa, Glycine max
  unsure (1)..(278): unsure at all Xaa locations
  Clone ID: PAT_MRT3847_26432C.1.pep
FSSSGKRKKKTLPIIVIVVPIVVSLVLLALRCCCFLRRKETKNQHDILKESFGNDSTTLETLRFELAKIEAATNRFAKENMIGKGGFGEVYRGILSDGKEIAVKRLTGSSRQGAVEFRNEVQVIAKLQHRNLVRLQGFCLEDDEKILIYEYVPNKSLDYFLLGTQHQNLLSWSDRQKIIIGIARGILYLHEDSCLKIIHRDLKPSNVLLDSNMNPKISDFGMARIVVADQXLEKGPGRIVGTYGYMSPEYAMHGQFSVKSDVFSFGVMVLEIINGKRK

SEQ ID NO: 204215 - protein, 87 aa, Glycine max
  Clone ID: PAT_MRT3847_26433C.1.pep
STTGGPPFSIVDTHLNNISYSKFFVPFLNGSVPFGDLDVSALKQKLLVISWAYFKKMPLRPFVKSITSKNTGAAVIFRCFFIFFENS

SEQ ID NO: 204216 - protein, 404 aa, Glycine max
  Clone ID: PAT_MRT3847_26434C.1.pep
LERMKVENHRLKNMLDQVNNNYNALQTHLVSLMKDQMDKEDDKQQPHQVFDGKLEEKQAGNGGGALVPRQFMDLGLATNADTNETSHSHSSSVIRSQDSPPTNNTEVASKKNGGASDEGLVFDQDKKEFGRGIEREDSPSDQGVAANNNVPKFSPPRNVDQAEATMRKARVSVRARSEAPMITDGCQWRKYGQKMAKGNPCPRAYYRCTMAAGCPVSKQVQRCAEDRTILITTYEGNHNHPLPPAAMAMAQTTSSAARMLLSGSMSSADGLMNASFLTRTLLPCSSSMATISASAPFPTVTLDLTQSPNPLQFPKQPSQFQIPFPGVPQNFANSQASLLPQIFGQALYNQSKFSGLQMSQDSDPSQLSNQSQRPPPHLADTVSAAIAADPNFTAALAAAITSII

SEQ ID NO: 204217 - protein, 56 aa, Glycine max
  Clone ID: PAT_MRT3847_26435C.1.pep
KNLVVVGAHALSSILLGAVKKDKEGSISYLPPNEESLPLDNHHIAFILILYRVREE

SEQ ID NO: 204218 - protein, 171 aa, Glycine max
  unsure (1)..(171): unsure at all Xaa locations
  Clone ID: PAT_MRT3847_26436C.1.pep
VVVYFDDILIYITSLDLHVDHLKSVLCMLREEQLYVNLEKRIFCTNHVVFLGFVVSSKGVQVDEEKVRAIQEWPTXKSVTEVKSFHGSASFYRRFLKDFSTLETPLTXVLKKNVGFKWGXKQEEAFNVLKQKLTNAPILALPNFXKSFEIECDASNVRDLLSSSRSRTDAW

SEQ ID NO: 204219 - protein, 55 aa, Glycine max
  Clone ID: PAT_MRT3847_26437C.1.pep
PIKSNLNLYTPSTLVYPTLNTNFDVYSSTISNHSFPSNLSYFISFFHHRIIYPNL

SEQ ID NO: 204220 - protein, 134 aa, Glycine max
  unsure (1)..(134): unsure at all Xaa locations
  Clone ID: PAT_MRT3847_26438C.1.pep
ASLITLWRITFNYTYHAIHVNIWALRSVALPREMLARPPIFWLVAMGIRCVGLPRAQYGGLYIITHHPTXAVLPRGSLALLCPHCGGTSSWLRLRHYINIPLWWFPVLLFNYVHTVYFLLCVFRFCCLFCGDCL

SEQ ID NO: 204221 - protein, 107 aa, Glycine max
  Clone ID: PAT_MRT3847_26439C.1.pep
PKLEELNLSRSGVDDEMLSVISKCCRGLLHLDLENCSGVTANGVRQVVGKCTRLREINLGSCDEVGANVVAWMVFSRPSLRRIMAPPSFDLSDGQKELLLRHGCLVC

SEQ ID NO: 204222 - protein, 74 aa, Glycine max
  Clone ID: PAT_MRT3847_2643C.1.pep
WEDENMGLLISTMSSTVVHVMSLVFVQSPKSSLWNYLPMKYLTSTISFSLIILISVSEMINSKACCAIKPHLWH

SEQ ID NO: 204223 - protein, 52 aa, Glycine max
  Clone ID: PAT_MRT3847_26440C.1.pep
AMRRLLGTPPIYQGKKGGSMKAANPFATNDCVNIKAASLFLAKNCCKSFKVS

SEQ ID NO: 204224 - protein, 63 aa, Glycine max
  Clone ID: PAT_MRT3847_26441C.1.pep
VCPNFFCSSIGCGFFSHHLSALAGGAVFSPVVFVRPVPLWSRWCCRGWIQRRFSMFTKGHNLL

SEQ ID NO: 204225 - protein, 46 aa, Glycine max
  Clone ID: PAT_MRT3847_26442C.1.pep
KEGDQNALKFIIFTFYSLKPWLVVATIPCIYIRANQIEIKYLNLYF

SEQ ID NO: 204226 - protein, 54 aa, Glycine max
  Clone ID: PAT_MRT3847_26443C.1.pep
KLCCSSHSYRFCSHGVSSMSSLYIEQKSCFIGDPRVTLGRDLGYATKNRSPKLI

SEQ ID NO: 204227 - protein, 35 aa, Glycine max
  Clone ID: PAT_MRT3847_26444C.1.pep
PMQVVGAVGFQNKRFEIPEDVNPVVAQIIRDCWQT

SEQ ID NO: 204228 - protein, 55 aa, Glycine max
  Clone ID: PAT_MRT3847_26445C.1.pep
PAPCHILKCPHMSISSPASMVASPSATRHESFTADAFSPWPLEVVLTLPCYIRGV

SEQ ID NO: 204229 - protein, 98 aa, Glycine max
  Clone ID: PAT_MRT3847_26446C.1.pep
IVVFPRPLKYFLSPALGPSKGGTPICCGRSPKPNLHPRDQEGLNLPFQFLTVPLIQIQTLTRTRLKPPKDPKENLVRDALPTHRLIRPSPKTPLALVF

SEQ ID NO: 204230 - protein, 83 aa, Glycine max
  Clone ID: PAT_MRT3847_26447C.1.pep
VKVVGWVLEIEVEGIGVKSRRSSGVKKDIFVCKNVRWSEMVKVILHIVVRVYRENGRYGSIGIKVSGPRRVDGCCCETNRKMR

SEQ ID NO: 204231 - protein, 87 aa, Glycine max
  unsure (1)..(87): unsure at all Xaa locations
  Clone ID: PAT_MRT3847_26448C.1.pep
ARSRYCFASLFFFFFFLKELEPLFKQXGTNGGYVKXKRXXRLNTAANVKRFEDSQITIPWSGGRLXSAKDASAKSQRSHSNWANLTI

SEQ ID NO: 204232 - protein, 59 aa, Glycine max
  Clone ID: PAT_MRT3847_26449C.1.pep
REFFGFLALTKKKGCFYIKRGFFFAPHLGQPLGGFLYLLNQTRFNWPPQENICWKRGAP

SEQ ID NO: 204233 - protein, 74 aa, Glycine max
  Clone ID: PAT_MRT3847_2644C.1.pep
MGYIGAHGVAALHRYKYSGVDHSYVAKYVLQPFWSRFVNFFPLWMPSYMITLMGFMVLLVSALLGYIYSPQLDT

SEQ ID NO: 204234 - protein, 48 aa, Glycine max
  Clone ID: PAT_MRT3847_26450C.1.pep
DSILSRSHLLLLFLFLLLRCLFYFSFPFNLLVFSFWELGLCYCCSSKS

SEQ ID NO: 204235 - protein, 74 aa, Glycine max
  Clone ID: PAT_MRT3847_26451C.1.pep
IKTTSINHSFILFWYLTSKGDHIRGHQTLYINSSDTRHNRGNNSLTHKTKTAQNNNPFEKNKKRVESKKHHNQI

SEQ ID NO: 204236 - protein, 57 aa, Glycine max
  Clone ID: PAT_MRT3847_26452C.1.pep
PRKLLDFHRRVIKSRKSISLIGRVWRASKSFGESRSRIWRPFNEYRFIPRSPSRPNS

SEQ ID NO: 204237 - protein, 90 aa, Glycine max
  Clone ID: PAT_MRT3847_26453C.1.pep
VIWNQIWAKHWANQKNWSELMLFTRICVIPFPPIRPYPFRFYVLVVFGQKLWPSDHKINYILIKKKKKGRPGRSELSEPGHYGDYSRTGT

SEQ ID NO: 204238 - protein, 182 aa, Glycine max
  Clone ID: PAT_MRT3847_26454C.1.pep
MAVLSHVCSCISHSTLFTSTAPSSSLSVSPTTFLQLSSFSTESTWNNIRRTNLCSNVNSLRYSGKTLLRHRHKYYNPCSSMASSLDDSGKRSKRVWIWTSNKQVMTAAVERGWNTFVFPSHHRQLAHDWSSIAVICPLFVNEGEVLDGQNKRVATIFDVSTPEELEELRPENEQAENIVVNL

SEQ ID NO: 204239 - protein, 169 aa, Glycine max
  unsure (1)..(169): unsure at all Xaa locations
  Clone ID: PAT_MRT3847_26455C.1.pep
MVCSLVSSLRVSPPLRSPASIDSYYLTPNFPSDTVFDSXPTHTGRNFLHAKKGCSVNFEFLNXVITSKCKGPRYPPKECCGAFKEFACPYADVLNDLTNECASTMFSYINLYGKYPPGLFSSECREGKFGLACPAVPPSAVSADDTANQAVHCPSLLLMLIACFLILLF

SEQ ID NO: 204240 - protein, 122 aa, Glycine max
  Clone ID: PAT_MRT3847_26456C.1.pep
MASLKVACVVAVMCMVVVAMSAAPMAQAAITCGQVAGDMSPCFSYLRSGGKPSQACCNGVKSLSSAAKTTADRQGACSCLKNLANNMGQSLNAGNAASLPGKCGVNIPYKISTSTNCATIKF

SEQ ID NO: 204241 - protein, 183 aa, Glycine max
  Clone ID: PAT_MRT3847_26457C.1.pep
MVFSFNQRFWVSSSLLLLAVLSVSSLTPTFLSETVFDSQPAHTGRNLLQAKKGCSVNFEFLNYTPRVRKCKGPRYPPKECCGAFKEFACPYADVLNDLTNECASTMFSYINLYGKYPPGLFSSECREGKFGLACPAVPPSAVSADDTANQVRAGSRSRLYPANAVHCPSLLLMLIACFLILLF

SEQ ID NO: 204242 - protein, 58 aa, Glycine max
  Clone ID: PAT_MRT3847_26458C.1.pep
QYCHMRFASREHLCLIAQSSSTLGSAVTLIATTSLSSSPTSLPATPRSSARFALAKRA

SEQ ID NO: 204243 - protein, 53 aa, Glycine max
  Clone ID: PAT_MRT3847_26459C.1.pep
NTTWSVHITPHQQRRMQIFRSASWLLTDVELLKTFLQPSKTTHLISHKAIIIC

SEQ ID NO: 204244 - protein, 82 aa, Glycine max
  Clone ID: PAT_MRT3847_2645C.1.pep
SPWGSPPFSLLAYFQICPPRCPFQKLAHFNFQMGPPLYRPLNPALFVGFPPLGLFFFHPLSPPPFHFLTFFFCQFFGFLFKT

SEQ ID NO: 204245 - protein, 54 aa, Glycine max
  Clone ID: PAT_MRT3847_26460C.1.pep
MGAPLDFFLKALGAFFPHSLIFKGLLMPKKKKKKKKKKKKKKKQKKKKKKKKKK

SEQ ID NO: 204246 - protein, 82 aa, Glycine max
  unsure (1)..(82): unsure at all Xaa locations
  Clone ID: PAT_MRT3847_26461C.1.pep
CIRGCYFSQKLADMAADSTVVDYGDENLEPPIIFAEDAVERSSFFEVPAFQYPKHDGDISKLNSXAYHNILSGDMKLVSQYL

SEQ ID NO: 204247 - protein, 69 aa, Glycine max
  Clone ID: PAT_MRT3847_26462C.1.pep
IFAGRMSGTPVLIGMIPPAYFLGSSLATLWANSAGQIVAIPRSVVNSKSYVHLGPGVLTKGKRPKRIPH

SEQ ID NO: 204248 - protein, 110 aa, Glycine max
  Clone ID: PAT_MRT3847_26463C.1.pep
GAGFFKKVLKGEHPPSRVAPLVSRLGAPTPCCLGLQSKKVVPPFRPLWAPTCTPPPPKEGFNVPFDQGAKTQTPGFGFSPLLKGDQKTSHLVSPRSMADPFINGGAGLFF

SEQ ID NO: 204249 - protein, 38 aa, Glycine max
  Clone ID: PAT_MRT3847_26464C.1.pep
VSERLNRPGSIRMKLTLTHFEGRKRFTSLWILRWLIRY

SEQ ID NO: 204250 - protein, 40 aa, Glycine max
  Clone ID: PAT_MRT3847_26465C.1.pep
ILIYFMGTDSIPDHQLRCHTLRLVLQFKITSTIILYIIEL

SEQ ID NO: 204251 - protein, 79 aa, Glycine max
  unsure (1)..(79): unsure at all Xaa locations
  Clone ID: PAT_MRT3847_26466C.1.pep
RYGMHMMDICEGKPIFFSLGWSDDMDTLLSDRLPIIRVMGKKSTQGGCRXAQPCSSRRSISHYLAFYYSQGSHPECLLV

SEQ ID NO: 204252 - protein, 92 aa, Glycine max
  Clone ID: PAT_MRT3847_26467C.1.pep
FAETPTALVNNMFARPVQFAGSLFFFLFCSTLISLFAGILCSSLASKPSNSSTTSSCSYPLLLLLHLLLLLLRFGFAFPSLPPCSLLLLLLR

SEQ ID NO: 204253 - protein, 140 aa, Glycine max
  unsure (1)..(140): unsure at all Xaa locations
  Clone ID: PAT_MRT3847_26468C.1.pep
HXQNKXNTPXXKXTXDXXXXXXXXXXXNNXNHHXXQXEXXRTXQXAXXXXXXKIXXHPXAHXXTXXTPXSRTTXXXXTSXXYNXSXKLXXXXTXXXXSSXXXXTTTXXXXXXHXQXNXHXYTXXXXQRHXNVXXXXXTHL

SEQ ID NO: 204254 - protein, 64 aa, Glycine max
  Clone ID: PAT_MRT3847_26469C.1.pep
NPARPTRPRSRNSLFSQLSFGGFHFLGVARCTPWRKKFPRVRVLCPLDLGDQVDRPWLVLKIPT

SEQ ID NO: 204255 - protein, 66 aa, Glycine max
  Clone ID: PAT_MRT3847_2646C.1.pep
VLDEPLQRSILSAEADVALLVVVFGTSSIVRGERLSRRQPRRCPAADVGTIYTVSASLVARVRVRV

SEQ ID NO: 204256 - protein, 77 aa, Glycine max
  unsure (1)..(77): unsure at all Xaa locations
  Clone ID: PAT_MRT3847_26470C.1.pep
GKGQRGKNPLGGNPGPPKGAGPPHKGGAGNLSPKKKKGPKKKPPLGKGAXGFFNXTDLKGPEKGQKGNPGPASPTFV

SEQ ID NO: 204257 - protein, 102 aa, Glycine max
  Clone ID: PAT_MRT3847_26471C.1.pep
WEKKDENIQFHQYLPKGVSYYGMLRNSKYCLCPTGYEVASPTVVEAINTGSVPVLIYDHYVPPFSDVFNYICPPVTVLLQKIPTGKTLLVTISLGRLLHVQT

SEQ ID NO: 204258 - protein, 139 aa, Glycine max
  Clone ID: PAT_MRT3847_26472C.1.pep
MDIISQLQEQVNLIAHLAFNTVGTLQRDAPPNRLSPNYPEPPAHATEDGSNFSEQPKLMSTTLVKAAKQFDALVAALPISESGEEAQLKRISELQAENDAIGLELQKQLEAAEKELNQVQELFRQASDNCLNLKKPDDS

SEQ ID NO: 204259 - protein, 54 aa, Glycine max
  Clone ID: PAT_MRT3847_26473C.1.pep
VMSHYYYVTLVELRIRLQILEVPSSQSCITTSPGSECSLSELFKDIEKTKTHLS

SEQ ID NO: 204260 - protein, 147 aa, Glycine max
  unsure (1)..(147): unsure at all Xaa locations
  Clone ID: PAT_MRT3847_26474C.1.pep
QKKNPPPPKKKKGPPAPPNQEKTPLLKGGPESKQKGSFGEPNPILWPQKTTLGRGKPHKAPIVGGKKKKNRGEHTGXPNGIPKTRGNRGKRKKFLPPQKPQRGPQKFSKKPLPPLALRKDKNSPPPQKKPPGWGNPHRPPLANKKPM

SEQ ID NO: 204261 - protein, 114 aa, Glycine max
  Clone ID: PAT_MRT3847_26475C.1.pep
KSRFQESPFEKQNINWGGKKTKRGPWGDQPPKFGLSKKKGRGGFGPPGKTYPRGVDPSRSWCWRQQFNKGLCPNFNKFFDKPGHISGKKIPELGGAVFGSLINGLNPSFDQTPN

SEQ ID NO: 204262 - protein, 248 aa, Glycine max
  unsure (1)..(248): unsure at all Xaa locations
  Clone ID: PAT_MRT3847_26476C.1.pep
MTTPPSSSSASQSQFAYSNPSSSSSYFPVPFHLQQPATTHYAAPYVAAPSVQIPAPXSSAPVAPAPVPGVYSAVPQYQAQQLFERDAQIITPEALENVKAAIASSDVEHKTDAKKKAVPRKAAGHAWEDPILAEWPEDDYRLFCGDLGNEVNDDVLSKAFSRFPSFNMARVVRDKRTGKTKGYGFVSFANPSDLAGALKEMNGKYVGNRPIKLRKSKWRERTDYEALEKQKNHIQKKPKMARKGVLHK

SEQ ID NO: 204263 - protein, 62 aa, Glycine max
  Clone ID: PAT_MRT3847_26477C.1.pep
KKGVGPPSFFQPPIGGLAPPKEGAVGYPRKGDYPFKTPLSAIPFEGGGKPFFDSSKFQIVLY

SEQ ID NO: 204264 - protein, 142 aa, Glycine max
  unsure (1)..(142): unsure at all Xaa locations
  Clone ID: PAT_MRT3847_26478C.1.pep
GRVGYILPSLVTAEIKYKRNLSNIDINGLLYDGXYKVWTKHEKSLALTEEEKKEVIRNRGIPAEVVAQRAHEYEKHVAHESLKDQIPSCDKMYSTKVNKFAKSMNLIQSGVGDLKLTTEGKLYEVKHIPECNIRAGEDDVFQ

SEQ ID NO: 204265 - protein, 152 aa, Glycine max
  unsure (1)..(152): unsure at all Xaa locations
  Clone ID: PAT_MRT3847_26479C.1.pep
RFIEIEENWDKVKTIFLPTEKPLTPEACAPLIAILPLEIRGTIGDFIMGVFAVFKDLDFSFLEMNPFTLVNEKPYPLDMRGELDDTAAFKNFNXTSASLKFTILNPKGRIWTMVAGGGASVIYADTVGDLGYASELGNYAEYSGAPNEEEVL

SEQ ID NO: 204266 - protein, 75 aa, Glycine max
  Clone ID: PAT_MRT3847_2647C.1.pep
GAFHQIGERWSPCQISYATKKFSRLLSSRWDEEVNFPPVIETTPSTMTARTDFFTLRGIERTLCHEFWEQVVNRK

SEQ ID NO: 204267 - protein, 63 aa, Glycine max
  Clone ID: PAT_MRT3847_26480C.1.pep
SRFRKEGQRSLPGDKVSRAFTTTDERLDCSEHSAYDAFFGGFLQYASSITLLYEDILYMLLRT

SEQ ID NO: 204268 - protein, 423 aa, Glycine max
  Clone ID: PAT_MRT3847_26481C.1.pep
MARKKIREYHSKRLLKEHLKRLASIDLQILSAQVTESTDFTELTDQHPWLSSTRLVVKPDMLFGKRGKSGLVALNLDIAQVAEFVKARLGVEVEMGGCKAPITTFIVEPFVPHDQEFYLSIVSERLGSTISFSECGGIEIEENWDKVKTIFLPTEKPLTPEACAPLIAILPLEIRGTIGDFIMGVFAVFKDLDFSFLEMNPFTLVNEKPYPLDMRGELDDTAAFKNFNKWGNIEFPLPFGRILSPTESFIHSLDDKTSASLKFTILNPKGRIWTMVAGGGASVIYADTVGDLGYASELGNYAEYSGAPNEEEVLQYARVVIDCATEDPDGRKRALLIGGGIANFTDVAATFNGIIRALKEKESKLKAAQMHIYVRRGGPNYQTGLAKMRSLGEELGVPIQVYGPEATMTGICKQAIDCIMSEA

SEQ ID NO: 204269 - protein, 93 aa, Glycine max
  unsure (1)..(93): unsure at all Xaa locations
  Clone ID: PAT_MRT3847_26482C.1.pep
VARKKIREYHSKRLXKEHLKRLASIDLQILSAQVTESTDFTELTDQHPWLSSTRLVVKPDMLFGKRGKSGLVALNLDIAQVAEFVKARLGVEV

SEQ ID NO: 204270 - protein, 142 aa, Glycine max
  Clone ID: PAT_MRT3847_26483C.1.pep
MVDVDFGTSGSPKRHNHNGFIVTISAILALLKKRKAAVKASKEDELKKSSRPKKLLSNISSKALFGHKKNNKKQLRSVEETQQAQGWGNGGVWQKEILMGGKCEPLNFSGVIYYDGNGKQLSQIPLRSPRASPLPGYLTRRQ

SEQ ID NO: 204271 - protein, 61 aa, Glycine max
  Clone ID: PAT_MRT3847_26484C.1.pep
SDYMLEKVEITRIGYGRVEIRMIEEGCPESLEKELHPTLWILRRSGMETMGMPIENGFEIH

SEQ ID NO: 204272 - protein, 44 aa, Glycine max
  unsure (1)..(44): unsure at all Xaa locations
  Clone ID: PAT_MRT3847_26485C.1.pep
CRKWNLVWVGRNKVAALEPNEVETLLGFPRSHTRGGGISXTDRK

SEQ ID NO: 204273 - protein, 106 aa, Glycine max
  unsure (1)..(106): unsure at all Xaa locations
  Clone ID: PAT_MRT3847_26486C.1.pep
KNVGPLEVSLFEKKGGLWKPGLFIPGLVLPPKDLGSGWFLAFFNPPLPLFPVMKVFFPPFWALWSPAFGGIKPCSPLLAFWGPXNYREGNFFSPPKIRWGKSICLF

SEQ ID NO: 204274 - protein, 198 aa, Glycine max
  Clone ID: PAT_MRT3847_26487C.1.pep
QLRTQVNSKWNNPSLFHSSTTMASISCITHHPITSKLNNAFSSPHVSASNLASRFLGTRKRVGLHSLTSRIIGPSNGSKATCWFRFGKNGVDAKGAGIYGSQGRDDFDRDDVEQYFNYMGMLAVEGTYDKMEALLSQNIHPVDILLLLAASESDKPKIEELLRAGAKYDVKDADGRTALDRATDEIKDLILNFSVQRA

SEQ ID NO: 204275 - protein, 376 aa, Glycine max
  unsure (1)..(376): unsure at all Xaa locations
  Clone ID: PAT_MRT3847_26488C.1.pep
MGRVFPPLSSLEKNRVEQXEKFYPDLISPQCLRPVAITSXELLHKESVIPVRGXQLGPATPGPHRRAGIEGERGDGCSGQYDQICNARLPRALDPHSVPSEELSTSLGYMVQLLNLIVHNLAAPALHNSGFAGSCSRIWQRDSYWDARPSSRSNEYPLFIPRQNYCSTDGENSWSERSSSNFGVASVESERRHRLDSSGSTSFNYSLASSHSVQTHKDLQKGISLLKKSVVCITAYCYNSLCLDVPSEASTFEAFAKLLATLSSSKEVRSVFSLKMPRSRTCKQVQQLNKSVWNMNSAISSTTLLESAHSVPTTRIENYLPSATASFLYATDSDGKNECLVEGWDIVEHPTFPPPPSQSEDVEHWTRAMFIDAKRK

SEQ ID NO: 204276 - protein, 62 aa, Glycine max
  Clone ID: PAT_MRT3847_26489C.1.pep
LFNLMSYTNELILTQYFHYPLLHYNAPIVYLLQTKTLILPYIPLSLFSFQLFNKTFSHITQT

SEQ ID NO: 204277 - protein, 53 aa, Glycine max
  Clone ID: PAT_MRT3847_2648C.1.pep
LMRRRHKTTESIYMINITSTARLIHQSDRTNLSLNPSNAKSAPYFLPSPTSEK

SEQ ID NO: 204278 - protein, 112 aa, Glycine max
  Clone ID: PAT_MRT3847_26490C.1.pep
TEQAIEHDHGALLTAGSLRLKNSFIPRMDLPVANKETETLKQIMEHTTETNSSFSFLINDNEQVTGLLTLRDIILQFAPPNMNSSINGGGFFEFALEQSGCQVKNGTMVRNH

SEQ ID NO: 204279 - protein, 88 aa, Glycine max
  unsure (1)..(88): unsure at all Xaa locations
  Clone ID: PAT_MRT3847_26491C.1.pep
MDHDKTGCQAPPEGPILCINNCGFFGSAATMNMCSKCHKDILLKQEQAKLAASSIXNIMNGSSSSTEKGTCVAAAANIDIPVIPIEPK

SEQ ID NO: 204280 - protein, 69 aa, Glycine max
  unsure (1)..(69): unsure at all Xaa locations
  Clone ID: PAT_MRT3847_26492C.1.pep
MNVSLSDASVVDIFQILASEXVSALQFFDFLKGSDHELCCDPDIGSLYINNCGLLGNHCLIIPRAELPD

SEQ ID NO: 204281 - protein, 173 aa, Glycine max
  unsure (1)..(173): unsure at all Xaa locations
  Clone ID: PAT_MRT3847_26493C.1.pep
MDHDKTGCQAXPEGPILCINNCGFFGXVAATMNMCSKCHKXDMLLKQEQAKLAASSIGNIMNGSSSSTENGTCCWGRCCWLNVDIPVIPVEPKTVSVQPLFGSGPEGSGEAKLKDGPKRCSSCNKRVGLTGFNXRCGDLFCAVHRXSDKHNCPFDYRIAVPXVIAKSNPFLSS

SEQ ID NO: 204282 - protein, 110 aa, Glycine max
  Clone ID: PAT_MRT3847_26494C.1.pep
LKAPPPYNNIIRTPTEMVEKIIDSFLVAVHDMDAKKKNIVLLTVENRQTYLYNFLLNKKNLKKSNIFGKVDNKGNSALHLAAKLGDYKPWLIPGEALQMHWEIKWYSVEE

SEQ ID NO: 204283 - protein, 108 aa, Glycine max
  Clone ID: PAT_MRT3847_26495C.1.pep
GPGGGPLGGPGGRPGKPGPGPGGGPPLPKGGPKKAGRKQGQRGSPGETESGPQSHPGDNPEPKRANPGGPKGGPNPQKWGGPNGPITRGETVGATGKKKWANPRGKGV

SEQ ID NO: 204284 - protein, 175 aa, Glycine max
  unsure (1)..(175): unsure at all Xaa locations
  Clone ID: PAT_MRT3847_26496C.1.pep
MDHDKTGCQAPPEGPILCINNCGFFGSAATMNMCSKCHKDMLLKQEQAKLAASSIGNIMNGSSSSTEKEPVVAAAAANVDIPVIPVEPKTVSVPPLFHSNPAGSGAAMWIDIPKRIITHFMPARLLGMPXKANPVVKSVHRDSDKHNCPFDYRTAARDAIAKANPVVKAEKLDKI

SEQ ID NO: 204285 - protein, 175 aa, Glycine max
  Clone ID: PAT_MRT3847_26497C.1.pep
MDHDKTGCQAPPEGPILCINNCGFFGSAATMNMCSKCHKDMLLKQEQAKLAASSIGNIMNGSSSSTEKEPVVAAAAANVDIPVIPVEPKTVSVQPLFGSGPEGSGEAKLKDGPKRCSSCNKRVGLTGFNCRCGDLFCAVHRYSDKHNCPFDYRTAARDAIAKANPVVKAEKLDKI

SEQ ID NO: 204286 - protein, 174 aa, Glycine max
  Clone ID: PAT_MRT3847_26498C.1.pep
MDHDKTGCQAPPEGPILCINNCGFFGSAATMNMCSKCHKDILLKQEQAKLAASSIGNIMNGSSSSTEKEPVVAAAANIDIPVIPVEPKTVSVQPLFGSGPEGSVEAKPKDGPKRCSSCNKRVGLTGFNCRCGDLFCAVHRYSDKHNCPFDYRTAAQDAIAKANPVVKAEKLDKI

SEQ ID NO: 204287 - protein, 72 aa, Glycine max
  Clone ID: PAT_MRT3847_26499C.1.pep
TNRWPPLISESLFFHFFYFFSPPRGRGIFWKPKRRKNARREGPRPYLFTVTTRDPHTLTHSGQPKSVTNSNG

SEQ ID NO: 204288 - protein, 57 aa, Glycine max
  Clone ID: PAT_MRT3847_2649C.1.pep
RAGGFFFFFFFFFLGVLNFTTFSTQRKRFLACDASDRFIEWVIIKVFLYRQTTLDII

SEQ ID NO: 204289 - protein, 75 aa, Glycine max
  unsure (1)..(75): unsure at all Xaa locations
  Clone ID: PAT_MRT3847_264C.1.pep
CTGLTSMDVFLTWNSNSDITCIAINFVRVQCIQVWPLIVXKKCVTLFYLADLDYTAFAKEVVYLLTKGCIPSLQF

SEQ ID NO: 204290 - protein, 57 aa, Glycine max
  Clone ID: PAT_MRT3847_26500C.1.pep
GLEISISECSESEIRSKLLKRRYNRSHIRSKFSGTMRAKLVIIFCKMRVLTPYLRSP

SEQ ID NO: 204291 - protein, 131 aa, Glycine max
  unsure (1)..(131): unsure at all Xaa locations
  Clone ID: PAT_MRT3847_26501C.1.pep
XVXXXTLFXXXSXXXMRXXXXXXXESXXWXXXXXXXXXXXXDDXXXXVXXAVXXVXVXXXXXXCCXXKXXXRXXXRXXXXCXXXXXXXXXXVDXHHWSSCAXXXXXMIXLVRXEXSXLXXXHXFRRVXXFX

SEQ ID NO: 204292 - protein, 59 aa, Glycine max
  Clone ID: PAT_MRT3847_26502C.1.pep
AWCNHWHPHRFCVYRVPNYNKVPFKGLKFFPTQCPLKRPGGTRFFWLKINLWGAFSYQS

SEQ ID NO: 204293 - protein, 64 aa, Glycine max
  Clone ID: PAT_MRT3847_26503C.1.pep
IIILSLKNKIISISLSNFQKLIFNPYWFIMFMISQFVTFLTVKINIFNLIFLKIISIYFKSPKY

SEQ ID NO: 204294 - protein, 52 aa, Glycine max
  Clone ID: PAT_MRT3847_26504C.1.pep
QVTIHPNKRSSVNTICSKISYLFKPYYPYMILSDISEPSISGKLHISGNQGL

SEQ ID NO: 204295 - protein, 64 aa, Glycine max
  Clone ID: PAT_MRT3847_26505C.1.pep
NLRAADAICSFDYRSYKRSDSEIVLDHGTAEITSPGSGVGKTAQGTPSEKPPQTGGAGAQKHSS

SEQ ID NO: 204296 - protein, 46 aa, Glycine max
  unsure (1)..(46): unsure at all Xaa locations
  Clone ID: PAT_MRT3847_26506C.1.pep
RRXRFFQTSTQHHSRRRRRRPPQEPSHSAGIRWGTADSRMWRGVRS

SEQ ID NO: 204297 - protein, 62 aa, Glycine max
  unsure (1)..(62): unsure at all Xaa locations
  Clone ID: PAT_MRT3847_26507C.1.pep
VGPRPAWWAWRXNSPPVRPPPHAXLHLXPXPSIXRIDLXXIWFXSXLXIXXXXTSSLLSFPL

SEQ ID NO: 204298 - protein, 373 aa, Glycine max
  Clone ID: PAT_MRT3847_26508C.1.pep
MENQALVELLDRRLGFDSNLKIKQVMTATAELAFMCMKCPQELRPNTEQVLEILNGIKPGRIETGSYSTKDISALKIFHNAELEEATNKFDTCLGKGGYGTVYYGKLQDGREVAIKCFHDESETEETIKQFMKETAILGLLHHENLVSLYGRTSRNCNKHMLVYEYISNGTLTKHLHESSGGKLPWHNRLNIAIETATALVFLHESGIIHRDVKGSNILLDENFTVKVADFGFSRSLPDHATHVSTIPVGTRAYIDPDYYESGRVSDKSDVYSFGVVLFELISSIRPSLMEGTDYVTLAQFAKRKILNKELTAVVDQSFWLGVDKNMMEMITAVAELAFQCVQCPKELRPSMKQVLDTLEGIRKGTWGFNQIT

SEQ ID NO: 204299 - protein, 88 aa, Glycine max
  Clone ID: PAT_MRT3847_26509C.1.pep
QPRPHVLYVFPHLTLMNYLYILTNELRTACSHFYFRPPPPHPALPRHRETMTLSSWICVNNSKTMLLQIVHPGGHVELHDRPVTAGRL

SEQ ID NO: 204300 - protein, 58 aa, Glycine max
  Clone ID: PAT_MRT3847_2650C.1.pep
LDNQYLHHHNTLLNRLYTLSHKSPNITHKHKLAQLINQTIYSPSYQWHVVLTPYSNHH

SEQ ID NO: 204301 - protein, 64 aa, Glycine max
  unsure (1)..(64): unsure at all Xaa locations
  Clone ID: PAT_MRT3847_26510C.1.pep
XAVXMVXRSCDXXEXXXXXXXRCXSFATVQWDXDXDLQAAXXPLXYLIVXKLNRXXNHTNQASX

SEQ ID NO: 204302 - protein, 148 aa, Glycine max
  Clone ID: PAT_MRT3847_26511C.1.pep
IPPNIPYTTLRTRPRPPDTSSRLCQQWDTALLCYTPQSLHVPPAWDCACKPLDPFQIPREQPTSSITAPRHNHNQSGHSRPHQEDIPQVICTRGFSGGSEKDTGHCIWQHVCERDITPSRLAHSTKQPSPKELCGLWSRQSLEELNNI

SEQ ID NO: 204303 - protein, 148 aa, Glycine max
  Clone ID: PAT_MRT3847_26512C.1.pep
MGGRKCLLTLVLSLVLMMSMAEAQSGTSADCAQELIPCLDYLNGTINPPSSCCDPLKRTVQNELACLCNIYFSPGLLQSVNVTVDEALGLSRRCGVTSDLSSCKNGSAPAPGSRPPPATPGGDKGGAGTVTFTGLSFLLLFWVSMLFN

SEQ ID NO: 204304 - protein, 54 aa, Glycine max
  Clone ID: PAT_MRT3847_26513C.1.pep
SLEFTATKRICPTSWILNKDASFYKYSFIIFVTHVISNKSKDIFYKTKSSMFSK

SEQ ID NO: 204305 - protein, 46 aa, Glycine max
  unsure (1)..(46): unsure at all Xaa locations
  Clone ID: PAT_MRT3847_26514C.1.pep
PGHSKWVICRVYERDNHXNDGDGTELSCLEEVFLSLDDFDEISLPN

SEQ ID NO: 204306 - protein, 142 aa, Glycine max
  Clone ID: PAT_MRT3847_26515C.1.pep
MGGRKCLLTLVLSLVLMMSMAEAQSGTSADCAQELIPCLDYLNGTINPPSSCCDPLKRTVQNELACLCNIYFSPGLLQSVNVTVDEALGLSRRCGVTSDLSSCKNGSAPAPGSRPPPGKTPPNIPNFFFFFFLDELLFCSDK

SEQ ID NO: 204307 - protein, 39 aa, Glycine max
  Clone ID: PAT_MRT3847_26516C.1.pep
LIELSLDSYIVLCHNLNNFQNYILVACGPHPSTYASTQH

SEQ ID NO: 204308 - protein, 75 aa, Glycine max
  Clone ID: PAT_MRT3847_26517C.1.pep
ERLSGTLCDDSHFRRDICILPNKGLPSLPTQLYEKTRLSYPTTFLQSREKNTLAYPIDVDPGDVKNTGTSFPLAR

SEQ ID NO: 204309 - protein, 106 aa, Glycine max
  Clone ID: PAT_MRT3847_26518C.1.pep
MAELIGPRLYSCSNCRNHVSLHDDIISKAFHGRNGRAFLFSHAMNIVTGPKEDRHLLTGLHTVADVYCGDCREVLGWKYERAYEASHKYKEGKFILEKSKIAKENW

SEQ ID NO: 204310 - protein, 106 aa, Glycine max
  Clone ID: PAT_MRT3847_26519C.1.pep
MAELIGPRLYSCSNCRNHVSLHDDIISKAFHGRNGRAFLFSHAMNIVTGPKEDRHLLTGLHTVADVYCGDCREVLGWKYERAYEASQKYKEGKFILEKSKIVKENW

SEQ ID NO: 204311 - protein, 492 aa, Glycine max
  Clone ID: PAT_MRT3847_2651C.1.pep
ERWKRGFSSVRWRGSASAIGKGFGARGGRERGEGRRRGKTWRERRCRDYWTSMIPPRRKKWTEAEEKTLIDKYGELVEDGSLAKMRTREKKFKPIACHVNSVHHVRDPVAYPWQWSWKDVSTKVQNMRHQYLLVKQKIKRPEFSGSGGGGDCDDVSEFDWVEGLTHWSNFLRYKDVFGDVALVVGGHGGNELMGIEDGDHGDRDGDNGDGFLAGGGGMDMVEFGQMGHSGDGDFGAAMDGVDNEVMGLGFEYEAEEGEVNYNGSGGREREDAAENGFVFEEEGEVTGSSLKKKRKAVKGMEKKAWRILANQLGQLREMEARFEQRELERERDRQRRENLRVELDKQWEKKLEERDKLRRQRMVEWEAMEKENEEMERKRREEELIHEREWEEGMNCRRLEWKKRVDEMLSQHRAEMGQMQTRFLHEQQNLTNQLLGIFSQWPAQPAGLSDHTSASNHYLSHMMQNLHHVNGIVHGDARVEGDNQEDQFIVDG

SEQ ID NO: 204312 - protein, 167 aa, Glycine max
  unsure (1)..(167): unsure at all Xaa locations
  Clone ID: PAT_MRT3847_26520C.1.pep
PCHTHIIKEYGQTIYDLAYNVFQKMADSLCLVHHDYKDWTIILRTIKFTFTPDDIGYMALQLHSYTXSITLLQDDEHVNGIDMIHDIGTLNAVPPIPAAFLCIVGDVTTCVRAMKISRNAIHRVLCKETGTDYAFSAYLLSLMHGIVYAPIKHVQGVHLLRYRPLNF

SEQ ID NO: 204313 - protein, 367 aa, Glycine max
  unsure (1)..(367): unsure at all Xaa locations
  Clone ID: PAT_MRT3847_26521C.1.pep
NCLRKEIASFKKHLSVYYFVIYLYIVTQASRISACYMKMGSNLRFLSLCLLALIASTHAQLQLGFYAKSCPKAEQIVLKFVHDHIHNAPSLAAALIRMHFHDCFVRGCDASVLLNSTTNQAEKNAPPNLTVRGXFDFIDRIKXLVEAECPGVVSCADILTLAARDTIVATGGPFWKVPTGRRDGVISNLXTEARNNIPAPSSNFTTLQTLFANQGLDLKDLVLLSGAHTIVENFFAEFASLINRLFNFTGKGDQDPSLDSEYAANLKAFKCKDLSKXNTTKIEMDPGSRKTFDLSYYSHVIKRRGLFESDAXLLTNSVTKSQIIQLLEGSVENFFAEFATSIEKMGRINVKTGTEGEIRKHCAFVNS

SEQ ID NO: 204314 - protein, 64 aa, Glycine max
  Clone ID: PAT_MRT3847_26522C.1.pep
SPSCPAAGLRESGEEERKDKVEEKETKNEVERSQGQLMRNVYCMGVIRRKCRRQGGLRKVSCVR

SEQ ID NO: 204315 - protein, 370 aa, Glycine max
  Clone ID: PAT_MRT3847_26523C.1.pep
MFPSTNYTSSGSYPRFPSSSSSTSPYPSFTLLHPENSSSSNNTFLHDPLALTYIPSHYHAPIPETLANWAVADCAILNQDLGGALYGITKKPMKKATKKDRHSKIHTSQGLRDRRVRLSIEIARKFFDLQDMLGFDKASNTLDWLFTKSKKAIKELTRSKHSVESFEFSSSSEGEVVSTIQQQDLQQQHGINLENGKLKEPAAYCVKAKMKESREKARARAREKTSSKVLCNTSGEGKVQELKKKCPATENPQILNQLRSTLQPPHPQNVGGEVPRDDDFNVIEESIVIRRKLKHTLMSSNIHHQNAVIPKEASVNNSDYHSFPNLSPNWEANNGANGRSTFCAIASMNLSTGLQIFGKSWEECTNPHPS

SEQ ID NO: 204316 - protein, 72 aa, Glycine max
  Clone ID: PAT_MRT3847_26524C.1.pep
SHIPTSQKYVERCWPRVIGPLAKGGRATTVGETLHKRKDTNLGVADNWRMVSGKNLHLCAISTSRWIVCKGH

SEQ ID NO: 204317 - protein, 131 aa, Glycine max
  Clone ID: PAT_MRT3847_26525C.1.pep
MSDTNRATEEKSKRGLKEWFKSSQVLLSMILVQVFVTGLQLLSRVVLVQGSFIFSLIAYRFIVATICVAPFALYFERGRTKDFTPKVWFWVFVNALMGMTLAQGLFYYGLKDTSATYAGNFLNLVTIWTFF

SEQ ID NO: 204318 - protein, 407 aa, Glycine max
  Clone ID: PAT_MRT3847_26526C.1.pep
MEPQLQPKLEPAPELVSAGAEDSEKSHVSDVTEVRHVAMAEANAGCCASVLKRKRGRPAKGSRVPKGMTPPSRQKKEEEDVCFICFDGGSLVLCDRRGCPKAYHPWCIKRDEAFFRSKAKWNCGWHICSACGKGSHYMCYTCTYSLCKRCTKNADFVSIRENKGLCGICKRTIMLIENCAQGDKAECEVDFDDKSSWEYLFKVYWMYLKEKLSLTFDEILQAKNPCKGVARLEASGVAVDVSSLLLSPKMELPINNFANDKPWHYQDPTGKVQGPFSLLQLYKWNACGYFPSDLRIWRVDETQNNSIFLTDVLNGKCSKNVSLPNNSQQLSLGTNSTLENKENSQDGGENENNATRNGNSANHQIVEQCDEQKVADTYTQSNGKDESSKEQWLELSVSRFDYTSRWE

SEQ ID NO: 204319 - protein, 46 aa, Glycine max
  Clone ID: PAT_MRT3847_26527C.1.pep
HSVTALAWSLSSLTWQASSMPDNAKIARLFIIRLDMNNGALATRYG

SEQ ID NO: 204320 - protein, 37 aa, Glycine max
  Clone ID: PAT_MRT3847_26528C.1.pep
SKVSKNILHQIHNGKRKLITYVKKIYQLAKLIIIRGV

SEQ ID NO: 204321 - protein, 61 aa, Glycine max
  Clone ID: PAT_MRT3847_26529C.1.pep
TTSSFYNSFPIPPSLLTFRYDSTILFLHLINLTLFPFLFHISDPKSSSTISPLLFLNYPLI

SEQ ID NO: 204322 - protein, 373 aa, Glycine max
  unsure (1)..(373): unsure at all Xaa locations
  Clone ID: PAT_MRT3847_2652C.1.pep
LKARVVESNTDFPHKFFYCFWWGLRSVSSVGQGLETSTYAGEIIFAIFIAVFGLILFASLIGNMQKYLQSTTVRVEEMRIKRRDAELWMSHRMLPDFLKERIRRYEQYKWQENRGVEEETLIRNLPKDLRRDIKRHLCIDLLKKVPMFENMDNQLLDALCDKLKPVLXYTEKSYIVREGDPVDEMLFIMRGKLATATTNGGRTGFFNSFEIKAGDFCGEELLTWALDPNSSSNLPISSSRVETIGAVEAFALMPDDLKCVASQFRRLINSKQLQHTFRFYSLQWKTWGACFIQAAWRRYKKKKAERLLREAEERIQALENEEGSSPSFAATIYASRFASSGLRHLRSGKRTRVPQPQRSLMPQKPDDFTAQKN

SEQ ID NO: 204323 - protein, 65 aa, Glycine max
  Clone ID: PAT_MRT3847_26530C.1.pep
LFTSFLFFFFFFWQAKTLVYFSISSILAIEKINSTKGDGSLYSKAKGSPDGEHQGCMVGTAQAIS

SEQ ID NO: 204324 - protein, 130 aa, Glycine max
  Clone ID: PAT_MRT3847_26531C.1.pep
SETLKNVMVLYHYYPFPSLAYGCSYCHAYATTKLKATHSLSLTLCNHRRICASQPDSCTFAIITNLFFYQNPSFITGNTLLLTMHRFCCVSGLSENKSLVEKLHRYGLITSSNVADVMETDDRALFVPDG

SEQ ID NO: 204325 - protein, 76 aa, Glycine max
  Clone ID: PAT_MRT3847_26532C.1.pep
LPHTVHSTLVEQQVCHDPSPYLYIVDMPNAESKTHLYWGSILTYIILLNINNRALRQRKSCKLLIKDSINNRLLQG

SEQ ID NO: 204326 - protein, 96 aa, Glycine max
  Clone ID: PAT_MRT3847_26533C.1.pep
IPKVFDQPRILSCHGCQNCLNCDLDHVKRPSKQVEECSHGVFECVPGEMIFMPSFQSSAASFSIELVCLASSNDLSHSLDNSDNCDKIISLADQIQ

SEQ ID NO: 204327 - protein, 74 aa, Glycine max
  unsure (1)..(74): unsure at all Xaa locations
  Clone ID: PAT_MRT3847_26534C.1.pep
SKKYPISPPKGPHGGPFKKKAPQAFXEKRNFSPKPLGPKNLRGDLNFPKFFWTQGIRGFPPGVWVKIAPKRNSL

SEQ ID NO: 204328 - protein, 231 aa, Glycine max
  Clone ID: PAT_MRT3847_26535C.1.pep
MQSIRTCFKSYGSYNKHSRFSGAGNSDSDHEQQLPILHDQETHCHPAMPAGDYVVKINEDGSEAPQGNRIWRESSYEFWNNDGATTTAGGSDQSFDFRQSEDPPSQLIGHFLHKQRASGEMQLDMDLEMEELQREGDDGKLTPVDESPVTHRVSRELKVSFEEPTCNVNFLEAQNDAVRRRHSKDSPSIAEFQRPPQPPQHDCRRSPSPSAGDEEVVRCTSNAFFERSLMQ

SEQ ID NO: 204329 - protein, 130 aa, Glycine max
  unsure (1)..(130): unsure at all Xaa locations
  Clone ID: PAT_MRT3847_26536C.1.pep
MRMHYNMLPIRMTTGYXASTLEPKYTNRRLAVTTHNXFRFETHFLNSEPEATRCYLHXNRYRSDSITVNQQPYFYATDLXFHSMDTFWVSIDGNVLYNIPYYKKHGYGVEKFKLDLYDEWVNTGKAPALS

SEQ ID NO: 204330 - protein, 63 aa, Glycine max
  unsure (1)..(63): unsure at all Xaa locations
  Clone ID: PAT_MRT3847_26537C.1.pep
XPXLXIDNXVKYINNTLYXAKXVLELLXIEXFQQELKGVGXPXKCPXXFLXXPXFTXGXNXLX

SEQ ID NO: 204331 - protein, 46 aa, Glycine max
  Clone ID: PAT_MRT3847_26538C.1.pep
KQLFLFFLLSLISLTYIHNSGYKNNLVSILISTNFSLSSLTPFTPT

SEQ ID NO: 204332 - protein, 95 aa, Glycine max
  Clone ID: PAT_MRT3847_26539C.1.pep
SYNLDQIPLNLKKKKKKGKKKKKKKDKKYRGIKIKIHMPAAPVLPYCVPFLASLCLCFLAAGPEFPWRGLTYSPWSKFLLCRLPFYAKRHRPIAL

SEQ ID NO: 204333 - protein, 60 aa, Glycine max
  Clone ID: PAT_MRT3847_2653C.1.pep
NERDTVNGNFSSWRRSYTPWCLHSLKIYSNEDFQETKQKMPGSLFTYLSQIGAQDAKWLS

SEQ ID NO: 204334 - protein, 67 aa, Glycine max
  unsure (1)..(67): unsure at all Xaa locations
  Clone ID: PAT_MRT3847_26540C.1.pep
MQIFVKTLTGKTITLEVESSDTIDXVKAKIQDKEGIPPDQQRXIFAXXXEDGRTLXDXNIQRXVLTR

SEQ ID NO: 204335 - protein, 50 aa, Glycine max
  Clone ID: PAT_MRT3847_26541C.1.pep
AFLIRGLPISGSCRSFRFLRLRLCPPGLVPSKVLFLKIKDGLAFCARCHN

SEQ ID NO: 204336 - protein, 57 aa, Glycine max
  Clone ID: PAT_MRT3847_26542C.1.pep
LTLDPRTSCVRRVSLKAQLCHSSTFLMPHLFGKLEQSCRFILLRCHLALFRTFGSVT

SEQ ID NO: 204337 - protein, 101 aa, Glycine max
  unsure (1)..(101): unsure at all Xaa locations
  Clone ID: PAT_MRT3847_26543C.1.pep
LYSQCSFGDTKHWFGFLLMASVRRTLSPVPRAGTVANGEVCSVASPLSKSSSSPQNFSPSVGLDYRALVFGCFLPKVFQGFGEIKATXAALEEDAFSFFHL

SEQ ID NO: 204338 - protein, 56 aa, Glycine max
  unsure (1)..(56): unsure at all Xaa locations
  Clone ID: PAT_MRT3847_26544C.1.pep
ETMKLDVFLLYYASLFVISQRNLEITTLFYGKEQQPHYNXVIRMFTCIRKVETFFL

SEQ ID NO: 204339 - protein, 111 aa, Glycine max
  unsure (1)..(111): unsure at all Xaa locations
  Clone ID: PAT_MRT3847_26545C.1.pep
IRHTFPTAFDPFADANAEDSGXLGRKEYVHVRVQQRNGRKSLTTVQGLKKEYSYSKILKDLKKEFCCNGTVVQDPELGQVIQLQGDQRKNVSTFLMQAGIVKKEYIKLHGF

SEQ ID NO: 204340 - protein, 159 aa, Glycine max
  unsure (1)..(159): unsure at all Xaa locations
  Clone ID: PAT_MRT3847_26546C.1.pep
MGTFFNSQSSSSSRGRGGDQTLKSFRESSPLGQNHIKRGYFTLCXALGGAXVGAFLHVLWGIGGVLTTXGSIGSDGWVRSTPPVXEQKGWALXSGXALCQGASIGPLSEXGIAIEPXLIVSAFVGTSLAFACVSAXXLXARRREXLYLGGVRSSGRGIL

SEQ ID NO: 204341 - protein, 113 aa, Glycine max
  Clone ID: PAT_MRT3847_26547C.1.pep
MSEFDTNIPTAFDPFAEANAEDSGAGTKEYVHVRVQQRNGRKSLTTVQGLKKEYSYSKILKDLKKEFCCNGTVVQDPELGQVIQLQGDQRKNVSTFLVQAGIVKKEHIKLHGF

SEQ ID NO: 204342 - protein, 135 aa, Glycine max
  Clone ID: PAT_MRT3847_26548C.1.pep
AQCSWGSADSPCDPGVSSFFSSSTPSSMASSFFFFGFPPPPPSPTPFFLFNFQFFIRKKYQKIGSMNDHLVLFVDHLVRPVPVVEPLAQQPPEPVTPVNEAAVAGPSGSSPAAEDDRYDYREDAPLLQLAECCIC

SEQ ID NO: 204343 - protein, 454 aa, Glycine max
  Clone ID: PAT_MRT3847_26549C.1.pep
MNPNDANSPKPLEILQMNPVPPFLSKTFDLVDDPTLDPIISWGSTGFSFVVWDPLEFARIVLPRHFKHNNFSSFVRQLNTYGFRKIDTDKWEFFNEAFQRGKKHLLKNIQRRRSSQSQQVGSYIGIECSTEAGRSDVEIEIERLRKERTMLMEEVVDLKQEQRRMAHRAGEVNQRLQSTEQRQKQMVSFLVKLIQNPAFLARLRHEEQKEIDSPRVVRKFVKQHQHETGTAETLQEGQIVRYQHDWRNIGMSSETPKLSPVSIEQSPHYLSQGLAGEVSVGAEDLTAQIENIVSNDLAAVHGITVSQEIMIGEGLSSFGAEDPLFKGKSVMSPILEVPPEYFASFPEGLTKGKDFQDFSALGTEGMIKLEDIWDSGLNVSGAASGSGNELWSNHVNYEEFPEFGVTSGMSDSDIWDIGLGSLGIDKWPTDEPSLGETNGQAGQPKEDRPKNFGP

SEQ ID NO: 204344 - protein, 155 aa, Glycine max
  unsure (1)..(155): unsure at all Xaa locations
  Clone ID: PAT_MRT3847_2654C.1.pep
TTGHPDKLCDQIYHAVLNSCLEQDPDSKAACETCTXTNLTMDFGEITTKANXDYEKIVRDTCMXLGFDSNDARLDADDCKDHRDIEHQNPDIAQGAHGHLTKKPAQIGAGDQSDMFGYATDETTGLMPLIHVLATNSALADRGSENGTCPCMSLM

SEQ ID NO: 204345 - protein, 44 aa, Glycine max
  Clone ID: PAT_MRT3847_26550C.1.pep
HRCTTSSLLTMPVRVHEGKSEELPELFGSHQKLIAPLSSLLAAV

SEQ ID NO: 204346 - protein, 464 aa, Glycine max
  unsure (1)..(464): unsure at all Xaa locations
  Clone ID: PAT_MRT3847_26551C.1.pep
MNPNDANSPKPLEILQMNPVPPFLSKTFDLVDDPTLDPIISWGSTGFSFVVWDPLEFARIVLPRHFKHNNFSSFVRQLNTYSHGAPPGFRKIDTDKWEFFNEAFQRGKKHLLKNIQRRRSSQSQQVGSYIGIECSTEAGRSDVEIEIERLRKERTMLMEEVVDLKQEQRRMAHRAGEVNQRLQSTEQRQKQMVSFLVKLIQNPAFLARLRHEEQKEIDSPRVVRKFVKQHQHETGXNNTAETLQEGQIVRYQPDWRNIAMSSETPKLSSVSIEQSPHYLSQGLAGEMSVVGAEDLTAQIDNIVSDDLAAVHGITPSQEMMIGEGSSTFGAEDPLFKGKSVMSPILEVPPEYFASFPEGLTKGKDFQDFSALGTEGMIKLEDIWDSGLNVSGAALSSGNELWGNHVNYEEFPQFGVTSGMSDSDIWDIGLGSFGIDTWPTDEPSLGETDGQSGQPNEDRSKNFDP

SEQ ID NO: 204347 - protein, 460 aa, Glycine max
  Clone ID: PAT_MRT3847_26552C.1.pep
MNPNDGNNSPSPKPLEMVNPVPPFLSKTFDLVDAPTLDPIISWNSTGLSFVVWDPLEFARIVLPRHFKHNNFSSFVRQLNTYGFRKIDTDKWEFFNEAFQRGKKHLLKNIQRRRSSQSQPVGSYIGIGSSTEAGGSEVEIEIERLRKEKTMLMEEVVDLQQEQRRTAHHAGEVNLRLQSAEQRQKQMVSFLAKLIQNPAFLARLRHKKEQKEIDSPRVVRKFVKQHHETGTTTTAETLQEGQIVRYQPDWRNIAMSSETPKLSSVSIEQSPHYLSQGLAGEMSVVGAEDLTAQIDNIVSDDLAAVHRITPSQEMMIGEGSSTFGAEDPLFKGKSVMSPILEVPPEYFPSFPEGLTKEKKDFQDFSALGTEGMIKLEDIWDSGLNVSGAALSSGNELWGNHVNYEEFPQFGVTSGMSDSDIWDIGLGSFGIDTWPTDEPSLGETDGQSGQPNEDRSKNFDP

SEQ ID NO: 204348 - protein, 776 aa, Glycine max
  Clone ID: PAT_MRT3847_26553C.1.pep
FASGFKELLSRSLIQKDIAIAEEKFRMHDLVYDLARLVSGRSSCYFEGSKIPKTVRHLSFSREMFDVSKKFEDFYELMCLRTFLPRLGYPLEEFYLTKMVSHDLLPKLRCLRILSLSKYKNITELPVSIDSLLHLRYLDLSYTSIESLPTETFMLYNLQTLILSNCEFLIQLPQQIGNLVNLRHLDLSGTNLPEMPAQICRLQDLRTLTVFIVGRQDGLSVRDLRNFPYLQGRLSILNLHNVVNPVDASRANLKNKEKIEELMLEWGSELQNQQIEKDVLDNLQPSTNLKKLDIKYYGGTSFPNWIGDSSFSNIIVLRISDCNNCLTLPSFGQLPSLKELVVKRMKMVKTVGYEFYSSNGGSQLLQPFPSLESLEFEDMLEWQEWLPFEGEGSYFPFPCLKRLYLYKCPKLRGILPNHLPSLTEASFSECNQLVTKSSNLHWNTSIEAIHIREGQEDLLSMLDNFSYCELFIEKCDSLQSLPRMILSANCLQKLTLTNIPSLISFPADCLPTSLQSLDIWHCRKLEFLSHDTWHRFTSLEKLRIWNSCRSLTSFSLACFPALQELYIRFIPNLEAITTQGGGAAPKLVDFIVTDCDKLRSLPDQIDLPSLEHLDLSGLPKLASLSPRCFPSSLRSLFVDVGILSSMSKQEIGLVFQCLTSLTHLLFKGLSDEDLINTLLKEQLLPISLKILVLHSFGGLKWLEGKGLQNLTSLQQLYMYNCPSFESLPEDHLPSSLAVLSMRECPLLEARYRSQNGKYWSKIAHIPAIKINEKVII

SEQ ID NO: 204349 - protein, 54 aa, Glycine max
  Clone ID: PAT_MRT3847_26554C.1.pep
SSRIGSSVLEKKKKTQKKKKSKIKNEKAGRRGHMKFRDQGYLLRRGLGIDQTSH

SEQ ID NO: 204350 - protein, 106 aa, Glycine max
  Clone ID: PAT_MRT3847_26555C.1.pep
LGCYREKTLLVIPVFYKVDPSDVRRLQGSYAEGLARLEERFHPNMENWKKALQKVAELAGHHFKDGYPSLPSFCFIIFVKIERENKCLLTLTRYGYKGFSLTSLQL

SEQ ID NO: 204351 - protein, 69 aa, Glycine max
  Clone ID: PAT_MRT3847_26556C.1.pep
YFILSLNHNLTCILELLTYIVHYIYIMTLYILQCSEHGKSVNSGCQTSLPTLLSWILRFSHHQIILAWS

SEQ ID NO: 204352 - protein, 43 aa, Glycine max
  Clone ID: PAT_MRT3847_26557C.1.pep
SLGVKPGGVFHLRFKPPFFKKKATFLREIKGFLGGGKGIFLII

SEQ ID NO: 204353 - protein, 91 aa, Glycine max
  Clone ID: PAT_MRT3847_26558C.1.pep
VLACKNAWQKNFWGGFKWNMVLQKGVRKVRSVFLPVGKGLDIAYIGSSRSGVSPAPPPPPATTSKTRPSRWIKHIDQQSGEEHLFRNSSSH

SEQ ID NO: 204354 - protein, 46 aa, Glycine max
  unsure (1)..(46): unsure at all Xaa locations
  Clone ID: PAT_MRT3847_26559C.1.pep
XXXXLRDWREIXFSTCXXXXXVTXSTSITCTKXSFQPXVXIVEFXT

SEQ ID NO: 204355 - protein, 124 aa, Glycine max
  Clone ID: PAT_MRT3847_2655C.1.pep
MLLCCICLLIKVASVTFCVTLSASLAARKGSTSMAAFQICLQIWMATSLLADGLAVAGQAIIASAFARNDYKRVIASASRVLQLGLILGLVLSVLLLSLLPFASRLFTNDNNVLQLISIGIPYV

SEQ ID NO: 204356 - protein, 85 aa, Glycine max
  unsure (1)..(85): unsure at all Xaa locations
  Clone ID: PAT_MRT3847_26560C.1.pep
HAWQIPLYIFNGWHQRSETKVPVVETGTLNLAESCXLVVDQKDYDLNITLTICGGSEESSSPSLTLYISLVELRASQESTELVHN

SEQ ID NO: 204357 - protein, 59 aa, Glycine max
  Clone ID: PAT_MRT3847_26561C.1.pep
LEKVTLKTLKVLHLNSVLLLIPDIFFIDLAFCFLFPSCFLHFVIYYYSITELQNSSKSL

SEQ ID NO: 204358 - protein, 164 aa, Glycine max
  Clone ID: PAT_MRT3847_26562C.1.pep
AYDGLGISILLTTNPSIQYTAYDQLKQRILKGKISNRTGTKSSPEALSAFYAFMLGAVSKCAATILTYPAIRCKVMIQAAESEDDKSTEAERKAQRTISGALYTIWKREGILGFFKGLQAQILKTVLSSALLLMVKEKIAKSTWILMLVIGRYLSVNSPKLKAV

SEQ ID NO: 204359 - protein, 130 aa, Glycine max
  Clone ID: PAT_MRT3847_26563C.1.pep
MVLMSVLSNCLISLTNAEKRGKRQVLIRPASKVVIKFLEVMLRHQYIGEFEVVDDRRSGKIVVHLNGRINKAGVISPRFDVTLSEMDKWTNQLLPSRSFGQVVLTTSYGIMDHEEAKRKHTGGKVLGYFF

SEQ ID NO: 204360 - protein, 125 aa, Glycine max
  unsure (1)..(125): unsure at all Xaa locations
  Clone ID: PAT_MRT3847_26564C.1.pep
PRVRITQNSVSHSKMQPIAGTTKQPTTLLNPIFATPESRAPNSYPGLSTSTGSASNXENEEEDQEKKTAQTPTSNVHQKKPREKRKREGKKCSQNRIKKSAPKSLSFSIKNSSAPHSLHLLLPIP

SEQ ID NO: 204361 - protein, 57 aa, Glycine max
  Clone ID: PAT_MRT3847_26565C.1.pep
SASHVGESPKRAAVDSRGGDDGGARNCGVGSEEWIVAGVEDVRYGRQGTGLESASAV

SEQ ID NO: 204362 - protein, 63 aa, Glycine max
  Clone ID: PAT_MRT3847_26566C.1.pep
FQEVLQTSACINLISIIPNVTAWYLEPSKLDHKGFLVVLLKLKIFKNLAIIQKRQPSLYVLNK

SEQ ID NO: 204363 - protein, 67 aa, Glycine max
  Clone ID: PAT_MRT3847_26567C.1.pep
SKYNNNLSKPQNLPLQHVSLYMTNYNNLSVYKTTLLSCCRMSRLSDISIHHSRCRYILMLLSIPYLK

SEQ ID NO: 204364 - protein, 88 aa, Glycine max
  Clone ID: PAT_MRT3847_26568C.1.pep
AQAQAAMLYNSTSSSLSLPLNVVNSASCVNNSYANTSSLSGFLQGQENHQRGFVPSRVVAPHIFLRDNGLLQDIVPTQMGNEENEDRV

SEQ ID NO: 204365 - protein, 67 aa, Glycine max
  unsure (1)..(67): unsure at all Xaa locations
  Clone ID: PAT_MRT3847_26569C.1.pep
NSKCILSGIINKSGGTLHVGGHMTDPHLMVEHHAGXYLRKHHCEHSSEYIGEPHSDHKAQEYHGLHK

SEQ ID NO: 204366 - protein, 98 aa, Glycine max
  Clone ID: PAT_MRT3847_2656C.1.pep
LKINFNLNKLKFTKEHLCPPLNTKPAQIRESNKVGSVTALHYRRLHPPCFSLSHTRRNRPHYPASVAPIPLATRFHLRRPSHSTNGSTSPNAISRVNA

SEQ ID NO: 204367 - protein, 149 aa, Glycine max
  Clone ID: PAT_MRT3847_26570C.1.pep
TRASLLAKYPDMQHRAQRAFITYLRSIHIQKDKDIFDVMKLPINEYSASLGLPMTPKIRFLNPKINSKDVSKSILVEPEDSDKETIFEVSRKLDTAAFKDEETENDILQLADTANEGEVKSSEIEEIIPATRVLKKKKLKINVHRPLGT

SEQ ID NO: 204368 - protein, 87 aa, Glycine max
  Clone ID: PAT_MRT3847_26571C.1.pep
ILDTGTVASAAMASMRCLRALTQTRPYILRKAYYVRSLDVLPFANCNAFAHSFTAHAYVFAQCPHLRCVSYDTEDDHSDEQDECDED

SEQ ID NO: 204369 - protein, 339 aa, Glycine max
  Clone ID: PAT_MRT3847_26572C.1.pep
MESISDPPFHEAYKILFDKTRNGNNFEEHKELLAVAEECDLPVIDLSRLEESDEVVREECKSQIARASQEWGFFQVVNHGISTEIFSSLRCEQEKVFKQPFEKKTKEDKFLNFSAGSYRWGTPSATCIKQLSWSEAFHIPLTDILGSTGSNSLSWTIEQFATTVSSLAQTLADILAEKMGHKSTFFKENCLPNTCFLRLNRYPPCPIGFGIHGLMPHTDSDFLTILYQDQVGGLQLVKDSKWIAVKPNPDALIINIGDLFQAWSNGVYKSVEHRVMTNPKLERFSMAYFFCPSNDTVIESCREPSFYRKFSFREYRQQVRDDVQKLGSKIGLPRFLTHA

SEQ ID NO: 204370 - protein, 130 aa, Glycine max
  Clone ID: PAT_MRT3847_26573C.1.pep
GSSGLMPFSDSDFLTILYQDQVGGLQLVKDSKWIAVKPNPDALIINIGDLFQAWSNGVYKSVEHRVMTNPKLERFSMAYFFCPSNDTVIESCREPSFYRKFSFREYRQQVRDDVQKLGSKIGLPRFLTHA

SEQ ID NO: 204371 - protein, 183 aa, Glycine max
  Clone ID: PAT_MRT3847_26574C.1.pep
MDNIWIVFVTVFLLCTVILYRNRLSLMLKSKRKKNKLPLGTLGWPFIGETIEFVSCAYSDRPESFMDKRRRMYGKVFKSHIFGSPTIVSTDASVNKFILQSDAKVFVPSYPKSLTELMGESSILLINGSLQRRIHGLIGAFFKSQQLKAQITRDMHKYVKESMASLREDCPITYKMKQKDCFS

SEQ ID NO: 204372 - protein, 192 aa, Glycine max
  Clone ID: PAT_MRT3847_26575C.1.pep
MSFGSSLLSHSHTLQFLSNRNRTSRFKATAEVPDFLSADWFESRKKRPFGPRLDFSAEDAVHYQLEALKYNDQPRPDYGIEVMYRFAGFDPFERSPYFGPFFDLGQFERFRRIFHHSTFRVLLGYKEGKIMSTLFVEENKYKQRVWIRGSRPEEEEIFQLTMVQKVGGCWDGYWLTEFLLHDTDTFAGGLAY

SEQ ID NO: 204373 - protein, 65 aa, Glycine max
  Clone ID: PAT_MRT3847_26576C.1.pep
HQGARRGMMSTLDKTLVGRPAVFMRSLEMYKLELGLAPRHRPLRHGISRELRCEHPSDWRHRVRV

SEQ ID NO: 204374 - protein, 64 aa, Glycine max
  Clone ID: PAT_MRT3847_26577C.1.pep
VTPPIVASKPNWSRVQHLSTTVLSVRLWVITGMFNVKLTGLTNCTLGRPRMRQTARPMSGQPER

SEQ ID NO: 204375 - protein, 204 aa, Glycine max
  Clone ID: PAT_MRT3847_26578C.1.pep
MAEIETTVPDPTQIDVKLFNRWSFEDVEVNDMSLADYIGVSPSKHATYVPHTAGRYSVKRFRKAQCPIVERLTNSLMMHGRNNGKKLMAVRIIKHAMEIIHLLTDLNPIQVIVDAVINSGPREDATRIGSAGVVRRQAVDISPLRRVNQAIYLLTTGAREAAFRNIKTIAECLADELINAAKGSSNSYAIKKKDEIERVAKANR

SEQ ID NO: 204376 - protein, 176 aa, Glycine max
  Clone ID: PAT_MRT3847_26579C.1.pep
VTDMSLADYIGVSPSKHATYVPHTAGRYSVKRFRKAQCPIVERLTNSLMMHGRNNGKKLMAVRIIKHAMEIIHLLTDLNPIQVIVDAVINSGPREDATRIGSAGVVRRQAVDISPLRRVNQAIYLLTTGAREAAFRNIKTIAECLADELINAAKGSSNSYAIKKKDEIERVAKANR

SEQ ID NO: 204377 - protein, 77 aa, Glycine max
  Clone ID: PAT_MRT3847_2657C.1.pep
CLFSFCYAYSLELSACSNSQKYIMSQVDVRQLGEALNSASKMMETMISNIQRFMPKVKQIREWSFMLAFLTWILKLD

SEQ ID NO: 204378 - protein, 134 aa, Glycine max
  unsure (1)..(134): unsure at all Xaa locations
  Clone ID: PAT_MRT3847_26580C.1.pep
AKSKCSTVGMXRVAWAFXGMIFALVYCAAGISGGHINPAVTFGLFLXRKVSLPRAIFYIVMQWGGAICGAGVVKGFXGKTKYGALNGGANFGAPGYTKEDGLGAXEIGGTFXPWYTXGFSAPGAKRNARDSHVP

SEQ ID NO: 204379 - protein, 62 aa, Glycine max
  Clone ID: PAT_MRT3847_26581C.1.pep
VSLDLLEEQAIIYRIVFRLITWDVFYYDVGWALLYLSLMSFILKATRYRLSISIHNNENLHL

SEQ ID NO: 204380 - protein, 73 aa, Glycine max
  Clone ID: PAT_MRT3847_26582C.1.pep
PVLLKSESRFHISLPLPFLKNHNMNLTKVIIMVILRKTQIYYLIFLIECTSQITNFTITVTKQKIYSNCSVSN

SEQ ID NO: 204381 - protein, 127 aa, Glycine max
  unsure (1)..(127): unsure at all Xaa locations
  Clone ID: PAT_MRT3847_26583C.1.pep
RNSRVDSTRREGLMSISSGSRLSSLKIGICLNITDRGLTYVGMHCSKLKELDLYRSTGVDDLGISAIARGCPGLEMINTSYCTSITDRALITLAKCSNLKTLEIRGCXSCTSIGLAAIAMNCRQLSR

SEQ ID NO: 204382 - protein, 81 aa, Glycine max
  Clone ID: PAT_MRT3847_26584C.1.pep
FFKTQCHYVFEGVFLIFLGACLPLSFINIPFFFQYRFQSCGFDGVVDWEFFVGFLRFLVSLFLDAASLLGFNPWDLVVNRI

SEQ ID NO: 204383 - protein, 79 aa, Glycine max
  Clone ID: PAT_MRT3847_26585C.1.pep
MIKWQSERSFEQHNLVPKTNVLLLQTLFFANKDKTEAAITELLVGLNYIWRFEREMTAKALFECANSNGLLLKLNKSSQ

SEQ ID NO: 204384 - protein, 284 aa, Glycine max
  Clone ID: PAT_MRT3847_26586C.1.pep
MKYVWQYDPIKNSWTEASPMSVGRAYCKTGILNNKLYVVGGVTRCRGGLSPLQSAEVYDPHTGMWSLLPSMPFARAQVLPTAFLADLLKPIATGMASYKGRLFVPQSLYCWPFFVDVGGEVYDPNLNSWLEMPIGMGEGWPARQAGTKLSITVNDDLYALDPSNSLDSAKIKVYDYEGDTWKVAAGDVPIHDFTESESPYLLAGLLGKLHVITKDANHNITVLQADMQNEHAESAFSQSILSSPDNSISEDAESSAETQGEFWKVLATRSGRSAELVNCQSLKI

SEQ ID NO: 204385 - protein, 81 aa, Glycine max
  unsure (1)..(81): unsure at all Xaa locations
  Clone ID: PAT_MRT3847_26587C.1.pep
YPLNDSISNAGSPCQDVIMEAPSITSNRFRSESDEEPEHADEHCYEEEEIDLYAEEKTYSDSKQLGSLYHXALSRPHYSTL

SEQ ID NO: 204386 - protein, 95 aa, Glycine max
  Clone ID: PAT_MRT3847_26588C.1.pep
MFHQATIYGIDPNWGRIAAAACYSGVSFHQDLLRVELGDILLMYGGEPQLFDRAGLHHTTCRNRSRARCSPGIDHFLFAVCPSQSRLLEIQDEAY

SEQ ID NO: 204387 - protein, 67 aa, Glycine max
  Clone ID: PAT_MRT3847_26589C.1.pep
MASRHNKKAFSSLAVRIRTLSDLNRPSADSDSDSDGPQEYYTGGEKRRTTAQRAKFDFWNSVFPSII

SEQ ID NO: 204388 - protein, 66 aa, Glycine max
  Clone ID: PAT_MRT3847_2658C.1.pep
KDHSLWCPSTSPVRAFFKFLFFEQKNIFLLVDNGGYIYLKMDLCQDFGVPIFFQRNKPLFFSKSIN

SEQ ID NO: 204389 - protein, 48 aa, Glycine max
  unsure (1)..(48): unsure at all Xaa locations
  Clone ID: PAT_MRT3847_26590C.1.pep
KAQFIQSLRGSASTFFAXFATSLXKMGSINVNTGSQGEISKRCAFINS

SEQ ID NO: 204390 - protein, 73 aa, Glycine max
  Clone ID: PAT_MRT3847_26591C.1.pep
NKVQKVPGPGQVPGKVHRSPGPLRKTTPEGPLLGQPLNKNPFFNNNFKWPLHKFLNNLFQGQKDFKGPKKTPL

SEQ ID NO: 204391 - protein, 127 aa, Glycine max
  Clone ID: PAT_MRT3847_26592C.1.pep
MMFPSPRFKPFLYLNSLTRTPLLQLQTPKSNQTFPPSLTPKHTSTTSQHHPFKVSYLVSTCGFSVETALKISKFTQFKTPEKPDSIIALFRSHGFSNTQIISIIRRAPNVLSGDPHKRIFPKFEFLR

SEQ ID NO: 204392 - protein, 52 aa, Glycine max
  Clone ID: PAT_MRT3847_26593C.1.pep
RKKTSKSPRTLKPLILPIKSVSSKLLTILVDSLCIVVMKCYENFLSIFCNKK

SEQ ID NO: 204393 - protein, 62 aa, Glycine max
  Clone ID: PAT_MRT3847_26594C.1.pep
PIKNFCWGKQHSLMCKEVRLLEGYVAVPLRRLLSSIHPAVLFRVWGFQLYIAMLVSRKNCFE

SEQ ID NO: 204394 - protein, 67 aa, Glycine max
  Clone ID: PAT_MRT3847_26595C.1.pep
RGVLRGVALGSGYGVFLLGPGDRASLIFRLWRPKRYFPGPIWRVPTGFSLSRIYHMKKVKLILPDYK

SEQ ID NO: 204395 - protein, 93 aa, Glycine max
  Clone ID: PAT_MRT3847_26596C.1.pep
MAAGTLYTYPENWRAFKALIAAQYSGAQVRVLSAPPHFHFGQTNRTPEFLRKFPAGKVPAFEGDDGFCVFESNAIAYYVSNEELRGSTPEAAA

SEQ ID NO: 204396 - protein, 94 aa, Glycine max
  Clone ID: PAT_MRT3847_26597C.1.pep
AIALKALTGSMLFYHFIWAKHPDVHLCFYSTYFGISREAKMNCHLSPIVYACVFNCLCLLSSSVVHLIEIVYKSTKYLLVNLLTAIPSVVFSQP

SEQ ID NO: 204397 - protein, 57 aa, Glycine max
  Clone ID: PAT_MRT3847_26598C.1.pep
PGRKPFLRSQIENGIILVQGFGLPPSAGKLREVVVPGACPPMLLIYNSSDAAKEGYS

SEQ ID NO: 204398 - protein, 71 aa, Glycine max
  Clone ID: PAT_MRT3847_26599C.1.pep
QNRYKMVHYLYNKTWKWGRGQNPLEILLTLIKLLIWKRVQKLHFKTFAIWAIGEAPIIKTNSMQNPVFFKK

SEQ ID NO: 204399 - protein, 51 aa, Glycine max
  Clone ID: PAT_MRT3847_2659C.1.pep
KIRVLNNGSKGFVGTGTVEYGDSCKGKDTWSDPNKYLLWDAVHPTQKMSSK

SEQ ID NO: 204400 - protein, 341 aa, Glycine max
  Clone ID: PAT_MRT3847_265C.1.pep
SPLYNGSTCATIKESQNCIINGRHDSTYLRWRWKPSECHLPRFEPNTFLQLIRNKHVAFVGDSMARNQIESLLCLLATASTPKRVHHKGSRRWHFDSHNASLSLYWSPFLVQGVQRTSTGPQHNVMHLDLVNEKWARDVDQMDLIVLSVGNWFLVPSVYYEGGKVLGCLKCHGLKYSDVSFYGSLRKALRIALNSIIERKVGKGNGVDVILRTFSPSHFEGDWDKGGSCSKTKPYRKGEMQLGEVDAEIRRIEMEEVENAKAKVKQFGGFRLEALDVSKLALLRPDGHPGAYMNPFPFANGVPKRVQSDCVHWCLPGPIDSWNEIFLEMMKKWEKQPRSQQ

SEQ ID NO: 204401 - protein, 126 aa, Glycine max
  Clone ID: PAT_MRT3847_26600C.1.pep
GPFRRIIYREPRNCAIGSLSVNIQIGLNFFTRKSDPGTYFIETLDIEQQKLSRNSYGHYSSLRGPIRTHIISRCSKLNNRKLAGNSKGHNVSLRRPIHAHYLSRHLKLNQTEAFSRKFNLVITFIL

SEQ ID NO: 204402 - protein, 90 aa, Glycine max
  unsure (1)..(90): unsure at all Xaa locations
  Clone ID: PAT_MRT3847_26601C.1.pep
RGLVDPESDDEEDGNDEHDATVEIGSKRKRQRSKSRHQVQKPKKFHEQRPDDSHEEGPEDDDNSEDEYLKDFLESRPXLKGTAXRPPSTG

SEQ ID NO: 204403 - protein, 44 aa, Glycine max
  Clone ID: PAT_MRT3847_26602C.1.pep
GFLRNLIKFIGIQLRFFKTSKKFFGIKKYINFYEFFLRMNFNRF

SEQ ID NO: 204404 - protein, 56 aa, Glycine max
  unsure (1)..(56): unsure at all Xaa locations
  Clone ID: PAT_MRT3847_26603C.1.pep
HASSHASVRLLEDYIRGAARYILEXVTEIAGVVFFFDPKPIQGYWNGACSHTNYCT

SEQ ID NO: 204405 - protein, 53 aa, Glycine max
  Clone ID: PAT_MRT3847_26604C.1.pep
EKLAHYQHRRGFIWGERFLHIFFIRQLQPIVLRCDQPNTYRIIRLKYITERSS

SEQ ID NO: 204406 - protein, 464 aa, Glycine max
  Clone ID: PAT_MRT3847_26605C.1.pep
MGPSSKHTPRSPTYLIPCVIALALFSLTGLLLYKVDDVASRTGTVVGHNLEPTPWHVFPHKPFDEESRQQRTYKILQCSYLTCRYAAGAVGGSRRSFAGGREECPEFFRAIHRDLAPWLESRISKAHVAAAQRYAAFRVVIVEGKVFVDWYYACVQSRAMFTLWGLLQLMRRYPGRVPDVDMMFDCMDKPSVNKTEHQAMPLPLFRYCTTKEHFDIPFPDWSFWGWSEINIRPWQEEFPDIKRGSRSVTWKNKLPWAYWKGNPDVASPIRTELINCNDSRKWGAEIMRQDWGEAARNGFKQSKLSNQCNHRYKIYAEGYAWSVSLKYILSCGSVALIISPQYEDFFSRGLIPNHNFWLVDSLNLCPSIKYAVEWGNQHPVEAEAIGKRGQDFMGSLNMDRIYEYMFHLISEYSKLQDFKPTPPTTALEVCVESVLCFADEKQRMFLNKSTAFPSHKPPCNLKPA

SEQ ID NO: 204407 - protein, 47 aa, Glycine max
  Clone ID: PAT_MRT3847_26606C.1.pep
SFFLRRVESVFRKPRHYEWCRFFFQRDIKSEVGRDGTSCRLIDIDQY

SEQ ID NO: 204408 - protein, 123 aa, Glycine max
  unsure (1)..(123): unsure at all Xaa locations
  Clone ID: PAT_MRT3847_26607C.1.pep
AKKLSVNPSQIKQYEGNVRTQVSMWFDSNDATESEVHDXENKFWSGLLEKCYLPRGSTXFGHLAERLTLNAKFNLIEWRNQWISQSNKWQEGNELYPVKDKEHSVSISEAVYAKDFQNNFMSH

SEQ ID NO: 204409 - protein, 152 aa, Glycine max
  Clone ID: PAT_MRT3847_26608C.1.pep
LNGLLEVSFSLSFRSLSTIHLLHFTIFHFHFSLPPKMHSSLSLSFSATSSSAATVSRSRHSFHSPAVATPLNLRFCGLRREAFASGLAASRNRHHSHLPRRPRSAAVSAALSSNGIPPKSFDYDLLIIGAGVGGHGAAQNSLLKKTKPDISE

SEQ ID NO: 204410 - protein, 68 aa, Glycine max
  Clone ID: PAT_MRT3847_26609C.1.pep
SVKVEENEVGSAKVNEFFDVATSSEEMSRTTVDKSEDVPNSSSGNEEKSHSRKSSSSSSSSSSSSDSD

SEQ ID NO: 204411 - protein, 133 aa, Glycine max
  unsure (1)..(133): unsure at all Xaa locations
  Clone ID: PAT_MRT3847_2660C.1.pep
REKAHLGDMETGVIEPLPTKPTWVETPKDSQQAQPXDKNPSXLDYNCLEIXGTNHEGYYPLLGEHPKYPPPMVPLXKKNFLMTLTTCVCEXFDCVEEEDCYVETNPSAGLKTTEGTDSMDRNPLGTCEGLTYV

SEQ ID NO: 204412 - protein, 1289 aa, Glycine max
  unsure (1)..(1289): unsure at all Xaa locations
  Clone ID: PAT_MRT3847_26610C.1.pep
MGSEIGIKVRKVVVISIRGGYRSACNHPFLVGFFCFLLLLYRSFPFLFSVLVSASPVLVCTAILLGTLLSFGQPNVPEVEIEEKVTHDISSFQAGFSEGDTVFADRDESYFVKGYSENRSDVEERGIEEEASLVSERDNRAEEDRGLLTFRMSVKNEEIIXEVNSDLQVVRARSLEDINIALNQVSEGNKGELPNSLDSKDTSVKVEENEVGSAKVNEFFDVATSSEEMSRTTVDKSEDVPNSSSGNEEKSHSRKSSSSSSSSSSSSDSDXIPSGHFEQEEYKFLIYCENKSAIKWTEDDQKNLMDLGNLELERNKRLENLIARRRARRLMTEKNLIDLDCVDIPCNVAPIAMTRHNPFDFPDDSFAAMGLPPIPGSAPSILQPRRNPFDIPYDSNEEKPDLKADSFQQEFKVFHQKEAFFRRHESFSVGPSVLGLSKQERYDWKPVFISERMASEGTSYPSFQRQSSEVSDSKLSSVPDTESVSSIDQDDRKFSEQDLSQETEFISNIDHVSDVVEHGSQSSGENDSVEMIQVEESNACQDEGEIVLGGVEDPSEMVFYPETGEVEIHEQFNAGETHLRREPSHEESVGSSRSSHSSLSEVIDSIPDENMEKAENLQQGDDHLSESRISTQASVEESIFQQVSGEVEENHHVDPVYDLSPQASETLQLFPSISSHDSAMELSERALPPASVEMTANAAEEESKVHDHRLEGNTSDHDKTQAASSELHEEAKNELSSEKSEDVNNVTANELSAVAPNFVDQNGSTMAEPQVVPVSVDSNLSSDIGSIKDVTNLGLVHGQDLADHIRADSEILHQDNVDSPDSDYQMASEKSHLSDNESVEESALPNAESRFDNANMSTPVQDADEMFDSAASDAHHISSNGSSMPAPRDFQLSPTAGPSPVVHPDSPSEETEHIEKFSSNNDDIFQIQQGKTNIHQDLDKNTVAFTSGSQHEIDVKSPSNLENDLSSSDKSVVAQSSSDHDEIQSSNAIQVESAHCFGTSNDEVGELHDAVDKFPPSISSVTSEKFETPKFRSPTGEADLEVDRHGEVENEDQNEVLETALHSEESMSQVTEENSNEEFDDMKEIDEEFLSELDTVGDFSVNDAGVSLHTGIEHEKIRDAQLSSLPKDVKTEEFEQDIPVLEARSLEDINLAFKQLQEGVDVEEVINRSTIKDQNVGGESKDHLEINSDLQVVEARSLEDINIALNQVSEGNKGELPNSLDSKDTSVKVEENEDGSAKVNEFFNVATSSEEMSRTTVDKSEDVPNSSSGIEEKSHSRKSSSSSSSSDSD

SEQ ID NO: 204413 - protein, 107 aa, Glycine max
  Clone ID: PAT_MRT3847_26611C.1.pep
GEKSFFEFKIRVGGNKFGKIPRTSNIPKFITLKVSGPNSFWAYPLPPNYVPQFPQTIHGSQVTIPKRGHSMTQGDFPLFIFPPPKQKFEGEKIIKTPGFQKIGNNFG

SEQ ID NO: 204414 - protein, 40 aa, Glycine max
  Clone ID: PAT_MRT3847_26612C.1.pep
NFIDSLISLTFMFHVLIWTSKFRLLFFSLRPLTKLCFSKF

SEQ ID NO: 204415 - protein, 93 aa, Glycine max
  Clone ID: PAT_MRT3847_26613C.1.pep
GVYDMIMLSTVDMHWLRDLLVSILGFWPMTINGLVLPEAMVGPTLHDVAAILNLPIYGEELPPLYKTCCSTTANTFSIKFTKDDFVLDQVASE

SEQ ID NO: 204416 - protein, 90 aa, Glycine max
  unsure (1)..(90): unsure at all Xaa locations
  Clone ID: PAT_MRT3847_26614C.1.pep
ITTQNGALNSSFGGRARDDIYTICCXDCELWYSACTKAMTMSFNSNPSSGAWSLEFLKRTGFHCDIIXVTGRAATSMEEGQVTSAWVMSF

SEQ ID NO: 204417 - protein, 48 aa, Glycine max
  Clone ID: PAT_MRT3847_26615C.1.pep
RFHENASHTIKGDGRDIINISTTCVKYKKNKLDISSTRLSLQSVYKIH

SEQ ID NO: 204418 - protein, 101 aa, Glycine max
  Clone ID: PAT_MRT3847_26616C.1.pep
KLVISYAVSRLNPPFNLSIGHGNLIVLQTNETQSISSDLQSSKTAYHQPAKPYTKSIKIGTSKKKHNNPQSKTNTTTRLREQIEIIRTREHGKDEEQSTKA

SEQ ID NO: 204419 - protein, 59 aa, Glycine max
  Clone ID: PAT_MRT3847_26617C.1.pep
QITIILEILDFICVVHFQKLNVVYPMPCTNKKYVRVNKKRNTLIYIILYSLNTEPRGRG

SEQ ID NO: 204420 - protein, 55 aa, Glycine max
  unsure (1)..(55): unsure at all Xaa locations
  Clone ID: PAT_MRT3847_26618C.1.pep
TLLFLNTLYPNSSIIKISXFLIILKSPKFNISIXLFFPFPSHSSIFPHFTTFFFH

SEQ ID NO: 204421 - protein, 43 aa, Glycine max
  unsure (1)..(43): unsure at all Xaa locations
  Clone ID: PAT_MRT3847_26619C.1.pep
DLSYISLHASMCFWNLLIQKKKKKKGRPPLKRPASGRGQXGLL

SEQ ID NO: 204422 - protein, 432 aa, Glycine max
  Clone ID: PAT_MRT3847_2661C.1.pep
GSSSHNLLSGPIPPKLIKGGLVESFAGNPGLCVLPVYANSSDHKFPMCASAYYKSKRINTIWIAGVSVVLIFIGSALFLKRRCSKDTAAVEHEDTLSSSYFYYDVKSFHKISFDQREIIESLVDKNIMGHGGSGTVYKIELKSGDIVAVKRLWSHSSKDSAPEDRLFVDKALKAEVETLGSIRHKNIVKLYCCFSSYDCSLLVYEYMPNGNLWDSLHKGWILLDWPTRYRIALGIAQGLAYLHHDLLLPIIHRDIKSTNILLDVDYQPKVADFGIAKVLQARGGKDSTTTVIAGTYGYLAPEFAYSSRATTKCDVYSFGVILMELLTGKKPVEAEFGENRNIVFWVSNKVEGKEGARPSEVLDPKLSCSFKEDMVKVLRIAIRCTYKAPTSRPTMKEVVQLLIEAEPRGSDSCKLSTNDVSNVTVIKKPYEL

SEQ ID NO: 204423 - protein, 72 aa, Glycine max
  Clone ID: PAT_MRT3847_26620C.1.pep
KGTLRTLTLPPKIHRPPFYREGIPKGGKPFPEKISRWDQLYPIFFFILQFFPFSINGWKVVLGIGLLNHPRN

SEQ ID NO: 204424 - protein, 89 aa, Glycine max
  Clone ID: PAT_MRT3847_26621C.1.pep
LRLANLRTHLASAYAIRMRSSGGSVLPLWDTLYFACVILALGIMLGTNPQSHGYGPRPTLRFFTAVGLPAIRYTAGHILYAGSKSMTKC

SEQ ID NO: 204425 - protein, 64 aa, Glycine max
  Clone ID: PAT_MRT3847_26622C.1.pep
TTSIGTSNYSWSDALRGLYVLMLPLGVACFPSISIKTYGIILVTVCVSVHLWVKLTMSQAGVLY

SEQ ID NO: 204426 - protein, 45 aa, Glycine max
  Clone ID: PAT_MRT3847_26623C.1.pep
FSFFPYINFIKINFISSNEKKNHLLDQKPNPDNMLIYELVLIVLI

SEQ ID NO: 204427 - protein, 30 aa, Glycine max
  Clone ID: PAT_MRT3847_26624C.1.pep
SFCSPFNFLFYIVQGFFPIIILCSIVMAPI

SEQ ID NO: 204428 - protein, 131 aa, Glycine max
  unsure (1)..(131): unsure at all Xaa locations
  Clone ID: PAT_MRT3847_26625C.1.pep
PPQIVFSLPQQGVCGAFTQNPQHRKSFLKLTPHKVKKNFFXNKKNQSPIPLFLKFSKNTNFFKGKSPRFXNIRRGPPKTGFSFFKNKSLKGPRFFQFDYVKGRVLRAFPPPPKNQVLFFTPSKGPPEYCLN

SEQ ID NO: 204429 - protein, 35 aa, Glycine max
  unsure (1)..(35): unsure at all Xaa locations
  Clone ID: PAT_MRT3847_26626C.1.pep
VRSSXSLCRVVETRCWDATXXVSARHIRSSKRAGV

SEQ ID NO: 204430 - protein, 79 aa, Glycine max
  Clone ID: PAT_MRT3847_26627C.1.pep
ASLWDHLYTLIESSTLTIVAYIWNLLILCHHRPQHLNWIGSSTHQITQPMHVCLAQFEFFICVHCYEIAAFESRTGMDK

SEQ ID NO: 204431 - protein, 96 aa, Glycine max
  Clone ID: PAT_MRT3847_26628C.1.pep
MSNSSFLDRPLLKVSRPVAACSRCRTAKIRCDGKLPACSACERAGKADTCSSSDEFPRGKERSYVGSLEAYCERLEKRAAELRERKKILTGGEEGV

SEQ ID NO: 204432 - protein, 233 aa, Glycine max
  unsure (1)..(233): unsure at all Xaa locations
  Clone ID: PAT_MRT3847_26629C.1.pep
EKKDWLFGLVTSWFEAKKRLNRQLAALACGLFVESEGVDFERRLGTLLPVIEKEIDPENFKDIIEETEEKAADRLLFGFLTLMRKLIKECSIIHFTKPSETLSKIWSHVHSHLRHPHSWVWLTAAQIFGLLFASCQPEELIQKWKGKKTKKKTSDPIAVRFLTSDLGQKMKSISLASCHQLHSKFLDESLGEQVVKNLLFIAKVLYLLELESGNKRGEVKDSEEQDTXADALA

SEQ ID NO: 204433 - protein, 59 aa, Glycine max
  Clone ID: PAT_MRT3847_2662C.1.pep
ADQCVGFVHHDKSSKVTVFPARLGMPFQMGIYDGEDECESHNDLRHEEERIQKVKRHLA

SEQ ID NO: 204434 - protein, 71 aa, Glycine max
  Clone ID: PAT_MRT3847_26630C.1.pep
IDSKIIHEGLKQGASSNLNWQSPERSKSSNAIFHVTNKYHGFTMNKIIETSQKNHRPCITNLVLFNTLNAT

SEQ ID NO: 204435 - protein, 73 aa, Glycine max
  unsure (1)..(73): unsure at all Xaa locations
  Clone ID: PAT_MRT3847_26631C.1.pep
VSFKLVYGFPSGAYPSPSGAYSXSKGYLSFYGFPSHGGFPSAGYSPAGYSSAAGGYPSAGYPSLCYPGSSSPH

SEQ ID NO: 204436 - protein, 110 aa, Glycine max
  unsure (1)..(110): unsure at all Xaa locations
  Clone ID: PAT_MRT3847_26632C.1.pep
MERSGGMVTGSHERNELVRVRHGSDSGICQICGDTIGLTATGDLFVACHECGFPLCHSCYEYELKNVSQSCPQCKTTFTSRQEGAEVEGDDDDEXDADDLDNGINYGQGN

SEQ ID NO: 204437 - protein, 40 aa, Glycine max
  Clone ID: PAT_MRT3847_26635C.1.pep
VHVCIKWLRHETRQSMCFYLELRGSSLGIHFKWKRSRLYL

SEQ ID NO: 204438 - protein, 66 aa, Glycine max
  Clone ID: PAT_MRT3847_26636C.1.pep
VDSNAIDLHDTLWNIDGDLILASGYLHHIPLYWIQACLTSISNIHSSFLPAFARVAFYLMIDHEAE

SEQ ID NO: 204439 - protein, 152 aa, Glycine max
  unsure (1)..(152): unsure at all Xaa locations
  Clone ID: PAT_MRT3847_26637C.1.pep
LRSYSALQADDRFWPADYGGPLFLLPGLVIGLSVTGVLNVVLTPEHQSEMRRYLFNHQNEDGGWXSHIEGSSTMFCTALNYVTLRLLGEDIDGGEGAIQKARTWILHHGGVTYIPSWGKLWLSVLGVYEWSGMKPIPPETWLFPYFLPFHPG

SEQ ID NO: 204440 - protein, 74 aa, Glycine max
  Clone ID: PAT_MRT3847_26638C.1.pep
AEPYSIKIYQRDQAATGGQSCIKRSLRWLMKATNRSELAGRGSRFNTCPDMGAVVILMTWKNASMIKSLYFPTA

SEQ ID NO: 204441 - protein, 58 aa, Glycine max
  Clone ID: PAT_MRT3847_26639C.1.pep
LETQDGAFHLCLESLFSLRVTLFMEQLNHLSVTLLRFTTDLLSSTLTVNKACLCLMWV

SEQ ID NO: 204442 - protein, 40 aa, Glycine max
  Clone ID: PAT_MRT3847_2663C.1.pep
VVFFLSVALILCLISISFPVSYFVCFSPLPPYFVICNVLW

SEQ ID NO: 204443 - protein, 237 aa, Glycine max
  Clone ID: PAT_MRT3847_26640C.1.pep
MQSSISQSEICITDYLLPQEVPSQFQFPDMSNNNIPMNHTNLQMPQITSFSKPPRSSSNLSNRKPSLRNITIPSITSDETNNIKENKHYRGVRRRPWGKYAAEIRDPNRKGSRVWLGTFDTAIEAAKAYDKAAFKMRGSKAILNFPLEIGESEESVSSCIKVGVKREREEESKSNNYEKSEFNNNNNSNKHVKKEECSPKAVCPLTPSCWKGFWDTDVMGTIFSVPPLSPLSPLMVV

SEQ ID NO: 204444 - protein, 195 aa, Glycine max
  Clone ID: PAT_MRT3847_26641C.1.pep
MSQTTATTTTIATTMYNNNQVSSSSFSSDETNNTKDDKHYRGVRRRPWGKYAAEIRDPNRKGSRVWLGTFDTAIEAAKAYDKAAFKMRGSKAILNFPLEIGSDQSKEESSSSSSSVSSSSIVIKVGVKREREEESERKNNYEKSEFNNNSNSNKHVKKEECPLTPSCWKGFWDTDVMGTIFSVPPLSPLSPLMVV

SEQ ID NO: 204445 - protein, 140 aa, Glycine max
  unsure (1)..(140): unsure at all Xaa locations
  Clone ID: PAT_MRT3847_26642C.1.pep
MEHLDIVSEVKHQRIKTNGIWLHVAEKGTGPLVLLLHGFPETWYAWRHQINFLAHHGYHVVAPDLRGYGDSDSPIDPSSYTIHHLVGDIIGFLDHFGQHQAFIVGSDWXAVIGWHLSLFRPERVKGFVCLGFPYYPRSPT

SEQ ID NO: 204446 - protein, 146 aa, Glycine max
  unsure (1)..(146): unsure at all Xaa locations
  Clone ID: PAT_MRT3847_26643C.1.pep
GESQGEENPKKGAGPKKFTPTRFPKEEPHVLSXGGGNLARIPPQTREANHFQQKSGGLEATPQEQTSIQVFQTGRRIKSVCRKKVGVKGGPPFFPAPAGRQTGRPSPXWAPSQQKWEAXKGKKQTSPKHWGRKGWHTREERENRGK

SEQ ID NO: 204447 - protein, 111 aa, Glycine max
  unsure (1)..(111): unsure at all Xaa locations
  Clone ID: PAT_MRT3847_26644C.1.pep
LCQFSEAKIKDLSSQLQSQTAQQFRMPDLGSVTPKQDDPAGSAAXLKKRSXVDETGVEPHNIDLVMTQPVVSKSKTVKALKPHNGDIVGAFMELAPSLGFLFQLFVFWQLY

SEQ ID NO: 204448 - protein, 82 aa, Glycine max
  unsure (1)..(82): unsure at all Xaa locations
  Clone ID: PAT_MRT3847_26645C.1.pep
EKMRLKKEPWAIEEDQILRCYIDKHGHGXNWPALSKQASLLRCGKSCILRWINYVRPDVQRRNFTIDEEDTIIELDDMLRNR

SEQ ID NO: 204449 - protein, 45 aa, Glycine max
  Clone ID: PAT_MRT3847_26646C.1.pep
IRCICSTHGLIAQVAAILIFLKLCIIHVMLGSGVLVNSHFRHKCR

SEQ ID NO: 204450 - protein, 266 aa, Glycine max
  Clone ID: PAT_MRT3847_26647C.1.pep
MALHISSGCFTVMCNSRVHRIRAVASEGSATLNTVVEEKVKLGGSDLKVSGVGIGAWSWGDTTYWNNFEWNDRNEKAARAAFNTSIDGGLTFFDTAEVYGSGLALGAINSEVLLGRYIKERKEKDPEVEIEVATKFAALPWRFGRQSVLNALKDSLCRLGLTSVDLYQLHWPGVWGNEGYIDGLGDAVEKGLVKAVGVSNYSEKRLREAYEKLKKRGIPLATNQVNYSLIYRAPEENGVKAACDELGITIIAYSPIAQGALTGKYT

SEQ ID NO: 204451 - protein, 89 aa, Glycine max
  Clone ID: PAT_MRT3847_26648C.1.pep
LIVCSHGVSCWMLRSICTEKSTAISMRFPTERSSSELQTVAFEMLGEAISRAGPSFPVDIWRSILEVFRKTMDVLALKTPVVEDSVMST

SEQ ID NO: 204452 - protein, 226 aa, Glycine max
  Clone ID: PAT_MRT3847_26649C.1.pep
GIPGEDPRVRDAIGSGCWGLWKWNPLPQSRRRRIRSNSGSADAAGGGGYRFPVKQAVTAASLALTGDTIAQLSHRWRKAKEGGGSVSQDELWRYLSDHDWLRALRMTSYGFLLYGPGSYAWYQCLDHCLPKPTVQNLVLKVVLNQIVLGPCVIAVVFAWNNLWLQKLSELPEKYRRDALPTLLYGFRFWIPVSVLNFWVVPLQARVAFMSMGSVFWNFYLSSTMTK

SEQ ID NO: 204453 - protein, 71 aa, Glycine max
  Clone ID: PAT_MRT3847_2664C.1.pep
LISLSQLNTEQKHPRRPQKKKKKKKKKKKKKKKKKKKKKKKKKKKKKKKKKKKKKKGPPKRIKPNLPLNAT

SEQ ID NO: 204454 - protein, 59 aa, Glycine max
  Clone ID: PAT_MRT3847_26650C.1.pep
QLWSCSLKDICFYVSRHIMYLVRGALPALFEIFFFALFIMVWEFGFFQRVRFFLLIVRS

SEQ ID NO: 204455 - protein, 119 aa, Glycine max
  Clone ID: PAT_MRT3847_26651C.1.pep
EYGSPLNKYMTTAAREIHIRLSNYALLTNVNFLWPSTIISHPKLRRSDPRRMQELSDNRDVPRMLPPPTWLNIADGREQSCLDSEMRVDRYNRTENHSESEDLRDFRAGILSDPLYNQL

SEQ ID NO: 204456 - protein, 84 aa, Glycine max
  Clone ID: PAT_MRT3847_26652C.1.pep
TSCPRRQKGRTGESKNQRRKEQPKPKAGEGPPGNQTPPSQHAQGPRTRPRRPGRDPRPHRKAANHYPPMGKQDPRCGTRTPHQG

SEQ ID NO: 204457 - protein, 78 aa, Glycine max
  Clone ID: PAT_MRT3847_26653C.1.pep
PQAVAQWTVWNRMATLRTPLIIDSSRHSCCQLSIDLLGVGILVDGTGDWITLMQRSPHCNFVRVAGWKNGCLMVKIVM

SEQ ID NO: 204458 - protein, 46 aa, Glycine max
  Clone ID: PAT_MRT3847_26654C.1.pep
MILFVCENEMQKIMQVSCVYIFLFMNLKFIIGVLGCIDCVLRPSAD

SEQ ID NO: 204459 - protein, 76 aa, Glycine max
  Clone ID: PAT_MRT3847_26655C.1.pep
TRGPPRGPPKGPPTGPKLGGGKFFWGGNPPFSKKKPPLSPKKKKKKKKKKKNKKTKKKKNQKKKKKKKKKKKKNKR

SEQ ID NO: 204460 - protein, 57 aa, Glycine max
  Clone ID: PAT_MRT3847_26656C.1.pep
TERGHTLPIHHHQLLFRIKATSKSSKNLEPHGIVNKRLGVQVILGFESLRIIAEKER

SEQ ID NO: 204461 - protein, 56 aa, Glycine max
  Clone ID: PAT_MRT3847_26657C.1.pep
HYLLSMKLLHLLGLEYEHQYSISYLNPTNNHHYQQFHLLYSFLYSFLFLYSTGSGP

SEQ ID NO: 204462 - protein, 56 aa, Glycine max
  Clone ID: PAT_MRT3847_26658C.1.pep
SISLLPFFYPFYYFSINVFFASLIHCHSSSPNILPQLPPLLTNPFPLFPFLACIKY

SEQ ID NO: 204463 - protein, 43 aa, Glycine max
  Clone ID: PAT_MRT3847_26659C.1.pep
SIEPFSRHLPHPMTGRISDHPSPCLSSGEKKVRRPSRKADAWA

SEQ ID NO: 204464 - protein, 126 aa, Glycine max
  unsure (1)..(126): unsure at all Xaa locations
  Clone ID: PAT_MRT3847_2665C.1.pep
NKAFSKKKIRGLIRKGLQGLTPMNKKGSFHRNLKPENMLVPKEVLKMADFERVKKEPPFSLYTQKVPPRGNQVPKPWWQAPGKTPAVNMGPVGAIXVDLFTLTPLFPGEMEKNQLTKKYGILGMPN

SEQ ID NO: 204465 - protein, 40 aa, Glycine max
  Clone ID: PAT_MRT3847_26660C.1.pep
NNFKSKGKTLTTNVYKLMIIFAGERYGYIGDFHPIQVVRV

SEQ ID NO: 204466 - protein, 95 aa, Glycine max
  unsure (1)..(95): unsure at all Xaa locations
  Clone ID: PAT_MRT3847_26661C.1.pep
MKQDRDHTTLRTADPIQEVKPVGDYLMSKHRKDGHAHEXTSKADVATAKSXAVRIPIGIVIKATTSGHIPNYGYEFESLESTAGTLVTFRALLYT

SEQ ID NO: 204467 - protein, 46 aa, Glycine max
  Clone ID: PAT_MRT3847_26662C.1.pep
LSHCPLCCALENVRLEMLYCLRIFISHVVILNRNTGCANEVANHVL

SEQ ID NO: 204468 - protein, 33 aa, Glycine max
  Clone ID: PAT_MRT3847_26663C.1.pep
DLGGEKPGLFVCFFPPFSIGGFVKPGYLNPLLV

SEQ ID NO: 204469 - protein, 65 aa, Glycine max
  Clone ID: PAT_MRT3847_26664C.1.pep
GKFKKGPPFLKNLKSGPLEEGTHKKTFSINFILAGPGMFLSLQKRLKRWAKQIGRREGFLLSGRL

SEQ ID NO: 204470 - protein, 217 aa, Glycine max
  unsure (1)..(217): unsure at all Xaa locations
  Clone ID: PAT_MRT3847_26665C.1.pep
LVQRNAMLLNLPNAVLSLWRXAVGHLHFEGAKMTSPYIKCTDCFFLSFGSXTDDTMNCEALPHKLWLAAEMPEKGGWKFSHEELVTAWTTQVXPAAAMMADGCTYVYATALDSSVTTIPGDCVLGVSLTTMNTMCAYGLRPAMSRSRLLGTIPHSVPHPTVRNQRATXLTPLNCDSSTHTSCQFSIDLLGGGIXSGXTGEGITLIQSPPIDNSMRGA

SEQ ID NO: 204471 - protein, 285 aa, Glycine max
  Clone ID: PAT_MRT3847_26666C.1.pep
RVRTKWCFSKLKYLTVDGCQFLTDVVIPFYLLPFLTHLQQLQVSHCGSVKSIFDITQEREITTMGLGAAAFPRPLPFSLKKLTLERLPKLENVWNEDPHGILTMQLLQHVIVEKCKCLTSVFPASVAKDLVKLEDLFVQDCEELMEIVAEDNADPRGANLELTFPCPCVRSLKLQDLPKFKYFYYCSLQTPTEDEMPTSNLPCLSLGEKGLEMMKRGEFQRNFLHKLQVLTLCFRIGSNVFPYEILQLAPNIEKLVVCDGSFKEIFCFDSLNVDAGLLLQLKVLC

SEQ ID NO: 204472 - protein, 125 aa, Glycine max
  unsure (1)..(125): unsure at all Xaa locations
  Clone ID: PAT_MRT3847_26667C.1.pep
GKKNLKKKFKKKKKKKKKKKKKKKKKKKKKKKKKKKKKKKKGGGRLKETNLTTAGWQXKSFLKGAPKKNPGAGVKKRGKGKNPGVPKKNPLEKNPLFPRGEKKKKAXKNAPSKKWPTQKGKGNPP

SEQ ID NO: 204473 - protein, 64 aa, Glycine max
  unsure (1)..(64): unsure at all Xaa locations
  Clone ID: PAT_MRT3847_26668C.1.pep
CECCVAXXMXXXXLSGPPGFRPFFFNNREPMILYFSILYVTHTGTRVTIFTTRSPKRSKFGTSQ

SEQ ID NO: 204474 - protein, 81 aa, Glycine max
  Clone ID: PAT_MRT3847_26669C.1.pep
QAFIAHLDEPLRTTFQWFMHYKDIIALPITSWNVQQGFVTATLLRVLKARDWDPYEAQKMSVDSANSTVHNEIANILSNTI

SEQ ID NO: 204475 - protein, 49 aa, Glycine max
  Clone ID: PAT_MRT3847_2666C.1.pep
IFTSMPRGLVFQLNKTGHTAISGSTLVLPHKNFPNLVFVTLFMGSKKNF

SEQ ID NO: 204476 - protein, 148 aa, Glycine max
  Clone ID: PAT_MRT3847_26670C.1.pep
MASSSYSNSSCAACKFLRRKCMPDCIFAPYFPPEEPHKFANVHKIFGASNVSKLLNEVQPHQREDAVNSLAYEAEARIKDPVYGCVGAISVLQKQVLRLQKELDATNADLIRYSACNEIPNTTTHHGGRRMSDDGGGGGSSLAHSHCL

SEQ ID NO: 204477 - protein, 71 aa, Glycine max
  Clone ID: PAT_MRT3847_26671C.1.pep
SLSFCCALLFFFLSFIVSLFLFMLYASKFLFFTMCAWFFVVSKSLLINLSIKLVLLHSIHGLLTLLFFQVH

SEQ ID NO: 204478 - protein, 57 aa, Glycine max
  Clone ID: PAT_MRT3847_26672C.1.pep
LKPRIICHDATSMPLLLAGNNRLSRNVHRNDVIRSRAILHRHHSLIRPHTADSRSRP

SEQ ID NO: 204479 - protein, 40 aa, Glycine max
  Clone ID: PAT_MRT3847_26673C.1.pep
GAQEYICQRSLVAPPRPDKKKTLFILGKGSLVNLPSLLML

SEQ ID NO: 204480 - protein, 153 aa, Glycine max
  unsure (1)..(153): unsure at all Xaa locations
  Clone ID: PAT_MRT3847_26674C.1.pep
LRFQACAAVGSTXGLTATTLSESGLQKDSGIIVDSLVRTFSVAYNVDEPLETDFVEGNFGFDIKSRCTLEKVSSTEALLERGKTYQYDIIGARSHFSXRIXEMEDHYIPILIVAILRHIIEPSIMMIKLRWKHNLLTLSFDDDETFNGYKLDL

SEQ ID NO: 204481 - protein, 116 aa, Glycine max
  Clone ID: PAT_MRT3847_26675C.1.pep
ERWRKWLVWAAEVGGFPLQRKFSLPWCPASSLHPREQTDSGKAGRLWRLIYRRPSCLPAPLELPVTWLPSNPYSPNNLWRGLMRGGWIPPSSPLPSPFSHVHLLGVEFMLSPQRLC

SEQ ID NO: 204482 - protein, 113 aa, Glycine max
  Clone ID: PAT_MRT3847_26676C.1.pep
LPIFGFHKALEGGHLCASPPFLFVAINCPQAAGPRLFLIILSPVFLTLATGNGASTSANVYLATHWNPNLNWVSNSHPFGKFCAQTSSTVVSSFVAVVVLVLLVVMSALSLGK

SEQ ID NO: 204483 - protein, 113 aa, Glycine max
  Clone ID: PAT_MRT3847_26677C.1.pep
REKWPLNFLALRNLKAGQSEGGVLVKSKTFFSSFKEVLTPKWALCILHSWGKLILAPGWRFFFNFKQKPFFIAPFGILKGGIVLANRVNRSRASFFLVFLNWISPLGSSNVCL

SEQ ID NO: 204484 - protein, 98 aa, Glycine max
  unsure (1)..(98): unsure at all Xaa locations
  Clone ID: PAT_MRT3847_26678C.1.pep
ESLHPXPNNRRGSPEKTSPAPTHGAQQQAPTRPRRGQKAPTRTEPPPGTXQTQSNPPRHPRRLRDPNRSPXPRRTRKSDEPARRKRPRGARPTEERSR

SEQ ID NO: 204485 - protein, 81 aa, Glycine max
  Clone ID: PAT_MRT3847_26679C.1.pep
KKIEVMLAQRFSPPGKRGLWDGKGGLTPFLVEIKGGALLEEIIFFFLEGAPPLKTRDTEPTNRCKGKKNPKHRDHTRAAGD

SEQ ID NO: 204486 - protein, 45 aa, Glycine max
  Clone ID: PAT_MRT3847_2667C.1.pep
LFFQGQYVKVNLPLSVSIVIRNTSSCSYFLTVFPRVFFYLLMQVA

SEQ ID NO: 204487 - protein, 46 aa, Glycine max
  unsure (1)..(46): unsure at all Xaa locations
  Clone ID: PAT_MRT3847_26680C.1.pep
PITSKLRRTSTSSTKFPTLLDNTMFNFPTYKNRFNLSFYLXYRISK

SEQ ID NO: 204488 - protein, 90 aa, Glycine max
  unsure (1)..(90): unsure at all Xaa locations
  Clone ID: PAT_MRT3847_26681C.1.pep
ASYVSFLVLILASLILMPKRLATYYKPIKKPPLYKPSVYKPPMDILPFYXQKASVYKPKPXVNNNPPYKKPPYKKTPYGKYPPVEDNTHA

SEQ ID NO: 204489 - protein, 51 aa, Glycine max
  Clone ID: PAT_MRT3847_26682C.1.pep
AAIGSLMASVPVCGHLASVPFSCHMGAVPFGSPRATPAIGRLIATGTSVVC

SEQ ID NO: 204490 - protein, 77 aa, Glycine max
  Clone ID: PAT_MRT3847_26683C.1.pep
AKHSLHNKIHYYENINGDSLSTKQTMYTNLMKKYEKSTYEHNYDIKFKQKQLREKESMEEKETWVGSYPKQRAKKTR

SEQ ID NO: 204491 - protein, 56 aa, Glycine max
  unsure (1)..(56): unsure at all Xaa locations
  Clone ID: PAT_MRT3847_26684C.1.pep
MRISENKRVQDRPEIEKSTHEVLYQIGEXGSSNPRFLQLELEVKHTTQKQTDKVYI

SEQ ID NO: 204492 - protein, 99 aa, Glycine max
  Clone ID: PAT_MRT3847_26685C.1.pep
IIRWDNRMSASIPDEDIFYTVGFLHSSGFDNWKAYDAQNKEILQFCNDSGIKVKQYLPHYRTQEDWTNHFGPKWRTFVERKHQFDPKMILSPGQRIFNN

SEQ ID NO: 204493 - protein, 114 aa, Glycine max
  Clone ID: PAT_MRT3847_26686C.1.pep
KPPGYSGAYAPEKANLFTIIWPPVGKKNLGINPPPIFWKGPPPPKNHFYGPPILGPQSPISPPKLKSPPKSYEAKKSPGGFFFGPPPPPPPPPPPPPPPPPPPPPPPPPPPPPP

SEQ ID NO: 204494 - protein, 31 aa, Glycine max
  Clone ID: PAT_MRT3847_26687C.1.pep
HFIQLNNRSKISRQHYSRKGEYQRSGLSKRK

SEQ ID NO: 204495 - protein, 36 aa, Glycine max
  Clone ID: PAT_MRT3847_26688C.1.pep
DFCQTQFHMTSLSGMAYDRSVSLRQLSNELSGGRNQ

SEQ ID NO: 204496 - protein, 28 aa, Glycine max
  Clone ID: PAT_MRT3847_26689C.1.pep
SIVFHQPVHSTHLAPFQIDSVPVSRFYH

SEQ ID NO: 204497 - protein, 24 aa, Glycine max
  Clone ID: PAT_MRT3847_2668C.1.pep
DRFLVTVVPHRHPLRLAGLGVGPE

SEQ ID NO: 204498 - protein, 65 aa, Glycine max
  Clone ID: PAT_MRT3847_26690C.1.pep
NCGLQLLSRCCLHNGIVPALLCGLPSSLPVTTVVSGGGDGTIVSEVFTVLSLCSSSVNKDTQSVE

SEQ ID NO: 204499 - protein, 65 aa, Glycine max
  Clone ID: PAT_MRT3847_26691C.1.pep
RGVGRKLFEERPLLRQIPGLLQLRGPRARTFPMVPQPKEMGGKGFKPSFLIQLNPKGKGGLGPPK

SEQ ID NO: 204500 - protein, 43 aa, Glycine max
  Clone ID: PAT_MRT3847_26692C.1.pep
QTDLARDLYWHNAHIAEDKRLINTARTQSHHTGTLEHSDTHSL

SEQ ID NO: 204501 - protein, 96 aa, Glycine max
  unsure (1)..(96): unsure at all Xaa locations
  Clone ID: PAT_MRT3847_26693C.1.pep
LEMQEAYLGNLVNGVPELDLHRPKEAPPLRKEALFRIGWLEKAGVPTIAQIGEVHSMPKMMNASGSKGYIDLLVGLGLVGLXQGQGKLFPTKMVLM

SEQ ID NO: 204502 - protein, 58 aa, Glycine max
  unsure (1)..(58): unsure at all Xaa locations
  Clone ID: PAT_MRT3847_26694C.1.pep
KNSNLDHDVTYXYKLVPGVXERSFGLKVSQLXQLPSHCXRXAIVMXXKXXGTEQSGEG

SEQ ID NO: 204503 - protein, 379 aa, Glycine max
  Clone ID: PAT_MRT3847_26695C.1.pep
MDEFGVLTERFGLKPQGKSAPMARAKRPPNVADSQTRPNSKSPLNGSPSHQNSTFDFDYGFFSSSNNSNTDNKTQRFDDIFGVDAKSNGASFDYDSIFSGSNKPVSTSSYVDDIFGGMHGESVGVDDLLDKIGGLNTNAKSPNAKSPAFDDLIPGFGVSNNGVGMNNPSVTPNKPAAAAAASHDDPFLIFETASSSPSSESFLDALEQISKLNNSKGTKGGSPSLKSPPKPMSKVNRPSVSTIDELEDFAMGGAQTNASSRKANVKAAETKQNLAARMNNGKRVPAARVNQANGVDDLESFFSMGSRSSSVPKSRTPTMDRMYDNQMKNKGKPEVSPRVPSRSSTNVNKSPRKMYIDDLSLMFGGSPSSEFQEVEGETE

SEQ ID NO: 204504 - protein, 91 aa, Glycine max
  Clone ID: PAT_MRT3847_26696C.1.pep
VMNMMSETTRSFCKATSPSNTTSIIEATHSQVRVFMRRNKRPRNMALKLEQSDHQDLKVPVTHKFGLPEIEEFAYCGAKELTQCGKSEMGS

SEQ ID NO: 204505 - protein, 67 aa, Glycine max
  Clone ID: PAT_MRT3847_26697C.1.pep
KGKWGRGPPFKFFFFFFFFFFFFFFFFFFFFFFFFLAKKNPQFRGRKLTSIHLHLLGLHICYKPIKL

SEQ ID NO: 204506 - protein, 118 aa, Glycine max
  unsure (1)..(118): unsure at all Xaa locations
  Clone ID: PAT_MRT3847_26698C.1.pep
MASWNSVPLHVSYEVLGWVAFACWSISFYPQVILNFRRKSVVGLNFDFVMLNLTKHSSYLIYNASLYFSSAVQKQYRDKYGQNEMIPVAANDVAFSAHAVLLTAISLFQIAIYDRXSQ

SEQ ID NO: 204507 - protein, 116 aa, Glycine max
  unsure (1)..(116): unsure at all Xaa locations
  Clone ID: PAT_MRT3847_26699C.1.pep
KISIPIIIFSISXXKISPRDVXYSTATAPSSSLTIITLTSWSTSNVXNXAITRPIFLFFQLYIYNYINFFSHLFITSXKSLFKAISLTIHTPYTTTHXSYINNIFTFPPFFTFNNF

SEQ ID NO: 204508 - protein, 67 aa, Glycine max
  Clone ID: PAT_MRT3847_2669C.1.pep
FGLPRKGESFRMLDYFPPGGGETPFGEKVSWAKGGRVLPPGLGFLTQRKSPTPPPKLAAIKRPPRKL

SEQ ID NO: 204509 - protein, 172 aa, Glycine max
  unsure (1)..(172): unsure at all Xaa locations
  Clone ID: PAT_MRT3847_266C.1.pep
PRVRVREQLEGCYLLAGIKYEGLTVKQLQGIRDALPETCRLLVAKNTLVGKAIEGTPWEALKPCMKGMNAWLFVHTEEVPAALKPYRAFQKEERVEETNDFVGAVFEGKFYGPGDFKALETMPSRAEVYATLLGALQGPATSLVATLQAPAXDVVAVLSAYVRKLEEEAGAA

SEQ ID NO: 204510 - protein, 95 aa, Glycine max
  Clone ID: PAT_MRT3847_26700C.1.pep
KIGKGFYFSARLSLFKSTPRVGPSLKREKKIWGKWYPKKKKKGGVKGPKKGLKVGGIRISPQGKGKPWVPGHPLPVPGGGPSPGTVNRCCQKPVF

SEQ ID NO: 204511 - protein, 40 aa, Glycine max
  Clone ID: PAT_MRT3847_26701C.1.pep
GNIQRKKQTSLITDTNSALTMQVKRTEKLRTTKENYSKPK

SEQ ID NO: 204512 - protein, 42 aa, Glycine max
  Clone ID: PAT_MRT3847_26702C.1.pep
VPNYSLTNRGRQSCNVADLTRHPYYGTSFGALQEITTGLPIA

SEQ ID NO: 204513 - protein, 49 aa, Glycine max
  Clone ID: PAT_MRT3847_26703C.1.pep
EFIKKKPANFSFYFRAKKNPGFQPPLTKKKHGNPAKSGKVKPLKSQLTA

SEQ ID NO: 204514 - protein, 106 aa, Glycine max
  Clone ID: PAT_MRT3847_26704C.1.pep
HDCTSNVARISSGRSVYRHDSQSSNRVSTLDSTTWSLLQHDLHVSRYPTQNRARCDRSPPRIQETVGPWYRSPTAREYPQCSARGSCNRTCGFDPPLCTRKSTLEP

SEQ ID NO: 204515 - protein, 76 aa, Glycine max
  Clone ID: PAT_MRT3847_26705C.1.pep
KLNGNEPLVTLPSKFSHSNYLQLSKCVFGNTSNEVNSRQFRALDAEVTPGSIGQDSRVEDSTQLQTCYINQPGNTD

SEQ ID NO: 204516 - protein, 43 aa, Glycine max
  Clone ID: PAT_MRT3847_26706C.1.pep
NREFLTLVNKICIRPTGIKLDDNHSTNLGRTFLEKNKTFPLKV

SEQ ID NO: 204517 - protein, 138 aa, Glycine max
  Clone ID: PAT_MRT3847_26707C.1.pep
RGVVVYLRGHEGRGIGLGPKLKAYNLQDQGHDTVQANIELGLAVDAREYGIGAQILRDIGVRTMRLMTNNPAKFVGLKGYGLAVVGRVPVLTPITEENKRSLETRGTKMGHIYGSDLQGSLPGFNGSTVNNGDSLENT

SEQ ID NO: 204518 - protein, 82 aa, Glycine max
  Clone ID: PAT_MRT3847_26708C.1.pep
MGGFSNRDSNYTDEGGREMKRIVKEPLAWAVSGVGDHLPQISEPSMLVYEGVRNAGYASLPALIRGRKRFMLCSTRKHGIHF

SEQ ID NO: 204519 - protein, 63 aa, Glycine max
  unsure (1)..(63): unsure at all Xaa locations
  Clone ID: PAT_MRT3847_26709C.1.pep
XARVRKLGIRLERXXXXXXXPXPXFXTSLIKTXTXDYKXKXXXEIIXHXSVRRERGXXXXPGR

SEQ ID NO: 204520 - protein, 308 aa, Glycine max
  Clone ID: PAT_MRT3847_2670C.1.pep
LPKDVWSDRIPDFHLLDQAEQSAKRQKLKIWENFVEGEEVSNGAAVENKQQEVLKVIVTEVLGGGKFYVQTVGDQKIASIQQQLASLNLKDAPVLGAFNPKKGDIVLCYFHADKSWYRAMVVNTPRGPVESPNDLFEVFYIDYGNQEVVPYSQLRPIDPSVSAAPGIAQLCSLAYVKVPNLEEDFGQEAAEYLSELTLNSGKEFRAKVEERDTSGGKAKGQGTGTVLAVTLVAVDSEISVNAAMLQEGLARLEKRNRWDGKERQQALDNLVPFQGEARTSRRGMWQYGDIQSDDEDTAPPARKAGGRK

SEQ ID NO: 204521 - protein, 86 aa, Glycine max
  Clone ID: PAT_MRT3847_26710C.1.pep
LNSRSYYVSTVPIPTRGCGDTTICSSSWKIKSGYQRCNGGGLIYSSFYLTSNTNIGSPTIKVDCIHAKIDAPSREQHLLQCTGTDI

SEQ ID NO: 204522 - protein, 51 aa, Glycine max
  unsure (1)..(51): unsure at all Xaa locations
  Clone ID: PAT_MRT3847_26711C.1.pep
LPHSISQGPFGNPPPQFLREGWQFXSPWPWNXLXFGNLFPNFQAVVIIQDP

SEQ ID NO: 204523 - protein, 36 aa, Glycine max
  Clone ID: PAT_MRT3847_26712C.1.pep
MPPVNLFGTTIVLAVQFRAYDMVALRMNTCYSAHTP

SEQ ID NO: 204524 - protein, 346 aa, Glycine max
  Clone ID: PAT_MRT3847_26713C.1.pep
GGEAPAPAPAARPPVCKEESRKPSSSSQERRRRTPSMEREQQQQRSSIKERRVSRSPRRRSSENTTPSNARNNNSSNNTSSRPFGSSGKMVSVPATVSSLVMDKSNNNGGGGGGGESGATTGIKRITVKRNVGAASPRSQSPARANGNAASGNKAFNENQQQPSLSRSNSRKAEQSPYKRNPLSEIEPNSLAFPHSTANNSSSKVQNRPKKEFETEANQKTNGSRTALDKGMNVNCKTKVQQEEDVKVQSSITDNVVVKTMVPPGVDNLKPPYTLTRSRSSRQSRDLDLNPEALLNPPQSYASLLLEVATNFHQKNTPPVIATACVTKACSILEAVADLNSNAGLN

SEQ ID NO: 204525 - protein, 119 aa, Glycine max
  Clone ID: PAT_MRT3847_26714C.1.pep
MKRSNDDVAAPVPASTSKPVFLTKAQREQLALQRRQEEVADQKRRQEQLLSRNHSSDPKPSSDRDRDRERDRDHHRDRDRDRDRDRERERANAPGWRNSRSVSARRSLSPSRSSTCARK

SEQ ID NO: 204526 - protein, 166 aa, Glycine max
  unsure (1)..(166): unsure at all Xaa locations
  Clone ID: PAT_MRT3847_26715C.1.pep
MKRSNDDVAAPVPASTSKPVFLTKAQREQLALQRRQEEVADQKRRQEQLLSRNHSSDPKPSSDRDRDRERDRDHHRDRDRDRDRDRERERERARDRDREAERRNREREREEESRARERARLEKLAEREREKELESIKEQYLGXRKKPKKPRSSRPSEEFPVLPSDW

SEQ ID NO: 204527 - protein, 57 aa, Glycine max
  unsure (1)..(57): unsure at all Xaa locations
  Clone ID: PAT_MRT3847_26716C.1.pep
EWVTNKLRGCLKGDCEDIWIDAYLGIGSPTLYITIAYTCXLIRMNQRNPSLKCALDN

SEQ ID NO: 204528 - protein, 135 aa, Glycine max
  Clone ID: PAT_MRT3847_26717C.1.pep
MATQASRSEIEVVVDTTTSNDNNNEEPTSLSLTSSLNSILTKFHAGYFRISLSLGGQALLWKTLIESSSSPTHDTSAALRRVLCTLPSAAAILALWSLALFALVLLSLLYLLRCLFYFKMVKAEFLHPVGVNYLF

SEQ ID NO: 204529 - protein, 182 aa, Glycine max
  Clone ID: PAT_MRT3847_26718C.1.pep
MFNVVIILHSVCPLVLPNVTSVVKECGNLINNQTACCKAIKSYVSYLQEQSFVTNLQALKCATSLGKKLQQENVSKNVYNLCRISLKDFSLQVGLQESGCLLPSLPSNAVFDGTSGIGFICDLNDNIVAPWPTTSYSLPSSCNRTTKLPSLPTATSSQNGLFINTLVLPLLFTSILLPKRLL

SEQ ID NO: 204530 - protein, 137 aa, Glycine max
  Clone ID: PAT_MRT3847_26719C.1.pep
GRGSKGGRDLGSSGGETFFVNVTCLGRICFHGIRVQKCSPPFFYKTLAGGSPRALKIKGLRDVFLKMSPKKKKNEKAMGVVHPGNQNQGWVQAISWPWGAHPNFTRGLGLGFFFTQLKRGQNWESFGFKTIGPGLAP

SEQ ID NO: 204531 - protein, 48 aa, Glycine max
  unsure (1)..(48): unsure at all Xaa locations
  Clone ID: PAT_MRT3847_2671C.1.pep
KNGKVWNDNWIFWVEQLVEELGKTVYNKXILREGVIKALGWLRRNLTN

SEQ ID NO: 204532 - protein, 94 aa, Glycine max
  unsure (1)..(94): unsure at all Xaa locations
  Clone ID: PAT_MRT3847_26720C.1.pep
LTVTRSLKKNPFAANHLLRKINKLNTKAEKEIIRTWSRASTIKPTMIGXTXASHNGKEHLPIXXTDRMVGHKXGEFPPPLXXRGQAKNDNRSRR

SEQ ID NO: 204533 - protein, 54 aa, Glycine max
  Clone ID: PAT_MRT3847_26721C.1.pep
LFFVSNLFVPSIHSISSKMAKDHVAARHWSAGKLDMLVPMMQGMMLADSRTSML

SEQ ID NO: 204534 - protein, 125 aa, Glycine max
  Clone ID: PAT_MRT3847_26722C.1.pep
SIMQGAALLGGPLFNTVASDVILFFSRLIIFVARPFFYSGRIGKTVGFRNFCDLQPILLCPGDAIWSGALSVALPNFSPFIMVTWSPLFNGPSLGGVLVPPRQWFLFLLGGAFTLRVLSFFSSPF

SEQ ID NO: 204535 - protein, 75 aa, Glycine max
  Clone ID: PAT_MRT3847_26723C.1.pep
ELCVLMHSLDKLGIVHFLPCLSHGTTSSSSKRSPISAGMSQYPYSDECTSFLHNESPLPLLARHNRRSPFGCRPK

SEQ ID NO: 204536 - protein, 83 aa, Glycine max
  Clone ID: PAT_MRT3847_26724C.1.pep
VYFSVLKTKGLSGQLAVTREVFSDLSEHSGVSFTIPYLLVLAPQNIPEVMARKIIDKKHQFVCGCNSQFFFASVIRCILRMKH

SEQ ID NO: 204537 - protein, 150 aa, Glycine max
  Clone ID: PAT_MRT3847_26725C.1.pep
MTARGSDPIRGRLRPQMALALAIALISITLVSVNADGYPYYSPPPPYEYTSPPPPPYLYKSPPPPSPSPPPPYYYKSPPPPSPSPPPPYYYKSPPPPSPSPPPPYYYKSPPPPEKSPAPTPYYYKSPPPPSPSPPPPYYYKSPPPPSPSP

SEQ ID NO: 204538 - protein, 193 aa, Glycine max
  Clone ID: PAT_MRT3847_26726C.1.pep
FGQDEMIDVIGVTKGKGYKGVTSRWHTKKLPRKTHRGLRKVACIGAWHPARVAFSVARAGQKGYHHRTEINKKIYKIGQGYLIKDGKLIKNNASTDYDLSDKSINPLGGFVHYGEVTNDFIMLKGCVVGTKKRVLTLRKSLLVQTKRRALEKIDLKFIDTTSKFGHGRFQTMEEKKAFMGPLKKDRIAKEEGA

SEQ ID NO: 204539 - protein, 99 aa, Glycine max
  Clone ID: PAT_MRT3847_26727C.1.pep
MQLTLEFGGGLELLCDSKKIHNVNIEQHNGEDKLIMKDLLSWVQTNLIKERPEMFMKGDTVRPGVLVLVNDCDWELSGQLNTSLEDKDVVVFISTLHGG

SEQ ID NO: 204540 - protein, 85 aa, Glycine max
  Clone ID: PAT_MRT3847_26728C.1.pep
VGDNNKKCWPRDARMRLMKHDVNLGRSVFWDMKNRLPRSITTLEWENSFVSADSKDNPNLLFSMCGFQVRIRPRIRMTQEALSHT

SEQ ID NO: 204541 - protein, 58 aa, Glycine max
  Clone ID: PAT_MRT3847_26729C.1.pep
ENVEETGICRRRISIDKLMVHRPKSSWHRLHSLFFRILYCPRFFLSRDLGYVQHCEDI

SEQ ID NO: 204542 - protein, 93 aa, Glycine max
  Clone ID: PAT_MRT3847_2672C.1.pep
PCCTPIIAPLTNLLNGKYTKLQWNEQAHIGFTNLKHVNITALVLAIPNFVAPLDLETNASSLAIGTCCPKTTTHFLLQQEVCQLATSSVCIHK

SEQ ID NO: 204543 - protein, 55 aa, Glycine max
  Clone ID: PAT_MRT3847_26730C.1.pep
TRLLKMSSRATRTHRYDALEGWVICFGIKRSNRPLRRLKDWTEFCLKCRAIAHRK

SEQ ID NO: 204544 - protein, 53 aa, Glycine max
  unsure (1)..(53): unsure at all Xaa locations
  Clone ID: PAT_MRT3847_26731C.1.pep
XNVXXFILLLLFFKMGGSWKNNNNKMNRFTLYFRGVCXSSVAIYFYSRLYKXL

SEQ ID NO: 204545 - protein, 58 aa, Glycine max
  unsure (1)..(58): unsure at all Xaa locations
  Clone ID: PAT_MRT3847_26732C.1.pep
RXXAXFYLGSFFNNITGSEVGYLLESRANALAGDNAVRMMLEKMASLCELCLHEHTYK

SEQ ID NO: 204546 - protein, 56 aa, Glycine max
  Clone ID: PAT_MRT3847_26733C.1.pep
YGCETTEGDITNVGYAGQHDINGLIVFKWDLTILVNHSYMHDLKKNITKIKMKKHN

SEQ ID NO: 204547 - protein, 71 aa, Glycine max
  Clone ID: PAT_MRT3847_26734C.1.pep
SDEASELVGRIINVSLIICDARLDVSVAMSIRVDHVRRLIDISAMDSPPHCSHCCFVLFEGNPSVRWTCGS

SEQ ID NO: 204548 - protein, 78 aa, Glycine max
  unsure (1)..(78): unsure at all Xaa locations
  Clone ID: PAT_MRT3847_26735C.1.pep
WRVSKTXCSXVTAQXXINIAVIKYWGKRXETLXLPVXDSIXVTXDXIXLXTTXTAAVSPXFHQDRMXXNGKEISXSGG

SEQ ID NO: 204549 - protein, 56 aa, Glycine max
  Clone ID: PAT_MRT3847_26736C.1.pep
MSGLDDQIPTAFDPFADAHADDSGAGSKEDAHIRAQQPNGRNSLTTVQGWKKEFSY

SEQ ID NO: 204550 - protein, 45 aa, Glycine max
  unsure (1)..(45): unsure at all Xaa locations
  Clone ID: PAT_MRT3847_26737C.1.pep
CTKDCKCVGCFYHKEHSRCWXAYVLPAHTIGVNSSHVGYIKVPHK

SEQ ID NO: 204551 - protein, 119 aa, Glycine max
  Clone ID: PAT_MRT3847_26738C.1.pep
KGPSLKKRSFWLSPGVFPKICLPSPPEMGNPSFPQFLGRRFPGNRVFFLKKRPNFFFQNFLFQIWEFFFTPLDKKPPKGNPCPVLNPNFRKPPSVKNFFIFPPVFFKILFFFKYFLGGF

SEQ ID NO: 204552 - protein, 43 aa, Glycine max
  Clone ID: PAT_MRT3847_26739C.1.pep
NKGYKESIQCPIPPNLPKLLRSKYLSNTGPIKSTLIPHKNILM

SEQ ID NO: 204553 - protein, 55 aa, Glycine max
  Clone ID: PAT_MRT3847_2673C.1.pep
DRSKFPRINGSSFIPPITHKDYNSLSYDFSDSPHPLTNTFDSNPQQSSCLPRGGR

SEQ ID NO: 204554 - protein, 111 aa, Glycine max
  Clone ID: PAT_MRT3847_26740C.1.pep
SACLYDEARVYHNHGFAKILLELDQKLHGKVSMEWHQRIPVMKVCPICGNNAGLSSSSLKLHLQKSHRKLSSGSVDSAMTMEIQKALTALKISRGGSVSPTQRSSHPLIDQ

SEQ ID NO: 204555 - protein, 126 aa, Glycine max
  Clone ID: PAT_MRT3847_26741C.1.pep
VLVRPRVRKAFIKLCCNLLAYQMLPSNPDDKIDEVDKILSKLDGKIERKMDPLMCRHNQRQKCTDCLPLDPYDEKFLHEKDIKHLSFHAHVHKLTDLHGRGTRSNNVLENVCCKLRPNWAGGHLPY

SEQ ID NO: 204556 - protein, 351 aa, Glycine max
  unsure (1)..(351): unsure at all Xaa locations
  Clone ID: PAT_MRT3847_26742C.1.pep
RVREILVHEKLMAQVSLNTAESDVLVMKQKVEHDLQEMVQKITVSGALLQKLQLNFEVIINRINAGFEAEELYSQHHKEFLSGLDHLEAELQQLNSRNQDLAQEIIKLDTSSSDLEMCKLTLATIKEEKKDXRVXSLQEKTEESTKISSELDFLKKNLDSLHNELHAEKTVRQRLEKTISDLTTELNEKQSQLQGKKELELSLEEKAEESAKISSELNFLEKSLHSLHNELHAEKTVREKLEKTVSDLTTELNEKQSQLQGKKELELSLEEKAEESAKISSELNFLEKSLHSLHNELHAEKTVREKLEKTVSDLTTELNEKQCQLQDSCXTXQXXVXXXQLXPDXIKNQDL

SEQ ID NO: 204557 - protein, 85 aa, Glycine max
  Clone ID: PAT_MRT3847_26743C.1.pep
WPCAKSKRTTRKLPIANFEPALVQTNPEFEKPKRNFRKIPHQVLDPELENPQSELEKVKRSLRKIHNPVVENAVQPEVEIETPKE

SEQ ID NO: 204558 - protein, 78 aa, Glycine max
  Clone ID: PAT_MRT3847_26744C.1.pep
TLPICLCFFKGQNYLNQRFLFPPLLLRRWIGLIQNYKGPKNINALFFRTPLCLISSVMNTAKSTDFLFYVKGITSRLG

SEQ ID NO: 204559 - protein, 99 aa, Glycine max
  Clone ID: PAT_MRT3847_26745C.1.pep
RLNFNQLWGKINGGKQKKNKPPIRGNFTGGVKNWKNHHGPKRQTIFLIKRGKAFWVKKRGKKNDTPNCFKKGIRPHYVKKPKVSGGTATKKRAKALPIK

SEQ ID NO: 204560 - protein, 91 aa, Glycine max
  unsure (1)..(91): unsure at all Xaa locations
  Clone ID: PAT_MRT3847_26746C.1.pep
FSKVGDFMAEENKLFPVPPDTKVLPGLQLMAANRIRPLPVFYXKGMIGLGSLGNVVCAVGGEPPQKVERFNAFIQGGFLIMMMKNFPGPPR

SEQ ID NO: 204561 - protein, 170 aa, Glycine max
  unsure (1)..(170): unsure at all Xaa locations
  Clone ID: PAT_MRT3847_26747C.1.pep
DPNEVYVVSMANSLQNIMKDVYDGFIITKPTSIYSPSRAHEMKEADQNGRHSGYGDTKGARHATLTPKILWMRMMRLLMRLLREYRESDKLVYHVFHDMDMSVKGNVFKIXIVFMDSIHADKAEKATETTLSDAFDAKHAANRARRHTRLAQRLERCTLGTIDTASTAPQ

SEQ ID NO: 204562 - protein, 95 aa, Glycine max
  unsure (1)..(95): unsure at all Xaa locations
  Clone ID: PAT_MRT3847_26748C.1.pep
RIALGTARGLVYLHEQCDPKIIHRDVKXANIVCWXNFEAVVGDFGLTKLLDHKDSHVTTCVRCTGWPLCSKYLFTSPLLKKTGVFGFRILLFELI

SEQ ID NO: 204563 - protein, 180 aa, Glycine max
  unsure (1)..(180): unsure at all Xaa locations
  Clone ID: PAT_MRT3847_26749C.1.pep
QPRGVPQIEVTFDIDANGILNVSAVDKSTGKENKIXITNDKGRLSKEDIERMVQEAEKYKAEDEKQRDKVSSKNSLESYAFNMKATVEDEKLQGKINDEDKQKILDKCNEIISWLDKNQTAEKEEFEHQQKELEKVCNPIITKLYQSAGGMPGGMPGGFPGGGAPPSGGASSGPTIEKVD

SEQ ID NO: 204564 - protein, 67 aa, Glycine max
  Clone ID: PAT_MRT3847_2674C.1.pep
IKVNQRQEGVATLNYVRRKKVLTVAKEEEESIKTILTIYNMIKYQYTACMHDNLEFINMFPFGFLGF

SEQ ID NO: 204565 - protein, 49 aa, Glycine max
  Clone ID: PAT_MRT3847_26750C.1.pep
SFHACLSKYTDWFISGLQSSSQLMTNTNVPWSNVYSIAPQKNRSSTQLN

SEQ ID NO: 204566 - protein, 106 aa, Glycine max
  Clone ID: PAT_MRT3847_26751C.1.pep
GCLQLLIAFPTSCLSFTSYPKSPAFFLSHFLSPYHTKAFFILAKLSVPFFMYLDCLGSVLKRVCLPHQNYLEFLGKFLSLSRSELECVYRFLRFALFLLQHTPLSK

SEQ ID NO: 204567 - protein, 136 aa, Glycine max
  Clone ID: PAT_MRT3847_26752C.1.pep
WSRGQARGENPTIACPYNRLRTMDILDKPRPAQKEAIREPTLPSQKHAKEEVRRPRPRPAVGRGPRASKRPPIRRPPSWRSSCSARKSPASDTPQTTYRLPRRTHSAGTTVTCRWWSCSTRRRPTLASGHSLRLSA

SEQ ID NO: 204568 - protein, 146 aa, Glycine max
  Clone ID: PAT_MRT3847_26753C.1.pep
MAKAEGGKEPINEQAVANMYAAMRSELNQIYSKITELEMEVSEHTLVTNAIQPLDQSRRCYRMIGGVLVERTIKEVLPAVQRNKEGLEEVVARLNEALEKKKKEISEFEANYKIRIRKADAEVKDESGRKEGSAQGVLVGPAGGSE

SEQ ID NO: 204569 - protein, 119 aa, Glycine max
  Clone ID: PAT_MRT3847_26754C.1.pep
MASQQHIEKMQLRQNFRNLWHSDLLSTIQADTPYCCFSLWCAPCVSYLLRKRALYDDMSRYTCCAGYMPCSGRCGESKCPELCLGAEDVCCFGNSVASTRFLLQDEFNIQTTQCDNCII

SEQ ID NO: 204570 - protein, 146 aa, Glycine max
  Clone ID: PAT_MRT3847_26755C.1.pep
MAKAEGGKEPVNEQAVANMYAAMRSELNQIYSKITELEMEVSEHTLVTNAIQPLDQSRRCYRMIGGVLVERTIKEVLPAVQRNKEGLEEVVARLNEALEKKKKEISEFEANYKIRIRKADAEVKDESGRKEGSAQGVLVGPAGGSE

SEQ ID NO: 204571 - protein, 152 aa, Glycine max
  Clone ID: PAT_MRT3847_26756C.1.pep
AKSGWGFAFPRDSPLAIDMSAAILTLSENGELQRIHEKWLSEKACGFHSTEDEQLKLNSFRGLFLICGITCFLALLIYFLSMVRQFNKKSPQKVGPSNRCSSRSARIQTFLHFVDEKEDVSPKLKRKLDYISSNRLRSISKRVQEDISQEAP

SEQ ID NO: 204572 - protein, 142 aa, Glycine max
  unsure (1)..(142): unsure at all Xaa locations
  Clone ID: PAT_MRT3847_26757C.1.pep
KKLSNMDLKGQFPXIQNCTSLTGLDFSINTLSGTIPENTATLLPFVTSLDQSSNKFSGAIPMSLANCTDLNALKLDQNRLSYHFPQQLGLLQRPRTFTVSNNSLTGPVPNFTNGHVVVNYSNNEGLCGPSLRPCPNNSSTGH

SEQ ID NO: 204573 - protein, 148 aa, Glycine max
  Clone ID: PAT_MRT3847_26758C.1.pep
PRLPLQNHFNAIPAQGRSDINQNPGTSIHNCSIPAASDLAPSNGTPKTYLGRPWKQYSRTLYMQSFMDDGLIDPKGWKAWSGDFALDTLYYAEFDNQGPGSNTSNRVTWPGYHVINAPDAVNFPVANFIIGDAWLPATGVPYYADLLI

SEQ ID NO: 204574 - protein, 66 aa, Glycine max
  Clone ID: PAT_MRT3847_26759C.1.pep
SYKGIRYSDGESELHIFIGIFYLFSIISKDNHGDIFMEWWGNFVIKQRPTCPRVGSRLQHRGHSCC

SEQ ID NO: 204575 - protein, 63 aa, Glycine max
  Clone ID: PAT_MRT3847_2675C.1.pep
RCKIESIISQEFRRNAEDVDRKNFLYIEYLLRRGNKQLDQLKNPGTTGLSSLQLHYSHPSSKG

SEQ ID NO: 204576 - protein, 50 aa, Glycine max
  Clone ID: PAT_MRT3847_26760C.1.pep
FLIDNPKQSTVFKIFLGISQNFEIAGKTFKPAFFVPQATARFFENGESSA

SEQ ID NO: 204577 - protein, 199 aa, Glycine max
  Clone ID: PAT_MRT3847_26761C.1.pep
LKFFCAEANRFTGQLPASLLNSPSLQILNLRGNSLGGSVNLNCSAMKNLTTIVLGYNQFHCPVLVSLSNCLRLEGIGHGSDHLHCGEIPVNFKKLQSLTQLSLSYTGLHNLSSALEVLSHCRNLSTLLLPWNFHNEQMPQPQGQNIVFSNLKVLVLSNSQIKGSFPKWLSGCKMLQMLDLSWNHLTGSIPSWIGNLNNL

SEQ ID NO: 204578 - protein, 80 aa, Glycine max
  Clone ID: PAT_MRT3847_26762C.1.pep
VRNNVVNDFIPNPSELSTAPKVHIGARGRLSLSPRYHRCVGLGKLGIWPFSLCVFFSLSSSFVLLCFGRFLFDLRSKIVL

SEQ ID NO: 204579 - protein, 46 aa, Glycine max
  unsure (1)..(46): unsure at all Xaa locations
  Clone ID: PAT_MRT3847_26763C.1.pep
MKKSLVLCEWALRRPCFEKTSLMLCLNKFDIFERKVLRAPXNVCVC

SEQ ID NO: 204580 - protein, 87 aa, Glycine max
  Clone ID: PAT_MRT3847_26764C.1.pep
LILGPPKQSFFFVCTRPKLENWAEGTFLFFLGDLVSPPSGEGFPLNLWLKGVFYFKTLAVVLVTKVWLGFGLRREKKKKFGRVKVFF

SEQ ID NO: 204581 - protein, 60 aa, Glycine max
  unsure (1)..(60): unsure at all Xaa locations
  Clone ID: PAT_MRT3847_26765C.1.pep
TPSCSFSNTEYATKXKPTQTLTIITRINHLLIPLHLLPLQLPSDKNHIHFPRHSSIITSF

SEQ ID NO: 204582 - protein, 78 aa, Glycine max
  Clone ID: PAT_MRT3847_26766C.1.pep
ILYTIQLLKTRQPTHDDAQERNGNPGDENRWKRIVIIAKQIYSRKHATVTPVPHQPQAPQLPDIITVSSPPTVAIQNS

SEQ ID NO: 204583 - protein, 55 aa, Glycine max
  Clone ID: PAT_MRT3847_26767C.1.pep
SPSTLRYGLSICSAFSARFLSAIPLQPYLCLPAKEVQLMPLKNPLQSSGAYGNMG

SEQ ID NO: 204584 - protein, 62 aa, Glycine max
  Clone ID: PAT_MRT3847_26768C.1.pep
HDIIITLLVLLAKFTFSNECGKNHFPLNTYIFKSCPPFDLMNCGKWFCTPTPRKFLVCPLPL

SEQ ID NO: 204585 - protein, 35 aa, Glycine max
  Clone ID: PAT_MRT3847_26769C.1.pep
VIYECRTTLCDLTSTMTSRVRLILHGGEIPKNYGI

SEQ ID NO: 204586 - protein, 328 aa, Glycine max
  Clone ID: PAT_MRT3847_2676C.1.pep
MASIQWPYEQLKTAFSVSTFHQYLFLFLLVIVVLKLTRRPKIKPSFNLPPSPRKLPIIGNLHQLSKLPYHSLRTLSQKHGSLMLLQLGQTRALVVSSPDAVREIMKTHDITFSNRPKTTAAKTLLYGCNDIGFASYGESWKHKRKICVLELLSPKRVQSLSLIREEEVAELINKIREASLSDASSSVNLSELLIETTNNIICKCALGKKYSTEDCHSRIKELAKRAMIQLGVVTVGDRFPFLGWVDFLTGQIQEFKATFGALDALFDQVIAEHKKMQRVSDLCSTEKDFVDILIMPDSELTKDGIKSILLVSLFFSPVAFFFKFNRFS

SEQ ID NO: 204587 - protein, 49 aa, Glycine max
  Clone ID: PAT_MRT3847_26770C.1.pep
LGGECADIWHRLTVGIETCKERIKDLVGPVIKLFHVSVTNSLEIIGSVV

SEQ ID NO: 204588 - protein, 58 aa, Glycine max
  unsure (1)..(58): unsure at all Xaa locations
  Clone ID: PAT_MRT3847_26771C.1.pep
LSSRQVPXQXLASSLXLSSQILKSCLFVIHLPXPNSLELVFLPSTPESALNLFFFPGG

SEQ ID NO: 204589 - protein, 50 aa, Glycine max
  Clone ID: PAT_MRT3847_26772C.1.pep
RIQMTKVFRIFVFFLFKTWCIRNATTPMCNRNRNLRALISVHSLQLYNSN

SEQ ID NO: 204590 - protein, 74 aa, Glycine max
  Clone ID: PAT_MRT3847_26773C.1.pep
NKEAAMFIYLSEQSDFILDRILKPENMISEFFRLFQSHALNAQVGKHDHTSLAGICFLNRPLVQPIGMRWAPLV

SEQ ID NO: 204591 - protein, 104 aa, Glycine max
  Clone ID: PAT_MRT3847_26774C.1.pep
RSLCCHFVSQKYRLGLRKPTQQPSMVAALGSSDPYLQMDSVEGFRTLSGSVGMLSTTLPSYASGGVFCRLNPPSGLRGVNSALFQPVLSQNNSMSAKAFGNMQL

SEQ ID NO: 204592 - protein, 44 aa, Glycine max
  Clone ID: PAT_MRT3847_26775C.1.pep
YTITLVIRIVHCSAAYNHHNHRSVTLGSHTLAGKHLHDQKPVIL

SEQ ID NO: 204593 - protein, 164 aa, Glycine max
  Clone ID: PAT_MRT3847_26776C.1.pep
EAAFGYCDLKKLESEASSFRDDPRQPCGPALKKMQALFEKLEHGVFNISRMRESATNRYKVFHIPVQWMLDNGFVSQMKLASVKLAMKYMKRVSGELETSGGGGPEEEELIVQGVRFAFRVHQFAGGFDVETMRAFQELRDKARSCNLQCHSQQQKFFCRSATC

SEQ ID NO: 204594 - protein, 121 aa, Glycine max
  Clone ID: PAT_MRT3847_26777C.1.pep
HGVVIVITITKPNTLYLYPIKALLYLSSINSNLANIDCAVFYCHDDHPCLLLHRSSPKRIAFSFSPFSPSIPSAMTADTHAAPNINPKGLLCKVVVGASTGSIASTYVFPLNFIITRFHVH

SEQ ID NO: 204595 - protein, 157 aa, Glycine max
  Clone ID: PAT_MRT3847_26778C.1.pep
MSIKYHAFLFLAEVVQQYWDHLGASGTDTKELCFEIADIWSGSAFSQMIKRHFGVSELEHLSVSDLMELEKLTHAALSRIRSAKIEALEKTNDVNNVVTRSIDCDQTDGVSNGAESHYSGSNLHTQPLNFQGTMPWSSYLPFIISILVETWSILKIM

SEQ ID NO: 204596 - protein, 75 aa, Glycine max
  unsure (1)..(75): unsure at all Xaa locations
  Clone ID: PAT_MRT3847_26779C.1.pep
GNERRLPGKHXMAGINPFFLGVANRGSSIKVGNAPKKNGKGFFXDRRPAFNMDPYGVPPLIAETTILWNPLKTVK

SEQ ID NO: 204597 - protein, 88 aa, Glycine max
  Clone ID: PAT_MRT3847_2677C.1.pep
MASTKVQRVMTQPINLIFRFLQSKARIQIWLFEQKDLRIEGRIIGFDEYMNLVLDDAEEVSIKKKSRKTLGRILLKGDNITLMMNTGK

SEQ ID NO: 204598 - protein, 200 aa, Glycine max
  Clone ID: PAT_MRT3847_26780C.1.pep
MGKKKVEIKRIENKSTRQITFSKRRNGLMKKARELSILCDAKVALLIFSSTGKLYELCNGDSLAEVVQQYWDHLGASGTDTKSQELCFEIADIWSGSAFSQMIKRHFGVSELEHLSVTDLMELEKLVHAALSRIRSAKMRLMMESVENLKKKEHILRNENELLEKQIEAQKKADDVNNVVTRFIDYDQTDRVTHNLLPGL

SEQ ID NO: 204599 - protein, 127 aa, Glycine max
  unsure (1)..(127): unsure at all Xaa locations
  Clone ID: PAT_MRT3847_26781C.1.pep
HTTVLTNADEETNHLVRVKHLLHKTLLQHHALYQHILETSVHPTXHECSKDIRMMTRQHPLNITASPAYQPQLISMLAKLTNSKNALQTAALTAYSMLSTALSFPSDAKISALNETSRILSALIANY

SEQ ID NO: 204600 - protein, 186 aa, Glycine max
  Clone ID: PAT_MRT3847_26782C.1.pep
MGKKKVEIKRIENKSTRQITFSKRRNGLMKKARELSILCDAKVALLIFSSTGKLYELCNGDSLAEVVQQYWDHLGASGTDTKSQELCFEIADIWSGSAFSQMIKRHFGVSELEHLSVSDLMELEKLTHAALSRIRSAKMRLMMESVVNLKKKIEALEKTNDVNNVVTRSIDCDQTDGVTHNLFPGL

SEQ ID NO: 204601 - protein, 81 aa, Glycine max
  Clone ID: PAT_MRT3847_26783C.1.pep
RNETFNLRAMLFCTINDFPAYGNLSSYSVKGHRACPICEEDTSYIQLKHGRKTVYTRHRRFLKPHHPYRRLKKTFNGSQEH

SEQ ID NO: 204602 - protein, 54 aa, Glycine max
  Clone ID: PAT_MRT3847_26784C.1.pep
EVWESKTADSLTLITFFLTFSQALEVRQVLLIISLANRMLIRQSLTHIITLELR

SEQ ID NO: 204603 - protein, 75 aa, Glycine max
  Clone ID: PAT_MRT3847_26785C.1.pep
TRGYGLRTIMGDQIIILWRNAYTKYRPDFKHPKTLKTLGKPPNKRFGKNSHFAHSRYIKKVPTIIDFPNFRHLNG

SEQ ID NO: 204604 - protein, 75 aa, Glycine max
  Clone ID: PAT_MRT3847_26786C.1.pep
AEQTDKALLPQPTAFVISKKTGTGMRPGKGGNRFWKSIGLGFKTPREAFRRNPTMFIKCPFHCQSYPVRALIIAS

SEQ ID NO: 204605 - protein, 355 aa, Glycine max
  Clone ID: PAT_MRT3847_26787C.1.pep
LSNALKRGEIIAKQGGGGAGGSVPGIERMGPGIDRISGAGMERMGAGLGHGMDRVGSEIERMGLVMDRMGSVERMGSSIERMGPLGLDHMASSIERMGQTMERIGSGVERMGAGMGFGLERMAAPIDRVGQTIERMGSGVERMGPAIERMGLSMDRMVPTGMGASLERMGPVMDRMATGLERMGANNLERMGLERMGANSLERMGLERMGANSLERMGPAMGPALGAGIERMGLAMGGAGGASFDRAIEMERGNFGGSFAGSFGGAGGHAPGVARKACQIFVRNLPFDFTWKMLKDKFNECGHVLYADIKMENGKSKGCGVVKFESPEVAERACRMMNGMKLSGREIDVRIDRNA

SEQ ID NO: 204606 - protein, 106 aa, Glycine max
  Clone ID: PAT_MRT3847_26788C.1.pep
MAATRLYSKGRILGHKRGKRNSRPNQSLVQIEGVDNQEAAKHYLGKRIAYVYKAKREINGSRVRVIWGRVTRPHGNSGVVKSKFRVNLPARVFGASCRIMLYPSAI

SEQ ID NO: 204607 - protein, 56 aa, Glycine max
  unsure (1)..(56): unsure at all Xaa locations
  Clone ID: PAT_MRT3847_26789C.1.pep
PSAVKDVCVXPPRERLFLDEYFFFCLCLDEIVWQGYLHTTQWDRINPVIRLEPPSE

SEQ ID NO: 204608 - protein, 88 aa, Glycine max
  Clone ID: PAT_MRT3847_2678C.1.pep
MASTKVQRVMTQPINLIFRFLQSKARIQIWLFEQKDLRIEGRIIGFDEYMNLVLDDAEEVNVKKKSRKTLGRILLKGDNITLMMNTGK

SEQ ID NO: 204609 - protein, 48 aa, Glycine max
  Clone ID: PAT_MRT3847_26790C.1.pep
IIFSNSSICSNGASIFVHKNSSYYIPDDLGNLWHVTHTAFISYSITIH

SEQ ID NO: 204610 - protein, 270 aa, Glycine max
  Clone ID: PAT_MRT3847_26791C.1.pep
YCFPTASPPPMAVQELRTTIRVLPPQDCYISTLRNNVRSRAWGAAIGCSYKVERCCIVKKGGGTIDLEPCLTHTSTVEPTLAPVAIERTITTRAAASNALRQQRFVREVTIQYNLCNEPWIKYSISIVADKGLKKPLYTSARLKKGEVLYLETHSCRYELCFTGEKMAKAIPATQMHDLDTEKSQNHHHHPTNGDKADSDNVMVDVFRWSRCKNPLPQKLMRTIGIPLPLEHVEVLEENLDWEDVQWSQTGVWIAGKEYTLARVHFLSMN

SEQ ID NO: 204611 - protein, 42 aa, Glycine max
  Clone ID: PAT_MRT3847_26792C.1.pep
RIVGAIERFDGKRIILELAHWPPSVFHPGRFSCWNLYPFLNF

SEQ ID NO: 204612 - protein, 77 aa, Glycine max
  Clone ID: PAT_MRT3847_26793C.1.pep
MCNSDGDCRSLGFLLGLPFAFLSLLLSIVGLIVWIVGLLLTCICPCCLCLTVIVELALALVKAPLHVMEWFTSQIPC

SEQ ID NO: 204613 - protein, 138 aa, Glycine max
  unsure (1)..(138): unsure at all Xaa locations
  Clone ID: PAT_MRT3847_26794C.1.pep
RTRGLELIVDKTMEIKITKDRMKGLAVDFFSARTDYRVLATEWALAELINNPKVXQKAREEVYRVSGTHRLFDEIDTHNIPYIRTVVKDTFLMHPAIRVVTRMCSENCEIKGXVIPEGAXILLNVWQVGRDPKYWDRP

SEQ ID NO: 204614 - protein, 110 aa, Glycine max
  Clone ID: PAT_MRT3847_26795C.1.pep
FPPYISSSRPFVPKSREGGLSPKNKNFPPTFKPFFFKKNYFFLFTPPPPTFIPGGVSPKVFFLPPTFLKGDFFNKHSLFFFLNSPPPLDFPTNNQGVRPSPQNQSILIFS

SEQ ID NO: 204615 - protein, 42 aa, Glycine max
  Clone ID: PAT_MRT3847_26796C.1.pep
EGLSYQELAIYRVSLSFSLCLCKSYDSVVDSFRLGSKLLWGV

SEQ ID NO: 204616 - protein, 70 aa, Glycine max
  Clone ID: PAT_MRT3847_26797C.1.pep
MIHACYSEVVTLYQLMFVTYPLIMSVTEVEAKKKKKKKKKKKKKKKKKKNKKKKIKGKKIIKIKKKKKNF

SEQ ID NO: 204617 - protein, 75 aa, Glycine max
  Clone ID: PAT_MRT3847_26798C.1.pep
ALEAQESCGRIWQFRLLIAFIWYHHLQDFRVQGEHTHLPLHQFSSFILIFSFTVTLTTLFHLISYTGGVMLMSVN

SEQ ID NO: 204618 - protein, 68 aa, Glycine max
  Clone ID: PAT_MRT3847_26799C.1.pep
QFHFKDFNRAFGFMTRVCLQAEKLDHHPEWFNVYNKVHITLSTHECAGLSERDINLASFIEQVAVSMT

SEQ ID NO: 204619 - protein, 88 aa, Glycine max; identical to SEQ ID NO: 204608
  Clone ID: PAT_MRT3847_2679C.1.pep

SEQ ID NO: 204620 - protein, 56 aa, Glycine max
  Clone ID: PAT_MRT3847_267C.1.pep
YVIKPVRYIRYYLHATFLEPHLVMWLVRLEMLGRVSAPLFQIADPQKSSFATEKKK

SEQ ID NO: 204621 - protein, 599 aa, Glycine max
  Clone ID: PAT_MRT3847_26800C.1.pep
MNLESPVKTEVEEAYEGEDEHEESPSIKRELSDFDLQVLEVAASKGGCDPSSEEIKYPSLYENQANIQLEDKDHEYSKKSCDIIQSGHVSDPGIGKAEFCASPKLKRSCSDLERRDVLRETCHLFPSSKSQSFEDLQGLSAHQMVNLESPRSVMTHRSADRVMLKRHSSSQVLPSRSKRLWWKLFLWSHRNIHRSQLSKSTQIHPVTAALNSQCGYSSDTLEPKQDKALSHVESHSPSSSFGEYFQKSCDDRNFDNQRWSRFQKDNFGFWPQNQWVAFSTESSSYSRVDEWVKDLEIQQPPLEDDFNDDNIGSIAFPPSPDDGRSMARSTAQLIQHPDANLSKEILNANSVVQSLNPASTAAHISSIGIKAIPSLSHFFSLRCVNLSNNLIVHITPGFLPKGIHTLNLSRNKISTIEGLRELTRLRVLDLSYNRISRIGQGLSNCTLVKELYLAGNKISDVEGLHRLLKLTVLDLSFNKIATTKALGQLVANYNSLQALNLLGNPIQSNISDDQLRKAVCGLLPKLVYLNKQSIKTQRGREILTDSVAKAALGNSSRTSYRRALKKGGGHGGSSSSVHRSSASVSQKIRNRSRSQTKHH

SEQ ID NO: 204622 - protein, 115 aa, Glycine max
  Clone ID: PAT_MRT3847_26801C.1.pep
KTCKTPHALGSLLSALMQHCAPPQRRFPLERGLSPPWWPSGEEVWWGQQGLLAQEHGPPPYRKPHDLKKARKVSVLDAVSIHIYPDFDKPIRVQTHLTTLLDKMTDEDSATWSTA

SEQ ID NO: 204623 - protein, 211 aa, Glycine max
  Clone ID: PAT_MRT3847_26802C.1.pep
FVVHITPGFLPKGIHTLNLSRNKISTIEGLRELTRLRVLDLSYNRISRIGQGLSNCTLVKELYLAGNKISDVEGLHRLLKLTVLDLSFNKIATTKALGQLVANYNSLQALNLLGNPIQSNISDDQLRKVVCGLLPKLVYLNKQSIKPQRGREILTDSVAKAALGNSSRNSYRRALKKGGGQGGSSSSSVHRSSASVSQKSRNRSRSRTKHH

SEQ ID NO: 204624 - protein, 44 aa, Glycine max
  Clone ID: PAT_MRT3847_26803C.1.pep
KSKCLFSLGFQSPPFPRTTLDHLTPFVPNSPLGGAEALYPALNI

SEQ ID NO: 204625 - protein, 105 aa, Glycine max
  Clone ID: PAT_MRT3847_26804C.1.pep
LSYFKHTSPIADIYWYLDVAGLKSSKLYIWNGIALFFGWLVARIFLFMFLFYHIGTRLDEVKEVFLFGFYTLIMVPSVLAVLNIFWFWKIASGMVKTLTKAKHSK

SEQ ID NO: 204626 - protein, 206 aa, Glycine max
  unsure (1)..(206): unsure at all Xaa locations
  Clone ID: PAT_MRT3847_26805C.1.pep
MELEQNQRWEGYVNWRNKPALSGCNGGMLAASFVLVVEILENLAFLANASNLVLYLRQYMHMSPSKSANNVTNFMGTAFLLALLGGFLSDAFFTTYQIYLISAVIEFLGLIVLTVQARVPSLKPPACDASTPCNEVSGGKAAMLFAGLYLVALGVGGIKGSLPSHGAEQFDDNTPSGRKKRSTFFNYXVFCLXFGALIAVTFVVWV

SEQ ID NO: 204627 - protein, 160 aa, Glycine max
  Clone ID: PAT_MRT3847_26806C.1.pep
KLATLKAERDAAKGAVLPVLNVGSTHLPSDKIKAKQKDLQDMESTLKELLDQGSARLMDLKSLHEERIRIFTQLCDLQNTLKNLKCITSSHAFQLVKDQIEKSKSDVLEYQALYEKLQFEKDNLAWREREWYIKNDFADVFQRSVAVSEFRVADLRSEIQ

SEQ ID NO: 204628 - protein, 77 aa, Glycine max
  Clone ID: PAT_MRT3847_26807C.1.pep
PALGMRTIGIFNLKFLLAYLFGYGLALLACVFRFTDILKGLIRHAKGLEDRRSLLELMIWSFCCLCSFWLFCCFSYF

SEQ ID NO: 204629 - protein, 71 aa, Glycine max
  unsure (1)..(71): unsure at all Xaa locations
  Clone ID: PAT_MRT3847_26808C.1.pep
VIQSKKKKKKKKKKKKKKKKKKKKKKKKRAQKKKNKNXQNKKRRKMRYRKRKKNEIQGRGVYKGITVKTPC

SEQ ID NO: 204630 - protein, 31 aa, Glycine max
  unsure (1)..(31): unsure at all Xaa locations
  Clone ID: PAT_MRT3847_26809C.1.pep
HQCLCERNIFLQPLDVKLTLFSKDLQVFQXL

SEQ ID NO: 204631 - protein, 145 aa, Glycine max
  unsure (1)..(145): unsure at all Xaa locations
  Clone ID: PAT_MRT3847_2680C.1.pep
FPVELKNGDNLIKRNSREFTTTVGDNVSFKSLLKSAESGNTVLSSVDRQCGFPDRLVLPMGHKAGVXYALFVMVTPYGADEHEHADYYHSEKVNYQTGVKDIYSCNGLMTVLDNRPLGFPFDRQIENFGRFYMPNMYFKDVVIFH

SEQ ID NO: 204632 - protein, 42 aa, Glycine max
  Clone ID: PAT_MRT3847_26810C.1.pep
MSNLIGSKRIELRAPYLVLDHCSRVQPEYIWIDCYGGRLGKS

SEQ ID NO: 204633 - protein, 93 aa, Glycine max
  Clone ID: PAT_MRT3847_26811C.1.pep
MCFFISGIVRPTSFYTTQAASKRVDVPKGYAAVYVGDKMRRFTIPVSYLNEPSFQELLGQAEEEFGFDHPMGGLTIPCKEEEFLKVTSHLNEL

SEQ ID NO: 204634 - protein, 117 aa, Glycine max
  Clone ID: PAT_MRT3847_26812C.1.pep
PGKYGSEAVYVPRVPGTDSEDDDEHLFCVAHNFFGGNSFAHVVKAFGTSSDLVAVAELLHRVKVREHAKFPPEHPWQKHGKVCPVIKQNRPALQKRVASAKFLKDHILAGPQKSNFF

SEQ ID NO: 204635 - protein, 99 aa, Glycine max
  Clone ID: PAT_MRT3847_26813C.1.pep
NVSCRSRCLLEHRHGCVPRIFLVYRVPPLFLDLLLRGHSFLGPVGDCFSEFIMSNGLLGLLPMASIILVVPSPKINNPHIFPILCLVPLPRHGYKFVLR

SEQ ID NO: 204636 - protein, 47 aa, Glycine max
  Clone ID: PAT_MRT3847_26814C.1.pep
KKKKKKKKKIKKKTKKKKKGEKKKEKPEKKRGRAFWGIKVIDPVLAG

SEQ ID NO: 204637 - protein, 110 aa, Glycine max
  Clone ID: PAT_MRT3847_26815C.1.pep
SSGGIAPWMIFSSLLIFSCAIHPEFHGFYLHTMDLQFSGETPQKKKKKNKIKLLVLIFMHYSTLLKGSFSFTTSFVVLLLSFLFVMSILMTNIFSFLFVFLSERESLKMK

SEQ ID NO: 204638 - protein, 121 aa, Glycine max
  Clone ID: PAT_MRT3847_26816C.1.pep
AVRCPRRCEKSTEPYHLEEVSNGAPVENKQQEVLKVTVTEVLGGGKFYVQPVGDQRIASIQQQLSFLNLQEAPLLGAFNPKKGDTVLCLFGADKSWYRAMVVNGPRGPVESPNDMFEVFYI

SEQ ID NO: 204639 - protein, 54 aa, Glycine max
  Clone ID: PAT_MRT3847_26817C.1.pep
HTNMRLHHPTKSVRYAPSLSIAVANFLLSILQHNIIHESLRAVATSCTSSLSNS

SEQ ID NO: 204640 - protein, 50 aa, Glycine max
  Clone ID: PAT_MRT3847_26818C.1.pep
WQESMCRGLTGKIKEELGFRILPGGKLLFNMCDGNSPIDTLLVGDINGEC

SEQ ID NO: 204641 - protein, 234 aa, Glycine max
  Clone ID: PAT_MRT3847_26819C.1.pep
MNPRSSLCSSLFMFITLLGLHVYFASSQVEDYVRCLRGIEDTVSDPQARLATWRFDNTTSGFICDFEGVSCWGRRENRVLGLDLRDTKLSGNKIPEALKYCGKSIQRLDLASDSFTSKIPREICTWMPFLVSIDLSSNKLSGHIPPTIVNCSYLNELVLSNNQLSGSIPSEFGSLNRLKKFSVANNRLSGTIPEIFNGFDREGFEGNSKKNDIIIVAAGGWLVWEAAWEGVINL

SEQ ID NO: 204642 - protein, 39 aa, Glycine max
  Clone ID: PAT_MRT3847_2681C.1.pep
HNIDGIQRCQLIYSTNCASNENYNFKYVLLNLHFFHSFT

SEQ ID NO: 204643 - protein, 117 aa, Glycine max
  unsure (1)..(117): unsure at all Xaa locations
  Clone ID: PAT_MRT3847_26820C.1.pep
LQLVDISALLMATKYEEIYPPQXRAYTGEQILVMDKIILAKLEWTLTMPTPLVFLLHFIKASVPDXRDCARLFVSFHSTVGNREEKVVYLKYSDPEKGVVAMLPPAKNLLPEGSNSQ

SEQ ID NO: 204644 - protein, 73 aa, Glycine max
  unsure (1)..(73): unsure at all Xaa locations
  Clone ID: PAT_MRT3847_26821C.1.pep
SSCCCSRSCSCSLGCRGCNLSPVLPYSDSPTTYTLFLXLPPLQAHSRAPYVCVPAANYGCTCLPNCSRIPCTC

SEQ ID NO: 204645 - protein, 160 aa, Glycine max
  Clone ID: PAT_MRT3847_26822C.1.pep
MSSFQNGSSPRSRNAAESDIEAGTSARRSDDLDGGDFSDPFDIARTKNASVERLRRWRAAYLFKAAGVGPGSFPIKPPPIPTAGEFPIGQEQLASISREHDTAALQQYGGVVGLSNLVKTNSEKGIHGDDADLLKRRNAFGSNNYPRKKGRNFLMFMWDA

SEQ ID NO: 204646 - protein, 49 aa, Glycine max
  Clone ID: PAT_MRT3847_26823C.1.pep
MNNQRSIFKLPECSIKSQALHRQITLRPMIDIECLYILIYERQVGLTIV

SEQ ID NO: 204647 - protein, 146 aa, Glycine max
  Clone ID: PAT_MRT3847_26824C.1.pep
QVRQPIDVASLERYIAANVPEIQVPIDVKQFGYGQSNPTYQLTDKNGKKFVMRKKPPGQLLSKTAHKVDREYRIIHALEKTDVPVPKAYCLCQDESVIGTDFYIMEFLDGRIFEDAAIPDVTPEERTKMWHSAITTLAKFHRVNPS

SEQ ID NO: 204648 - protein, 81 aa, Glycine max
  Clone ID: PAT_MRT3847_26825C.1.pep
SQKRWVGVTKHKHASFITYFTGYKELYLPFTIHTIHPEKNCRKKTTKGLSASKKQMAAFLKTENLLHKFLLPTQREHFLKE

SEQ ID NO: 204649 - protein, 66 aa, Glycine max
  Clone ID: PAT_MRT3847_26826C.1.pep
FSLFSFFFFFFVFFWDLVFIFILQNRILNSSFSQSNHKPLGLLFPKPPITSPKGAVYYLAFHSNPL

SEQ ID NO: 204650 - protein, 100 aa, Glycine max
  unsure (1)..(100): unsure at all Xaa locations
  Clone ID: PAT_MRT3847_26827C.1.pep
AILMNMPNAAFSMWXHCGGDLDYDVSKLTAPYIKCTVYFFIALGKWAEDTINFEACPHKLLLPGEIHEKARWHFSQEEFLTARTTQVRPAXTTMTPDGCA

SEQ ID NO: 204651 - protein, 55 aa, Glycine max
  Clone ID: PAT_MRT3847_26828C.1.pep
FVIYTTLRLSAKKKKKKKKKKKKKKKKKKKKKKKKKKKKKKKKKKKKKKKRGGPF

SEQ ID NO: 204652 - protein, 71 aa, Glycine max
  Clone ID: PAT_MRT3847_26829C.1.pep
QSFRYVQKKKKKKKKKKKKKKKKKKKKKKKKKKKKKKKKKKKKKKKKKKKGGAVLRDQSLLPRVCKVKVFL

SEQ ID NO: 204653 - protein, 111 aa, Glycine max
  unsure (1)..(111): unsure at all Xaa locations
  Clone ID: PAT_MRT3847_2682C.1.pep
VVVEAMXGLESSGSNSFTVSSSSGQHHWGNSMSCSSSWEPNSADSTDCWTSSRLSSREEEAQKTPLGLGCSLSSEAKKKKKGLNSKRRECDHEHSGGIGRGRLGSNKGVCV

SEQ ID NO: 204654 - protein, 475 aa, Glycine max
  unsure (1)..(475): unsure at all Xaa locations
  Clone ID: PAT_MRT3847_26830C.1.pep
MDPRGVLILVAVLVAEIGSVANGNLVFPVERRKRSLSAVRAHDVRRRGRILSAVDLNLGGNGLPTETGLYFTKLGLGSPPRDYYVQVDTGSDILWVNCVECSRCPRKSDLGIDLTLYDPKGSETSDVVSCDQDFCSATFDGPIPGCKSEIPCPYSITYGDGSATTGYYVXDYLTYNRISGCLSTSPENSSTKSQYNSIGTKNGTLQRGFEEXIEVDTDILQLPSDIFDSGNAKGTIIDSGXLDNFRGGGIFAIGEVVEPKVSTTPLVPRMAHYNVVLKSIEVDTDILQLPSDIFDSGNGKGTIIDSGTTLAYLPAIVYDELIPKVMARQPRLKLYLVEQQFRCFQYTGNVDRGFPVVKLHFEDSLSLTVYPHDYLFQFKDGIWCIGWQKSVAQTKNGKDMTLLGDLVLSNKLVIYDLENMAIGWTDYNCSSSIKVKDEATGIVHTVVAHNISSASTLFIGRILTFFLLLTAMLNN

SEQ ID NO: 204655 - protein, 130 aa, Glycine max
  Clone ID: PAT_MRT3847_26831C.1.pep
YTLNVDRGFPVVKLHFEDSLSLTVYPHDYLFQFKDGIWCIGWQKSVAQTKNGKDMTLLGDLVLSNKLVIYDLENMAIGWTDYNCSSSIKVKDEATGIVHTVGAHNISSATTLFMGRILTFFLLLTTMLNN

SEQ ID NO: 204656 - protein, 163 aa, Glycine max
  Clone ID: PAT_MRT3847_26832C.1.pep
YGCEKTTEGDDDSLKEKIAEMNTELLKQKAEMLEEYFGIHIDEHGNVSRLPVILDQYTPDMDHVPEFALCLGNDVDWEDEKNCIQAVSAALGNFYAMHPLMLPNPSGEGLLFYKKRKMMDGYAEENTCDNTGSDVIDNKVEHEMFSEAETAWAQREWSIQHVL

SEQ ID NO: 204657 - protein, 181 aa, Glycine max
  Clone ID: PAT_MRT3847_26833C.1.pep
MVLISGNNKSVLQQTNDERAKAQGVTVLQNSHQHGNKNIESGRTQNVVNSGLTKAISTMDEFKCGFPSEGLSTTSNKWWGNSDRDDRAGANANGAKSHQPEEKVGAETDKMAHETGKAEKSEIPHGSSLLKAVRKSAVEEGREALKLGVFRGYGVNKLGKREKTLLHQIFGSSLPRSWMDP

SEQ ID NO: 204658 - protein, 76 aa, Glycine max
  unsure (1)..(76): unsure at all Xaa locations
  Clone ID: PAT_MRT3847_26834C.1.pep
SLLGQPNHLPDSARRIVEIQHDCVLYEHVNEYAKLHRMTIPXDVIYSWAKRAYYADMIQTNDIFDGSIIRCAIRPD

SEQ ID NO: 204659 - protein, 95 aa, Glycine max
  Clone ID: PAT_MRT3847_26835C.1.pep
FEAGKGAKSDPHSWELIFPIKGRGPKKGFEMGSFEWANQTSWPLGFLIDNPKQFTVFDIFLGIFQDFEIAGNTFMPAFFVPQATARFFEKGESLA

SEQ ID NO: 204660 - protein, 34 aa, Glycine max
  Clone ID: PAT_MRT3847_26836C.1.pep
GSMFTYANGERERFDSAPSLRLKTRPTSCLHLDF

SEQ ID NO: 204661 - protein, 40 aa, Glycine max
  unsure (1)..(40): unsure at all Xaa locations
  Clone ID: PAT_MRT3847_26837C.1.pep
FSRFETNFYSWXALTSNRLVYLTEYHRPQXXFXIQLSKLN

SEQ ID NO: 204662 - protein, 423 aa, Glycine max
  Clone ID: PAT_MRT3847_26838C.1.pep
DRFPFVLRWKGKQSGPTANRDVVFYRKALDSLKPCDVEWLPYRNMDSMVIPEHIKSTLILGRSKTMLICFDKAERHLPNRCLRQYGMLQSIPDDVERWERKSRGVDGGVDLSGKMESELNDWMDRQVSIVDGDEGVDESEYMEWYLRITRKFIGRPISLSSEFQRTKINKCLQNAGLRDIAHIADTFSTKGLDPQQIESISRIRYIAHECLRDQFGGPVMASGSTQVELGKRVRGKERVRRKGGTGKRLRKDGVVQYNAVSEDEQAQYYGTAIEVGQLHLSHIERELSHAQLCTVDNEVSVVQLIHANADGENMQLCDPHIEVDESDLGYAAGEENNEDPDDVAAEFSHEELKHRAGEEIKQELNHLTGEENIEELNAANEIHFVQPSELCDVSHNFVMLVPTIQRLQMLLLRSITRNLVTQV

SEQ ID NO: 204663 - protein, 63 aa, Glycine max
  Clone ID: PAT_MRT3847_26839C.1.pep
RCTYRELMSLTRAESGCRNVLNDHIDARTLEGNYRYVAGPTMAVIALKCPEIEAITAMVGGPT

SEQ ID NO: 204664 - protein, 95 aa, Glycine max
  unsure (1)..(95): unsure at all Xaa locations
  Clone ID: PAT_MRT3847_2683C.1.pep
QPQTVAPEANHAKCHRXVGITSSSTSVDQVFSRIVHKFDLMYPXKAFVQWHAPNRVKKGEFSQAREDPAALHKAYMQVGPESGHGDNDGQGDHHH

SEQ ID NO: 204665 - protein, 68 aa, Glycine max
  Clone ID: PAT_MRT3847_26840C.1.pep
LSPFFGRGPFQMYGDFRGAEIYWCLFPWRPFLAKKAEFTGPLLGLSGVPAHLKEQDSFCCTVGSVPIF

SEQ ID NO: 204666 - protein, 59 aa, Glycine max
  Clone ID: PAT_MRT3847_26841C.1.pep
FGICSHEFYPLNNLYCRTSFVLFGVYYQLQKRRSPSINWLNLVSISPSSTYDFGDMFGF

SEQ ID NO: 204667 - protein, 65 aa, Glycine max
  Clone ID: PAT_MRT3847_26842C.1.pep
LERTLITPDIRTVPAVHVNHWAQSRLCSPRADWYGRTMTEHLVQPKTRHWTGFLPKKAARLPFRT

SEQ ID NO: 204668 - protein, 61 aa, Glycine max
  Clone ID: PAT_MRT3847_26843C.1.pep
MLCYLSCEFGSSWCANHLYRVKCIKLNNEKLYLTTMGYVIFSVLSLSCIVLFARKNPCPGF

SEQ ID NO: 204669 - protein, 44 aa, Glycine max
  Clone ID: PAT_MRT3847_26844C.1.pep
SSVSRHGHELRLGEKILWCPPGRIACYHKRFSISQVYTPSKHQA

SEQ ID NO: 204670 - protein, 162 aa, Glycine max
  unsure (1)..(162): unsure at all Xaa locations
  Clone ID: PAT_MRT3847_26845C.1.pep
EXXXQGSXPXHXPRXFVLKTXYQCPTDXXAWXXXPXXXGGIXHLXFGGXGEVXRSXKXXIRQXYNXCXSXXXRXXNXYLYXFPXLQIXXXYXTLXVAEXXXSXXXFXVLXGDXXXPXVAQPXGXLXXVAXXRTRGXTXXXGPNXIPSXPGQISXDXTGKSLX

SEQ ID NO: 204671 - protein, 56 aa, Glycine max
  Clone ID: PAT_MRT3847_26846C.1.pep
RGTLWMREAHPPHPYNKRVHKLWGPYYKCKRLLRLTANTCHTFCAKPRAKCSPNLP

SEQ ID NO: 204672 - protein, 81 aa, Glycine max
  Clone ID: PAT_MRT3847_26847C.1.pep
IFPPPPLFSPGGGPFFPPPFFPKGKKKDGFFFLDAQVKVLFFLLPKAFGFVASVGGVRFGPHLGAGRFHIGRGLPRFLVPL

SEQ ID NO: 204673 - protein, 50 aa, Glycine max
  Clone ID: PAT_MRT3847_26848C.1.pep
LLKIGQFKEIQIKWLPVTTDYFKTQPQMCPPHCKSYIKTHLHPCFPQKLQ

SEQ ID NO: 204674 - protein, 63 aa, Glycine max
  Clone ID: PAT_MRT3847_26849C.1.pep
ILFQLIAFCLLGIPIIAVRAFLLCGGTLSYISKQCVNCPMAFLKVESCIGFLSGASYFSIVDI

SEQ ID NO: 204675 - protein, 65 aa, Glycine max
  Clone ID: PAT_MRT3847_2684C.1.pep
RLQGTLIRFPIQCNCGSENLAHPYSRWSIIDDLKLLHERSWMCRELERWNLQGFNERIIRSEGLQ

SEQ ID NO: 204676 - protein, 63 aa, Glycine max
  unsure (1)..(63): unsure at all Xaa locations
  Clone ID: PAT_MRT3847_26850C.1.pep
FFVGGNWKCNGTTEEVKKIVTTLNEAXVPGEEVVXFVESPPFVFLPVVKSLLTPEFHVLSQNC

SEQ ID NO: 204677 - protein, 76 aa, Glycine max
  unsure (1)..(76): unsure at all Xaa locations
  Clone ID: PAT_MRT3847_26851C.1.pep
LENGTRPFLFTCESGNEGHPDKLFYQVCDAXLDACLEQDPDSKVVCETCTMTNKVMXLCRVTTKANVNYEKIVRDT

SEQ ID NO: 204678 - protein, 131 aa, Glycine max
  Clone ID: PAT_MRT3847_26852C.1.pep
APWFLQTLLMIQQQCSCSPSWPAYALSLASLPPVQLNLFTYEHLQICPSMQDQPKKELGTPTPGSKTGSALQASLLAAKQELTVTRATDALWHAKILLEVLLWAIASAARDGTLTSASLLEICGSPQVLSE

SEQ ID NO: 204679 - protein, 479 aa, Glycine max
  Clone ID: PAT_MRT3847_26853C.1.pep
PTRQERRNPSWAKKKTLLAESAPTTTATAITPKNVKKLTLIPLIFLIYFEVAGGPYGEEPAVQAAGPLLALLGFLIFPFIWSVPEALITAELTTALPGNGGFVLWAQRAFGPFCGSLMGTWKFLSGVINIASFPILCIEYVQKIFPIFNSGWPRHVAVLSSTLALSFLNYTGLTIVGYVAVLLAVVSLSPFILMSLIAIPKIKPNRWVSLGQKGVKKDWNLFFNTLFWNLNFWDNVSTLAGEVDEPHKTFPLALFVAVIFTCVSYLIPLFAVTGAVSVDQTEWETGFHAQAAEIIAGKWLKIWIEFGAVLSAIGLFEAQLSSSAYQILGMAEIGILPKFFGVRSKWFDTPWLGILISTIITIGVSYMDFTDIISSANFLYSLGMLLEFASFLWLRWKSPSIKRPYRVPLKLPLLVVMCLVPSGFLVLIMVIATKTVYLVSGVMTVAGIGFFLFIKLCKTRKWVEFEQEKDDDGFQRYVL

SEQ ID NO: 204680 - protein, 208 aa, Glycine max
  Clone ID: PAT_MRT3847_26854C.1.pep
MNPKDALTCNIFLFFLSFWRGKQVWLGCVSLFLLRKHLYIVLSFCYDYGSNSRLCPLPISRSGGRQWRQCRIGTFAVAIAALLISTTAWLSVVFSDATTCCFHHLKDWESSPHFFNWKKCISHRLAKVKPPPALQFETMNDHLHNGSSIVEEEGLSLKHIVFGIAGSSQLWKRRKEYVKLWWRPNDMRGHVWSLLSSSRSRLEPIRLE

SEQ ID NO: 204681 - protein, 175 aa, Glycine max
  Clone ID: PAT_MRT3847_26855C.1.pep
MHIGMMVMMTQALKTIVSSYHDYDKNSRLCPLPISRSRSRQWRQCRIGTFAVAIAALLISTTAWLSLVFSDATTCCFHHLKDWESSPHFFNWKKCISHRLAKVTPPPALQYETMNAHLHNGSRTVEQEGLSLKHIVFGIAGSSQLWKRRKEYVKLWWRPNDMRGHVWLEEQCLKP

SEQ ID NO: 204682 - protein, 79 aa, Glycine max
  Clone ID: PAT_MRT3847_26856C.1.pep
QLKLPSIVDCASLQQQKKTREAMLHDYLNRVPLATFKLHKLYKNPQFNHWKAPGDQSQPQLKGFDHPNNGTLWCTSFKD

SEQ ID NO: 204683 - protein, 65 aa, Glycine max
  Clone ID: PAT_MRT3847_26857C.1.pep
DWFLIKIRSVAHLFSCSQHHEKQYNKMQKKKKLNNFNVCIYLLCKTEKQKGDREGIAVKGDNIRQ

SEQ ID NO: 204684 - protein, 150 aa, Glycine max
  unsure (1)..(150): unsure at all Xaa locations
  Clone ID: PAT_MRT3847_26858C.1.pep
SITFKHQXIIGXXXXKRXAXSIXLAFXQXXFXGXTTDPVNATXXXXXXIVVLFSTLVFGFLTKPLIRYLLPHSATRKSISHSESGPPFDDLNLPFLSLEESAATNISRAKASLSMLIESPVFTIHRYWRRFDDAYMRPIFGGPHGNQSQC

SEQ ID NO: 204685 - protein, 115 aa, Glycine max
  Clone ID: PAT_MRT3847_26859C.1.pep
SAGGGVGRVASADPTTDRLFASSPVPPHFLQRPGSDHFLPLVSVPALQQQQQRHHHQHLAVAASAAAGHRQFGLPPNGHFELPILSRMGAPVPGYAAEDVESGRRNVLTLFPAGY

SEQ ID NO: 204686 - protein, 210 aa, Glycine max
  unsure (1)..(210): unsure at all Xaa locations
  Clone ID: PAT_MRT3847_2685C.1.pep
PRVRLESRGGRQSSIVLCTTGVVLRVLVSKGSHSSKTGRVKDEISGITHIIMDEIHERDRYSDFMLAIIRDMLPLYPHLRLILMSATIDAARFSQYFGGCPIIHVPGFTYPVKTFYLEDVLSIVKSRHDNHLDSTTCSIPKNTCELSEEEKLSIDEAINLAWSNDEWDLLLELVSSEGTPELFNYQHSLTGLTPLMXVFAGKGRGGDMCM

SEQ ID NO: 204687 - protein, 122 aa, Glycine max
  Clone ID: PAT_MRT3847_26860C.1.pep
PTRPSTRAPTRSIRNFRSNRGPGSGILKGFVWLITWIFTTVCFALLTDHPGSFLIMLSVIHFAVRLSGVFFLREILDDASADADADEVKYFGVFNVVAMAMALLLLAYGFIHSPRMLESRVF

SEQ ID NO: 204688 - protein, 80 aa, Glycine max
  Clone ID: PAT_MRT3847_26861C.1.pep
MTLHRFGNTSSSSLWYELNYIESKGRMKKGDRVWQIAFGSGFKCNSAVWKCNRSIKTPVDGPWADCIDRYPVHIPEIVKL

SEQ ID NO: 204689 - protein, 102 aa, Glycine max
  Clone ID: PAT_MRT3847_26862C.1.pep
QSILPDPHDFKPQSLMGYNYVDVKGQNYELIPFGSGRRVCPGSSLALRVVHMVLARLLHSFNVASPSNQAVDMTESIGLTNLKATPLEVLLTPRLDTKLYEN

SEQ ID NO: 204690 - protein, 55 aa, Glycine max
  Clone ID: PAT_MRT3847_26864C.1.pep
FKGLLVSFRLSFFFYLLLNFEMLIKLLFVCVNFLCFDKCHFIYLFVPLIKNYINN

SEQ ID NO: 204691 - protein, 51 aa, Glycine max
  unsure (1)..(51): unsure at all Xaa locations
  Clone ID: PAT_MRT3847_26865C.1.pep
LSPSWLTCSPSSSSLSSPQPPPXKXXPTGQLFXTNSLTKTXGXANGNVGSV

SEQ ID NO: 204692 - protein, 72 aa, Glycine max
  unsure (1)..(72): unsure at all Xaa locations
  Clone ID: PAT_MRT3847_26866C.1.pep
REKSVRPPSPWDITLPEKLAEKQEMKLLVMQLLLRRLLLLIQVXKTYTSFSPNRSLPFLSWVELEHTLSSIP

SEQ ID NO: 204693 - protein, 57 aa, Glycine max
  Clone ID: PAT_MRT3847_26867C.1.pep
VAHQKGQRTLLYQLLSLQIFTLAGNKRRNFSPDFASGKGEPPDTPRNSRINTTCLGR

SEQ ID NO: 204694 - protein, 473 aa, Glycine max
  unsure (1)..(473): unsure at all Xaa locations
  Clone ID: PAT_MRT3847_26868C.1.pep
MGSCISTSSRSTCSSKSNGDMVSPSCLEIGCCGQKRTRRTFSDHVISLHHLPSLPSRIFSNGKSRGSCIFTQQGRKGINQDAMIVWEDFMSEDTIFCGVFDGHGPHGHLVARKVRDALPIKLISSLHSNESKRNGSGKTCFKGNVKPDSGESEKDCSAEDKLNSTWREAFMKAYKAMDKELRSHPNLDCFCSGSTAVTIVKQGSNLFMGYIGDSRAIMGSKDSNDSMVAIRLTVDLKPDLPREAERINKCRGRVFALQDEPEVPRVWLPFDDAPGLAMARAFGDFCLKEYGVISIPEFSHRQLTDRDHFIVLASDGFXVWDVLSNEEVVEIVSSAPTRSSAARILVDSAAREWKHKYPTSKMDDCAVVCLFLDGKMDSESDYEEQGFSSATIQSNHSGNPIESDDGQKSEPSLQRNFTVRSSEENETNGALSVDVVEDATSSADDQNWSGLEGVTRVNSLVQLPRFSEERPKS

SEQ ID NO: 204695 - protein, 158 aa, Glycine max
  Clone ID: PAT_MRT3847_26869C.1.pep
LRTLEDLPKGAFVCEFVGEILSMKELHERNLKCTENGKYTCPVLLDANWDSGYVKDEEALCLDAASFGNTARFINHRCSDANLIEIPVEVEDPGHYYYHFAFFTSRKISAQEELTWDYGIDFDDHDHPVKLFQCRCGSKFCRNMKRYSRSLRYASIAG

SEQ ID NO: 204696 - protein, 70 aa, Glycine max
  Clone ID: PAT_MRT3847_2686C.1.pep
ILELNRLQAATQITIGVRLQTISLVSIPSNLLLVLKNWKYPFLLATPPIKGMGLLQKVPPELTSTPLIFA

SEQ ID NO: 204697 - protein, 32 aa, Glycine max
  Clone ID: PAT_MRT3847_26870C.1.pep
FSFSRPLMKFDDHQLLPIVDLSNIATMANNVI

SEQ ID NO: 204698 - protein, 315 aa, Glycine max
  unsure (1)..(315): unsure at all Xaa locations
  Clone ID: PAT_MRT3847_26871C.1.pep
MSMDSSSNSVMEDEFESTTLHSAPSFAIYNNLHGDDDITPEEVLKRTVLVGQSLEATGSGDFSFGSNKMDLIEEGENENENNDWSTGIRNLSIEEEDVQPASPPMYLAAGLGVDADVGFDKFISDDVFNPSLEESEDLEGYYKRMVDEYPCHPLVLKKYAQLLQSNGDLQGAQEYFLQATVADPNDGEILMQYAKLVWENHHDKDRAMVYFERAVQAAPQDSNVLAAYTSFLWNIEDDENEDRKHEIQSDMEIQKTEPVKPSKEESGQVIDAANVTTANFGEESNVEDYLXKMVDENPSNPLFLKKYAQFLLQSK

SEQ ID NO: 204699 - protein, 65 aa, Glycine max
  Clone ID: PAT_MRT3847_26872C.1.pep
RVPLTILFAHIIEMASQPLLLSFKNSGSRKLYIGHWYVLLPSSVIIPSYKYLRLPNLLDVPNFKT

SEQ ID NO: 204700 - protein, 49 aa, Glycine max
  Clone ID: PAT_MRT3847_26873C.1.pep
YQIRQDQCHSLILSEPSYNQWPRPSQIYGQKIRSWDPGPLSARHSQTLR

SEQ ID NO: 204701 - protein, 97 aa, Glycine max
  Clone ID: PAT_MRT3847_26874C.1.pep
PRGGKVKQAGKARSVFFLKNRCRSPFWVRGVSWPTNNEVSCSPPAANEGGSPTTICKSFWESLGSPSCPSLWLRYACFNHTIHMEVSSRHFLWKTNP

SEQ ID NO: 204702 - protein, 63 aa, Glycine max
  Clone ID: PAT_MRT3847_26875C.1.pep
LTFELSRIYFSYEQCYLKFKFWQVLFGVLPAKVGLLLFGPRTGVFFTQRILHRGWFKQFGNFA

SEQ ID NO: 204703 - protein, 63 aa, Glycine max
  Clone ID: PAT_MRT3847_26876C.1.pep
LQRSHKHAKISLVSCPTLLHNFSHSSIVRIISSLIHCSLCIVHVSSCIIESCQFAPSCCQHNV

SEQ ID NO: 204704 - protein, 94 aa, Glycine max
  unsure (1)..(94): unsure at all Xaa locations
  Clone ID: PAT_MRT3847_26877C.1.pep
KPPIGRPPVSKPPVENPPFYRPPGGKPPGSKPPVKKPPWYKPPLEKPHGSKPPVEKPPVYRPPVEKPPFXRPPVEKPPVYKPPVEKPPVFKPPV

SEQ ID NO: 204705 - protein, 70 aa, Glycine max
  Clone ID: PAT_MRT3847_26878C.1.pep
YGCERTPEGDTLLYYQLRTCDHGFLHHYIIVSTIVNLGLSFIYGYPYCSRPRLCPGSCWSSLIGGCRMGN

SEQ ID NO: 204706 - protein, 57 aa, Glycine max
  Clone ID: PAT_MRT3847_26879C.1.pep
KKKKKKKKKKKKKKKKKKKKKKTKIKKKKKGERAAHRLFNPGNKILIGTREGAGFPF

SEQ ID NO: 204707 - protein, 47 aa, Glycine max
  unsure (1)..(47): unsure at all Xaa locations
  Clone ID: PAT_MRT3847_2687C.1.pep
FWFXISLXLVILXLXXQXGCSVXXXXFXGLKSXFKXLKXTRSXYLXI

SEQ ID NO: 204708 - protein, 362 aa, Glycine max
  unsure (1)..(362): unsure at all Xaa locations
  Clone ID: PAT_MRT3847_26880C.1.pep
MREESLGLIIGVSIGVVIGLVLAIFAFFCHRYHRKRSQIGNSSSRRAATIPILTNGADSCTILSDSTLGPESPIKSPDXNGMPFWLDGFKKSSNMVSASGIPEYSYKDLQKATYNFTTLIGQGAFGPVYKAQMSTGETVAVKVLATNSKQGEKEFQTEVMLLGRLHHRNLVNLVGYCAEKGQHMLVYVYMSKGSLASHLYSEENGALGWDLRVHIALDVARGIEYLHDGAVPPVIHRDIKSSNILLDQSMRARVADFGLSRDSXEMVDKHAAIRGXTFGYLDPEYISSGTFTKKXDVYSFGVLLFEIIAGRNPQQGLMEYVELAAMNTDGKVGWEEIVDSRLQGNFDFKDCSKISFSPFKPY

SEQ ID NO: 204709 - protein, 101 aa, Glycine max
  unsure (1)..(101): unsure at all Xaa locations
  Clone ID: PAT_MRT3847_26881C.1.pep
NPEFKFPIAMMGYGPEDKSTVLELPFNYGVTXYDKGNAYAQIAIGTDNVYKTAEAIKLAGGKITREPGALPGINTKITACLDPDGWKSVFVDNVDFLKELE

SEQ ID NO: 204710 - protein, 40 aa, Glycine max
  Clone ID: PAT_MRT3847_26882C.1.pep
WGWDYYSAPRGRKAVLHGFQFTSVYCPVHWPDKLVYIVHM

SEQ ID NO: 204711 - protein, 105 aa, Glycine max
  Clone ID: PAT_MRT3847_26883C.1.pep
CFFFFFFFFFFFGQKKKNIFFNSAATKGHPIKVLNEKRKPNGYFPSSIKGPIPRGAATNSKILPNIWLLGDPKSQETKDITLNGPPCPPHFYSRPFLPPHSLQSS

SEQ ID NO: 204712 - protein, 155 aa, Glycine max
  unsure (1)..(155): unsure at all Xaa locations
  Clone ID: PAT_MRT3847_26884C.1.pep
HAHNKRAGGRGNQXNESPPPDKEKEKPESRSHTIKEQRRKQKAPKPNQTTLTSPRSGNTKPHTGSRPAGESNKPSTTDPQGRGREPSNQRGTKRRNEPPGNPKEPAPGQERPQKKGPPSHRRHPKPTATPPNPHRKEGEPETKGTQGTKNKDPAP

SEQ ID NO: 204713 - protein, 72 aa, Glycine max
  unsure (1)..(72): unsure at all Xaa locations
  Clone ID: PAT_MRT3847_26885C.1.pep
LRFLAEQPLPCTELTTKMEHAQNMTRAVYPRHGRYLTGSCMFRGKMNSKDVDEHMINLQNKNSSYLAXWIPN

SEQ ID NO: 204714 - protein, 85 aa, Glycine max
  Clone ID: PAT_MRT3847_26886C.1.pep
FWELKYYILPRRTWGLHVLPPGGTRRDRFSFKRKAFNDLHRNVTVLPGLLRRREGRAASCSPRSGLTCDSRRALKHINQPKGSKP

SEQ ID NO: 204715 - protein, 75 aa, Glycine max
  Clone ID: PAT_MRT3847_26887C.1.pep
MHSQNVVEMEGKTEIRMTSAAAFVEGGIQESCDDACSICLEEFCASDPSTVTTCKHEFHLQCILEWGERSSQRPI

SEQ ID NO: 204716 - protein, 179 aa, Glycine max
  Clone ID: PAT_MRT3847_26888C.1.pep
LVIVEENNGNFNYGYSSFPPHSFLLIPLWNQKASKRADGVILWDYHVICIQIKQGAVPPLVWDLDSTLPFPSPLPSYVSETIRPSFQLFSDYNRLFRVVHAPLFLRCFASDRRHMKDSGGNWIEEPPQHEPIVAEDRTVHNLNEYINISAADAITDVTISSVKDAISTQNTCGDKGKPA

SEQ ID NO: 204717 - protein, 280 aa, Glycine max
  Clone ID: PAT_MRT3847_26889C.1.pep
MAKPRVDAEYLKEIEKARRDLRALISNRNCAPLMLRLAWHDAGTYDAKTNTGGPNGSIRNRQELNHAANKGLETALAFCEEVKAKHPKISYADLYQLAGVVAVEVTGGPTINFVPGRKDSLESPAEGRLPDAKQGASHLRDIFYRMGLSDKDIVALSGGHTLGKAHKDRSDFHGQWTKDPLKFDNSYFVELLRGESKDLLKLPTDKALVEDPNFRKYVELYAKDEDAFFSDYATSHKKLSELGFIFKNHRSILAKGVIGIAIVLTAVILGYLRELNKKTN

SEQ ID NO: 204718 - protein, 58 aa, Glycine max
  Clone ID: PAT_MRT3847_2688C.1.pep
SWNHRLAQNAFRTLLITLPLRVLPTSSCTVNEAILFLARILVRRLSPNSIGLIAPRLV

SEQ ID NO: 204719 - protein, 121 aa, Glycine max
  Clone ID: PAT_MRT3847_26890C.1.pep
MAKEFDAYAGMVVTSLNMLPCGRLEGGRIAQAMFGRSTAMLLSFATSLLLGVGGLSGSVLCLAWGLFATFFRGGEEIPAKDEISPIGESRYAWGIVLGLICFLTLFPNGGGTFSSAPFFRG

SEQ ID NO: 204720 - protein, 76 aa, Glycine max
  unsure (1)..(76): unsure at all Xaa locations
  Clone ID: PAT_MRT3847_26891C.1.pep
LKWGPPGEKEFWKVSLGNRLPCPFFKNGVVEKPLSLKGGXYSFVKGFFXLWGPQFGPASFFSVWASPLVRALILVP

SEQ ID NO: 204721 - protein, 34 aa, Glycine max
  Clone ID: PAT_MRT3847_26892C.1.pep
KKDVWRGECGIPSGPPLTAILYSILNVLLVTCSF

SEQ ID NO: 204722 - protein, 53 aa, Glycine max
  Clone ID: PAT_MRT3847_26893C.1.pep
AIQLSFLESKRPITLVWILGVVNKMLLSLHEINNFIGQLETIHRNEVAGRIPS

SEQ ID NO: 204723 - protein, 157 aa, Glycine max
  Clone ID: PAT_MRT3847_26894C.1.pep
VFSIMTKAAILDLAIGGHPLVWAAVVADVGTCLLVIFNSMLLLRKGHNHGGKCCRSSTKPHNHKNGCGGSHDNSSHHHHHHEHDQHQHEDHSHKRCCSEKTKKLFPPQKCGGAHGSSSHHHHHHRQHQHEYHNHDQHDQHHQKCASQTSFSTCPPCS

SEQ ID NO: 204724 - protein, 48 aa, Glycine max
  Clone ID: PAT_MRT3847_26895C.1.pep
LFLPLGMTIQMSSLLLASLAVFYFFSSLEKSFAFKAARKEDTASSNLH

SEQ ID NO: 204725 - protein, 74 aa, Glycine max
  Clone ID: PAT_MRT3847_26896C.1.pep
SENLGLKKYFDGCNTKAHVRSLHCILLKYIEITVFLQLLLCLLDVKSERGKVREKASTETVKERGAKECARRAS

SEQ ID NO: 204726 - protein, 193 aa, Glycine max
  unsure (1)..(193): unsure at all Xaa locations
  Clone ID: PAT_MRT3847_26897C.1.pep
MAPRLDFSNWWTKDTQKGTPVVVKMENPTFSVVEINGADAAFRPVEKSRGKNAKQVTWVLLLRAHRAVGCVTWLAAVLWALLGAIKKRLIHGQGVSVESESDKLEKGKLLFRVIRVFLVTSLAVLAFEVVAYLQGWHFGNPNLHIPRTSDLEGLLHLAYVAWLTFRAEYIAPSIQGTFKFXVCLFLIQSADRM

SEQ ID NO: 204727 - protein, 64 aa, Glycine max
  Clone ID: PAT_MRT3847_26898C.1.pep
KFPFLEYQRRNALPPPLHHFVLTAYIGKRFANGSSTNQMEYTTSLIFILINLLIASELEVCISL

SEQ ID NO: 204728 - protein, 137 aa, Glycine max
  Clone ID: PAT_MRT3847_26899C.1.pep
PIWIVPFYHSCWVVCRVRITLAPYIPCRLELILMTVPLFCESWSSPSPFVGSRATTLASARSVPYGARALLLTGTPPQCLPYAGRWTVRAWNSVSDVARTSMLHISRERQRRARLACTALECYNAVHSSNYRPRGCT

SEQ ID NO: 204729 - protein, 556 aa, Glycine max
  Clone ID: PAT_MRT3847_2689C.1.pep
MAESSPPATPELKPELGIGSGSGRKPGIRRVGLRAEIDTSPPFGSVKEAVTRFETTGPWIPFYNFGEAYNSAEDFDIKRVEEEAAKLEKDLIVKELETLDVLEELGATKAILEELKKQLQSEALNCFATPGGNSCEQIGVPVKNCVNDINNEEQALQCRSPWATLSPDLFMMELRQAKMSLGKTISDLRAIQSSVEALNKKMKKDRLFVERTREKLASKFAAVSAQEVARKEARLTPPEATVGTSCTCHHLLNVGRSFKFDTGQSNGMSETRISEVSRPLPEFGENGFSIKTAEMRWFAAKKMEEAAIAAEAVALAEIEALCSPEISSEFAPPECQKMPFAIGECSPLHPIVQIPQESTLKKVIDSKFQVDKIGSSKLTILKKLEEATEEVIRSKQILNEALNSVESANRKQHAAEEALRRWIPQDDLIGQPVDNYIKPKKFNQAGNCHDCPLPDVTRSITMNNDPKPILKSSVSMRDVLSKKQVPEEYTTTKEMEEPSERKVALSQMLRALRQDQTLPTIPEKDGSNQRQFIAQRKKFGFIQISLPLGKRSKKKA

SEQ ID NO: 204730 - protein, 108 aa, Glycine max
  Clone ID: PAT_MRT3847_268C.1.pep
ELVYSKHLSSLEACLKNATDGKFPECGLIDDRVKFHKHLMEAQAESLLDDSGEEEAGDELERIVCDCKDGRKLCGSNRVKYVKPESNVAELERVYEYLDETNRVLVIA

SEQ ID NO: 204731 - protein, 123 aa, Glycine max
  Clone ID: PAT_MRT3847_26900C.1.pep
MQHNIFASMRSLKIMDGCKGTQVYAINPSSATGGGIGEKLLQQLHDHIKSHTLRTKSVRNLQPPNMTTPSEVFVSDGSLLPYGLPMTDLLEPKIEPSLVCGDFVETLAGVYRRTEDRHQFDRS

SEQ ID NO: 204732 - protein, 104 aa, Glycine max
  Clone ID: PAT_MRT3847_26901C.1.pep
KEGDFYCLVCGGIGKKVWKRFKDCVGLIHHSTAILKTKRKRAHRAYARVICKIVGWGIDQLPTIVLKDFDSSLAGSRKLLVEHKIPVVGCIDYSNGEPDNSTDK

SEQ ID NO: 204733 - protein, 63 aa, Glycine max
  Clone ID: PAT_MRT3847_26902C.1.pep
FGSRCPIGLLCLLSTYNFCGMISYLVSYLTYHTYASSSNPLEFQIIFGRKNKIISFQNPLYDN

SEQ ID NO: 204734 - protein, 87 aa, Glycine max
  Clone ID: PAT_MRT3847_26903C.1.pep
QKRKAAWQSDNNSLSCASQFICSLSLNLLPQSIIFTCLVDTMALFPGGFEHPLERRQDNSRPMRDPGGDRIPVIGEKAERSDLPRPR

SEQ ID NO: 204735 - protein, 41 aa, Glycine max
  Clone ID: PAT_MRT3847_26904C.1.pep
RTRAETGFWLLKEVFKLGSFAIRGVMNLMIILARHYRCPSW

SEQ ID NO: 204736 - protein, 69 aa, Glycine max
  Clone ID: PAT_MRT3847_26905C.1.pep
AKRQQKGIGSQNYKNWHHGAASETKPSPEVPDSMSEETHRKEKRPEDYPRTLSVVGVNVLNGIRINEML

SEQ ID NO: 204737 - protein, 249 aa, Glycine max
  Clone ID: PAT_MRT3847_26906C.1.pep
MALIHVLLESNQLTDKIPPTLGLVQSLEVVRLDGNSLNGPVPPNINNLTHVQDLYLSNNKLSGSLPNLTGMNALSYLDMSNNSFKPLDFPGWFSTLKSLTTLKMERTQLPGQVPTSLFTLINLQIVVLKDNKINGTLDIGSSYSNQLRLVDFETNSIDSFEQKDEVPNVKIKIILKDNPICQENGELESYCSSSQPNVSYSTPLNNCQPGTCSSEQILSPNCICAYSYSGTLTFRSPSFLDFDNKTYYS

SEQ ID NO: 204738 - protein, 86 aa, Glycine max
  unsure (1)..(86): unsure at all Xaa locations
  Clone ID: PAT_MRT3847_26907C.1.pep
FLCLSGWLGWVGRXPLXAXRAGXXPPLXGFFFAVPLASRLLFRGFPWPVAASXXLFXGALLAXXVSLRAGWLPWAWCLWSSPFPFF

SEQ ID NO: 204739 - protein, 90 aa, Glycine max
  Clone ID: PAT_MRT3847_26908C.1.pep
MREIVHIQAGQCGNQIGAKFWEVISDEHGIDPTGTYHGDSDLQLDRISVYYNEATGGKYVPRAILVDLEPGTMDSVRSGPFGQIFRPDNF

SEQ ID NO: 204740 - protein, 119 aa, Glycine max
  Clone ID: PAT_MRT3847_26909C.1.pep
ANHSSQYIGWLYNTTFYGLFFSGQNLTGHVTITCMRHGRINVVTPILQKYTKKSTPRPYGGARQKHPNKNPPARPRKSLFIGAPKKHTPAGVYQQLDGENPGLTPLCPFATHPLFPGGA

SEQ ID NO: 204741 - protein, 120 aa, Glycine max
  Clone ID: PAT_MRT3847_2690C.1.pep
SNKDIANFHRPKALWYPHDNEVAVKEQGKLPTQGPMKIIIKSLGGKGSKLHVDVEETLSSVKAKASKKLDFKVSETVKIFYLGRELEDHKSLAAQNVQPNSLLHLVRTKIHLWPKAQRVP

SEQ ID NO: 204742 - protein, 94 aa, Glycine max
  Clone ID: PAT_MRT3847_26910C.1.pep
RLDDTFTLTSIKAYIAEFHTTLLFVYAGVGSSIAYGKLTSDASLDPDGLLAAAIRHGFALFDADSVGAHILGGHDNPVVNYELHLEGHMTILTV

SEQ ID NO: 204743 - protein, 57 aa, Glycine max
  unsure (1)..(57): unsure at all Xaa locations
  Clone ID: PAT_MRT3847_26911C.1.pep
YGDACVEQWQTYXCFAPDICIIKIVLQGYSHQKSQKGLHRHDQQFFNNTDVVSKLLT

SEQ ID NO: 204744 - protein, 50 aa, Glycine max
  Clone ID: PAT_MRT3847_26912C.1.pep
SHLRLRCCCCCCCWVHRRGVEGAVAADILNVRSAVGESLHHSVTVRSGFE

SEQ ID NO: 204745 - protein, 191 aa, Glycine max
  unsure (1)..(191): unsure at all Xaa locations
  Clone ID: PAT_MRT3847_26913C.1.pep
PPAAPAPPPRPPPRPPAPPPPPPPAPPGPPAPPPRPPRRPAPPPAPAPPPPXPPPPPPPPXPPPPPXPAPPPRPAPPPPPPPPPXAPPPPPRPPAPPPPPPPAPAPPPPPPGPAPPPPPRGGPXXARGPPPAPPXTPQPKCFCPWKLVNKSEDINEEGSYKGSKDEGSTRPCWFCVATTLSLSLLLCCGTW

SEQ ID NO: 204746 - protein, 332 aa, Glycine max
  unsure (1)..(332): unsure at all Xaa locations
  Clone ID: PAT_MRT3847_26914C.1.pep
FFFIQRDIDDFNVPFLAIYGSLIPPEEEKLKQKKLVALLEKLVSKEWPTAKLYLYGSCANSFGVSKSDIDVCLAIEEADMEKSKIIMKLADILQSDNLQNVQALTRARVPIVKLMDPVTGISCDICINNLLAVVNTKLLRDYAHIDPRLRQLAFIIKHWAKSRRVNETYHGTLSSYAYVLMCIHFLQMRRPAILPCLQEMETTYSVTVDDVHCAYFDQVEKLCDFGRHNKESIAQLVRGFFHYWAYCHDYANTVISVRTGSIIXREKDWTRRIGNDRHLICIEDPFEISHDLGRVVDKHSIKVLREEFERAAEVMQNDPNPCIKLFEPYVPS

SEQ ID NO: 204747 - protein, 282 aa, Glycine max
  Clone ID: PAT_MRT3847_26915C.1.pep
MAKKIIHDTTRKMSQLCQKIVQVDVRWGFLKRVSFVGHFFRFIWNRLVVCSVAGSPSHYRKLPLRDPSSSPPATVDDVFSSAATTTGGYDSDSDLVNLKISLLGDCHIGKTTFVIKYVGNEQEKGSLQMEGLNLMDKTLSVQGARISFRIWDVAGDKRSLDQIPMACKDAVAILIMFDLTSRCTLNSVVGWYSKARKWNQTAIPILIGTKFDDFVKLPPDVQWTIVTQARAYARAMKATLFFSSASHNINVNKIFKFIMAKLFNLPWKVERNLTLGEPTIDF

SEQ ID NO: 204748 - protein, 493 aa, Glycine max
  unsure (1)..(493): unsure at all Xaa locations
  Clone ID: PAT_MRT3847_26916C.1.pep
MNGGGGDLPPSNGGEFLLSLIQQRPHQPHPHPPPQSPAIDPAVAAIGPTIPVAPPLWQILSADHPHHHHHQPHPHHLPPPWSHSLSHLRXYPPNFFGLPHNAFPPPRTHFPITPNSVANGVNANINLAHDLRNLGFPIEESHHNNNNNNNVVDGFVHHHHQQQQQQHELKLQFGSLPTVAYSAAEVSSNGDSLLNLKFNRGGNVVHPTSNSSGNVVLQGNHDAGERERRGLGGYMAGGSLPPETSRVAPGFGNRIRGKGLEGRNENLYGRREGGRMVSGERSNVGLVDQLDRPGPPARSHLHSGSGNETSGIGEVGGRDSKHKGGGRLRMEGFPESGGRVADVDVLGEQLADSLLVEDESDDRTNLRQRRREKDVRFLDSRGQQIMSQRGRMYRRQMMCRRDIDDFNVPFLAIYGSLIPPEEEKLKQKQLVAILEKLVSKEWPTSNLYLYGSCANSFGVSKSDIDVCLAIEEADMEKSKIIMKLADILQSDNL

SEQ ID NO: 204749 - protein, 214 aa, Glycine max
  Clone ID: PAT_MRT3847_26917C.1.pep
MLHQDFAVHKVTIRAGDVQWMTAGRGIIHSEMPAEANNNKGLQLWINLSSRDKMIEPNYQELPSENIATAEKDGVEVRVIAGEAMGVHSPVYTRTPTMYLVFSMMPKTQWNQSIPESWNAFVYIIEGEGVFGSPTSSPTVPHHVLVLTQGDGLSVWNNSSKPLRFVLIGGQPLNEPVVQHGPFVMNTQSEIENTIEDYHYGRNGFEMSKYWMSQ

SEQ ID NO: 204750 - protein, 57 aa, Glycine max
  Clone ID: PAT_MRT3847_26918C.1.pep
NRFTDRWTEWGDLSMIDSSYVRPSYPSIPPLDFAMDVLRMTNVSYYMNHSSDFQSLV

SEQ ID NO: 204751 - protein, 112 aa, Glycine max
  Clone ID: PAT_MRT3847_26919C.1.pep
IKIKQHLTYIPNKEHYTSLSTCFVQKPPQKMSIFCVKLFICMTVSSFSFLVFCIVPKENIEEIFLSLFLEGKTRHLYDVLICITCVACCLTVYYIPKINRKTNICYFLLHEF

SEQ ID NO: 204752 - protein, 96 aa, Glycine max
  Clone ID: PAT_MRT3847_2691C.1.pep
STQDCNKTGSGTFCDISCLRRRCSCLMREISNFQRYERYLQFYMPLVLGDINLVAQKENGALETKPNDNKLDREALCVILPRPTCLSRLKPLMLIS

SEQ ID NO: 204753 - protein, 151 aa, Glycine max
  Clone ID: PAT_MRT3847_26920C.1.pep
KKGLKHFQEPKPHPLTITPKKKNENPGAGGGPGNRGPDPEGLPISQIGRNIKASRKRGIPGTRGKSLTDANSTQNTSLKHKAKSPRGLRRGLTTVRRLEPTAHFKNRKPPGPHGIRKPPTSGERRFAARAPWWFSFTHGKRAKALSPLPLG

SEQ ID NO: 204754 - protein, 73 aa, Glycine max
  unsure (1)..(73): unsure at all Xaa locations
  Clone ID: PAT_MRT3847_26921C.1.pep
FFXXXXXNXXXFXXEXLXGQGXXXXXCIGFLISVSXTXHSLYLLYXWTTXKTXHAFGGEFTLHLCEASKGIPC

SEQ ID NO: 204755 - protein, 209 aa, Glycine max
  unsure (1)..(209): unsure at all Xaa locations
  Clone ID: PAT_MRT3847_26922C.1.pep
MVAISLYRGNLHRVPDVPRRWPMPAPKITLKDFKSLLARRSKALSRLQNPNSTPLPNGSQPEPPPTVTVNHGEGPSITVAREDGDRNETPLVAVSSDKKPLAGSDSEKPQLDSKIDEASEKKTSDAVAAPEEEQTEPVAENEDLLNEEKTAQNQIXEASVRLNDDGHAASLVLKQILNAEEELKSRDRMKRKKEIEEKLQGLNDNKHNL

SEQ ID NO: 204756 - protein, 61 aa, Glycine max
  Clone ID: PAT_MRT3847_26923C.1.pep
VFEIVCLGVCSLALHRVVFSRISIGGYSLRRIFLSTPFVGGEPVLLESTCCRVLNRLSGLG

SEQ ID NO: 204757 - protein, 150 aa, Glycine max
  Clone ID: PAT_MRT3847_26924C.1.pep
MDPMELKRVFQMFDRNGDGRISLKELSDSLENLGILIPDKDLAQMIERIDVNGDGCVDMDEFGDLYESIMEERDEEEDMREAFNVFDQNRDGFISVEELRRVLASLGLKQGGTLDECKKMITKVDVDGDGMVNYKEFRQMMKGGGFTALS

SEQ ID NO: 204758 - protein, 56 aa, Glycine max
  Clone ID: PAT_MRT3847_26925C.1.pep
GRRIFLKIFELFQDVFKTHTWITPEYEAQGLLYFFARVGARVGERVVHRKFGRYCG

SEQ ID NO: 204759 - protein, 57 aa, Glycine max
  unsure (1)..(57): unsure at all Xaa locations
  Clone ID: PAT_MRT3847_26926C.1.pep
ASGNVSDVKHALGDKVIASSGSRRHVTQARVKXLYDQNHDIMMNAKGPKIERDILYL

SEQ ID NO: 204760 - protein, 187 aa, Glycine max
  Clone ID: PAT_MRT3847_26927C.1.pep
TRPISPKFKNTVRHLLHQKIRDSYMHPQFVSDVMKPLQIEQLMDQEVVNLSGGELQRVAICLCLGKPADIYLIDEPSAYLDSEQRIVASKVIKRFILHAKKTAFIVEHDFIMATYLADKVIVYEGRPSIDCSANAPQSLVSGMNKFLSHLDITFRRDPTNYRPRINKLDSTKDREQKSAGSYYYLDD

SEQ ID NO: 204761 - protein, 153 aa, Glycine max
  unsure (1)..(153): unsure at all Xaa locations
  Clone ID: PAT_MRT3847_26928C.1.pep
MRLRRDIFVCCFTSTSSDTMQKEKHSKLKWRIFPYKELRKATNNFDRFHFIGKRGGKTGLITQYHGKLEDGREITIQRFNGDQRYLLQQFINETIILNYLPHXNIVSITGCASHHEESLLVTEYLSNGNLAAHLHXEKDEKITLPWLKRWYSI

SEQ ID NO: 204762 - protein, 45 aa, Glycine max
  Clone ID: PAT_MRT3847_26929C.1.pep
SGRPNPRSRGKAPNYFLFFIFKVANLMINLYITFSRSVNLHWSCG

SEQ ID NO: 204763 - protein, 84 aa, Glycine max
  Clone ID: PAT_MRT3847_2692C.1.pep
IRIYCCYSAYKHALCAFYGLGTALVLLRGAEKSEALMPYHVAREQTATALDYILTRSRLQDQIKARRLCMITDACISHKRLLRT

SEQ ID NO: 204764 - protein, 60 aa, Glycine max
  unsure (1)..(60): unsure at all Xaa locations
  Clone ID: PAT_MRT3847_26930C.1.pep
VXLGHXYLDKSVWTXHKILQLYLTFGHYFXDIMTYYXLKYCSSETHFYLHFVVTFYIFWK

SEQ ID NO: 204765 - protein, 80 aa, Glycine max
  unsure (1)..(80): unsure at all Xaa locations
  Clone ID: PAT_MRT3847_26931C.1.pep
ARNDXYSLXVGXNGRKLXFEGSPXSIRDSHXXVRXSHDGLIIYAXWALFFSXXETXKXXKLRXXGRIWKEQQXPXSGXCI

SEQ ID NO: 204766 - protein, 89 aa, Glycine max
  Clone ID: PAT_MRT3847_26932C.1.pep
GLCWWLKACLGGTFELCTIVHHLFYLSDKILISQVMSVKAVGIAIKLTLEGANQTFHFQAWVFAMVSVTCIIVQLNYLNMAGAIFFFCA

SEQ ID NO: 204767 - protein, 120 aa, Glycine max
  unsure (1)..(120): unsure at all Xaa locations
  Clone ID: PAT_MRT3847_26933C.1.pep
FTRGRTRGQDVRIEYDACTISNDCGSLVVAKVVNHKQIVGFHVAGSKGRLGYAXIEYHWCVKMGQVQRAKLYLDFFLGRVIAKRVVVKLGNWNLGANVXLPTKTKLVGTSKEWQLDLPCE

SEQ ID NO: 204768 - protein, 77 aa, Glycine max
  unsure (1)..(77): unsure at all Xaa locations
  Clone ID: PAT_MRT3847_26934C.1.pep
RIRVTPCHPXGLSLTSYQEPALLEKKIXSFHXFIFVKRRLTRVANRLHEFSTFPTFXXPSCXLNLYWRRXASIVIEF

SEQ ID NO: 204769 - protein, 55 aa, Glycine max
  Clone ID: PAT_MRT3847_26935C.1.pep
PFFFIITLQTPPHSFKLLFPLNITFTQFFIFPTLHVADPKLSYGLQCLECMGWNK

SEQ ID NO: 204770 - protein, 30 aa, Glycine max
  Clone ID: PAT_MRT3847_26936C.1.pep
PRVRGRETYFHNASGRSLHFMTRLLAYIQY

SEQ ID NO: 204771 - protein, 70 aa, Glycine max
  Clone ID: PAT_MRT3847_26937C.1.pep
IGYVNYSNRIMSPRSADTKNCCFSLFSQMNENSRMIWLFPELPAEMGRGVLRCVSVVSIKVDRLSQMERD

SEQ ID NO: 204772 - protein, 81 aa, Glycine max
  unsure (1)..(81): unsure at all Xaa locations
  Clone ID: PAT_MRT3847_26938C.1.pep
SHARVRKLGIRLEVILMLYSGKKKKKKXXGRRLVXSSXRXLXXXXXLXXYQXXLXXVVLXLXVIXVIAVXXXKLLXAXXSX

SEQ ID NO: 204773 - protein, 87 aa, Glycine max
  Clone ID: PAT_MRT3847_26939C.1.pep
VREVRLQLSFSRKEENWVFIKLVKLRFVKEFLQIQLNILNIALLSVELLYFTFSAFGDHYLIEFVEIDFPDRSLFFNEQMIRDNLEP

SEQ ID NO: 204774 - protein, 50 aa, Glycine max
  Clone ID: PAT_MRT3847_2693C.1.pep
DGMLKHKGTYEIISPEDIGLERTNEVGIVLGKLSFLDLCKSSWYKHTGYI

SEQ ID NO: 204775 - protein, 58 aa, Glycine max
  Clone ID: PAT_MRT3847_26940C.1.pep
MSLVTSEDIQHILRVLNTNVDGKQNILIAMTYIKGIGWRFSNIACKKADVDMNKMAGD

SEQ ID NO: 204776 - protein, 66 aa, Glycine max
  Clone ID: PAT_MRT3847_26941C.1.pep
YKIKISIILKTLTLIFELLDLSKTSSYFFYSLEECPWGILVESFVKYQPAFLNFRTYIPVRCALER

SEQ ID NO: 204777 - protein, 115 aa, Glycine max
  unsure (1)..(115): unsure at all Xaa locations
  Clone ID: PAT_MRT3847_26942C.1.pep
AYVKREDTLIHTQIHCVPHHAPRKPHLRFPKSXCDFSSTRPHVPAKNRALRVQSTRLWAAKVLSFSLLLRDHLXLRAXXFNHSCVLCVSAGAGQEVAALRXLGIDDVTGVEILES

SEQ ID NO: 204778 - protein, 111 aa, Glycine max
  Clone ID: PAT_MRT3847_26943C.1.pep
GNEHGFVQEVHGGVADALKAVDLYLEQNNLQMEVEVETRTLEEVEEVLHYSSQTKTSLTRIMLDNMVVPLPNGDVDISMLKEAVQLINGRYETEASGNVTLDTVHKIGQSG

SEQ ID NO: 204779 - protein, 451 aa, Glycine max
  Clone ID: PAT_MRT3847_26944C.1.pep
KGEQNVLIFDLGGGTFDVSILTIEEGIFEVKATAGDTHLGGEDFDNRMVNHFVSEFRRKNKKDISGNARALRRLRTACERAKRTLSSTAQTTIEIDSLYEGIDFYATITRARFEEMNMDLFRKCMEPVEKCLRDAKIDKSHVHEVVLVGGSTRIPKVQQLLQDFFNGKELCKSINPDEAVAYGASVQAAILSGEGDEKVQDLLLLDVTPLSLGLETAGGVMTVLIPRNTTIPTKKEQIFSTYSDNQPGVLIQVFEGERARTKDNNLLGKFELTGIPPAPRGVPQINVCFDIDANGILNVSAEDKTAGVKNKITITNDKGRLSKEEIEKMVKDAERYKAEDEEVKKKVEAKNSLENYAYNMRNTIKDEKIGGKLSPDEKQKIEKAVEDAIQWLEGNQMAEVDEFEDKQKELEGICNPIIAKMYQGAAGPGGDVPMGADMPAAGAGPKIEEVD

SEQ ID NO: 204780 - protein, 214 aa, Glycine max
  Clone ID: PAT_MRT3847_26945C.1.pep
NQPGVLIQVFEGERARTKDNNLLGKFELTGIPPAPRGVPQINVCFDIDANGILNVSAEDKTAGVKNKITITNDKGRLSKEEIEKMLKDAERYKAEDEEVKKKVEAKNSLENYAYNMRNTIKDEKIGEKLSPDEKEKIEKAVEDAIQWLEGNQLAEVDEFEDKQKELEGICNPIIAKMYQGAAARPGGDVPTGDDDMPGAGGAGSGAGPKIEEVD

SEQ ID NO: 204781 - protein, 127 aa, Glycine max
  unsure (1)..(127): unsure at all Xaa locations
  Clone ID: PAT_MRT3847_26946C.1.pep
MAISCNKQEFLLRPVFHTRESTTAFLPPLSLSLKLPPQSHSKVRRVVKMSATEVTSSRISYESFAIKPPEHPTYDLKGIIKLALEEDAGDRGDVTCLATIPFDMEVEAYFLAXEDGIIAGIALAEMI

SEQ ID NO: 204782 - protein, 77 aa, Glycine max
  Clone ID: PAT_MRT3847_26947C.1.pep
LINLVPVIGLRRSWTEGLAREKHRYFNVSSCCTVIYFASYCSYFSNELKKGSGVHSLRPVIFCAEKMTWRLVGFVLF

SEQ ID NO: 204783 - protein, 42 aa, Glycine max
  Clone ID: PAT_MRT3847_26948C.1.pep
LSQLCSINLKQCLRVSNTKFIKIKKHTYTSIEDKAIEALPLV

SEQ ID NO: 204784 - protein, 140 aa, Glycine max
  unsure (1)..(140): unsure at all Xaa locations
  Clone ID: PAT_MRT3847_26949C.1.pep
MVDDPMAITEETTHVPPRKRQNLLLEIPSRTEESSQEFVAIKMPPTPSSNPTPTPKRVNFLXRTPADIEKPNTAAPEVSSTGTGEKPSISRSLSLTKIFTPRIKRASSLPLDEIRQSNNESSQGGSVGGPLNKREAQRKI

SEQ ID NO: 204785 - protein, 135 aa, Glycine max
  Clone ID: PAT_MRT3847_2694C.1.pep
MGDGDLFFLVRGFRKKKKKRAGRRFFFFFFCARLVLFFCFGLYFFFFCVVFVFFFFKCRIHKLDGFFELMAGQMVVDVEVIGGGSLGDLGVSAPGGRICKLWRVQKTLKLVLDRERPVWRDPGYRTRAYAVIALS

SEQ ID NO: 204786 - protein, 90 aa, Glycine max
  Clone ID: PAT_MRT3847_26950C.1.pep
NKKKFFFLKPPLLGPHGPKGVPGPILRGGNPKGGAFFAPTKKNFFFSQPKLKRGPFCPSKIFYCPPSKQNFLTQGLGLNFKDYFFWPLSP

SEQ ID NO: 204787 - protein, 514 aa, Glycine max
  Clone ID: PAT_MRT3847_26951C.1.pep
MTSTEEKPVTVSEEHDASSCRRTVSLPVQKVDDPMAITEETTHVPPRKRQNLLLEIPSRTEESSQEFVAIKMPPTPSSNPTPTPKRVNFLVSSRSVDPPTYHSPGPSTSRSKSSIRSLLPKLSFRYRTPTDIEKPNAAAPEISSSGIGEKSSISRSLSLTKIFTPRIKRTSSLPLDEIRQSNNESSHGGSVGGPLNKRETQRKIARSLSVPANDKDKSIRRMDSFFRVVPSTPQVKEGNELLATPTTNDTENEDANGEDIAEEEAVCRICLVDLCEGGETFKLECSCKGELALAHQECAIKWFSIKGNKTCDVCKEEVRNLPVTLLRIQSVRNRNNGGNRSQLEDVNGYRVWQEVPVLVIVSMLAYFCFLEQLLVGKMGTGAIAISLPFSCVLGLLSSMTSSTMVKSRFIWIYASAQFALVVLFAHIFYSVVHVQAVLSILLATFAGFGVVMSGSSILVEFFRWRRRVQALQEQQHGPAAQNPRTPNTPRPGSGSGPSNHSQPVVQSQQNSNQS

SEQ ID NO: 204788 - protein, 98 aa, Glycine max
  Clone ID: PAT_MRT3847_26952C.1.pep
MVRGGITKASLSLLGGAKRAKSGLSKFSGTAQPAESSGGVSKSGGKIEDSACWIPHPRTGIYFPKGHEWVMDDVTEDAARLSQTYWFRNVDGVDNPGH

SEQ ID NO: 204789 - protein, 80 aa, Glycine max
  Clone ID: PAT_MRT3847_26953C.1.pep
STTAEKRLMRDFKRLVQDPTDGIKGAPQDNNILLWNAEVFVTDDTLWDGSTFKVTLHCTDHYACRPLIGLSVTPMSAPSV

SEQ ID NO: 204790 - protein, 98 aa, Glycine max
  unsure (1)..(98): unsure at all Xaa locations
  Clone ID: PAT_MRT3847_26954C.1.pep
QATHYSRLYEIEGSCYYGDDDKNRPLVLKNRRTRWRVQEQCRSLNYAGRITGAXDQNLHLIAAAQPAAGAPTLIXPAPPEHDKIIVLVCKCLKDMFTM

SEQ ID NO: 204791 - protein, 90 aa, Glycine max
  Clone ID: PAT_MRT3847_26955C.1.pep
PKPFPIIKPIPKIIPIAKPIPIPIYKPISKSIPIIKPVPKIIPIIKPIPIIKPVPKPIPIIKPVPKLPLHPKFKKPILPPLPIHKPIPTP

SEQ ID NO: 204792 - protein, 439 aa, Glycine max
  Clone ID: PAT_MRT3847_26956C.1.pep
MGEENEETKTFKDLGLSESLVEACEKLGWKNPLKIQTEAIPLALEGKDVIGLAQTGSGKTGAFALPILHALLEAPRPKDFFACVLSATRELAIQIAEQFEALGSEIGVKCSLLVGGIDMVQQSIKIAKQPRLDVGTPGRVIDHLKHTKGFSLSRLKYLVLDEADRLLNEDFEESLNEILQMIPRERRTFLFSATMTKKVQKLQRVCLRNPVKIEASSKYSTVDTLKQQYRFLPAKHKDCYLVYILTEMAGSTSMVFTRTCDATRLLALILRNLGLKAIPINGHMSQSKRLGALNKFKSGECNILLCTDVASRGLDIPTVDMVINYDIPTNSKDYIHRVGRTARAGRSGVAISLVNQYELEWYIQIEKLIGKKLPEYPAQEEEVLLLEERVGEAKRLAVMKMKETGGKKKRRGEEDYDGEDIDKYLGLKEGKSSKKFRRR

SEQ ID NO: 204793 - protein, 84 aa, Glycine max
  unsure (1)..(84): unsure at all Xaa locations
  Clone ID: PAT_MRT3847_26957C.1.pep
LHPSRDVAVLDFSYKFDKNMVNAKLHLLAXLNSFLXAKTVSAEEFSPQWKITFLXPPLKLQEVVRGVRPLPLLELANLFNSYHL

SEQ ID NO: 204794 - protein, 198 aa, Glycine max
  Clone ID: PAT_MRT3847_26958C.1.pep
MRRVSTMHCALWRFCVPLLLLASFSYAPFVLATTEISGNEVSTDGKVLNEELAKPNLQGHDEEAKFKGFIPKPIPIVKPIPKPFPIIKPIPKIIPIAKPIPIPIYKPISKSIPIIKPVPKIIPIIKPIPIIKPVPKPIPIIKPVPKPFIVKKPIPVESEEFLKPKPFFKKPIPKLPLHPKFKKPILPPLPIHKPIPTP

SEQ ID NO: 204795 - protein, 55 aa, Glycine max
  Clone ID: PAT_MRT3847_26959C.1.pep
FIDSLGRSFAMNESKTKNLNLIELSQNFAMSFSDHTPSFMRSPASFSTDTDAIDV

SEQ ID NO: 204796 - protein, 53 aa, Glycine max
  unsure (1)..(53): unsure at all Xaa locations
  Clone ID: PAT_MRT3847_2695C.1.pep
PVQNLXLLSCRRGNPIDDCWRRDPPCKHNKLTLTDCSIALRRNYLGGRYWRTY

SEQ ID NO: 204797 - protein, 176 aa, Glycine max
  unsure (1)..(176): unsure at all Xaa locations
  Clone ID: PAT_MRT3847_26960C.1.pep
MLLFATLLLFSLQSSILTPIPVKPTKLSSNLSVTNSASYGERISSSTRRRTISPFESRISLIFALAPQANTLSQRLLADVAAETAKYVFPKRFENRNLEEALMSVPNLETVEFKVLSRRDQYEIREVEPYFVAETTMPGKSGFDFNGASRSFNVLAEYHFGXNTTKEKMEMNTPVF

SEQ ID NO: 204798 - protein, 107 aa, Glycine max
  Clone ID: PAT_MRT3847_26961C.1.pep
AEEPESTVTTGAPDESLFDKITEKLHGHDSSFISFWDSDSKKTVPSSVKDRVFRLFERERPVHSVLGPGKPVDVYLGRTKKLSPGFLGEPTAVGVLLELLRYNLITL

SEQ ID NO: 204799 - protein, 36 aa, Glycine max
  Clone ID: PAT_MRT3847_26962C.1.pep
MGKEKTHMNIVVTGHVDSGKATTTGHLIYTLGRIVT

SEQ ID NO: 204800 - protein, 472 aa, Glycine max
  Clone ID: PAT_MRT3847_26963C.1.pep
SIGTILITPSKFVHCIVWAKDLLFAKLFGDKNQDNDLNVRSSDAASSSKNVEDVFERRKDEDIDQYGTQLFDHVFGYNIELALSNEETWKNRNRPKPIYSKDILSDEPAQQNGNLEKKYESDELSVSAMASLGMKNPQDIWSLKENSRIFLEAFRLFFTKREKEIGNLSFDKDDQLAVEFVTAAANIRAASFGIPLQNLFEAKGIAGNIVHAVATTNAVIAGLIVIEAIKVLKNDIKNYRMTYCLEHPARNMLLMPVEPFEPNKSCYVCSETPLSLEINTNRSKLKDLVEKIVKAKLGMNLPLIMCASNLLYEAGDVEDDMVAIYEANLEKALAELPSPVTGGTMLTVEDMQQEFVCNINIKHREEFDEEKEPDGMVLSGWTQPVSAAENKDKSVGNGASTSDALITAVESEKDDEITIVSALKKRKLPDESDISNSAAEAKNQKQLEVIDDEDDLVMLDGDLNSVKKRRLS

SEQ ID NO: 204801 - protein, 80 aa, Glycine max
  Clone ID: PAT_MRT3847_26964C.1.pep
EDRCYICGKVGPYARECRMTGRPTVTANSNTVNHGSTNPTRSGNVSNNNNTSGGRPKVPSWVFAMSGSEAAASPDLIQKK

SEQ ID NO: 204802 - protein, 49 aa, Glycine max
  Clone ID: PAT_MRT3847_26965C.1.pep
WSQNPLFPFAFAICKKKDQGWSFKCIGDSSGKLKGPWKGKTKKKGWGPF

SEQ ID NO: 204803 - protein, 140 aa, Glycine max
  Clone ID: PAT_MRT3847_26966C.1.pep
MLNMCVFGRSSVLIVLVLVGVLWWPNDAGTPTKWKANISVKNSLGGNMGLNVYCPHIDPKQHFLGTGAYYEWVYSGGIPSPGETPFLCYFTWQGASHSTDLCVPDKDTGCQFADWEIKLNGLCRYFGAGPGAYVCYKWNN

SEQ ID NO: 204804 - protein, 103 aa, Glycine max
  Clone ID: PAT_MRT3847_26967C.1.pep
SQFKVKYNDELIPNAASMVTNEKGILADAESPGTIDVREDGISENNIASNRTPLRELILTAPGDGQYLNGVMLYEELLYQSAVASQPFVIVWKEAVVLSDLQV

SEQ ID NO: 204805 - protein, 139 aa, Glycine max
  Clone ID: PAT_MRT3847_26968C.1.pep
VSNLEHLQNLVVIDCKGLESLSVDSTSELHMLTILDCLELKTLHLKTSRLKSFRYRGPLPLLRPEYHFNLRDAMLDFRLGLSCSGLKTKDFDATLLTIKNCEVLTLCKWTFEELIWPSISPLSGSFIFYKLRELWWIDN

SEQ ID NO: 204806 - protein, 320 aa, Glycine max
  Clone ID: PAT_MRT3847_26969C.1.pep
WDPKLPRVWLDFSKLNKTIFQGSGVIDGSGSKWWAASCKKNKSNPCKGAPTAFTIDTSSSIRVKGLTIQNSQQMHFTISRCDSVRITGVKVSAPGDSPNTDGIHISESTNVIIQDSKIGTGDDCISIVNASSNIKMKRIYCGPGHGISIGSLGKDNSTGIVTKVILDTAVLRETTNGLRIKTWQGGSGYVRGVRFQNVRVENSSRFGSRDQFYCDSPTNCENQASAVEISEVMYQNISGTTMSAKAIKFDCSDSVPCSKLVLSNVDLEKQDGSVETYCHSAQGFPYGVVHPSADCLSSSDKTSQIEESTIEEEDIRHTEL

SEQ ID NO: 204807 - protein, 40 aa, Glycine max
  Clone ID: PAT_MRT3847_2696C.1.pep
GLTPRCDTQDHGSTLEVFHVFSPCFPFRPPKPPSWAESVL

SEQ ID NO: 204808 - protein, 68 aa, Glycine max
  Clone ID: PAT_MRT3847_26970C.1.pep
ACLARILYSWSAAALFFFFFFMKKKELAFLPSKRHTGVTFHWGKTKHGHKITVLIHLQQLIGSMQRLY

SEQ ID NO: 204809 - protein, 76 aa, Glycine max
  Clone ID: PAT_MRT3847_26971C.1.pep
ITCNKILFFLVNYYNIKKKINIEKNNTTKISSALIFTASLHQLLYAIKKKTQSIELKLHFSTDSKVITWTKLVVKI

SEQ ID NO: 204810 - protein, 51 aa, Glycine max
  unsure (1)..(51): unsure at all Xaa locations
  Clone ID: PAT_MRT3847_26972C.1.pep
LFFFLGGSVAGFSRXRALAVARRCFLKAXXXSPLLSSGRRRRARKSKKEFR

SEQ ID NO: 204811 - protein, 46 aa, Glycine max
  Clone ID: PAT_MRT3847_26973C.1.pep
LLTTTTTFCSDSYNKILILNINTTLILTPLTTSWSLKLILATNYYT

SEQ ID NO: 204812 - protein, 96 aa, Glycine max
  Clone ID: PAT_MRT3847_26974C.1.pep
DGGDPVFNLGPIFLGGPGGKGEKLTIPKGNWAKNKKKIFGTLNKEPKGGGLFSLNNWGKHYKKGARHDQGFCNYTNIYIPPPKTPRSKLWGALRQG

SEQ ID NO: 204813 - protein, 66 aa, Glycine max
  Clone ID: PAT_MRT3847_26975C.1.pep
YNANHLTILYFSHWAGGLATPPNQKHCTRGQNTALQHTHTIFHHRQQKGGISILPLRQIFNSRPHI

SEQ ID NO: 204814 - protein, 230 aa, Glycine max
  Clone ID: PAT_MRT3847_26976C.1.pep
RDSGDEGVGAVPVDVVIEILVRGGIREWEQISCVKKQWASLFRCDCECFWQAALSFYYPHQLPLPPPPTWPVPLPNNSKRRFIALYISQHIFASDPPHEILGHTYLFLKDQLQPSIMPPHSGILHGTIIDQFIACGKSRDVAHELASRIWLAVVDNLDQNHHSFSLLKRLAHEGDVFLPYPYTRSVKVQWRLFEKLFTDFRDCFNHVDYYDMLGCAKSRFHPIPSAWLGY

SEQ ID NO: 204815 - protein, 45 aa, Glycine max
  Clone ID: PAT_MRT3847_26977C.1.pep
EYDTQLLVITMSSWTTQANLARHASGFGLGTSAPRACSLLMVLGL

SEQ ID NO: 204816 - protein, 167 aa, Glycine max
  Clone ID: PAT_MRT3847_26978C.1.pep
MHSFGYRANALLTFAVTILALMCAMASVSDNFNTPTPSAQVQVLNINWFQKQPNGNDEVSMTMNISADLQSLFTWNTKQVFVFLAAEYETPKNSLNQISLWDGIIPSKEHAKFWIHTSNKYRFIDQGSNLRGKEYNLTMHWHVMPKTGKMFADKIVMPGYRLPQEYR

SEQ ID NO: 204817 - protein, 83 aa, Glycine max
  Clone ID: PAT_MRT3847_26979C.1.pep
MHSFGYRANALLTFAVTILALMCAMASVSDNFNTPTPSAQVQVLNINWFQKQPNGNDEEIPLQPHTSGTSLNHTSPSPSEHHC

SEQ ID NO: 204818 - protein, 62 aa, Glycine max
  Clone ID: PAT_MRT3847_2697C.1.pep
RKRPSIGEVSQFISRIKQRRQRHLTEDNLSFASNNFSRAVSRLEDRQVELSRMPTINLTETV

SEQ ID NO: 204819 - protein, 123 aa, Glycine max
  Clone ID: PAT_MRT3847_26980C.1.pep
KRGGFRALQNLRVPWGETPPPPGFKGAIKGGALFPLKLAHFLKRPLVGPFFFFPPLGKRGFFSKPFIWGPPGFSPFQGFKTGARCFIFGSPKKKFIISQPGEENLKFGLGLTPKKKKKKEKII

SEQ ID NO: 204820 - protein, 74 aa, Glycine max
  unsure (1)..(74): unsure at all Xaa locations
  Clone ID: PAT_MRT3847_26981C.1.pep
KNLAPVRDEIPNALRAAPNPAHLVLDPLEGFSCPEVSNQALKKDGTLLGLRRPCIMLMECLCDSXSSPGCAPTP

SEQ ID NO: 204821 - protein, 264 aa, Glycine max
  unsure (1)..(264): unsure at all Xaa locations
  Clone ID: PAT_MRT3847_26982C.1.pep
MRKRKSEPLVGVLELIKGHEHSSLFERRLDSQGDTDRYKDLVKQPMDLETIQLRPQKGHYSSCTSAFFRDLLLLFTNATVFFSHDSLESQAGRQLHRLATAEMKNHGQAQSDPIPRKNDSLPTNAPXAKPDSLLYKNKASGPILGWRKRSSMRRKPSSATFGQKGDQPVFNDKKERPSSDAKPPMKPSSSDTDEEELPKAKEKPVTGARSLRRSNKNLNSNSSNNNNKKPSSISTPKAGSSGNKPSETVKPEKRTFQEMISKAS

SEQ ID NO: 204822 - protein, 45 aa, Glycine max
  Clone ID: PAT_MRT3847_26983C.1.pep
FRPRVRTRLRSERERHKRRIGSLLSVRKAESFMGMMHGTLAALDL

SEQ ID NO: 204823 - protein, 258 aa, Glycine max
  unsure (1)..(258): unsure at all Xaa locations
  Clone ID: PAT_MRT3847_26984C.1.pep
MVDISCVKVGRADAWGPILTIGESLVERMRKHSAINGGKYVSVHLRFEEDMVAFSCCVFDGGKQEREDXRGKFTKPGRVIRPGAIRINGKCPLTPLEVGLMLRGMGFTKNTSIFLASGKIYNAEKTMAPXLFPNLHTXETLASEEELAPFKNYSSRMAAIDYTVCLQSEVFVTTQGGNFPHFLLGHRVLYGXHAKTIKPDKRKLALLFDNPNIXWKSLKRQLLSMRSHSDSKGVELKRPNDSIYSFPCPDCYVPCQQN

SEQ ID NO: 204824 - protein, 118 aa, Glycine max
  Clone ID: PAT_MRT3847_26985C.1.pep
GIGKKQPDPILENPQGKTKKKENLNFNQKHNWGPGGFSTFQKKIFLRGGGPGESKKKGATRGKTPTTTLGWGERTKPHPKKLGPPKTREGLIITTRGSWKQVGRLVRGGRDGYFFGSG

SEQ ID NO: 204825 - protein, 83 aa, Glycine max
  Clone ID: PAT_MRT3847_26986C.1.pep
SSLQRSLMCWVIIRCSLQRVRSVVAVRDSLSSLAVHMLVRYVRKTLGLVLVMKEIFCPLSLMSDTCSIISFITLLSFMTVASR

SEQ ID NO: 204826 - protein, 82 aa, Glycine max
  unsure (1)..(82): unsure at all Xaa locations
  Clone ID: PAT_MRT3847_26987C.1.pep
KXXAASSMALSSPSLAGKAVKLXPSVXEVGRVSXXKTVXKQXSSXSXWXGXXXXXYLXPFXXXSXSXXGEFPXDYXWXXWAS

SEQ ID NO: 204827 - protein, 157 aa, Glycine max
  Clone ID: PAT_MRT3847_26988C.1.pep
KNSGIGGEVNHLRKEPMDIAMNARGNYCSSPGSSDAATEHEILLKSEETRGESVETLNSCELSCSNHCLGFMHNNMLPDTNLRPNPEASIAKKHTEEVISEILGLCQGKCLKISHGQSPNEQFRRSEHFDEMKTRLKGLECKLRAHSIHYKNQAPIV

SEQ ID NO: 204828 - protein, 52 aa, Glycine max
  Clone ID: PAT_MRT3847_26989C.1.pep
NNAIQIILHYNTKDSCETKKIMKRPPLRWEGRSRSSEVRVHLIIGRKTETCV

SEQ ID NO: 204829 - protein, 75 aa, Glycine max
  Clone ID: PAT_MRT3847_2698C.1.pep
VNSEALSCLQVVLLIQLRLFLVVLIVYKSHKNNLNCIKRTTCKQLRLFLCDLYTIKTTKIFNLKLHGVNTYYSVR

SEQ ID NO: 204830 - protein, 63 aa, Glycine max
  unsure (1)..(63): unsure at all Xaa locations
  Clone ID: PAT_MRT3847_26990C.1.pep
FYIXKGISKXELGLGLGVGREXEGRRRALLXXFXLWCEKXSVRXVDRXWKKMKEXMTASSPVH

SEQ ID NO: 204831 - protein, 168 aa, Glycine max
  unsure (1)..(168): unsure at all Xaa locations
  Clone ID: PAT_MRT3847_26991C.1.pep
KILKSNGAITNPPIFARYSSSSSSPSVPYVSNYQKQTAPSPTSSSGNRISPAILVIIVILAVVFFILGFLHLLVRFLIKQRSSSNSSISQSNRYPDMSESDAYQRQLQQLFHLHDSGLDQAFIDALPVFFYKEIIGLNEPFDCAVCLXEFLEQDKLRLLPMCNHAFYI

SEQ ID NO: 204832 - protein, 70 aa, Glycine max
  unsure (1)..(70): unsure at all Xaa locations
  Clone ID: PAT_MRT3847_26992C.1.pep
FQLLLFVSSIGNIAVWQCYFVFLTHCXSSYHSVSLVFLLPDFRGRSGNGMTSVVLTFHRRWHAQSTPATN

SEQ ID NO: 204833 - protein, 59 aa, Glycine max
  Clone ID: PAT_MRT3847_26993C.1.pep
AYIINIRRGLDVPLLQVTHTFILVHKLALEPPLMLQQQGLIFICMFGSHGPLDSLKNSS

SEQ ID NO: 204834 - protein, 238 aa, Glycine max
  Clone ID: PAT_MRT3847_26994C.1.pep
MATEADAPVIPLLTPYKMGNFNLSHRVVLAPLTRMRSYNNVPQPHAVLYYSQRTSPGGLLISEATGVSDTAQGLVHTPGIWTKEQVEAWKPIVNAVHAKGGVFFCQIWHVGRVSSPVFQPNGQAPISSTDKPLKQNGIEEAQVTPPRRLRTDEIPHIVNDFRVAARNAIKAGFDGVEIHGAHGYLLEQFIKDKVNDRSDGYGGSLENRCRFALEVVDAVVKEIGAEKVGVRLFHLTEQ

SEQ ID NO: 204835 - protein, 89 aa, Glycine max
  unsure (1)..(89): unsure at all Xaa locations
  Clone ID: PAT_MRT3847_26995C.1.pep
MAGTETVAFQAEINQLLSVIINTFYSNKETILRELISHSXSDASDKIRFERLTDTSELDAQTELIIHIISDERNNTLTIGDSGIVMTKA

SEQ ID NO: 204836 - protein, 39 aa, Glycine max
  Clone ID: PAT_MRT3847_26996C.1.pep
LASQRRCKFSWEHIYMMYHLFLTEINHSLMLHFCPSFIW

SEQ ID NO: 204837 - protein, 54 aa, Glycine max
  Clone ID: PAT_MRT3847_26997C.1.pep
GVADPLFWTVPFPNPPWGTPVNEFPEEVISLVNGPDFPLLHLNKGGFFFQRFND

SEQ ID NO: 204838 - protein, 106 aa, Glycine max
  Clone ID: PAT_MRT3847_26998C.1.pep
WKDESSFQLLDPTLLESYVPNEVEKCMQIGLLCVQENPDDRPTMGTIVSYLSNPSLEMPFPLEPAFFMHGRMRRHSAEHESSSGYSTNRSSLSSVNKMSTTAFFPR

SEQ ID NO: 204839 - protein, 76 aa, Glycine max
  Clone ID: PAT_MRT3847_26999C.1.pep
TRKAAYVYSVNENILTWEQHHSMALAQEKNVILFKKNPSVINTPGITTGVCVKWKSLNKTLSPSDEYKLQKPLALN

SEQ ID NO: 204840 - protein, 57 aa, Glycine max
  Clone ID: PAT_MRT3847_2699C.1.pep
NHMRSKSLPCLTSEIITTTRDWGQRSSRCPRERRSSHISFSFMLLSHHFSVKKIIIL

SEQ ID NO: 204841 - protein, 36 aa, Glycine max
  unsure (1)..(36): unsure at all Xaa locations
  Clone ID: PAT_MRT3847_269C.1.pep
SAAYDTRTYRRQSLIGXNYGLLTTTNLLPHADYYSA

SEQ ID NO: 204842 - protein, 59 aa, Glycine max
  unsure (1)..(59): unsure at all Xaa locations
  Clone ID: PAT_MRT3847_26C.1.pep
RLAQADEFEDKINEFXTTCNPLIPNMYQSPGRDPGGSMYKDRPAAGSGCGHGPKIDEVD

SEQ ID NO: 204843 - protein, 114 aa, Glycine max
  unsure (1)..(114): unsure at all Xaa locations
  Clone ID: PAT_MRT3847_27000C.1.pep
LVGSPKEWQLDLPCPRLRSVLTTTDERLVGTDRSEYEPFLGGIQKDATSMMSLDXELFLRLHEIRLXKWFDCADEEDSVQXVALSAALCGGNGVDYIERVPLPASHGFPYVLPR

SEQ ID NO: 204844 - protein, 38 aa, Glycine max
  Clone ID: PAT_MRT3847_27001C.1.pep
PGVFNGTHMCRLGAEKKINVVTQRRGGFSALDPNSSFV

SEQ ID NO: 204845 - protein, 88 aa, Glycine max
  Clone ID: PAT_MRT3847_27002C.1.pep
KTDLLCIGDTHGDLRHRSPGGQIRLRLWNPHAVPRPDSWFWGEDGDGFWLLRRGALAGLPEHQKGSNPKEDLDAAHGIVQITACIGSR

SEQ ID NO: 204846 - protein, 52 aa, Glycine max
  Clone ID: PAT_MRT3847_27003C.1.pep
TLFESHFKSTSVSILLVECHHISYPSLMRGYETLIPHEPLNASDTSRLINTS

SEQ ID NO: 204847 - protein, 69 aa, Glycine max
  unsure (1)..(69): unsure at all Xaa locations
  Clone ID: PAT_MRT3847_27004C.1.pep
RPANVSAENLTGYPVXMKDVEMSKYVRSLTLFIEDNQSGSEITIVQMNGLHGTTVETPDMNGLTKIEDR

SEQ ID NO: 204848 - protein, 174 aa, Glycine max
  Clone ID: PAT_MRT3847_27005C.1.pep
IPCPHQIVRMLHKSMRLMTIMVQKNAETLNSSLSDERISSLNSKSPQGHVRNENAMCMQNCENFAQSLEDDDSNGSNSVIPNPPLIDERNADRTIILNRDAHVGMVETVNFTPSTEQISGGAVDEDGLPNHISEKSGLDSVLSRPREAYSPRGSSDADWIILFNQPSFEKQNHD

SEQ ID NO: 204849 - protein, 135 aa, Glycine max
  Clone ID: PAT_MRT3847_27006C.1.pep
MATTACFIIVSRNDIPIYEAEVGVAAKREDSAQLHQFILHAALDIVQDLAWTTSAMYLKSVDRFNELVVSVYVTAGHTRFMLLHDSRNDDGIKSFFQEVHELYIKTLLNPLYLPGSRITSSHFDTKVRALARKYL

SEQ ID NO: 204850 - protein, 87 aa, Glycine max
  Clone ID: PAT_MRT3847_27007C.1.pep
MATTACFIIVSRNDIPIYEAEVGVAAKREDAAQLHQFILHAALDIVQDLAWTTSAMYLKSVDRFNELVVSVYVTAGHILYTWDSFIV

SEQ ID NO: 204851 - protein, 93 aa, Glycine max
  unsure (1)..(93): unsure at all Xaa locations
  Clone ID: PAT_MRT3847_27008C.1.pep
GIGKLVNLESQRLSSCTRLVELTYAITSLIILNFLVISESVSLSKLPEIMGELRTLENLNCRSCIRCEXLPYSLKELESLSTVVYDEESAALW

SEQ ID NO: 204852 - protein, 82 aa, Glycine max
  Clone ID: PAT_MRT3847_27009C.1.pep
TAHLGPTVSGHYAALTVSGAPFQGTWSRSATEDAAPDYNPDAEGDRCSWWARPRFARRVLGESLVESFPPLIDMRKLSVSPP

SEQ ID NO: 204853 - protein, 34 aa, Glycine max
  Clone ID: PAT_MRT3847_2700C.1.pep
RDHRLPHLRTGGKSNRYVISRISQFRSTSLCTIS

SEQ ID NO: 204854 - protein, 38 aa, Glycine max
  Clone ID: PAT_MRT3847_27010C.1.pep
GRPRSFFLVKCMRRLIVKSRWLAKWWRDVHFVGLSNGN

SEQ ID NO: 204855 - protein, 71 aa, Glycine max
  Clone ID: PAT_MRT3847_27011C.1.pep
LYCCSSTRARMTLMGPEPNDELLFYVYEVDIVRERTNVFAVDIDCFDVPCTAFRGLVLNTHPVIARLLDAL

SEQ ID NO: 204856 - protein, 46 aa, Glycine max
  Clone ID: PAT_MRT3847_27012C.1.pep
ITIHNVHPLVFLYFRTPSKFCTPRDNCLASIFNVSDTARVESVRSV

SEQ ID NO: 204857 - protein, 58 aa, Glycine max
  Clone ID: PAT_MRT3847_27013C.1.pep
MLFNPQYFFWPTKLNWGGIFISISFIFFQLKKNFASYYPIFTLYNPIYFHLQINLLGN

SEQ ID NO: 204858 - protein, 108 aa, Glycine max
  Clone ID: PAT_MRT3847_27014C.1.pep
MKPIFALFVVLSLLLVANINLSHARKDLGDYWKKMMNDEPMPEAIKDLIQDQQVQDATADHFIRYFDMKPNIILYHTHVVSKKQQQQKAFDHKFKPVSRNGKSWLNKP

SEQ ID NO: 204859 - protein, 49 aa, Glycine max
  Clone ID: PAT_MRT3847_27015C.1.pep
VLGPHKVVLKNPDKTIVVEIPSTVGLIGVFEKNKDLSKYNLGQLTSGKD

SEQ ID NO: 204860 - protein, 73 aa, Glycine max
  Clone ID: PAT_MRT3847_27016C.1.pep
MHNDNILGLLKLSIKRGVNLSIRDARTTHPHVVCNIGYQKLNTLVEKNNCNPFWNEELTLSLKDVKTPLHLTV

SEQ ID NO: 204861 - protein, 114 aa, Glycine max
  unsure (1)..(114): unsure at all Xaa locations
  Clone ID: PAT_MRT3847_27017C.1.pep
MHSIDFSGSLSCAKKMRECIAIHIGHXSVQLGNPGWDLYWLVHSIKPYGQIPIDMTVGCXDDASSTLLRKTGAAKHVPRPXFADLETPELDGSRTGAYRVLFPPELLISSYGTP

SEQ ID NO: 204862 - protein, 60 aa, Glycine max
  Clone ID: PAT_MRT3847_27018C.1.pep
SLKLIFEPLLDKLNFQSLTLVYDRRCKKSCYLTTICKGRSPIFKTQPPIDHIHPIYISMS

SEQ ID NO: 204863 - protein, 92 aa, Glycine max
  Clone ID: PAT_MRT3847_27019C.1.pep
GAFTLLVQKDKQLSSPHQKKVQIEFQDALFGSSKRKQQFRKEASKHSLQKRELGLQASQSTLSEGLTAKTKRGVLQNHKCPNLLNNHQMMGN

SEQ ID NO: 204864 - protein, 52 aa, Glycine max
  Clone ID: PAT_MRT3847_2701C.1.pep
LQFWPQHQGFWGYREHNHNYGLIRCVCLQFPIFQQLRIAMKPQFKSSIIILY

SEQ ID NO: 204865 - protein, 98 aa, Glycine max
  Clone ID: PAT_MRT3847_27020C.1.pep
PSQIAFLLPNIKLPSQISYKWRPVLLLIPKSILNIGFKTRKLEIICPVLNFYKPDYYSKKRNQLFKSGKLSQHIDLPIQYIQPFKHNFNQQVLCHKVL

SEQ ID NO: 204866 - protein, 73 aa, Glycine max
  unsure (1)..(73): unsure at all Xaa locations
  Clone ID: PAT_MRT3847_27021C.1.pep
GNVFVLARWGFKCQWFWGQMLGVFCLQWSSFVPIFVPPFVSKVCISXDCHLGRGVRLCNIPLRCFXSFMEKKX

SEQ ID NO: 204867 - protein, 71 aa, Glycine max
  Clone ID: PAT_MRT3847_27022C.1.pep
SGFGVIVGAFELGLRHGLEAQSFGFCFCHWNLVFWGMEVRLSEVKCGAVRRRNENLGEMGIDVMGYGPQNK

SEQ ID NO: 204868 - protein, 70 aa, Glycine max
  Clone ID: PAT_MRT3847_27023C.1.pep
FVKRWNMIRKRGIPADVLAQRAHDLDKHVGQESLEGHHGAEDQTYCTKACRCAQMMNLIHCVDAVRKLLT

SEQ ID NO: 204869 - protein, 103 aa, Glycine max
  Clone ID: PAT_MRT3847_27024C.1.pep
GRKKVVFTLRKTGREMAPTRWTTKPLFRRGEEVTIPSQIILLTIHHRRRTRCLLITARWWRGGEYYSINSTNTTTRRTGCATTFFGRKKQPKLSWGPPFRCLL

SEQ ID NO: 204870 - protein, 45 aa, Glycine max
  Clone ID: PAT_MRT3847_27025C.1.pep
QSVPNSLFIRDHSAVTDNYWNVPGPLDYFVAPSGTLLRFNSSWLV

SEQ ID NO: 204871 - protein, 85 aa, Glycine max
  unsure (1)..(85): unsure at all Xaa locations
  Clone ID: PAT_MRT3847_27026C.1.pep
FYYYPLAGHXVRHADGKFRINCTSEGIPFTEAICHCNLSCLHYLDVKIAKHFAMDFPSQDEFGNQYPLVLKVTKFLCRVVLEPNF

SEQ ID NO: 204872 - protein, 49 aa, Glycine max
  Clone ID: PAT_MRT3847_27027C.1.pep
RMNRTTVSWAHLQQQHHIHVRVTIMDAEALHCTICSFLFIPKRVVKTSV

SEQ ID NO: 204873 - protein, 52 aa, Glycine max
  unsure (1)..(52): unsure at all Xaa locations
  Clone ID: PAT_MRT3847_27028C.1.pep
ARNSARAQTETKASVGLKAGVKDDXLTHYTADYETKDPVILASXHVTSQPGV

SEQ ID NO: 204874 - protein, 86 aa, Glycine max
  Clone ID: PAT_MRT3847_27029C.1.pep
VLKKRLMHRKRIKPSLRALMSRKYLYQSRKARRLKITHPKSMHPQSECLAFIVHTRQSPKDSWRRFRPTTSLNVFRINSSVIESRN

SEQ ID NO: 204875 - protein, 35 aa, Glycine max
  Clone ID: PAT_MRT3847_2702C.1.pep
CLCQDRLFRPEIVGGIKPPFLPQKFPVKRGLHSAL

SEQ ID NO: 204876 - protein, 51 aa, Glycine max
  Clone ID: PAT_MRT3847_27030C.1.pep
HCYYRINQIIVWILCRHAVLTTVILVIGFKSNDYKKKKTIKNIVICLILKG

SEQ ID NO: 204877 - protein, 71 aa, Glycine max
  Clone ID: PAT_MRT3847_27031C.1.pep
KCFFYTKLTQPSRSVFIKPPQACKQTKKKIKKNKNYPLSLNHPNLLTHSSNFLSLLYISPTFNSLPSLNTT

SEQ ID NO: 204878 - protein, 122 aa, Glycine max
  Clone ID: PAT_MRT3847_27032C.1.pep
MVPQALSVPASASFTIASRTRSPSHLVFSHSYGAIEAKGNPPITPAVMTPGGPLDLSSVLFRNRIIFIGQPVNSQVAQRVISQLVTLATIDENADILVYINCPGGSTYSVLAIYDCMSWIKP

SEQ ID NO: 204879 - protein, 273 aa, Glycine max
  Clone ID: PAT_MRT3847_27033C.1.pep
MVPQALSVPASSSLAIASRTRSPSHLVFSQRNPCSIASSLPNPYGHSSEVGLSSKSRGFPLKHDEKNIHGASTSYGAIEAKGNPPITPAVMTPGGPLDLTSVLFRNRIIFIGQPVNSQVAQRVISQLVTLATINENADILVYINCPGGSTYSVLAIYDCMSWIKPKVGTVCFGVAASQGALLLAGGEKGMRYAMPNARITIHQPQSGCGGHVEDVRRQVNEAVQSRHKIDKMYSVFTGQPLEKVQQYTERDRFLSVSEALEFGLIDGVLETEY

SEQ ID NO: 204880 - protein, 56 aa, Glycine max
  unsure (1)..(56): unsure at all Xaa locations
  Clone ID: PAT_MRT3847_27034C.1.pep
LSLXXFLSLESRSXSTATTXPQISAXHCLLXSYSISXXVAVSIXLRFPXLXPLFPA

SEQ ID NO: 204881 - protein, 80 aa, Glycine max
  Clone ID: PAT_MRT3847_27035C.1.pep
EPCLVSVACISILFLVISGSLMPSRPFSRSLVCLLRSYASCASQVYLPYALLPLLRSSFRLFFCRLFFAFLPSRFLVLTS

SEQ ID NO: 204882 - protein, 69 aa, Glycine max
  unsure (1)..(69): unsure at all Xaa locations
  Clone ID: PAT_MRT3847_27036C.1.pep
PIWSEFREASFGHGELQIVXNSYACFWSWHRXNDDDEPVKSDDIWITSLTSSGCVDQKRNELRNKLMTP

SEQ ID NO: 204883 - protein, 139 aa, Glycine max
  Clone ID: PAT_MRT3847_27037C.1.pep
AAMVSRGWREMTRSLWRAAEELRIRVPAWAQVGFVSSILQKCPGIVTLSLKMESDVDSTILACIAFSCPNLAFLEISVSDPAVNRISGGEFARFVADKKSLKSLKMEGCSNLGGFVLCSSSLSTLWLSDLYSLSKMVFN

SEQ ID NO: 204884 - protein, 88 aa, Glycine max
  Clone ID: PAT_MRT3847_27038C.1.pep
MGFLVQFVVFMLFPWFLSVRAEENYSSQHCDFPAIFNFGDSNSDTGCMAAAFYPEVLPYGETFFHEPVGRASDGRLIINFIAHHLGFP

SEQ ID NO: 204885 - protein, 139 aa, Glycine max
  Clone ID: PAT_MRT3847_27039C.1.pep
IFNSTIIPTGLISNLTQLNYLNIKVDPEDERWNDNVNIVFVEIIGLKRLETASIYIPKASLLKFMPVHKSLNFRLVVGNHMRRFISRVTPELEEKFKLCDYSLKFVNGVNVPNIVKMTLGNFKALYLDRHMTIKSLSDF

SEQ ID NO: 204886 - protein, 74 aa, Glycine max
  Clone ID: PAT_MRT3847_2703C.1.pep
SRGSRNTLKSKTRPKMATIRSTPPRKLYGERKPPILPERGGFRRILETGAPKNNLVKKKHWGFHLTSRTLIFSL

SEQ ID NO: 204887 - protein, 117 aa, Glycine max
  unsure (1)..(117): unsure at all Xaa locations
  Clone ID: PAT_MRT3847_27040C.1.pep
XXXXXLVXQNXXVAFXXXXXKLECXXXQERKCVYXFRYQNIHLYGCEKTTEGKGNNKKGTWTIFLWYLCLSSVRFTIYISIIIFNYINNIIFKNNYCDSHNLTFIKKLEQNMFEIFL

SEQ ID NO: 204888 - protein, 52 aa, Glycine max
  unsure (1)..(52): unsure at all Xaa locations
  Clone ID: PAT_MRT3847_27041C.1.pep
SHIAKKAIENPEPFVMKPPREGGGNNIYGDELRETLLTLPETXSTHDAAYIP

SEQ ID NO: 204889 - protein, 96 aa, Glycine max
  unsure (1)..(96): unsure at all Xaa locations
  Clone ID: PAT_MRT3847_27042C.1.pep
THARVRXLGIRLELSSPCSQPGAKEGEKDRGERLCKYYGIWLHPYPLRRKVFVEEPRPLDHPCWAPELQGLPALGTGWGCRLRSHRNPPSSSSSCV

SEQ ID NO: 204890 - protein, 140 aa, Glycine max
  Clone ID: PAT_MRT3847_27043C.1.pep
EYKSPPPPSPSPPPPYYYKSPPPPSPSPPPPYYYKSPPPPSPSPPPPYYYKSPPPPSPSPPPPYYYKSPPPPSPSPPPPYYYKSPPPPSPVSHPPYYYKSPPPPTSSPPPPYHYVSPPPPTKSPPPPVYIYASPPPPIYK

SEQ ID NO: 204891 - protein, 129 aa, Glycine max
  Clone ID: PAT_MRT3847_27044C.1.pep
LGRIFVVELEGRSYRCKFCRTHLALADDLISRAFHCRRGKAYLFNNAVNFTIGTPEERMMLSGLHTVADIFCCCCGQIIGWKYESAHEKSQKYKEGKFVLERGRIVDEVDFSTEFYIDSHASMSDAEEP

SEQ ID NO: 204892 - protein, 129 aa, Glycine max
  unsure (1)..(129): unsure at all Xaa locations
  Clone ID: PAT_MRT3847_27045C.1.pep
GWGGKNWXGVFCNTQQFNTDLQRVMIPFIREKGALNTHWMFSYQHIPPPKKERGKKHPENLCWARYWPPLSLSSNTERGKYYYLTGMVTPHPHLDILGETLEINEREEGNFCGRGKHKIFFQECVPKTN

SEQ ID NO: 204893 - protein, 83 aa, Glycine max
  Clone ID: PAT_MRT3847_27046C.1.pep
IGINLVPTPLLTEASKFDSNQLVSAGFHKTCVCALIEQIAGSSKHLLQWEFFIEENLIILSLPYHPCKFENFRCKLCMFHLHG

SEQ ID NO: 204894 - protein, 57 aa, Glycine max
  Clone ID: PAT_MRT3847_27047C.1.pep
VDLRQNREGRGLSLAGFVSWFIWRSAYLTRVISWRNRFYVAINWATTLVFGRDISRI

SEQ ID NO: 204895 - protein, 303 aa, Glycine max
  unsure (1)..(303): unsure at all Xaa locations
  Clone ID: PAT_MRT3847_27048C.1.pep
QIGGSNLDNLAKATELANAYCYDEINFNCGCPSPRVAGRGCFGVRLMLDPKFVAEAISLIAANTNVPVTVKCRIGVDDHDSYNELCDFIYKVSSLSPAKHFVIHSRKALLKGLSPAENRSIPPLKYEYFYGLLRDFPDLSFTINGGIASIDEVNGALKAGAHGVMVGRAAYNNPWHILGHVDTAIYGASSSGLTRRQVLEKYQVYGDSVLQRYGLGPSLRDIVKPLLGFFHSEPGNGLWKRKADSAVQTCTXIKSFFEETLVAIPDSVLDSAVVKPQSGRGDIFANIYSSLPPPYRTREEDVI

SEQ ID NO: 204896 - protein, 27 aa, Glycine max
  Clone ID: PAT_MRT3847_27049C.1.pep
RAECQTERCILVSFCNHQPVCLIIGTN

SEQ ID NO: 204897 - protein, 154 aa, Glycine max
  Clone ID: PAT_MRT3847_2704C.1.pep
MQIFVKTLTGKTITLEVESSDTIDNVKAKIQDKEGIPPDQQRLIFAGKQLEDGRTLADYNIQKESTLHLVLRLRGGTMIKVKTLTGKEIEIDIEPTDTIDRIKERVEEKEGIPPVQQRLIYAGKQLADDKTAKEYNIEGGSVLHLVLALRGGTY

SEQ ID NO: 204898 - protein, 43 aa, Glycine max
  unsure (1)..(43): unsure at all Xaa locations
  Clone ID: PAT_MRT3847_27050C.1.pep
KXNRHHHCHXHTLPQIRXTCCLWWQXLXFADKHFLXAIWCFMX

SEQ ID NO: 204899 - protein, 99 aa, Glycine max
  Clone ID: PAT_MRT3847_27051C.1.pep
MIETKFWCLCNLFTTKWVKICLFIQLKKNMGIIQLINVELTFPEKGYFLNHHKKKSKKQKEKNFNHSCLSNISKIDNIRCRIGGKDEGVFLFCCSFFTL

SEQ ID NO: 204900 - protein, 79 aa, Glycine max
  unsure (1)..(79): unsure at all Xaa locations
  Clone ID: PAT_MRT3847_27052C.1.pep
RAKIREIFMPSLCSTMTDGKIDSWTKXKATSSPXGHSVIILXSDKADMDIETFYYCYLAVIVVEEGCAFDDDSHIDYLV

SEQ ID NO: 204901 - protein, 56 aa, Glycine max
  Clone ID: PAT_MRT3847_27053C.1.pep
CCYFFLKTSTGTNCTTSSLVDIFISSILSKFNCSDFAKVSRVSFIFLGGGGKFFFF

SEQ ID NO: 204902 - protein, 77 aa, Glycine max
  Clone ID: PAT_MRT3847_27054C.1.pep
CIGFSPLRLTTKNSIPYNLSSFCSPDRVNTSAIQFPRDKIMHDLTVESEPRFSLKDKSLHSHTQSGVFGRPCGRPVI

SEQ ID NO: 204903 - protein, 92 aa, Glycine max
  Clone ID: PAT_MRT3847_27055C.1.pep
KLLPKHGNFKQTNIFIIIQIIGPLTLNALKLKFILREEHYRIGVGGGIMIEMAPFSVDLPLGEARPMRSPVDGPSTFLWERAALKKPATSFS

SEQ ID NO: 204904 - protein, 108 aa, Glycine max
  Clone ID: PAT_MRT3847_27056C.1.pep
CNRPILCRILCFYSTVQTLCTLILILRSRYRSFYGHHSRLPSRFLRAVDLHALSWPRGISDLDSTAAKSGRCLLYDSSLSNHYAANLATEYDSCNNPKRIFYRTFLLV

SEQ ID NO: 204905 - protein, 202 aa, Glycine max
  Clone ID: PAT_MRT3847_27057C.1.pep
MALHRLLKRKGGVDELNDDFPLASPATKIRRLDAELPPILEEDEPLPNEERALVLFKPLVHSPSSFSLTLDSDLMKGIRNNQYLWSKQCERVTELESREEENDDELALVPWVPSPSYQFSAVDDSLNTNVELMEADEMGEGEGVGSMMMDIEQEDDTDTDAKTSTSSIHYPTTHGGITEGFQQHCLLPKLPHNTSTPITWTR

SEQ ID NO: 204906 - protein, 51 aa, Glycine max
  Clone ID: PAT_MRT3847_27058C.1.pep
KAWRFREYIKDTNRNQILNDNSEFYSFKFGQFFSFVYYYYLERKQQKGNPN

SEQ ID NO: 204907 - protein, 74 aa, Glycine max
  unsure (1)..(74): unsure at all Xaa locations
  Clone ID: PAT_MRT3847_27059C.1.pep
VSKSVSNWPRTVKRPRSGQFSRGSDPLTSITKIHAQVQGGETPQDYQDTTRILLETPSCXLLLRPYRLPHTCPT

SEQ ID NO: 204908 - protein, 87 aa, Glycine max
  Clone ID: PAT_MRT3847_2705C.1.pep
MINSNDALFLGNILGKLFPCFFVLNGRIDELGLPREKYEWYLDLRRNGTVNNSGFTLRFDLMVLFATGLGNVRDVIPFPRSYGKAYT

SEQ ID NO: 204909 - protein, 81 aa, Glycine max
  Clone ID: PAT_MRT3847_27060C.1.pep
ELIFPIEVWGPKHGFQMWSFVWANQCSGHFSFLIARPKQFAGFEILWGIFQELEIAGKIFMPAFCVPQGAARFFGNGGSCA

SEQ ID NO: 204910 - protein, 72 aa, Glycine max
  unsure (1)..(72): unsure at all Xaa locations
  Clone ID: PAT_MRT3847_27061C.1.pep
RARVKLVWVLFLEFLGISMITPKVLAPDFAYNWDGGGFGPGGLKXPNRALXECTGGCSRTQYHRPGMFFCQK

SEQ ID NO: 204911 - protein, 241 aa, Glycine max
  Clone ID: PAT_MRT3847_27062C.1.pep
MEDVITEAAPPSRFLEEDLNIFTPPSPPLPKPFLIFPHNKQTLKPSLLIIALSPSSLALFNQTLTLTLTPLASLILPELPLSLPDHNVSILPLSPDTLLAPVPFPVPSHRAHAVARALLSIRPDSVLVLDSLDPTNFRGKLSSDDAVAFKLETSAEMKRAHDEKLLGEELDYYPSGSVVDGLGAAILARCQLMNVRASLCVSWPRFDMSVVALIKGLLRRGVLRGFEFGLSDDGVLKIGKG

SEQ ID NO: 204912 - protein, 79 aa, Glycine max
  unsure (1)..(79): unsure at all Xaa locations
  Clone ID: PAT_MRT3847_27063C.1.pep
RQGTKEKILKTGTFSLIGKLKLQKTMTGEALPARIAGGSISHGGGGKEFFFFFAXTPITGAILEGGQKTTTCTGRGIIF

SEQ ID NO: 204913 - protein, 55 aa, Glycine max
  Clone ID: PAT_MRT3847_27064C.1.pep
LFQLSCHLVELIHNIVPLKDLKTGIKTTESTCKAAEIILSDAYFHNVFSKHIIQP

SEQ ID NO: 204914 - protein, 91 aa, Glycine max
  unsure (1)..(91): unsure at all Xaa locations
  Clone ID: PAT_MRT3847_27065C.1.pep
PRLLVTSVXVVXSXFYSTSXXILYQPLXILXLPFSFTSIILMSTVSFLYXHWACHSMXIQHRSXVTHLILLXXLQXXVCXXLXXXKSSVAS

SEQ ID NO: 204915 - protein, 125 aa, Glycine max
  Clone ID: PAT_MRT3847_27066C.1.pep
ESYAGDKNIIKFDGDHNSSRPQFFYNSISIFFYNVLHPPHTPRVCKLEKYFDFGDLKTGSAVNESLLYGILSSLQSATTDAASSSSAPPNTSNSITASVSELISKVAPVIAAESMIFPSVRVIFF

SEQ ID NO: 204916 - protein, 49 aa, Glycine max
  Clone ID: PAT_MRT3847_27067C.1.pep
NRDSCVLIPMMLLRALSFVIDLIGQPFGFGRLGLRLLSIISLPVVSSYR

SEQ ID NO: 204917 - protein, 327 aa, Glycine max
  Clone ID: PAT_MRT3847_27068C.1.pep
LIKAPSLDSLPLRLCDAKMGRKRASKNSDRVQALPTVVEPQPSNGNIQLPRALESQLEIPLPGLTSPKHPNLLVGRAEMRHAKSPAQEQVNQDHGHQKKPPTPAKKKIKFCGASVRRSERIKSSVVNHPNTNCYIEVVEDLTVSDGEKDEADTQLEQVLLAEPEMEFELPLEHEHESEPELADNLGEKKSWKEKVDCALQRIEALDKTVELLKSKVDENIAFCEAPSMASISYKSMYIDSQKKIEALTVENQRLNGKLENALGKIEAYEKEIRVLVDVLDKTKDAVKDTMITNVAKTIEAAVNVSTQAMQIHNACSASAVKRKRNEN

SEQ ID NO: 204918 - protein, 114 aa, Glycine max
  Clone ID: PAT_MRT3847_27069C.1.pep
KKKTPGEFGTNPNFGGALAHKLQNPGNQPQSNLVPLWNLNPNPGPGLFNPLSRAHGWLKFVPKHFFFWFKKKGEKSFCSRPPYGKKGGGPPPGALSPRLPFYLKRGPFGPFTFS

SEQ ID NO: 204919 - protein, 73 aa, Glycine max
  unsure (1)..(73): unsure at all Xaa locations
  Clone ID: PAT_MRT3847_2706C.1.pep
MYRACSTIAGAAASGSAGGTRGGLFRTPISGGEHRATXAHGLPRPPLAVRNFMXHERFGHLCTAMCCMHHLPP

SEQ ID NO: 204920 - protein, 57 aa, Glycine max
  Clone ID: PAT_MRT3847_27070C.1.pep
KPAHFLLIGIELAVYSYGQNAIIIYRESKFPPWSGCFSEKKAPLVWPPLRCTKQGGL

SEQ ID NO: 204921 - protein, 76 aa, Glycine max
  Clone ID: PAT_MRT3847_27071C.1.pep
FQYRWSISRARKNHFPSLILISGEKRKGVTIAVATFYCSQLQRTCCPTKPPRICNSRTSKYKESEAKERCSLDFSR

SEQ ID NO: 204922 - protein, 87 aa, Glycine max
  Clone ID: PAT_MRT3847_27072C.1.pep
PSAPEFFFRELNLFPTGEVRLFTPAKKKGSIPPKGPTPLGVKIKGQNFCGFFYWGPQPQKMFFKKPRSSQPKFQALKLVEVNYYWVK

SEQ ID NO: 204923 - protein, 49 aa, Glycine max
  Clone ID: PAT_MRT3847_27073C.1.pep
ILKESLATPEKLKDFANNASQTVELDSIIWVKSDELVPSYSGNMARAVE

SEQ ID NO: 204924 - protein, 174 aa, Glycine max
  unsure (1)..(174): unsure at all Xaa locations
  Clone ID: PAT_MRT3847_27074C.1.pep
MLQIASSKTDSHTFKTKLPNGNMMEPIPTTKKDFFPSRSKTLSRDFEESLMMKSGSRLDICASSAQIVILKPGSDRICNCNHEENCINLSGTLHGRKGLEDFLEEVRERLECELQGIRASGIETPYNEKLSDAKENXRSYKSKMQFNGPSSPELFNIXXTRRFLSERLRNIVKW

SEQ ID NO: 204925 - protein, 124 aa, Glycine max
  Clone ID: PAT_MRT3847_27075C.1.pep
LKGLPNLSNHPTPSSPKKKNSFNKLFFFTPLPKKGKLFFPKTPFLGGKSPNKTQNFQRSHPLLAMFLKTPPKPLKKPFPKIAQGLWKNPGRYPGKKNPTLAIFFAPFIALKKSCLLAKTSKKLF

SEQ ID NO: 204926 - protein, 707 aa, Glycine max
  Clone ID: PAT_MRT3847_27076C.1.pep
MADVAGATVSPSIGETNDAQKNVFDLGAFVGDLTLEDDPSSDDISLEGLEQELEECKNNDVVANILSKGTKLRDYTKGVENDLRKVELDSIQDYIKESDNLVSLHDQIHDCDSILSQMETLLSGFQAEIGSISSDIKILQEKSMDMSLRLKNRKVAESKLAKFVEDIIIPPRMVDVLVDGEVNEEYMRTLEILSNKRRIPDVDSYFKASKALLVVPPELGMRRPPAVSKVFDFIVQKLYALRKPKTNIQILQQSVLLKYKYVVSFLKEHGKEIYNEVHAAYIDTMNKVLSAHFRAYIQALEKLQLDIATYNDLIGVETRSSGLFIRAREPLKNRSAVFALGDRINILKDIDEPALIPHIAEASSNKYPYEVLFRSLQKLLMDTATSEYNFCDDFFGEESIFYEIFSGPFGVIDEHFNSILPNCYDAIGLMLMIQIIHKHQLIMSRRRIPCLDSYLDKVNISLWPRFKLVFDMHLNSLRNANVKTLWEDDVHPHYVMRRYAEFTASLIHLNAECGDGQLDLNLERLRMAVDDLLIKLAKNFPKPKSQTVFLINNYDMTITVLKEAGPEGGKIQMHFEELLKSNTTIFVEELLQEHFNNLIKFVKSKASEDPTSNPDKPITVAEVEPLVKDFASRWKAAIELMHKDVITSFSNFLCGMEILRAALTQLLLYYTRLSDCIKRIVGGSALNKDLVSISSIMYEIRKYSRTF

SEQ ID NO: 204927 - protein, 55 aa, Glycine max
  Clone ID: PAT_MRT3847_27077C.1.pep
NRASLLRNIQRDIITWVNTHKIMKKVKYKLKYQNGTIIQHKTPIYISSPERGNRN

SEQ ID NO: 204928 - protein, 148 aa, Glycine max
  unsure (1)..(148): unsure at all Xaa locations
  Clone ID: PAT_MRT3847_27078C.1.pep
FASSSALFVLGFLLFPSVXFXGWLVLWGPGCVLPGPLFWRFGLPPRVCXFPGGVFAPLXFXPSLVARGLVLAPGCLALLAFLGFFVRLXVSGFGPFVRLLLXLSVPWPFSFFAPLRGCWVCFCPGFACVLVVFSCLASLFPVFWAWLL

SEQ ID NO: 204929 - protein, 106 aa, Glycine max
  Clone ID: PAT_MRT3847_27079C.1.pep
QLDQSNSPFQQIDQVIVDRTIARGMKLKATVAKMSMQGNGTSWSVDFNNVLLFPNLIKNVQYSLSSSGSTFPNHALRNVSENRVVIETNEAVAANVFVTVDQSALS

SEQ ID NO: 204930 - protein, 63 aa, Glycine max
  Clone ID: PAT_MRT3847_2707C.1.pep
VLHCSGSTTYDAGLPWVGHVGSTCVCVALCGDCLAVWESIAKNSPTARLLPLGVQLIQKVCQP

SEQ ID NO: 204931 - protein, 38 aa, Glycine max
  Clone ID: PAT_MRT3847_27080C.1.pep
LGMCWSFVMAGLIRSCEILIQLLCSLIEVKLHYSLSCL

SEQ ID NO: 204932 - protein, 84 aa, Glycine max
  Clone ID: PAT_MRT3847_27081C.1.pep
LFAYFLFCVSSNRLIPIILGDGGGTNTGRSNINPIFLTSITLTNSRPRDSNFPKDPFTNPAIISILSGTPPFSANTSTKSLSIL

SEQ ID NO: 204933 - protein, 49 aa, Glycine max
  unsure (1)..(49): unsure at all Xaa locations
  Clone ID: PAT_MRT3847_27082C.1.pep
RLTIPSGQLVNDELKTLQTVCATLGRRGISIISTLGTKXIKLMNLLSPF

SEQ ID NO: 204934 - protein, 194 aa, Glycine max
  Clone ID: PAT_MRT3847_27083C.1.pep
MATSGGDEGQNNPALDPDLDAPDDPDHEFAEFGSGCFWGAELAFQRVVGVVKTEVGYTQGHTPDPNYKLVCTGTTNHVEVVRVQFDPKVCPYNDLLALFWSRHDPTSINRQGNDVGAQYRSGIYYYNDTQARLGQESKDAKQLELKEKIVTEILPAKRFYKAEEYHQQYLEKGGGQGNKQSAEKGCTDPIRCYG

SEQ ID NO: 204935 - protein, 281 aa, Glycine max
  Clone ID: PAT_MRT3847_27084C.1.pep
YGEENEDKLLEELLSYKALESSPQPQQRIEPDPCSSENAGSSWDDFSDTDIFSDDEEIAKTMSENDDTLRSLVKMGYKQEEALVAIERLGPNASLEELVDFIGVAQMAKAEDALLPPEEKLQYNDYAKSNKRRFYDYEVLGRKKPRGCEKKILNEDDEDAEALHLPNPMIGFGVPTESSFITHRRLPEDAIGPPYFYYENVALAPKGVWQTISRFLYDVEPEFVDSKFFCAAARKRGYIHNLPIQNRFPLLPLPPRTIHEALPLTKKWWPSWDIRTKHTGS

SEQ ID NO: 204936 - protein, 112 aa, Glycine max
  Clone ID: PAT_MRT3847_27085C.1.pep
YRWGAYIYALSCSNKRNCFLKSIKHSILEALLILVELGCATFIFFDKNWKEEIPTDKTGDCDAIYGLLIENRNIVIWVALGIVICEALLFLLALIDRAANRPADYDSDQEFI

SEQ ID NO: 204937 - protein, 85 aa, Glycine max
  Clone ID: PAT_MRT3847_27086C.1.pep
VNRAQARMYVICTGHKYMVGFPTRKTNNDITCIVSNGGRVQCMQVWPPFGKKKFETLSYLGDADDAQSLEELQFRFRNEGSLAWI

SEQ ID NO: 204938 - protein, 93 aa, Glycine max
  unsure (1)..(93): unsure at all Xaa locations
  Clone ID: PAT_MRT3847_27087C.1.pep
DGXNGLARLSCCQVRXPVPFMPXRVTASXPXXTISXAXLXXRYXXDXXCAQPPIXXIAXGHXCLAXXXXAXSLLSAXACAGXPLXXVXLXXXV

SEQ ID NO: 204939 - protein, 109 aa, Glycine max
  unsure (1)..(109): unsure at all Xaa locations
  Clone ID: PAT_MRT3847_27088C.1.pep
FTLPSHSLAHASHVFCLLLTLLCSLPNRHLVITVATHEDTPRSTFPRHPSTKFPASVRAERRSXGMVREHLVFQQKSLTKGKRIWCRRTLREENLVQTQGPGILECEEQ

SEQ ID NO: 204940 - protein, 141 aa, Glycine max
  Clone ID: PAT_MRT3847_27089C.1.pep
SIWWLEKARDAAAGEDPRLVFGSCDMNLRSLVFAESEKLRLDHIYYLILGLNFNSLYCLTLLLTPSTFFFSLAHSTPFLSQSPLNHHHCDSRGDSASTTDVPSTSFNKVFGICLRCISVYAFRLHNFLFCFYVFFLFHERT

SEQ ID NO: 204941 - protein, 264 aa, Glycine max
  Clone ID: PAT_MRT3847_2708C.1.pep
HASGLETEVPLLVYEFVNNGTLFDFIHTERKVNDATWKTRVRIAAEAAGALAYLHSEASIPIIHRDVKTANVLLDDTYTAKVSDFGASKLVPLDQTELATIVQGTIGYLDPEYMQTSQLTEKSDVYSFGAVLVELLTGEKPYSFGRPEEKRSLANHFLSCLKEDCLFDVLQDGILNEENEKEIKKVAFLAAKCLRVKGEERPSMKEVAMELEMHQWINTDANLKESDYLVPKVSSIVSEPGDSSSPQEYDSRRDQVLPSLGDGR

SEQ ID NO: 204942 - protein, 65 aa, Glycine max
  unsure (1)..(65): unsure at all Xaa locations
  Clone ID: PAT_MRT3847_27090C.1.pep
KSAELEPNRLESSYIFFNADGCQWXEAYPACVXRTTKNWWDQYEAFDPSDEQKKDYSWVQKNPVI

SEQ ID NO: 204943 - protein, 80 aa, Glycine max
  Clone ID: PAT_MRT3847_27091C.1.pep
LIWLCSSGLSLSQFPFLGPLCEREFEMHVKNTALLNQVVVFPSSDNKHYAFGSKAAVSISSCYLTMPRGPRKQLDVCVSL

SEQ ID NO: 204944 - protein, 647 aa, Glycine max
  Clone ID: PAT_MRT3847_27092C.1.pep
REREVKLEHYLVAVRWGLGFKFYVSFPLPFINTHTAPSSSSSLSLFFVAGLAFQDPNLFPMRNLSFFFFFFFTFFAAVRSDPSDHRYKEGDPVPLYANKVGPFHNPSETYRYFDLPFCEPGDLKEKKEALGEVLNGDRLVSAPYKLEFQRDKELVSVCDRKLSKQDVARFRSAVRKDYYFQMYYDDLPIWGFIGKVDKEGKDPSDYRYFLYKHIHFDVFYNKDRVIEINVRTDPNALVDLTEDAEVQAEFLYTVKWKETNTPFEKRMDKYSQSSSLPHHLEIHWFSIINSCVTVLLLTGFLATILMRVLKNDFVKYAHDEESAEDQEETGWKYIHGDVFRFPKFKSLFAAALGSGTQLFTLTVFIFILALVGVFYPYNRGALFTALVVIYALTSGIAGYTATSFYCQLEGTNWVRNLLLTGCLFCGPLFLTFCFLNTVAIAYKATAALPFGTIVVIVLIWTLVTSPLLVLGGIAGKNSKAEFQAPVRTTKYPREIPPLPWYRGTIPQMAMAGFLPFSAIYIELYYIFASVWGHRIYTIYSILFIVFIILLIVTAFITVALTYFQLAAEDHEWWWRSFLCGGSTGLFIYTYCLYYYYARSDMSGFMQTSFFFGYMACICYGFFLMLGTVGFRAALLFVRHIYRSIKCE

SEQ ID NO: 204945 - protein, 74 aa, Glycine max
  Clone ID: PAT_MRT3847_27093C.1.pep
NNNIFTYPHFKYLSRIPLLYAHTTDPRSQHKLTPDSFTAWRDTFTETPHHQGQSMQNRYLVCLTVISLTVIHLH

SEQ ID NO: 204946 - protein, 142 aa, Glycine max
  Clone ID: PAT_MRT3847_27094C.1.pep
MVDVDVGTSDSPKRHHNNGFLVTISAVLALLTKRRAAKPTKGDEWKKELKKSRPKKLLSNIRSKALFGHNHNNKKKLRSVEETQQGWGNGGVWQKEILMGGKCEPLDFSGVIYYDGNGKQLSEIPLRSPRASPMPGYLTRRL

SEQ ID NO: 204947 - protein, 48 aa, Glycine max
  Clone ID: PAT_MRT3847_27095C.1.pep
VYLNRELISLSPIGQRRADTVPRIERTAYVVIQLQLEKNRVQYLILQD

SEQ ID NO: 204948 - protein, 201 aa, Glycine max
  unsure (1)..(201): unsure at all Xaa locations
  Clone ID: PAT_MRT3847_27096C.1.pep
ESCMRSGYAVRIVAAAKTWLPDVLLALGSTSIIKHTDCGEEHSTASEQMKLHFPKWPLILAKTELFEVNKAEDDESSQPEKFSAFTKLMEMLIILLKKIPSIMDAVGVIFMVSSVIGLEQKDFGMALGLLWFVCLKLFKPDDRDWXDMMLSSLQEIFPRIEREIAEENDDELEKLTYAKELIEPLWMYHLYETGRVSLADD

SEQ ID NO: 204949 - protein, 78 aa, Glycine max
  Clone ID: PAT_MRT3847_27097C.1.pep
VSNCERLRCGIIGDSDVKRRVRHFESQSGLISMQSLSLASAISKAQISSFRVSASSRSLSSALITQSLVFVFPQISTS

SEQ ID NO: 204950 - protein, 28 aa, Glycine max
  Clone ID: PAT_MRT3847_27098C.1.pep
GEETPFLSNYGNLIIITYRSYSHRRGEN

SEQ ID NO: 204951 - protein, 66 aa, Glycine max
  unsure (1)..(66): unsure at all Xaa locations
  Clone ID: PAT_MRT3847_27099C.1.pep
LIPYDEPVVQAXSAEVYFCFFPVERDWXEGVAHICELKSRVYAPLSTNTNLVESPKECQLALPWDK

SEQ ID NO: 204952 - protein, 63 aa, Glycine max
  Clone ID: PAT_MRT3847_2709C.1.pep
YNPDMGYDAFMETGDPEIVHASYFYLCCHICYKNITGFYFCSMLHIPMIPDKLFRWFCYHWGI

SEQ ID NO: 204953 - protein, 85 aa, Glycine max
  Clone ID: PAT_MRT3847_270C.1.pep
LVCNAIIHYTRINVYLRVLRFLQRGSVKRLCKLPVSIDHVVVTYMSSDHIVLSIESIAMPIQVRVVSAQSEHSFQSWLHQSSSSL

SEQ ID NO: 204954 - protein, 48 aa, Glycine max
  unsure (1)..(48): unsure at all Xaa locations
  Clone ID: PAT_MRT3847_27100C.1.pep
SLFIAXAXSGXHSPRSGXSXXETXPXCRSXWPAAVAVXHXSLCXXXHG

SEQ ID NO: 204955 - protein, 93 aa, Glycine max
  Clone ID: PAT_MRT3847_27101C.1.pep
MDWQGQKLAEQLMQIMLLAFAVIAFVGGYVMASFQMMILIYAGGVVFTTLLTVPNWPLFNRHPLTWLDPTEVEKHPKPQPSVNVTQKKKPVKK

SEQ ID NO: 204956 - protein, 57 aa, Glycine max
  Clone ID: PAT_MRT3847_27102C.1.pep
SCCLDHKTLDSMMNQGLLFAKLQIRTHLAADYRVVDYQTLHMTGNGLIRCHYMEWEN

SEQ ID NO: 204957 - protein, 64 aa, Glycine max
  Clone ID: PAT_MRT3847_27103C.1.pep
REILSLISDCAATMETTDSIISRDQIAHASVWVGCAVSSGFSSSFERFSCVNVGSSDPDNDDGD

SEQ ID NO: 204958 - protein, 121 aa, Glycine max
  unsure (1)..(121): unsure at all Xaa locations
  Clone ID: PAT_MRT3847_27104C.1.pep
DQQRLIFAGKQLEDGRTLADYNIQKESTLHLVLRLRGGMQIFVQTLTGKTITLEVESSDTXEHVKGQIXDQGGNPPEPQRLIFGGKXFEDGGTSATIKFRKELTLYFGLRLRGGNGTFLRT

SEQ ID NO: 204959 - protein, 93 aa, Glycine max
  Clone ID: PAT_MRT3847_27105C.1.pep
PTPVEAPQWIMTVEAITECLKGMDVNTLRKANEKMVLVASSYSGKNLILFCLNKDNCDALLNQVTLIEPHSQKGCKGVPVTLNNGIHLTANGR

SEQ ID NO: 204960 - protein, 37 aa, Glycine max
  unsure (1)..(37): unsure at all Xaa locations
  Clone ID: PAT_MRT3847_27106C.1.pep
FXSXSKLXKQTNPXXIDCXXRVXXAARDXRRKRVXFR

SEQ ID NO: 204961 - protein, 83 aa, Glycine max
  Clone ID: PAT_MRT3847_27107C.1.pep
METQGSGWSGSPSKSLRALGPQPMSSRGGLLSNHFGLQPDLPLPSQGDSGGPFVCEDSISRTPRWRLCGIVSWGTGCALAQKP

SEQ ID NO: 204962 - protein, 182 aa, Glycine max
  Clone ID: PAT_MRT3847_27108C.1.pep
KRNQRQDEVTEIALGLEKSKLPFFWALRLQRGPWDPDVLRLPEGFEERTKALGVVCTTWAPQLKILGHMAVGGFLTHSGWTSVVEAILNEKPLVLLTFLSDQGINARVLEEKKMGYSVPRNERDGLFTSDSVAESLRLVMVEEEGRIYRERIKEMKDLFVNRERQNMYIDNLLRTLTSSLKC

SEQ ID NO: 204963 - protein, 131 aa, Glycine max
  unsure (1)..(131): unsure at all Xaa locations
  Clone ID: PAT_MRT3847_27109C.1.pep
GSSIHATTASNAAESSSGTYCPCEYPSPPPDYTSCSADXYSVARMEDSDRHTPRTDSVYPQYXLAKERTISGDAYYGSHMMHYGDARLSSDALFHYPGTDTANDNFTPVDEYCLWSPCKPVSQRDADLIHF

SEQ ID NO: 204964 - protein, 127 aa, Glycine max
  Clone ID: PAT_MRT3847_2710C.1.pep
EVVVVAKAVNDGPASVRDALEANAKSMQARATSKRTNNKAVKDRQASVTPEQHERKSQFPERYAQQKKHLSLPLFPTTTIGSFPQTKEIRIQRNKFTKGEITLEQYEKFIEKEIEDVIKIQDELDLD

SEQ ID NO: 204965 - protein, 170 aa, Glycine max
  Clone ID: PAT_MRT3847_27110C.1.pep
MILSALLTSVGINLGLCFLFFTLYSILRKQPGNITVYAPRLVVEGKVKEGGHFNLERLLPNAGWVRQAWQPSEEDFLSNSGLDAFVFMRIFIFSLKVFSFGGIIGTFILLPINYMGSQLSDDSDFQHKSLDSFSISNVNNGSNRLWVHFSAAYIFTGIGCYLLYYEYLYL

SEQ ID NO: 204966 - protein, 225 aa, Glycine max
  Clone ID: PAT_MRT3847_27111C.1.pep
MDLEVAGRHAMLFDDDGMAAFVNSAEALVEWNSLSIDRYDVRHLLSAPLPPRLKRRPPPPEPDLDHQRYLDLPSSSADDEQQDYGSDPVSSTGFHAVAFSYGNSNVSTETKDNDTKSSFDPKFPVPESLLNNLPPNEKVHQIISRTATFVSKHGSQSEIILRAKQGDNPTFGFLMPNHHLHAYFRFLVDHQELLKVDKDDGSSTEDMNRTQGLDQSGGALSLLGS

SEQ ID NO: 204967 - protein, 123 aa, Glycine max
  unsure (1)..(123): unsure at all Xaa locations
  Clone ID: PAT_MRT3847_27112C.1.pep
THASAPFYVAVIERYNFSNVLHRFWVYSIDKPHIQCSNFNRRIDIRITGYDYTSGVXQFQGFLYVPSXTSWVCNQYVFGGLSSASISQTRVYGGSLSHYQSPSLDPIIYNMWIRFNMIHDVGA

SEQ ID NO: 204968 - protein, 94 aa, Glycine max
  Clone ID: PAT_MRT3847_27113C.1.pep
AASSLSLSLSLSPSANQLLLLFLQWVVLDLHNPSLMVSHPFFSILSKPLLCIPFLLNLYRFHHGSLSKSLLSSSCFMVFVNKHVILTLKNCTSF

SEQ ID NO: 204969 - protein, 42 aa, Glycine max
  unsure (1)..(42): unsure at all Xaa locations
  Clone ID: PAT_MRT3847_27114C.1.pep
XXXDHAVDPDGKPRCVPXHGXLTSDFXXXVEQRSRKQIGNXK

SEQ ID NO: 204970 - protein, 61 aa, Glycine max
  Clone ID: PAT_MRT3847_27115C.1.pep
MVVSKVVVFLGLILAALMSVACSQSAAPAPAPAPTSDGTSIDQAVAYVLMLVALVLTYIMH

SEQ ID NO: 204971 - protein, 63 aa, Glycine max
  unsure (1)..(63): unsure at all Xaa locations
  Clone ID: PAT_MRT3847_27116C.1.pep
VXLNTRVAPGVXXXTXAXTTAKCPWFSAQEPSQKXXNCSCLXKGXYELDSXXXXXXXGXCFFX

SEQ ID NO: 204972 - protein, 46 aa, Glycine max
  Clone ID: PAT_MRT3847_27117C.1.pep
HGLYNGLISFRTARVRLHLLLPVENAGGRTRGANLEGVGTASNHQV

SEQ ID NO: 204973 - protein, 271 aa, Glycine max
  Clone ID: PAT_MRT3847_27118C.1.pep
TLHRNRKEFNVPHRASPRLARGKPVQLANNVMNEQTLQVPKRNLRKSRNTLDIDISEDQTVSKEQPHQQEADKIEDKKPEIQISSNKSSGNLNEEPRHTGNITPPVHHSRNINSLTHEEPLKQNGQVVEGGFVTTEQQLFETGTVNHDNSELQYCAPFMNSWSDPCLEFAFKTLTGVIPVEENLTLQGCFQEPVNYHERRDGGSMLPDLGSSCFSQSDFSFLHDTGVKSMPGQQPSISSSFLPLEKTSLQGFAGVDPQTQFSQCNNNFQRR

SEQ ID NO: 204974 - protein, 47 aa, Glycine max
  Clone ID: PAT_MRT3847_27119C.1.pep
KMIYRLVTLLSLKSQPIIAFPLLKSYQPPPSHSIHTAENVGPQICHG

SEQ ID NO: 204975 - protein, 215 aa, Glycine max
  Clone ID: PAT_MRT3847_2711C.1.pep
PLQAHINPLFTLPKLLHLRGFLITFVHTEYCHTRFLISRSFNALHGSPDFRFESIPDGLPPPLDADADGDVSQDVPSLCDSIRKNFLQPFRDLLARLNHSATDGLIPSVTCLVSDGSMASFTVRAAQELAVPNVICWPASACSFLSLINIPALVEKGLIPLKGTVYYINYRLNWRYTRLTQKWKEDQKCLEWLESQELGSVVYVNFGSFTVMSAE

SEQ ID NO: 204976 - protein, 361 aa, Glycine max
  Clone ID: PAT_MRT3847_27120C.1.pep
MELDLTPKTAEVLFEGDGGGYYTWWSSKVPLLAKTNVGAGRLVLQPQGFAIPHYSDISKVGYVLQGNDGVAGMALRNSTTREEVVVKLKKGDVIPVPIGSVSWWFNDGDSDLVIVFLGETSKALIPGEISYFFLTGLQGVIGGFSNELTSKIYGLDKDGVEKLTKSQSGVVIIKLDKSQSLPKPQMEITKKLVYNIDVAHPENVVENAGIVKTLTEQDFPFIGDVGLSVIRVKLEPGAIKAPSYPINPTVQLIYIARGSGKIEIVDFSGKCALETQVEAGHLLVVPQFFVVAQIAGEEGIESYSIVTTTKPLFEELGGRASIWSALSPSVQQASLHVDSEFQSLFISKIKETTNLIPPTTN

SEQ ID NO: 204977 - protein, 141 aa, Glycine max
  unsure (1)..(141): unsure at all Xaa locations
  Clone ID: PAT_MRT3847_27121C.1.pep
VFCPGLRLVSVSGACSWPFGCSFCWDCVCGLRFSLSPCVCGCCCVGWWGWRLVLLFWCSLYSLVLFFGVGFFLFSLVLFFGVVFVARPVLLSSLLARLGAFIAVFPVGFGWVFVQXPPPCFGGGRPPTSVLVVPGFFPAGP

SEQ ID NO: 204978 - protein, 61 aa, Glycine max
  Clone ID: PAT_MRT3847_27122C.1.pep
REQDWGNFQHRDEMRVEKALRQRYGRFFYRLPYGESAVDVYDRITGCIETLRTDINIGRYQ

SEQ ID NO: 204979 - protein, 73 aa, Glycine max
  Clone ID: PAT_MRT3847_27123C.1.pep
ESLERSGVLHMQQSQLGFVHRDLKRRKKEELNRAYKRTLFNIHWSHFSTTIFVYTTNANDERAEMKIKVQELS

SEQ ID NO: 204980 - protein, 213 aa, Glycine max
  Clone ID: PAT_MRT3847_27124C.1.pep
VRLEGENNEANVFLIYEYVSNGTFQTYLSGDSPGKVFNWSERLSVLINVAKAVHFLHTGMIPGFFKNRLKTNNILLNENWMAKLSDYGLSIISEETDACGVKGESSDSWQMKMLEDDVYSFGFILLEALVGPSLSAKREANVLNVMASFNSQDGWKQVVDPVLQATCSKESLLVVISITNKCISSESWSRPSIEDVLWNLQYASQIQGTADGG

SEQ ID NO: 204981 - protein, 72 aa, Glycine max
  Clone ID: PAT_MRT3847_27125C.1.pep
LPLFYQKQVGKFFPKNPKVGGHFGPFFTQKGPFKSFVRLKKMKSSMQKDYSLAHILVFQAHCLIRPSNIFIL

SEQ ID NO: 204982 - protein, 55 aa, Glycine max
  Clone ID: PAT_MRT3847_27126C.1.pep
TYGGPPPFGFVLDQGLLQTLFAFEFSKGLWILRKVAVWFYPNEVQKIPCMTRMGM

SEQ ID NO: 204983 - protein, 41 aa, Glycine max
  unsure (1)..(41): unsure at all Xaa locations
  Clone ID: PAT_MRT3847_27127C.1.pep
XEFVGFTAGXICXVKXXXPRXYEXXNEPPXCXSSIXLFXQX

SEQ ID NO: 204984 - protein, 79 aa, Glycine max
  unsure (1)..(79): unsure at all Xaa locations
  Clone ID: PAT_MRT3847_27128C.1.pep
AGAFXFFFGFFFLARNIPSDTEGKRHNGRKTESSFFSCSCKKFQMKGVRNKIGGSRPEKNTQQGTWNVMDNIHYMGNAK

SEQ ID NO: 204985 - protein, 317 aa, Glycine max
  Clone ID: PAT_MRT3847_27129C.1.pep
MTMSETVPNCRNFKLLRSWSCREYYTSSSPEKAGVMERTPASSFEKCFPGRPDELQRKFLPLTYGSSTKLSMNGSPSSVGSPSMDELRANSMRSNANEDVTSLQTFVAGMKEMAKLEYEKQLVDDDQDQQAETTTFRFEKNMKDVGVGSMLEAPESPVEWPLQFKQQQREIVELWQACNVSLFHRTYFFLLFRGDPTDSIYMEVEFRRLSFLKETFASGNQSMNASSAKGVQREREVLVKLMQRRLSEEERKNLFSKWGIELDSKRRRKQLANRIWSSTDMNHIVESAAVVAKLLSFTGLKEMFGLSFSPHTWASLF

SEQ ID NO: 204986 - protein, 76 aa, Glycine max
  unsure (1)..(76): unsure at all Xaa locations
  Clone ID: PAT_MRT3847_2712C.1.pep
MWVTWSLETEPPGTAFPFVFAMDKLIHDSAKPYFCTYTDVISEYPLKVMIQFHNXHGGEASIIVTKRAEPSKYLGV

SEQ ID NO: 204987 - protein, 121 aa, Glycine max
  Clone ID: PAT_MRT3847_27130C.1.pep
AVRQGGHSLALVSISPNATQHVGGPQQGAPTVINYQVVVVVQVHDHKIRVVHVGTVNRGTWGPHKTLGISGGRLQNSFMGGVPQIQQSASHMSRLIVRARCGQGWHDYCCIGRAYGCSWPW

SEQ ID NO: 204988 - protein, 51 aa, Glycine max
  unsure (1)..(51): unsure at all Xaa locations
  Clone ID: PAT_MRT3847_27131C.1.pep
SLVHVEAFKRIGEKLHEIEQKLIQKKQDXTLRNRSEPAKMPYTMLYTSSDE

SEQ ID NO: 204989 - protein, 63 aa, Glycine max
  Clone ID: PAT_MRT3847_27132C.1.pep
KISGGYWFIGAGKNNYHLFIERLHCQSVYKYPSEDDVHTFLESTDLSLMIQQTLIPDLERVYT

SEQ ID NO: 204990 - protein, 60 aa, Glycine max
  Clone ID: PAT_MRT3847_27133C.1.pep
FRVLFYEKWWWVFFSPNFSFFFNVDPFFWGVNFVMECNVLGMIMVGGGCFSLRGQVSPPF

SEQ ID NO: 204991 - protein, 79 aa, Glycine max
  Clone ID: PAT_MRT3847_27134C.1.pep
EKLPWSPQFNRLFSLRKHLTLLILDLLHHSFSLCKQYPKFKPFLQETRTLIRNEAAAPPPPPPLLPPPFWRQHLHLSLI

SEQ ID NO: 204992 - protein, 88 aa, Glycine max
  Clone ID: PAT_MRT3847_27135C.1.pep
SPTRPLVHSIQDVPPQKTSGDMVKGLASHKPSSRKCIYHALRCTVPARLDRLSPLQILFEACPCLKIGYIHANDAIPDVDRDDMKVHI

SEQ ID NO: 204993 - protein, 63 aa, Glycine max
  Clone ID: PAT_MRT3847_27136C.1.pep
LTFSSQSLMMWTMPMCIQQLLVGVIQGTLICCLCLKPMLDTVILVSVVRVSILVITLHLCPCK

SEQ ID NO: 204994 - protein, 46 aa, Glycine max
  Clone ID: PAT_MRT3847_27137C.1.pep
KVGPPEGPVPKFPGHPTLSGSRTTIEGATTSLLSKIKDFQSFRWGE

SEQ ID NO: 204995 - protein, 59 aa, Glycine max
  unsure (1)..(59): unsure at all Xaa locations
  Clone ID: PAT_MRT3847_27138C.1.pep
GXPNXXXFDTTXXNLYXSSXXXAXSXNXSXHXYCHIXXXPXXGXSTAAXXXQXTXXAXX

SEQ ID NO: 204996 - protein, 103 aa, Glycine max
  Clone ID: PAT_MRT3847_27139C.1.pep
GNQEVVSVFGVDRDNMSNFKAGYGHFSTNVKGVFAAGDCRRGQSLVVWAISEGRQAAAQVDNYLVKEDKDHRNQDGLVKRQQGLYKKQHGSSKHTVMTYRWLL

SEQ ID NO: 204997 - protein, 114 aa, Glycine max
  Clone ID: PAT_MRT3847_2713C.1.pep
MALEAYAAANPDKIHTDVLTKARDSCYKARDAFYACLEKESDKKPTEIASVGLLYPLECKECRNEYVKQCRSSWVKHFDRQYCQNKRVQRLLDDKGSRRGPLTLPQPYTFKPIA

SEQ ID NO: 204998 - protein, 48 aa, Glycine max
  Clone ID: PAT_MRT3847_27140C.1.pep
LRIFKINLFEKMGALTHINYYDNIMLICYYYKYLFHEYVKNGTKLVPT

SEQ ID NO: 204999 - protein, 43 aa, Glycine max
  Clone ID: PAT_MRT3847_27141C.1.pep
EVGVVRHVHHGWGGSLISLVHRGTRFWPFRGRWPMGFIRHKLF

SEQ ID NO: 205000 - protein, 51 aa, Glycine max
  Clone ID: PAT_MRT3847_27142C.1.pep
ALWSIVDSMWNRMLPRMCILDEHDDHVKIVITPLVIINRQSDLKGMGHYHS

SEQ ID NO: 205001 - protein, 120 aa, Glycine max
  unsure (1)..(120): unsure at all Xaa locations
  Clone ID: PAT_MRT3847_27143C.1.pep
AASMISSPAVTTVNRAGAGMVAPFTGLKSMAGFPTKKTNNNITSITSNSGRVQFIQVXPPIGKNKFKTLSYLPDRNNTQLSKKVQYLXKKDXIPYYKFELKHDFLYPEHNRSPRYYNKRY

SEQ ID NO: 205002 - protein, 224 aa, Glycine max
  Clone ID: PAT_MRT3847_27144C.1.pep
MAGSAIGFEGYEKRLEISFFEHGVFADPGGIGLRALSKDQLDEILKPAECTIVASLSNDYVDSYVLSESSLFVYPYKIIIKTCGTTKLLLSIPVILKLADALDIAVKSVRYTRGSFIFPGAQSFPHRSFSEEVSVLDSYFSNLGSGSKAYVMGDPSKSQIWHIYSASAQTKGSSEAVYGLEMCMTGLDKESASVFFKENTSSAASMTENSGIRKILPQSDISDF

SEQ ID NO: 205003 - protein, 361 aa, Glycine max
  unsure (1)..(361): unsure at all Xaa locations
  Clone ID: PAT_MRT3847_27145C.1.pep
MAGSAIGFEGYEKRLXEISFFEXNVFADPEGIGLRALSKDQLDEILKPAECXIVASLSNDYVDSYVLSETSLFIYPYKIIIKTCGTTKLLLSIPVILKLADALDIAVKSVRYTAXSFIFPGAQSFPPLPFCTGFPHRSFSEEVSVLDSXKAYVMGDPSKSQIWHIYSASAQTKGSSEAVYGLEMCMTGLEKESASVFFKENTSSAALMTENSGIRKILPQSDISDFEFDPCGYSMNGIEGGAISTIHVTPEDGFSYASFEAVGYDFDEMALGELVERVLACFRPAEFSVALHIDMHGEKLNKFPLDIKGYYCGERSYEELGVGGAVVYQSFVQGCDGSTSPRSILKCCWSEDENEDEVREI

SEQ ID NO: 205004 - protein, 99 aa, Glycine max
  Clone ID: PAT_MRT3847_27146C.1.pep
PHSWYLPSVVSSPTSSRPVTPTASSSSLSQRPPSHVPPSKAVAVIAILKDKSVDELQKFLSDKDAYQQFLHSLDQVNIQTNVTIHFLIPKPQGHPIWCC

SEQ ID NO: 205005 - protein, 239 aa, Glycine max
  Clone ID: PAT_MRT3847_27147C.1.pep
MLDEGLVRKSLNPCALLVPKIGIIRHQIPMIGGIMNVLSGSTLFCKITHAPNIFMICVHRDSLGRFVLIFCFNANLGAHVGHLRFVVIFCRNNQHENREKGMFYSITVPNFVSSDQGVPMNPKRIKVIPEWPAPPSVRKIWGFQDLTNFYKRFAPYFSILVAPLIELVRNHVPSWEDAHEMSFQTLPYFSILNTTNTYVFVIFTGVEGKSPEFQEPRDLRSNPFQGGGNDAILLRKGIG

SEQ ID NO: 205006 - protein, 111 aa, Glycine max
  Clone ID: PAT_MRT3847_27148C.1.pep
FVGLGLCLVFGAVGPCVVWRVFPFGGVFPGLLRVVGRFSCPPGSSCLSVVGALGFFRVLVVRLCSLSRFGRRWPSSAGWASRWFSPSPPPFVRCVWFFTLVLCGLVPCSVL

SEQ ID NO: 205007 - protein, 33 aa, Glycine max
  Clone ID: PAT_MRT3847_27149C.1.pep
MLLHNQDAYRSKVFFNYEKRLRLHSPPEKAFEY

SEQ ID NO: 205008 - protein, 78 aa, Glycine max
  Clone ID: PAT_MRT3847_2714C.1.pep
GDYYFLGRVLSASLFILSAWQMFNELDDTGGPIAKELIPAFTALTTIVSSTLGVTTPDINVRPVLSSIISLKGVERLL

SEQ ID NO: 205009 - protein, 63 aa, Glycine max
  unsure (1)..(63): unsure at all Xaa locations
  Clone ID: PAT_MRT3847_27150C.1.pep
APKATKLPFSAISKEFGVRSQRNRAGKVEIFWRKEKRVSKRKERYKKEEXLRRKKKSDAGLPG

SEQ ID NO: 205010 - protein, 109 aa, Glycine max
  Clone ID: PAT_MRT3847_27151C.1.pep
AYVRYHVKSSKGFIQRSMRERLESLVEVLHRPNLEENDQTKQHQVYRYTKKLVRSAKYAVLKQRWGTFGRKIKRIRFRLKIHGFTRFRQQWFRFPKFSTGYTKIVEKSA

SEQ ID NO: 205011 - protein, 435 aa, Glycine max
  Clone ID: PAT_MRT3847_27152C.1.pep
RATLPQYSSVYVSAKSGPVTPQSSVRWDNPSKEKVNSHIRNRSSPLRRLLDPLLKHKASDKHNSAQSSQALEGGSANSSFRTIGVNESLLAEKSKGSSVQGLLQLTIKNGVPLFKFVLNNERKIFAATRNSLASLEKGDLGSCFTFYLVNEIKKKSGGWISHGNKEKSCGYAYNVIAQMKFSSSKIAEPTNQNSSRKCMVKEYVLVSVEIGRGRSPRADSARGVELAAVVVETSCEKTTEGLHDDNNMLKKGCSKCLTDERCLCSSGENEASDCTTVILPGGVHGSPNKGEPTPLIYRWKTGGSCDCGGWDIGCRLLVLSNQNQNSSIPKSYKPYNDRFQLFVKEGTEKDTSLFTLLPLKDGFYSVEFDSTITHLQAFFISVVALSCQKLPGSLEMGSMHEEVLNLKEPSSMNNRKLGKAPLNYAPIPLSPVGRV

SEQ ID NO: 205012 - protein, 80 aa, Glycine max
  Clone ID: PAT_MRT3847_27153C.1.pep
MEEMGKCSVVYDILARLAFNDKGKQSSEMVVVSVPHFQWGVLESGEKGKTVLEVKKCDATQSEMDRTKDVRFCKLVVALM

SEQ ID NO: 205013 - protein, 78 aa, Glycine max
  unsure (1)..(78): unsure at all Xaa locations
  Clone ID: PAT_MRT3847_27154C.1.pep
VGNKLDHELLSNAPHGCWQRVXGAFGTGPTLPAGTALDVPGVLALTAYSRKSMKARLTNAYHVMSTNTLRTCCTDHSH

SEQ ID NO: 205014 - protein, 105 aa, Glycine max
  Clone ID: PAT_MRT3847_27155C.1.pep
VIEARARANTRKESGKIRNRRMLKKYNGTATHPRLSVFCSDKQLYAMLVDDKNKKCLFYGSTLYLFIRQDPPCSTLEVAQRVGEALVKACVDLNINEILSYDCNG

SEQ ID NO: 205015 - protein, 108 aa, Glycine max
  unsure (1)..(108): unsure at all Xaa locations
  Clone ID: PAT_MRT3847_27156C.1.pep
LLARFMSSVSTITCVFLGLXYXPLAXSVSHTVVNAYKNLLAIAIATEIEFEHANAIREGFANPEAYALAAPAAAASSEDAKAGLKPQAAEAKAESESDDDDFGLDLFG

SEQ ID NO: 205016 - protein, 71 aa, Glycine max
  Clone ID: PAT_MRT3847_27157C.1.pep
PFLSPEFRLRVPRGLDPSHFSGLIKPWVLTGQPQGWSYFPHPTLNLVLRNNFRGRFRRTREYSTVTFLRGM

SEQ ID NO: 205017 - protein, 250 aa, Glycine max
  Clone ID: PAT_MRT3847_27158C.1.pep
RKCRHNGHPKRAGSHSGAQRKRSKSQSSRRGRSGAQGVTAHCPTAREAKSGRCHRHMQIADAEPTPTPDKRIGNALQRLDVFVDEGDELWDDAGGQRRRQVSDDEEIRFFALLLHATVQAEAGTLTRRQATAVNVVVVEPVHLIVQTADHNAFAHRRVAVVVRRQQRRDFVFAHLFGAERVGQHFAVGRDDERFGPLLLRLHLFGQIQRTRRRRRARTGSTSIGRSRRCGFVVALRRHLNLSSIQTRFSL

SEQ ID NO: 205018 - protein, 91 aa, Glycine max
  Clone ID: PAT_MRT3847_27159C.1.pep
VEIALRKNFKSYGAWHHRKWVLSKGHSSIDNEMRLLNGFQKMDPRNFHAWNYRRFVAELMKRSDEDELKYTEEVIGTNFSNYSAWHNRRLV

SEQ ID NO: 205019 - protein, 46 aa, Glycine max
  Clone ID: PAT_MRT3847_2715C.1.pep
TKHSSLIPLNLNIHNYHLILLYPKHSKISLIKNPTLLYITPAKTIN

SEQ ID NO: 205020 - protein, 195 aa, Glycine max
  unsure (1)..(195): unsure at all Xaa locations
  Clone ID: PAT_MRT3847_27160C.1.pep
LTGNISDVFGVYPELDYVDLSSNNFYGHISPNWAKCPNLTSLKMSNNNXSGGIPPELGQAPNLRVLVLSSNHLTGKFPKELGNLTALLELSIGDNELSGNIPAEIAAWSGITRLELAANNLGGPVPKQVGELRKLLYLNLSKNEFTESIPSEFSQLQSLQDLDLSCNLLNGEIPAALASMQRLETLNLSHNNLSG

SEQ ID NO: 205021 - protein, 55 aa, Glycine max
  Clone ID: PAT_MRT3847_27161C.1.pep
FVWEVGLASDCLSGAFRPYSSELVLFQEFAVLGVDQWSLPFFASLRGRVISLLFI

SEQ ID NO: 205022 - protein, 81 aa, Glycine max
  Clone ID: PAT_MRT3847_27162C.1.pep
QGSGTVGHVETVRCGFHGVLQTGTVGGDIELDHIDGFRKRSRVDLSDDGKDHQHDRDEREDGSSGDTVFSSHCVCSWLAWK

SEQ ID NO: 205023 - protein, 85 aa, Glycine max
  Clone ID: PAT_MRT3847_27163C.1.pep
NVPRTRPAKKKKLLGGRTVWPKVLEKKIPLPPVKQLFQHPSRGKPQRNLRSDPHILIWAGRNFGSGILSSCSKEVLTSFEEFVLV

SEQ ID NO: 205024 - protein, 46 aa, Glycine max
  Clone ID: PAT_MRT3847_27164C.1.pep
VLLDRDVRDSFVNTSVFAPNAPDMIPMKCKAKRRHTSEAISVQFLG

SEQ ID NO: 205025 - protein, 44 aa, Glycine max
  Clone ID: PAT_MRT3847_27165C.1.pep
LLPNILEIHPLLAWAQIFIYIYIYIYIYIYIYIYIYIYIYIYIY

SEQ ID NO: 205026 - protein, 70 aa, Glycine max
  Clone ID: PAT_MRT3847_27166C.1.pep
NQIQFLGKTWQIPPTLFLTLLQGGSNFMLNLSWTEREKKSNASNFEVVLLRGGLEKKKKKKKTQSGRSRG

SEQ ID NO: 205027 - protein, 88 aa, Glycine max
  Clone ID: PAT_MRT3847_27167C.1.pep
SVDPNTRIDHALFELTPSITRCDLRVDGGGVSERLAYGLLEPIVYNLMSAKDQIAKGGYSIALRTPGGHPEMVSIATLQRLDRFICAP

SEQ ID NO: 205028 - protein, 69 aa, Glycine max
  Clone ID: PAT_MRT3847_27168C.1.pep
ARGTFLSPLFHIILLDVLTAGFISIKQSIGIHGDMIMTPLVVGHGASETLMVGSDFKGGKYPRRSKMKG

SEQ ID NO: 205029 - protein, 86 aa, Glycine max
  Clone ID: PAT_MRT3847_27169C.1.pep
SKIQMVILFTQMPDSGASHMKTLEIKRRKLSRNSDGHNFPHGGQIQPHNISRRSTLNNVISREIQMVITCNSDVRFGRIICRAARN

SEQ ID NO: 205030 - protein, 101 aa, Glycine max
  Clone ID: PAT_MRT3847_2716C.1.pep
MALEAYAAANPDKIHTDVLTKARDSCYKARDAFYACLEKESDKKPTEIASVGLLYPLECKECRNEYVKQCRSSWVKHFDRQYCQNKRVQRLLDDKGSRRGV

SEQ ID NO: 205031 - protein, 70 aa, Glycine max
  Clone ID: PAT_MRT3847_27170C.1.pep
RMKLHNNIIQTFQNVRFVPSATTNVISLGEMTSPGYRYVGLNWGCKVHLVLRGQKNWRNLCYLEGQALRR

SEQ ID NO: 205032 - protein, 122 aa, Glycine max
  unsure (1)..(122): unsure at all Xaa locations
  Clone ID: PAT_MRT3847_27171C.1.pep
RFASANTQEFXDGNYPVDPWIPNDDNGLYPESQLPSKAVDGNVACARGRGGLPTTDCISSAANNGSPDIINTXVAQPLGTGQTIAVLTIVDPFPVTLLAVLFGVTNEXGRGGAPNPMLTRTF

SEQ ID NO: 205033 - protein, 316 aa, Glycine max
  unsure (1)..(316): unsure at all Xaa locations
  Clone ID: PAT_MRT3847_27172C.1.pep
QEAYMDYGYLKSLLKDIMLHKQRKKPHSSATPAALMRKLSLNRTFSGLTHRYYQPVSPEHDIENQPILVHSVKRDGHEKYETNFLMAAEEGGEYELVYFKRLDDEFNKVDKFYRSKVEEVMKEAAELNKQMDALVAFRVKVEHPTASFDGSVEMTRLASDVSASATALHASTPRGVQLNRAQTGRIPTLIEDIKEEGSTHHGHSEESRDSEKGEEIQTTNKRVEVQNQKKKNITPIKPIRPASVEILNRVQLNNTCETPRSTIRGFIKYPGQTEINFTKENLSKVEETLKLAFIEFYQELRLLKXYTFLNVLAFLR

SEQ ID NO: 205034 - protein, 71 aa, Glycine max
  Clone ID: PAT_MRT3847_27173C.1.pep
MDSSCVPNGDVSGFKDKEPMVDPFLVEALQNPRHRVTILRMELDIQRFLNNADQQHFEFQHFPSSYLRLAA

SEQ ID NO: 205035 - protein, 80 aa, Glycine max
  Clone ID: PAT_MRT3847_27174C.1.pep
KCDSSMSKSIFPHDQPMQFRLSIYLVSHIEIFCTIFPHIRHGEYDLCRCLSCFPSTILDSFSYGNEVGLGPSILYYVTVP

SEQ ID NO: 205036 - protein, 140 aa, Glycine max
  unsure (1)..(140): unsure at all Xaa locations
  Clone ID: PAT_MRT3847_27176C.1.pep
MVGFQSDHKPGNKCNGNSNSFPVPDRHVRLMRGRELRKSSKASPDSNNISNVVSEYSEHNLRLREDNSNSAAPFERYLEGVAAAAAAARGAREDGRPFRQRLLVVANRLPVSAXRKGEDLWSLEISAGGLVSALLGVKEF

SEQ ID NO: 205037 - protein, 97 aa, Glycine max
  Clone ID: PAT_MRT3847_27177C.1.pep
SSKRNAFVTMPCLLLNALSLSLLFYLKPFRFSIPLSEETSKTNLSSLSLSLSLRKLLNLFRPHFNAEAFVLSRTWRHSDCPLSTYPHCLTYKPFAPK

SEQ ID NO: 205038 - protein, 89 aa, Glycine max
  Clone ID: PAT_MRT3847_27178C.1.pep
TAEIQQKILHLPTSWDWRNVHGINFVSPVRNQASCGSCYSFASMGMLEARIRILTNNSQTPILSPQEVVSCSQYAQGCEGGFPYLIAGK

SEQ ID NO: 205039 - protein, 122 aa, Glycine max
  Clone ID: PAT_MRT3847_27179C.1.pep
MAKRTLLKLKPSLHVPLRFFRSSTLALTRPVAPLARPESPSISLFKPSTVHFPGILARQMVTARSPRGASKRNDEEEEDDDDGFDDEDGFDLDDEFDDSDDGDGFDDEEEEEKPKGKKKKTW

SEQ ID NO: 205040 - protein, 63 aa, Glycine max
  Clone ID: PAT_MRT3847_2717C.1.pep
DYFLLHTYFKRWKLFFTIMKNPILEMYNNEKEQFEIFKNLRGAGFNMELQVDSRGSPGTELEF

SEQ ID NO: 205041 - protein, 482 aa, Glycine max
  Clone ID: PAT_MRT3847_27180C.1.pep
MRVDTQLKRQTPHSHLLTSPAMHNPGGGGSDGVCHVVAMPFPGRGHINPMMNLCKILASKRPNEILITFVVTEEWLGFIGAEPKPDAVRLAAIPNVVPPERLKAANFPAFYEAVVTEMQAPFERLLDRLQPPPTAILGCVELRWPIAVANRRNIPVAAFWTMSASFYSMLHHLDVFARHRGLTVDKDTMDGQAENIPGISSAHLADLRTVLHENDQRVMQLALECISKVPRANYLLLTTVQELEAETIESLKAIFPFPVYPIGPAIPYLELGQNPLNNDHSHDYIKWLDSQPPESVLYISFGSFLSVSTTQMDQIVEALNSSEVRYLWVARANASFLKEKCGDKGMVVPWCDQLKVLSHSSVGGFWSHCGWNSTLEALFAGVPMLTFPLFLDQVPNSSQIVDEWKNGSKVETSKLDSEVIVAKEKIEELVKRFMDLQSQEGKEIRDRAREIKVMCLRAIAAGGSSYGNLDAFIRDISKPLTH

SEQ ID NO: 205042 - protein, 102 aa, Glycine max
  Clone ID: PAT_MRT3847_27181C.1.pep
DPFTTPWFWFRICKGSPSKCPPPFFPPARDLVVEMGVKNLPPPVSPPQKKRRNVPPGQGIQGGYAPSFFHPSPLGKNFSAPLGPPPGKGYQGLNPGGVFFFF

SEQ ID NO: 205043 - protein, 67 aa, Glycine max
  Clone ID: PAT_MRT3847_27182C.1.pep
SNLSIFPKSKIYNVCSASIPIYNTIYPPLYLIFKYIIHPLLILIFNIICIYIYIPINAFHLLLSPYK

SEQ ID NO: 205044 - protein, 64 aa, Glycine max
  Clone ID: PAT_MRT3847_27183C.1.pep
MPVDLSKWSGPLSLQEVDEQPQHPLHVTYAGAAVDELGKVLTPTQVKNWTTSISWDGLDSGKLY

SEQ ID NO: 205045 - protein, 229 aa, Glycine max
  unsure (1)..(229): unsure at all Xaa locations
  Clone ID: PAT_MRT3847_27184C.1.pep
METSHPLSIESFSYSWLVNLKPSLESLDGSLRTSLDASDETSSFIEMDPRMTPSKRFFRNSQDFKFDFPISQSPRTLVDADELFSNGYLMPLFVESLKMEAFEASDVIPSLPSSSHVPKSVVPNSHSRCPSLKTCXTLLIRIFLKYLNFLCXKIEELQMRLITXTVVKRTETAEKRENYAETSARISGVYAADDWRKSCDSGDSESSIYEAVLHCKRSIGMFKFIVYIN

SEQ ID NO: 205046 - protein, 135 aa, Glycine max
  unsure (1)..(135): unsure at all Xaa locations
  Clone ID: PAT_MRT3847_27185C.1.pep
EKCRIWSRRIAWAASAWALLFRSVXADDVGGLSEDDCKKDVAQDRGALAEFYAAWCGHCIKLAPEYEKLGSSSKKAKSVXIGKVDCDEHKNLCPMYGASGYPTFQWLTKGALAALQAGGPHTAGSLVEFGNSGGG

SEQ ID NO: 205047 - protein, 69 aa, Glycine max
  Clone ID: PAT_MRT3847_27186C.1.pep
QHPNNVLGRKFFLIFFKLHSFYHPFLLFLATLPLFLIIAITPSCCKFSTPPFCSNHTSPTHFFFFLNQK

SEQ ID NO: 205048 - protein, 40 aa, Glycine max
  unsure (1)..(40): unsure at all Xaa locations
  Clone ID: PAT_MRT3847_27187C.1.pep
MIXXVLSSTLYHIYXVHMXFLYSRFSMNINILIPHDPSAA

SEQ ID NO: 205049 - protein, 52 aa, Glycine max
  Clone ID: PAT_MRT3847_27188C.1.pep
LGTPGKLAMSSPMSDFKIKHKKISLNGFQCRSLLEQHYKLMRFEKKPRTVSF

SEQ ID NO: 205050 - protein, 63 aa, Glycine max
  Clone ID: PAT_MRT3847_2718C.1.pep
SNRHEHDNSLVQADQLDTPNDFSQCINNVAAYVMLVYAFICGSTFLCSHCRIIIYLYYLHSYR

SEQ ID NO: 205051 - protein, 44 aa, Glycine max
  Clone ID: PAT_MRT3847_27190C.1.pep
MAGIKRRLCSDSDIHALHKELDEVSCPICMDHPHNAVLLLCSSH

SEQ ID NO: 205052 - protein, 113 aa, Glycine max
  Clone ID: PAT_MRT3847_27191C.1.pep
PRVRDVLASTLNDLKQEALNSSSSGKKFATKEANFTSSMKLYTLAQCTPDLSTSDCNTCFSSSIGGFPNCCDGKRGARVLLPGCSVRYELYPFYNVSTVSHLPSPSSGKSSIS

SEQ ID NO: 205053 - protein, 89 aa, Glycine max
  unsure (1)..(89): unsure at all Xaa locations
  Clone ID: PAT_MRT3847_27192C.1.pep
QSVSYXWNRNQHLQLAPTGQIINFKQIIHLTYYKTCTHKKIKQMGLSLCVCVRALCMFLWGWWNIKDVLYTYIVSLLSQHCIIFQSNSY

SEQ ID NO: 205054 - protein, 29 aa, Glycine max
  Clone ID: PAT_MRT3847_27193C.1.pep
YFFNLHGWVKRITLFRFQFLLLKVHLLQY

SEQ ID NO: 205055 - protein, 49 aa, Glycine max
  unsure (1)..(49): unsure at all Xaa locations
  Clone ID: PAT_MRT3847_27194C.1.pep
TSLPGXLXFIAIXXGSXXHHLQTPQCPXIXLSLQLRXXSXPXPLXEIXL

SEQ ID NO: 205056 - protein, 106 aa, Glycine max
  unsure (1)..(106): unsure at all Xaa locations
  Clone ID: PAT_MRT3847_27195C.1.pep
MQTSRGRYLGVRMAELIIGTYVMVGLAPVGSQVGARLYVANMCDSLEYAGQDSVPSXDKEYDDTGPVGPQEEFDKAMNAYGVVKPSAMQPRGIVSLCMGLDVMQRP

SEQ ID NO: 205057 - protein, 273 aa, Glycine max
  unsure (1)..(273): unsure at all Xaa locations
  Clone ID: PAT_MRT3847_27196C.1.pep
IHIAVLHRHASIFNLIHEIGPMKEVILTFNDDQENNLLHYAARQAPPDRLNAVSGAALQMMLELSWFEEVKKIMLPSSIEKRNSNGIIPRQLFTMEHEELLEKGESWMKRTAKSCMVVSTLITTXVFTAAFSVPGGNNDDKEGSPNYLGKPTFLIFALSDSIAMISSSASILIFLSILISRYAEEDFLKSLPLKLISALLALFISIISMMVAFSSAFFITYYYGSNGVPIFISALAFIPIPVFIFLQFRLWSDILYLAYMCSFLFRPSKRMIH

SEQ ID NO: 205058 - protein, 65 aa, Glycine max
  Clone ID: PAT_MRT3847_27197C.1.pep
AQFVFHSYIVCSNYRISCFLDPHINFSDSEMRAFSSLSDGSVSVARNQTTGDYAGGEFQFFRSCR

SEQ ID NO: 205059 - protein, 76 aa, Glycine max
  unsure (1)..(76): unsure at all Xaa locations
  Clone ID: PAT_MRT3847_27198C.1.pep
EQGMITKLYTRRESFSTNPLHSAKDHSSDHVNIGHVHQNGVSNGHISTFALXGFKGAQGNSHSALDRIVAEQESLI

SEQ ID NO: 205060 - protein, 51 aa, Glycine max
  Clone ID: PAT_MRT3847_27199C.1.pep
MKYHILVHLFTRTLITQIFETLTVLNKSRQHPGVVPTRPPTRPPTRLKTRQ

SEQ ID NO: 205061 - protein, 263 aa, Glycine max
  Clone ID: PAT_MRT3847_2719C.1.pep
IVGEKPMPHQSPKRELSPDGVEYNSPNKRPRTNTYQPQQEAKVKKKKNPFKKFVTEKIVAAKTMGVGVSGSSPAHTSSSNNLVPGTTPESTPKNDNQKTSHESTTSTVNSVGKSGASAGEVTDAPDDPQTPIQTTGSRQLQTTPLSIKSSTGSIPHVDSPGKSTRLQLFEAESGVKMDLRLGYGDYVVSIQKRSIISSSTYENRKEDANQLPQNPGMQFLPSEMLSNMIEKAGEQMFARYLEWLRDHHMLGKSSVPRIDYSDQ

SEQ ID NO: 205062 - protein, 339 aa, Glycine max
  Clone ID: PAT_MRT3847_271C.1.pep
FERVNGKLVNILEGLELHTGIFSAAEQKRIVNYVASLQEMGRKGELKEQTFSAPQKWMRGKGRQTIQFGCCYNYAVDRDGNPPGILGNGMVDPIPALFKVIIRRLIKWHVLPPTCVPDSCIVNIYEEGDCIPPHIDNHDFVRPFCTVSFLSECNIVFGSNLKIVGPGEFDGSIAIPLPMGSVLVLNGNGADVAKHCVPAVPTKRISITFRRMDVSKRPFGYVPEPDLQGIQPLAYEVEQEKKSSGHRPSRHTKRHKDRRGGGRNDAMGSATRNDRFLEPHDSNLNSPRSATRNDRFSEPRDSNLSSPRSATRNDRFSEPRDSNLSSSRSANRWSRKPGS

SEQ ID NO: 205063 - protein, 63 aa, Glycine max
  Clone ID: PAT_MRT3847_27200C.1.pep
ARLGGVPRPRYFCPSFGGCLCFIVAVGSFAGIKFDFWGRISFVGVVFIGCYAVFGCLPLFFLV

SEQ ID NO: 205064 - protein, 70 aa, Glycine max
  Clone ID: PAT_MRT3847_27201C.1.pep
FVLGCIWGEPCGSPRFGPRGGHFKWWGIILGPLVWIPSIGVSRFLRSWFFSPKSTVAPPNIGIPEGILHK

SEQ ID NO: 205065 - protein, 62 aa, Glycine max
  Clone ID: PAT_MRT3847_27202C.1.pep
VADHYDRKHGHSCLASNNISDYVYYSVYDIVMGKTICLMSWTPTSTVMVYMMLTLFGVHYSI

SEQ ID NO: 205066 - protein, 79 aa, Glycine max
  Clone ID: PAT_MRT3847_27203C.1.pep
LSPNKKDLSNYKNEAMHFVTSIFSPSIKSVNWSMEKKERKDFDVQKKVVINKIEQIINGLVICECKYSFQPNPVIIVKG

SEQ ID NO: 205067 - protein, 129 aa, Glycine max
  Clone ID: PAT_MRT3847_27204C.1.pep
MAATYTSIDNLERSTESIAPVLEPDPNDVVSTPILSTLQTDEPDPDDQEFQRINDTTTAVCNRLSEALEMLRSEVSAMQATSILQTLLKIIMNVIEHPEVEKYKRLLKANPVIERNIVNNKAAFGNSNF

SEQ ID NO: 205068 - protein, 106 aa, Glycine max
  Clone ID: PAT_MRT3847_27205C.1.pep
MVSAEKPMPETEHAAAENNTNTALFGKYEVGRLLGCGAFAKVYHARNTETGHSVAVKVISKKKLNSSGLTSNVKREISIMSRLHHPNIVKLHEVLATKTKIYFILE

SEQ ID NO: 205069 - protein, 153 aa, Glycine max
  Clone ID: PAT_MRT3847_27206C.1.pep
AIGAVLEPDPNYFFFTPILSTLQTYDPDPDDQEFQRINDTTTAVCNRLSDAQEILLLKKTTSILQTLLKIIRNVIEHPEVEKYKRLRKANPVIERNIVNNKAALEILFLVGFSEDVMFDNLGKENAYLVLKRNDPGLLWLAKATLESSTSLTC

SEQ ID NO: 205070 - protein, 59 aa, Glycine max
  Clone ID: PAT_MRT3847_27207C.1.pep
RLRGWFILFISREHEAVISYIIFETDIFHRESMVNNVHDYSSLSDSSYLGDACIFCTAD

SEQ ID NO: 205071 - protein, 93 aa, Glycine max
  Clone ID: PAT_MRT3847_27208C.1.pep
GQQQEQQQEEQPLEVRKYRAELSEQDIFVIPAGYPVGVNATSNLNFFAFGIRGENNHRNLLAGSQDNGVSHITSQVPEPAFPGSGQAGEKLLK

SEQ ID NO: 205072 - protein, 184 aa, Glycine max
  Clone ID: PAT_MRT3847_27209C.1.pep
RFDVFVEAEANKAAGKYENASIDFQIEFYKNEGLTPYTEAKLPLISDVPEGCVIVREHVPISDLFTCLWFNEVDRFTSRDQISFSTVRDKLLSRVDFHFLMFLDCERRNFVVQKYHRDILERLVAPVAIALSPPPPVETLPEKVVRRGPGRRGRDRRPGSRRHRKVVAGGRDINMEANYTVLFV

SEQ ID NO: 205073 - protein, 106 aa, Glycine max
  Clone ID: PAT_MRT3847_2720C.1.pep
MMMFEDMGFCGDLDMFSAPLGEGDITTRQTEPEVIVEDDYSDEEIDVDELERRMWRDKMRLKRLKEQSKPKEGIDAVKQRQSQEQARRKKMSRAQDGIFEYLLKMM

SEQ ID NO: 205074 - protein, 54 aa, Glycine max
  Clone ID: PAT_MRT3847_27210C.1.pep
LTFGLFFNEGNAGNLRDCLIIDPENMSLKLKAAEARQLGCYKHAVLNGSQTSRN

SEQ ID NO: 205075 - protein, 86 aa, Glycine max
  Clone ID: PAT_MRT3847_27211C.1.pep
KMGGLNIKVLVIVAMCVASVTDTERRRMRDSCCCLTTHRLETMPVNKNHISSLRVWYILLTRVFPLCVCVCVFFFNSFWSSNMGFF

SEQ ID NO: 205076 - protein, 72 aa, Glycine max
  Clone ID: PAT_MRT3847_27212C.1.pep
MSGEEKKEDPMEHEMESLTPATVFCIRLKQPKSNLLYKMSVPEICRNFSAVSWCGKLNAIACASETCARIPS

SEQ ID NO: 205077 - protein, 64 aa, Glycine max
  Clone ID: PAT_MRT3847_27213C.1.pep
PIHKLPRWFLKKNLYENYENELFKKLTRTMYIKVLKPQPEMIKKATTLIKKPNTVALLSSSRSR

SEQ ID NO: 205078 - protein, 98 aa, Glycine max
  unsure (1)..(98): unsure at all Xaa locations
  Clone ID: PAT_MRT3847_27214C.1.pep
MATSLSVSPSLSLXKTLFIAKALPLSRPSFLSLPLTNSLLSLSTRRRTFIVRAKSHHGSEPVPAHYDFDLFTICAGSGGVRSAHFDANYGTSVAICDL

SEQ ID NO: 205079 - protein, 152 aa, Glycine max
  unsure (1)..(152): unsure at all Xaa locations
  Clone ID: PAT_MRT3847_27215C.1.pep
PIKGLCDADWASDPEDRISTSGAAIYXATNLVSWWSKKQQIVARSSTEAEYRSLAQATAEVSWIQTLLTELNVSFPTRIIFCDNESVVSLSHNPVVHSRTKHMEIDVFSVPERVLAKQLLVCHIPAIDQWVDASTKPLAPSRFMFLRQIHCG

SEQ ID NO: 205080 - protein, 50 aa, Glycine max
  Clone ID: PAT_MRT3847_27216C.1.pep
GKAKPNTQVILSFFFWGNLLIIELKACGYYKDNFTFNLKYKHTNHMQVIL

SEQ ID NO: 205081 - protein, 94 aa, Glycine max
  unsure (1)..(94): unsure at all Xaa locations
  Clone ID: PAT_MRT3847_27217C.1.pep
TVQSETVQWCLPLRVSTRRQVSSVKEGXKPXHDSETKRLHKCGVSGDNSYKIYSLSSLIYDKHPTVELLRDMTENCVDNFWMGIECPSTHNDRG

SEQ ID NO: 205082 - protein, 68 aa, Glycine max
  Clone ID: PAT_MRT3847_27218C.1.pep
GTKVPPQNSPNPGGPPPALKKQGAQGGPLKGSPPKEKRGSPPPKGKTMGGVQKRGGPPPGRGPPKIPP

SEQ ID NO: 205083 - protein, 88 aa, Glycine max
  Clone ID: PAT_MRT3847_27219C.1.pep
SRKSNPFGARAGRTCLRKVREGQAKTKGIPYKKKKRKRTTMPVSAVRSGGGSSSAVAATSGGGDSGDTIIGGEVGSSASLASTNNCHS

SEQ ID NO: 205084 - protein, 80 aa, Glycine max
  Clone ID: PAT_MRT3847_2721C.1.pep
DQPQVPAPQLRRATHHQAPHNQTLEKRQHRRVTCVESSDTRRHNLAHLLNIENTEAVNPHFSYQHRPRLGYKSTSQPVAT

SEQ ID NO: 205085 - protein, 105 aa, Glycine max
  Clone ID: PAT_MRT3847_27220C.1.pep
FYQPGARKQNFPLLSHYLPIRQLKRENPMALKIKGLGGRKTNAQPQTINSKKGGLTKNSPSQREGEPNPSLTQDGGQRRGAPQTPVQNPNREIIHSAGEQASSLL

SEQ ID NO: 205086 - protein, 104 aa, Glycine max
  unsure (1)..(104): unsure at all Xaa locations
  Clone ID: PAT_MRT3847_27221C.1.pep
MLTTKKTRFHDELFYLRMMLSIAKGPFSFEDTKTIVGTLYXTFRDACFAMRFLHQDKEYIDVVKEASNWGSSYYLRKLIVTMLISININRTEHVWEQNMRVFSI

SEQ ID NO: 205087 - protein, 46 aa, Glycine max
  Clone ID: PAT_MRT3847_27222C.1.pep
WKGITGAISYSNIIALQTIPRENFIEQESRTTYSPLQDTKGVLSLF

SEQ ID NO: 205088 - protein, 72 aa, Glycine max
  Clone ID: PAT_MRT3847_27223C.1.pep
MGQMIIRTKRNKWQHVGARLPTSPRAQNSIDIENLPRFDADEHNILESADFAFGRVIIANKQMVFWHLVLYH

SEQ ID NO: 205089 - protein, 56 aa, Glycine max
  Clone ID: PAT_MRT3847_27224C.1.pep
CSRTFRMSQAKECVFTEAPTAHSPPDTALCQCHLRGISVRWMLCANCSIELSRPSF

SEQ ID NO: 205090 - protein, 75 aa, Glycine max
  unsure (1)..(75): unsure at all Xaa locations
  Clone ID: PAT_MRT3847_27225C.1.pep
MEGKEQDDSLGANKFPEIQPIGTAAQSQDDGKDYQETAPAPLVDTXRSLTSWSCYRPGIAEFVATFHALYIDRLN

SEQ ID NO: 205091 - protein, 51 aa, Glycine max
  Clone ID: PAT_MRT3847_27226C.1.pep
NPHNTFAFNKRMGKLTLHQGAIWTDTRVPICICRGAYAYTALIMNTPNAVL

SEQ ID NO: 205092 - protein, 143 aa, Glycine max
  Clone ID: PAT_MRT3847_27227C.1.pep
TLPNCIPFLEIIPLKCAAGPIGGTAHVGMSCQCQWRVSLLSPCLYQTSSHCCQWRHRHSCHCQWRYKLHASNNGGTHVNNRPPLQFVLKQTLFGKLFLKQPPYSKFAVTSLIILNHSRIILQIRGFKTNNIIKQFRHRRNKIT

SEQ ID NO: 205093 - protein, 41 aa, Glycine max
  unsure (1)..(41): unsure at all Xaa locations
  Clone ID: PAT_MRT3847_27228C.1.pep
AXVRTGEDNRTGGDPEQHKTDSLRVISLILIIYSLLLMANT

SEQ ID NO: 205094 - protein, 89 aa, Glycine max
  unsure (1)..(89): unsure at all Xaa locations
  Clone ID: PAT_MRT3847_27229C.1.pep
GSLLVYDFFTAFPFFETHTGDVSSYTPTNGIXTTDGPISSSDDLFNAAIKPAITESACICTNGTAAQITPMTQVAGQPKKGPPQFAELK

SEQ ID NO: 205095 - protein, 76 aa, Glycine max
  Clone ID: PAT_MRT3847_2722C.1.pep
APLGEQIKLPFVPGDQKLFQIFLAKKFLGPLDQGGGAPVILNVPQTYPKYPPPLKPLFNIGKVVASLYFGFPKKGA

SEQ ID NO: 205096 - protein, 87 aa, Glycine max
  Clone ID: PAT_MRT3847_27230C.1.pep
MFGETAPRPKFVQSEPRMSATEVLTDDEFAMRRSSTVSPMSSYCSEPGRLSGEGSPMMMSPWNQTTNSSFSKPHWSQEHNSTLHVAH

SEQ ID NO: 205097 - protein, 49 aa, Glycine max
  Clone ID: PAT_MRT3847_27231C.1.pep
MSHSDSIPLHPSSQSDIYQIENLINASVHQSVPSARPPIRPRASIPVSV

SEQ ID NO: 205098 - protein, 142 aa, Glycine max
  Clone ID: PAT_MRT3847_27232C.1.pep
LPVVWKLIRRRTIDMTYGDSPCPRAHYNLNNNPIIRRARLLNVRTPYPPAHPKPYLNLHPRFTNDFVLSLSNFPSFSLFFRTQHDVTKKSRFTNLLRNLRRFFTNPRFTPPSLPFWNGIENLIALRFRDLPPEVLLLWRRLL

SEQ ID NO: 205099 - protein, 69 aa, Glycine max
  unsure (1)..(69): unsure at all Xaa locations
  Clone ID: PAT_MRT3847_27233C.1.pep
AGVKVYHVXKVAELDLTGLEGEIKQYVGLWNGKRISANLPYKVQFLTDIPARGPVKFFAHLKEDEFDYL

SEQ ID NO: 205100 - protein, 79 aa, Glycine max
  Clone ID: PAT_MRT3847_27234C.1.pep
NVKTLSLVCRLYLNKGRIVRSRESPLRFFFVMSVIKWYQNREILIFFFMSPLCIGMNSAFYRDCWHPIFGRVGRPGIRT

SEQ ID NO: 205101 - protein, 460 aa, Glycine max
  unsure (1)..(460): unsure at all Xaa locations
  Clone ID: PAT_MRT3847_27235C.1.pep
MPLSAPPKALNSPIHHPHGPSFFPSISKPKQKPIGLTLLPLNRAFRGLEISVPSPSSLHSNVAKHVDVATLSNLCVDIVLNVPQLPPPSPLQRKAFMDRLAQSPPDKKYWEAGGNCNMAIAAARLGLNCISIGHVGNEIYGKFLSDVLHDEGIGLVGMITNDDIVNSSGSSASCETLLCWVLPDPLQRHGFCSRADFCEEPILHWMSKLSSEVKMAIKNSKVLLCNGYGFDELSPGAILEXTGKSLSTGTPDEQRALNQLLRIRALNQLLRMSDVLLLTSEEAEELTGINDPILAGQEFLKRGIRTKWVIVKMGSKGSILITASSVACAPAFKVNVIDTVGCGDSFVAAIVYGFIHNMPLVNTLAIANAVGAATAMGCGAGRNVATLENVVHILRSSNLSEDDEFWIEILEKNVVAQEITYLSNVMNGNKNRLNLVSFDKVASELLPKLELPQTVGNAPT

SEQ ID NO: 205102 - protein, 68 aa, Glycine max
  unsure (1)..(68): unsure at all Xaa locations
  Clone ID: PAT_MRT3847_27236C.1.pep
MGTIPDPGELSELSQXSFDEFQLQTSLMNSCTLLWKELSEHFXSLEQDVYHKCEGLKRXIHTLDNSTS

SEQ ID NO: 205103 - protein, 157 aa, Glycine max
  Clone ID: PAT_MRT3847_27237C.1.pep
LPRNYFGNALAGPVPPECFSGEIPSKPFSFPARKIKKAVEMLKEEYISSQLDIALGEEQLESIKALFSSQGEGRNAPFAGNPTLQIPRWINIPLYETNFGWGKPEPFVLGYVCPFARGIFFQGPKNDGSVIVLMYFPISHMQLFKKFFFEDVFPSRL

SEQ ID NO: 205104 - protein, 162 aa, Glycine max
  Clone ID: PAT_MRT3847_27238C.1.pep
ANEPVFQKFIDLFRLYDSVGIYTINYVGRLKKKKKKKKKKKKKKKKKKKKKKKKKKKKKKQTQKKKKKKKKKKKKKKKKKKKKKKGGALLKGQIFKTPGLHLFFFFLGPQNLFPGAEFNNRGGGKTPGVPHLNALGKIPFFMGGNKKKKGPTIFPFQNKGPP

SEQ ID NO: 205105 - protein, 62 aa, Glycine max
  Clone ID: PAT_MRT3847_27239C.1.pep
TRPTEAKRRTNGIIFEFIYLKAMTNSKVSNGHSVTLPIILVGLTMAYSTDNVSFNFNWFNTF

SEQ ID NO: 205106 - protein, 92 aa, Glycine max
  unsure (1)..(92): unsure at all Xaa locations
  Clone ID: PAT_MRT3847_2723C.1.pep
GLRAHSCTKVSNIISVDLPVYTGFTYATTEFATXRSEWILVQHVHQLFTNGLTEHTNRLSTDVYIGGDSYSGITIPEIDHEISLGNEKRLHP

SEQ ID NO: 205107 - protein, 49 aa, Glycine max
  Clone ID: PAT_MRT3847_27240C.1.pep
NFFHPLIIISHILSHHLLSPLYTHFSHIFIIFYFINTILIITKHITSSQ

SEQ ID NO: 205108 - protein, 174 aa, Glycine max
  Clone ID: PAT_MRT3847_27241C.1.pep
CRVRVPFSSFRPVKPDDPVLDPFLVHTLTIRFEPRRQRPVEGNATMKQDLRSFKLILEYIKALPTGQETDFVLVSCSGLGIEPSRREQVLKAKRAGEDSLRRSGLGYTIVRPGPLQEEPGGQRALIFDQGNRISQVCYEYIAEDGRELYELVAHLPDKANNYLTPALSVLEKNT

SEQ ID NO: 205109 - protein, 293 aa, Glycine max
  unsure (1)..(293): unsure at all Xaa locations
  Clone ID: PAT_MRT3847_27242C.1.pep
ILIAVLDNSATGEIDFFRNSFINGGYVKLYEKLSMSLGYNHEYYRASCLSVGGXGVSYCXILEVGPSAEPGRRRLYYTRKSTKEGFCRGPRFPYFLKIFFSTIFPYTNSCFIFKQCIIXGVLILYSFLFQRPVEGNATMKQDLRSFKLILEYIKVLPTGQETDFVLVSCSGLGIEPSRREQVLKAKRAGEDSLRRSGLGYTIVRPGPLQEEPGGQRALIFDQGNRISQGISCADVADICVKALHDTTARNKSFDVCYEYIAEDGRELYELVAHLPDKANNYLTPALSVLEKNT

SEQ ID NO: 205110 - protein, 331 aa, Glycine max
  Clone ID: PAT_MRT3847_27243C.1.pep
MKMEGLDLFLVATNHRGFICVCSALIKFLKWVWVVFLRPPKNLKEYGSWAIITGSTDGIGKAMAFELASKGLNLLLVGRNPLKLEATSKEIRDRLDVEVKFVVIDMQKVEGVEIVKKVEEAIDGLDIGLLVNGAGLAYPYARFFHEVDLELMDAIIKVNLEGATWITKAVLPTMIKKKKGAIVNIGSGSTVVLPSYPLVTLYAATKAYLAMFSRCISLEYKHQGIDIQCQVPLFVSTKMTKMKTSIFVPTPAMYSKTCTRWIGYEKLVEPYFLHSVQGFLIRAIPDSLVDSYMLRYFLYWRGRGLSKDSNIKTSAASNSEEANIINQDHTN

SEQ ID NO: 205111 - protein, 31 aa, Glycine max
  unsure (1)..(31): unsure at all Xaa locations
  Clone ID: PAT_MRT3847_27244C.1.pep
CFSSSFSXDIPTAMAYENAPQGHVMLLERSS

SEQ ID NO: 205112 - protein, 49 aa, Glycine max
  Clone ID: PAT_MRT3847_27245C.1.pep
TTRPVDLHKPNFYYLMPILLHISKVRDHYTTVITYLICLYCLKQLPYFP

SEQ ID NO: 205113 - protein, 46 aa, Glycine max
  Clone ID: PAT_MRT3847_27246C.1.pep
NGCNKTTEGSPHCRVVLLGETSEARNKFLQTCRELVRNTNKVLSAE

SEQ ID NO: 205114 - protein, 74 aa, Glycine max
  Clone ID: PAT_MRT3847_27247C.1.pep
AASDIAATPFIMSPHGRYAGPVHPHPSGRRGSQLPPSEALQSGRQPLYKCFMCLMLQGYCTRRSQYRGNFCRYL

SEQ ID NO: 205115 - protein, 155 aa, Glycine max
  Clone ID: PAT_MRT3847_27248C.1.pep
STGISFSLAFPITTFKFQVQLFSIATPSTKQNHQNPQVVSEKLRIMVSGWRRTFRTSNTIPQNTHEPEICDYYNNINSSPKITSNFSFFSTPSLIPTRTNSPLSKHQCNYNNNARTPSPTKRYSPTSFHQSTPSSPNSPSAFSLLKSTLRLSKSS

SEQ ID NO: 205116 - protein, 141 aa, Glycine max
  Clone ID: PAT_MRT3847_27249C.1.pep
MGDRQVVDQQHMGDPQLPSSPPSKDDMVSCVMALEAALLPCLPARELQAIDRSPHPSHQIDVDRYARDFMEAAKKLQLYFISLQREDKPTKVEMLRKEIALMEEELNIKNELIKKQENLIQEWKKELKDQLDKHKIELDRV

SEQ ID NO: 205117 - protein, 55 aa, Glycine max
  Clone ID: PAT_MRT3847_2724C.1.pep
FTFLAIAGWQRIFKLISALSHLVSSQFTPQLTFVTYHQVVMNLGFSSLHPSVITL

SEQ ID NO: 205118 - protein, 44 aa, Glycine max
  unsure (1)..(44): unsure at all Xaa locations
  Clone ID: PAT_MRT3847_27250C.1.pep
QKKTTKKSSILSYLLNSNSXISYDILYLDTVXXTXFFFTFYXLI

SEQ ID NO: 205119 - protein, 74 aa, Glycine max
  Clone ID: PAT_MRT3847_27251C.1.pep
TNLCCSSPCPALIAMPTFGYPYERFLLILHFTMVQIETLARTRLPYTHFFWPQETKKAQGNNKKARLKSLFFYV

SEQ ID NO: 205120 - protein, 331 aa, Glycine max
  Clone ID: PAT_MRT3847_27252C.1.pep
MRINAFCVSASASIYSPFPNPHGALLQDWKLRKHRFSLKLTAFPLNSSCRKRRTTFICAANQEAEEAFKKTVEIDRLIDMLREANPRELQKLVVENILAFNPSFWVRLAARTDTCKSDDDKKDYEELATTVMNVVDCVVHKTKEKIESSTDVLKGVLKPVIDAEGEIPWPPRDPQALTLMEKEISQREQEGQLDEGFLAEVNAQLRQAKEDGDKPGLEAMMQKVLQLYASIVLSKRSYAMKGKEVLKDEQFLETIIQAPEQEWNNILINGLTIGAGDVSAEDLFAVLKKRIERVLIRTEGGSYQQRILTEYLKGIETRAEEIVQVLQGRPQ

SEQ ID NO: 205121 - protein, 72 aa, Glycine max
  unsure (1)..(72): unsure at all Xaa locations
  Clone ID: PAT_MRT3847_27253C.1.pep
TQHKVSXTHTVPNXXXXAXXXCSRFPTPSFSLPLPAFFXXHPSHTSLIEREKVQCFCIEXPPHYPAYTIXXH

SEQ ID NO: 205122 - protein, 86 aa, Glycine max
  Clone ID: PAT_MRT3847_27254C.1.pep
DRIKCRLLEGSNAQEVRAMVLDMQARLLLDMLGKGIESALINSSALVPELWQASGETLSSIDPESMAVEPALIPSIQAYVDSVLDW

SEQ ID NO: 205123 - protein, 54 aa, Glycine max
  Clone ID: PAT_MRT3847_27255C.1.pep
VLQLLRFVIIYIYTYINTFSACAKFQISMFMLTIIIIFFLFSLFLFLFELSGRV

SEQ ID NO: 205124 - protein, 84 aa, Glycine max
  Clone ID: PAT_MRT3847_27256C.1.pep
SFAPHRLETPCKTTPYPHPPPSNPSFFFSFERVPKMVAKPGSVPDFEALRELFKHHIESFDYMVDAGLDTMLGHIKPVEFSMIS

SEQ ID NO: 205125 - protein, 85 aa, Glycine max
  Clone ID: PAT_MRT3847_27257C.1.pep
CYTNPSLNPTLAAGRVFRRERDCSYRKSGRKNTDKGANAAVVGFAYFLECNWCCCSYHVSVFFLSGLIEKLDRKCASAYIENIFF

SEQ ID NO: 205126 - protein, 102 aa, Glycine max
  Clone ID: PAT_MRT3847_27258C.1.pep
GSRVPLIASKILKFVSSDQDPREGEPLTWFMDDSDEDQKPPPHKEPNQVLATWQRPGRRSLRWTLLKVGEEKETGQMGHAEESVDTTDIGGYTRLPRNAAKL

SEQ ID NO: 205127 - protein, 78 aa, Glycine max
  unsure (1)..(78): unsure at all Xaa locations
  Clone ID: PAT_MRT3847_27259C.1.pep
MAGGGITLGSNAAKKATXRSRKAGLQFPVXRIGRVLKGGKNTKRVDTEAHKYLDDVVGYVASEVXELGGNAGRDDMKT

SEQ ID NO: 205128 - protein, 86 aa, Glycine max
  Clone ID: PAT_MRT3847_2725C.1.pep
RTILPVISHHHFSQQKMVMMKSLPLVLIVRLFPLYHHLSPVPGRGTDRPGHALHRSRRGPRTLRARGRHDGNAEKGGVGDSRDAAA

SEQ ID NO: 205129 - protein, 59 aa, Glycine max
  Clone ID: PAT_MRT3847_27260C.1.pep
RGIAREALHVAHKALVHDQSRGFPTHEGSARTRTLVFRPEISKEESVPLLRRRRGSDPK

SEQ ID NO: 205130 - protein, 72 aa, Glycine max
  Clone ID: PAT_MRT3847_27261C.1.pep
PRVRKKKKKKKKKKKKKKKKKKGQIWRWCGRIILNKTIACVDIPNFFWAARPNFLSGVCAPSRLGKPCLYPP

SEQ ID NO: 205131 - protein, 71 aa, Glycine max
  Clone ID: PAT_MRT3847_27262C.1.pep
SWHLGVGPSFKLLASLNTIGCANCHSHQPINKGIYIIISSPNEKYWVGFSCGGGYFCGRQPQLVAFTKTLK

SEQ ID NO: 205132 - protein, 72 aa, Glycine max
  unsure (1)..(72): unsure at all Xaa locations
  Clone ID: PAT_MRT3847_27263C.1.pep
PAYYYESPPRPTSHAPPYHYMNPPPPXRPSPPPXYHYTSPPTPCPSPAPNYIYKSPPPPLYIYTSPPPPIYK

SEQ ID NO: 205133 - protein, 101 aa, Glycine max
  Clone ID: PAT_MRT3847_27264C.1.pep
MDKVTRLATEKGVVVFTKSSCCLCYAVNILFQELGVIPVVHEIDKDPEGKEIEKAITRLGCPTPVPAVFIGGKLVGSTNEVMSLHLSGSLTQLLKPYRALS

SEQ ID NO: 205134 - protein, 101 aa, Glycine max; identical to SEQ ID NO: 205133
  Clone ID: PAT_MRT3847_27265C.1.pep

SEQ ID NO: 205135 - protein, 135 aa, Glycine max
  Clone ID: PAT_MRT3847_27266C.1.pep
MAQVELRDEHGNPVELTDAYGNPVWLTDEKGNPVHLTAVATNAHKSMLQNDTPQELPHSKSSSSSEDEGHGERIRKGLKDNIEEKLPAGEGVVKENKHTTIAASTSTTDTSDANHHPTTEHEKKSIIDKIKEKFQ

SEQ ID NO: 205136 - protein, 138 aa, Glycine max
  Clone ID: PAT_MRT3847_27267C.1.pep
SILLLCNFSNDLLTSGTLLSRVASGGWGSGSGGRNGASSGSAGCQLCLLGGLPLIRRQAWVGGALLGNGRCSGTGTSGADSAGLSWWEGLVSLLASRAHRRGGQLVGGLADNAGNDIVPLLGILRSVCPEVVFARAEF

SEQ ID NO: 205137 - protein, 217 aa, Glycine max
  unsure (1)..(217): unsure at all Xaa locations
  Clone ID: PAT_MRT3847_27268C.1.pep
MGSSIFCLHLILSSFFLFTFLLAAVNGSKKCYIVYMGAHSHGPSPTSADLELATDSHYDLLGSIFGSREKAKEAIIYSYNRHINGFAALLEEEEAADIAKNPNVVSVFLSKEHKLHTTRSWEFLGLHRRGQNSAWQKGRFGENTIIGNIDTGVWPESXSFSDKGYGTVPSKWRGXLCQINKLSMFLMQIHATEKLIGARYYNXAFEAHNGQTGSIAT

SEQ ID NO: 205138 - protein, 671 aa, Glycine max
  unsure (1)..(671): unsure at all Xaa locations
  Clone ID: PAT_MRT3847_27269C.1.pep
MEHVLEKRFPLNAEDYTLYEEVGEGVSACVYRAFWVAFNEIVAIKVLDLEKLINDLDGIRREVQTMNLIDHPNVLRAHCSFTAGHNLWVVMPYMAGGSCLHIMKSNYPEGFEGPVIATLLHEVLKALVYLHAHGHIHRDVNSTNILVDSTSTPKLADFGVTACLLDLGGILQSRGLFVEKPCWMVPEVMQQLHGYDFXADIWSFGITALELAHGHAPFSKYPPMKVLLMTLQNAPPGLDYERDKRFSKAFKELVATCLVKDPKKRPSSEKLLKHHFFKQARASKYLARTILEGLAPLGDRFRLLKAKQADLLVQNKALYEDKDQLSQKEYIRGISAWNFNLEDLKSQAALIQDDDIPNAEESQRDKKQKDRLDDFKVSAERLSPGAANHSDDAPTQDKEDGFNNLPDLESSLASFPSKPLQALKGCFDMCEDDVNNSSPRNLDHDGRIDNESSGTSTSLQQNATSHQKKFPSGSLLPDNFLFPKKIVTDGDRDYLQTKYSSDRNHSGPLQYRQKRDTNNLPLVDDTSDGAFVQFRGRFKVTPADLSPMGPSNSTSGPLVSPTSPPNPNFLSVAILPSLQCILQQNGLQREEIIKLIKYAEQSSGKNTESMEAGIVDILQAPPATTRERELHFQVIQLQQSNGILFEELQKQKMKNVQLEKQLSSMINKVEK

SEQ ID NO: 205139 - protein, 92 aa, Glycine max
  Clone ID: PAT_MRT3847_2726C.1.pep
FILYSVAGWLFLFHSKAKLFTSCYRGSDCSSAPTPKHILIRVLAQPFTTVLGILFVSFSVPCSFHSFISDDISFRRLHYLVKASKVILWCSP

SEQ ID NO: 205140 - protein, 280 aa, Glycine max
  Clone ID: PAT_MRT3847_27270C.1.pep
MISNGVCTLRTCLRFPARPLFREPPRLFSCRQRFLVTASETKKKEKVIVISGPTGSGKSRLALELAKRLNGEIVSADSVQVYRGLDVGSAKPSPNERKEVPHHLVDILHPSEDYSVGQFFEDARQATGCILDNGRVPIVVRGTGLYLRWFIYGKPDVPKASPEIVSEAYQELAELQRNDDWDTAVQLVVKAGDPKAQFLAVNDWYRLRRSLEIIKSSGSPPSAFRVPYDSFREQGEYGVADGSELSDMNTYGDAMEKTNSSELDYEFMCCFLSSHRLDLY

SEQ ID NO: 205141 - protein, 292 aa, Glycine max
  unsure (1)..(292): unsure at all Xaa locations
  Clone ID: PAT_MRT3847_27271C.1.pep
LVFRVIIGTGDNLSDFTFSENVTHAHICAEEALNFQTVSVAGKTFFITNLEPMKFWEFLSLLLEGLEYQRPFIKLPAKLVQYILSVLKWVHEKLGSRYSGYPLLVHFFQLASYTRTFNCMAAQKDIGYSPIVSLEEXFFFLLFKFLLLASPIFFSLPTENXIIRKAALQQGGEKVNDVLLYREEKKSFAYFPVLVLLFYWYFLSERTLISAAARLLLFSTLLLYGHGFLPSKLFGFHIQRIPTTYFEISDTAVKDSVTTTVYLWNRGFQNISGLAQGDDWSAFFKVKDAVSF

SEQ ID NO: 205142 - protein, 70 aa, Glycine max
  Clone ID: PAT_MRT3847_27272C.1.pep
ASGLAPVAAYHRRFIFGRSDFICVPRSLVGQSKVVFALAIRVYGSRAYVIHFVIFIDVYYKYVSNRVDKC

SEQ ID NO: 205143 - protein, 142 aa, Glycine max
  Clone ID: PAT_MRT3847_27273C.1.pep
SPEELCHWLILADMYGVCKIREYCLDTIACNFETFADTKEFRAMLLTLPPPSGDSSLRTTVPRIPGSALNADQGNLLDDLREKWLEIEAAELDKRDESALQFDKRLEMLMLVAEQEKSSDNADLDGINDTLAILPNHHSDLR

SEQ ID NO: 205144 - protein, 184 aa, Glycine max
  Clone ID: PAT_MRT3847_27274C.1.pep
MATLQCNCNSLALNKPSYSRRRRRQFLQPLFSSTRFVSSNSICTSSSATTSRWGCAVSAVVSEENAVGSSFSAADVFKLTYLEGNSWIWNVGGINILVDPILVGNLDFGIPWLYDAAKKVLQKFQLSDLPEINCLLITQSLDDHCHLKTLKPFSQKFPDIRVIATPNAKGLLDPLFRNVTYLEP

SEQ ID NO: 205145 - protein, 46 aa, Glycine max
  Clone ID: PAT_MRT3847_27275C.1.pep
RDLSRETAISHSEQQHEEMPRIYRTYWLDLIFRDFGRHPSDLHLDS

SEQ ID NO: 205146 - protein, 65 aa, Glycine max
  Clone ID: PAT_MRT3847_27276C.1.pep
DGHHGLVSSAIVGYVCASGYGCGYSSSKALLLREGSRLLSILLVLGLRFQQPSTLPVMTVCCNAR

SEQ ID NO: 205147 - protein, 46 aa, Glycine max
  Clone ID: PAT_MRT3847_27277C.1.pep
MGSRFPSHQLSNGLYVSGRPEQPKERTPTMTSVAMPYTGGDIKKSG

SEQ ID NO: 205148 - protein, 130 aa, Glycine max
  Clone ID: PAT_MRT3847_27278C.1.pep
FSPPPRGKTCGPPSPCWGPAAAAATSPFHFHFKWRGWLRGYPPKWRGWWFFFPQLKKSGPVGFPGEGCFFEPGFPGDPPPPPFRWFGNGPPLFFPPPSISAPLFLFFFLNPPFPPNFYFFFFKISFPPFV

SEQ ID NO: 205149 - protein, 219 aa, Glycine max
  unsure (1)..(219): unsure at all Xaa locations
  Clone ID: PAT_MRT3847_27279C.1.pep
NTDTTTSAFLHFLLLAVAQDVNSDFAVLKSLRGSWLSPTPNWEGSDPCKDWEGIKCKNSRVISISLSDIGLTGHLSGDIGSLSELEILDLSYNRGLTGSLPQEIGNLKKLLKLVLXGCGFXTGRIPDEIGFLEQLVFLSLNSNNFVGPIPPSIGNLSNLTWLDXADNQLDGIIPISSGTTSGLDMLQKTLHFHLGKEXFQEKISPKLFTSKMTLIHGIF

SEQ ID NO: 205150 - protein, 65 aa, Glycine max
  Clone ID: PAT_MRT3847_2727C.1.pep
GVRTGVRGKQKDIAKKRFTALRYDIGQTVVYPSQQAVLTVQFSSHYWNQLQGIGWLWFAETNTHV

SEQ ID NO: 205151 - protein, 73 aa, Glycine max
  Clone ID: PAT_MRT3847_27280C.1.pep
PRVLPLVHPRLPIRATTFFVIHFYFFFVLNNPYQSLINHILIQHYNNTPPSNIPTFIHLPSILQQSPYIKYSN

SEQ ID NO: 205152 - protein, 164 aa, Glycine max
  unsure (1)..(164): unsure at all Xaa locations
  Clone ID: PAT_MRT3847_27281C.1.pep
RAAGLLGAGFALADGVQSSGLADVLSRALDFLEDTPYWAIAPAVSLMSSIITEFITSNDAXATATLLIPLLYNIAKTMHVHPLLLMVPGAVATAFLLPTSTPSNVVGFATGHIEILDMLKIGVPLKVAGIAVLSIFMPTLGAIVFGTDDYIQWMPNINSPWLRN

SEQ ID NO: 205153 - protein, 190 aa, Glycine max
  unsure (1)..(190): unsure at all Xaa locations
  Clone ID: PAT_MRT3847_27282C.1.pep
SFDYSNFTKELRLSNEEHRELLGHVXADDVLQNIMEWRQAGGNQPVALSAGQAIHDSIPRPTICASRKKLKITPSAPSQSFGGPSVFWPQPXVHPLQPSSVSKRGSISGSNANKHKPXPSITWGPNTDISGTAMGDAAKVASMDSLAGRRVRTRWPDDNNFYEGIISDYNRTKSIHAVLYDLXTANESWE

SEQ ID NO: 205154 - protein, 45 aa, Glycine max
  Clone ID: PAT_MRT3847_27283C.1.pep
LFWCIACTSQWPYKGDYILSSLGITILKFPLGCSYDPIGSDSFMG

SEQ ID NO: 205155 - protein, 69 aa, Glycine max
  Clone ID: PAT_MRT3847_27284C.1.pep
FAFMEKKRAYWLSIKFQALYRPTILIQILLKSGTERSRALPAEARQGGPHFPSSDLIRAIFCQNYVGGS

SEQ ID NO: 205156 - protein, 50 aa, Glycine max
  Clone ID: PAT_MRT3847_27285C.1.pep
KKARKAAVKEEKREARKAKKELKGRYKSETQKAQKVAAVTGPSSIRLMDG

SEQ ID NO: 205157 - protein, 70 aa, Glycine max
  unsure (1)..(70): unsure at all Xaa locations
  Clone ID: PAT_MRT3847_27286C.1.pep
PISSWATXAVYALLXXPITXGRXTYXGCXLSXRXYSXFHWKVXXXXEXGLXXVPKAKTGKTXLXKLXRPL

SEQ ID NO: 205158 - protein, 174 aa, Glycine max
  Clone ID: PAT_MRT3847_27287C.1.pep
MKRPLTPSASGMKTNKKAKAMENDEDVEGLGRFDDNLLFEVLKHVDARTLAMAGCVNKQWHKTAQDERLWELICTKQWANTGCGEQQLRSVVLALGGFRRLHALYLFPLSKPQQLQQLTSSSSSSSSSSAWGPTVPQMIRSKPLRLGKDEVHLSLSLLSIRYYEKMNFNNRTTR

SEQ ID NO: 205159 - protein, 63 aa, Glycine max
  Clone ID: PAT_MRT3847_27288C.1.pep
PPSFFFFFFQFILKENQQNNPAYFTIITSPQNKFKPKSHKIYLHIIIYISRQTIPTIIFYFPI

SEQ ID NO: 205160 - protein, 53 aa, Glycine max
  unsure (1)..(53): unsure at all Xaa locations
  Clone ID: PAT_MRT3847_27289C.1.pep
SSRIGSREIQEKVVLKFSQEEFLTAWXXXVXXATPVVSVKRYLIENIGTDLPF

SEQ ID NO: 205161 - protein, 73 aa, Glycine max
  Clone ID: PAT_MRT3847_2728C.1.pep
AGGTTATGPGPAGVEAPTGPVAARTGIWAKAVVSGHGVNLERGRAPFIISILRGLKWYEKLEAGWSFTPSEGL

SEQ ID NO: 205162 - protein, 100 aa, Glycine max
  Clone ID: PAT_MRT3847_27290C.1.pep
PVLAHDVPHLMSKYAVASSSISSASLEVLPLITGSLKGSQLVRYINERSAASISLRRPLYVSRSHNYIYRYAFSQIQRFRPSPHLQMHTTHTPSRSPPDA

SEQ ID NO: 205163 - protein, 142 aa, Glycine max
  unsure (1)..(142): unsure at all Xaa locations
  Clone ID: PAT_MRT3847_27291C.1.pep
MVTSTTAAAVLSPPSVAGLRLAPSPRARVAFRAAPARRSVAARAELSPSLVISLSTGVSLFLGRFVFFNFQRENVAKQVPEQNGKTHFDAGDERAKEFSGLLKSNDPVGFNLVDVLAWGSLGHIVAYYILATSSNGYDXNFF

SEQ ID NO: 205164 - protein, 44 aa, Glycine max
  Clone ID: PAT_MRT3847_27292C.1.pep
HFWSSLQQHAGFELLVIQYPLTPNGSASWMMRRRRRLWSDRQLL

SEQ ID NO: 205165 - protein, 43 aa, Glycine max
  Clone ID: PAT_MRT3847_27293C.1.pep
CRLFHHILPSFALNPCHHIFYIIPPTLHSNSQSMLHTKTGRVG

SEQ ID NO: 205166 - protein, 104 aa, Glycine max
  Clone ID: PAT_MRT3847_27294C.1.pep
AIFLFSSAFFPPTSKPCPPTCTSTTTCPSSESPPPPPPMPSSKPTTSPPTMTTATPSLPSSLKPRPKLTEPPSSTSPSPSTSTSTSTTRITVLRLRRRAKFQRR

SEQ ID NO: 205167 - protein, 39 aa, Glycine max
  Clone ID: PAT_MRT3847_27295C.1.pep
PTPPIRDKSKTRSLKGFGCNSPIRYVTLQCNLILCRLPR

SEQ ID NO: 205168 - protein, 97 aa, Glycine max
  Clone ID: PAT_MRT3847_27296C.1.pep
MRGVQSLKQHRCVYSSFKFVWSFKCSRSPVIVNDNGRQQRRGFVTSCLHMASISFSWVVILVPGAEVGVCSVGSFLAQARATILAEAVDFTTSRVAG

SEQ ID NO: 205169 - protein, 158 aa, Glycine max
  Clone ID: PAT_MRT3847_27297C.1.pep
IRLEQRDSEAETAVAQVEEPTEVERLTQMLRNAEYQQATIEWLQSDNQAELFDNLFRFLNPLYLQQVTSLVALSVSAAITSSFETNVELRLEWLGTIVSNIDTSDPDIRDVAPKIMDVLYQRLQGAYMQLAESVPRDDGALRKMVTLTRQIADVRRVL

SEQ ID NO: 205170 - protein, 76 aa, Glycine max
  Clone ID: PAT_MRT3847_27298C.1.pep
LWFPFFKFFSKNIKGRHIFYFNTNETNLTICSFNQTSKHIATLSTLALNLHKQRVVSNRRTFCYINSPISTRRGIS

SEQ ID NO: 205171 - protein, 96 aa, Glycine max
  Clone ID: PAT_MRT3847_27299C.1.pep
FGFFFFFFPFFSFCIFFFFFFFFLLIQPPEFFFFGEKHTSKQNKPYKKKQRSHISLTWKKNRKNNVSWSGPKKKPKYAQGPYLIIIATATPKEKLP

SEQ ID NO: 205172 - protein, 76 aa, Glycine max
  Clone ID: PAT_MRT3847_2729C.1.pep
MPRPGPRPYECVRRAWHSERHQPVRGSIIQQIFRVVNDAHSPATKKNKEWQEKLPVVVLKAEEIMYSKANSEAEYL

SEQ ID NO: 205173 - protein, 158 aa, Glycine max
  unsure (1)..(158): unsure at all Xaa locations
  Clone ID: PAT_MRT3847_272C.1.pep
GHEXVXXAHFFKFPCXGAXXHXLLGRHGPAPVGPLXWVQEXPNLGGFLFLPXRGFPLNISGSTRATILWKILNXXRPESFLVENYAPWVLCRPWPCEPGKRVCAAFFRPMLIACLPLAGWVHHFEWKLGQGKEEIGDPWAFPPPGFLPLLVXLSPRFR

SEQ ID NO: 205174 - protein, 79 aa, Glycine max
  Clone ID: PAT_MRT3847_27300C.1.pep
MDEFGVLTEKFGLKPQGKSAPMARAKRPPNVADSQTRPNPKFPLNGSPSHQNSTFDFDYGVFSNSNTDNKTQRFDDIFG

SEQ ID NO: 205175 - protein, 72 aa, Glycine max
  Clone ID: PAT_MRT3847_27301C.1.pep
ICISGSSSSRTMHCCSTSPKAGVWLSGLPWPTVPAISAKNSSIMPRSRLVVAPVRMISPPVSRMPPVMSKWS

SEQ ID NO: 205176 - protein, 42 aa, Glycine max
  Clone ID: PAT_MRT3847_27302C.1.pep
IICMKQIRNGYHIVIKQSRVGDINIKICLKKGKRGIELVFLV

SEQ ID NO: 205177 - protein, 239 aa, Glycine max
  Clone ID: PAT_MRT3847_27303C.1.pep
FGSSGSPASSSSSLSFLRTYSVDDLGEKLRMLRPEGMRNDWFSVTELSERLRRLTKMEEEEVEKQAHSNTQYGCNKDVLDHVRGSLVRLDQNQTEAAKKASRQGLSILSHLNGTPTFSLDPPKPHLVEKYFHPDNMSSSEKLKIELAKVRDEFKMSDSDCGSARVQIAQLTTKIKHLSAVLHKKDVHSRKGLLAMVQRRKRLLKYLRRTDWDSYCFVISKLGLRDNPDHIYRARSGTAT

SEQ ID NO: 205178 - protein, 53 aa, Glycine max
  unsure (1)..(53): unsure at all Xaa locations
  Clone ID: PAT_MRT3847_27304C.1.pep
XQHIKMRNLIKLILFKSRKQIHVDKKVIFTLLLSNKTYXKHLPLKTRLFKFTK

SEQ ID NO: 205179 - protein, 58 aa, Glycine max
  Clone ID: PAT_MRT3847_27305C.1.pep
QKEPVTDRTDWHHSFLLRRYYGLAADCDEKGHPSPYDKLDLLLAHTGPIWCTVRSYML

SEQ ID NO: 205180 - protein, 39 aa, Glycine max
  Clone ID: PAT_MRT3847_27306C.1.pep
IQEFFKYLLILGVRLFKGKKNNLLGGKQLYETIFFSILI

SEQ ID NO: 205181 - protein, 56 aa, Glycine max
  Clone ID: PAT_MRT3847_27307C.1.pep
LGLGLPVSRTNNKAKHNGAHKDSHMVYALYKLMDQTIEAAKGLENMFTPTVDDIGK

SEQ ID NO: 205182 - protein, 39 aa, Glycine max
  Clone ID: PAT_MRT3847_27308C.1.pep
QAKYHRSKDLLARTQLAKESIILASAAINALSAHLSARV

SEQ ID NO: 205183 - protein, 120 aa, Glycine max
  unsure (1)..(120): unsure at all Xaa locations
  Clone ID: PAT_MRT3847_27309C.1.pep
MFMCGSGFGTAISHADLHYDERIEGYIKGYRQVFYDRSTDHRXTAESPEITPTLEPAXEKXCYRTAYKNATKADSETALVYLEVXDKQYYLNEYPDLYTDLTATSAAIAYIMAYIATSDM

SEQ ID NO: 205184 - protein, 110 aa, Glycine max
  unsure (1)..(110): unsure at all Xaa locations
  Clone ID: PAT_MRT3847_2730C.1.pep
MLLTPNQRKLWPNSTVEESNRRIVGRKVGGDRSKIEASKSGSDEKVVLRHQNVEGKKQTXRLYNNVIEETASMLAELRKSKVKALVGAFETVISLDSPRDATAAEVSTTC

SEQ ID NO: 205185 - protein, 42 aa, Glycine max
  Clone ID: PAT_MRT3847_27310C.1.pep
TLKMFGKLVFFQYFNVVYFFGENSMSYILRNEHTTLHWSSNY

SEQ ID NO: 205186 - protein, 112 aa, Glycine max
  Clone ID: PAT_MRT3847_27311C.1.pep
GVPSHQIYQGTQQHQRGQFLLQTRIPCHYTSGTHAKLNCKLQLPFPRPRANLTRSHTLPGPHTMLILQSLLLRNVCAPLGSPLKAQTDSRTLSAAPLAFEEDTGPLDLKNGG

SEQ ID NO: 205187 - protein, 153 aa, Glycine max
  Clone ID: PAT_MRT3847_27312C.1.pep
IRLEVSPVSVAHFSQYKLTMLLLKRLENLGFQICAPESLEGNEQSCEKKIMMGHECVSIDASNDFVTVTASSIIKGKRVEQNIHCNILIGTDGAGSTVRKLVGIEMRGEKDLQKLVSVHFFSKDLGQFLLKENPGMLFFIFNAEAIWVLVAHD

SEQ ID NO: 205188 - protein, 86 aa, Glycine max
  unsure (1)..(86): unsure at all Xaa locations
  Clone ID: PAT_MRT3847_27313C.1.pep
YMQAQGLLLGRHYRRACHLLNAFKIVLTELRLRYLDDKCLKELKEXDQCLSMLGEAKVDDDGDVDDMKDSNAMFSDKDCEDRENYI

SEQ ID NO: 205189 - protein, 211 aa, Glycine max
  Clone ID: PAT_MRT3847_27314C.1.pep
MEEGKDKDVVKRMVTVEDWLLQFARMFKNHVGFESDSYLDTHEYAMKLYEEAIEDSVASNDAQELFRMAADKFQEMAALALFNWGSVQMSLARNQGFFLEDGARESSLEHIKAAYELAQKEYEKAEMRYEEALKIKPDFYEGYLALGHQQFEQARLCWCYAMACKKDLEAGFSDEVLKLYNKAEDSMEKGILMWEEIDEHRLNGLSKPDKH

SEQ ID NO: 205190 - protein, 40 aa, Glycine max
  Clone ID: PAT_MRT3847_27315C.1.pep
TVLYYNMLRLVCSENRQRPYVLKQYIFFYLCMVKLIFITL

SEQ ID NO: 205191 - protein, 103 aa, Glycine max
  unsure (1)..(103): unsure at all Xaa locations
  Clone ID: PAT_MRT3847_27316C.1.pep
TGLECPVRPTRAITLTVLLLFDATILITVECQAYDMFPVLMNTGYGARTPEVKCSILKLSIETHIIFCFKTIPXKCFETSXEYIHGEQYRSDFHSVNHLAYFY

SEQ ID NO: 205192 - protein, 94 aa, Glycine max
  unsure (1)..(94): unsure at all Xaa locations
  Clone ID: PAT_MRT3847_27317C.1.pep
MKLKTWLASVLLLTIAVLTNTLGAFVGVNIGTDVSDLPSATNIVGILQANQITHARLYDANAHLLQALXNTNIEVIGGVTNEEVLRIGRISISS

SEQ ID NO: 205193 - protein, 224 aa, Glycine max
  unsure (1)..(224): unsure at all Xaa locations
  Clone ID: PAT_MRT3847_27318C.1.pep
MSTTELSNMKQPPVPLATLIGQELRNGKIEKPFVKYGQAGLAKKGEDYFLIKTDCQRVPGDSSTXISVFAIFDGHNGISAAIFAKESILSNVLSAIPQDMGRDEWLQALPRALVVGFVKTDIEFQKKGETSGTTATFVLIDRWTVTVASVWDFRCILDTEGAVVSLLTVDHRXLEENXKERDRVTACGGGRYTSFRSSYFTCGXLRWWPCRLSFSSFIEDIDVV

SEQ ID NO: 205194 - protein, 427 aa, Glycine max
  unsure (1)..(427): unsure at all Xaa locations
  Clone ID: PAT_MRT3847_27319C.1.pep
MSRIELSRAKSAPVPLGTLIGRELRNGKVEKPFVKYGQAGLAKKGEDYFLIKTDCLRVPGDASTAFSIFDGHNGISAAIFAKESILSNVLSAIPQDISRDEWLQALPRALVVGFVKTDIEFQKKGETSGTTATFVLVDGWTVTVASVGDSRCILDTQGGVVSLLTVDHRLEENAEERERVTASGGEVGRLNVFGGNEVGPLRCWPGGLCLSRSIGDTDVGEFIVPIPHVKQVKLSNAGGRLIIASDGIWDALSSDMAAKSCRGVPAELAAKLVVKAXEALRSRGLKDDTTCLVVDIIPSDHPVLPAIPRKKRSVLTSLLFGKKSPNSTNKGNNKLSAVGVVEELFEEGSAMLTERLGKDFPSNPNPGIFRCAVCQADQPSVDSVSMNTGSFFPPVSKPWEGLFLCTNCQKKKDAMEGKRSTRPSETA

SEQ ID NO: 205195 - protein, 295 aa, Glycine max
  Clone ID: PAT_MRT3847_2731C.1.pep
RSQSRDHLSPRIQQPPCLPPKPVAGNPLNYAKVTTPAVSPIPVPDSIHPNSRLMGSSKYPFSEGIPSGHHQPLTMEARPPLNLGSVYPLYYGYEARDPDPWTTATDTTCSDTIFVGRPVISVPEPSGIGLSENFSYGTFHHVANRMRKETAVGTQEAAPDRECDLSLRLGQCLHPCSSSKSSSAYEVDDVGLGVSPESCKFSHLSLQRNREFCFYPRETGYGTIESTSGKCNVEGEDLNLEATLRKRKAPLCGNNEEDGQFCRNPGVPSNRFTSRPGSYTLSCCIIVYAFAFLDR

SEQ ID NO: 205196 - protein, 477 aa, Glycine max
  unsure (1)..(477): unsure at all Xaa locations
  Clone ID: PAT_MRT3847_27320C.1.pep
MSRIELSRAKSAPVPLGTLIGRELRNGKVEKPFVKYGQAGLAKKGEDYFLIKTDCLRVPGDASTAFSVFAVFDGHNGISAAIFAKENLLSNVLSAIPQDISRDAWLQALPRALVVGFVKTDIEFQQKGETSGTTATFVLVDGWTITVASVGDSRCISDTQGGVVSLLTVDHRLEENAEERERVTASGGEVGRLNVFGGNEVGPLRCWPGGLCLSRSIGDTDVGEFIVPIPHVKQVKLSNVGGRLIIASDGIWDALSSDMAAKSCRGLPAELAAKLVVKEALRSRGLKDDTTCLVVDIIPSDLPVLPPIPRKKHNMLTSLLFFGKKSENSVNKATNKLSAVGVVEELFEEGSAMLTERXVLSLYLPACYVLKCNSNLIEQVTGILFFIFAFGCICLGNFLKFCIFLKCRLGKDFPLNKNSGIFRCAVCQVDQPPGDDGLSVNSGPFFSPASSPFLCTNCQKKKDAMEGKRPSRASITA

SEQ ID NO: 205197 - protein, 138 aa, Glycine max
  unsure (1)..(138): unsure at all Xaa locations
  Clone ID: PAT_MRT3847_27321C.1.pep
MSRIELSRAKSAPVPLGTLIGRELRNGKVEKPFVKYGQSGLAKKGEDYFLIKTDCLRVPGDASTAFSVFAVFDGHNGISAAIFAKENLLSNVLSAIPQDISRDAWLQALPRALVVGFVKTDIEVQXKGETSGNTATFV

SEQ ID NO: 205198 - protein, 80 aa, Glycine max
  Clone ID: PAT_MRT3847_27322C.1.pep
HAWGMLVVYVGAPCGPWGHLAKLDDTMDGLLPGLFGKLLTSWGHSLLGWACLDLVHDVEQERARHKIEATATSSADQERG

SEQ ID NO: 205199 - protein, 135 aa, Glycine max
  Clone ID: PAT_MRT3847_27323C.1.pep
GGCLSPVKCWRGWIPARGGIPQMGGCLFLSHPGEAPLKFLLAGLLWLKGGKNSGSLKPRFLQGGKGFYKKSFFVEQACQKKKLGPLRIFFFLFPQGSGPLLNPPPPWVGGPVFLGPTPDFPWPKGNPHQKNPFFP

SEQ ID NO: 205200 - protein, 83 aa, Glycine max
  Clone ID: PAT_MRT3847_27324C.1.pep
LGGGKVTPKLNFAPLYGMSGALSLGFNKAGFQVNKYIPFGPVKMVIPPLLKRGEKKKGLLAASGFKNPLIKKGLGRGLKAPVF

SEQ ID NO: 205201 - protein, 426 aa, Glycine max
  Clone ID: PAT_MRT3847_27325C.1.pep
MSRTELSNMKQPPVPLATLIGQELRNGKIEKPFVKYGQAGLAKKGEDYFLIKADCQRVPGDSSTLFSVFAIFDGHNGISAAIFAKESILSNVLSAIPQDISRDEWLQALPRALVVGFVKTDIEFQKKGETSGTTATFVLVDGWTVTVASVGDSRCILDTQGGVVSLLTVDHRLEENAEERERVTASGGEVGRLNVFGGNEVGPLRCWPGGLCLSRSIGDTDVGEFIVPIPHVKQVKLSNAGGRLIIASDGIWDALSSDMAAKSCRGLPAELAAKLVVKEALRSRGLKDDTTCLVVDIIPSDLPVLPPIPRKKHNMLTSLLFFGKKSENSVNKATNKLSAVGVVEELFEEGSAMLTERLGKDFPLNKNSGIFRCAVCQVDQPPGDDGLSVNSGPFFSPASNPFLCTNCQKKKDAMEGKRPSRASITA

SEQ ID NO: 205202 - protein, 48 aa, Glycine max
  Clone ID: PAT_MRT3847_27326C.1.pep
FNSLLPQSKAKGKLVKYTCAEQNNTIKGYLPQTKRHLRLKKNYRRATK

SEQ ID NO: 205203 - protein, 66 aa, Glycine max
  Clone ID: PAT_MRT3847_27327C.1.pep
VGSRISAVHFPAWTVTDCTTRFFLKLVVHFSACACDSTDADPRETVLRSSLFVGARHAQRACSQNL

SEQ ID NO: 205204 - protein, 183 aa, Glycine max
  Clone ID: PAT_MRT3847_27328C.1.pep
FSSFLVERRIDLVYGGGSVGLMGLVSQAVHDGGRHVLGVIPKSLMPREITGDPIGEVRAVSDMHQRKAEMARQADAFIALPGGYGTLEELLEIITWAQLGIHSKPVGLLNVDGFYNSLLSFIDKAVDEGFISPKARRIIVSAPTAKDLVRELEEHVPERDEVVSKLVWEDRLNYVVPESEVAM

SEQ ID NO: 205205 - protein, 32 aa, Glycine max
  Clone ID: PAT_MRT3847_27329C.1.pep
CFHKLIGWDLLCLLAPSLFWFPLMTLLPEIKK

SEQ ID NO: 205206 - protein, 56 aa, Glycine max
  Clone ID: PAT_MRT3847_2732C.1.pep
LLLLVCFVVARVSSFRLAPRLPLCLFACPAFLALCVRSGSLTSAVAWVAPVPVRCL

SEQ ID NO: 205207 - protein, 62 aa, Glycine max
  Clone ID: PAT_MRT3847_27330C.1.pep
LSKILSDKPIPHKNKLEPAPEANSSLEQKYMRCKVLRTAFRPIPAYSQTNLSETPSHRFLNT

SEQ ID NO: 205208 - protein, 153 aa, Glycine max
  Clone ID: PAT_MRT3847_27331C.1.pep
MDAKRTLELTVLSLEELHVDWKHAAESLYVVVRAESITSYSTGTATESGGNPSWNEKLVVDVPVHARSITLEVKCKDAPSVKDLGIARIAISDFLGGGTMAPEQCLQFLSYRLRDWEGRRSGVINFSVRVRATEKACSCSGDVVIGVPILWNR

SEQ ID NO: 205209 - protein, 79 aa, Glycine max
  unsure (1)..(79): unsure at all Xaa locations
  Clone ID: PAT_MRT3847_27332C.1.pep
XKSKRVKAFRCGEFDGCIERAESAQGMPLKKREKYARREDAILHALELEKQMLKKQEKIGLEQLGVAHQVKRSKFVYRQ

SEQ ID NO: 205210 - protein, 56 aa, Glycine max
  Clone ID: PAT_MRT3847_27333C.1.pep
LSNRVRIWVKQGGLVACDGGLGPRWVSMSMSAASMITPYEFFNRMSTNSQEDFPSS

SEQ ID NO: 205211 - protein, 112 aa, Glycine max
  Clone ID: PAT_MRT3847_27334C.1.pep
DNFTMGYIMPKKHLEINLDHPIVKTLRQKVEANKNDKAVKDLVVLLFETALLSSGFSLEDPQTHSNRIYRMIKLGLGIDENEVTAKEPSAAVPDEIPPLEGNKNASRMEKVD

SEQ ID NO: 205212 - protein, 257 aa, Glycine max
  Clone ID: PAT_MRT3847_27335C.1.pep
LKPPQPTPTPPAAAPQQPLVPSLPQSPSDATPDTAAVDIVGILRKAKSFNILIRLMKTTQLINQLNAQLLTTKSGGITILSPDDSAFSELKVGFLNSLSDGQKLELLQFHVLSDYVSSSNFDTLTNPVRTLAGAKPGKVELNVISYGGSVNISTGEVNTTITGIIYTDKHLAIYKVGKVLLPMDFFAVAKAPAKAPSLAPEPSSDAAKAPKADKDESSSSDASQVNPTEQNSGIEKISVYGMWVSLVFGLVLLIAFS

SEQ ID NO: 205213 - protein, 458 aa, Glycine max
  Clone ID: PAT_MRT3847_27336C.1.pep
YGCERRQKGLQITAGDPWCSSGGVAPDGTFVSAGGFDTGARSVRYMGPNCQNCEWREYDNIFGADRWYATQQILPNGEFILVGGRRSFSYEFIPVEGQRGEKPYFFPFLYETSDIDENNLYPFVHLSTDGNLFIFSNNRSLLLNPTTHKIVRTFPVLPGGSRNYPASGMSALLPINLNDPATATKAEVMVCGGNLPDAFHIAETTKIFLPALRDCNRLTISEPFPEWESELMPSGRTMGDLLVLPNGDLLLINGATMGTAAWWDADLPNYTPVLYKPEDPKGLRFTVLKPSQIARMYHSTSTVLPSGKIWVSGSNTHNTYRDVDKFPTETRVEAFSPPYLDANFDKYRPQIDEDASEKELAYGGLFEASFSVEDGAELTKNNIKVSMYSPPFTTHGFSMGQRLLFLKIDELNVQGQEGSYRVRVEAPPSNAIAPPGYYLLFVVYRGLPAAKGMWVHIQ

SEQ ID NO: 205214 - protein, 176 aa, Glycine max
  Clone ID: PAT_MRT3847_27337C.1.pep
ARGAFSELKAGFLNSLSDGQKLELLQFHVLSDYVSSSNFDTLTNPVRTLAGAKPGKVELNVISYGGSVNISTGEVNTTITGIIYTDKHLAIYKVGKVLLPTDFFAVTKAPAKSPSLAPEPSSDTAKAPKADKDESSSSDSSQVNPTEQNSGTEKIAVYGMWMSLGLGVLLMSVMTT

SEQ ID NO: 205215 - protein, 291 aa, Glycine max
  Clone ID: PAT_MRT3847_27338C.1.pep
MMKKQSLLSSSLALLVSFLYFTTTLAQLSPASAPFKPPQPTPIAPAAAPKPLVPSLPQSPSDSTPDSTPAVDIVGILRKAKSFNILIRLMKTTQLINQLNAQLLTTKSGGITILAPDDSAFSELKAGFLNSLSDGQKLELLQFHVLSDYVSSSNFDTLTNPVRTLAGAKPGKVELNVISYGGSVNISTGEVNTTITGIIYTDKHLAIYKVGKVLLPMDFFAVAKAPAKAPSLAPEPSAKAPKADKDPLSPDSSESSQINSTNENSGTVKINVHGKWVSLVLGLVLMTVFSS

SEQ ID NO: 205216 - protein, 316 aa, Glycine max
  Clone ID: PAT_MRT3847_27339C.1.pep
MSQYKSYHFYSFPKEPEPSFTKTKIMMKKQCLLSFSLALLVSFLYFTTTLAQLSPASAPQKPAQPTPTAPAAAPKPLVPSLPQSPSDSTPDSTPAVDIVGILRQAKSFNILIRLMKTTQLINQLNAQLLTTKSGGITILAPDDSSFSELKAGFLNSLSDGQKLELLQFHVLSDYVSSSNFDTLTNPVRTLAGAKPGKVELNVISYGGSVNISTGEVNTTITGIVYTDKHLAIYKVGKVLLPMDFFAVAKAPAKAPSLAPEPSAKAPKADKDPLSPDTSESSQTNPTTENSGTVKINVHGKWVSLVFGIILMTVFSS

SEQ ID NO: 205217 - protein, 276 aa, Glycine max
  Clone ID: PAT_MRT3847_2733C.1.pep
MIDGVAIYNIVAALVPLYVPMILAYASVLWWKIFTPEQCSGINRLVALYSVPFLNFNFLAFNNPYAMNLRFIAADTLQKVIILGALFLWSAFTKCGNLDWTITLFSLSTLPNTLIVGVPLLTAMYGDSSGSLMSQIFVMQGVVWFTLMLFLYEYRGAKSLISNQFPENGGSIASFTVDSDVNSLNGNEPLQADVEMKENGELHVVVRSHSFNNDSPCNCSTSNHCSEAEICSMQRSLSFNTTRDLKREGSKEEMSKIDQEKMSRKDACNHLSNGVK

SEQ ID NO: 205218 - protein, 174 aa, Glycine max
  Clone ID: PAT_MRT3847_27340C.1.pep
TAARDDRRGEHKAEVVLEIKTERPKVAKREETKEASKLPFKREMGKTIQSAEDRRPKTGEITSEFEKVIEFKQAVEKMHESHNGEHQRDSKEVTPKKEVKPPTITPEQGVEKSKKEDVSPMPMAIQRKEPHELSLPSKDYEIPKIEGVQQEKEGKRFTHALEAFTFKKKKKKLE

SEQ ID NO: 205219 - protein, 98 aa, Glycine max
  Clone ID: PAT_MRT3847_27341C.1.pep
NSWEERKGLGLLNSTALLESRQWFNYKITSGNQPPRALVTVPFSRIPLIIIVSSFIYFTFVLFLATITILYIYLYPNSFTICLIISIKIISSSDIIRM

SEQ ID NO: 205220 - protein, 43 aa, Glycine max
  Clone ID: PAT_MRT3847_27342C.1.pep
EMSPRDKKLGFGVIIFFFTKCADMYWYHMRPSRQNCCIKPSSE

SEQ ID NO: 205221 - protein, 51 aa, Glycine max
  unsure (1)..(51): unsure at all Xaa locations
  Clone ID: PAT_MRT3847_27343C.1.pep
SGRTLDKQAXTEANLKKAGYHTWEKFLHPISMFVDRILESTVPSILTNENK

SEQ ID NO: 205222 - protein, 61 aa, Glycine max
  Clone ID: PAT_MRT3847_27344C.1.pep
GDGGKITTAHVLLGIWSEVDSPGHKILSTLGFNEEKKLKSFLSPHFLNLVVRMIDACFNMY

SEQ ID NO: 205223 - protein, 75 aa, Glycine max
  Clone ID: PAT_MRT3847_27345C.1.pep
GKKNRLIAILLQSSAIQKKEDLVPIRKKPSTLPSTDPIVILKKVRIKNPISKNLCFTPLELKLSTYEFAFLPCYY

SEQ ID NO: 205224 - protein, 67 aa, Glycine max
  Clone ID: PAT_MRT3847_27346C.1.pep
DGMLAAYYRREGGGYTGASLDSGERKKSDVRPPRSCMSLSHYSFGRQRACPTINIDRSNRWRYPYLW

SEQ ID NO: 205225 - protein, 253 aa, Glycine max
  Clone ID: PAT_MRT3847_27347C.1.pep
MEACCCNLEVDVNGEETFMVDKTVITQYSNKFARLFGKSSGATGKLKVIFHDFPGGAEGFELMLKFCYNNGTADINPSNLFLARCAAEYMEMKEPMADVSNLLEQTEKSLQEISYWTWSDILIGLKQCQSLLVPDSSVMVERCLDTIVGRLVLASEASPCPSTSSTDSSWVRYSCDSKSTESVKTSFSRLTWWFEDLLFLSPLLVAMLVKLMLSRKMDHVVISKFLLYYQKAKFSTATTHEKCKIIEILVPNS

SEQ ID NO: 205226 - protein, 88 aa, Glycine max
  Clone ID: PAT_MRT3847_27348C.1.pep
GTETRREGVGGTKELNGEFENFRKTVNARLIRSQGSVKPGDTNVIGVELGNTRKGGVREMVRKGDGNVGAICSVRKVSLGGSVGSNQM

SEQ ID NO: 205227 - protein, 69 aa, Glycine max
  Clone ID: PAT_MRT3847_27349C.1.pep
VSIIFGIEQILSLHAAIQSSSFLFLLSSYVYNSNSNFKIYYHSFINETHASFYSPSVIANFFTSLPPKM

SEQ ID NO: 205228 - protein, 45 aa, Glycine max
  Clone ID: PAT_MRT3847_2734C.1.pep
VAALSFFFFFFFFFFFFFFFFYFYFFFFFYLSGGKPSNITFNNRF

SEQ ID NO: 205229 - protein, 94 aa, Glycine max
  unsure (1)..(94): unsure at all Xaa locations
  Clone ID: PAT_MRT3847_27350C.1.pep
XIIAALLEXXQHFTSFFXFXHXRXYQSTWXXLHRTPKKVDIFNEXSSSIDKIEDITTAXEHXXQIANLFGIEXTXDFKXCLADLHGPFLXVXXF

SEQ ID NO: 205230 - protein, 55 aa, Glycine max
  Clone ID: PAT_MRT3847_27351C.1.pep
FYWIFDITPLYEHSHVSCLHGTWCMIVCVQYVKTQRLYNIVIMSQQFGSYILVQD

SEQ ID NO: 205231 - protein, 52 aa, Glycine max
  Clone ID: PAT_MRT3847_27352C.1.pep
FCKSYYKIKDWERTCSEAVCWRAESDQIWMRLWRVRLETKSLVWRSCMVRTR

SEQ ID NO: 205232 - protein, 70 aa, Glycine max
  Clone ID: PAT_MRT3847_27353C.1.pep
MAAYKLKQKPLLSLCKIFNLKMKIACTGNADDGVIIDKLSKGADPVADREDREQYLPMERRKVQRQPMYH

SEQ ID NO: 205233 - protein, 92 aa, Glycine max
  Clone ID: PAT_MRT3847_27354C.1.pep
LAISIELSKVLSPYKQTNNQSRSIIGNPIPRPGRGPRPACGSETSPGVHRAHWRGSIRGHRVRLELREGYDLRSSCHVCSGQGTWGFCERDG

SEQ ID NO: 205234 - protein, 70 aa, Glycine max
  Clone ID: PAT_MRT3847_27355C.1.pep
EESIIISRFQQYLKINTAQPTPRYHKSAYFLISQGKALSLESQNIQFFACNPLFLLKWESSNPNLPSILL

SEQ ID NO: 205235 - protein, 148 aa, Glycine max
  unsure (1)..(148): unsure at all Xaa locations
  Clone ID: PAT_MRT3847_27356C.1.pep
SFFPMQDVQVTIDWFISSHECVPRTYCVLNPQNXFVLKRWMGKLTFPQRTFRGDKRMLFSIRGGAGAKNAILMNMPNAVLLMGRYLVGELKFEVSKMTSSYIXMSXAFLIAFENLDADTINLDAFPHKLVQFGEIYEKVVLKFIHEEF

SEQ ID NO: 205236 - protein, 36 aa, Glycine max
  Clone ID: PAT_MRT3847_27357C.1.pep
KPLSVISELVIRDSVQQQLPTQSLSVSVSERMSLSS

SEQ ID NO: 205237 - protein, 87 aa, Glycine max
  Clone ID: PAT_MRT3847_27358C.1.pep
MNPPEIPFGGAPLPKKELQLQGPRPPPLKVSKESHKIKKPPPHPAHHHHNYPHAPPDQNLQQQREPVIIYSVSPKVIHVTPGDFMDV

SEQ ID NO: 205238 - protein, 99 aa, Glycine max
  unsure (1)..(99): unsure at all Xaa locations
  Clone ID: PAT_MRT3847_27359C.1.pep
MMMLKNRKMRIYLFFLHTPLFADPDRRGLMALTLSQLGEILSPAACSIDCSLKHYNADSYVLSDFSLCAFALRIIIATCGCTXKLLLSIPPILSCVDVL

SEQ ID NO: 205239 - protein, 61 aa, Glycine max
  unsure (1)..(61): unsure at all Xaa locations
  Clone ID: PAT_MRT3847_2735C.1.pep
QDLLTGDELLSDSFRXKEIEHGMLWEADAKCLAKGAVDVNIAAYPSDEGEREDDGPDDAAD

SEQ ID NO: 205240 - protein, 58 aa, Glycine max
  Clone ID: PAT_MRT3847_27360C.1.pep
NGKSLAAVLHGRDWENLGVTQLNHLRIHPLGASWCKSEKARPDRPFQQWLTLNWQMGR

SEQ ID NO: 205241 - protein, 74 aa, Glycine max
  Clone ID: PAT_MRT3847_27361C.1.pep
LIKLIRFNFVKRLLNLISWYFYIIIHTIFIFNIHLLILTLIICLIDLFVYLSWMAYLGIQIYSLVYESFIKEII

SEQ ID NO: 205242 - protein, 86 aa, Glycine max
  Clone ID: PAT_MRT3847_27362C.1.pep
KNVLLTFLILKKMNSCKIKDYGKYIVNFGVIDAYKLIDKKGYLLTISPGFGASGCPKESKTLLGLEKQVIMTVMVLVGLLLLVAMV

SEQ ID NO: 205243 - protein, 194 aa, Glycine max
  Clone ID: PAT_MRT3847_27363C.1.pep
MSTTIDVPESSNVAKEKAVLVAPSRPGGWKKGVAIMDFILRLGAIAAALGAAATMGTSDQTLPFFTQFFQFEASYDSFTTFQFFVITMALVAGYLVLSLPFSIVAIIRPHAAGPRLFLIILDTVFLTLTTASGASAAAIVYLAHNGNQDSNWLAICNQFGDFCAQTSSAVVSSFVAVVVLVLLVVLSALALGKR

SEQ ID NO: 205244 - protein, 48 aa, Glycine max
  Clone ID: PAT_MRT3847_27364C.1.pep
AVGVCPCNSTNQRLSKIKIMSYQTKFSMSLNFVGERGYNIDPQQRNNP

SEQ ID NO: 205245 - protein, 181 aa, Glycine max
  unsure (1)..(181): unsure at all Xaa locations
  Clone ID: PAT_MRT3847_27365C.1.pep
MSTTIDVPESSNVAKEKVVLAAPSRSGGWKKGVAIMDFILRLGAIAAALGAAATMGTSDQTLPFFTQFFQFEASYDSFTTFQFFVITMALVAGYLVLSLPFSIVAIIRPHAVGPRLFLIILDTVFLTLATASGASAAAIVYLAHNGNQDSNWLAICNQXWXDFARKPGGAVVSSFGSVVIF

SEQ ID NO: 205246 - protein, 111 aa, Glycine max
  unsure (1)..(111): unsure at all Xaa locations
  Clone ID: PAT_MRT3847_27366C.1.pep
TPFFSVTVPSSEWGWGSFKITERISIHIGQAVIQVFNACWELYCLXHGICPDGQMPSDNTIGGGDDAFNTFFIETGAXKHLPFAEFVYHEPTVIDEVITPTYSTAYSPIVD

SEQ ID NO: 205247 - protein, 119 aa, Glycine max
  Clone ID: PAT_MRT3847_27367C.1.pep
WEMEDQRLFLCFQIGLLAPIVSFVFPPLTFLLVNHNPSHEGSLQLRQNCCHFSLLILYFLQTLPSPSSLPCARSHLEVKSDFNYLHCSPTILRIFFFVLWSDASRISNSALMPSQIISF

SEQ ID NO: 205248 - protein, 134 aa, Glycine max
  unsure (1)..(134): unsure at all Xaa locations
  Clone ID: PAT_MRT3847_27368C.1.pep
DYLPTLAAVSPPTIHGLAGSSLFGTXLSFKLSRHSVTXINLMTGVAEAKYGDTNXYFDLEDASHTTGQLDWHRSYAPLFYYLLRSEQCHTFAASFTDRGLPLLLLILGCGVTLADSKATASSVVVGLQTGSHLS

SEQ ID NO: 205249 - protein, 167 aa, Glycine max
  Clone ID: PAT_MRT3847_27369C.1.pep
LCLCGCLTANKLAADENPVPDCNGPDGKPYDSLASIRKDYKRQAAKNYAPPTDEVVNGWKDNSETDVKACEEAAHKCYKGRHLARINQRKCMDKLGFWQTVARFYTNVRDLCVYGDVDGPSEEYLTNAAKKKCTTGTDLAKRLCICKEIIGSSGRTSEKYNKMMNVE

SEQ ID NO: 205250 - protein, 214 aa, Glycine max
  Clone ID: PAT_MRT3847_2736C.1.pep
FGSRFPITLWLISIQCSFIFLQVSPQLYGDNYPRFFTYWTTDAYQTTGCYNLLCSGFIQTNNRIAIGAAISPRSAFNRRQFDIGLMIWKDPKHGHWWLEFGSGLLVGYWPANMFSHLRNHASMVQFGGEIVNTRSRGYHTGTQMGSGNFAEEGFRKAAYFRNLQVVDWDNSLLPLRNIHQLADHSNCYNIRQGTNSVWGTYFYYGGPGRNVRCP

SEQ ID NO: 205251 - protein, 54 aa, Glycine max
  Clone ID: PAT_MRT3847_27370C.1.pep
PAKCMQSRRHIWSGKAKSRHKQCQMYISSCPIVHLTFVSVECAISRLCSSSILY

SEQ ID NO: 205252 - protein, 44 aa, Glycine max
  Clone ID: PAT_MRT3847_27371C.1.pep
PTNKDGANYVAWFGVQNLTIVLLIYIYILNAHSVAYDILYTVEY

SEQ ID NO: 205253 - protein, 96 aa, Glycine max
  Clone ID: PAT_MRT3847_27372C.1.pep
QIQPFAVAAYARPSLSTTTSFERVDHYDLYAFILKSLRRKQFRRGLDRPPRGINIFMQDLLVTAVGMNPYLVIIRLDGNDLHTRPDQCYALLIHQA

SEQ ID NO: 205254 - protein, 84 aa, Glycine max
  Clone ID: PAT_MRT3847_27373C.1.pep
SRLWSDVQPLGNSRHVDSYRPLTVSAAFFIKSCHANVQSVLVRKSGNLNRIVHSKIAVTRPATAISTPGTEGEGNTLRSRTHPG

SEQ ID NO: 205255 - protein, 69 aa, Glycine max
  unsure (1)..(69): unsure at all Xaa locations
  Clone ID: PAT_MRT3847_27374C.1.pep
WDTYGGWGAHGGSAFSGXDPTKVDRSGAYIVRQAANSVVANVLAKMCIVQVSYAIGVPXPLSMFLDSYR

SEQ ID NO: 205256 - protein, 116 aa, Glycine max
  unsure (1)..(116): unsure at all Xaa locations
  Clone ID: PAT_MRT3847_27375C.1.pep
EARHVRMQAISGLGWLPRADVTTIVQVDKLHSAQEERNAPDXYHMIGLLFNIEVLDLPGTPYVWPNMIDMNALTLLTNTQEFFVGCLPELIWWPLSVNGNYPECETPSQAAGVQVT

SEQ ID NO: 205257 - protein, 166 aa, Glycine max
  unsure (1)..(166): unsure at all Xaa locations
  Clone ID: PAT_MRT3847_27376C.1.pep
WLCTSETSLKVASEGXETGRSISYLSSSMQNAFSFKLQDKKGRLHRFTCDTRSMAEVITSVIQRVGDDIDPMDLPQILYEDEENDKVVLASDSDLAAAVDHAKTAGLKGLRLHLDYSGTHGYGTDSSSLSWKYANSQAWASAYSAIAAGAAVVAALGLLAFVRRSQ

SEQ ID NO: 205258 - protein, 103 aa, Glycine max
  Clone ID: PAT_MRT3847_27377C.1.pep
SSIHHIIGRAINPLVRSHCYSYNAIKDYTKPTNLPLNSSQTKMYVMTSYSYQLPTHIYYSNVTSYSVTSHFKPFYMILPITRLLISLFVRLENLLIYRIYKIV

SEQ ID NO: 205259 - protein, 51 aa, Glycine max
  Clone ID: PAT_MRT3847_27378C.1.pep
NNKIMIKILFIKLKIIFFFSLCSFSNNINDHLIFYFFLLLFYFVSFKLNIV

SEQ ID NO: 205260 - protein, 82 aa, Glycine max
  Clone ID: PAT_MRT3847_27379C.1.pep
YHSFRVVGKIALSRDHCWVSYEDILTGRFDTDLIPEVRLYAFNSHFEVKLIKLTALKYLITAIFSFSSVLMSGFFNLHVASR

SEQ ID NO: 205261 - protein, 80 aa, Glycine max
  unsure (1)..(80): unsure at all Xaa locations
  Clone ID: PAT_MRT3847_2737C.1.pep
HSGHLPYKYSXLTRLLRDSLGGKTKTIIIATISPSIHCLEXTLSTLDYAHRAXNIKNKPXINHKMMKSAMINDLYSEIDR

SEQ ID NO: 205262 - protein, 91 aa, Glycine max
  unsure (1)..(91): unsure at all Xaa locations
  Clone ID: PAT_MRT3847_27380C.1.pep
XRXXXXEXXNLXMXTGXXIKXXXFXXXPXIXAXXXXXXXXXXRXXXXGXXHXXXYVXAIEXXSXCXXXXXXXXXXXXXXXXXRXSSXXXCX

SEQ ID NO: 205263 - protein, 80 aa, Glycine max
  Clone ID: PAT_MRT3847_27381C.1.pep
SLILLAVRVSCLVSGQCALLLMLSVPSSIGSFRVYCLCFWLVFRLELLSYLDFTLAPVTSMLILRFQALLVGYLIKPVFR

SEQ ID NO: 205264 - protein, 135 aa, Glycine max
  unsure (1)..(135): unsure at all Xaa locations
  Clone ID: PAT_MRT3847_27382C.1.pep
KEHAVPHSSSGVDSRNSSEIAGEISLAIELCVRLLRRSNPFFVESIDVENSSAVNLPLPLPSSPRNWGKYKIYGTSIRILGSCRGLILLHIXTRLENYLILWNPSTGVHKRLSNLKFDSTEYYFLYGSGYDPSTD

SEQ ID NO: 205265 - protein, 169 aa, Glycine max
  Clone ID: PAT_MRT3847_27383C.1.pep
KQLEVVELSENALTGTVESWFFLLPSLQQVDLANNTFTGVQISRPLEAREGSSNSNLVALNLGFNRIRGYAPANLGAYPALSFLSIRYNALRGAIPLEYGQIKSMKRLFLDGNFFVGKPPAGLMEAGTAVSGSLGDNCLHACPGSSQLCSPAQKPSSVCKQAYRGRPTP

SEQ ID NO: 205266 - protein, 90 aa, Glycine max
  unsure (1)..(90): unsure at all Xaa locations
  Clone ID: PAT_MRT3847_27384C.1.pep
EIMKMNNSMXNLIPXAGSVAITSGSSSXKXRMIVGVSVGVVGAVVWLDFLVLCRKRRRLVQRQSKTWVXLSINDGTTLIXGNKYLGTTLM

SEQ ID NO: 205267 - protein, 397 aa, Glycine max
  Clone ID: PAT_MRT3847_27385C.1.pep
MQNLNFLYLTIISLTLIHNYSILVQALTSPSDIAALKAFKASIKPSSITQWSCLASWNFTTDPCSLPRRTSFICGLTCTQDSTRINQITLDPAGYSGTLTPLISQLTQLTTLDLAENNFFGPIPSSISSLSNLQTLTLRSNSFSGTIPSSITTLKSLLSLDLAHNSLSGYLPNSMNSLTTLRRLDLSFNKLTGSIPKLPSNLLELAIKANSLSGPLQKQSFEGMNQLEVVELSENALTGTVESWFFLLPSLQQVDLANNTFTGVQISRPLAARGGSSSSSGNSNLVALNLGFNRIRGYAPANLGAYPALSFLSIRYNALRGAIPLEYGQIKSMKRLFLDGNFFVGKPPAGLVAAGTAVSGSLGDNCLQACPGSSQLCSPAQKPSSVCKQAYRGRPTP

SEQ ID NO: 205268 - protein, 51 aa, Glycine max
  Clone ID: PAT_MRT3847_27386C.1.pep
GWSILGAFNCMAKILLVRIAEGPASLPKDEIYLLRSGISCCRRFKVLLVTR

SEQ ID NO: 205269 - protein, 141 aa, Glycine max
  Clone ID: PAT_MRT3847_27387C.1.pep
MELSWVVGCLCTADVKDFMLKIHTVNYAEEVCFNDFLSLGDTQDGENGDNYSVSTADKLLPISSQDLAGFNHNSVEYSEEKEKLVFICSHAMEHIKQGGSVLIPFDRLGTILLLLEEMTASLEASDTKNPIPISFLGGWSY

SEQ ID NO: 205270 - protein, 55 aa, Glycine max
  Clone ID: PAT_MRT3847_27388C.1.pep
ASIYLKDWIKEHLFGVNINSILTNYQTHSFKRQRNTILKLKREKGKLLNPLRPII

SEQ ID NO: 205271 - protein, 253 aa, Glycine max
  Clone ID: PAT_MRT3847_27389C.1.pep
ASFIDVVLISSPMGIMGLPFLTRTKGFSAKIYVTEASARIGQLMMEDLVSMHAEFRQFYGPGESNFPSWLRHEELEVLPSELRELILGKDGVELGGWMPLYSAADVKDFMLKIHTVNYAEEVCFNGTLVIKAFSSGIEIGSCNWILNSPKGDIAYLSGSSFISAHAMPFDYHSLQGTCVLIYSDFLSLGDTQDGENGDNYSVSTADKLLPISSQDLAGFNHNSVEYSEEKEKLVFICSHAMEHIKQGGVSYSF

SEQ ID NO: 205272 - protein, 61 aa, Glycine max
  unsure (1)..(61): unsure at all Xaa locations
  Clone ID: PAT_MRT3847_2738C.1.pep
RTHTVPRFTSLLFFXARRAFXCPSEERVELPLFKVVEKFSCYLNMLVQAVSSIRPKPMSSS

SEQ ID NO: 205273 - protein, 80 aa, Glycine max
  unsure (1)..(80): unsure at all Xaa locations
  Clone ID: PAT_MRT3847_27390C.1.pep
RIYTFSFSRCSSLSCSSISILSLHPHKIFRRAPKNSHNTTYYETLGVSNNASHDDLKKXAYKKAAIKNHPDNGGDPEKFK

SEQ ID NO: 205274 - protein, 55 aa, Glycine max
  unsure (1)..(55): unsure at all Xaa locations
  Clone ID: PAT_MRT3847_27391C.1.pep
XVXXXXNXXMXRXXRXXQXXXXFXSXXLDTXXXDGTXLQXYGXXPMXPXXXXGRX

SEQ ID NO: 205275 - protein, 45 aa, Glycine max
  Clone ID: PAT_MRT3847_27392C.1.pep
IYQDKNGISLLVLRNHRGASATVSLHGGQVLSWKTELGEELLFIS

SEQ ID NO: 205276 - protein, 80 aa, Glycine max
  unsure (1)..(80): unsure at all Xaa locations
  Clone ID: PAT_MRT3847_27393C.1.pep
SVLSAPPTVWYSPHRPEYLLALSVQIPSLHDAEFPVEYPCHPDALSADPATVSXTRSCXVIHPRCPTLVTLGLPLPEILD

SEQ ID NO: 205277 - protein, 147 aa, Glycine max
  Clone ID: PAT_MRT3847_27394C.1.pep
NLGALRWRLSSDELLQLEDAANESPRRMIQNIFQTRYTCNTKKANQIKRYGGCNHPSVLHDLAFITDKTSGGTFALGSKECIVYSMEVTGLYHLVSLKAESKQACPGKMTTDQSITAQQWRKLMQESMPVMPQRSFGQSHQIILLCC

SEQ ID NO: 205278 - protein, 61 aa, Glycine max
  Clone ID: PAT_MRT3847_27395C.1.pep
SSSNIRKSSCNDSRVIRACCIAIDNIQILSQVISSHGLLVKCFGMLNHEHSRMNVIVVVNT

SEQ ID NO: 205279 - protein, 67 aa, Glycine max
  Clone ID: PAT_MRT3847_27396C.1.pep
HRKEKQVMLKKLVSVKDLHQKSRSLILSNFRVEIVRRGYRCYVRRFQQQQFPMIAVANVCFRARQDL

SEQ ID NO: 205280 - protein, 302 aa, Glycine max
  Clone ID: PAT_MRT3847_27397C.1.pep
GNKTAKVSILFLLNFLGLVCSSNGGDIVVYWGQDESEGTLSETCNSGLYKIVNIGFLAKFGGGREPEINLAGHCDPASNGCKSLSKDIKNCQKRGIKVILSIGGGETGYSLSSANDATKVADYIWNNFLGGKSSKTRPLGDAVLDGVDFDIEVGGGESFYAVLARRLSQHSKGGGRKVYLTAAPQCPFPDEHQNGALSTGLFDFVWVQFYNNGPCQFESSDPTKFQKSWNQWISSIRARKIYVGLPASPSPATAGSGFVPTRTLITQVLPFVKRSPKYGGVMLWDRAADKQTGYSTNIKPSV

SEQ ID NO: 205281 - protein, 52 aa, Glycine max
  Clone ID: PAT_MRT3847_27398C.1.pep
CLVYSFMFFWICFNVQGLWIGLICGLACQTGTLSFLAWRAKWTKLNVSLDRD

SEQ ID NO: 205282 - protein, 53 aa, Glycine max
  Clone ID: PAT_MRT3847_27399C.1.pep
GQRRRFVLQIAPCCLTWRRALANGFGSTRLRSWRDHTLMRIRQRFGYELLQAP

SEQ ID NO: 205283 - protein, 81 aa, Glycine max
  Clone ID: PAT_MRT3847_2739C.1.pep
TRTLTNVGPAGTYKASVTSDMASVKISVEPQVLSFKENEKKSFTVTFSSSGSPQQRVNAFGRVEWSDGKHVVGTPISINWG

SEQ ID NO: 205284 - protein, 332 aa, Glycine max
  Clone ID: PAT_MRT3847_273C.1.pep
MLLLIHLFILGFFNFSTTTEAIDLNSNYLNHSCSSNKTFTPNSAYQSNLQTLLASLSSHATTAQFYNTTAGGGDVGETIYGSFMCRGDVTNHTCQECFKTATQQITLRCPHSKEALIWYHECLVRYSNRCFFSTVEEWPRFSFMDYNVTSSTKEEGSYGFWLLSKTLSDAVGEAANAGPAGTMKFATKNATLSGAQEVYTLVQCTPDLSSQDCSKCLGDIMRDIPLCCLGRIGGMVLYPSCTLMFGIGQFYRDFLMVHQNQNQKMKSSLRTIVIIVLLVVVVPVMLSFFSYHLIRRKARKRNYKILLRENCTYSYCNKKFFNPCKFKFANLF

SEQ ID NO: 205285 - protein, 37 aa, Glycine max
  Clone ID: PAT_MRT3847_27400C.1.pep
HCFSIIHHTPFYFHLQIHLRIYRYNTTLIYFTNFFPT

SEQ ID NO: 205286 - protein, 184 aa, Glycine max
  Clone ID: PAT_MRT3847_27401C.1.pep
VLTEPTGRDIGLRYDLGRELGRGEFGVTYLCRDRETKEELACKSISKKKLRTAIDIEDVRREVEIMRHLPKHPNVVSLKDTYEDDDAVHLVMELCEGGELFDRIVARGHYTERAATTVTRTIVEVVKVCHEHGVMHRDLKPENFLFGNKKKTAPLKVIDFGLSVLFKPGERFNEIVGSPYYMAP

SEQ ID NO: 205287 - protein, 52 aa, Glycine max
  Clone ID: PAT_MRT3847_27402C.1.pep
HWGNTFFTTQVSLMYKHILKKKLPTNRKHPSEESHKRAPSQKKALIYPFAKI

SEQ ID NO: 205288 - protein, 96 aa, Glycine max
  unsure (1)..(96): unsure at all Xaa locations
  Clone ID: PAT_MRT3847_27403C.1.pep
LKRPRLTAPGGRTIKAQANGPQNETFKGENXGELGPDIGENGAGDRRRSSYNTPFQAGGYDTTPNAYTLASRGGLQRXSSYYRWVWEANRANPRGE

SEQ ID NO: 205289 - protein, 50 aa, Glycine max
  Clone ID: PAT_MRT3847_27404C.1.pep
GVPRGSIGPGFEIKGGRGLFRVHHQRGLVPKNGAQVIIIIIILIGKLKKM

SEQ ID NO: 205290 - protein, 69 aa, Glycine max
  unsure (1)..(69): unsure at all Xaa locations
  Clone ID: PAT_MRT3847_27405C.1.pep
NNVNILGVKNLIISLYIHIYIYIYIYIYIYIYIXIKKYMNIDVYLNNFYIHVFLISCILIYINSNFKKY

SEQ ID NO: 205291 - protein, 83 aa, Glycine max
  unsure (1)..(83): unsure at all Xaa locations
  Clone ID: PAT_MRT3847_27406C.1.pep
LYSLSPSPIHFALIFSLISTIPGLCSNRRSARATPXSTPLPASVHHAPSTTPAHSIMHIYTLCHFINHHSTFCFSLSKDKSTQ

SEQ ID NO: 205292 - protein, 179 aa, Glycine max
  unsure (1)..(179): unsure at all Xaa locations
  Clone ID: PAT_MRT3847_27407C.1.pep
MESSRRAVESYWRSRLIDSATSDEDKVAPVYKLEEICELLRSSHVSIVKEVSEFVLKRLEHKSPIVKQKALRLIKYAVGKSGVEFRREMQRHSVAVRQLFHYKGQLDPLKGDALNKAVRDTAHGHCXEAISAIFSEDNXLIMSKPAPAEDLNRRIQGFGNTNYEPPXEDKXPFXXEVVX

SEQ ID NO: 205293 - protein, 56 aa, Glycine max
  Clone ID: PAT_MRT3847_27408C.1.pep
HYMDKIMFKYIQYLIITLFLKTQKTLINESHFVTDRCMFMKLSLLFFLMRTYYKSL

SEQ ID NO: 205294 - protein, 254 aa, Glycine max
  unsure (1)..(254): unsure at all Xaa locations
  Clone ID: PAT_MRT3847_27409C.1.pep
MADKPSRSLVLFGDGLARFIDSSHSHFHSLASLSSCGFLSLPNSPPSVXESEDERTVREVAVLLDACPIYLNMGKISDSDNQEDSPKQTLPDRFMGMKAAILTNNSSLKSFSAKLGFSVLKLDELVVGGSAEVVALELLKLLGFQEGKVLDSDHFDLVFFHNGAGEQKVVAADMGYMDALVGGVMSQMQPGSDISSRLHLVRCRELWQISWEGDDSKFSVSKRVDEKNPHLSVLYPLQVMLWKGGIPXXDVRHY

SEQ ID NO: 205295 - protein, 69 aa, Glycine max
  Clone ID: PAT_MRT3847_2740C.1.pep
RSDTFGQVGQPILVTDLSYLLSLRGYLTIFLWLIMFTRVLNFLGTSPCTSRFHFLSYIFVPHSSCFLIL

SEQ ID NO: 205296 - protein, 80 aa, Glycine max
  unsure (1)..(80): unsure at all Xaa locations
  Clone ID: PAT_MRT3847_27410C.1.pep
QWCEKFSWKMGFLSMGAYYFNVNWVAKHYFELTKIKLFVLSCLKTGNPVFEAFVLALYQHXRGASQSLVSGLCLAAKPPL

SEQ ID NO: 205297 - protein, 308 aa, Glycine max
  Clone ID: PAT_MRT3847_27411C.1.pep
MADKPSRSLVLFGDGLARSIDSSHSHFHSLASLSSCGFLSLPNSAPSESEDERTVREFAVLLDACHTYSNMKGQISDRDNQEDPPKQTLPDRFIGMKAAILTNNSSLKSFSAKLGFSVLKLDELVGGGSAEVVALELLKFLGFKEGKVLDSDHFDLVFFHIGAGEQKVVAADVGYMDALVGGVMSQAQPGSDISSRLHLSVVMSYGNVLEADDSKFSVLKRVDEKNSHLSMLYPLQSYTMKGGIPRKDVRHYSPMLIAQWQSAVTRKDNAERFSFEDFMEHGGNLTIPADRFLHEIAFKLWKAPKYGA

SEQ ID NO: 205298 - protein, 46 aa, Glycine max
  Clone ID: PAT_MRT3847_27412C.1.pep
LSVSECRVRPFCVGWHVPQFLGMQSNAEPDHNYLQARRRPTILHAK

SEQ ID NO: 205299 - protein, 295 aa, Glycine max
  unsure (1)..(295): unsure at all Xaa locations
  Clone ID: PAT_MRT3847_27413C.1.pep
MASPLLTPYKMGKFNLSHRVVLAPLTRQRSYDNVPQPHAILYYSQRTSNGGLLITEATGVSDTAQGYPQTPGIWTKDHVQAWKPIVDAVHAKGGVFFCQIWHVGRVSDSVYQPNGQAPISSTDKPLTPQIRSNGIDQVQFTPPRRLRTDEIPHIVNDFRLAARNAIEAGFDGVEIHGAHGYLLEQFMKDKVNDRTDEXKSECPHSLVPMRKAFNGTFIAAGGYDRQDGINAVAENRADLVAYGRWFLANPDLPKRFALNAPLNKYHRETFYTSDPVLGYTDYPFLDDEESNAVAS

SEQ ID NO: 205300 - protein, 44 aa, Glycine max
  Clone ID: PAT_MRT3847_27414C.1.pep
SYKAHSLHASNSLCPSPSPLIPCPTQLIAKKESVRKEGNLDDSR

SEQ ID NO: 205301 - protein, 56 aa, Glycine max
  Clone ID: PAT_MRT3847_27415C.1.pep
RNQMSKLLKLLESPQLKIHLETIMSTSCPTNHKFDLKFWRGEKREHMDIVVFFYSQ

SEQ ID NO: 205302 - protein, 345 aa, Glycine max
  unsure (1)..(345): unsure at all Xaa locations
  Clone ID: PAT_MRT3847_27416C.1.pep
LLFLLLTRWANSICPIGISISVFPSYFHRFQLLINFACRVVLAPLTRQRSYDNVPQPHAILYYSQRTSNGGLLITEATGVSDTAQGYPQTPGIWTKDHVQAWKPXASAHASGNFPHLLLLPNTNVSNTLPNTTIISMAVQIVGFDGVEIHGAHGYLLEQFMKDKVNDRTDEYGGSLENRCRFALEVVEAVVNEIGADRVGIRLSPFAEYSESGDSNPKELGLYMMNALNKYGILYCHMVEPRMKTVGEKTECPHSLVPMRKAFNGTFIAAGGYDRQDGINAVAENRADLVAYGRWFLANPDLPKRFALNAPLNKYHRETFYTSDPVLGYTDYPFLDDEESNAVAS

SEQ ID NO: 205303 - protein, 67 aa, Glycine max
  Clone ID: PAT_MRT3847_27417C.1.pep
GPLAHIDAYYLKMLIKKSNLHQLYRLDRIGIGPYTNQVTYSGTVVNYKCRCRTVASNSSQDSFYKLP

SEQ ID NO: 205304 - protein, 72 aa, Glycine max
  Clone ID: PAT_MRT3847_27418C.1.pep
FFFFFFFFFFFFFFFFFFFFFFKQKKQGAFHYFNEFEGVLLHPSIGGSLLLRGGEIKQMGQLGEHNPPIASN

SEQ ID NO: 205305 - protein, 49 aa, Glycine max
  Clone ID: PAT_MRT3847_27419C.1.pep
LANAIFNTLGSQPFFHTCIKRRRSCFCLKTKKLLLKKFPLLFTKAHVWS

SEQ ID NO: 205306 - protein, 86 aa, Glycine max
  Clone ID: PAT_MRT3847_2741C.1.pep
NVYHSHTNEEKRGHVWSRWQSHRLSQVSRCNKFLAFGRSRIEPHVSFVTKQLNLLFFNYMGFKYNILPRKKTGFTFYNWGKGKAFF

SEQ ID NO: 205307 - protein, 80 aa, Glycine max
  Clone ID: PAT_MRT3847_27420C.1.pep
ISFESNLCYFSSSCFYGLKQLWEVFLVFVNMRLFYMLICACWMMNHLTESWDFFWGGKLCDVTLSLRILGHGFRAPVIFK

SEQ ID NO: 205308 - protein, 207 aa, Glycine max
  unsure (1)..(207): unsure at all Xaa locations
  Clone ID: PAT_MRT3847_27421C.1.pep
MALNPQMFPNGMPVPFVNEMFVLARDGXVNFEADRFLPLAIMGVIVKTKGIVYLSNIRMVFVAKSPVGHFTAFDMPLLYIHGEKFNQPIFHCNNLSGHVEPVVPNDQHRALYSTHSFKILFKEGGCGTFIPLFFNLITSVRQYNQHTNMQTQNYVDPLQASQTPVDEMMRHAYVDPNDPTKIFLQQPNSDSQLRRRTYQPQADGGHV

SEQ ID NO: 205309 - protein, 206 aa, Glycine max
  Clone ID: PAT_MRT3847_27422C.1.pep
MALNPQLFPNGMPVPFVNEMFVLARDGVEFEVDKIPASGNHGGHLKTKGIVYLSNIRMVFVAKSSVGHFTAFDMPLLYIHGEKFNQPIFHCNNLSGHVEPVVPNDEHRALYSTHSFKILFKEGGCGTFIPLFFNLITSVRQYNQHANMQTQTYVDPLQASQTPVDEMMRHAYVDPNDPTKIFLQQPTSDSQVRRRTYQPQTDGGHV

SEQ ID NO: 205310 - protein, 98 aa, Glycine max
  Clone ID: PAT_MRT3847_27423C.1.pep
FMILMYALMLFNRREYGNLVQMAKASSLVQNILFYNTISTNNMLISNGLFNVQRPNNKNPDPKHHHSFQFLNRKPDSYRGYNIASQLQHARVSLSHNL

SEQ ID NO: 205311 - protein, 81 aa, Glycine max
  Clone ID: PAT_MRT3847_27424C.1.pep
RNHPQRTINPKRKQAKTLAINIWRIFFKTWSLYTPHLGQNPPGHKKLDNKGPIIPDPFPGKEKNGASPRGDIPATKINGPS

SEQ ID NO: 205312 - protein, 83 aa, Glycine max
  Clone ID: PAT_MRT3847_27425C.1.pep
KPLFVFFHPRKPKKFSPDSHIKGRGGLKPPAPMGPLSFSAKELCSWPLSKTLLGKVPPVSNLYFFGTGYPPRYLARGFSHTPP

SEQ ID NO: 205313 - protein, 69 aa, Glycine max
  Clone ID: PAT_MRT3847_27426C.1.pep
RLRFRVWGIPCLPTYSQGKFPLDGSDAASVWLPNASRAPFLACIEHNEGAFQVAIFIQVLTSGSPDDRF

SEQ ID NO: 205314 - protein, 81 aa, Glycine max
  Clone ID: PAT_MRT3847_27427C.1.pep
GNVHCAREKWNGRLCCDRRGGVYGLQWFQRECWWSPRLMEVVGERKKIILWDAPNKYFLSIPEFAVNPLSLYIYINSFTIP

SEQ ID NO: 205315 - protein, 55 aa, Glycine max
  unsure (1)..(55): unsure at all Xaa locations
  Clone ID: PAT_MRT3847_27428C.1.pep
CREMVGXTHFLYNYITLHTPSPCIIYSLFIDFISLSNTLLSPTVFLAYLRTHSSS

SEQ ID NO: 205316 - protein, 35 aa, Glycine max
  Clone ID: PAT_MRT3847_27429C.1.pep
ANLQNVARRTHRPSEQINNSVSHMTTSKAAVRENL

SEQ ID NO: 205317 - protein, 36 aa, Glycine max
  Clone ID: PAT_MRT3847_2742C.1.pep
TRVRPLLLTAARIRHKLFGGDIKEHHIIQLLSSILT

SEQ ID NO: 205318 - protein, 95 aa, Glycine max
  unsure (1)..(95): unsure at all Xaa locations
  Clone ID: PAT_MRT3847_27430C.1.pep
LEQVKRQSKHTLIVCLSVLYFSXTDFLISLRCVSKLVSTTNFSLELVQWCMKLILNANEASNKKFIIISVICLIIVTIKQILYNFNFQSGVYSRR

SEQ ID NO: 205319 - protein, 69 aa, Glycine max
  Clone ID: PAT_MRT3847_27431C.1.pep
QKTHQTIISSFFNDDDVGGKNTFVFRGTTFNFQPPPLTRKKRVKNKPSPPKNLQIKIKIFRFSFLTTNN

SEQ ID NO: 205320 - protein, 66 aa, Glycine max
  unsure (1)..(66): unsure at all Xaa locations
  Clone ID: PAT_MRT3847_27432C.1.pep
LHCCRHVHQVSDGAMDTCLQQYPYSRCCCXTCTKTHWSMDLGGTTTKVNGDHEKIVRDTSKNMRLV

SEQ ID NO: 205321 - protein, 136 aa, Glycine max
  Clone ID: PAT_MRT3847_27433C.1.pep
MSSSIGQSILMALTVTVNKYASSNLQAVPRTQGKVATKKTTPTLSTNVEMGRRGLVLSTVIATTQVPEPDSRTQLLKKYQKKSEENKEKNDKERLESYYKRNYKDYFELMEGTLKAKDGKLSDTEKGILDWLQKNK

SEQ ID NO: 205322 - protein, 70 aa, Glycine max
  Clone ID: PAT_MRT3847_27434C.1.pep
LLLECVRTQLQGMGLEYHSSHLKHGIPVRFIGSSALQLHRLTFVVCLFKGSNINWHHSFPPCLSATNELC

SEQ ID NO: 205323 - protein, 56 aa, Glycine max
  Clone ID: PAT_MRT3847_27435C.1.pep
ISVYMEGQQRFWRRNSDSDGRIARKTIKILHASFVLLTIEKTKDGSSLCVFGGAFS

SEQ ID NO: 205324 - protein, 47 aa, Glycine max
  Clone ID: PAT_MRT3847_27436C.1.pep
STVQSLSHSCQYSWMHRLQCRPYRPSSQFNTVLLPRPILSLCSPMKG

SEQ ID NO: 205325 - protein, 89 aa, Glycine max
  Clone ID: PAT_MRT3847_27437C.1.pep
AEYMLATVIKEGDSVIVALDSDGNVFVLLGISGAPGSLPEALPVSFGFFAYPMGLFCLTPSRGLFYLSVSLKFFMEYLVGLPKKKPPPQ

SEQ ID NO: 205326 - protein, 76 aa, Glycine max
  unsure (1)..(76): unsure at all Xaa locations
  Clone ID: PAT_MRT3847_27438C.1.pep
SLIHFTFLLPAVLFEKFIQTDHERWEVVQEAHWTRSRNDLFDIFKPTNIFPISNXGTCKRKIHTSKFSGALRNIYF

SEQ ID NO: 205327 - protein, 47 aa, Glycine max
  Clone ID: PAT_MRT3847_27439C.1.pep
MNKISNLSCVRSSDLIDAKLEEHQLCGSKQCPGCGHKFEGKPDWLGL

SEQ ID NO: 205328 - protein, 128 aa, Glycine max
  Clone ID: PAT_MRT3847_2743C.1.pep
ALNYSAPRVRTLAKRKFQCDAGKQYSVTDLNYPSFAVLFESGGVVKHTRTLTNVGPAGTYKASVTSDMASVKISVEPQVLSFKENEKKSFTVTFSSSGSPQQRVNAFGRVEWSDGKHVVGTPISINWG

SEQ ID NO: 205329 - protein, 144 aa, Glycine max
  Clone ID: PAT_MRT3847_27440C.1.pep
MSSSVLTSQGIFTTSRIGSSESPNSGASSSFTQPMEDMNENEETDLLSISWNQDYGCFAAGTSHGFRIYNCEPCKETFRRDLKSGGFKIVEMLFRCNILALVGAVANSHYPPNKVLIWDDHQSRCIGEFTLRSDVRGVKFRRDR

SEQ ID NO: 205330 - protein, 410 aa, Glycine max
  unsure (1)..(410): unsure at all Xaa locations
  Clone ID: PAT_MRT3847_27441C.1.pep
VHLSQTSQGIFPTSRIGSGESPNSGASSXPSLLADMNENDETDLLSISWNQDYGCFADGTSHGFRIYNCEPCKETFRRDFKSGGFKIVEMLFRCNILALVGAVANSHYPPNKVLIWXYDHQSRCIGEFTFRSDVRGVKLRRDRIVXVLEHKIYVYNFTDLKLLHQIETLANPKGLCWHSHYSNTFVLAXDXLHKGQVRVEHFGLNVTKLINAHDSQIACFTLTLDGLLLATASVKGTLIRIFNTMDGSRLQEVRRGVDRAEINSIALSPNVQWLAASSDRGTVHVFSLRVRVSGEDSLTQPNAFQGPALFHQNSSSSLDPLISPNTGANPNSSLSFMRGVLPKYFSSEWSFAQFHLPEYTHFIVAFGSQNSVIIVGMDGSFYRCSFDQVHGGEVVQQEYVRFLKFENRPK

SEQ ID NO: 205331 - protein, 285 aa, Glycine max
  Clone ID: PAT_MRT3847_27442C.1.pep
MAFSRVALLICTVGYFVIASAGNFHQDFDITWGDGRAKILNNGELLTLSLDKASGSGFQSKNEYLFGKIDMQLKLVPGNSAGTVTAYYLSSKGATWDEIDFEFLGNLSGDPYILHTNVFSQGKGNREQQFYLWFDPTADFHTYSILWNPQRIVFSVDGSPIREFKNMESKGVPFPKNQAMRIYSSLWNADDWATRGGLVKTDWTQAPFTASYRNFNANACTMSSGTSSCGSNNPSSSNNNVWLSEELDSTDQERLKWVQKNYMIYNYCSDTQRFPQGLPSECNTA

SEQ ID NO: 205332 - protein, 90 aa, Glycine max
  Clone ID: PAT_MRT3847_27443C.1.pep
MAFSRVALLICTVIGYFVIASAGNFYQDFDITWGDGRAKILNNGELLTLSLDKASGSGFQSKNEYLFGKIDMQLKLVPGNSAGTVTAYYV

SEQ ID NO: 205333 - protein, 63 aa, Glycine max
  Clone ID: PAT_MRT3847_27444C.1.pep
SSGTSSCGSNNPSSSNNNVWLSEEMDSSDQDRLKWVQKHYMIHKCCSDPQRFPQGLPSECNTA

SEQ ID NO: 205334 - protein, 69 aa, Glycine max
  Clone ID: PAT_MRT3847_27445C.1.pep
GEFQLSSKGATWDEIDFEFLGNLSGDPYILHTNVFSQGKGNREQQFYLWFDPTADFHTYSILWNPQRIV

SEQ ID NO: 205335 - protein, 170 aa, Glycine max
  unsure (1)..(170): unsure at all Xaa locations
  Clone ID: PAT_MRT3847_27446C.1.pep
GSSFVKTLIGITIILEVXSSDTIDNVKAKIQDXSXIPTDQQRLLFSGKQLEDGRTLGDFNIQKESTLNLGLRLRAGMQIFAMTLIVMTMTLEVDMLHTIYIRKAKIQDMDGVLPHLQTLIFVGXHLEDGRTLADYNIHKESTHALVKHLRGRVQIVSMTLTGNTITLEVY

SEQ ID NO: 205336 - protein, 65 aa, Glycine max
  Clone ID: PAT_MRT3847_27447C.1.pep
LYPKQTRIDVTITSLDILNHFDHFNSLRYLDRLLVNKNSVTIIYLKENQSCTQKKKKKKKKKAAV

SEQ ID NO: 205337 - protein, 123 aa, Glycine max
  unsure (1)..(123): unsure at all Xaa locations
  Clone ID: PAT_MRT3847_27448C.1.pep
KHGTNRAAAPNNPSLLQPTARPNRQGTRNRGARKPRKQRTNRARNKRRKPNXQKNPTKQRNRPPKPPARPKREKTRKKPPGNTPETRQPQHNTRTPAQGHQKRQQGPAGPQDPAPKRKKGPRG

SEQ ID NO: 205338 - protein, 138 aa, Glycine max
  Clone ID: PAT_MRT3847_27449C.1.pep
KVPGCSSIEVNNVVHEFFSGDGVHSTSTILHHALDELVKELKLAGYVPDTSLVFYADIEDEEIDIVLRYHSEKLAITYGLLNTPPGTTIRVVKNLRVCVDCHNAAKFISLIFGRQIILRDVQRFHHLKDGKCSCGDYW

SEQ ID NO: 205339 - protein, 74 aa, Glycine max
  Clone ID: PAT_MRT3847_2744C.1.pep
NTLACGHNQHLQQHHDYYQIAIAWIKQINYNLLITLALKPFFMRRTLEWLGVGECPRTTWNRFVLKTKAACTFI

SEQ ID NO: 205340 - protein, 116 aa, Glycine max
  unsure (1)..(116): unsure at all Xaa locations
  Clone ID: PAT_MRT3847_27450C.1.pep
PSWGLFFPIKGSGLNNGFXMRSFEGANQNSWGVGFPIGNPQQFAGFDIFLGISPDFAGGGNTFRGAFFVPQGPAGFFENGGSYAGFGNGAFLGGVVCLSPQRELAMPLLLGMVCFF

SEQ ID NO: 205341 - protein, 62 aa, Glycine max
  Clone ID: PAT_MRT3847_27451C.1.pep
RCLNAVFEISIIYTMILGLRVIHSLIKWIALVGSAFTIDISSFPPRDGGSENRIFHNGVTRW

SEQ ID NO: 205342 - protein, 74 aa, Glycine max
  unsure (1)..(74): unsure at all Xaa locations
  Clone ID: PAT_MRT3847_27452C.1.pep
IYNXLPPFXCQXXDXQLQXYQXIWKXRXYLYPRXPXKPXTXDYLLLXPXXDMFXDLAFQIXLFKSXFYLKXIXX

SEQ ID NO: 205343 - protein, 216 aa, Glycine max
  Clone ID: PAT_MRT3847_27453C.1.pep
MAYPNPYPAQPYPSTSVPMPAVPTAVIGPQFCAPYPLDLAVVKKVMTLSDGNFVVTDVNGNVVFKVKGSLMTLRDRRILVDAAGNPLVTLRRKIMTAHDRWQAFRGESTEAKDLIFTLKRSSLIQFKTKLDVFLANNTKEDVCDFKVKGSWLERSCVVYAGESNNIVAQMHKKHTVQSILIGKDQFMVTVYPNIDYAFVVALIVILDEINEDEKED

SEQ ID NO: 205344 - protein, 52 aa, Glycine max
  Clone ID: PAT_MRT3847_27454C.1.pep
FGSWNTWLAFRTPSSIRRFTFCKYMVPMMVTHFEQLVVVAMYSVITAGKVTP

SEQ ID NO: 205345 - protein, 215 aa, Glycine max
  Clone ID: PAT_MRT3847_27455C.1.pep
MAYPNPYPAQPYPSASAPMPAVPSAVIGPQFCAPYPVDLAVVKKVMTISDNFVVTDVNGNIVFKVKGSLATLRDRRVLLDAAGNPLVTLRRKIMTAHDRWQAFRGESTDAKDLIFTLKRSSLIQFKTKLHVFLANNTKEDVCDFKVKGSWLERSCVVYAGESNNIVAQMHKKHTVQSILIGKDHFMVTVYPNIDYAFIVALIVILDEINDDEKED

SEQ ID NO: 205346 - protein, 99 aa, Glycine max
  Clone ID: PAT_MRT3847_27456C.1.pep
DVQLKHEDLRIDTYRSGGSGGQHANTTNSAVRVTHIPTGTMITIQDECSQHMASVSKYLARFTFNIFYWKCASLFCFSTYSLSLSLSISPFFVFIKCFN

SEQ ID NO: 205347 - protein, 83 aa, Glycine max
  Clone ID: PAT_MRT3847_27457C.1.pep
TWDHTSLKRGKKKIECWGKTPPMSRKAGHPKTKKGGKQTPTSPTASNGSKQNPENTTGEGPDWENSRSSKGGEKDVDQGHTRA

SEQ ID NO: 205348 - protein, 52 aa, Glycine max
  unsure (1)..(52): unsure at all Xaa locations
  Clone ID: PAT_MRT3847_27458C.1.pep
EFEKNELILLWMAEDLLKKPRXGRTLEEVGHEYFDDLVFRSFFQLSTIRSSW

SEQ ID NO: 205349 - protein, 50 aa, Glycine max
  Clone ID: PAT_MRT3847_27459C.1.pep
PVSQLVAEQHVKLPPPNHTPISVPLRTTPRQMSTTLQEALELLGKTVIES

SEQ ID NO: 205350 - protein, 55 aa, Glycine max
  Clone ID: PAT_MRT3847_2745C.1.pep
YRCEFTTQGGTSQSDKVVRCCLLRMQQHWSHVTAICTLWTYSCRTLCMIAGFITL

SEQ ID NO: 205351 - protein, 62 aa, Glycine max
  Clone ID: PAT_MRT3847_27460C.1.pep
IAACIVQIPASLAIGNKIARLKHGMQRCAASVQWLNQRIALSRYAHVPLGNFELDWLIFIAD

SEQ ID NO: 205352 - protein, 265 aa, Glycine max
  unsure (1)..(265): unsure at all Xaa locations
  Clone ID: PAT_MRT3847_27461C.1.pep
MAEEINGGTSMDSTESRWVIQDEDEDASDLENFDADLRFRRHAGVVDSEDEDDNAEQRLIRTGPRIDSFDVEALEVPGAHRSDYEDISVGKKIVLAFQTLGVVFGDVGTSPLYTFSVMFRKAPINGNEDILGALSLVLYTLILFPLLKYVLVVLWANDDGEGGTFALYSLICRHANVSLLPNQLPSDARISSFMLKVPSPELERSLKIKERLENSLTLKKTLLIFVLAGTSMEIANGVVTPAMTVLSSVXGLKVGVDAIKKDEVV

SEQ ID NO: 205353 - protein, 75 aa, Glycine max
  Clone ID: PAT_MRT3847_27462C.1.pep
GPPPKKGKIRFVGPITVLPLFIFPQGPGIRALPFFKTKKNFLPSCLGNFWPQKIYNLPPSQGDLSMKKPPERKGF

SEQ ID NO: 205354 - protein, 73 aa, Glycine max
  Clone ID: PAT_MRT3847_27463C.1.pep
IQFNHINQDYNQYNENLKGYKASQVRRTKENKLWIYIRIDTSPAFPSYTLYCISLSFWLFQSLFSHHRYLLIL

SEQ ID NO: 205355 - protein, 128 aa, Glycine max
  Clone ID: PAT_MRT3847_27464C.1.pep
ASLFFFFGGFFPLYGLSFSLSVPLFSFKSSFFSFLKQGEKKTRGGEKNTHKIPQKKNPQPLKKKPGGPKRGPKKKKRVSLYLNFHAKKNLGKIWFPKPEKKPLLTKCPPHTKRVGFFSNLGNKKKNFF

SEQ ID NO: 205356 - protein, 112 aa, Glycine max
  Clone ID: PAT_MRT3847_27465C.1.pep
NLPNKKGQWYPPTKWIIFLVKSLFCFLKVVPALGKEPFLGWKQLVSPRLKVSLRCYPPRVLAVNGVSQPQKKKEINFWSWGDNFFVAKTSWGTLECPGAIKFFFPNFLVSPF

SEQ ID NO: 205357 - protein, 165 aa, Glycine max
  Clone ID: PAT_MRT3847_27466C.1.pep
MATTFASSSPRIATFLSSSSSSSTLRTTTTLPSLQFTSPSKKVILFHNPVLQKHSRFRPLLLPPPPAAAAEDAVDAAEQLYKTTDQGVATVVSALFFIAFVGLSAITIGVVYLAVTDFLQKRETDKFEKEEAAKGKNKNKKKKKVGRARAGPRGFGQKVVEDDDD

SEQ ID NO: 205358 - protein, 162 aa, Glycine max
  Clone ID: PAT_MRT3847_27467C.1.pep
VVVPKHVTNDQQDISRTWMRLLSFVQGMNPQKRETGQHIEDENEHVHLPFILGHSIANIHTLLVDGSFSDASKGEMDAEIVWSSCKNDSDDGDNLRHAKVGRRSEESSACNVTSGNSALASRKFREIKADDSSQLPLPRSVTLLIYECLRAIENWLRVENTP

SEQ ID NO: 205359 - protein, 37 aa, Glycine max
  unsure (1)..(37): unsure at all Xaa locations
  Clone ID: PAT_MRT3847_27468C.1.pep
NTLFPEAQRIVTSNRGQNVFNYLNVASIFVFVXXXXX

SEQ ID NO: 205360 - protein, 154 aa, Glycine max
  unsure (1)..(154): unsure at all Xaa locations
  Clone ID: PAT_MRT3847_27469C.1.pep
MEQYEILEQIGKGAFGSALLVRHKHEKKKYVLKKIRLARQTERSRRSAHLEMELISKLRNPFIVEYKDSWVEKGCYVCIIIGYCEGGDMAEAIKKANGVLFPEEKLCKWLVQLLMALDYLHMNHILHRDVKCSNIFLTKDHDIXRLGGFGLAKM

SEQ ID NO: 205361 - protein, 38 aa, Glycine max
  Clone ID: PAT_MRT3847_2746C.1.pep
NRINGFSCNCGTEHDVYGLSSTVPERAVYFLKQRLELE

SEQ ID NO: 205362 - protein, 87 aa, Glycine max
  unsure (1)..(87): unsure at all Xaa locations
  Clone ID: PAT_MRT3847_27470C.1.pep
MEQYEILEQIGKGAFGSALLVRHKHEKKKYVLKKIRLARQTERSRRSAHLEMELISKFRNPFIGEYKDSWVEKGXYVCINISYCEGG

SEQ ID NO: 205363 - protein, 64 aa, Glycine max
  Clone ID: PAT_MRT3847_27471C.1.pep
KIAASDCLTKNVTRMCNVLWGAPEDMAGDWTPLEYGNSDKPETQEADFVNRVYVLRDLKLHSSD

SEQ ID NO: 205364 - protein, 87 aa, Glycine max
  unsure (1)..(87): unsure at all Xaa locations
  Clone ID: PAT_MRT3847_27472C.1.pep
MARPTHHVIDITGSSRPSTSSSSTPHDRLANDVDFGALNSRTRRRGDTTRSRQHRSPLNSGLWICVELVITVSQIVASGVVLSLXKH

SEQ ID NO: 205365 - protein, 127 aa, Glycine max
  Clone ID: PAT_MRT3847_27473C.1.pep
FFMKRIYRDIFLYISCIPRINIQLFLELTKKFLNKSIYDNEANAERIYKTNQSIIRFICFINSNCIYDNEANAERIYKTNQSIIRFISILHKYFHTRNPNSHNSCDISFLSQAYVFFNLLHTRIINL

SEQ ID NO: 205366 - protein, 109 aa, Glycine max
  unsure (1)..(109): unsure at all Xaa locations
  Clone ID: PAT_MRT3847_27474C.1.pep
ESGQRHHCLLHDSLSTSIHITXLHTIVNVNCLSTLAGCIGLTWNPNDPSSSLNFYPARAPTATIDXNLIVFHVYSFSFFLFCRLSALALKHDMRLSPTTYFQYPICADH

SEQ ID NO: 205367 - protein, 225 aa, Glycine max
  Clone ID: PAT_MRT3847_27475C.1.pep
IIRNALQDTNNVISHCCGERRRVSIGTDIIHDPILLFLDEPTSGLDSTSAYMVVKVLQRIAQSGSIVIMSIHQPSYRILGLLDRMIFLSRGQTVYSGSPSQLPLYFSEFGHPIPETDNRTEFALDLIRELEGSPGGTKSLVEFNKSWQSMTKHHQEKEEERNGLSPTEAISASISRGKLVSGASNTNPYPSSMVPTFANQFWVEMATLSKRSFLNSRRMPEFDGD

SEQ ID NO: 205368 - protein, 75 aa, Glycine max
  Clone ID: PAT_MRT3847_27476C.1.pep
RVNDGVSLLDQQCICRHLYAAHRSQFIISKVFDGLRGVIRLVHTRSAGDYSVMLILGIVVSPFFCNTPHRWFRFV

SEQ ID NO: 205369 - protein, 78 aa, Glycine max
  unsure (1)..(78): unsure at all Xaa locations
  Clone ID: PAT_MRT3847_27477C.1.pep
VSMGDKGFIKPLLEKRGKVHFDKVCIKPGKPFTFAEIDFQSTESTILAFGLPGNPVSSLVCFHLCXVPAIRYPAGWTN

SEQ ID NO: 205370 - protein, 109 aa, Glycine max
  Clone ID: PAT_MRT3847_27478C.1.pep
LLLLINHSFVSVITLILNGLTSVLLTEKPPIFSMTKISPEVEIRMPMEAFPPVSADDVIEQEAFNLSDQHKRISIRDLAKKFDKNLAAAAKLSNEAKLREVASLEGHVL

SEQ ID NO: 205371 - protein, 110 aa, Glycine max
  Clone ID: PAT_MRT3847_27479C.1.pep
MTKISPEVEIRMPMEAFPPVSADVSFISNSFPKYKLDVDNQVLEEPVEDNLGPSLKDVIEQEAFNLSDQHKRISVRDLASKFDKNLAAAAKLSNEAKLRRVASLGGHVLL

SEQ ID NO: 205372 - protein, 85 aa, Glycine max
  unsure (1)..(85): unsure at all Xaa locations
  Clone ID: PAT_MRT3847_2747C.1.pep
LCRLVLISXQASLQGEVLSQAARDATVGIETEPSHPLTADARQGALPKISGAQRTSPLMPFEPNRPSSGRNSFPMXNYXSTLPAX

SEQ ID NO: 205373 - protein, 68 aa, Glycine max
  unsure (1)..(68): unsure at all Xaa locations
  Clone ID: PAT_MRT3847_27480C.1.pep
LLGRCVEEFXKKGLEFDLLKEVDALRRAKSLRVENKEVRKWSSRDLVSLFFFSMACFSLALTRVILCT

SEQ ID NO: 205374 - protein, 76 aa, Glycine max
  Clone ID: PAT_MRT3847_27481C.1.pep
MTKISPEVEIRMPMEAFPPISADVSFISNSFPKYKLDVDNQVLEEPVEDNLGPSLKDVIEQEAFNLSDQHKRISVR

SEQ ID NO: 205375 - protein, 139 aa, Glycine max
  Clone ID: PAT_MRT3847_27482C.1.pep
NGKKLTLTTDPIQTVSGLGSHVETLLRKSNTDFNVVISQMNGKDHSSHSTHSFNVGRMRIKLCRGWITKAREIYSPSMQLCGVRSDIANAAKALFWQARKGLSFVLTFESERDRNAAIMVARKYALDCNVVLAGPDDLV

SEQ ID NO: 205376 - protein, 490 aa, Glycine max
  unsure (1)..(490): unsure at all Xaa locations
  Clone ID: PAT_MRT3847_27483C.1.pep
MTKISPEVEIRMPMEAFPPVSADVSFISNSFPKYKLDADNQVLEEPVEDNQGPSLKDVIEQEASNLSDQHKRISVRDLASKFDKNLAAAAKLSNEAKLRDVASLEGHVLLKKLRDALESLRGRFAGRNKEDVEKAISMVEALAVKLTQNEGELIQEKFEVKKLVNFLKQASEDAKNLVNQEKSFACAEIESARAVVLRIGEALEEQEKASQASKPQDVDGLVEEVQEARRIKLLHHPSKVMAMEYELRALQEKFGEKSIFSIKLQKELIMSKRNEENKSCLYMLDGSEALGSYLRVQPCSDEVPQVSKCSKPQDAXSSEGSWREVISGANKSIYAPDPSDVGRILQVDIVSNGKKLTLTTNPIQTVSGLGSHVETLLRKSNTDFNVVISQMNGKDHSSHSTHSFNVGRMRIKLCRGWITKAREIYSPSMQLCGVRSDVANAAKVLFWQARKGLSFVLTFESERDRNSAIMVARKYALDCNVVLAGPDDLV

SEQ ID NO: 205377 - protein, 54 aa, Glycine max
  Clone ID: PAT_MRT3847_27484C.1.pep
VQWTSYPPSKSGDSSRLGPWLVAIECISYLDNGSEIRNGVHSMYTGNTRRVYPS

SEQ ID NO: 205378 - protein, 254 aa, Glycine max
  unsure (1)..(254): unsure at all Xaa locations
  Clone ID: PAT_MRT3847_27485C.1.pep
MTKISPEVEIRMPMEAFPPVSADVSFISNSFPKYKLDVDNQVLEEPVEDNLGPSLKDVIEQEAFNLSDQHKRISVRDLASKFDKNLAAAAKLSNEAKLREVASLEGHVLLKKLRDALESLRGRFAGINKEDVEKAISMVEALAVKLTQNEGELIQEKFEVKKLVNFLKQASEDAKKLVNQEKSFACAEIESARAXVVLRIXEALEXQXKASQASKXTDVDGLIEEVQEARRIXMXHQPSRVMAMEYELRAFRDQ

SEQ ID NO: 205379 - protein, 281 aa, Glycine max
  unsure (1)..(281): unsure at all Xaa locations
  Clone ID: PAT_MRT3847_27486C.1.pep
MIPDSHNSFKPMFKNCLDWLLNNQNQQGFWGECDAXGKPTLETLPATLASIVALKKWNTGALMIDTGLVFIETNIEKLLKDIDNNCPRWFRIVFPAMVQLSESVGLEIVFPDAVTGSVSRIFHRQQYLLNKEELVGKHCFPPLLSYLEALPPTYTISEEDIRSNLSDDGSVFQSPSATAKAFMATGKIECLAYLQSLIQRCPDGVPQTYPMDEELIKLCMVNKLQRLGLAEHFVEEIDEILAKVYRNYVEQESWVKPTNMVAAQLSQDSLAXHLLRMHGYI

SEQ ID NO: 205380 - protein, 67 aa, Glycine max
  Clone ID: PAT_MRT3847_27487C.1.pep
SLDDLLIPSLQSGDSLFDVDTVHRLLVNFLQRVEEEETEDYGYESDGFCSSGHGSLLKVGQLIDAYL

SEQ ID NO: 205381 - protein, 33 aa, Glycine max
  Clone ID: PAT_MRT3847_27488C.1.pep
ETHSNTKRLGPHQIQESHLIQVKNKSLNSYQCG

SEQ ID NO: 205382 - protein, 72 aa, Glycine max
  Clone ID: PAT_MRT3847_27489C.1.pep
LPHSNLSFSFLTPPLLKTTLNNYIIIYNFNNFIYINSHLPSILILLFFIFFHLHSFHLFFYLLHNILYFYPH

SEQ ID NO: 205383 - protein, 43 aa, Glycine max
  Clone ID: PAT_MRT3847_2748C.1.pep
NLFYFDGYFALGRTPQTFNLLFKTSNLTMLSKPIITGVSLNTM

SEQ ID NO: 205384 - protein, 39 aa, Glycine max
  Clone ID: PAT_MRT3847_27490C.1.pep
RFCTNYRALNKETIPDKFPIPVIEELLDELKGICFGFLR

SEQ ID NO: 205385 - protein, 64 aa, Glycine max
  unsure (1)..(64): unsure at all Xaa locations
  Clone ID: PAT_MRT3847_27491C.1.pep
FWGFEAHNVVPDILTMTTGIANGIPLDAAVTTHXIEEVFPLLNYFDTFGGNPVYTAARLAVLIV

SEQ ID NO: 205386 - protein, 95 aa, Glycine max
  Clone ID: PAT_MRT3847_27492C.1.pep
RGVFPPGHLPVCPPKTGPFIFGHFTGSQFRIPFYVLGFSNAKWGSLCPTPGFGFSPPPPPPPPPPPPPPPPPPPPPTTGGRHTVMTGNLPWNGNR

SEQ ID NO: 205387 - protein, 67 aa, Glycine max
  Clone ID: PAT_MRT3847_27493C.1.pep
LFFFFFFFFFFFFFSFFSKEIKTSLEFGANPNFAVLMAHHDHHPGQLTDLQFEAPTEFALQFRASSN

SEQ ID NO: 205388 - protein, 55 aa, Glycine max
  Clone ID: PAT_MRT3847_27494C.1.pep
LKLAKISGLHRLHCPTTFDRESLSSHKSTFLTYERTTLQRYIVAPSISFAFRQYP

SEQ ID NO: 205389 - protein, 155 aa, Glycine max
  Clone ID: PAT_MRT3847_27495C.1.pep
LEPQHASPISHFHFSPLSSLCPGNSNTPFPFSRRRRKRLFANFGSRKFRRKCTVRFCAVPSSDNNHPNWNADFANSARRTATTFVLKRISNNNNNNNNNNDNDVIVTELQAPPPSVQLGSNFTGFSEDPIGDKLRTQLGVIHPIPLPSELTGTSS

SEQ ID NO: 205390 - protein, 173 aa, Glycine max
  Clone ID: PAT_MRT3847_27496C.1.pep
MASIHANLVPNLSFNHFQTPPSSYLVGAGIVQRGVSLRNCRRKVPCIIKCEKKDDEVEHIQNVSVERPPYYSYLDSTSGQLEPASGARASIPGQEYWPEGTASRVRAARAPAPTAESSTSPMSPSYGAKPGSRRKNYKTTPVVFCLITQPILVSNASGSRGSSEVLIESLEES

SEQ ID NO: 205391 - protein, 58 aa, Glycine max
  Clone ID: PAT_MRT3847_27497C.1.pep
IGEKMYKKIICIYILFLPLYRSHERKVKNLTTINNIGFTGIERKSFFEPNQKKLFFIL

SEQ ID NO: 205392 - protein, 48 aa, Glycine max
  Clone ID: PAT_MRT3847_27498C.1.pep
VHGFMTVNNGEKMSKSRGTGLDPLKYLSLGMNPEWLRYYIAAKLNSHV

SEQ ID NO: 205393 - protein, 85 aa, Glycine max
  Clone ID: PAT_MRT3847_27499C.1.pep
KVHDWTRAHACSLIVVLVGWPVAENRITGVNCGSESTAALADDVASKNDGHTLTHMPSVNFSKLFNSITILFWIIVTGTPLVCFF

SEQ ID NO: 205394 - protein, 80 aa, Glycine max
  unsure (1)..(80): unsure at all Xaa locations
  Clone ID: PAT_MRT3847_2749C.1.pep
XCIFSLDEVSAGEKFCIGDMLIMCSHLIQKRITMSSLLLPTEILEPCAVKDLSWNVSCLYXALSLLSFPSKVDYPHFQNH

SEQ ID NO: 205395 - protein, 48 aa, Glycine max
  Clone ID: PAT_MRT3847_274C.1.pep
LAMTDGCFIGKQIVRPILINNSTHGERKGDYKTGPLLFFFLPRGGTSD

SEQ ID NO: 205396 - protein, 59 aa, Glycine max
  Clone ID: PAT_MRT3847_27500C.1.pep
HKILWGTCCSYIPQKNTIFFVYVSHLCCIKPLVNVIFVARGQKPSYRMCLIDDMNFSES

SEQ ID NO: 205397 - protein, 51 aa, Glycine max
  Clone ID: PAT_MRT3847_27501C.1.pep
GIDSNTSSFRVLLPSGRTLDYTCPMSFAPSSCPPLVVFKPNTISYLISLRY

SEQ ID NO: 205398 - protein, 41 aa, Glycine max
  Clone ID: PAT_MRT3847_27502C.1.pep
TDCYTNLILLILNTYTVSRIQLYKHHSFKITQSYIASKSSA

SEQ ID NO: 205399 - protein, 77 aa, Glycine max
  Clone ID: PAT_MRT3847_27503C.1.pep
YRKLEDANYNQSLICNYRCIYISLSQLVLSNYFRYSMLKIEHYFQNGNFKSRLSTISTKSILIKTFNIGSPFCRLLA

SEQ ID NO: 205400 - protein, 90 aa, Glycine max
  Clone ID: PAT_MRT3847_27504C.1.pep
MGISLLQQKRSKSEIGILRRKNLMECQARRKPKKRRVGCKVNSSFNQCGEWHPFKKDLGSSPTFVCAIICVFIFKQLVALLILYYYLMGL

SEQ ID NO: 205401 - protein, 62 aa, Glycine max
  Clone ID: PAT_MRT3847_27505C.1.pep
YYTPCGLDEFATVRCYLKQPRSTLTHVTHQYDSSLTMNLPSFSFFPSGLSYVIMIFTIFSFS

SEQ ID NO: 205402 - protein, 51 aa, Glycine max
  Clone ID: PAT_MRT3847_27506C.1.pep
SSVIQLSLPRKYSNLLPKFYIHLSFYARSLLKYSTYLKQRKIPARESVSNQ

SEQ ID NO: 205403 - protein, 107 aa, Glycine max
  unsure (1)..(107): unsure at all Xaa locations
  Clone ID: PAT_MRT3847_27507C.1.pep
WXGRSVGAFSLFRRLAGGGCAAGRFGWXPPGFSRXGGCLSAACVLFLGGPVGGVCCGLPAFVGLGPFGRPLWVVFFASFFFRAPLGPLLWSWVWRFCVWVVKGILGR

SEQ ID NO: 205404 - protein, 51 aa, Glycine max
  Clone ID: PAT_MRT3847_27508C.1.pep
RHWNFVGRKPFTGNGSRLKKSLFFFKRRPLDWLWKDCRKTNLSKCKRFIVF

SEQ ID NO: 205405 - protein, 172 aa, Glycine max
  unsure (1)..(172): unsure at all Xaa locations
  Clone ID: PAT_MRT3847_27509C.1.pep
MEKRVAILQEWFDRVDSEKSGSITAVQLKTALAVGNLEFPLSVVQQMIRMYDFDRNGTMSFQEFVSLNNFLLKVQHAFSXSREGSGCGFLVPDDVFEALGKIGFMLDSPAFYSVCESFDQSKNGRFRLDDLISICIFLQSARNLFNSFDTAKQGRVTLDLNQFVYCTANCRI

SEQ ID NO: 205406 - protein, 54 aa, Glycine max
  Clone ID: PAT_MRT3847_2750C.1.pep
LISSSKKQSLSIVSSCVGLLESFSTIFISKKSATSLHSCNLIQIYLAAFINPHL

SEQ ID NO: 205407 - protein, 181 aa, Glycine max
  unsure (1)..(181): unsure at all Xaa locations
  Clone ID: PAT_MRT3847_27510C.1.pep
DDRRGKRKRMENRVILQEWFDRVDSEKSGSITAVQLKTALAVGNLEFPLSVVQQMIRMYDFDRNGTMSFQEFVALNNFLLKGWMRHNTXRFIDAGXGFLVPDDVFEALGKIGFMLDSPAFYSVCESFDQSKNGRFRLDDLISICIFLQSARNLFNSFDTAKQGRVTLDLNQFVYCTANCRI

SEQ ID NO: 205408 - protein, 131 aa, Glycine max
  Clone ID: PAT_MRT3847_27511C.1.pep
MHRSCTFVDGLGGTFDVDVEDLETSRADPLAKIVDGINQSEARRTALMLFCFVYKDANAKDAYITSIDRKGFDVLAKVSSPVLKDGIDGYQWKEFRFMFKEEANDVEMFCSQLVEMEEEVINKVSTSSGLK

SEQ ID NO: 205409 - protein, 47 aa, Glycine max
  Clone ID: PAT_MRT3847_27512C.1.pep
QRRGFLKLTTTQWNHHGNCLPNANPTTSLPSGRGLVTPNVLSAPSAH

SEQ ID NO: 205410 - protein, 41 aa, Glycine max
  Clone ID: PAT_MRT3847_27513C.1.pep
HASDEKKCLFLEFFIYPGGTQPLKTQVLDQMVFKCKLISIG

SEQ ID NO: 205411 - protein, 55 aa, Glycine max
  Clone ID: PAT_MRT3847_27514C.1.pep
SCLNLVEESLVLCNCQSMLNNSYGAVNFNSSVCYVYFHISNHCACVTASQGCIHE

SEQ ID NO: 205412 - protein, 64 aa, Glycine max
  unsure (1)..(64): unsure at all Xaa locations
  Clone ID: PAT_MRT3847_27515C.1.pep
XVGXXXXXXAXXWXXGDWRXXIFXNAXGXSLKESFLRGKXTSGDGTSGNGRERRXKRRHLSLGX

SEQ ID NO: 205413 - protein, 82 aa, Glycine max
  Clone ID: PAT_MRT3847_27516C.1.pep
TRNEGKWFGSFFPCLSKHSIINKFFPRIIKLFKFCILYTLILFRKHVLSIYLRWTTLVSICFRWTTLVSICFRSIFYLLDVL

SEQ ID NO: 205414 - protein, 88 aa, Glycine max
  Clone ID: PAT_MRT3847_27517C.1.pep
TYRYKNTSGWGGTTDRQCRQHVNNMYIRGIYYIPFENHYLSEGTTTTLVKKGRLDRTYAMIGGDQGMHGIIKRFKTVTSVNCVAGRFK

SEQ ID NO: 205415 - protein, 49 aa, Glycine max
  Clone ID: PAT_MRT3847_27518C.1.pep
YLDNRQLIECIRLWSTSYAYCCCYNYWNWTLTVSYCMISNLHKIDQWKA

SEQ ID NO: 205416 - protein, 96 aa, Glycine max
  unsure (1)..(96): unsure at all Xaa locations
  Clone ID: PAT_MRT3847_27519C.1.pep
TESSPYSSTMLSACKCVFLLIVQFRQFGSPQMCCVSTFSLYAHVYWKFFDSLYLSDVIPYSLSSRXLTMSVSIGITGMHPWMCDSEVILMLDERLY

SEQ ID NO: 205417 - protein, 54 aa, Glycine max
  Clone ID: PAT_MRT3847_2751C.1.pep
REAVMLWQAKVSVQWLKLQQNISILSVRSWQNIKMSTLKMRRDTASRGHGSRLT

SEQ ID NO: 205418 - protein, 86 aa, Glycine max
  Clone ID: PAT_MRT3847_27520C.1.pep
LSYLLQGQAALISASASLTTYKTMDSGVDYGTHSLVNNILEIELTSEPLSLEPAEESCDLQSVSEQDPLKSLTERVLDTLASGGSN

SEQ ID NO: 205419 - protein, 68 aa, Glycine max
  Clone ID: PAT_MRT3847_27521C.1.pep
RWRLFSAHQVLIPSTIYPDIKFDACALAFNSLHPDIILEVYIQKYKHLLTYIYIYIYIYDMCVCVVII

SEQ ID NO: 205420 - protein, 101 aa, Glycine max
  unsure (1)..(101): unsure at all Xaa locations
  Clone ID: PAT_MRT3847_27522C.1.pep
XGXAXXVXGRVFXLXNRXRHXXSPXLXYHTRXGTGXLNXLYQXLXRCSRXXQXLXXLXTGXXXRXXXXXTVQXLRSRXXXGXPPWXXAXEXXTEXTYEXXR

SEQ ID NO: 205421 - protein, 51 aa, Glycine max
  Clone ID: PAT_MRT3847_27523C.1.pep
DKQNLKLDIPDAHHNILDAISILLSERQAIIGLSSPKGYMNNFYSYITSLS

SEQ ID NO: 205422 - protein, 100 aa, Glycine max
  unsure (1)..(100): unsure at all Xaa locations
  Clone ID: PAT_MRT3847_27524C.1.pep
ARNSARGRQLGEENEEFALRVQQLVAKELGQIGTRLTPADKAEHMKRQRHPRLRPQSVQSSFPSPPSPSSDVQXTILAQRVKEVLPHVPLXLQRDLARTG

SEQ ID NO: 205423 - protein, 84 aa, Glycine max
  Clone ID: PAT_MRT3847_27525C.1.pep
FSSLDSFPQLEFQRKPNNYLVLLFSLALIIAFDFVMMSSRACKPFSSSLLAASKLLLKSSSRAPPLQISALVGSMVPKIQGNND

SEQ ID NO: 205424 - protein, 57 aa, Glycine max
  Clone ID: PAT_MRT3847_27526C.1.pep
VTFHICCSCAWTLLRYAETIVTHKSVSPAGDFRLHWYMYVQTCVTDPGLAASTWLHR

SEQ ID NO: 205425 - protein, 79 aa, Glycine max
  Clone ID: PAT_MRT3847_27527C.1.pep
HFRIPSKVHPSHIVHLFVRLTFCYFYSASSLAPNIGPLSLSPKKIRKYITKETPNDLKRLPVTIKLTLQNLQSKVTIVP

SEQ ID NO: 205426 - protein, 58 aa, Glycine max
  Clone ID: PAT_MRT3847_27528C.1.pep
VNDPYLQSQNSPSKLLFFRTLSRLNLECIIGGSHFSPIYSHALLASSTKKMCAFHGSF

SEQ ID NO: 205427 - protein, 80 aa, Glycine max
  Clone ID: PAT_MRT3847_27529C.1.pep
MDGNNYNSWADQWDDGPDPVMVGSNNKNSNDNTAKYKQKLGEGFGKTKAVASTGVKKLKDGTSVGLHWIKTKYSKATQKH

SEQ ID NO: 205428 - protein, 75 aa, Glycine max
  Clone ID: PAT_MRT3847_2752C.1.pep
DVREPESIVHSGRHSSKRSSFLRSISQESLGVGNSGRHSFSASFGVPTSVGFIEPAGEGPQDPPSTAPSPPEVPL

SEQ ID NO: 205429 - protein, 75 aa, Glycine max
  unsure (1)..(75): unsure at all Xaa locations
  Clone ID: PAT_MRT3847_27530C.1.pep
IVCERLRRQSPHSNLCGVPVQYKHLSELLKRLLSXESTMSLLSTLGSGKTMSISHALKELMEIDEVSENVLQVHL

SEQ ID NO: 205430 - protein, 76 aa, Glycine max
  Clone ID: PAT_MRT3847_27531C.1.pep
RAGWSFCRGAGPWCSRRPLFRFLRAPLFAESRLGPGPGLVRYVMHGARFVVQTPRSPGLKKSLMKITKKEKKKGRQ

SEQ ID NO: 205431 - protein, 49 aa, Glycine max
  Clone ID: PAT_MRT3847_27532C.1.pep
KKKAQMLVAKNAKLQSRIFLFFKAPKETVFKLKKTPGHEQLQSMKLQGF

SEQ ID NO: 205432 - protein, 86 aa, Glycine max
  Clone ID: PAT_MRT3847_27533C.1.pep
VVGSSYYKTIKNGFNDPPFDIQPRVSFKYAASRGVYGTPFFYVNGFLLPDTGAAVDYKTWRKVIDPLVGAKNKKSIQNEESLHFFL

SEQ ID NO: 205433 - protein, 92 aa, Glycine max
  Clone ID: PAT_MRT3847_27534C.1.pep
KNDALQVSTAASHKTSGQKENNYIFSLHTRGRFGTSFSIRCKIATITFSSSFASQTQYEALTAPYLFIRRYRKRGKEYQGWKKVEKLNKKRD

SEQ ID NO: 205434 - protein, 156 aa, Glycine max
  Clone ID: PAT_MRT3847_27535C.1.pep
GGWMFLLPAVGALAALMLHAAQRGRDMFVRETIRNTNINPQNMILKLKQRQHRPVTPQMFKIPKGFKVGEGRATTRTTPEPGSEHPTAKTMHTSMAPYKSVTPWPPQAKINHNHHRPGPAPLRTHTPSKGACACLRLERTRTPTSARRSDRYLAHS

SEQ ID NO: 205435 - protein, 93 aa, Glycine max
  Clone ID: PAT_MRT3847_27536C.1.pep
QQGEHETVHRDLILAFGSWEFSPLDLENPFPNNEGSVHIWQGDEDLIVPVKVQRYIAQKLPWIQYHELQGAGHLFPHVDGMSDTIIKSLLSGK

SEQ ID NO: 205436 - protein, 80 aa, Glycine max
  Clone ID: PAT_MRT3847_27537C.1.pep
GYGNIMVFHLRLVVSFKTRKGKQGSKGLSKELIQGKSIWLEAYKNKIALIISKYACELGRINKNQAKAIVQAINGAKHTK

SEQ ID NO: 205437 - protein, 58 aa, Glycine max
  unsure (1)..(58): unsure at all Xaa locations
  Clone ID: PAT_MRT3847_27538C.1.pep
XKKMXTNIXQKYIPLLLNHXSYLPFSHLLXYGVLGDFTVSMFDDLGISXXLANKLDVF

SEQ ID NO: 205438 - protein, 49 aa, Glycine max
  unsure (1)..(49): unsure at all Xaa locations
  Clone ID: PAT_MRT3847_27539C.1.pep
VVXXXXDLIXXVEIERXXDLCAETXSWFPSNXKGFCXEQQRVESXKLMQ

SEQ ID NO: 205439 - protein, 51 aa, Glycine max
  Clone ID: PAT_MRT3847_2753C.1.pep
SSFFLTKNLWIMGEISAGETMLSINIIKHISLRLQIILYFTPQVTAYTRTK

SEQ ID NO: 205440 - protein, 43 aa, Glycine max
  Clone ID: PAT_MRT3847_27540C.1.pep
ELTFLSHSRRAITKGYEPIHKTLLKIHGIFHLGKRLLRDVRTD

SEQ ID NO: 205441 - protein, 46 aa, Glycine max
  Clone ID: PAT_MRT3847_27541C.1.pep
VNITETMWRGLVHITFQGSCLQRAFQYRVDYGSKYGPPLQRPSVLE

SEQ ID NO: 205442 - protein, 242 aa, Glycine max
  Clone ID: PAT_MRT3847_27542C.1.pep
YRLQVPGYRNLPGSTHASEQLDCDQLSGWSCPVVGQQNHLSALSFLKSSTLNNSIQNSCHHESSGSDSHGICDKMDATDVLMKTSHEVVISSHMSNPLNPENSSCLCKFSIQDRESLIDSCSGMGHFLKKSFDNDGTVEPKVTEKHLGPLKYSMLCHDINTISNTLSGEATKEDQPDNNTLTSHLYGFQPQKYGHQCNHPSINPLSVNPMLTRNSILHLMGRNGGKYQADHEQTLPYFNCST

SEQ ID NO: 205443 - protein, 49 aa, Glycine max
  unsure (1)..(49): unsure at all Xaa locations
  Clone ID: PAT_MRT3847_27543C.1.pep
XILVIYIVFNFFSFSKAIEWKNILSIHLPTRGPFYLAGVTEELLKCIQP

SEQ ID NO: 205444 - protein, 170 aa, Glycine max
  Clone ID: PAT_MRT3847_27544C.1.pep
AFPVHRRLDTVITICYEAQSRIRDPVYGCVSHIFALQQQVVSLQAELSYLHGHLAQMELPQPPPPLPLPQTMAAPPPGFSIADLPSATVAAAAATTYDLSSLFDPLGQTSWAMQQRAIDPRQYNMAAAPSTATTGADIQAVASDIPHRHGSPPSPPASSSNASPSLSLSK

SEQ ID NO: 205445 - protein, 109 aa, Glycine max
  Clone ID: PAT_MRT3847_27545C.1.pep
SATLALRLPQPMFSNNNRGQIWSDFMAASLGGVWIWWGGASGPDMELRSMSSDHGRHCAKTWRRDEEMHDMKGRGTPVSDQRLELRDSVTGGAALCQEWPWWRTGADAW

SEQ ID NO: 205446 - protein, 38 aa, Glycine max
  Clone ID: PAT_MRT3847_27546C.1.pep
PYISCLLYMRPGYSHGVIRERILTGQGRMLRKQQIIGL

SEQ ID NO: 205447 - protein, 68 aa, Glycine max
  Clone ID: PAT_MRT3847_27547C.1.pep
CVIRTRRSIGHSFRTEQATDGYDIGSQAMELILIQGPMQMRIREPEEFGLVIIGSSVIGTKESPGVAP

SEQ ID NO: 205448 - protein, 106 aa, Glycine max
  Clone ID: PAT_MRT3847_27548C.1.pep
SFGSLGQRLLCVFLSEKTTVAKPTMNSISFSSSTNPQSLKSPFHRQSQARSLSLSLALSFSHLKNFLKKPHAFPFLLSGILLLTWIFLRNQHSSSQFSSRYHQATD

SEQ ID NO: 205449 - protein, 32 aa, Glycine max
  Clone ID: PAT_MRT3847_27549C.1.pep
IEDDKTIIPRNSLVDVNQSGLLMVIIIDITPR

SEQ ID NO: 205450 - protein, 72 aa, Glycine max
  Clone ID: PAT_MRT3847_2754C.1.pep
APKEMDVSIAILLHITRSTRNQRLRFILRKKFENPSLTYWVLASLPLTVLFPSLLRFLSHSYCSLSSLNIKN

SEQ ID NO: 205451 - protein, 75 aa, Glycine max
  Clone ID: PAT_MRT3847_27550C.1.pep
RAVFFSRYTLFCAQDFPHLLFFPLFLCSPSVESMGAEVKIWNPVEVALQALHDYSFQIYSSHFTIDPFLELFLMA

SEQ ID NO: 205452 - protein, 52 aa, Glycine max
  Clone ID: PAT_MRT3847_27551C.1.pep
NHLQCPYDLNLISHNNPSFYDHSIPKSLKTSTNINLPLPSFQDKDTHKQSHR

SEQ ID NO: 205453 - protein, 59 aa, Glycine max
  Clone ID: PAT_MRT3847_27552C.1.pep
PRWLLRTDEVLGAHRSPPLGVASTRTVPMSRSVLPFGLFPRYFFNIPPVFSPGVGGQEG

SEQ ID NO: 205454 - protein, 122 aa, Glycine max
  Clone ID: PAT_MRT3847_27553C.1.pep
MMNPEMQGNMPPNMGMPPNMGMPPGMPPNMGMPPGMTMMGMPPNMGMPMMMPPGGRPPFPPGGMPHGMRPGPFPPGMAMPPGMGMPPFGMPPGMFPPGMLPPGMQPPPFQPQQPPTQPPPQR

SEQ ID NO: 205455 - protein, 55 aa, Glycine max
  Clone ID: PAT_MRT3847_27554C.1.pep
LQLIKQRACLGWNLYLAPPGVCKPRPTCSLVGDHIGKGLISQQGGIFIGKKSCRR

SEQ ID NO: 205456 - protein, 50 aa, Glycine max
  Clone ID: PAT_MRT3847_27555C.1.pep
WLLVKGLLHNWYYIIRQCVFVKSYHDQATVPYLHLSVRTHNSYGRAESAA

SEQ ID NO: 205457 - protein, 57 aa, Glycine max
  Clone ID: PAT_MRT3847_27556C.1.pep
HLLQPKLATEDFLLAHTSILFEEVFIGTLISRDITFVRIYRDQLDSTRRQLDGLSVT

SEQ ID NO: 205458 - protein, 78 aa, Glycine max
  Clone ID: PAT_MRT3847_27557C.1.pep
RSMMQAGFPNDLMVWNAFPKQRVFGSKPAEREKINDATDFMIYPGNPTTISPTSYPQCDWDYMSPYKSYDQMILQVKS

SEQ ID NO: 205459 - protein, 55 aa, Glycine max
  Clone ID: PAT_MRT3847_27558C.1.pep
EMMLHNVHIELDNSYDHYQLRTQASKVESNCMECVSYMWIRASRMHFLFRVELKI

SEQ ID NO: 205460 - protein, 101 aa, Glycine max
  Clone ID: PAT_MRT3847_27559C.1.pep
MGGFFSSIFSSLFGTREMRILILGLDGAGKTTILYRLQVGEVVTTIPTIGFNVETVTYKNLKFQVWDLGGQTSIRPYWRCYYSNTDAVIYVVDSCDRDRIA

SEQ ID NO: 205461 - protein, 67 aa, Glycine max
  Clone ID: PAT_MRT3847_2755C.1.pep
VSKNPELILGIGQYSKSHMYYNRGIWAIKAKYGGVLSRLDAKLKPDATAEEPIKFYPADDIKKPPVN

SEQ ID NO: 205462 - protein, 43 aa, Glycine max
  unsure (1)..(43): unsure at all Xaa locations
  Clone ID: PAT_MRT3847_27560C.1.pep
GGXGLGATIALLSCDLAVMGSNPGNRLSFVGLRLSASTLPRSH

SEQ ID NO: 205463 - protein, 59 aa, Glycine max
  Clone ID: PAT_MRT3847_27561C.1.pep
MGANRVDEDYDYLIKAVLIGGSGVGKAYILVRFTRGELRPGLKTTIVVEFASRKIKVDL

SEQ ID NO: 205464 - protein, 316 aa, Glycine max
  Clone ID: PAT_MRT3847_27562C.1.pep
MLLLIRMQGRTRGAKKMLAPKTHTCEALSLSLPQPSSPPPEPVNILFRRRQLLSATASTISFNFTVPFTTSLSMSEPVASAGGLFQMPPPRLINRYFLVRAGESEFESMGVINTNPVEKTSVDSGLSERGKKQSIKSAFDLKEMGACDKGCWIWSAITQRAYQTAEIIASVNGVTRSYIVPEYSFLDARGLGAFEGKKLEYVSEVYASDGISPNIKPPPINDGTPNESVADVFVRVTQLMSILETQYSGDTVIIVSPDSDNLTILQAGLIGLDLRRHRELSFAPGEVRFVDPNDIPVYKQPASAIYKCSKNPPNCN

SEQ ID NO: 205465 - protein, 102 aa, Glycine max
  Clone ID: PAT_MRT3847_27563C.1.pep
MKPPPINDGTPNESVADVFVRVTQLMSILETQYSGDTVIIVSPDSDNLTILQAGLIGLDLRRHRELSFAPGEVRFVDPNDIPVYKQPASAIYKCSKNPPNCN

SEQ ID NO: 205466 - protein, 79 aa, Glycine max
  Clone ID: PAT_MRT3847_27564C.1.pep
NYFLLTRYKLYRGLGEETCKLWTYEHHALQYYQRHLPCNSQCSLRTAIVVRMKTPLRYERIAFISIMMELAKQVLLDRQ

SEQ ID NO: 205467 - protein, 67 aa, Glycine max
  Clone ID: PAT_MRT3847_27565C.1.pep
VVQLVSTNQTRELENRCSFNLLTESNYKKINKYSSQNLAYRIAHVLMVSTEKQKTSYPIAQRLFAMR

SEQ ID NO: 205468 - protein, 364 aa, Glycine max
  Clone ID: PAT_MRT3847_27566C.1.pep
MSNVLAGEESEKVVTYGWAARDTSGILSPFHFIRRANGDNDITLDVLYSGICHTDLHMVKNDFRISIYPMVPGHEIVGKVTKVGRRVTKFSVGDIAGVGGSVGSCGSCSDCSNGFYVYCPKMILTYSAHYYDGTITQGGYSNNIVVDQNFVVLIPKSLPLDGAAPLLCAGITVYSPMKYYGLAQPGLHLGVVGLGGLGHVAVKFAKAFGMHVTVISTSPSKKEEALEKLGADEFLVSLDQQQLQDARGTMDAIIDTVSANHSIQPLIALLKTSGKLILVGGPPSPLEVLAMPLLLGRKMIAGSAGGGREEIQEMMDFAAKHNITADVEVIPMDYVNTAFERLEKNDVKYRFVIDVANTISCMSN

SEQ ID NO: 205469 - protein, 256 aa, Glycine max
  Clone ID: PAT_MRT3847_27567C.1.pep
PTRPFVLYSGNHERDWPGTGSFYENMDSGGECGVLAQTMFYTPASNRAKLWYSIDYGMFRFCIADTEHDWREGTEQYKFIEHCLASVDRQKQPWIIFLAHRVLGYSSCICYAEEGSFAEPMGRESFQKLWQKYKVDIAIYGHVHNYERTCPIDQNICTNEEKHHYKGRTLNGTIHVVAGGGGASLSAFTSLKTKWSIFKDYDYGFVKLTAFDHSNLLFEYKKSRDGKVYDSFKISRDYRDILACTMDSCPSITMAS

SEQ ID NO: 205470 - protein, 95 aa, Glycine max
  Clone ID: PAT_MRT3847_27568C.1.pep
TILIYIIKSIMLGRFGLYVSVHLIFGLYVSVPLILLFECGVTLKNHPRRETTKIEGQINSKLLIISELLNIRVDHLSILSNPSYWIDLDFTYLCL

SEQ ID NO: 205471 - protein, 59 aa, Glycine max
  Clone ID: PAT_MRT3847_27569C.1.pep
TATALNYINPLYICMYLYMPREPTLKGVCRRSRASDKIGIKLCHEERNGVSSIYNVGTE

SEQ ID NO: 205472 - protein, 64 aa, Glycine max
  Clone ID: PAT_MRT3847_2756C.1.pep
LFLFLTSDFLVFSVCSHFLYFNNLFLLLLGSMIVFTYQYNFFLCVLSLLICLLKNFPKCHLSHN

SEQ ID NO: 205473 - protein, 143 aa, Glycine max
  unsure (1)..(143): unsure at all Xaa locations
  Clone ID: PAT_MRT3847_27570C.1.pep
LNCXXXXSQILXXNSGVFKDIVLKRNXXXGPVLVYPMNRNKWYDRMSASIPDEEVFYTVGFLHSSGFDTWKAYDAQNSEILEFCRDAGIKVKQYLPNHSTQEDWTNHFGAKWIKFLERKHQFDPRMILSPGQKIFHKQLQPVF

SEQ ID NO: 205474 - protein, 73 aa, Glycine max
  Clone ID: PAT_MRT3847_27571C.1.pep
PCGCVLVVRLQPQPQARRRRRRHAAVVRGAALERHCRSGGNGCVVVMGKSEGEIRVWRREGRRVESEGFRVRG

SEQ ID NO: 205475 - protein, 119 aa, Glycine max
  unsure (1)..(119): unsure at all Xaa locations
  Clone ID: PAT_MRT3847_27572C.1.pep
GNFHEVFGENQTRGFASQVSYPFLSKFFCLSLPRAPLNRYVRHSLILLITCINSCCSKAITTTFISRDEICIWIWESLKQTLFHLDMICVTTXTATPMHNVYVTIYGWISCHECVSNTY

SEQ ID NO: 205476 - protein, 55 aa, Glycine max
  Clone ID: PAT_MRT3847_27573C.1.pep
QNGPNKIFPYGIFLVLKISSVILDLTLGAPGMTLATTFLQMPNVPCQFLQQARHI

SEQ ID NO: 205477 - protein, 84 aa, Glycine max
  unsure (1)..(84): unsure at all Xaa locations
  Clone ID: PAT_MRT3847_27574C.1.pep
ASFVSFLVLLLAALILMPQGLATYYKPIKKAPVDQPPVDKPPXYKPPXYKPKPPXVNNPKHPFYXPPFRKPPYQKPPLGKGPLP

SEQ ID NO: 205478 - protein, 135 aa, Glycine max
  Clone ID: PAT_MRT3847_27575C.1.pep
MADAGSADRRGRRGGRRGGRGRRGEGGAEGGSRRGGDRRGARRGGNSASARAGGKGDEEKWVPVTKLGRLAKDGKIQQLEEIYLHSLPVKEYHIIDEFLGSKLKDEAMNIMTVRNYTTVVPRSRFKAFAVDCDLE

SEQ ID NO: 205479 - protein, 58 aa, Glycine max
  Clone ID: PAT_MRT3847_27576C.1.pep
MRHWTSYNKVPTGKTLAVPKQSAEWDNPVVTEGEIVERHAPIASWNSSEEGRANGTRQ

SEQ ID NO: 205480 - protein, 78 aa, Glycine max
  Clone ID: PAT_MRT3847_27577C.1.pep
INSSKFAHRLVAGEHPNIDARRCQSCILVRYAEPAICLYMAVTPSISMTCSICSYSAFTRSCLRWETNGAARPLSFDS

SEQ ID NO: 205481 - protein, 158 aa, Glycine max
  Clone ID: PAT_MRT3847_27578C.1.pep
MASSPPSSSAIKDAKVLMVGAGGIGCELLKTLALSGFPDIHIIDMDTIEVSNLNRQFLFRQFHVGQSKAKVARDAVLKFRPHINITPYHANVKDPEFNVDFFKQFNVVLNGLDNLDARRHVNRLCLAANVPLVESGTTGFLGQVTVHVKGKTECYECQ

SEQ ID NO: 205482 - protein, 56 aa, Glycine max
  unsure (1)..(56): unsure at all Xaa locations
  Clone ID: PAT_MRT3847_27579C.1.pep
AQAQRDSSFFTLIMSFKCCINSLCMSKGERREYGQPKRRNSQEPPLATTQXPSSPP

SEQ ID NO: 205483 - protein, 60 aa, Glycine max
  Clone ID: PAT_MRT3847_2757C.1.pep
LACIMYQVGYKSANQSMMLLVYSPLIIWSYPNFITSIMEVGYCCYAAFVFLVRNSRAFMR

SEQ ID NO: 205484 - protein, 52 aa, Glycine max
  Clone ID: PAT_MRT3847_27580C.1.pep
VFIRKVKILKAQKFDLGKLMEVHGDYSEDVGAKVDRPADETLVEEATEVVGA

SEQ ID NO: 205485 - protein, 92 aa, Glycine max
  unsure (1)..(92): unsure at all Xaa locations
  Clone ID: PAT_MRT3847_27581C.1.pep
AKILTNFWTSTNISKKLNFHSSKPXILTRILRHVFQLSDFPIYTLIDTFHDHYRSFKCVHFPHFLTLYISLCHDYSTNVCNYIIHSCSFTLL

SEQ ID NO: 205486 - protein, 232 aa, Glycine max
  unsure (1)..(232): unsure at all Xaa locations
  Clone ID: PAT_MRT3847_27582C.1.pep
MQTIRLQYETLKATVLDLKKFENDVTITEYSATLLQLLATISSKEKLVLASCSLGGXYGQIFGGMNIDLAMEKFXEKVAVGVFLTAFARDTEHHPSYVLEQNKSSEDLDNEFAPSGNKKSFILGSQYLSNKQHQLSPIVDLELAKTLVRPSSLFIEDLSKQKNFSKHGYGSVPRAYIVCTEDLAIPLEYQLWMIQNAGINDVLMIKGADHAAMFSKPRELFNSLQKIATKYD

SEQ ID NO: 205487 - protein, 91 aa, Glycine max
  Clone ID: PAT_MRT3847_27583C.1.pep
RASSPRQSSCGGRSAAAVGAGYFHLGSHSSPHTHLCTARPHEFSISGGSPAAECSVYFFRGAAASRLSQVGIVLRLISCLSRTRCLNYLNV

SEQ ID NO: 205488 - protein, 51 aa, Glycine max
  Clone ID: PAT_MRT3847_27584C.1.pep
ANPFLNALCDSHYDVVTCILRYIKNNQALIPCNRSVWCNRVVSSMTTPDLY

SEQ ID NO: 205489 - protein, 105 aa, Glycine max
  Clone ID: PAT_MRT3847_27585C.1.pep
QTIQTVLLFAASKRVVPTMVAAPGALCFRRGLAQLPLQPQMAVGYMPLFHPQHSDNSREAVPYGLAQHEIKQRDDGGSGAYAREDGTTGKLRKKPEIDWTKLHVD

SEQ ID NO: 205490 - protein, 53 aa, Glycine max
  Clone ID: PAT_MRT3847_27586C.1.pep
LKNFKLKLQIIDKASNPDINYLCIGWKLLHQRSNKSIGKVVNAILCCAKRHKP

SEQ ID NO: 205491 - protein, 65 aa, Glycine max
  Clone ID: PAT_MRT3847_27587C.1.pep
HIYVEFVTAPCIHQNCMYISSKDIVNFYEVFPFESYNNSSPNPHSIPMEGFRRLMNFSFQSPCYH

SEQ ID NO: 205492 - protein, 132 aa, Glycine max
  unsure (1)..(132): unsure at all Xaa locations
  Clone ID: PAT_MRT3847_27588C.1.pep
DAFIEHDTPRLEYQLDDETKANCDACPETPDLRSPSPFEKQMCAVYTQDTITKLQHDVFCADDRHLPKDNDGATSAHTVTDCEYHQNYIXEWNTSSSYISYTCHVFESKGYLCGQAIEVLLKDEVFIFPPSP

SEQ ID NO: 205493 - protein, 60 aa, Glycine max
  Clone ID: PAT_MRT3847_27589C.1.pep
NPHDKPKNFPRGVDRLLLNSSVDALVPSLRLLPEPFTTLFSTLLTNKGSPVCTIPIDSRF

SEQ ID NO: 205494 - protein, 33 aa, Glycine max
  Clone ID: PAT_MRT3847_2758C.1.pep
VGLMARRMYSNCIECGNGSLSFIIFSGQFFVEL

SEQ ID NO: 205495 - protein, 37 aa, Glycine max
  Clone ID: PAT_MRT3847_27590C.1.pep
RDLCFCICDRQANLSHKNVLLSQFTGRILRVKTRKRF

SEQ ID NO: 205496 - protein, 95 aa, Glycine max
  Clone ID: PAT_MRT3847_27591C.1.pep
SRVDPRVRPRVRAMAFSKLSMLAQQRGDAYANADVRVSLEEIACKQGHDDVSKLTPTDIAIESLHKIESFVIEHTADSSASDAQAESQIQRIQTL

SEQ ID NO: 205497 - protein, 65 aa, Glycine max
  Clone ID: PAT_MRT3847_27592C.1.pep
ENCFCLEGGLFPQCFFCHSGRGPPPSGCQPLLKGCFSPIKARGWVSPPKIFLTPEPRGSLGFSPL

SEQ ID NO: 205498 - protein, 40 aa, Glycine max
  Clone ID: PAT_MRT3847_27593C.1.pep
FKFWGTPTSSETQDMMWFLIGILSLWDGHNVHHQRMLFSL

SEQ ID NO: 205499 - protein, 176 aa, Glycine max
  Clone ID: PAT_MRT3847_27594C.1.pep
MSDREDNAPEEFTTEQGIQQDEEIRRIQRENKARVVREGKERRRRWAQKITPRPSKAGKKSEDVEDSEPQQESNTAAGFLPDNIVQMLAAREKQVFLSDNNEEKDEIKPTTSRKRKSRKSGLKPVILSEIGPPPCLNSALDFLKKKQMSVQRSSSVLNNSNKAFRLLSRSGVLRSK

SEQ ID NO: 205500 - protein, 95 aa, Glycine max
  Clone ID: PAT_MRT3847_27595C.1.pep
MLSRPVEKVHNLLENNMNNISHLDQLSDEERSKLRDLSKHTLDSWIEMTSGTKKIMEKYSVNTCGYCPEVQVGRKEHKLRMCKASNHQSRNGLHA

SEQ ID NO: 205501 - protein, 83 aa, Glycine max
  Clone ID: PAT_MRT3847_27596C.1.pep
FGAAIGKGRQAAKTEIEKLKLADMTCRQGVIEVAKIIYGVHDEAKDKDFELEMSWVCDESNRQHEKVPDELLEKAKAAPKHAD

SEQ ID NO: 205502 - protein, 249 aa, Glycine max
  Clone ID: PAT_MRT3847_27597C.1.pep
MSSIGTGYDLSVTTFSPDGRVFQIEYAAKAVDNSGTVIGIKCKDGVVLGVEKLIPSKMMLPGSNRRIHSVHRHSGMAVAGLAADGRQIVARAKSEATNYDSVYGEPIPVKELADRVASYVHLCTLYWWLRPFGCGVILGGYDRDEPQLYMVEPSGVSYRYFGAAIGKGRQAAKTEIEKLKLADMTCRQGLIEVAKIIYGVHDEAKDKDFELEMSWVCDESNRQHEKVPDELLELAKAAAKAALEEMDAD

SEQ ID NO: 205503 - protein, 256 aa, Glycine max
  unsure (1)..(256): unsure at all Xaa locations
  Clone ID: PAT_MRT3847_27598C.1.pep
MSSIGTGYDLSVTTFSPDGRVFQIEYAAKAVDNSGTVIGIKCKDGVVLGVEKLIPSKMMLPGSNRRIHSVHRHSGMAVAGLAADGRQIVARAKSEATNYDSVYGEPIPVKELADRVASYVHLCTLYWWLRSILVAAXPFGCGVILGGYDRDGPQLYMVEPSGVSYRYFGAAIGKGRQAAKTEIEKLKLADMTCRQGVIEVAKIIYGVHDEAKDKDFELEMSWVCDESNRQHEKVPDELLEEAKAAAKAALEEMDAD

SEQ ID NO: 205504 - protein, 110 aa, Glycine max
  unsure (1)..(110): unsure at all Xaa locations
  Clone ID: PAT_MRT3847_27599C.1.pep
MKNNKSPFSAATFTLFNATLLILSSLSPTHALGSAATLAATSSAVCGMVASEPTRRIACYRHGEVVAVAPNVSFSAISGGRSYFCGLRSGNYSXLCWDTLFGFQSKRLYN

SEQ ID NO: 205505 - protein, 37 aa, Glycine max
  Clone ID: PAT_MRT3847_2759C.1.pep
KYTNCYYLKFILQLIYNTITIKPKYRSELHIFTSKIK

SEQ ID NO: 205506 - protein, 68 aa, Glycine max
  Clone ID: PAT_MRT3847_275C.1.pep
EDLKFWILNWNQGFGFLSLSSSVSSVLSRGVLSLSSANNDGIWHRLAVGYSSLASWVMSSSLALQSFC

SEQ ID NO: 205507 - protein, 75 aa, Glycine max
  Clone ID: PAT_MRT3847_27600C.1.pep
PPKPYKSFKTNAMPFTKHTLRAFYSYLNWYFPHHQLPLFNLFNIHHTYRHFIFFFATINLYLTFFCPYQFFTFLF

SEQ ID NO: 205508 - protein, 43 aa, Glycine max
  Clone ID: PAT_MRT3847_27601C.1.pep
FYSSLAQWGFCFAQVLPLYCKRSSSCFNGMVGFKNIYQYLGKA

SEQ ID NO: 205509 - protein, 81 aa, Glycine max
  Clone ID: PAT_MRT3847_27602C.1.pep
TSMKKSIWRTVLSLSSFSGWAQSLSTSMTDIEEPRIVPGSMCELAYNKYKRWQRWCLVTLSIACLIVGQSAIVILGRLYHD

SEQ ID NO: 205510 - protein, 92 aa, Glycine max
  Clone ID: PAT_MRT3847_27603C.1.pep
KANIEVAHLSTAGKSYGVDRTTNNLAAAVDAELSELVPESTFLDSEQVGDSASNNQTDAVNAESSELVPESTCLESEQVSYSATNNQTDAVD

SEQ ID NO: 205511 - protein, 30 aa, Glycine max
  Clone ID: PAT_MRT3847_27604C.1.pep
LVCMLCFTFHQMLCTFCSISVLRVLLLPGG

SEQ ID NO: 205512 - protein, 81 aa, Glycine max
  unsure (1)..(81): unsure at all Xaa locations
  Clone ID: PAT_MRT3847_27605C.1.pep
TXSNTGSTTRPKTHSFIYLSALLFSSTSQGTFLLPLPNPRFRGSISDLALLVCFALLFPQLGPSRIHVKLYSFFNICGIRV

SEQ ID NO: 205513 - protein, 100 aa, Glycine max
  Clone ID: PAT_MRT3847_27606C.1.pep
PTRPKKKKKKKKKKKKKKKKKKKKKKKKKKRAKQTKGTKLKNAGMERNNSTIGTPKFRKMAVVKHRLNWKNPGVTKLNCLEKNHPLTGWPKSQKATMDHL

SEQ ID NO: 205514 - protein, 50 aa, Glycine max
  Clone ID: PAT_MRT3847_27607C.1.pep
VFRLCRTYLNLIFFWIILKNSREISLESSFSFSYSIQCNRIGRLPKMAAP

SEQ ID NO: 205515 - protein, 59 aa, Glycine max
  Clone ID: PAT_MRT3847_27608C.1.pep
MHEFHLKLYFLREIKQLHDVCVYIYIHTHRVIVLFTLRNKLLKIYFTLTITTFSAFYTK

SEQ ID NO: 205516 - protein, 73 aa, Glycine max
  Clone ID: PAT_MRT3847_27609C.1.pep
TNLKSLYFSEMNYEWLICMKFATILLILSNSWKGTTICSLIADSFKQSGSYVALAVGVLTITSLKYSLFRTRC

SEQ ID NO: 205517 - protein, 70 aa, Glycine max
  unsure (1)..(70): unsure at all Xaa locations
  Clone ID: PAT_MRT3847_2760C.1.pep
GDFPSILGPSPDPXDIXIXIXXXEXLSXLSXXAXSXRKGQQNHRFQLXHSXIXXXALXHXLCSSKXTPXT

SEQ ID NO: 205518 - protein, 87 aa, Glycine max
  Clone ID: PAT_MRT3847_27610C.1.pep
MIGFAAVNNAVTVEEVEALHVLFKRLSSSLIDDDSIHKEELQLALFQTPYGKNLFLDRVFDVFDQKRNGVIEFDEFVHALSVFHPYA

SEQ ID NO: 205519 - protein, 157 aa, Glycine max
  Clone ID: PAT_MRT3847_27611C.1.pep
TRPAEKLVGNVGFLPSDFGSFRKWCLLGSGLLQIVALRPNLQMYLNEALLSWYQRLHASKVPDLDYSRAKMFLHNHYLCLVVLQFLGPPVLVLLFLGLSQIDDGVSFGNFAMLNDLLPGFAFFKEVAFFLAWWATFLWALFSSVILMLHRHCVLYVS

SEQ ID NO: 205520 - protein, 66 aa, Glycine max
  Clone ID: PAT_MRT3847_27612C.1.pep
SGPVGVQWHLGFVMDHRKQSPAVDMSVGNLWKFCKNVVTLGCQLVLLHRSPQIFRKFGILGMIAQS

SEQ ID NO: 205521 - protein, 80 aa, Glycine max
  Clone ID: PAT_MRT3847_27613C.1.pep
DRAQKARTYIYIYIYISIYMLDIYIYIYSMICICMLWMMTKPQLQIQAIVFTLFKLIFNFMKTQRITVQAQISLPPFGTR

SEQ ID NO: 205522 - protein, 56 aa, Glycine max
  Clone ID: PAT_MRT3847_27614C.1.pep
RPTRTRTRNSQLRPTHCMIRILIATASYGGVKPIKSGICRSFINHNRVIKTKLTPL

SEQ ID NO: 205523 - protein, 52 aa, Glycine max
  unsure (1)..(52): unsure at all Xaa locations
  Clone ID: PAT_MRT3847_27615C.1.pep
PRLVEQDFCCCCGMVTTHQXTKXPXAXKTVDHWIINTHSRFFNLKICLKIPP

SEQ ID NO: 205524 - protein, 313 aa, Glycine max
  unsure (1)..(313): unsure at all Xaa locations
  Clone ID: PAT_MRT3847_27616C.1.pep
NLVLGQSPYFDILVIMEADYGKDCTKSENRENLSVPPGFTSLTSFILKRDGNVKKSDKSTAFQIASEQEPIFMETIPEMNDISAYRQVLMHRPWIIADQSNHHKLEESHIKHLPMDPPLNDGRPKGIIHGCPNCSNCVKVTARWHPEDAIREVLEEAPTFHPTEEEFXDTLKYIASIRSRAEPYGACXVPPTCWKPPCSLEKKNIWEKSEFVAQIQRIDGHQLQHAQEIMASASGNTKTKRKRDVKVALDSQLGNRNTSTPNNQNVQKCDCESEPGPKFSLKTLKKYADIFKSQYFVYKDKKKITGSNIKLAI

SEQ ID NO: 205525 - protein, 84 aa, Glycine max
  Clone ID: PAT_MRT3847_27617C.1.pep
LNSARGKRALVSRMLQYVLDHVVLQIPFPDIVIKRTLEGKPYLDYYDKFDLRFPNFNFNVSHHGDYVAIASEPVCLVGVDIVSY

SEQ ID NO: 205526 - protein, 245 aa, Glycine max
  Clone ID: PAT_MRT3847_27618C.1.pep
MAVLFSNLISITNNTKPCFSFTSKPIICGAKNLTSKRSLILQTPLVCIGIGLTPQVSVAQSSPQESSPSKSLLSSIENTTSWFQFYGDGFAIRVPPEFKDITEPEDLDAGQSLYGDKAKTKTFSARFASSDGSEILSVVTKPTNQLKITFLQAQNITDLGSLKEAAKIFVPGGSKIYSARSIKIKEDEGFTTYYFYEFGRDNQHVALMAGVSSGKAFIAGATAPQSKWDSDGVKLRSAAISLKIL

SEQ ID NO: 205527 - protein, 52 aa, Glycine max
  Clone ID: PAT_MRT3847_27619C.1.pep
THLIANNTPPLATQGICINPTPLYFIHHPTTNPFYFLKTCIASSSITSVETT

SEQ ID NO: 205528 - protein, 56 aa, Glycine max
  Clone ID: PAT_MRT3847_2761C.1.pep
MTNTTATSRTNSELFGKVVVASKVPLPNYCPDLDDKRPQREVITWVGPVGMELQLI

SEQ ID NO: 205529 - protein, 138 aa, Glycine max
  Clone ID: PAT_MRT3847_27620C.1.pep
VDKLITRLVSRDEAHIVLMELMKWRTQGLDPVYARAVHMKERDPVTGKMRLVNPQSSRLVWETYLTEFKSLGRVAVRLIFLHATSRGFKCNWSSWRWVCSQGNSRAALDRAHKLIFIAAHSKFERKDFSTDEEKNAEL

SEQ ID NO: 205530 - protein, 43 aa, Glycine max
  Clone ID: PAT_MRT3847_27621C.1.pep
SSISPASIVWLSFVPHCRSKNFTRRSSTWFFALSLKSLCYVKL

SEQ ID NO: 205531 - protein, 65 aa, Glycine max
  Clone ID: PAT_MRT3847_27622C.1.pep
RAEENVEPREPSSFSFWVPHTAANLSWDKVENIYLSDLNEIEIDALTELKSNLEQSISANTLFDS

SEQ ID NO: 205532 - protein, 98 aa, Glycine max
  Clone ID: PAT_MRT3847_27623C.1.pep
AIPAKKMVVNRTKDRGGKPAQKQTMKGNGKLGGQQTQEGCKQPRKVNSTLSSHQSSVGPVGVPGKAGPGPAGVTAKGVGSQLQWRQNQGHSLNLWEND

SEQ ID NO: 205533 - protein, 37 aa, Glycine max
  Clone ID: PAT_MRT3847_27624C.1.pep
RSRSAPLTCIGSGDELLNEYEVNWIWVCLNYSILEIL

SEQ ID NO: 205534 - protein, 64 aa, Glycine max
  Clone ID: PAT_MRT3847_27625C.1.pep
GLEKIENLQSHDNTEIYEKAVKILETYWLEEEDETMPPGDASQSGFNFGSSDAPAVPSGGFNFN

SEQ ID NO: 205535 - protein, 532 aa, Glycine max
  Clone ID: PAT_MRT3847_27626C.1.pep
MSYRPSGNSRTEVRRNRYKVAVDADEGRRRREDTMVEIRKNRREESLQKKRREGFQPQQIPASVHSSLVEKKLEHLPSMVTGVWTDDNNLQLEATTQFRKLLSIERSPPIEEVIQTGVVSRFVEFLMREDFPQLQFEAAWALTNIASGTSENTKVVIDHGAVPIFVKLLASPSDDVREQAVWALGNVAGDSPRCRDLVLSHGALLPLLAQLNEHAKLSMLRNATWTLSNFCRGKPQPPFDQVKPALPALARLIHSNDEEVLTDACWALSYLSDGTNDKIQAVIEAGVCPRLVELLLHPSPSVLIPALRTVGNIVTGDDMQTQVIINHQALPCLLNLLTNNYKKSIKKEACWTISNITAGNKQQIQAVIEANLIAPLVNLLQNAEFDIKKEAAWAISNATSGGSHEQIKFLVSQGCIKPLCDLLICPDPRIVTVCLEGLENILKVGEADKNIGNTGDVNLYAQMIDEAEGLEKIENLQSHDNTEIYEKAVKILETYWLEEEDETMPPGDASQSGFNFGSSDAPAVPSGGFNFN

SEQ ID NO: 205536 - protein, 731 aa, Glycine max
  unsure (1)..(731): unsure at all Xaa locations
  Clone ID: PAT_MRT3847_27627C.1.pep
PRVRSALNIIAQISLLEECGFLERALEELHKKESKIVDKLVYKEQEVSLLVKLGHLEEGEALYQALLSMNPDNYRYYEGLQKCVGLYLGPGQYSPDQIDRLDSLYKTLVQQYKWSSAVKRIPLDFLQGDKFREAADNYIRPLLTKGVPSLFSDLSSLYNHPGKADILEQLILELERSIRMSGQYPGRMDKEPPSTLMWTLFLLAQHYDRRGQYEIALSKIDEAIEHTPTVIDLYSKTRAYFEGSRSCASPNSAFNQIRKSSENGSSNHSVGDHNAESGTSNGKLEAXKISLSDKVEQGLXKNGLQVIPSLDFGCLVIQAAFESPPKLGCSSRXVHTKFWCRCYQILNTSXDVFSFHEFSLSKLTCRMTFRTYVEMLKFQDQLHSHAYFHKAAAGAIRCYIELHDSPPKSTAEEDDNMSKLLPSQKKKMRQKQRKAEARAKKEAEEKNEESSASGVSKSGKRHVKPVDPDPSGEKLLQVEDPLSEATKYLKLLQKNSPDSVETHLLSFELYTRKTKDFACLGRPVKQLLRLDAEHPDSHRCLIKFFHKVGSMNAPVTDSEKLIWSVLEAERPTISQLHEKSLFEANNSFLEKHKDSLMHRAAFAEILHILDSNRKSEAVKFIEESTNNIVPRNGALGPIREWNLKDCIAVHKLLGTVLADQDAGLRWKVRCAEYFPYSTYFEGCHSSASPNSAFSQLRKNSENESPNHSVGGQNVGSITSNGKLEAFKDLTI

SEQ ID NO: 205537 - protein, 43 aa, Glycine max
  Clone ID: PAT_MRT3847_27628C.1.pep
GSSSHYIGMLFFSNMHTMAKGKMPYDVWRDAPPKGEIDFALLP

SEQ ID NO: 205538 - protein, 76 aa, Glycine max
  unsure (1)..(76): unsure at all Xaa locations
  Clone ID: PAT_MRT3847_27629C.1.pep
DKALYYGHQYFYGHSPLGIIKSKPESSGFXPPSKMGGSEYVKTNXQIYRVLFTIIHPTPVFSLKVQLLEHIMPYPG

SEQ ID NO: 205539 - protein, 139 aa, Glycine max
  unsure (1)..(139): unsure at all Xaa locations
  Clone ID: PAT_MRT3847_2762C.1.pep
LEQDRDSKDACETCTTANLAMDLLXEMTXTKALVDYQNIARDTXRTLCKSKXDVGLDADNCADLVDIDQDYHDFAQGGHGHLTKXPEXIGAGDHRHMLGYPTDETPELLPLSHVLATKLGTRLTEVLKNSTCPWLMPDG

SEQ ID NO: 205540 - protein, 117 aa, Glycine max
  unsure (1)..(117): unsure at all Xaa locations
  Clone ID: PAT_MRT3847_27630C.1.pep
PNRPPTALRTPGADGIRTLALQSMQPELPVLSPWVPVREVNFLRACKRHAEGMQAVGVVSIDSIRECSAAPPYVNGRRLPSGCVVQDMPNGYSRVTWVEQAEYXESQVHHLWWGFWS

SEQ ID NO: 205541 - protein, 87 aa, Glycine max
  Clone ID: PAT_MRT3847_27631C.1.pep
SFHKIIHRGNFLKWVISRINGNVAFFANDFAVFVHHFFDALGLSPSRTMPTPKKHNPELKPRFPHARKSRRSDLCCPRAPLPPPDAW

SEQ ID NO: 205542 - protein, 90 aa, Glycine max
  unsure (1)..(90): unsure at all Xaa locations
  Clone ID: PAT_MRT3847_27632C.1.pep
EVNDPSLTIKSIGHQWYXTYEYTDYGGLIFNSYILPPLFLEPGDLRLLDVDNRVVLPIEAPIRIXITSQDVLHSXAVPTLGLKTDAIPGR

SEQ ID NO: 205543 - protein, 64 aa, Glycine max
  Clone ID: PAT_MRT3847_27633C.1.pep
RIWSMAEYKEISRASTEIERIKLNSEGCNLNLVSISVTLLLMLYFCYDSCWTFPLSHIIDNRLS

SEQ ID NO: 205544 - protein, 139 aa, Glycine max
  Clone ID: PAT_MRT3847_27634C.1.pep
LPLFIVKPLYSVHQLLHKIMYPIPFPLKTLHPIPLLLSLQILFLNLSLNQLLMILSQNFLLPLLLHLIPPPPMSQPPIILFLTILLLCRPGLSLVLCKPDFIPHYFSESKSVKQAFQDPNCQAAVVATIAAKNSVCSSY

SEQ ID NO: 205545 - protein, 35 aa, Glycine max
  Clone ID: PAT_MRT3847_27635C.1.pep
ILKNYRTFYYDKCCFYLKDNFIIDETRLWVNNDKG

SEQ ID NO: 205546 - protein, 125 aa, Glycine max
  Clone ID: PAT_MRT3847_27636C.1.pep
FFKSCCCTFLPVLLLLVLTLHIIILYVVLSLALALAFSFDSFIFAVSLCALLNFTLSCAPPIVVGDWFSLEPTPCAGCCGLLAAYQWWSGGGSGLFPEPIHRHCHNQMKKRSSWLLHHCCCCCAC

SEQ ID NO: 205547 - protein, 109 aa, Glycine max
  unsure (1)..(109): unsure at all Xaa locations
  Clone ID: PAT_MRT3847_27637C.1.pep
EKWDCASAKTMSLKSNPNSGAEGWKLEKRTGTECDSNSISGRAGTATQEDEVTVARDRSIYEWECXPRAIEIXHTHNALKWNRGKVNLTHGNCTCVKGKRLPICIGGGA

SEQ ID NO: 205548 - protein, 106 aa, Glycine max
  unsure (1)..(106): unsure at all Xaa locations
  Clone ID: PAT_MRT3847_27638C.1.pep
FLFLFLRSAFDTTFNATHSPPPAAAPDCRARNTTPFAPRPTAETTFRFXKSSVSPRRRSSLPPSLLSLSPPYMVDRVPRGEKQPTPRGGGVGCLGPRAPDAWADAW

SEQ ID NO: 205549 - protein, 124 aa, Glycine max
  unsure (1)..(124): unsure at all Xaa locations
  Clone ID: PAT_MRT3847_27639C.1.pep
AHASARSIVGALXYATITQPEISFRVNDVCQFMSKPSEQHWLAVKRILRRSTSGASISLGPNLISWRAKKQSVVAWSSTEAEYRSMALIAAESTWIQTLLYELEAAYTTALILFDNTSTVSFGS

SEQ ID NO: 205550 - protein, 535 aa, Glycine max
  unsure (1)..(535): unsure at all Xaa locations
  Clone ID: PAT_MRT3847_2763C.1.pep
SHSSGFTLGSLPCCNAKSLITTRLFSSYYSLEQFSDDEYDCDFENQQASSTVANVDDWKWKLSMLLRSKNDQEIVSRDIGHLFGKVVVASKVPLPNYCPDLDDKRPQRELVIPLSLQRRVEVRVCCRNTLIXQLNSAKTTDSLDDLNSTNQVKDIDMDENADSFVDESVMEKVLQKRSLRMRNMQRAWQESPEGRKMLEFRKSLPSFKEKQVHYHKVIVVSGEAGCGKITQLPQYVLESEIESGRGAFCSIICTQPRRISVMAVAERVSAERGEPLGETRFFDXVGFEVRLEGMKGKNTHLLFCTSGILLRRLLSDRNLTGITHVFVDEIHERGMNEDFLLIVLKDLLPRCRDLRLVLMSATLNAELFSNYFGGAPTFHILGFTYPVRAHFLEXYFEMTGYKLTSFNQIDDYGQEKLWKTQKQLAPRKRKNQIAALVEDALSKSSFEKYSSKARESLASWAPDCIGFNLIEAVLCHICRKERPGAVLVFMTGWENISSLRDQLKAXPLLGDPNRVLLLTCHGSMAISEQAVISIC

SEQ ID NO: 205551 - protein, 46 aa, Glycine max
  unsure (1)..(46): unsure at all Xaa locations
  Clone ID: PAT_MRT3847_27640C.1.pep
GISLKCNKRRGIYFYVFSRVPEHQLEINFCLCMLRVSGNFPFFFXM

SEQ ID NO: 205552 - protein, 57 aa, Glycine max
  Clone ID: PAT_MRT3847_27641C.1.pep
PGTSFMSLCAVMCSKRDIPRIMQCGSSKCPSVYHPHQHFALYPADSSSKHCLNRNTG

SEQ ID NO: 205553 - protein, 26 aa, Glycine max
  Clone ID: PAT_MRT3847_27642C.1.pep
YSSFYITDLTKHFVNLTGLVRRRIYL

SEQ ID NO: 205554 - protein, 72 aa, Glycine max
  unsure (1)..(72): unsure at all Xaa locations
  Clone ID: PAT_MRT3847_27643C.1.pep
MATSTPHQHQEXGRAXPTEAXQHPKNHRXKPRATNEARAKPKSXETRRKPKKAKKSXGQARAXNEXXEKNPT

SEQ ID NO: 205555 - protein, 159 aa, Glycine max
  Clone ID: PAT_MRT3847_27644C.1.pep
GTLRNVPVGGGCRRNKRSRGSSSSNTRSPANSDRQTASAGSASTTSGSSSADLVASLGGGTGVPPSLRFMAPLHQLGDHHHLGGGGGEIGLSYGLNYGAISGPMGGIGDLNFHIGGTLSGGGSMLSGLDQWRVPQTHQFPFLSGLEATSSHGLYPFEGA

SEQ ID NO: 205556 - protein, 260 aa, Glycine max
  Clone ID: PAT_MRT3847_27645C.1.pep
MACTKATFTFSQYCSDRCSSSRRRRRASAVSFFNGNSVMRLSSHRGALLTNNVLETSKSKDKSSSNNNIILVSEKLGEAGLKVLREWGDVECAYDLSPEELCSKISCCDALIVRSATKVTREVFQASKGRLKVVGRAGVGIDNVDLQAATEFGCIVVNAPTSNTVAAAELAIAHLAAMARNVARADASMKASKWERNKYVGVSMVGKTVAIMGFGKVGYEVARRAKAALGMNVVAHDPYASADRASAIGVHLVSFDEASP

SEQ ID NO: 205557 - protein, 52 aa, Glycine max
  Clone ID: PAT_MRT3847_27646C.1.pep
KGLRVTFKLTDHNRQANVTVIPYVVDLVIKAFKEPIRDRKMTTIIYLNCNIS

SEQ ID NO: 205558 - protein, 61 aa, Glycine max
  unsure (1)..(61): unsure at all Xaa locations
  Clone ID: PAT_MRT3847_27647C.1.pep
HPLHLADSDPAFRSRISVVFVLVHPSATQSVPGHGRVGNQEGDEDSDLRISHHFLXWGLRT

SEQ ID NO: 205559 - protein, 56 aa, Glycine max
  Clone ID: PAT_MRT3847_27648C.1.pep
GPRFFFFSFAPLKTIFIRSGIIHVHKNMGLFIFPALISPIISGIRVTSSLVFALKS

SEQ ID NO: 205560 - protein, 107 aa, Glycine max
  Clone ID: PAT_MRT3847_27649C.1.pep
GLYVLIQSSDTLAHTINMLGTNTLTSIIGSSYNPDISSSVHWAYLAMMRTHLLAYQMWHMIRNHLWGTTSRAKKPLQACKSYGHLGTPLGPRIVQQGLGPPTLKSGA

SEQ ID NO: 205561 - protein, 67 aa, Glycine max
  unsure (1)..(67): unsure at all Xaa locations
  Clone ID: PAT_MRT3847_2764C.1.pep
XYYYFXXXXVQXIXDKIKDPSCXIEXPGIAIXACXXGTYXXFXWVXXLLLTXSYSXLXSELTYACXX

SEQ ID NO: 205562 - protein, 94 aa, Glycine max
  unsure (1)..(94): unsure at all Xaa locations
  Clone ID: PAT_MRT3847_27650C.1.pep
WLSVRSRVGLVVRFFLFWLVFXXXGLFLNYVGPPPPPRGGWWIQNCVSGVANSLVIVPTVFAVLVGWICTHSFTYLNRSLICSNMFVXFFFLPL

SEQ ID NO: 205563 - protein, 49 aa, Glycine max
  Clone ID: PAT_MRT3847_27651C.1.pep
AFHFLPVIIYDHVSRELLPASLYNWCAACGSRSDILGSTHASKNITWIQ

SEQ ID NO: 205564 - protein, 71 aa, Glycine max
  Clone ID: PAT_MRT3847_27652C.1.pep
SYLDLPKLSQKARSTLSQKSCKQGQPGLQYFSPNSLLVVWQHMMEFHHSSRGAPGIAYKSKKNNVEAEFLV

SEQ ID NO: 205565 - protein, 77 aa, Glycine max
  Clone ID: PAT_MRT3847_27653C.1.pep
MTENASVRPSWPFAAVGSYKCISGLCIHPKLDFHETSSELKDHLQRQIASNMQLVPVLSSPFHQLTMLQERLFSICK

SEQ ID NO: 205566 - protein, 114 aa, Glycine max
  Clone ID: PAT_MRT3847_27654C.1.pep
NPFSSPKPSTFFSLTETRFAALLLHSLTSLTHCAIFTHCVKFPHKTGIDSLVKEVERIFASSPPDSMELEKAKQMLKEHEQALVDAIARIADASDGESDGEQPFLQHGQLMERG

SEQ ID NO: 205567 - protein, 413 aa, Glycine max
  Clone ID: PAT_MRT3847_27655C.1.pep
PKRASEHFFFALSHLPLLQLSRTIKFRHYWYWFSPSDQNRVRRGSIVTGNEKSSVTSIPHLKLHCDMEAQIHLLEQEAYSAVLRAFKAQSDALTWEKEGLITELRKELRVSDDEHRELLTRVNSDEIIHRIREWRQTGCYQPARRSTSQTFHDILPSPTVSASRKKQKTSHSGQSLPALSSVKSVQYTSAGPTGGRHFANHNSSALASNASATEAAAFDPLIGKKVWTRWPEDNHFYEAVVTDYNPADGRHALVYDINKVNETWEWVDLKEISPEDIKWEGEDPGILHRGGHGGQGGGGRKFFGHGGDSLGAGRGRGHPRFQARQEFLPPQNGIGRRVLDDIELLNTDSLVKEVERIFATSPQDSMELEKAKQMLKEHEQALVDAIARIADASDGESDGEQPFLQHSQLMERG

SEQ ID NO: 205568 - protein, 428 aa, Glycine max
  Clone ID: PAT_MRT3847_27656C.1.pep
NPFSSPKPSTFFSLTETRFAALLLHSLTSLTHCAIFTHCVKFPHKTGIDSPSDQNRVLRGSSVTGNEKSSVASIPHSKLHCDMEAQIHLLEQEAYSAVLRAFKAQSDALTWEKEGLITELRKELRVSDDEHRELLTRVNSDEIIHRIREWRQTGCYQPARRSTSQPGHDILPSPTVSASRKKQKTSHSGQSLPALSSVKSVQYTSAGPTGGRHFANRSSSALASNVPAEAAAFDPLIGKKVWTRWPEDNHFYEAVVTDYNPADGRHALVYDINKVNETWEWVDLKEISPEDIRWEGEDPGVLHRGGHGGQGRGGRKFFGHGGDSLGAGRGRGHPRFQARQEFLPPQNGIGRRVLDDIELLNTDSLVKEVERIFASSPPDSMELEKAKQMLKEHEQALVDAIARIADASDGESDGEQPFLQHGQLMERG

SEQ ID NO: 205569 - protein, 53 aa, Glycine max
  unsure (1)..(53): unsure at all Xaa locations
  Clone ID: PAT_MRT3847_27657C.1.pep
MRTQMXLRSLGIIAGHMAQKTYRLDPLKVKYWDVPSWENAPSRLWIGNIRXVI

SEQ ID NO: 205570 - protein, 123 aa, Glycine max
  unsure (1)..(123): unsure at all Xaa locations
  Clone ID: PAT_MRT3847_27658C.1.pep
QKEPDTKVGFYQLSPTTIGETVQGKDLALVKVKEARAAVGLTSSYTPTPSMEPGLQKDRRLTEENFGRTTHVAHNANQPQEKDLLEGNIPYXIKSRSRLEKVSXTKAQFVRGKTLKNDLIGAG

SEQ ID NO: 205571 - protein, 117 aa, Glycine max
  Clone ID: PAT_MRT3847_27659C.1.pep
GLDYHVNLMVLLKPLILPCNILNDDIMLYLFILEALVIHLIPLWSSFMHYFFGASRHCPLGLEIPLKIILTYLFCGLTNNSNLSKYACVLLFYFSLVSVDINLSTFTSNPLCQIFSN

SEQ ID NO: 205572 - protein, 54 aa, Glycine max
  Clone ID: PAT_MRT3847_2765C.1.pep
YFLNKCNVPFHFHYIPIKFLENLSGHDNVSLNTDFSGSLWNEPGVTSCVRPHAS

SEQ ID NO: 205573 - protein, 110 aa, Glycine max
  Clone ID: PAT_MRT3847_27660C.1.pep
ANERDREREKGCYQQQTKTVLLDSAVARTDVSGRRRGAERRSSGISDVLCSRPSEVFPGQRFKIRIKVLSWHFRSGTTATTHQCMMVENKHEQHGPVRGRNRSGAARIVG

SEQ ID NO: 205574 - protein, 88 aa, Glycine max
  Clone ID: PAT_MRT3847_27661C.1.pep
MSGKPLNSPRLLAMADSDLSSSQISTHSTDSGNRGSSKVEFSEDEETLIIRMYKLVGERWSIIAGRIPGRTAEEIEKYWTSRFSGSSE

SEQ ID NO: 205575 - protein, 44 aa, Glycine max
  Clone ID: PAT_MRT3847_27662C.1.pep
SMWPAHRVMFVPLRHRSRRSRESLTHSCTPAAIASVSGFKERQT

SEQ ID NO: 205576 - protein, 58 aa, Glycine max
  Clone ID: PAT_MRT3847_27663C.1.pep
ARAFCLRGNESNLPDPCQTLLDKRGKLLSGRTAVGHQRYHCPYQPIKIGPIAINRATV

SEQ ID NO: 205577 - protein, 171 aa, Glycine max
  Clone ID: PAT_MRT3847_27664C.1.pep
LELSLASGVMLALENFYYRLLLIVSGYMHNTEIAIDALSVCVTIYGWESMIPLAFLGATGVRVANELGAGNAKGARFATVVSVVTTLFVGFIFWLVIVSFNKNLALIFTSSSSVIQMVNELAMLLAFTVLLNCIQPVLSGVAVGSGRQAIVAYINIGSYYLIGIPLGVLLG

SEQ ID NO: 205578 - protein, 47 aa, Glycine max
  Clone ID: PAT_MRT3847_27665C.1.pep
AEFLFAPRAFSRPAAPYNRAHMLSVLDFKNHPTYCYFTVYDVLRERK

SEQ ID NO: 205579 - protein, 75 aa, Glycine max
  Clone ID: PAT_MRT3847_27666C.1.pep
IRTLRLFETLLQSKERNQGSLMRAQTGMKRAHHVKAGAHYDHQYSEGDHHHQWRFIYRHHQVRIHDQHQLQTTNH

SEQ ID NO: 205580 - protein, 106 aa, Glycine max
  unsure (1)..(106): unsure at all Xaa locations
  Clone ID: PAT_MRT3847_27667C.1.pep
PKNGVTEAKLKVAINCFGRIGRNSLEETATRRKDSPKDVIAINDTGXVTQASNLLKYESLLGTFNADDKPVGTNAISGDEKEIKVVSDRNPANLARKDLWIDSVIE

SEQ ID NO: 205581 - protein, 101 aa, Glycine max
  Clone ID: PAT_MRT3847_27668C.1.pep
GRPPRGPGKQTQMGGKGGVKKGEKHRGWPPKGPFFGYEKNPPLLKWGFQRWFAPPPKESKSKGVFFRGSKRKKVWAFPPPRTWGKETRKRQPTFSPSPFFF

SEQ ID NO: 205582 - protein, 77 aa, Glycine max
  unsure (1)..(77): unsure at all Xaa locations
  Clone ID: PAT_MRT3847_27669C.1.pep
RSKGRGRFKTXGANKNEGVAKARRRQKSKHANDRLRIKSGGIEKPRACVRASYLERRELDQNGNTELNGTGEKVKAL

SEQ ID NO: 205583 - protein, 84 aa, Glycine max
  Clone ID: PAT_MRT3847_2766C.1.pep
PRPTRPHPSTFAHYFTFLSLTVSVIFENLICICIAKWSHLCLINSQMVNPTTLKHCYRLHLALAHLHMLGHFLSPSTHYQMVAM

SEQ ID NO: 205584 - protein, 76 aa, Glycine max
  unsure (1)..(76): unsure at all Xaa locations
  Clone ID: PAT_MRT3847_27670C.1.pep
HESVICLRAGQNTFPLRGFGLLVEXVFAKTSSIRNIYTVDGDIQCELLFRGFLPYLIIPTVWAPIDSPTMNGALIC

SEQ ID NO: 205585 - protein, 94 aa, Glycine max
  Clone ID: PAT_MRT3847_27671C.1.pep
ALFIFCAFTTSYLPSGIADFELDNEGNPLENGGTYHISSDITSFGGIRAAPTGNERCPLTAVHSRNELDKGIATIISSAYRIRFIAEGHPLSLK

SEQ ID NO: 205586 - protein, 104 aa, Glycine max
  Clone ID: PAT_MRT3847_27672C.1.pep
MREGCSKVCVTGASGYIASSLVKKLLTKGHSVHATLRDLSLYKNESKVSLLKSLPQSEGKLVLFEADIYNPNDCDHAIEGCEFVFHVATPMIHDPGSQYKNTSE

SEQ ID NO: 205587 - protein, 168 aa, Glycine max
  unsure (1)..(168): unsure at all Xaa locations
  Clone ID: PAT_MRT3847_27673C.1.pep
MSMPPHRSLQAIFLVLFVVVLLPFSVSVAASYSSIHELLRSHGLPAGLXXDGVKSYNLDQRGRLEVNLDGPCMTKYETRVLFETVVRANLSFGQLKGLEGLSQEELFLWLPVKDIIVNDPSSGLILIDIGLAHKQLSLSLFEDPPVCRSQGLSLNIGGRKSIGFQDQR

SEQ ID NO: 205588 - protein, 83 aa, Glycine max
  Clone ID: PAT_MRT3847_27674C.1.pep
LWGCGCRAWVSCWCSPLVLWSSGSVFVRALFFLCPAFCLCRCVGFVGLLVLCCGPVLVCYFPRLAGALCGKKARGARYSVRPA

SEQ ID NO: 205589 - protein, 74 aa, Glycine max
  Clone ID: PAT_MRT3847_27675C.1.pep
VFCIRRLINAHIVDIILGIKILSSSSANSYFILLQQIMDLVGYTSIQMVAVIATREWELAYRSYAFCYAIYYQF

SEQ ID NO: 205590 - protein, 49 aa, Glycine max
  unsure (1)..(49): unsure at all Xaa locations
  Clone ID: PAT_MRT3847_27676C.1.pep
PTTXXYAXENXXTCRLNAXLXFSLCSCXSRXXXXRAEFPXLHVRVXCRL

SEQ ID NO: 205591 - protein, 69 aa, Glycine max
  Clone ID: PAT_MRT3847_27677C.1.pep
SKFSSIRVRLSQSITRNTYSSYTSRSLCTSRTGNIRASSLYRLARVWYIIPASNEALRWSLRPRGRSCG

SEQ ID NO: 205592 - protein, 72 aa, Glycine max
  Clone ID: PAT_MRT3847_27678C.1.pep
LMGQNIKGTIVIMQKNVSHMIRGSCYDRINLSMVHVSCSAHPSTTLLPSYICVQLMTATMSAGAIRKNQKGH

SEQ ID NO: 205593 - protein, 66 aa, Glycine max
  Clone ID: PAT_MRT3847_27679C.1.pep
YCRNDELFFRRAAYETFGEVNQTKHSGFYGLIVHKGRRYTYCAVHEGGVHEQNARTTIRDCVHERL

SEQ ID NO: 205594 - protein, 75 aa, Glycine max
  unsure (1)..(75): unsure at all Xaa locations
  Clone ID: PAT_MRT3847_2767C.1.pep
RXHAYVSSEFGSXXPXXMXNXXXNXSIXLSXXLLXXALXLAEXQSFIXVNXGQVXXXLPAXXXTAXXLXXXTIGX

SEQ ID NO: 205595 - protein, 111 aa, Glycine max
  Clone ID: PAT_MRT3847_27680C.1.pep
LIIASMADAKKIFYPKNRGRKGTSSSHTETTQKQERKFTMKDVCYYSQPSNIPPKDSDSSSQQQQARTFTMKDFCYYTKPNNPPSVSDASTSRAGTPLPTIKKSFARRTWS

SEQ ID NO: 205596 - protein, 49 aa, Glycine max
  unsure (1)..(49): unsure at all Xaa locations
  Clone ID: PAT_MRT3847_27681C.1.pep
MSTMCGILLXLGCSDDCRAKRGRVLELSRRSQQRGPDWSRLHLHGDCVL

SEQ ID NO: 205597 - protein, 62 aa, Glycine max
  Clone ID: PAT_MRT3847_27682C.1.pep
GGAQGGEGPPDFEFGKITGPPFPGGPPGKQGAQGLRSLQGGVGPPGPRQGQRGFPIFDPLFF

SEQ ID NO: 205598 - protein, 52 aa, Glycine max
  Clone ID: PAT_MRT3847_27683C.1.pep
YGFAIKTYERHSCGTDNFQGILIWAVAHCISSNCLLKRNASCVINLSKSDDL

SEQ ID NO: 205599 - protein, 75 aa, Glycine max
  Clone ID: PAT_MRT3847_27684C.1.pep
NKCVCCYPTSKKKKKKKKKKKKKKKKNKKKKKKKKKKKKKKKKKKKKKKKKKDTKRENKKKKTKVGLGGYFLKGS

SEQ ID NO: 205600 - protein, 39 aa, Glycine max
  Clone ID: PAT_MRT3847_27685C.1.pep
ARCELLLHFIALHFIHCSLLFLFQSYSLVLNLLPNFLSS

SEQ ID NO: 205601 - protein, 130 aa, Glycine max
  Clone ID: PAT_MRT3847_27686C.1.pep
HTRPGEWWFRSLTFFPNFFFFFWPLIQNLILFNNRGGFLNQGPSLAGDSFGGVGFFSVSRGYQSVFKFGSAMLMGFDENDGADVLRGGFFCPFGSGIFDIVGYCCPIAERLPLGARNGVCPVCALRGGVV

SEQ ID NO: 205602 - protein, 281 aa, Glycine max
  Clone ID: PAT_MRT3847_27687C.1.pep
RKPEEENGGELVFGGADPAHYKGKHTYVPVTRKGYWQFDMGDVLIAGKPTGYCADDCSAIADSGTSLLAGPTTVVTMINQAIGASGVVSKECRSVVNQYGQTILELLLAEAKPKKICSQIGLCTFDGTHGVSMGIESVVDKNERKSSGSIRDAGCSACEMAVIWMQNQLRQNQTEDRIIDYANELCDKLPNPMGQSSVDCEKLSSMPIVSFTIGGKVFDLSPQEYILKVGEGPEAQCISGFTALDVPPPRGPLWILGDVFMGRYHTIFDYGKLRVGFAEAA

SEQ ID NO: 205603 - protein, 282 aa, Glycine max
  unsure (1)..(282): unsure at all Xaa locations
  Clone ID: PAT_MRT3847_27688C.1.pep
GGEXXXGGADPAHYKGKHTYVPVTXKGYWQFDMGEELIAFFXIGXXADLWAAXADXGXXXXXXPTAARRRQKGTVITMINQAIGAAGVVSKECRSVVNQYGQTILELLLAEAKPKKICSQIGLCTFDGTHGVSMGIESVVDKNEKKSSGGIRDAGCSACEMAVIWMQNQLRQNQTEDRIIDYANELCEKLPNPMGPSSVDCGKLSSMPIVSFTIGGKVFDLSPEEYILKVGEGPEAQCISGFTALDVPPPRGPLWILGDVFMGRYHTIFDYGKLRVGFAEAA

SEQ ID NO: 205604 - protein, 43 aa, Glycine max
  Clone ID: PAT_MRT3847_27689C.1.pep
VILFFSFKKKIVQQFILILFKYFYYVLLFFILHNFIMEHRKIE

SEQ ID NO: 205605 - protein, 325 aa, Glycine max
  Clone ID: PAT_MRT3847_2768C.1.pep
MHMHWLGPDVPVFDPNFTYNHHRPYLYDDDLFPNDAVSARRHDAVSAHHHDGTSPLPLGMDWSPPPRLWEGRSTVWPRHPPTGWSFCVTLPSWVTAPQSPPSDPVAFFRVQVGVQSPQAITTSRLLLRRFSDFVNLFSQLKKEFPIKDLPTPPPKKILRIKSHTVLEERRLLLADWMEKLLSDVDVSRSAPVAIFLELEAAARSSFHDVNEHVSDEASANATTPSQMIQDTSPGSVKAHGSSAAIVPGNDEVSELGTPQHGMDNRSDQIMDNSTLEHGLINPTETDVHYATSSENFVYKDNITDKVTGYTADAIALHLDGSYTTS

SEQ ID NO: 205606 - protein, 156 aa, Glycine max
  unsure (1)..(156): unsure at all Xaa locations
  Clone ID: PAT_MRT3847_27690C.1.pep
FLCPSRITKRAGEASRLQLVEAIIQVLEDNTASETHEXGTSEIEIICLDFSIFTKEIIEWNRKAFKRMXKPQTLNIRNGKFSKGPRYLPNSLRILEWWRYPSNCLPSDFNPKKLVICKSPNSCFTSSELDGLSKASLKSTFSSPRNIFLMDLLDIP

SEQ ID NO: 205607 - protein, 75 aa, Glycine max
  Clone ID: PAT_MRT3847_27691C.1.pep
KSKTALICQLSKTNSTFSHKLFLTQLLLWDKRGSHYMRAHMLFNESHLLFRGIHPIIENILNNLLSVGWVAFLKK

SEQ ID NO: 205608 - protein, 46 aa, Glycine max
  Clone ID: PAT_MRT3847_27692C.1.pep
LLVRVGSRPHLGVPLDPPRITWPGPLRSHKRDPQNKEGRRVPSIGN

SEQ ID NO: 205609 - protein, 130 aa, Glycine max
  Clone ID: PAT_MRT3847_27693C.1.pep
MRQKTNNADSSGFLGSISSNFLRSVSSSNRKPTSSNPKPPKSDTENTPPTTHPNIPINLHHQSKPNDPFSHSNSHVKVVVRIRPENSNGKEGDLKIKKVSSDALCVGDRKFTFDEVFDANSNQEDVFSQW

SEQ ID NO: 205610 - protein, 157 aa, Glycine max
  Clone ID: PAT_MRT3847_27694C.1.pep
VPMIPLPETLVSDSLCVTKMGRKRASKNTHRALVLPTVVKPQPSNVRRSERIKSKSLVVSHPNTNCDIEVIEYITLSDGEKDEADTQLEHESELADNLGEKKSLEQKINCALQRIDALNKAVELLKSKLFYKWTRILPFVKPHLGACILTHKRRLKL

SEQ ID NO: 205611 - protein, 59 aa, Glycine max
  Clone ID: PAT_MRT3847_27695C.1.pep
LMNDRDRQLGSQGIPSCRLASPIIRHSFVNGTHSALVSPHIEIGVQPPDRLSIRNKRVI

SEQ ID NO: 205612 - protein, 92 aa, Glycine max
  Clone ID: PAT_MRT3847_27696C.1.pep
FFPLSKHVVLLALVMPFFPLSKHVVLTDSDSFVCSAEVFSSSESLSKVQAFKTSNGKLLSSATLVICSLAKLVSTTVNFMTSVLQFGVFTMR

SEQ ID NO: 205613 - protein, 98 aa, Glycine max
  unsure (1)..(98): unsure at all Xaa locations
  Clone ID: PAT_MRT3847_27697C.1.pep
KTPKAPVFKVYFPGLKKKKRKVPLKKNRVFPTTEKKNLXKKNKNPTGPPGEGTNFNFFKKFHFPGNPKMNXMKAFLKKRVFPVPVPKKKVKKPYFKPL

SEQ ID NO: 205614 - protein, 63 aa, Glycine max
  Clone ID: PAT_MRT3847_27698C.1.pep
PLRPLRLYGSGRDSPQRQGRWICPKPAVCTIVLQVLLSRVVRHINISSFCFPLKPGSRVFCEP

SEQ ID NO: 205615 - protein, 36 aa, Glycine max
  Clone ID: PAT_MRT3847_27699C.1.pep
PKVFFCKYNDPIYVKMEKLETMIKLASDRNIHQGPI

SEQ ID NO: 205616 - protein, 83 aa, Glycine max
  Clone ID: PAT_MRT3847_2769C.1.pep
TEHRLAISIELSKVLSLLIHTTKPASPAVYTAPLSASADALFSSLIAPADHLLNFRSSRRPRHTSPPGPADLYASHVCNGLTG

SEQ ID NO: 205617 - protein, 51 aa, Glycine max
  Clone ID: PAT_MRT3847_276C.1.pep
WELSLRANPIRCVFQRGSLDDTKVGGNGGCAATTVQNHPNLSPSRSRRTTG

SEQ ID NO: 205618 - protein, 87 aa, Glycine max
  Clone ID: PAT_MRT3847_27700C.1.pep
FQTFLGVLFRFSGKHMFLQIWGGKNSPLFNKIICEHTAGQFKRTSNCHQGKGLWRIFKNFVRGQNKLLPGDQPLLLTPEYFLLLCAE

SEQ ID NO: 205619 - protein, 58 aa, Glycine max
  unsure (1)..(58): unsure at all Xaa locations
  Clone ID: PAT_MRT3847_27701C.1.pep
GSFNLNVQSTIERINKNSCMERESRGNPCRIVNMPQWSKSETGFLANAATRTGALXFH

SEQ ID NO: 205620 - protein, 108 aa, Glycine max
  Clone ID: PAT_MRT3847_27702C.1.pep
PCCNICSISYASQISHLSLSVKLLMILTHRTCSYLVNQLDKILIRSMNLQFIIPKFSRGEWHLRNQGEAKKSTAKGKEVADRRDESLSVALLALIDVVGIFINWIWKY

SEQ ID NO: 205621 - protein, 123 aa, Glycine max
  unsure (1)..(123): unsure at all Xaa locations
  Clone ID: PAT_MRT3847_27703C.1.pep
MIVRTYGRRKGTLSGTYSGSSSLNDDVSEPFRDSLSQEIDDPLCGFAFSSQDSSSQHWSFFDSEIGDFGNGTGACGARESKRANRAPAEGIPATSTLMEAXEFGEMMEHVDEVNFALDGLRKG

SEQ ID NO: 205622 - protein, 157 aa, Glycine max
  Clone ID: PAT_MRT3847_27704C.1.pep
MGVVTQIYDTPAAVPPTRLFKAMTLDFHNLFPKLVDSIHSIVFTQGNGGPGTIKKITTIEGDKTKYVLHRVDAIDEANFVYNFSITEGTALADTLEKVSFESQLVEAPNGGSIRKVSVQFFTKGDATLSEEELTANKAKIQGLVKLVEGYLLANPDY

SEQ ID NO: 205623 - protein, 117 aa, Glycine max
  Clone ID: PAT_MRT3847_27705C.1.pep
MGHAAGLRAGTRYAFSRDFKKKGMIPLSTYLKQYKVGDIVDVVANGAVQKGMPYKVYHGETGIVYNVTKSAVGVILQKQVGNRYMEKRINVRIEHVRHSRSREDFLKRVKLNFAKQQ

SEQ ID NO: 205624 - protein, 127 aa, Glycine max
  Clone ID: PAT_MRT3847_27706C.1.pep
MAQPPRRQALKVILLGDSGVGKTSLMNQYVSNKFTSQYKTTIGADFMNKETAIDGKLATLQIWDTAGQERFQSLGSAFYRGADCCCLVFDVNNQKSFESLESWQEEFMIQAAPDTSSGPFPFVVLRN

SEQ ID NO: 205625 - protein, 64 aa, Glycine max
  Clone ID: PAT_MRT3847_27707C.1.pep
KPVDIGNVLSRLSTAGTWFTPKLILNHQCIKALAGNAHKFHTYHILETEKRIETIIKLQILTGI

SEQ ID NO: 205626 - protein, 38 aa, Glycine max
  Clone ID: PAT_MRT3847_27708C.1.pep
ITSLQIPLHLKSRSLKIKFMTAHTISGRKMLTSSIIQF

SEQ ID NO: 205627 - protein, 56 aa, Glycine max
  Clone ID: PAT_MRT3847_27709C.1.pep
TEFSTKYYGSFFYYKKQQNKVTKMGLVKKKSSIFQYGNNGRVKVTKIPINKINHLN

SEQ ID NO: 205628 - protein, 58 aa, Glycine max
  Clone ID: PAT_MRT3847_2770C.1.pep
DCFRAFPPKVFAHFYTLSKSQVFEFKNKRNWGPLVNPKFHQGSPRLKVAQKPSLMVLE

SEQ ID NO: 205629 - protein, 244 aa, Glycine max
  Clone ID: PAT_MRT3847_27710C.1.pep
MENIGEEYKHYWETNMFLQTQELGSWGLDEALSGYYDSSSPDGAASSAASKNIVSERNRRKKLNERLFALRSVVPNISKMDKASIIKDAIDYIQHLHEQEKIIQAEIMELESGMPKKSPSYDFEQELLPVVLRSKKKRTEQLYDCVTSRNSPIEVLELRVTHMGEKIGVVSLTCSKRTDTMVKLCEVFESLKLKIITANITSFSDRLLKIVFIEANEDEKDHLQIKIQTAIKALNNDPLSPMSI

SEQ ID NO: 205630 - protein, 111 aa, Glycine max
  Clone ID: PAT_MRT3847_27711C.1.pep
MNFKPWLSFLLLALALAMVAEASSVHHEYGFHVNAVVHDLIGDDNEMLLDSESNRRTLTGRQRYISYGALNANNVPCGNRGRSYYNCQQRGRANPYNRGCTKITHCARDTS

SEQ ID NO: 205631 - protein, 99 aa, Glycine max
  Clone ID: PAT_MRT3847_27712C.1.pep
IIPTRQKFITFTTCNYSYQAKVHHLFLFSPNRLFDPEIHESDNETPFIDFCCRSIHLVKFVDHVLYFFRPFSICFALSLVLTMTNTHLLSLFALLYPWF

SEQ ID NO: 205632 - protein, 52 aa, Glycine max
  Clone ID: PAT_MRT3847_27713C.1.pep
PWNLIIPIPSNFCTSYFFFIKNFSIVAEFGVWFLSCITQVPFCRGRVAGRAV

SEQ ID NO: 205633 - protein, 207 aa, Glycine max
  Clone ID: PAT_MRT3847_27714C.1.pep
KLTLTLFQPSMDSICPIGLQCATEISALLSPPSPLQVQKYYHDLLTARGCSGIKVKQDGNFGKGLYADMDFKEGELVLKDPMLVGAQHPLNKIDCLVCSFCFCFIGSIELQIGRRLYMQHLRANESHGCEVGSSSKHCHEMDSSDEEESTQQCTSGSSKTKVPLPEGIVESLMNGQLVLPFSEKFSLPPAVPCPGGCGEAYYCSQYL

SEQ ID NO: 205634 - protein, 46 aa, Glycine max
  Clone ID: PAT_MRT3847_27715C.1.pep
ASPNLTFSWGPLDSNSSSWLEFYHAVKDTVDQEERLLPQDCMATCS

SEQ ID NO: 205635 - protein, 33 aa, Glycine max
  Clone ID: PAT_MRT3847_27716C.1.pep
TADVDVPILLIFQGWWIILMGTLLWIAYFVNEG

SEQ ID NO: 205636 - protein, 200 aa, Glycine max
  Clone ID: PAT_MRT3847_27717C.1.pep
MMEPPQTRLMINVFIVSFLALLVNLVVGVLGADNYSRDDFPLDFVFGSGTSAYQVEGAANKDGRTPSIWDTFAYAGYAHGENGDVACDGYHKYKEDVQLMLETGLDAYRFSISWSRLLPNGRGPVNPKGLQYYNNLINELISNGIQPHATLHNFDLPQVLEDEYGGWISRDIMCVPDLLYYNSLQKGVFLHGLSWICLSC

SEQ ID NO: 205637 - protein, 104 aa, Glycine max
  unsure (1)..(104): unsure at all Xaa locations
  Clone ID: PAT_MRT3847_27718C.1.pep
RQILSSSASDFRTAVVSKNXSPQATAMHEGTIAIIIDSSESTDCNIVGAMLLVDTYHTNPENARSSIFVAPVIGGRPNRVVTCSNTITQIEPHMNTRCQQQSTT

SEQ ID NO: 205638 - protein, 521 aa, Glycine max
  unsure (1)..(521): unsure at all Xaa locations
  Clone ID: PAT_MRT3847_27719C.1.pep
MMEPPQTRLMINVFIVSFLALLVNLVVGVLGADNYSRDDFPLDFVFGSGTSAYQVEGAANKDGRTPSIWDTFAYAGYAHGENGDVACDGYHKYKEDVQLMLETGLDAYRFSISWSRLLPNGRGPVNPKGLQYYNNLINELISNGIQPHATLHNFDLPQVLEDEYGGWISRDIIRDFTYYAEVCFREFGDRVLYWTTVNEPNVFALGGYDQGNSPPRRCSPPFCATNDTMGNSTYEPYLAVHHILLSHSSAARLYWRKYRDKQHGFVGISIYTFGIFPQTNTEKDRVASQRARDFFVGWIMEPLQYGDYPISMKTNAGERIPAFTNHESKQVKGSFDFIGVIHYTNLNVSDNSDALKNQLRDFTADMAANIFGEDLFSNEEYLITPWGLRQELNKFKLLYGNPPIFIHENGQRTASNSSLQDVTRVKYLHGYIGSVLDALRDGSNIKGYFXMVFPGFVRVARWIQVXSFGLYYVDRDDPQLKRYPKLSVKWYNRFLKGRRTSILDLFELEQDPITCFCFPII

SEQ ID NO: 205639 - protein, 86 aa, Glycine max
  Clone ID: PAT_MRT3847_2771C.1.pep
GKLQRDIFARNAIHFYKISSAIGVVSSHSNLPQKLNDGLDIDLSLVRILWVDGSGQHRCRAVPKKRFNDIVAKNGVGLALRLWDSL

SEQ ID NO: 205640 - protein, 71 aa, Glycine max
  unsure (1)..(71): unsure at all Xaa locations
  Clone ID: PAT_MRT3847_27720C.1.pep
PKIVQVYPFNRTRYLKDNVKVRPPISKVFAKAXKSAYDLINLAPTSKYVPGLENTLILTIKGVFAGIQNTG

SEQ ID NO: 205641 - protein, 116 aa, Glycine max
  unsure (1)..(116): unsure at all Xaa locations
  Clone ID: PAT_MRT3847_27721C.1.pep
DYATQGAHGGFSGNFLDGNSQAGDSRFGSGNDFMSQDYMGHGSQGLFTQVGFTDPLQDDATQSHFSVANANPLQSQMSSLYSQPFAHYNXQPLNMQATQQQPQAQNSQNQKIHYNG

SEQ ID NO: 205642 - protein, 65 aa, Glycine max
  Clone ID: PAT_MRT3847_27722C.1.pep
GRRGRMRVGFKGGDAVDKAIKLFRNVDMASSEFGNCLLKAIKGLGTGRFSHGSMKAPVGMTRGQG

SEQ ID NO: 205643 - protein, 734 aa, Glycine max
  unsure (1)..(734): unsure at all Xaa locations
  Clone ID: PAT_MRT3847_27723C.1.pep
NVAVDQLAEKISATGLKVVRLCAKSXREAVSSPVEHLTLHYQVRHLDTSDKSELHKLQQLKDEQGELSSSDEKKYKALKRARVREISQSADVICCTCVGAGDPRLANFRFRQVLIDESTQATEPECLIPLVLGAKQVVLVGDHCQLGPVIMCKKAARAGLAQSLFERLVLLGVKPIRLQVQYRMHPCLSEFPSNSFYEGTLQNGVTVNERKSSGIDFPWPVPNRPMFFYVQMGQEEISASGTSYLNRTEAANVEKIVTTFLKSGVVPSQIGVITPYEGQRAYIVNYMSRNGALRQQLYKEIEVASVDSFQGREKDYIILSCVRSNEHQGIGFLNDPRRLNVALTRARYGIVILGNPKVLSKQPLWNSLLTHYKEHECLVEGPLNNLKQSMVQFQKPKKIYNERRLFYGGGPGIASNDNFGNVGSGAGTSSDRRSSRGRGSYIPPGPPNGTHKPGVHPAGYPPVPRVPLPHFHGGPQSQPYAIPSRGAVHGPVGAVPHVPSPGSRGFGAGRGNSGAPPIGNHLPHQQGTQQPIGNIGSTFNFPALENPNSQPSVGGPSSQPGFANNMPVQGAGQSFRDQFSMPGMSQDFLGDDFKSQGSHVPYNVTDFSTQASQSGYAVDYATQGAQGGFPGNFLNQNSQAGYSRFGSGNDFMSQDYMGHGSQGLFTQVGFSDPLQDDATQSHFSVANANPLQSQMNSLYSQPFAHYNTQPLNMQATQQQPQAQNSQNQKIHYNV

SEQ ID NO: 205644 - protein, 61 aa, Glycine max
  Clone ID: PAT_MRT3847_27724C.1.pep
SVWLSPTLPVFVPGCFFWFPPACAFSCYVLVRLSFLLMFSLGLCVWLFSLSFVVVSPSVDP

SEQ ID NO: 205645 - protein, 76 aa, Glycine max
  Clone ID: PAT_MRT3847_27725C.1.pep
RNCNRHCNPEPFITVPSDNLPLKAISQSLCILRTGRSDEIEMSDVIIKLGWLRFQLSASMSVVCFACYSRSYLLYR

SEQ ID NO: 205646 - protein, 70 aa, Glycine max
  Clone ID: PAT_MRT3847_27726C.1.pep
CSIILGLFLQFFSICLFSHKPVTTYSSIPQLCNPCPNDHQAHHLSSVQNQEETLPQIIPGPKEDPFLQIP

SEQ ID NO: 205647 - protein, 303 aa, Glycine max
  Clone ID: PAT_MRT3847_27727C.1.pep
PPRVRKKAARVVFIPSPGVGHLVPTIEFAKLLINHDERLWISVLVMDTTSAAYTESLASQRLQFINLPESPSKSEPAMTSLLEQQKPHVKQAVSNLISDDSAPALAAFVVDMFCTTMIDVAKDLKVPSLVFFTSGLAFLGLMLHLHTLREQDKTHFRESQTHLLIPSFANPVPPTALPSLVLDKDWDPIFLAYGAGLKKADAIIVNSFQELESRAVSSFSSHAIYPVGPMLNPNPKSHFQDDNDRDILDWLDSQPPSSVVFLCFGSKGSFGEDQVREIARALQDSGLRFLWSLRKPPPSDSSF

SEQ ID NO: 205648 - protein, 453 aa, Glycine max
  Clone ID: PAT_MRT3847_27728C.1.pep
TGGRGIPSLVIVDPFWQQHYVYPDEKSFNFSSLCDFLSEFLNGTLLPYQQSEHVLQGQREATHPPFVNLDFHEVDSIPRIMAHTFSELVIGFNLSNKENTSNSWNKDVLVLFSNSWCSFCQRMEMVVREVYRAIKGYVDMLNRGSQNVKENLNHVMMKLPEIYLLDCTLNDCDLILKSVDQREVYPALILFPAEKKQPLLYEGDMAVIDVMKFVAEHGSNFHQLIRDKVAVLWVSEGAVKNQNLHDTLQTDIHPESLHSRNKYHGAPGPDRMLDQVVRPNLMNSPASNELHEASPHVVIGSVLIATEKLLGVHPFDGSKILIVAANQVTGFQGLILNKHIQWSFLPKLEEGLENLKEAPLSLGGPVMKTGMPLLSLTRTVSGNNLPEIIPGIYFLDQVTTIRKIEELKSANQPVGDYWFFLGYSSWGWNQLYDEMAEGAWNLSEDATRNLNWP

SEQ ID NO: 205649 - protein, 37 aa, Glycine max
  unsure (1)..(37): unsure at all Xaa locations
  Clone ID: PAT_MRT3847_27729C.1.pep
XXHXDSVPQWXQXLVPCQHSSXLMAAMMSXSHSGLHP

SEQ ID NO: 205650 - protein, 70 aa, Glycine max
  Clone ID: PAT_MRT3847_2772C.1.pep
LNTSRTLYFIMYIIYDKGRLIHVPLPAIKLFNTISSLLLICGIELCMILYLSYQIQLSIDTLSGKSSITM

SEQ ID NO: 205651 - protein, 160 aa, Glycine max
  Clone ID: PAT_MRT3847_27730C.1.pep
MNSPPKLLLLSLLFLTLFTLSSSSSLPELRSLLEFKKGITRDPEKLLDSWAPTTVAESTATCPSSWQGVVCDEESGNVTGIVLDRLNLGGELKFHTLLNLKMLRNLSLSGNDFTGRLPPSLGSLSSLQHLDLSQNKFYGPIPARINDLWGLNYLNLSNNN

SEQ ID NO: 205652 - protein, 30 aa, Glycine max
  Clone ID: PAT_MRT3847_27731C.1.pep
KLHSYFISIGINFLSHLITGLENRTKNLTP

SEQ ID NO: 205653 - protein, 40 aa, Glycine max
  Clone ID: PAT_MRT3847_27732C.1.pep
CPQFFCWIRNQSRARHFFFPPLGFFHFCDVFSLLRTRLNF

SEQ ID NO: 205654 - protein, 102 aa, Glycine max
  Clone ID: PAT_MRT3847_27733C.1.pep
VLESIWQLLAFCNCILLLYFVLRCGMAIYTIVMTDTRVGKKRIQNLVSISLSPSNFYGVLPHSKSVMYQCEPNSSRPVLKMILHVFFPFVVNLVGANATVFK

SEQ ID NO: 205655 - protein, 292 aa, Glycine max
  Clone ID: PAT_MRT3847_27734C.1.pep
VPWTEEEEEKLRSLFTRFEFDDATTRDILGRLYLNDSVDSRPNVAQQLVWSISTCEDANARNEMKSLVKGLLCKSSVYEKNHLDLSKEDLYAVCDSCLSSLISLFEEASDTTPPERLMKKDSNKPLIERISRQVDNINWLLEIMLDGQVAADFVDIWAHQQQLLKMHDIASPMIRYELSRVSAILFVAMGTRKLQCPLEARSGLLQAWFGPMLLDFGWLQRCRKGLDMRTLEEAMGQTLLTLPLKQQYVLFMEWFRHFSRHGTECPNMSKAFQIWWRRSFLRGSETYAVESR

SEQ ID NO: 205656 - protein, 54 aa, Glycine max
  Clone ID: PAT_MRT3847_27735C.1.pep
VLAGKRYGCLVNHHFQISPESPTSQVRESRQNVSPTIGRVRLVVSKQTSQLVKT

SEQ ID NO: 205657 - protein, 151 aa, Glycine max
  Clone ID: PAT_MRT3847_27736C.1.pep
MRSVSSPGFFFLLFLAAFSFANFASGATLLQDEVKALEDIAKTLGKKDWDFNVDPCSGQRNWTSAVQVKGSENNVTCDCTFANGTVCHVTNILLKSQNLPGTLPRDLFRLPFLQEIDLTRNYLNGTTPKEWGSTKLAIISLTRNRSTRSIP

SEQ ID NO: 205658 - protein, 42 aa, Glycine max
  unsure (1)..(42): unsure at all Xaa locations
  Clone ID: PAT_MRT3847_27737C.1.pep
QHARPTLGGSKDYPYPRRGRTXXPPAKSDPKXERRLNXASSL

SEQ ID NO: 205659 - protein, 79 aa, Glycine max
  Clone ID: PAT_MRT3847_27738C.1.pep
MQIKQASMTLVKTYVKRVTMELESIRNSDRESIQDSLLLQGMHFAYRAHQVFFFFYHSADSFVISFDFPEILRLQICNL

SEQ ID NO: 205660 - protein, 59 aa, Glycine max
  Clone ID: PAT_MRT3847_27739C.1.pep
FGTCENFPSFSFSHKNFELHSIMEEGVEADEVVRSLSSLRMNIGSLSRRSWVSETVPEM

SEQ ID NO: 205661 - protein, 174 aa, Glycine max
  Clone ID: PAT_MRT3847_2773C.1.pep
ARFSARGQHHKPKQLHGSDAKLNLPELSIKSQSQCPPPSPPPPSSVTNNTQMENLQQIQNNYIDMATCSNFNNINNPEVSMASQQVGVGPIYTSDSIVSLPLDTNPKPVENEVEFRPSWATMNEGLPVFDDSIWAEAAMSLDFPHIAAETAIYASGNNLADVGVWDSLQTPWCM

SEQ ID NO: 205662 - protein, 114 aa, Glycine max
  Clone ID: PAT_MRT3847_27740C.1.pep
MKVVAAYLLAVLGGNNTPSTDDIKEILGSVGIEADEDRIESFLSEVKGKDIVELIAAGKEKLASVPSGGGGAVAVAAAPGGGGGGAAPAAEVKKEEKVEEKEESDDDMGFSLFD

SEQ ID NO: 205663 - protein, 114 aa, Glycine max
  Clone ID: PAT_MRT3847_27741C.1.pep
MKVVAAYLLAVLGGNNSPSADVIKEILGSVGVEADEDRIESFLSEVKGKDIVELIAAGREKLATVPSGGGGAVAVAAAPGGGAAAAAPAAEAKKEEKVEEKEESDDDMGFSLFD

SEQ ID NO: 205664 - protein, 112 aa, Glycine max
  Clone ID: PAT_MRT3847_27742C.1.pep
MAEEQSNPQHQQAEEREVMVEQQQPRRAPKLRYLDFVQVAAAQAAVCLAGLYGLAKDHAGPLRPSVDAVESAVKGVVSPVYDRFGGLPLDVLAFVDRKVDDTVHEVDKHLPG

SEQ ID NO: 205665 - protein, 114 aa, Glycine max
  Clone ID: PAT_MRT3847_27743C.1.pep
FMQSFIYVWKRPSLLLYCIIQQMLDGILYSHGLRKKEFETLNSAKLNDDVNRGLVSYLTSWLIHKAATFVSTFCITCLIYLGFQVFLSFSFFPSLNTIRVYLQSLLVENWANMA

SEQ ID NO: 205666 - protein, 98 aa, Glycine max
  Clone ID: PAT_MRT3847_27744C.1.pep
FPGFYVVGQWPGLWCQFTLSKTLHVRGRRPEIRLWAQCQIKLQPVVQIYSWFPEVFPSFAFCFGFMVFAKGQGKWQLILDCRRQLIPYAFCQVFRFAG

SEQ ID NO: 205667 - protein, 59 aa, Glycine max
  Clone ID: PAT_MRT3847_27745C.1.pep
MVVSRVVVFLGLILATLVSLACSQSAAPAPAPTSDGTSIDQTVAYILMLVALVLTYIMH

SEQ ID NO: 205668 - protein, 62 aa, Glycine max
  Clone ID: PAT_MRT3847_27746C.1.pep
SKLVFTRLSPMLDTGSEFLALALVKICGLDYKPQAWDHKALMLNIVIRQFFYYSQILVASFC

SEQ ID NO: 205669 - protein, 89 aa, Glycine max
  unsure (1)..(89): unsure at all Xaa locations
  Clone ID: PAT_MRT3847_27747C.1.pep
GRKRGIRVGGEYMKTFNGFLLLLRGGGFTIXNGARRWGYETRGGFGIKMDDKMPQHGYYXYCGAQYSLNVGPSYMDNKNFRHLLGEIRS

SEQ ID NO: 205670 - protein, 421 aa, Glycine max
  Clone ID: PAT_MRT3847_27748C.1.pep
MEDANLQRLHCSVKNYDWGLPGRVSEVARLHALNSASEFHAEDPYAELWMGTHDSGPSFLASSNGNENGVSLKAWISENPDVLGHKVLHKWGSDLPFLFKVLSVGKALSIQAHPDKELARTLHKLHPDLYKDGNHKPEMALALTNFEALCGFITLKELKGVLHTVPEIVELVGATNTNLVLQTNDQDGEEKVKPVLQAVFTDLMSASKDRVTDAVNRLKSRLLKESEVRQLTDKEQLVLRLEKQYPADVGVIAAFFLNHVKLNPGEALFLGASEPHAYLSGECVECMATSDNVVRAGLTPKHRDVQTLCSMLTYKQGSPEILRGVSVNPYVNKYTPPFEEFEIDRCILPQGETVVFPAVPGPSIFLVTVGEGTMNTGLPKGHVVTEGDVLFAAANTEISVTSASELNLYRTGVNSKFFQAS

SEQ ID NO: 205671 - protein, 71 aa, Glycine max
  Clone ID: PAT_MRT3847_27749C.1.pep
RLLTALYDQAYCYQNRTGKTSFTDCFLPPFVFLAVGYQFILEVSLSSISSGPVTYSRLLAFSTFSIIHIST

SEQ ID NO: 205672 - protein, 75 aa, Glycine max
  unsure (1)..(75): unsure at all Xaa locations
  Clone ID: PAT_MRT3847_2774C.1.pep
KNLKRVGFNPWEKLILRDPFEDFGKXSFENKSPKKKKLEKKGSKIFGNVGNQRSAPLGSNKGERTFKGPNPLDND

SEQ ID NO: 205673 - protein, 115 aa, Glycine max
  unsure (1)..(115): unsure at all Xaa locations
  Clone ID: PAT_MRT3847_27750C.1.pep
TLCSMLTYKTGXPEILHGVSVNPYVNKYTPPFEEFEIDRCILPQGETVVFPAVPGPSIFLVTVGEGTMNTGSPKGHVVTEGDVLFAAANTEIRVTSASELHLYRTGVNSKFFQAS

SEQ ID NO: 205674 - protein, 336 aa, Glycine max
  Clone ID: PAT_MRT3847_27751C.1.pep
PPGVYTLQDLRAYGKEKGWCPYYLARHMVQFANVVVYSYQYLLDPKVAGIISKEMQKESVVVFDEDGCEETTDGEALSVSVRRQTIEGARRNLNRMRQEIDKFKATDAGRLRAEYNRLVEGLALRGDLPATDAWLANPALPDDILKEAVPGNIRRAEHFIHVLRRLVQYLEGRLDTENVEKESPVSFVVSILNHAGIDQKALKFCYDRLHSLMMTLEITDTDEFLHIQTICDFATLVGTYARGFSIYSSFAKEGNLSDLFAKGEAFSTLFNVIGIGVGIQLASTICASMQGKLVAGPLLSIIHLYSVSEEMRATPINTLNPRRTAMVVADFLKAGI

SEQ ID NO: 205675 - protein, 53 aa, Glycine max
  Clone ID: PAT_MRT3847_27752C.1.pep
EGERKQNSSDSICVRRSQAHIITIFQTKGLRSTRTNVRLHLHHSITYYISNIR

SEQ ID NO: 205676 - protein, 65 aa, Glycine max
  Clone ID: PAT_MRT3847_27753C.1.pep
GLHPKQRDRFGHRFGFVRCWSVSDIRMLGMKLDNIFIGDWKLNVHVTKIVQGEVKVQRQVSGYGK

SEQ ID NO: 205677 - protein, 149 aa, Glycine max
  Clone ID: PAT_MRT3847_27754C.1.pep
ARDGKATFGEVFKVFFALTITAVGVSQSSALAPDTNKAKDSAASIFEILDSKPAIDSSSDEGTTLDTVKGEIELQQVSFCYPTRPNIQIFKDMCLTMPTGKTVALVGESGSGKSTVISLLERFYNPDSGRILIDGVDIKEIQTNWLRQQ

SEQ ID NO: 205678 - protein, 79 aa, Glycine max
  unsure (1)..(79): unsure at all Xaa locations
  Clone ID: PAT_MRT3847_27755C.1.pep
IWCTHCIYQXPCQDSQLXGXXSCYFELXNQVSEXXLXXRXHTXSTAVQFRPVLGRLAAAXGVERIXCPXXXSTXXWFHX

SEQ ID NO: 205679 - protein, 357 aa, Glycine max
  Clone ID: PAT_MRT3847_27756C.1.pep
MSSKGVGEDCLGWAARDASGVLSPYKFSRRTPGNEDVLIKITHCGVCFADVVWTRNKHGDSKYPVVPGHEIAGIVTKVGSNVHRFKVGDHVGVGTYVNSCRDCEHCNDREEVHCTKGSVFTFNGVDFDGTITKGGYSSYIVVHERYCFMIPKSYALASAAPLLCAGITVYSPMVRHKMNQPGKSLGVIGLGGLGHMAVKFGKAFGLSVTVFSTSISKKEEALSLLGADKFVVSSNQEEMTALAKSLDFIIDTASGDHPFDPYMSLLKTYGVFVLVGFPSQVKFSPASLNIGSKTVAGSVTGGTKDIQEMIDFCAANEIHPNIEVIPIEYANEALERLINRDVKYRFVIDIENSLKEK

SEQ ID NO: 205680 - protein, 114 aa, Glycine max
  Clone ID: PAT_MRT3847_27757C.1.pep
KSLDFIIDTASGDHSFDPYMSLLKTYGVFVLVGFPSQVKFIPASLNIGSKTVAGSVTGGTKDIQEMIGFCAANEIHPNIEVIPIEYANEALERLINRDVKYRFVIDVENSLKEK

SEQ ID NO: 205681 - protein, 81 aa, Glycine max
  Clone ID: PAT_MRT3847_27758C.1.pep
DNEHDVGVWEVADLMGGTGLPNEAVVTKEEVQHLTFLCKSEIDSAGRITAGVLRLFKLEGSVGQSAIDQLGNLGMLPNFLM

SEQ ID NO: 205682 - protein, 60 aa, Glycine max
  Clone ID: PAT_MRT3847_27759C.1.pep
HDITLIMSASESACFHMLLLMIKIQLSILFEMQKFMINFNCFIFLFTKLIGLGIKIWWLA

SEQ ID NO: 205683 - protein, 80 aa, Glycine max
  unsure (1)..(80): unsure at all Xaa locations
  Clone ID: PAT_MRT3847_2775C.1.pep
QKIYXESNTYSVSLHQSKYQYSLQWLNIFIGYLRIKVSLHQSLCNLIGALSKSSRFLHNFFILDKVYLIQLWNDISLREL

SEQ ID NO: 205684 - protein, 72 aa, Glycine max
  Clone ID: PAT_MRT3847_27760C.1.pep
NEDTLAVINTSPLHCKQKLDRFNFIQTSMKGLKSSHITFGYFWLFIFSIFSLGAHSVLSLSSLWTLFAYFCE

SEQ ID NO: 205685 - protein, 86 aa, Glycine max
  Clone ID: PAT_MRT3847_27761C.1.pep
VINDNTSMMGISAHCCIPLLKKSPLWVKDYTPHRPKHNKETGKLLKYLRPGTRINKNNFLGTTISMGPLVALQTRVGFSAGEVLHT

SEQ ID NO: 205686 - protein, 112 aa, Glycine max
  unsure (1)..(112): unsure at all Xaa locations
  Clone ID: PAT_MRT3847_27762C.1.pep
SDDMELSGIVGLNGTTYMESDTSKVPLRTVEILAFCHALLLVENKLCGDPLEKAELNGIDWSYKSDARTLAKEVYGHPVQIAHRCHFGFYFXDMKLSIAHHEEYSLFDKGAP

SEQ ID NO: 205687 - protein, 55 aa, Glycine max
  Clone ID: PAT_MRT3847_27763C.1.pep
EDTDRVGVDLSLMLAPSSSMAKLILDYPLTPYFLNKIPRLTIALPTKSNLLAIFF

SEQ ID NO: 205688 - protein, 207 aa, Glycine max
  unsure (1)..(207): unsure at all Xaa locations
  Clone ID: PAT_MRT3847_27764C.1.pep
MENRTTQVRCPENQELATYVWNKWKEMAQQPKGISDNIDMTLSKAHFNLCNSKTPIRTIKDFSQVKGVGKMILKLMQGFFGTGSEPEDLTKKGKRTKGTKRYMPQRNSVAYALLITLYRGTSSGNEFMHKQELIDASEASGLSRVPIAPEKGKGKPGHFGSSSRDWYSGWSCMKTLIAKGLXCKIKXAPAKYMLTQEGKEAARDCLA

SEQ ID NO: 205689 - protein, 107 aa, Glycine max
  unsure (1)..(107): unsure at all Xaa locations
  Clone ID: PAT_MRT3847_27765C.1.pep
MAMQYSFSSWSRRLPMEIMVLALCILVLLHGNPSTARLLVNGSRRLSVLTERRNLVQSGLGQTPPMGWNSWNHFGCDVNESVVRETADAMMSTXLAALGYQYVNIDD

SEQ ID NO: 205690 - protein, 46 aa, Glycine max
  Clone ID: PAT_MRT3847_27766C.1.pep
LSQLEVESLLTFLFILLPSSANLSVNAADYTSLIVLASVSRELSLL

SEQ ID NO: 205691 - protein, 77 aa, Glycine max
  unsure (1)..(77): unsure at all Xaa locations
  Clone ID: PAT_MRT3847_27767C.1.pep
VRSEVDVKITDFAVSKLMCRSLXACTSYVGTCAYMSXDRFDSEAYDGNYNGFAAYICSVGLTLSVLYGGHFPFLLAG

SEQ ID NO: 205692 - protein, 31 aa, Glycine max
  unsure (1)..(31): unsure at all Xaa locations
  Clone ID: PAT_MRT3847_27768C.1.pep
SKLRXXXVSPQIMFAASTDDFGGGKYGVKLN

SEQ ID NO: 205693 - protein, 181 aa, Glycine max
  unsure (1)..(181): unsure at all Xaa locations
  Clone ID: PAT_MRT3847_27769C.1.pep
HVDPKSTSAWNAVIKGSKKWILFPPDVIPPGVHPSPDGADVASPVSIIEWFMNFYGATKNWNKKPIECVXKAGEVIFVPSGWWHLVINLEESIAITQNYVSRRNLINVLDFLKSPNASTLVSGTRDRLNLYDKFKNAIEAYFPGEIDELTRKEEERKIQQRKLSFWDSVADTNAGAFKFSF

SEQ ID NO: 205694 - protein, 394 aa, Glycine max
  Clone ID: PAT_MRT3847_2776C.1.pep
MGAYDQVSLKPLDSSRKRKSRSRGYGTRSVAETIAKWKEYNEHLYSGKDDSRTTPKAPAKGSKKGCMKGKGGPQNSQCNYRGVRQRTWGKWVGEIREPNRGSRLWLGTFSSAQEAALAYDEAARAMYGPCARLNFPGITDYASFKESLKESSMAASSSCSSAETATSDTTTTTSNQSEVCAVEDVIENPRLVNVNDKVNDCHKAYVSASPTSRMKQEPKDEAVDHMDTGAGEIQDVGLEGTHDTGQVAENVNKDQMDLSWIDGFDFIDDYLKSFSADELFQVDELLGLIDNNPIDNSVLMQGLDFGQMGFPGDGNPQVDDTPSSFIYQLQNPDAKLLGSLPHMEQTPSGVDYGLDFLKTVESGDYNGGGEEPRFLNLDDDLNPDSNGMQARKDD

SEQ ID NO: 205695 - protein, 58 aa, Glycine max
  Clone ID: PAT_MRT3847_27770C.1.pep
HEQINMAFGGIPIDYHTSTWCLRQELHDRVYISPLPSYSECSIPSTIYALLAHTDSLM

SEQ ID NO: 205696 - protein, 239 aa, Glycine max
  Clone ID: PAT_MRT3847_27771C.1.pep
GNDNHLTNYISIDIVITGSRGSGRTPLDWDSRMKIALGAARGLTCLHVAGKVVHGNIKSSNILLRGPDHDAGVSDFGLNPLFGNGAPSNRVAGYRAPEVVETRKVSFKSDVYSLGVLLLELLTGKAPNQASLGEEGIDLPRWVQSVVREEWTAEVFDAELMRFQNIEEEMVQLLQIAMACVSVVPDQRPSMQDVVRMIEDINRGETDDGLRQSSDDPSKGSEGHTPPPESRTPPRSLTP

SEQ ID NO: 205697 - protein, 88 aa, Glycine max
  Clone ID: PAT_MRT3847_27772C.1.pep
FGSSHTRAARVDPYFPSPTAFVESSPNNRVTTTTMEMLRRSSRRLFASACLWLLLSPSPSPSPLSVVSAAHGAFNVKCKYQDRTLSAL

SEQ ID NO: 205698 - protein, 54 aa, Glycine max
  unsure (1)..(54): unsure at all Xaa locations
  Clone ID: PAT_MRT3847_27773C.1.pep
LFFTKLNVPKMSXYEKIMIDATKKKIRVECPYKIPSLETENMHLTHCSLKKDKC

SEQ ID NO: 205699 - protein, 92 aa, Glycine max
  unsure (1)..(92): unsure at all Xaa locations
  Clone ID: PAT_MRT3847_27774C.1.pep
GSSKLLTDVKLYXGQHIPVSNISVGRNHAVRIPLMAQDEILSSDASDFITVLVHKNSTPQATAIHVGAIEIIIESFASPECNIVGAMLLVDN

SEQ ID NO: 205700 - protein, 129 aa, Glycine max
  Clone ID: PAT_MRT3847_27775C.1.pep
GRPPGFLKTKKKKGAFFGQPKIFPPKKIFFNLGPTKAPKGKRKRQILFPGGPFLAIFSNMGHPPNSFGGLGKLEKGGPPPPKIHPPGGKFKGLEAEKLTPQGPFFLFHKPHLFQTPPFFFPLWGGPFFK

SEQ ID NO: 205701 - protein, 71 aa, Glycine max
  Clone ID: PAT_MRT3847_27776C.1.pep
KPNVVKWFSVTSKSIFMPKRAGSCYHFLGWRPQKKKKKKKLCSIYILCSCKTCALSLRPVLENTCFILYKA

SEQ ID NO: 205702 - protein, 144 aa, Glycine max
  unsure (1)..(144): unsure at all Xaa locations
  Clone ID: PAT_MRT3847_27777C.1.pep
HLDRIKEKVVLKVLQEEFLPAGSTKVRPTPPLWVDGCPYWFAFGPWXFSGLTIPGWNFVNWGLKFDKPINKLCGALWGSKSWVFSGFFRLFGYPIPQVLFHKANWVWNQMATSEEPTIEFWILXAKQSFCQIFLLDLLGGGNFS

SEQ ID NO: 205703 - protein, 103 aa, Glycine max
  Clone ID: PAT_MRT3847_27778C.1.pep
GVVKSKRSIWRLKTITDFFWAIVNYIGLFFATMFSMEKSDAYRKGSVGKKWDGGAPGGGPGGGGGGGGGPRGPPRGGLDNVRGLDSIRGRDHSSLPACGSCCG

SEQ ID NO: 205704 - protein, 92 aa, Glycine max
  Clone ID: PAT_MRT3847_27779C.1.pep
MASTAGAAARSIFRSCSARRAAFRLGSDAKAARSPFRVASNKPLSQSTLRCPVELSFCVESMLPYHSATASALMTSMLSVSRHSYGWLPEDA

SEQ ID NO: 205705 - protein, 46 aa, Glycine max
  Clone ID: PAT_MRT3847_2777C.1.pep
CSCSPLHCLDLTVLLLITWCLFLVLRNLKDLKSFAKDGPLYSAQNY

SEQ ID NO: 205706 - protein, 127 aa, Glycine max
  Clone ID: PAT_MRT3847_27780C.1.pep
KHHHVLYRKMVKPLLRLMALSPLITLSFWNKGFSLFKGMGEGFCSHPYPCICKKAVSGFEPLAPKSPRPNFSAAPGLAPPVLIAKAGKFFPIKKVLTPPKCHFCSHNPGKIPIFPPSPLNKHLFGSL

SEQ ID NO: 205707 - protein, 96 aa, Glycine max
  unsure (1)..(96): unsure at all Xaa locations
  Clone ID: PAT_MRT3847_27781C.1.pep
MASTAGAAARSIFRSCSARRAAFRLGSDAKAARSXFRVASNKPLSQSTLRCPVELSFCVESMLPYHSATASALMTSMLSVSRHSYGWLPEDCNDDV

SEQ ID NO: 205708 - protein, 139 aa, Glycine max
  Clone ID: PAT_MRT3847_27782C.1.pep
SVNGISVTNCTFVNTTNGAEIKTWMGTVPAEATNITYEGLIMKGVQNPIIIDQSYGSNKKTTPSTSVWKISNIHFRKIQGTTVSNIAVSLQCSTSNPCEGVEIADVDLAYSGGPHNTTFVSSCSNAKAVFGGILNPPAC

SEQ ID NO: 205709 - protein, 96 aa, Glycine max
  Clone ID: PAT_MRT3847_27783C.1.pep
MASTAGAAARSIFRSCSARRASFRLGSDAKAARSPFRVAFNKPLSQSTLRCPVELSFCVESMLPYHSATASALMTSMLSVYRHSYGWLPEGSLQHL

SEQ ID NO: 205710 - protein, 81 aa, Glycine max
  Clone ID: PAT_MRT3847_27784C.1.pep
EHPKIIERKRYPHENTYLRNKKMVRNTKLIKINKKVTPLVIEIKIAAKVCSSTFSANNMPKNILNHYTTKKGPKHKKVLCL

SEQ ID NO: 205711 - protein, 96 aa, Glycine max
  Clone ID: PAT_MRT3847_27785C.1.pep
MASTAGAAARSIFRSCSARRAAFRLGSDAKAARSPFRVVYNKFFSQSTLRCPVELTFCVETLLPYDSATASALMTSMLSVSRRSYGWLPEGKEKTI

SEQ ID NO: 205712 - protein, 169 aa, Glycine max
  Clone ID: PAT_MRT3847_27786C.1.pep
MACRVQKRISLRRKLHILRVLTYSNSAKRTSLAKSTVLRLYKLKLALETVKRQYENLLATRRECVRLLNHVKESKDVKIEKVGAGTFMVRVTCEKGGDNLVAILKAFDEMCLDVQQARVSCENGFFLEAIAVAEDQTLDVRDITEVLLKAIGKQSGEKDSQMFDKCCDS

SEQ ID NO: 205713 - protein, 84 aa, Glycine max
  Clone ID: PAT_MRT3847_27787C.1.pep
MKMKKKGPQWVSNLPFGHKHVYKQFDACPQGFGLFFQTPPKTFCVEGKRRKTLNLGTALTRNYPSSTKKLLFFGGNTTPIPGWQ

SEQ ID NO: 205714 - protein, 84 aa, Glycine max
  Clone ID: PAT_MRT3847_27788C.1.pep
SVCALICTIVQQPNTSHVAHTFPRFSACYSQHHVIKQALWFFNIWIHHSSFWCHHYHHCNLTNTIMLCFVLLPLFLSCHSLSIK

SEQ ID NO: 205715 - protein, 57 aa, Glycine max
  Clone ID: PAT_MRT3847_27789C.1.pep
WNPVLGGCFEENSPTKFFSAKKKQAGWAFVNYLIKKYCFKGNLRGVLIFFFRLFRQQ

SEQ ID NO: 205716 - protein, 88 aa, Glycine max
  Clone ID: PAT_MRT3847_2778C.1.pep
PKKPGIFVEFFFSAPVKRAPFFKTPLISIGVCNWFISPPPRVLLFFFGPHFFFLYRAPPYPGGLFKSPKFPFKVFFFPQSFLLGPLFF

SEQ ID NO: 205717 - protein, 401 aa, Glycine max
  Clone ID: PAT_MRT3847_27790C.1.pep
MLYFVISFVSFLILSKSFTSRPFSSGERGIKPGSIGFWGSLSSWLVSRLKKGSTTGTTPFSFFQFSLGMSLKKNSLVSKVENEEEEGNVSLLDLPDLPLECILEHLSPAELCRVATVCTSLRDRCRSDHLWKKHMERKWGKVFGDAAYRQWKWHVASKNREKISSNQHNQKGIFAFLRGGFLPFIWIKAKSEKGTESSSSLPEDSIAALYLSLESGKFWFPAQVYNRENGHAGFMLSCYDAQLCYDSRSDTFLARYSPHGRWTTEENIQWDRLRVPPIATSPHALHISDCLDDLRPGDHIEIQWRRNKEFPYGWWYGVIGHLEQCQGHGNHCHCHYNDMVILEFTQYSAGSRWRQTVINRKHHVEKGNEIDGFYGGIRKLHSKEEIARWKNLWPTKIVIHN

SEQ ID NO: 205718 - protein, 45 aa, Glycine max
  Clone ID: PAT_MRT3847_27791C.1.pep
QEGRMEGRIRKPYLIYRLLSLDENEKARYQLGMDNRIRIRFSWEV

SEQ ID NO: 205719 - protein, 175 aa, Glycine max
  unsure (1)..(175): unsure at all Xaa locations
  Clone ID: PAT_MRT3847_27792C.1.pep
DSLKTVKLSTDLCSSINGLVSSFVALLQEENPSRESTIVRTAGKLTPFQFNRIPEIIDGNVPLATRRTXKRYNLKSNESVSSESFCPLCNSPLDKSEITDWSNIDSHRSSDIFYNTCCSSCRFQILPSDSMAMEQFYMDLPQSVVGRAKQANNGNLSLLREQIQDYLLSDGEDET

SEQ ID NO: 205720 - protein, 75 aa, Glycine max
  Clone ID: PAT_MRT3847_27793C.1.pep
ISGPALTTIIRPSTLILASIISIIPIAGFSTSTTINNPISISRYISRLQCTHLSNPYSQKFTPSPKYLPNLTYSQ

SEQ ID NO: 205721 - protein, 63 aa, Glycine max
  Clone ID: PAT_MRT3847_27794C.1.pep
PNKIWNSKASVVALVKKIKGLIIFSIRHRVRVCTPFKLSFPLFNLLSGEWNGVILVHQTLAST

SEQ ID NO: 205722 - protein, 109 aa, Glycine max
  Clone ID: PAT_MRT3847_27795C.1.pep
MSKKKVSGNTMTLKDFHGGSIPSDLPLPSAPGVTVRTSDRAGFDRPSAWGTPMGRSDHWSRPHTSPATRHYDDKTPFLSHTAPIGRNLVGMRGKPPDGGSMPRRTISDE

SEQ ID NO: 205723 - protein, 44 aa, Glycine max
  Clone ID: PAT_MRT3847_27796C.1.pep
QPKGLADRSSRRDPSGCGGAWFTILTLSLFLTTHICQFAKSFFF

SEQ ID NO: 205724 - protein, 72 aa, Glycine max
  unsure (1)..(72): unsure at all Xaa locations
  Clone ID: PAT_MRT3847_27797C.1.pep
INFMLDISTYSXVFVDHLXIFFFFIFHFNGKQNTATEAIQRGQQHLCQFKATRVPIMNGLNRRYRRLLVLHR

SEQ ID NO: 205725 - protein, 52 aa, Glycine max
  Clone ID: PAT_MRT3847_27798C.1.pep
KRPRVFSLTICANLVGSLFQWENPLVCFFWNNIFIPKLVRVGPFFEQTNFFF

SEQ ID NO: 205726 - protein, 49 aa, Glycine max
  Clone ID: PAT_MRT3847_27799C.1.pep
ANYLAVDYYKRSEGGGSFQAVDTLNGKLLCGCNDVHACVPGSTSQACSA

SEQ ID NO: 205727 - protein, 153 aa, Glycine max
  Clone ID: PAT_MRT3847_2779C.1.pep
QNLKKLTEVFGVEWANDAIVPKVMAMAQHPNYLYRMTTCFAVSTLAPALSLDVIEQSIIPMMDKLVNDDIPNIRFNVAKSYGQLINTLKQLLEQGTVIALEKAGTPGQGCQKATDVITKSILPTLEKLQQVDDVDVRYFATTAAQSFTDAMQT

SEQ ID NO: 205728 - protein, 123 aa, Glycine max
  Clone ID: PAT_MRT3847_277C.1.pep
MRGGIGGNQNAKETEDSAIFRPYARRNRSKPNHGPRGASRDVKGIISDTNKQKDHNVLSVSKPKPTGLNGEVLSKDPTSNNPLGNELVGARACQTASGNASVPEDNLDIGMNKNFKEDQRIIP

SEQ ID NO: 205729 - protein, 271 aa, Glycine max
  Clone ID: PAT_MRT3847_27800C.1.pep
HSILSVVAYPCAWSWKHWRRRVKISCLQEYVKSEYDHSCLRSCRSRALYKGMKVGATPDLMVAYIDFFLGGDEKRLDIVSIIQKRFPMCIIFGGDGSYMAPYNLHNDTLLTNLLGQHVPATVWNRLVAGLNAQLRTVRHGSIRTALGPVVDWINSHANPQLEFHGVKIELGWFQATASGYYQLGIVVAVGDYSLLDLHQSDTWVGTDELMRKNVAHGRKNVKQLQHSWPYISNSLSLKRITGGINGGLINDATLKSLDFRRDFLLPLFCYW

SEQ ID NO: 205730 - protein, 260 aa, Glycine max
  Clone ID: PAT_MRT3847_27801C.1.pep
MDGAVLACTDGAVLPVSQVFDAIRELGNGGLEQWDPLVLTSASLLSKLPVDSSSVDFVILIWLSIDCPVDQLIQEILRVLKVDGTILIRKSSQSAVGSFDKIISSLENKLLLAGFTEPQVLQSAGIKAKKPSWKIGSSFALKKVIRSSPKMQIDFDSDLIDEDSLLTEEDLKKPQLPPGDCEIGSTRKACKNCTCGRAEEEEKVLKLGLTTEQIDNPQSACGNCGLGDAFRCSTCPYKGLPAFKLGEKVALSGNFLAADI

SEQ ID NO: 205731 - protein, 135 aa, Glycine max
  unsure (1)..(135): unsure at all Xaa locations
  Clone ID: PAT_MRT3847_27802C.1.pep
MGNADYAYPSGMNVECVHRVAIPPPQPFFKSLKYSMKETFFPDDPFRKFKNQPASKRFLLGLQYFFPIFEWAPKYTLHLLKSDLISGITIASLAIPQGISYAKLANLPPVLGLYSSCIPPLIXCMMGSSRDLAVG

SEQ ID NO: 205732 - protein, 61 aa, Glycine max
  unsure (1)..(61): unsure at all Xaa locations
  Clone ID: PAT_MRT3847_27803C.1.pep
MSNTCGNCDCSDKTNCTKGNSYGVICETENSYIETVDIDVPSTDXDGKCKCVTYCTCTDWT

SEQ ID NO: 205733 - protein, 168 aa, Glycine max
  unsure (1)..(168): unsure at all Xaa locations
  Clone ID: PAT_MRT3847_27804C.1.pep
VFFMXVGFPELILPTVFLYMFLIGVWNFRYRPRYPPHMNTRISQAEAVHPDELDEEFDTFPTSRSPDLVRMRYDRLRSVAGRIQTVVGDLASQGERIQALLSWRDPRATSIFITLCLLSALVLYVTPFQAVAGLAGFYIMRHPRFRHRLPCTPVNFFRRLPARTDCML

SEQ ID NO: 205734 - protein, 52 aa, Glycine max
  Clone ID: PAT_MRT3847_27805C.1.pep
DPAPARLYILMRCLHQFKTMIPARELVKTLQCPFMHANATMRSSNVDERQNL

SEQ ID NO: 205735 - protein, 73 aa, Glycine max
  Clone ID: PAT_MRT3847_27806C.1.pep
NKRKVSSLLTCFFVLVFFFFIHFLSFYSSFIFFFYLFLHHHLLLFFLFLSFFIYYFYFINLFIPLFNIFLIYY

SEQ ID NO: 205736 - protein, 79 aa, Glycine max
  Clone ID: PAT_MRT3847_27807C.1.pep
CMTTYSSLSAQNREIRTELRFKWKKEREHIHLASHTEEQPRAHPRGGTHSFWSNLPNSSPFSLHSLPPLFTIFVILSLS

SEQ ID NO: 205737 - protein, 82 aa, Glycine max
  Clone ID: PAT_MRT3847_27808C.1.pep
RTGRRWSAPPRPPPVPTVRRPPATGRRRCRRSRRTPPATTRAGVARPVPPRRPHHRPRADRRASAPAGIHATPRRAAGRPHR

SEQ ID NO: 205738 - protein, 30 aa, Glycine max
  Clone ID: PAT_MRT3847_27809C.1.pep
INNTLVQYYHSLTLSLSTHLLNTLLAYDDY

SEQ ID NO: 205739 - protein, 47 aa, Glycine max
  Clone ID: PAT_MRT3847_2780C.1.pep
ERRRPSMGEVVRVLDGTLSVDPPPPPFAFQRPLQVDDSEENVSKLKV

SEQ ID NO: 205740 - protein, 632 aa, Glycine max
  unsure (1)..(632): unsure at all Xaa locations
  Clone ID: PAT_MRT3847_27810C.1.pep
MKLRRSSLCVFLGFLVLFLSPPPSMAKFVVEKNSLTVTSPDDIKGTHDSAIGNFGIPQYGGSMAGNVLYPKDNKKGCKEFDEYGISFKSKPGALPTIVLLDRGNCFFALKVWNAQKAGASAVLVSDDIEEKLITMDTPEEDGSSAKYIENITIPSALIEKSFGEKLKVAISNGDMVNVNLDWREAVPHPDDRVEYELWTNSNDECGVKCDMLMEFVKDFKGAAQXILEKGGYTQFTPHYITWYCPQAFTLSKQCKSQCINHGRYCAPDPEQDFSTGYDGKDVVIENLRQLCVFKVANETKKPWVWWDYVTDFQIRCPMKEKKYNKKCADAVIESLGLDIKKIERCMGDPNADSENPVLKEEQDAQVGKGSRGDVTILPTLVVNNRQYRGKLEKGAVMKAICAGFEETTEPAVCLSSDVETNECLENNGGCWQDKVANITACKDTFRGRVCECPLVDGVQFKGDGYTTCAASGPGRCKINNGGCWHEARNGHAYSACSDDGGVKCKCPAGFKGDGVKNCEDIDECKEKKACQCPECSCKNTWGSYDCTCSGDLLYIRDHDTCISKTASQEGRSAWAAFWVILIGLVVAAAGAYLVYKYRIRSYMDSEIRAIMAQYMPLDSQGEIVNHVSEERA

SEQ ID NO: 205741 - protein, 125 aa, Glycine max
  Clone ID: PAT_MRT3847_27811C.1.pep
VVKTQRKVMAKKEMKSTGVTIMIMIMLGYAQANYNSPFVKIEPNNTTDKLTCPAQCGIDCFIANIAYPICFAICVAKCPKKPPLSVYNCMIGCGKYKSTDANIDARDLSAVNACLLECEKSDNLL

SEQ ID NO: 205742 - protein, 184 aa, Glycine max
  Clone ID: PAT_MRT3847_27812C.1.pep
LIVIDLICLWNLVVAWHLCCCTYIEWSWKCVHSYSHSSFYELLLSTIIEFSIFKFIKCFSLHEKKKKKKKKKKKKKKKKKKKKKKKKKKKKKPPGPKKREIKPPKRGFKTFGAPGVLGFSKRGFFFRAPKSFLGAPQKNPTLKISGGTPGNPPKGGFSPGGNLKKGGGKKGGGGNKGGVPRGKI

SEQ ID NO: 205743 - protein, 95 aa, Glycine max
  Clone ID: PAT_MRT3847_27813C.1.pep
KAFKFSNQGIPKGRLFLVPVFKNQQKGFFLSITLSGFSPLLGSQHLGGRESFFGAMAGLLCLLWEENRWTPGLVHWPFGDFRGPENPKGGYPFCF

SEQ ID NO: 205744 - protein, 121 aa, Glycine max
  Clone ID: PAT_MRT3847_27814C.1.pep
QSITENASSPIRFTLLNTKKHVSPITTIYRPGHRKPPRSHGGDLHRILEVRVLGVHSTVRHLNLLVAVADPRELPAVASLLRRSAQPRRRLPILPSLRRQLSVRLVALSGVLHSSSSLLSQ

SEQ ID NO: 205745 - protein, 124 aa, Glycine max
  Clone ID: PAT_MRT3847_27815C.1.pep
QSITENASSPIRFTLLNTKKHVSPITTIYRPGHRKPPRSHGGDLHRILEVRVLGVHSTVLHLDVLVAVADPRELPAVASLLRRSTQPRRRFPILPRLRRQLCIRLVALSGVLHYCSSSSSPLSQ

SEQ ID NO: 205746 - protein, 313 aa, Glycine max
  unsure (1)..(313): unsure at all Xaa locations
  Clone ID: PAT_MRT3847_27816C.1.pep
PVSLLPASVAGEPVPYEKSFWGAMEDPVRYLVTFIAFSQIGVMVAPTTITSQYLAPVWRGAVIVSFVWFLHRWKTNVFARSLSSQSLLGLDREKVFALDKISSIGLFVIGIMALAEACGVAVQSVVTVGGIGGVATAFAAKDILGNVFSGLSMQFSKPFSIGDTIKAGSIEGQVVEMGLTSTSLLSSEKFPVIVPNSXFSSQVIVNKSRAEYLAIITKIPLQTEDLSKIPPISDDVKSMLRSNAKVFLGKDVPYCFLSRIESSYAELTLGYNLKHMXQDELYSAEQDILLQAVQIIKNHGVALGSTWQDTSSK

SEQ ID NO: 205747 - protein, 265 aa, Glycine max
  Clone ID: PAT_MRT3847_27817C.1.pep
VAVDGSDRYSKQLFSSVLCRTFNVKSIHLFAQKKNEHILVEWLLIADKGDFSGKNLSQMSNVANSTNIMWHDCPIQKQDRQQLLQQKGCVIWLTGLSGSGKSTIACALSRSLHSKGKLSYILDGDNIRHGLNQDLSFRAEDRSENIRRIGEVAKLFADAGVICITSLISPYQKDRDACRALIPKGDFIEVFIDVPLHVCEARDPKGLYKLARAGKIKSFTGIDDPYEPPCSCEIVLQQKGSDCKSPSDMAEEVISYLEENGYLRA

SEQ ID NO: 205748 - protein, 51 aa, Glycine max
  unsure (1)..(51): unsure at all Xaa locations
  Clone ID: PAT_MRT3847_27818C.1.pep
SSSQVDLCWHGRRCEIVAXRIIRRKXVKSPPPPKMSRVWKIDVXGWXEVRG

SEQ ID NO: 205749 - protein, 64 aa, Glycine max
  Clone ID: PAT_MRT3847_27819C.1.pep
KTLCGIFLIILCGLHVDYHPYLLNKMSTIFSAITTPSITLACLVQKHPLAFSSPVLFLSAMVNV

SEQ ID NO: 205750 - protein, 96 aa, Glycine max
  unsure (1)..(96): unsure at all Xaa locations
  Clone ID: PAT_MRT3847_2781C.1.pep
HLWGRYSIRLERSAPLSPGLTGLLILGDILRMEGVXSRAVSXLAIEYGEDVPLLMGXLRIDAIYDPVGEQEVLQVQDNILSNLPTTIAMSYLTYDR

SEQ ID NO: 205751 - protein, 87 aa, Glycine max
  Clone ID: PAT_MRT3847_27820C.1.pep
NSGRTKEGTRALKLTDGISGQENRRTQHRCERAQPTHLQMRENMRVYPITMQGHENCQKTHTAPASMAKSLYTECEDTQWTASHLGN

SEQ ID NO: 205752 - protein, 52 aa, Glycine max
  unsure (1)..(52): unsure at all Xaa locations
  Clone ID: PAT_MRT3847_27821C.1.pep
LLRSGHCIKLAPDCEKLDSSFKKAKSVXIGKVDCDEHKNVCSMYETSGYPTF

SEQ ID NO: 205753 - protein, 79 aa, Glycine max
  Clone ID: PAT_MRT3847_27822C.1.pep
ITVMSITDFFAITISTVVSIGLKSQRPYSDVSFSKSSFLSDIKIMVGSRNLYTPMISQFLEEYILKFSASRSLTHPPQL

SEQ ID NO: 205754 - protein, 38 aa, Glycine max
  Clone ID: PAT_MRT3847_27823C.1.pep
SYPEFCSICKVYILPVRTKKLIFHQMVIDWKKTMQPLG

SEQ ID NO: 205755 - protein, 131 aa, Glycine max
  unsure (1)..(131): unsure at all Xaa locations
  Clone ID: PAT_MRT3847_27824C.1.pep
NSGRQPAQHKCPAYSLNPPHPKRAQEAPDMGLYCDNFMYQQHNLHPSHRATNFIIGDFTRQANPYLWLGGPGVINSPRYSPTPVPYIPACLETPSXELLSFCADFGGSYLGWMYVALYKEFLNRERPSYSY

SEQ ID NO: 205756 - protein, 29 aa, Glycine max
  Clone ID: PAT_MRT3847_27825C.1.pep
FTLSTNCSALELSILATNKEHQRDYKALS

SEQ ID NO: 205757 - protein, 55 aa, Glycine max
  Clone ID: PAT_MRT3847_27826C.1.pep
SYFNPGTKTFQKANTNGVFIYVKEAQDMFHALREKGDMFPVVLKDVKDHLHDTAS

SEQ ID NO: 205758 - protein, 102 aa, Glycine max
  Clone ID: PAT_MRT3847_27827C.1.pep
RVYHRPRELGESSHGTHLYRPYPLFIGVQRSFSIKLARQGSAILPPVKGVHSNLILILGKGHLLPTMVGANKPAVKYGVSGFNGRGVLFHQIPDILFSDECL

SEQ ID NO: 205759 - protein, 69 aa, Glycine max
  unsure (1)..(69): unsure at all Xaa locations
  Clone ID: PAT_MRT3847_27828C.1.pep
MGRVRTKTVKKSSRXVIKXNXSRMTLDFTXXKKLLEEXAIIPSKRXRNKIAGFSSIHEAIQXGPXRGIP

SEQ ID NO: 205760 - protein, 65 aa, Glycine max
  Clone ID: PAT_MRT3847_27829C.1.pep
LRLWGDLGYFNDNLIMCGVKGFCTFFLGPGFSAVRLHAFNHVVKIPVANFFFFYFINCVEVEKKN

SEQ ID NO: 205761 - protein, 199 aa, Glycine max
  Clone ID: PAT_MRT3847_2782C.1.pep
MTVSYKDWHEMLPFALHGYRTSVRTSTGATPFSLVYGMEAVLPFEGKRLTAMSHGRVYQQRMKSAFDKKVRLRKFHEGDLVLKKMSHAVKDNRGKWAPNYEGPFVVKRAFSGGALVLTNMDGEELPSPGQDHLELPSGVGKKHKQQKPIKVHRNGCKWGWGHDRLIVAPFSMLSKQRTSLQGSPQWGMPHCPRSLAIDA

SEQ ID NO: 205762 - protein, 67 aa, Glycine max
  Clone ID: PAT_MRT3847_27830C.1.pep
RPMVADSFWTPTPTVTLNYSASTPTVSPPRGGLALIYTLNDGSFWSPAYTRHRTKTIPKRTWGVWRD

SEQ ID NO: 205763 - protein, 160 aa, Glycine max
  Clone ID: PAT_MRT3847_27831C.1.pep
MPLPLEGSFHESQSQSQSQTRPRRRSTNYHNSLFGIMSAVHNGEIRLELAANSARDARNGMKSSSASSSALGPTRVIISCPEKGEVVGKLVLLPGSFQELVEIGAKKFGFYPNKVVCKDGGEIEDLEVIRDGDHLVFLGASGVLESNCPAPAPLTNGVHI

SEQ ID NO: 205764 - protein, 57 aa, Glycine max
  Clone ID: PAT_MRT3847_27832C.1.pep
IQSQVIGLVEQHLGRKCHVEAMPERENCRIARKPKTLDMVLHVAVLRRDGSVVVDIV

SEQ ID NO: 205765 - protein, 136 aa, Glycine max
  Clone ID: PAT_MRT3847_27833C.1.pep
TSTKIRLVGCECCKFVELMASKRTFDDEEDHQGNDDRDLGRLAKRRHGDPQEAEAMFIASLIASHLRPAIQKEIKEGLRSMFRGCACLCSPRSSINQQGGASTSGGRAMQLCFVNNLPIEFFSTFNISAGRWSSSN

SEQ ID NO: 205766 - protein, 60 aa, Glycine max
  Clone ID: PAT_MRT3847_27834C.1.pep
GVFGNNLRCQRGMCFHVIKVGITEVFYVTLLLIGGQIIEILERYIRGIHLEEGGRKGGCF

SEQ ID NO: 205767 - protein, 93 aa, Glycine max
  Clone ID: PAT_MRT3847_27835C.1.pep
LCWEMSCFSDPNRKLKLCCFARLRWLIRAIKDCKSPSAFIHHHHSFNFIILGPSLMENLGFFWKKKTKKENSRVWFNCNLLECVFAPTIPKLF

SEQ ID NO: 205768 - protein, 83 aa, Glycine max
  Clone ID: PAT_MRT3847_27836C.1.pep
PRRQHTRQRRHQYGCKMTTKRDFITHTASLHICKYCHPCYLQIRRNMESLHANVTSLVYSSGNRVSHSTFACSSFVSAFDVVW

SEQ ID NO: 205769 - protein, 67 aa, Glycine max
  Clone ID: PAT_MRT3847_27837C.1.pep
YLCALHYHIPLTYQCEADHFCCGIVCYITLPILTPSDMLSDVIAIEHYHDLSIKSFDLVNTSAGIIL

SEQ ID NO: 205770 - protein, 86 aa, Glycine max
  Clone ID: PAT_MRT3847_27838C.1.pep
ARAITLPPVLSHLDIQCTGGYLRTIWGAKGAFLLSEVELLHPARWTSGPRIRASPLKEQLHLRLIHRRLPQLGINPLTRRPLISRR

SEQ ID NO: 205771 - protein, 91 aa, Glycine max
  unsure (1)..(91): unsure at all Xaa locations
  Clone ID: PAT_MRT3847_27839C.1.pep
LGQRNTPNWTTNKRVFXAFSSFGRRMAGIQACFCVSSXDPIVKNRTRPEQMPIILLLGSSQDRLIFKVIHGSLCIYIKKSSWLPILWCNFE

SEQ ID NO: 205772 - protein, 1054 aa, Glycine max
  unsure (1)..(1054): unsure at all Xaa locations
  Clone ID: PAT_MRT3847_2783C.1.pep
DYQDIFAWSYQDMPGLSSDIVQHRLPLNPECSPVKQKLRRMKPETSLKIKEEVKKQFDVGFLAVARYPEWVANIVPVPKKNGKVRMCVDYQDLNRASPKDNFPLPHIDILVDNTANFALFSFMDGFSGYNQIKMAPEDMEKTTFVTLWGTFCYKVMSFGLKNAGATYQRAMVALFHDMMHQEIEVYVDDIIAKSKSEEEHLVNLRKLFERLKKYQLRLNPAKCTFGVKSGKLLGFVVSQKGIEVDPEKVKAILEMPEPRTERQVRGFLGRLNYIARFISQLTAICEPLFKLLRKNQTDRWNEDCQEAFGRIKKCLMNPPVLMPPVPGRPLILYMTILDESMGCMLGQHDESGKKERAVYYLSKKFTTCEMNYSLLERTCCALVWASHRLRQYMLSHTTWLISKMDPVKYIFEKPALTGRIARWQVLLSEFDIVYVTQKAIKGSALADYLAQQPLNDYQPMHPEFPDEDXHGLLDEDRDKWTVWFDGASNILGHGVGAVLVSPDSQCVPFTARLGFDCTNNMAEYEACALAVQAAIDSNVKLLKVYGDSALVIHQLRGEWETRDPKLIPYKAYIKELAKTFDEISFHHVPREENQMADALATLASMFQLTPHGDLPYIEFWCRGKPAHCCQVEEERDGKPWYFDIKRYVVSKEYPPEIADNDKRTLRRLVAGFFMSGSTLYKRNHDMTLLRCVDAKEANHMIEEVHEGSFGTHANGHAMARKILRAGYYWLTMESDCCVHVRKCHKCQAFADNVNAPPHPLNVMSAPWPFSMWGIDVIGAIKPKASNGHRFILVAIDYFTKWVEAASYTNVTRNVVVRFIKKEIICRYGLPRKIITDDGTNLNNKMMGEMCEEFKIQHHNSTPYRPKMNGAVEAANKNIKKIIQKMTVSYKDWHEMLPFALHGYRTSVRTSTGATPFSLVYGMEAVLPFEVEVPSLRILAESGLKESEWAQTRYDQLNLIEGKRLMAMSHGRLYQQRMKSAFDKKVRLRKFHEGDLVLKKMSHAVKDHRGKWAPNYEGPFVVKRAFSGGALVLTNMDGEELPSPVNSDVVKQYYA

SEQ ID NO: 205773 - protein, 301 aa, Glycine max
  unsure (1)..(301): unsure at all Xaa locations
  Clone ID: PAT_MRT3847_27840C.1.pep
MVFGQVVVGPPGSGKTTYCNGMSQFLSLIGRKVAVINLDPANDSLPYECAVNIEDLVKLSDVMVEHSLGPNGGLVYCMDYLEKNIDWLEAKLEPLLKDHYLLFDFPGQVELFFLHSSAKNVILKLIKKLNLXLTAVHLIDAHLCSDPGKYISALILSLSTMLHLELPHINVLSKIDLIESYGKLAFNLDFYTDVQDLSYLQHHLDQDPRSAKYRKLTKELCDIIENFSLVSFSTXDIQDKESVGNLVKLIDKSNGYIFVGMEASAVEFSKIAVGPVNWDYYRVAAVQEKYMKDDENIDDNE

SEQ ID NO: 205774 - protein, 63 aa, Glycine max
  Clone ID: PAT_MRT3847_27841C.1.pep
PKTHLVAKKSVKIASDILLIVNIVTYHMPSFRFLGSIDIIFSGPCSYVVQFVAYRIYTFLNFS

SEQ ID NO: 205775 - protein, 83 aa, Glycine max
  Clone ID: PAT_MRT3847_27842C.1.pep
ELCDIIENFSLVSFSTLDIQDKESVGNLVKLIDKSNGYIFVGMEASAVEFSKIAVGPVNWDYYRVAAVQEKYMKDDENIDDNE

SEQ ID NO: 205776 - protein, 115 aa, Glycine max
  Clone ID: PAT_MRT3847_27843C.1.pep
DLVLVVKSRRTCFFILFCYPNRREDYFKIRTVESDHHRSTGAVDLKGSNHLPSTQLHSHSSAQAPTVARLSRFQLTREIAFGHKKGRKENGVWANSGWSSWLWQNNLLQWHVSVS

SEQ ID NO: 205777 - protein, 229 aa, Glycine max
  Clone ID: PAT_MRT3847_27844C.1.pep
MEESVFAALTDDIVLSILAKLDDDPRHWARAACVSTRFSTLIRHFCWKTKCSQTFPSSLISSDSPSTWSSLLKLAVCCPGLRHAGIPADRNAAKRMNICRNSHLAGGYRHLRREQGCKLLARQFRDDNLFLCDWPGCVHSYQRRDYMLFRGFFHNFKASGVWRSISDEKRRKIDVECAFCTCQHTWDLQSAFCLRRGFGYHLDGEPVVRAYVCENGHVFGAWTNKPLYF

SEQ ID NO: 205778 - protein, 79 aa, Glycine max
  unsure (1)..(79): unsure at all Xaa locations
  Clone ID: PAT_MRT3847_27845C.1.pep
VLTPLIFDSSKQSYWQFFIDLLGVVIXMDKTRHRITLIQNSPISNYEXPVACKKGCLMVKIVLFAYAPFITSRGFLLIP

SEQ ID NO: 205779 - protein, 54 aa, Glycine max
  Clone ID: PAT_MRT3847_27846C.1.pep
NIGFKGLTTPGFPQNHSWITQLFSLSRWTQLVIHPCRGVHFFGGDWPPFPGVWD

SEQ ID NO: 205780 - protein, 55 aa, Glycine max
  unsure (1)..(55): unsure at all Xaa locations
  Clone ID: PAT_MRT3847_27847C.1.pep
ILYPGATTTNWLHSHLDLTQTLPLIIIXKKGNNKNGLLQLLCLKRDFYPNVYKNT

SEQ ID NO: 205781 - protein, 89 aa, Glycine max
  unsure (1)..(89): unsure at all Xaa locations
  Clone ID: PAT_MRT3847_27848C.1.pep
XXXGRRXKXXAPRLXLXXSXGXXMMXSXIDXXXCXFXXXGXXGXLAXXRXHXKXXRQRXPXXXXCQFXXSVRPPCVXVXXVYXXXVXPT

SEQ ID NO: 205782 - protein, 63 aa, Glycine max
  unsure (1)..(63): unsure at all Xaa locations
  Clone ID: PAT_MRT3847_27849C.1.pep
MKCMLSGCAIWAAATFAVLLCMDCLECFLHALRLHWVEFXDKFYYADGKAFEPFTFVQEEDYQ

SEQ ID NO: 205783 - protein, 255 aa, Glycine max
  Clone ID: PAT_MRT3847_2784C.1.pep
MASMSSLKMISSLKLSHLSCSISPLSTQKQVGSSLFQSFPTKTLKFSATPQVSTSRRSTNKTTTTAFFFNNQKQHQDSSQPTKVQELFVYEINERDRGSPAYLKLSQKPVNSLGDLVPFSNKIYSGDLQKRLGITAGLCVLIQHEPEKKGDRYEAIYSFYFGDYGHISVQGAYLTYQDTYLAVSGGSGIFEGVYGQVKLHQLVFPFKLFYTFYLKGVPDLPPELLGKPVEPSPSVEPSPAAMATEPHACLPNFTN

SEQ ID NO: 205784 - protein, 123 aa, Glycine max
  unsure (1)..(123): unsure at all Xaa locations
  Clone ID: PAT_MRT3847_27850C.1.pep
MDDKSEKTESPNPENVNGKVNEDASKGKDDLVDAEFKMWESCKIEKKEFSPEREPEPESFEEEXVDSKIEGGEGFDQVNGTSLKEKVDDIGNSPSKQQVKKKKKALLGKFGSLLKKKGGSNHK

SEQ ID NO: 205785 - protein, 188 aa, Glycine max
  Clone ID: PAT_MRT3847_27851C.1.pep
RSGFPGRPTRPGKGDLTDSEKDYDMLPKVVEFSEENGHGGEDLSKKVELSANEEGLKQSLQEESIPLDDKYEKTESPKPENVNGKVNEEVSKEKDDSVEAEFKMWESCKIEKKEFLPEREPEPESFEEEVDSKIEGAEGFDQVNGTSIKEKVDDIGNSPSKQQVKKKKKPLLGKFGSLLKKRGGSNHK

SEQ ID NO: 205786 - protein, 214 aa, Glycine max
  Clone ID: PAT_MRT3847_27852C.1.pep
MKLLSPKLFTLAILLAAALVLASADAVSDNEMQKHEATESRDVVEEKLRVQSLKNSSMAERSGGALNEHAVDNPEEIASMVDESIRNYTARRNLNFFSCGTGNPIDDCWRCDKRWYARRKRLANCGIGFGRNAIGGRDGRYYVVSDPNDDDPVNPKPGTLRHAVIQDRPLWIVFKRDMVITLKQELIMNSFKTIDGRGVNVHIAYGACITIQFV

SEQ ID NO: 205787 - protein, 68 aa, Glycine max
  unsure (1)..(68): unsure at all Xaa locations
  Clone ID: PAT_MRT3847_27853C.1.pep
GRDDVERRTPNLSRLHRVDIDIQSAHWRYLRLYEHGTTVQAPSDLXLKAIIRPPLEDAAYMREDEKAA

SEQ ID NO: 205788 - protein, 92 aa, Glycine max
  unsure (1)..(92): unsure at all Xaa locations
  Clone ID: PAT_MRT3847_27854C.1.pep
FVVARLSGATPPTAHVLSRSMAMPGIGMLLEGIIGSVVGTTVSVENERILVLARLRSRKRLHISCGYMXLYTILGKYXFFRIKPLPIFADIY

SEQ ID NO: 205789 - protein, 129 aa, Glycine max
  unsure (1)..(129): unsure at all Xaa locations
  Clone ID: PAT_MRT3847_27855C.1.pep
LVYQDLLTGDELLSDSFCYKEIENGMLWEVQGKGVXKGAFFFYIGANPSAEGGLXDEGVDDAAGKVVDIGDTFGLQEETGFDKKQFATFTKRFTQNMTSNLDAEKHEPFQKDIQGATKNPLSKSKDSQL

SEQ ID NO: 205790 - protein, 30 aa, Glycine max
  Clone ID: PAT_MRT3847_27856C.1.pep
EKKGLRPISFNIQARSICFTLESIDHIIDS

SEQ ID NO: 205791 - protein, 82 aa, Glycine max
  unsure (1)..(82): unsure at all Xaa locations
  Clone ID: PAT_MRT3847_27857C.1.pep
LLVALILMPHGLAPYYIPXKTSPGCSASVYKPPVCKPRGLYRHNHAFYXKPKPPXYTPPYKRPPYTTPPHGKYPSVEDSTHA

SEQ ID NO: 205792 - protein, 100 aa, Glycine max
  Clone ID: PAT_MRT3847_27858C.1.pep
MDSSAVVGSTISEPHNDMEFESHEAAYAFYKEYAKSAGFGTAKLSSRRSRASKEFIDAKFSCIRYGNKQQSDDAINPRPSPKIGCKASMHVKRRLDGKWM

SEQ ID NO: 205793 - protein, 66 aa, Glycine max
  Clone ID: PAT_MRT3847_27859C.1.pep
ITFVSVTVRVNLIFWYPSILICDLRTLFSANYLPLYAQPRGNHTFCVNPLQLGFTRFGYVCVHFHM

SEQ ID NO: 205794 - protein, 82 aa, Glycine max
  Clone ID: PAT_MRT3847_2785C.1.pep
ASLVISDQSGAEGAAVLTNNYIASSIHPFVADERNITHGHFILCIGKRLEPHGIIYGWKDYALDIVTLLRLVLILHHVYPSR

SEQ ID NO: 205795 - protein, 61 aa, Glycine max
  Clone ID: PAT_MRT3847_27860C.1.pep
MHMLLLLSDFNYALSDCYLDENKSLILKIVESQNSGKLSECAENQARLQRNLMYLAAIADS

SEQ ID NO: 205796 - protein, 321 aa, Glycine max
  Clone ID: PAT_MRT3847_27861C.1.pep
ESGGGKYRMSGSSPSHGRYRSRSRSTHASRDRSRSRSIIDEYAHSKRRRSDYDHDEERVRVRGREHGHGSVVDDRREYSTRYHNREARDRDRSRDRDVDRDLHREKKQEETSRGKEIEWEHKRGKERERSRERYRRDAEKDRSREREEDGDRRQEKERDRSWDTVFERDRRREKERDRSRDRTIGGKRDRDPENERDDKNRERRDDRYGHKDRDTANGKDRHLRHEDGNDNGDRYRKHSRHEENEYHWERKRNSDNPVKVYNSMGSTAEVDESKLTSEVEPDDLEEDTLQLPEQEEEDLNRIKEESRRRREAIMEKYKKQH

SEQ ID NO: 205797 - protein, 44 aa, Glycine max
  Clone ID: PAT_MRT3847_27862C.1.pep
KDLVLVLNKYMPCVRLMRHPLPSGVVGSVYKKGRGFLRDGEFPL

SEQ ID NO: 205798 - protein, 62 aa, Glycine max
  Clone ID: PAT_MRT3847_27863C.1.pep
CLSIKLQERINQRKKRISHNTKSQVLPPLPINRLNHISSIFRQHLSVRDSLLLKNASALTYC

SEQ ID NO: 205799 - protein, 93 aa, Glycine max
  Clone ID: PAT_MRT3847_27864C.1.pep
NPTNPAGIKFYTLPAPLNYPRRLFIFKTPKKGFNFNFFPLPFKIFMGVLPLCPPPPPPPPPPPPPPPPPPPPPPPPPPKEGGRHTVIIGKFPK

SEQ ID NO: 205800 - protein, 87 aa, Glycine max
  unsure (1)..(87): unsure at all Xaa locations
  Clone ID: PAT_MRT3847_27865C.1.pep
MKLELGRCLGRCFYHQQRSTLLIDMNNPFLNITVEWFLNNGAVVSTLSGAEDTYHIIRCGNVLTHDLXKTFNKMCKERVYWGTLAGA

SEQ ID NO: 205801 - protein, 56 aa, Glycine max
  Clone ID: PAT_MRT3847_27866C.1.pep
LRLLLCARMKSSPRDFLCRKPGIAKRALRYSFRLLTMSIDHSTPDLDELFGECRHD

SEQ ID NO: 205802 - protein, 51 aa, Glycine max
  Clone ID: PAT_MRT3847_27867C.1.pep
AHSSADSCIALHIVCQGLSVYTVTYIESPQAKKPTGGIVVMILLLVVVKAL

SEQ ID NO: 205803 - protein, 133 aa, Glycine max
  Clone ID: PAT_MRT3847_27868C.1.pep
PATFIQAALPQIIAHTQKVFFKKTIDNLRQAAYICCKELKDNPYIICPYKPEGSMAMMVRLNLSLLEDISDDIDFCFKLAKEESVIILPGTAVGLNNWIRIIFATDPFALLEGLKRVKSFCERHARKCLKTTE

SEQ ID NO: 205804 - protein, 109 aa, Glycine max
  Clone ID: PAT_MRT3847_27869C.1.pep
GLKHGADVKGAVKVSVKVERNGTAGIVSFNGNAGGGGAAGAMRFKSADFVPPNDPKEVYASILASSSKSGFQFPDSCRFLSPVRTRLTSVYCSIAAPSASSIARALAVI

SEQ ID NO: 205805 - protein, 35 aa, Glycine max
  Clone ID: PAT_MRT3847_2786C.1.pep
GIVRPFIEEFLVNFCFEEIGGLVINYGHNIQWFHL

SEQ ID NO: 205806 - protein, 90 aa, Glycine max
  Clone ID: PAT_MRT3847_27870C.1.pep
QHITELHQNINNIYIYNAWPLSSAYTYYTFNAKIHEPEIKPHGFKSTLHILFFLSPYTCFAWHINLNASLAKPEFQHRPLHQTSPYHSQF

SEQ ID NO: 205807 - protein, 31 aa, Glycine max
  Clone ID: PAT_MRT3847_27871C.1.pep
IILIFYFNYSFLKFKAFTSCLQRNLLYILFH

SEQ ID NO: 205808 - protein, 32 aa, Glycine max
  Clone ID: PAT_MRT3847_27872C.1.pep
SFYKLISMNCVLQSLYCENLVFKYLNKLSLHP

SEQ ID NO: 205809 - protein, 111 aa, Glycine max
  Clone ID: PAT_MRT3847_27873C.1.pep
FSCRMVLHLVALANLHGLRPAVVGLACPLVLKFLMGFRIFRDDALHHSRLFLFQLGHIAFSTQAHISRLPRMERALRLIWTTLTPSPSPSSTADNSQFTQQSFYDLSMLSL

SEQ ID NO: 205810 - protein, 85 aa, Glycine max
  Clone ID: PAT_MRT3847_27874C.1.pep
NFSLFVTCKHGVLKDLCLTSSFACSSSPPQLPFSVVATGENPQKGKPRVTPKTPTVPVVKPPVTIPPIVNPPVTIPPIVNPPVTV

SEQ ID NO: 205811 - protein, 75 aa, Glycine max
  Clone ID: PAT_MRT3847_27875C.1.pep
PPRPPGGGQLPQVGPQPNFRFQSQKRPLAPRQMGSFPPLKDKPLPQLGSPQGFKKNSWPQEPGNSSLVFGWPFLF

SEQ ID NO: 205812 - protein, 53 aa, Glycine max
  unsure (1)..(53): unsure at all Xaa locations
  Clone ID: PAT_MRT3847_27876C.1.pep
XKXKTLHSNSXPVAXXPKXLTTFYVSVQRKKEKPKKLVVVLXIXXXXXSXXSX

SEQ ID NO: 205813 - protein, 397 aa, Glycine max
  unsure (1)..(397): unsure at all Xaa locations
  Clone ID: PAT_MRT3847_27877C.1.pep
MGAERKWLFTLLSAAFLSLMLLLMSSFSAFSTPKVFPSLVQHGSHYPPAFAYFISGGNXNKDRILRLLLXAVYHPRNRYLLHLGRDARDEERQALVAAVRAVPVIRTFGNVDVVGKADYVTYLGSSNVAITLRAAAIMLKLDSGWNWFITLSARDYPLITQDDLSHVFSSVSRDLNFIDHTGDLGWKESDRFQPIVVDPGLYLARKSQIFQATEKRPTPDAFKLFTGSPWLILSRPFLEFCIFGWDNLPRTLLMYFTNVKLSQEGYFHSVVCNAPEFKNTTVNGDLRYMIWDNPPKMEPHFLNASVYNQMAESGAAFARQFQLNNPVLDMIDERILQRGRHRVTPGAWCTGRRSWWVDPCSQWGDVNTVKPGPRAKKLEGSVSNLLDDWNSQTNQCK

SEQ ID NO: 205814 - protein, 89 aa, Glycine max
  Clone ID: PAT_MRT3847_27878C.1.pep
GSTLSGIRASALDAGSILSYYFSLKFVQVHVLSLFCYLRFCLHLVSFLFASCVLLFAFLFTSCFILVCVLCSVICVLVYILFRSCSCSC

SEQ ID NO: 205815 - protein, 85 aa, Glycine max
  Clone ID: PAT_MRT3847_27879C.1.pep
SGAAFARQFQLNNPVLDMIDEKILQRGRHRVTPGAWCTGRRSWWVDPCSQWGDVNTVKPGPQAKKLEGSVSNLLDDQNSQTNQCQ

SEQ ID NO: 205816 - protein, 66 aa, Glycine max
  Clone ID: PAT_MRT3847_2787C.1.pep
PKFPGTPGNRGPVSIKPPPPRGPNHFPLQGKKAPGLGSQGVPPRPTQMAKVQTPVVPLPTPSYKMG

SEQ ID NO: 205817 - protein, 55 aa, Glycine max
  Clone ID: PAT_MRT3847_27880C.1.pep
MGAERKWLFTLFSAVFLSLMLLLMSSFSAFSTPKVFPSLVHHGSHYPPAFAYFIS

SEQ ID NO: 205818 - protein, 79 aa, Glycine max
  Clone ID: PAT_MRT3847_27881C.1.pep
PCPSHFFCSVCSSHTLSLNFPLLSPFTRCLFSFFFFSPSHMFFLFFFFFCRGPPPFPPLQPTPFLKSWQTFLVRNIMKI

SEQ ID NO: 205819 - protein, 231 aa, Glycine max
  unsure (1)..(231): unsure at all Xaa locations
  Clone ID: PAT_MRT3847_27882C.1.pep
MPVAVTIPSYQHRIYASLIYIAKAKKTTMASTSSSNPGGAFTTLQERVTFEKEIKKSKFIAIAGPIPDEKSAMSFLSQVRDPRATHNCWAYKVGDQYRSNDDGEPSGTAGKPIQTAIDSSGIDRVMVVVIRYFGGIKLGTGGLVRAYGGVASECLRNAPTCLVKXRVPMGVEVPFELVXXVLNHQLQSFHVGDIKQDYDTGKDGIKMVTFRSMEELKLSFKSKNMPLNQAN

SEQ ID NO: 205820 - protein, 232 aa, Glycine max
  unsure (1)..(232): unsure at all Xaa locations
  Clone ID: PAT_MRT3847_27883C.1.pep
VAVTIPSYQHRIYASLIYIAKAKKTTMASTSSSNPGGAFTTLQERVTFEKEIKKSKFIAIAGPIPDEKSAMSFLSQVHFLSLLLRLFYLFIYFNIGCFGFVCCYXVRDPRATHNCWAYKVGDQYRSNDDGEPSGTAGKPIQTAIDSSGIDRVMVVVIRYFGGIKLGTGGLVRAYGGVASECLRNAPTCLVKTKVPMGVEVPFELVGVLNHQLQSFHVEDIKXEYDTGKDGIS

SEQ ID NO: 205821 - protein, 137 aa, Glycine max
  Clone ID: PAT_MRT3847_27884C.1.pep
AIKHPINPIRASYLNHVRDGKKSVVVKKVISFLRKWHHSPRYALYYLKQFFLAGRGPSALKRKEATHQEVIHAKIEREWLVNPNMSGIEEDRASGFEVMQLELELLQTWLLNSGLGLSVMVSGLPWLGATKRDIRQK

SEQ ID NO: 205822 - protein, 105 aa, Glycine max
  Clone ID: PAT_MRT3847_27886C.1.pep
MTPPVDPTFSSFSAGFWKPCWPRRFRLKKEPLRWYPLSLFKGFWVSQGGGGGGGGEVQLACGLVFLGFLVLVPGNGKGFKGGFVFGLDGRGLFVQVLKRVFFLPA

SEQ ID NO: 205823 - protein, 268 aa, Glycine max
  unsure (1)..(268): unsure at all Xaa locations
  Clone ID: PAT_MRT3847_27887C.1.pep
ARNSARARSSDDQKDDIPVENYVAQRYVENPYLIGGRKFDLRVYVLVMSYIPLRAWLYRDGFARFSNTRFTLNSIDDHYVHLTNVAVQKTSPDYHPKKGCKWTLQRFRQYLASKHGPKAVETLFSDMDNIFIKSLQSVQKVIISDKHCFELYGYDILIDQDLKPWLLEVNASPSLTASSQEDYELKTCLLEDXLHVVDMEARLTGKEKRVGGFDLMWNDGPVSREEGPCDLSGMGNFVTNTHLGCINDRKEQLRQLFRSLQVQKKASS

SEQ ID NO: 205824 - protein, 171 aa, Glycine max
  Clone ID: PAT_MRT3847_27888C.1.pep
MNFQGVGYPLDIVVCSALGADMYDCVYPTRTARFGTALVPEGVLKLKHKAMADDTRPIDPTCPCMVCKNYSRAYIHCLVTKDAMGSQLLSYHNLYYMLQLSRNLHSSIVEGRFPEFVCDFLHKMFPKGDVPEWVCDAMEVAGIDIYSCCAPFPSCQKDDSKNMPEEVSLVR

SEQ ID NO: 205825 - protein, 139 aa, Glycine max
  unsure (1)..(139): unsure at all Xaa locations
  Clone ID: PAT_MRT3847_27889C.1.pep
KCRSIKFXAVDWGNNHKQRAHQIGKVASDFIQEEVKMDYVYDYMFHLLNSYAKLFRYKPSISANATELCVESMVCEAEGSVKKFMMESLVKVPANTDPCTMPVPFDPPTLNAPLQRKESSIQQVESWEKSYWDNQTITS

SEQ ID NO: 205826 - protein, 61 aa, Glycine max
  Clone ID: PAT_MRT3847_2788C.1.pep
CRLQRKNNFGINSHYESGEPHFQILLTLCGLSKHYKVVAPHFSPKVSSDYYSHKRPDFFIF

SEQ ID NO: 205827 - protein, 44 aa, Glycine max
  Clone ID: PAT_MRT3847_27890C.1.pep
SASTLKVIPELAAHTGSVRHDQILGHGRHRKPPVTVRHSQFLVP

SEQ ID NO: 205828 - protein, 101 aa, Glycine max
  Clone ID: PAT_MRT3847_27891C.1.pep
PKKKVFGRGGFSRGCWSQKRLVSFRNPRCLLFKEACFSDKVLSLPHLLAMVVPKTGFLIDGGKIAFINLGLNVLGWPEPPITFLLSPPSFRTLLRWVALVY

SEQ ID NO: 205829 - protein, 145 aa, Glycine max
  Clone ID: PAT_MRT3847_27892C.1.pep
RTELQSWIQEVIISLLQYADDTIFFGEATMENTKAIKSILRTFELASGLKINFAKSSFGSIGMPEPWKRSAADFLNCSLLSIPFVYLGIPIGDNPRRCQLWDPILQKCERKLAKWKLRHISFGGRVTLIQSPSVVFSQPYSSRSS

SEQ ID NO: 205830 - protein, 81 aa, Glycine max
  Clone ID: PAT_MRT3847_27893C.1.pep
DRVRISFNLTQSPISNRRVFSKVTKSGQANDSLSLCPAHRVIFYPLINRTQRSSNTLELFSKSSNDCICFRLQGTPACDPG

SEQ ID NO: 205831 - protein, 110 aa, Glycine max
  unsure (1)..(110): unsure at all Xaa locations
  Clone ID: PAT_MRT3847_27894C.1.pep
DKKWQQLSCMALSSPSLAGKVVKLGPSSPYTGRVSLRNTDNQHVFXGTPWYRPYQLKHLDPFYGXPPAYLTGELPSDYGWDTVDLFADPETFAQNRDTEDVHSLWAILAA

SEQ ID NO: 205832 - protein, 113 aa, Glycine max
  Clone ID: PAT_MRT3847_27895C.1.pep
LRLWALSLAHAQLSDVLWNMVFRRAIKIAGLMGGKGLAFTGGNFAGGFIIYAVFALWVCFTVAVLVLMEGLSAFLHTLRLHWVEFMSKFFMGSGYPFEPFTFKRILNEPPRAE

SEQ ID NO: 205833 - protein, 73 aa, Glycine max
  Clone ID: PAT_MRT3847_27896C.1.pep
EPIFAPHINLSEHVLNSWICNTYSMHKATRGEDKLKSGVTDFQRAEEAHLQSDLDRYMLAQAEDEGVAQRRWR

SEQ ID NO: 205834 - protein, 39 aa, Glycine max
  Clone ID: PAT_MRT3847_27897C.1.pep
LPLVCSVVVRIPRCSRTLGIMPMPWRMLSDVATPTQNML

SEQ ID NO: 205835 - protein, 82 aa, Glycine max
  Clone ID: PAT_MRT3847_27898C.1.pep
IIGPSGKNILGMDNKSHWDTRHSARTLMGHTNFQTTNPKSDLAPFSKNPLTFTLAPPQTFIQAYNFSHTMNLHPIIIAKFLA

SEQ ID NO: 205836 - protein, 85 aa, Glycine max
  unsure (1)..(85): unsure at all Xaa locations
  Clone ID: PAT_MRT3847_27899C.1.pep
REWLCVLVISSXPLKSWQPXCLISVVMVNYTKCTIQIFKRDTVISFNYEDWQGIVSHFGPGDKVKIFVLFDHGLVVKKTACLSSV

SEQ ID NO: 205837 - protein, 99 aa, Glycine max
  unsure (1)..(99): unsure at all Xaa locations
  Clone ID: PAT_MRT3847_2789C.1.pep
LANKSTFACGLQAGVRFLDIEFIRVAMHNXMPECKMDWLQNIAMHHHLEDGTSHAGCLLRNVSHIKTEDGRIEKWAHVRATRDEEHPYLPRVLCDSKHC

SEQ ID NO: 205838 - protein, 78 aa, Glycine max
  Clone ID: PAT_MRT3847_278C.1.pep
MNAFLNETNSLWIRYSVLLFYTTCVTSYMSYPNFVQGLLLDNMQPLVSRFEILGVLCCTINEVPRRLRNQKEADLRDP

SEQ ID NO: 205839 - protein, 100 aa, Glycine max
  Clone ID: PAT_MRT3847_27900C.1.pep
MNSDSLAAIGGMDQRLVIWDIQHFLSRATCDHEGGVTCLTWVGSSCVATGCVDGIVRLWDIRSGECVEKFRGHSDALQSLCESANGDYIVLGFLDHTAWG

SEQ ID NO: 205840 - protein, 147 aa, Glycine max
  unsure (1)..(147): unsure at all Xaa locations
  Clone ID: PAT_MRT3847_27901C.1.pep
EYKKAEMRYKEPLKIRPNFYEGYLTLEHQQLKQPKLCXYYAMTYKKDLEANCSNKVLKLYNKAXKQHRRKHLDIEXIENQHWNKISKSDKYREHVDKINLDILLQYISNNESSERATNMISRIHLVIKTLVYKHWFVGYKLILPTYD

SEQ ID NO: 205841 - protein, 523 aa, Glycine max
  Clone ID: PAT_MRT3847_27902C.1.pep
MAMASLARRKGYAVVLSSRSSFCLTSWRGFASGSDENDVVVIGGGPGGYVAAIKAAQLGLKTTCIEKRGTLGGTCLNVGCIPSKALLHSSHMYHEAKHAFANHGVKFSSVEVDLPAMMAQKDKAVSNLTKGIEGLFKKNKVNYVKGYGKFVSPSEVSVDTTEGENTVVKGKHIIIATGSDVKSLPGVTIDEKKIVSSTGALALSEIPKKLVVIGAGYIGLEMGSVWGRIGSEVTVVEFASEIVPTMDADIRKQFQRSLEKQGMKFKLKTKVVGVDTSGDGVKLTVEPSAGGEQTIIEADVVLVSAGRTPFTSGLNLDKIGVETDKLGRILVNERFSTNVSGVYAIGDVIPGPMLAHKAEEDGVACVEYLTGKVGHVDYDKVPGVVYTNPEVASVGKTEEQVKETGVEYRVGKFPFLANSRAKAIDNAEGLVKIIAEKETDKILGVHIMAPNAGELIHEAAIALQYDASSEDIARVCHAHPTMSEAVKEAAMATYDKPHSHLKSWLLLSSLVFIFVQEFTMTWR

SEQ ID NO: 205842 - protein, 502 aa, Glycine max
  unsure (1)..(502): unsure at all Xaa locations
  Clone ID: PAT_MRT3847_27903C.1.pep
MAMANLARRKGYAVVLSSRSSLCLTRWRGFASGSDENDVVVIGGGPGGYVAAIKAAQLGLKTTCIEKRGTLGGTCLNVGCIPSKALLHSSHMYHEAKHAFANHGVKFSSVEVDLPAMMAQKDKAVSNLTKGIEGLFKKKKVNYVNNXGKVDSPYEVSVDTIEGVNVCCEHQXIFEYPLASEAEYHPCLCTIDENNCLSVTMAVTLTDIPKRLIVIVACNIELESGSLWGLLGSEITAVXFASEIVPTMDAEVRKQFQRSLEKQGMKFKLKTKVVGVDTSGDGVKLTLEPAAGGDQTTLEADVVLVSAGRTPFTAELGLDKIGVETDKIGRILVNERFATNVSGVYAIGDVIPGPMLAHKAEEDGVACVEYIAGKVGHVDYDKVPGVVYTMPEVASVGKTEEQVKELGVEYRVGKFPFMANSRAKAIDNAEGLVKILAEKETDKILGVHIMAPNAGELIHEAAIALQYDASSEDIARVCHAHPTMSEAVKEAAMATYDKPIHI

SEQ ID NO: 205843 - protein, 96 aa, Glycine max
  unsure (1)..(96): unsure at all Xaa locations
  Clone ID: PAT_MRT3847_27904C.1.pep
APRXRRXXXEXRRGGWXRXPARRRTPSGRRTXXXXXXXXXXXRRWWLWXRTLALXLXWXXGXRXWRRLEGXGQRTLLXARGXXDGXVXXRREGXVX

SEQ ID NO: 205844 - protein, 80 aa, Glycine max
  Clone ID: PAT_MRT3847_27905C.1.pep
STTYNGQYSSGEAWKPRPGGSHNRIWLSGPNSSVQQSLIRRGWRLLDNRRMNQREDFPRESRPLQRPNPRNQIGSGLASY

SEQ ID NO: 205845 - protein, 241 aa, Glycine max
  Clone ID: PAT_MRT3847_27906C.1.pep
GHRLEVLSEIFFDVPPPPRSPLPESYLYSPESDNTTTTETEFSVQMARLILILLCKIDGKSRYYKEVSLSYLFLANNLRHILAKVRASNLHYVLGDDWVLNHDAKVKRLTANYERVAWGKVLSSLPENPTAEMSAAEARVMFGNFNFEFEKAYRRENTFTVPEQEFREEIKASLVRKITPIYREAYETHRIVMGTVREIREYVTFAPEDVENYMMNLFSEGRASSGSGGNKSCFVKCKKCK

SEQ ID NO: 205846 - protein, 135 aa, Glycine max
  Clone ID: PAT_MRT3847_27907C.1.pep
HLYLKIGVEELCHGEKNPYLVEGGFYSWMKQGLRIKELKPETALSILNEEAEAILEDVSPSPWQLLGYGTVLIAGLYALLELEKTLQLIGAFGLGLTIYLRVSSYENSEDLKQDVRLLLSPVRLGAQAFSWACGK

SEQ ID NO: 205847 - protein, 395 aa, Glycine max
  Clone ID: PAT_MRT3847_27908C.1.pep
CNLYQIDVLRRTIVVVESSLTSGASYVVYLYGSAKELLPAGIRDTVNVYEDKATEILRPVGSATQRLYMAVYSLEKSLGLDPNDPIIPFVVLLGSSATLWAFYWLWTYGGYSGDLSPKSAFELLAEDANAALIDVRSEEMREKYGIPDLRRAARFRYASITPLEVDGSIRKLLKSGRELDDSLIAAIIRNLKMVKDSSRVIVLDADGTRSKGIARSLRKIGLKNPYLVQGGFQSWMQQGLRIKELKPETALSILNEEAEAILELEPIRLEQLLGYGTVLIAGLYALLELEKTLQLIGAFGLGLTIYLRVSSYEKSEDLKQDVRLLLSPVRLGAQAFSWAAGKLESNGLGLPTSPSSSDVQNRVLQAAAKHESQPSDSEGNQDPVPEPTVPLNQNV

SEQ ID NO: 205848 - protein, 107 aa, Glycine max
  unsure (1)..(107): unsure at all Xaa locations
  Clone ID: PAT_MRT3847_27909C.1.pep
MGYLCDFCGDQRSLVYCRSDAACLCLSCDRNVHSANALSRRHSRTLVCERCNSQPAFVRVCXMRKISLCQNCDWVGSMGPHHLSSTHKKASINCYSGCPSAAEFSSI

SEQ ID NO: 205849 - protein, 71 aa, Glycine max
  unsure (1)..(71): unsure at all Xaa locations
  Clone ID: PAT_MRT3847_2790C.1.pep
GDAYVSVGRDRXFEALGKTYTQDVICHLXFSFGIEXYDVTREKAIVRKEKHLEEEXVDEDEEVIYKIEVPA

SEQ ID NO: 205850 - protein, 89 aa, Glycine max
  Clone ID: PAT_MRT3847_27910C.1.pep
SLLLLFWVIILHRMDNRQFFSFTHKTCQEIYSSRPGALMFKSETAFYFSLTPEHHKPFLHQTGGWETSKHIKGSPFWYCKQPMTLTKFY

SEQ ID NO: 205851 - protein, 50 aa, Glycine max
  Clone ID: PAT_MRT3847_27911C.1.pep
NVMFDLMLILISLLLINLSKCSTNDEEGGSIELIILTDGVVYAAFSTSTV

SEQ ID NO: 205852 - protein, 57 aa, Glycine max
  Clone ID: PAT_MRT3847_27912C.1.pep
IEVKLDNIEQVYCFNSTGNTHVNVGVHGHGRSREPPSDGHITLKTQCTSLVRPQREH

SEQ ID NO: 205853 - protein, 58 aa, Glycine max
  Clone ID: PAT_MRT3847_27913C.1.pep
VYFLITLAPIPKPNSDFCFVYGTLSYGEVGGASTAIPHSDSLLTLYFNPLVFASLIPS

SEQ ID NO: 205854 - protein, 132 aa, Glycine max
  Clone ID: PAT_MRT3847_27914C.1.pep
MTVKGSGKNEERELLQKMDTNIALKCHLKVPFNQVMQFTGIQAIVEHVACETKIHLIDLEIRSGVQYTALMQALAERRDRIVQLLKITAIGLSSLKTMIEETGKRLASFAESLNLPFSYKTVFVTDIAEIRE

SEQ ID NO: 205855 - protein, 86 aa, Glycine max
  Clone ID: PAT_MRT3847_27915C.1.pep
ISMLLSLVLDFLQQRPNLVYIVTGSCYVAHIVVISQYKALVITGVHKSINCVGAFSNVIVLNNFGCIIFHGRFIHCDLLQKGSSSR

SEQ ID NO: 205856 - protein, 69 aa, Glycine max
  Clone ID: PAT_MRT3847_27916C.1.pep
SSSGVAFQSSNQWQEKYNNLESAFKAYMIMKKGRIPEELASYFTPDQTHSNDASSVPNTPLNARGSSGA

SEQ ID NO: 205857 - protein, 63 aa, Glycine max
  Clone ID: PAT_MRT3847_27917C.1.pep
QRAISTTMLFQLLPIKHLISYSLSISTAAYNACSLSSLLLSTGFSLVALDSASKADREARARA

SEQ ID NO: 205858 - protein, 57 aa, Glycine max
  Clone ID: PAT_MRT3847_27918C.1.pep
ILIARGSRIWLRRIYGNTVLNHITGFSLFGDGDYTFSICMNRAIGFAHNLVAISMDQ

SEQ ID NO: 205859 - protein, 47 aa, Glycine max
  Clone ID: PAT_MRT3847_27919C.1.pep
EGQPKVLYLTLLSGGNLALSLHVDPGIHTLTSLQYATTILFIKEIAR

SEQ ID NO: 205860 - protein, 66 aa, Glycine max
  Clone ID: PAT_MRT3847_2791C.1.pep
FLYKMKLLLAFLLNENIERLVSTICFSYKIPSLSWFLLAVTVLPQFLIIARNCGKMLLMRLRLQSG

SEQ ID NO: 205861 - protein, 103 aa, Glycine max
  Clone ID: PAT_MRT3847_27920C.1.pep
LIKGTKISKPNGGSPPIYIIILNLKEMNLMLGGGGPSFWEGADNLTYDKVWPGHPLVDQLFLCHFLDSQKKIQWPSLVLLGIIWPKRLLVSFCGGHPWGELGK

SEQ ID NO: 205862 - protein, 77 aa, Glycine max
  Clone ID: PAT_MRT3847_27921C.1.pep
IQHPICRINNGLYIYASLKKVTHAPKWDYFKKGGSRLSCSGWSCFRLGFRALRPFPSSAEVYNQLCTHNLSGNHYVL

SEQ ID NO: 205863 - protein, 92 aa, Glycine max
  unsure (1)..(92): unsure at all Xaa locations
  Clone ID: PAT_MRT3847_27922C.1.pep
ARIRLEQEALFVYTQVFCHAXHIMAMLHPEVCEPLYVLALETLTCYETLSKTNPSVSSLLQRAHEQRFLKSIAEGIGPEERRQTLLQKMSSF

SEQ ID NO: 205864 - protein, 92 aa, Glycine max
  Clone ID: PAT_MRT3847_27923C.1.pep
TEGHPDPDMGRAQCHKKKTTAGEKNPEKHNGEAKGSQPDATRKGRPHQRQGPMQTFQSTTGEENPHEQAEAQHPESGKYLRTPKPKKRMRPD

SEQ ID NO: 205865 - protein, 65 aa, Glycine max
  unsure (1)..(65): unsure at all Xaa locations
  Clone ID: PAT_MRT3847_27924C.1.pep
QAYVVQRYYGNHVRTPSTTTPDSPGLLYLXETYYYYYYYYYYYYYYYYYYYYYYYYYYYYYYYYY

SEQ ID NO: 205866 - protein, 95 aa, Glycine max
  unsure (1)..(95): unsure at all Xaa locations
  Clone ID: PAT_MRT3847_27925C.1.pep
MPLNYLYVWILSQMQVLGTEYVSMHVRKSNRTSFNLYAQPLGYKIHXVEIKYYANREYALYISKQLKCKQHHHHHHHRLHCHEHVGVCCSVEPKG

SEQ ID NO: 205867 - protein, 173 aa, Glycine max
  Clone ID: PAT_MRT3847_27926C.1.pep
MKRAFSVDTAEDNKNNRNTKKTKLDSEEEEEHGTRGGSVYLDDNVLFEVLKHVDARSLAMAGCVSKQWQKAARDERLWELICTKQWANTGCGEQQLRSVVLALGGFRRLHALYLWPLSKPHAPSSSSSSSWPAIPHVLRSKPRWGKDEVHLSLSLLSIRYYEKMNFLNTKKNT

SEQ ID NO: 205868 - protein, 197 aa, Glycine max
  Clone ID: PAT_MRT3847_27927C.1.pep
MEAITASLERSLQNCSLNNTNNNHQQSRRPEEDDGSATDGGIGISSCSDDVPDPDNSHISDTTLELNSHISLPYHWEQCLDLKTGEIYYINWRNGMKAKEDPRSRRADYSVSRDCESEEEEEEESWYDSEESSSESCPSSSKEHYDEGQVEKQNNNVLVVAGCKGCLMYFMVPKQVEDCPKCTGQLLHFDRSENGSP

SEQ ID NO: 205869 - protein, 235 aa, Glycine max
  unsure (1)..(235): unsure at all Xaa locations
  Clone ID: PAT_MRT3847_27928C.1.pep
ITLLQGKMEEVELPFPKVDIIISEWMGYFLLYESMLDTVLYARDRYLAPGGLIFPDKATIFLAGIEDGEYKEEKIGFWDNVWGFDYTPLKKTAMTEPLVDTVDMKAVVTDPSAVFNIDLYTVKAEDLAFKVPFSLNVRRSDFVHAIIAWFDIEFSACHKPIRFSTGPHTKYTHWKQTVFYIDDVLTVQAGEKIVGTLSNKPNEKNKRDLDIEITYKLETXDMHRQSEGIGSYKMC

SEQ ID NO: 205870 - protein, 116 aa, Glycine max
  unsure (1)..(116): unsure at all Xaa locations
  Clone ID: PAT_MRT3847_27929C.1.pep
KKKRIQKKKYKNKKKKKKRENRKKKKTRFTLVEETHNMRAFKTIHEXCFEPKKDYINGRXYRSDCKTVNLQXFFYAREHEANHNDIFILEIDNTGLSNIQYYEKHEYGAQEFNETL

SEQ ID NO: 205871 - protein, 79 aa, Glycine max
  unsure (1)..(79): unsure at all Xaa locations
  Clone ID: PAT_MRT3847_2792C.1.pep
HASAHAYEEIFYVXDKQYTDVGSLGEDLIHPLTAAQEVEPVTYSMMAELIKNITFYDKXDGYPAETDENWGEEVCMHEQ

SEQ ID NO: 205872 - protein, 76 aa, Glycine max
  Clone ID: PAT_MRT3847_27930C.1.pep
PFTGGVKPFICSPSQLVSKANPSSFLHLVWTPCFVGASRMYSPSGLVKYMVPAHVKLWNVRIFCQIPPKKQVKGGR

SEQ ID NO: 205873 - protein, 107 aa, Glycine max
  Clone ID: PAT_MRT3847_27931C.1.pep
IFTWSFSWSPGSYPCASLSDSVPHSIRLSRTASGSAPPLCVLLGFSYVFIHLFLHTSSVSSISDFTWAFTGYGTAYDLAIPLWLPMCLLIGLFKKVSIYVPIFSPAF

SEQ ID NO: 205874 - protein, 46 aa, Glycine max
  unsure (1)..(46): unsure at all Xaa locations
  Clone ID: PAT_MRT3847_27932C.1.pep
PTRPAFLPNYDLSIPXQKNTPAKRQFYTLSFSSFIPTGSTLPFTLL

SEQ ID NO: 205875 - protein, 126 aa, Glycine max
  Clone ID: PAT_MRT3847_27933C.1.pep
TILSSPPHPFSLFSLFFLSVTSQYQQHNLVPGRTTCPGSGPFSCNHRFKCFSPFLNNNYRQLKSTLWLDNHTNIKKIVFCFVGIGVLFLVVTKKKKKKKKNAAALEDPKKCTAKNAKRCVREERDP

SEQ ID NO: 205876 - protein, 80 aa, Glycine max
  Clone ID: PAT_MRT3847_27934C.1.pep
ARDLFQCSYYSLGECFLSCQVHLRAGTPLMPRSYSSKLLLQDTNVFIYSWRPHTLDLITVRLALEKWHKMLHTVYSYETS

SEQ ID NO: 205877 - protein, 151 aa, Glycine max
  Clone ID: PAT_MRT3847_27935C.1.pep
MVGIFSRFSVGRNVHRRTQSALDEREVMPPNPEAVAAVASAATATSHGIEVAVEFKPVEHPIEPLDNDRPIQCPLPEPSILNDGRIWKERVSATVRRRGDLPVMKEGGTLESEDAGARPRTSRSNRMILPSVSAPEHNILKLLEECNASGI

SEQ ID NO: 205878 - protein, 50 aa, Glycine max
  Clone ID: PAT_MRT3847_27936C.1.pep
FNSIQYARAQLSCSSKALPKNEPFKRNPLTKVEVFHMISTCNWLCKIQFA

SEQ ID NO: 205879 - protein, 270 aa, Glycine max
  Clone ID: PAT_MRT3847_27937C.1.pep
MEKKTRNHVVLNSGMEKKTRNHVVLNSGVEKDDSFSKARENVKLDLMVQNDDSSFNANIEVELNPLADQGISVDEEDHQKEHTPYARNYSEALAKIVQEDHSMNKENNNSRAIGDDSSATISSPPISSQLRDLSNSLKMLYSSTPSCMQIPEKEPIPLDIVEPKTPTIEQNMSINRLDAMNAKSPWETFSMRGSGMKSSLVQEYLRFLNTANKEELKKLKGIGEKRATFILELREESPEPFKSLDDLKDIGLSAKQVKGIMKKEVGELFS

SEQ ID NO: 205880 - protein, 247 aa, Glycine max
  unsure (1)..(247): unsure at all Xaa locations
  Clone ID: PAT_MRT3847_27938C.1.pep
GSRPNFQRPLLRKNVAGRVSARSRRSFDDSQLSLGEMSNYADGPASLHEALSEGLSSGSDWSARVAAFNYLHSLFELGQKGIQEVVQNFEKVMKLFFQHLDDPHHKVAQAALSTLADIILACRKPFEGYMERMLPHVFSRLIDPKELVRQACSMNLEVVSKTYSIDSLLPALLRSLDEQRSPKAKLAVIEFXAISSFDKHAMDPEGAANIGILKLWLAKLVPLVHDKNTKLKEAAITCIISVYSHFD

SEQ ID NO: 205881 - protein, 53 aa, Glycine max
  unsure (1)..(53): unsure at all Xaa locations
  Clone ID: PAT_MRT3847_27939C.1.pep
LIMEIFQAXXGKMEINPKRFRRXXXVVLXXSFPVAAIVXSXYRNSSFXIXXEG

SEQ ID NO: 205882 - protein, 122 aa, Glycine max
  unsure (1)..(122): unsure at all Xaa locations
  Clone ID: PAT_MRT3847_2793C.1.pep
MEAENASKEIDRVNEIAWISEYRXTMKKRYLEPEQRRVMLLIPTLEEIRDMNKARASRXTLATPTLSLEEALLSAXELLLLRSEGNKLHLRLVRDDYMTKIYEVTDEMEQTMIGDHQELLDI

SEQ ID NO: 205883 - protein, 33 aa, Glycine max
  Clone ID: PAT_MRT3847_27940C.1.pep
IRQIGHFTQLYKACMKFNKYLKLLFCMRCDIHN

SEQ ID NO: 205884 - protein, 144 aa, Glycine max
  Clone ID: PAT_MRT3847_27941C.1.pep
KRSKRNKKANGNGKDAAKKNHHHPRPENVMLLRRAAASAVRDPPLVPPILNPAQYERRLMTLQIERQSYLMNMKVGVNGGAAEREFSNTSTAAVTAACDGCSKAKITGINGGFHLCVHDAVTVGFRSPAGPITRPAKTAGEAGP

SEQ ID NO: 205885 - protein, 74 aa, Glycine max
  Clone ID: PAT_MRT3847_27942C.1.pep
TRKTVKMRYDGIASGGKTLNFTQTHTMMQFTTLMINGCYFLDINSYETFNASSICYMKHVLILMLPLKLEVTKL

SEQ ID NO: 205886 - protein, 68 aa, Glycine max
  Clone ID: PAT_MRT3847_27943C.1.pep
LLQSFQLSFYDLDIYLITSSNENGRITSYDVQNEKFPVSGSFPIFQRGGCSLVFVLVGQGGQLTGPWI

SEQ ID NO: 205887 - protein, 87 aa, Glycine max
  Clone ID: PAT_MRT3847_27944C.1.pep
LAAFLVTFLVTFLVTFLVSSSDSESLLLESDSEEEEEEESSTFCLTGSAFLEAFEVFHTFVLALVAFAEAVLAIVNVNGKCADASVN

SEQ ID NO: 205888 - protein, 105 aa, Glycine max
  unsure (1)..(105): unsure at all Xaa locations
  Clone ID: PAT_MRT3847_27945C.1.pep
ILLRQAKAPSMFLQLYKKIGSLCVYGDDNXIRVHEYVRSYCSGYKLKSCVAVDNITITEGMDKTSATLQFIKXADLYLVMINSLQMAKAKRVDPGDTASLWIQLF

SEQ ID NO: 205889 - protein, 101 aa, Glycine max
  Clone ID: PAT_MRT3847_27946C.1.pep
PSKALILKACTPMLGNIRYRKDNITTTTVIQTFKIFILSIITPRVTYTFKVVFSLAPLGFPTVCPSIALCLHCGAYLDGHCWPWRFLPGKGIGKELEGIFG

SEQ ID NO: 205890 - protein, 549 aa, Glycine max
  Clone ID: PAT_MRT3847_27947C.1.pep
MNASIIDPLQGDFPEVIEEYLEYGCMKCIAFNRRGTLLAAGCNNGSCVIWDFETRGIAKILRDDECSSPITSICWSKYGHQILVSAADKSLILWDVMSSKKITRIVLQQTPLQARLHPGSSTPSLCLACPLSCAPMIVDLNTGDTTLLKVSVLETCNGPTPTPPSRNKCSDGITSFTPTAACFNKYGTLVYVGNSKGEILAIDYKNGDVRAVVPISGGSVVKNIVFSRNGQYLLTNSNDRIIRIYENRLPLKDEVRALDDLSENHNVLNNIENLKAVGSKCLTLFREFQDSITKVHWKAPCFSGDGEWVVGGSASKGEHKIYIWDRAGHLVKILEGPKEALIDLAWHPVHPIVVSVSLNGLVYIWAKDYTENWSAFAPDFKELEENEEYVEREDEFDLIPETEKVKGPDVNEDEEVDIITVEKDAAFSDSDMSQEELCYLPSTPSRDVPEQQEKCVESSSKLLDSNNTGSPLSEEAGPNGHMMNHASSPLEDDAGRMKRKRKPSEKVLELQAEKVKKPSKSSKSEKPKSKSLADQDNGNSFHGGGLYDE

SEQ ID NO: 205891 - protein, 40 aa, Glycine max
  Clone ID: PAT_MRT3847_27948C.1.pep
ISTILNYKAPPCNLSWKDPRINPHHVEYAREIQPCAWLIW

SEQ ID NO: 205892 - protein, 117 aa, Glycine max
  Clone ID: PAT_MRT3847_27949C.1.pep
LLWYLSMSVAHMIFPKFMLLLSNSVSSLDCSCNIGFEYKVVYMSLCSAQTIGFVQAPNEFAFALIIICWFCSFLFHSPVRASFFPMLILIERASYVLGLVAVIFIVLYIWMLHKSGS

SEQ ID NO: 205893 - protein, 198 aa, Glycine max
  Clone ID: PAT_MRT3847_2794C.1.pep
APPLQKGIKDDITKFVHKLTASVHPTQHMDDKQFSVITLAGDNRGATMHLGSESAKKEGSVHIHRAYKSDPEDTNEVTTDGEENTNEEDEEVGMAYVNSNIQSINNSLMFHGSITERDPGVQVTLPQKPAEPIKPDDKPNPGLETQRTQFNINRAEKSTYQPTVGRSIRGPFLEPNDKPRRHGCNFSCDKDIEDIEIL

SEQ ID NO: 205894 - protein, 72 aa, Glycine max
  Clone ID: PAT_MRT3847_27950C.1.pep
VANFLWRQRKKDIQLPLWVISASELVFLSVGVCLCLAVSLFFSFSFSFSFLIQLGRDHVINYRFTGLKNRRY

SEQ ID NO: 205895 - protein, 65 aa, Glycine max
  Clone ID: PAT_MRT3847_27951C.1.pep
VGDFVILFILYFFFFFGGAPKKGNIEKNFGPTKNKIFFYGLLGGGWVFIKTLRGGGFLVAPDILF

SEQ ID NO: 205896 - protein, 98 aa, Glycine max
  Clone ID: PAT_MRT3847_27952C.1.pep
VKTGILKFSNKNHESLAPYLKSNSFPKNCVISLPSETTIPKSELENFYDVSGKKDGNWESETFKSTVTSLPDSFSPSSLINSTQNSKMGINELGVENT

SEQ ID NO: 205897 - protein, 46 aa, Glycine max
  Clone ID: PAT_MRT3847_27953C.1.pep
IQMVLDFISYVMVIQSYGRFHVSIGFVSIVGYYCSVLVISPREEAL

SEQ ID NO: 205898 - protein, 50 aa, Glycine max
  Clone ID: PAT_MRT3847_27954C.1.pep
LAYFKSPSGRIGLYLKKGRYAQWGTTRATVYLTEIVGCLYSDQAFVPWQC

SEQ ID NO: 205899 - protein, 306 aa, Glycine max
  unsure (1)..(306): unsure at all Xaa locations
  Clone ID: PAT_MRT3847_27955C.1.pep
RADPIFNPALSASFAAVPCSSAVCDQLDDSGCHQGRCRYQVSYGDGSYTRGTLALETITLGKTVIRNTAIGCGNLNQGMFVGAAGLLGLGAGPMSFVGQLGGQTGGAFAYCLLSRGTASSSSGSLQFGRQAMPLGAAWVPLVPNPFYPSFYXYVGLSGLGVGGTRLNISEDLFRVTDLGDGGAVMDTGTAVTRLPTVAYGAFRDAFVAQTTNLPRAAGVSIFDTCYDLNGFVTVRVPTVSFYFWGGQILTLPARNFLIPADDVGTFCFAFAASPSALSIIGNIQQEGIQISVDGANGFLGFGPNVC

SEQ ID NO: 205900 - protein, 60 aa, Glycine max
  Clone ID: PAT_MRT3847_27956C.1.pep
FLSINNSILHKLLSFILWILITFFIIIFYFIFIKVSRLPSLLSAYHFIHILILHSIVHLI

SEQ ID NO: 205901 - protein, 102 aa, Glycine max
  Clone ID: PAT_MRT3847_27957C.1.pep
TTDQKRPIGFHIYPSKPRKISLSGFFSHGTSPLLKERGHIIFISPSGDHHQSRKRGPGLFIGGTICWKGGGGNLSFWTYKGANIEIQRPQASLGEGGRGGTI

SEQ ID NO: 205902 - protein, 212 aa, Glycine max
  Clone ID: PAT_MRT3847_27958C.1.pep
MQQHLMQMQPIMAAYYPNNVTTDHIQQYLDENKSLILKIVESQNSGKLSECAENQSRLQRNLMYLAAIADSQPQPSPMPGQYPSSGLMQQGAHYMQAQQAQQMSQQQLMASRSSLLYSQQPFSVLQQQQGMHSQLGMSSSGSQGLHMLQSEATNVGGNATIGTGGGFPDFVRIGSGKQDIGISGEGRGGNSSGHSGDGGETLNYLKAAGDGN

SEQ ID NO: 205903 - protein, 201 aa, Glycine max
  Clone ID: PAT_MRT3847_27959C.1.pep
MQQHLMQMQPIMAAYYPNNVTTDHIQQYLDENKSLILKIVESQNSGKLSECAENQSRLQRNLMYLAAIADSQPQPSPMPGQYPSSGLMQQGAHYMQAQQAQQMSQQQLMASRSSLLYSQQPFSVLQQQQGMHSQLGMSSNGSQGLHMLQTEATNGFPDFVRIASGKQDIGSSGEGRGGSSSGHSGDGGETLNYLKAAGDGN

SEQ ID NO: 205904 - protein, 79 aa, Glycine max
  Clone ID: PAT_MRT3847_2795C.1.pep
WSSYLDRTVQGPVTQKPVRKRVQRYVTGAAMSSTPAAKPGGVTRLLITYGACPGRASMLRGAGDALIANFAGSSSAALA

SEQ ID NO: 205905 - protein, 63 aa, Glycine max
  Clone ID: PAT_MRT3847_27960C.1.pep
LSTVQTFSTMLQTSRVAPCQLCSRVWTAPTTCDCTSVRKRCAHVLSVLSETHGACSRHACQRF

SEQ ID NO: 205906 - protein, 64 aa, Glycine max
  Clone ID: PAT_MRT3847_27961C.1.pep
SFLIAEIHSTTNLLTNSQTPVSAKCSQNCNLLLTTGQLLIEKEKPRELNKESEASSLGIRDLLN

SEQ ID NO: 205907 - protein, 143 aa, Glycine max
  unsure (1)..(143): unsure at all Xaa locations
  Clone ID: PAT_MRT3847_27962C.1.pep
FAPFVFGFVKAPPIPFARGPRLGGLFXHSQSGPFSVGGPVFPFFFGGEGFFVSFEIGRVGEFFVGVGGFFTPIYPPFKEFFFFSQPFPGGAEVLFKGVFQDPGGLFFFRGPGGKNWFFLFYLYKTLSNFFNWGFLIFFFFLWI

SEQ ID NO: 205908 - protein, 135 aa, Glycine max
  unsure (1)..(135): unsure at all Xaa locations
  Clone ID: PAT_MRT3847_27963C.1.pep
NIILLQLLRTKYSCAKLSNCTSRTERILKESGSQGILLYDFVIVSHYGIDNYTSIGDAIAAAPNNTKPEDGFXVYVREGLYEEYVVIPKEKKNILLVGDGINKTIITGNHSVIDGWTTFNSSTFGKYFLSNCSHL

SEQ ID NO: 205909 - protein, 104 aa, Glycine max
  unsure (1)..(104): unsure at all Xaa locations
  Clone ID: PAT_MRT3847_27964C.1.pep
EKNVLDKVVRSDECDIEEAAKXYLNTDFEFLKKEDHNGGSXVGGLIWNGNLXVVSNAGDCHAVISKEGMAEVLTSDHKPSREDERDKIETRVILVSCMILLFSY

SEQ ID NO: 205910 - protein, 110 aa, Glycine max
  Clone ID: PAT_MRT3847_27965C.1.pep
MASAVAQSALASAKRLVPLFDRVLIQRAEAVTKTKGGIVIPEKAQGKVLTGTVVAVGPGSRNSDGQHVPVSVKVGDQVLLPEYGGTKVELSESKEFHLFRESDILAKIES

SEQ ID NO: 205911 - protein, 67 aa, Glycine max
  Clone ID: PAT_MRT3847_27966C.1.pep
EISPFFYPLGLIGKTSKPRLGFLLAENFQTNLKLTNYPFIGGGFGRVVLGGPKKNPSPQGENRPVLI

SEQ ID NO: 205912 - protein, 55 aa, Glycine max
  Clone ID: PAT_MRT3847_27967C.1.pep
KMAGKEKDIKGQNFGHSSSPPLCISHSATLNTKVACCVLTLIYTFLISRDPELSI

SEQ ID NO: 205913 - protein, 142 aa, Glycine max
  Clone ID: PAT_MRT3847_27968C.1.pep
MGKWDHPPSRRFFRRRRSPVRPPTFYDINTPLPEYWQDGIPLWEKKYCTIVGLVPWQKIVDSKMFVYCHSNVFDWNDSAAEEALQNAKNHYWAKINSLPCDISLPDPDTYNDQIDWNPYIDPDMIKEIDKAFFTVPDEEQET

SEQ ID NO: 205914 - protein, 110 aa, Glycine max
  unsure (1)..(110): unsure at all Xaa locations
  Clone ID: PAT_MRT3847_27969C.1.pep
TLSVSTATEPGEDSEKGAACIIEEYLPEGDVKXAPTDRTELESKKSYPYVIERXLASLAMERPDREKEMGSALLSGXHADVIRPAQTGEGFCMLXALGDDLAEDILDADD

SEQ ID NO: 205915 - protein, 103 aa, Glycine max
  Clone ID: PAT_MRT3847_2796C.1.pep
FSKELDAPIMLGDDSHAPTLWTKLLLLNKMTNSNHLNKMMLDQHEDDEDKLTSRPWRKLLKTVFDKANANIDNKDAAGSPASYNLYDDKKADFINAYGWTNAL

SEQ ID NO: 205916 - protein, 119 aa, Glycine max
  Clone ID: PAT_MRT3847_27970C.1.pep
MLKKQSLLSFSLALLVSFMYCTTTLAQLSPASAPLKPTQPTPTPPAAAPQQPLVPSLPQSPSDSTPDSTPAVDIVGILRKAKSFNILIRLMKTTQLINQLNAQLLTTKSGGITILAPDD

SEQ ID NO: 205917 - protein, 80 aa, Glycine max
  Clone ID: PAT_MRT3847_27971C.1.pep
DTQFIFFFCFTGLFSSLIGLGFFSLHCSLCRFISMAQQDAQNGGSENAPAAVSFVALKPQLLIEAPKANHAVLFYKAPFA

SEQ ID NO: 205918 - protein, 294 aa, Glycine max
  Clone ID: PAT_MRT3847_27972C.1.pep
MMNRQSVLPFSLVLLVSFLYCTSTLAQLSPASAPLKPPQPTPTPPAAAPQQPLVPSLPQSPSDSTPDSTPTVDIVGILRKAKSFNILIRLMKTTQLINQLNAQLLTTKSGGITILAPDDSAFSELKAGFLNSLSDGQKLELLQFHVISDYVSSSNFDTLTNPVRTLAGAKPGKVELNVISYGGSVNISTGEVNTTITGIIYTDKHLAIYKVGKVLLPMDFFVVAKAPAKAPSLAPEPSSGVAKGPKADKDESSSSDSSQVNSTDQNSGTAKMISAYGMWVSLVLGVLLMSVMTT

SEQ ID NO: 205919 - protein, 80 aa, Glycine max
  Clone ID: PAT_MRT3847_27973C.1.pep
ASLRGTLSFVLLRQSGCLHKGRPLCSLCSRIGFLQPLLYGFFAPGLCLLSITSVCSLLYRGVLWASMGIFVPFQPLLYLD

SEQ ID NO: 205920 - protein, 67 aa, Glycine max
  Clone ID: PAT_MRT3847_27974C.1.pep
QSSCFPSQTANPRCCSLQGARHSKVGRKIFYCKAVRVSVRATYCGSRLCESRRPKLSSVSYGLLSTA

SEQ ID NO: 205921 - protein, 50 aa, Glycine max
  Clone ID: PAT_MRT3847_27975C.1.pep
DYYSLRIPETKRAFFCWSAIIQLWDVVYYVKLVRCKFTFKPTWVFRTWIA

SEQ ID NO: 205922 - protein, 111 aa, Glycine max
  unsure (1)..(111): unsure at all Xaa locations
  Clone ID: PAT_MRT3847_27976C.1.pep
GSGTNNTSSRGGGRAGTDRNGGRGGANQFGSSDYGLQGKPVYKKENGAPTYGGSTSSAPSVLGNNANMRPASYSDSVVTEKNIRIXIGDGPSSSSQRAGVQSAWAGNTGQV

SEQ ID NO: 205923 - protein, 66 aa, Glycine max
  Clone ID: PAT_MRT3847_27977C.1.pep
GLALFIIIVNNSLFYDSDQGWICIIVSAPTRFLFLIIIYIYIYIYIYIYIYIYINCVHNLKYSLKN

SEQ ID NO: 205924 - protein, 36 aa, Glycine max
  Clone ID: PAT_MRT3847_27978C.1.pep
AKPIKIFLQTFFLEIHVLFLGGDKIIPYLFFNLNLC

SEQ ID NO: 205925 - protein, 34 aa, Glycine max
  Clone ID: PAT_MRT3847_27979C.1.pep
GSSSLKACATAGLTPNLAVARCPVNHDPTLPANC

SEQ ID NO: 205926 - protein, 186 aa, Glycine max
  Clone ID: PAT_MRT3847_2797C.1.pep
MATKAKGKELPNSTGKMVQIIGEIVNMLITAHKEGKSINLSKIKIDAARENGLPRQPKTIDIIAAIPEQYKSAILPKIKAKPVRTASGIAVVAVMSKPHRCPHIALTGNVCIYCPGGPDSDFEYSTQSYTGYEPTSMRAIRARYNPYLQTRNRVDQLKRLGHSTDKVEFIVMGGTFMSLAADYRDY

SEQ ID NO: 205927 - protein, 69 aa, Glycine max
  Clone ID: PAT_MRT3847_27980C.1.pep
GKKTNCPLIPLMMLTLFHIHNQGFLFLFKLKNLIFYHVNFRLPDHPHGGVRKDHVQYTDTSIWFKKFFN

SEQ ID NO: 205928 - protein, 39 aa, Glycine max
  Clone ID: PAT_MRT3847_27981C.1.pep
GELLYLLRNVFLHIVLLKRVNGDINGLIVHVGYHMSAKM

SEQ ID NO: 205929 - protein, 52 aa, Glycine max
  Clone ID: PAT_MRT3847_27982C.1.pep
KKRVNTLIRKRIMLDRHIIFRECQTHAYAFNQPIYTCLGLGMLEYVIVCLYK

SEQ ID NO: 205930 - protein, 82 aa, Glycine max
  unsure (1)..(82): unsure at all Xaa locations
  Clone ID: PAT_MRT3847_27983C.1.pep
GDINFPGGAWFVPLNLSPGPEAFXELRVKKIKNGPLAMVAWLGFFGRAPLPGKGPVQNFFGPLFGPFPPTLGGSPPFLKGGR

SEQ ID NO: 205931 - protein, 70 aa, Glycine max
  Clone ID: PAT_MRT3847_27984C.1.pep
YSSFSFIFIFILGHFLYTCQDGRRSAYCVFSQPTLQGKIRQRMNILLDLQILYFTFERYVWFLYNALLHQ

SEQ ID NO: 205932 - protein, 56 aa, Glycine max
  Clone ID: PAT_MRT3847_27985C.1.pep
RSKGSIIFQSKNCFQFTLSSVCWVGLHVQVGQNEALDRSVCEQHAGVLHFGGHEVT

SEQ ID NO: 205933 - protein, 107 aa, Glycine max
  Clone ID: PAT_MRT3847_27986C.1.pep
GFLVDFLSHAALVGFMAGAAIIIGLQQLKGLLGLSHFTSKTDVVSVLASVYKSLHNQIAPGQKWNPLNFVLGCSFLIFILITRFIGRRNRKLFWLPAISPLLSVILS

SEQ ID NO: 205934 - protein, 250 aa, Glycine max
  unsure (1)..(250): unsure at all Xaa locations
  Clone ID: PAT_MRT3847_27987C.1.pep
THRRCCRRFHRLHHRNSNRSSAGTITLTTMSSSPQNIKQRVFTCLTKLSDRDTQSLAAAELESIARNLDATTLPAFLSCMYSTDASDKPPVRKQCVHLLGFLAQTHGNMLAPYLSKILGSVVRRLRDVDSSVRSACVNSIAALSGHVSKQPLNSFLKPLAEALFTEQDQNAQASAALCLASAIDGAPDPDPARLAKLLPRFEKLLKRDGFKAKPALLTLVESVVAAGGASGHAQLKSXVPCLGGGVEQRR

SEQ ID NO: 205935 - protein, 68 aa, Glycine max
  unsure (1)..(68): unsure at all Xaa locations
  Clone ID: PAT_MRT3847_27988C.1.pep
APHSWELLFSIXVCEPYKGLVMXVLIDQMKHSGLREFLLTNPYSLTNFDILLGVSNEFETHCNTLIQS

SEQ ID NO: 205936 - protein, 43 aa, Glycine max
  Clone ID: PAT_MRT3847_27989C.1.pep
DTPLMHLQYSHLHFQIHLTSLQYLIPLERSGSLVTSESCIVIF

SEQ ID NO: 205937 - protein, 89 aa, Glycine max
  Clone ID: PAT_MRT3847_2798C.1.pep
GYLNKRSVCPDQGPMNHLSNQSVCLFCVQPHLSSAVIHETILYDMIQRIKPGRVHPCLLAPVTYANPGTWGWSSVSLLSRVDTYRALPV

SEQ ID NO: 205938 - protein, 42 aa, Glycine max
  Clone ID: PAT_MRT3847_27990C.1.pep
NNSISSIIDQIRGNTSNRKPERSRKTTIHTIHQKPASSLCFS

SEQ ID NO: 205939 - protein, 433 aa, Glycine max
  Clone ID: PAT_MRT3847_27991C.1.pep
MASILHYFLALSLSFSFLFFLSDSVPIPQHHTNPTKPINLLVLPVQNDASTGLHWANLQKRTPLMQVPVLVDLNGNHLWVNCEQHYSSKTYQAPFCHSTQCSRANTHQCLSCPAASRPGCHKNTCGLMSTNPITQQTGLGELGQDVLAIHATQGSTQQLGPLVTVPQFLFSCAPSFLLQKGLPRNIQGVAGLGHAPISLPNQLASHFGLQHQFTTCLSRYPTSKGALIFGDAPNNMQQFHNQDIFHDLAFTPLTVTPQGEYNVRVSSIRINQHSVFPPNKISSTIVGSSGGTMISTSTPHMVLQQSLYQAFTQVFAQQLEKQAQVKSVAPFGLCFNSNKINAYPSVDLVMDKPNGPVWRISGEDLMVQAQPGVTCLGVMNGGMQPRAEVTLGTRQLEEKLMVFDLARSRVGFSTSSLHSHGVKCGDLFNFANA

SEQ ID NO: 205940 - protein, 54 aa, Glycine max
  Clone ID: PAT_MRT3847_27992C.1.pep
HAFAYVVRKKKKKKKKKKKKKKKKKKKKKKKKKKKKKKKKKKKKKKKKKKGGAV

SEQ ID NO: 205941 - protein, 49 aa, Glycine max
  Clone ID: PAT_MRT3847_27993C.1.pep
RSSTHASRSHIRRKVRVHIDFSSFFLRSFINASIIHSLFIMSITTQNHF

SEQ ID NO: 205942 - protein, 100 aa, Glycine max
  Clone ID: PAT_MRT3847_27994C.1.pep
NLNSSSTRYPIQLQDCTIAGAKDRSFSINDLVFTHRLLSQGISTYLSPKNLVQALWILLHFWPILSPFAVKDFRSATRLAEESSLSTSRNVATEVWNWGA

SEQ ID NO: 205943 - protein, 226 aa, Glycine max
  Clone ID: PAT_MRT3847_27995C.1.pep
LEHSRMVYSYYTPTYYSTLHDSLTSLCKTILPFSFKKRPLPAAEHKLSKLQSDNLKWQQDSFHQVLNLMGLHKEGIVAESEVSAFRTHLLDTLIASPPEQEHPVILRDKLLFLQELLYAKCISEEEYHSSKRPLLRRLAAQGAQIEARDVIVAGPKDSKENSEEEWSVIDLKDEKCSVNKENLGSKSKSNQGSAMKQIKGAALVFGFGKGGKNGEEKSMFDSPSLS

SEQ ID NO: 205944 - protein, 107 aa, Glycine max
  unsure (1)..(107): unsure at all Xaa locations
  Clone ID: PAT_MRT3847_27996C.1.pep
HQNNTITCGGIPVWLKYIPXISFRMDNGSFKXAAMQGFTHKIFQMMKNEKLFQSHGGPINLSXIENEYGPYSIGAAGRAYRNWASTASMAVWLGXGMPWVMCKENDA

SEQ ID NO: 205945 - protein, 72 aa, Glycine max
  unsure (1)..(72): unsure at all Xaa locations
  Clone ID: PAT_MRT3847_27997C.1.pep
NFHLIGQTKHYSGHLHTCNGGKKVLMYTMRXSIRRTRRPLRQFPSSFSSATCQWFSISSLHSRICHLVKKQP

SEQ ID NO: 205946 - protein, 61 aa, Glycine max
  Clone ID: PAT_MRT3847_27998C.1.pep
HRGARPLPAQGLHYRARNCSTIFLCRMRRIDVSSSDSYAATAHRRREEPHSGLSYAHILAY

SEQ ID NO: 205947 - protein, 127 aa, Glycine max
  Clone ID: PAT_MRT3847_27999C.1.pep
LPIFFFGGGEGAQFGRFGGSPTKKRSPCAPPPPKVGGPFLLFLRPKKPPPAELVFKGHTRHHWYSPPRVGRSPPNPSFHFLLPPLGCISPPLLCFLFRLNFRAKNQIFYTEVRMGGAAAQIFKKQPP

SEQ ID NO: 205948 - protein, 46 aa, Glycine max
  Clone ID: PAT_MRT3847_2799C.1.pep
GQVLPNLEVPKEEANLSGLIPIEIEDISVSSKTSCLKTHPTAFFPL

SEQ ID NO: 205949 - protein, 132 aa, Glycine max
  unsure (1)..(132): unsure at all Xaa locations
  Clone ID: PAT_MRT3847_279C.1.pep
MSRIFEYFVVCGIGPEIRTMDGNKGYHGTGCLYLPSLLDQYPPPNHTLYPSPPPQLSTCVLPAGVEFYSSGFDSNDPASFPRSYPIALTEGDGSXIYVSCISFRDPVCEDIAEAYRIXANSYAYKGICLVSR

SEQ ID NO: 205950 - protein, 106 aa, Glycine max
  unsure (1)..(106): unsure at all Xaa locations
  Clone ID: PAT_MRT3847_27C.1.pep
YIGVSSLVGAVPVMRAKALGIVIKLTLAGRXVIYPQTWAFSLFGLVCVRARMNYLYNALDTCNTAEGSAIYYVMTTTFTIVAPVILCKDWDAQCPAQDITEICGGV

SEQ ID NO: 205951 - protein, 43 aa, Glycine max
  Clone ID: PAT_MRT3847_28000C.1.pep
MLTLYFHGNTCVSTVLTYLHVLSHGSLWTLRSIAKYWSIVSYT

SEQ ID NO: 205952 - protein, 59 aa, Glycine max
  Clone ID: PAT_MRT3847_28001C.1.pep
FQAFPGFLSPSIFKKKPGFFFFFPSHFFLFQVKLASIWGGNLIGGKNYPSPINVVQGYF

SEQ ID NO: 205953 - protein, 88 aa, Glycine max
  Clone ID: PAT_MRT3847_28002C.1.pep
SFFYTFPFPLFNYLCVIVQSFNLYPPPPSGESTANSKNESPSFPSGASPLFLVLPHSYFTLLYYYFAFHFIHLFLCAQQAHGAHQRGF

SEQ ID NO: 205954 - protein, 58 aa, Glycine max
  Clone ID: PAT_MRT3847_28003C.1.pep
NFNHSFQWLQHITQFHLPKKKGGNLSMIHLDHLSTAKIMQCFFARTYYQQFWLFSTVC

SEQ ID NO: 205955 - protein, 204 aa, Glycine max
  Clone ID: PAT_MRT3847_28004C.1.pep
FAPDGLIEGFHEPDAYNPEEGKFIMGLQFHPERMRKPDSDEFDYPGCPFAYKEFVKAVVAYQKKLNNLASVQKPIKLNKEMEIKRKIIVRSFSLAKNLYNTGRGTNSSKQTELEAGAEFLESNTALSVQQENRLKQMGATVRNAGSYIERLKLNEEREKMARNLMGKMTVEQLSDLLSFYHTMGQICSEVLDIKIHGLVNDLAS

SEQ ID NO: 205956 - protein, 60 aa, Glycine max
  Clone ID: PAT_MRT3847_28005C.1.pep
GCSNVRGLGCVFAIECYFVYMASSSLRCVCVMHYTGQVCCYVQLVLGQSNRCGSSLCSQI

SEQ ID NO: 205957 - protein, 53 aa, Glycine max
  Clone ID: PAT_MRT3847_28006C.1.pep
RKQVERGVYVSTHRLRDTLDQFLQHFQLNLLPFLCVCHELILYPRSRLQCHRT

SEQ ID NO: 205958 - protein, 78 aa, Glycine max
  Clone ID: PAT_MRT3847_28007C.1.pep
ILTQEGRDTGLWDVVKVSFICKGLHPFLSIAGKKNRPPSSTWIGLNTLRKIPHQILACTILLSRFPSLESIGFHSRPT

SEQ ID NO: 205959 - protein, 163 aa, Glycine max
  Clone ID: PAT_MRT3847_28008C.1.pep
LTIGDDIALIAAITHVADLWIVYTQMRFSRRYTLEQIEERWYELLYDEEASLIARKRMEQMDKQKIISIQERIPFSLSEENLLRQIPSTDPQPISAILAKILEQNRDTTFHYARTVKILEEHWRELRLYGLLNDQRTPQQLNALQDEDNFTFDLYSLASSTDV

SEQ ID NO: 205960 - protein, 194 aa, Glycine max
  Clone ID: PAT_MRT3847_28009C.1.pep
KNSQSSGSVNESIQVEKDMEEVQIKPNIGIRLSDLKLVLGPELKIVYSFILNFSVSGELELNGLAHPKCIKPRGTLAFENGEVDLVATQVRLKREHLNVARFEPDNGLDPMLDLTLVGSERQYRIHHRASNWQEFVEQDTLSPIEVARRLDSQLAESILENNGHVAFEKVVTATLEKLMPRIEGKGEFGLAKWK

SEQ ID NO: 205961 - protein, 42 aa, Glycine max
  Clone ID: PAT_MRT3847_2800C.1.pep
TLTIETFKETVSLNNNTIVYCKLRIMSTTFTQSFLIVLLTRG

SEQ ID NO: 205962 - protein, 179 aa, Glycine max
  Clone ID: PAT_MRT3847_28010C.1.pep
SCRDVEHKRGRYEHYNILPLYAVGVKPAIMELPEIKAAIAALCNVDNLPMPIIHARPDDSTVPMERLKEVNDILDWIAFVFGFQKGNVANQREHLILLLANMNIGDRAESSHQLHSETVEKLKATILKNYESWCHYVHCEDNLRFLEDYDMQQIELIYIALYLLIWGEASNIRFMPECL

SEQ ID NO: 205963 - protein, 90 aa, Glycine max
  Clone ID: PAT_MRT3847_28011C.1.pep
ARVRLREDDRRDLIDDVSQDALSACGSLLEVSIQKAAICRTAMHRGAALAAMSYLSCKKKLYCFWCCRLICFKCKTLFFRGGGRIRKLNY

SEQ ID NO: 205964 - protein, 88 aa, Glycine max
  Clone ID: PAT_MRT3847_28012C.1.pep
SSSQSSPSMDWPGARKGLIEVVPPWPLLVCRGSSTGWDSTPCCLRSSWSPAVAIEVRVRRSSGSAVPASVIASTSLFVARSPETQRDS

SEQ ID NO: 205965 - protein, 74 aa, Glycine max
  unsure (1)..(74): unsure at all Xaa locations
  Clone ID: PAT_MRT3847_28013C.1.pep
SSKPTHLATRAPSPPPSNPARIPSPXRPNTPPPLCSPPPPPXFLQRAPSPPTTIPPSPPPSPPPASPSPAPPVL

SEQ ID NO: 205966 - protein, 102 aa, Glycine max
  Clone ID: PAT_MRT3847_28014C.1.pep
MLFQIPRLTNSLRDPFDVDQYYLHRKTILHNQKPSNSASSLDESELARKIVHGWEKASSDVRQAYKQFIGAGVDLVDGETRSEEFHEVALTMYRLFGRPMEE

SEQ ID NO: 205967 - protein, 60 aa, Glycine max
  Clone ID: PAT_MRT3847_28015C.1.pep
ERAREREREREREREYGQCTRSCSNFHIGLCVFRCLTIINEEAPFDVSCITLWIFPHILW

SEQ ID NO: 205968 - protein, 200 aa, Glycine max
  Clone ID: PAT_MRT3847_28016C.1.pep
MNHLHSLAYTTTTNLCGSSLGWDYHNLGVLNADKMSLMPAMEGSTTPPSLSSPQHSDFSTGYLEDALIESCERSKRRRVLPCAADEHSKSFIDDLEQSFWNFNPLWNQPVENFNFYCMNQIERFCGFSDEHISTSRSEEANILLADTKTPEETISASESLNSSSSSYKQPVTCKTTDPTVAPTGTLFCLSLSNMIIYSEK

SEQ ID NO: 205969 - protein, 55 aa, Glycine max
  Clone ID: PAT_MRT3847_28017C.1.pep
KIVRGYMCGSIKPTQVSSYSSLGQLSRVRFRQCLLSVKRLTHIGVMCIHILSCVS

SEQ ID NO: 205970 - protein, 62 aa, Glycine max
  Clone ID: PAT_MRT3847_28018C.1.pep
PQPQRHTEAMHSKALSFFSSALISTSLFYSNDVLCLLVVLKETPKKKNSIINNPNIPSKAKN

SEQ ID NO: 205971 - protein, 219 aa, Glycine max
  unsure (1)..(219): unsure at all Xaa locations
  Clone ID: PAT_MRT3847_28019C.1.pep
MIGGDIQYAVPAMEGSTTPSLSSPQHSDFSTGYLEDALIESCERSKRRRVLPCATDEHSKSFIDDLEQVQLXLYYIYSFEEANILLADTKTPEETISASESLNSSSSSYKQPATCKTTDPTVAPTENDDTRNKKVVTRVVYPFAMVKPGGREGDVTLNDINERILMPPTRPVRHPVGDFACRPCVSAEGPGLSGKAVVALTRIHTQGGRGTITIIRTKG

SEQ ID NO: 205972 - protein, 46 aa, Glycine max
  Clone ID: PAT_MRT3847_2801C.1.pep
GQLQERMRKRTIETPLRASLKSWKNIYMCETCKKKISTNIPKRVFN

SEQ ID NO: 205973 - protein, 72 aa, Glycine max
  Clone ID: PAT_MRT3847_28020C.1.pep
ETVMFSSSRSAASIIRSRSILIVDVIRLVHQEALWVLINQPHPPLSVPQQSMVLGLLLSLQLSPCRRFVNSR

SEQ ID NO: 205974 - protein, 42 aa, Glycine max
  Clone ID: PAT_MRT3847_28021C.1.pep
LEPLLASYREFRWLSHIDLLHQGDHLRKHTSHLVGALSNSLG

SEQ ID NO: 205975 - protein, 114 aa, Glycine max
  Clone ID: PAT_MRT3847_28022C.1.pep
FFFLPASPTFSVFSPLCRGVFFPPLFWCYKKYIYKVFFAQKIKRPPPPVSIFSFPSLLCFFPPLPLCFVVLKKKPLNLNNKNTQKKKKKKKKKKKKKKKKKKKKKKKKKKKKKK

SEQ ID NO: 205976 - protein, 69 aa, Glycine max
  Clone ID: PAT_MRT3847_28023C.1.pep
SGIPALSQRPALLTSGFSLDDPNTFGNRIHRMLKLGLSIDEDAGEADADMPPLEDTDADAEGSKMEEVD

SEQ ID NO: 205977 - protein, 50 aa, Glycine max
  Clone ID: PAT_MRT3847_28024C.1.pep
GLLASSPRVGLTVTDAVGCLSDGRELMEVELDNCVGRTYAGPIQRYPHRR

SEQ ID NO: 205978 - protein, 142 aa, Glycine max
  Clone ID: PAT_MRT3847_28025C.1.pep
FITAAALILAGLVAEGTTQVTELKHLDRGYVNLHGKLKSLGANIERGHFPNYAVMPGVLITEALAQTGAVAMLNSEENKGKIALFAGIDKCRFKKQVVPGDTLMLEVEITKIKGPIGKGSAKATVDGQLACSCELTFAIQDA

SEQ ID NO: 205979 - protein, 90 aa, Glycine max
  Clone ID: PAT_MRT3847_28026C.1.pep
CCGKNELKWNLCTLRGIWKLFLTTWVLLWHDNMYVFTWGRVGRGLGVRKTCLSLIGGGMPLVLEILVNYKFYCMDKRRFFLREMHTKLPE

SEQ ID NO: 205980 - protein, 48 aa, Glycine max
  unsure (1)..(48): unsure at all Xaa locations
  Clone ID: PAT_MRT3847_28027C.1.pep
NGVVPHILGPIGEIKDKVGLIFVXEELLTNRLTQMRPATTTLVDGRTY

SEQ ID NO: 205981 - protein, 298 aa, Glycine max
  Clone ID: PAT_MRT3847_28028C.1.pep
YNYKIAFHVLVKALISLDPFGEMELLKKHFQEFISGLMSLPIKLPGTKLYQSLQAKKKMVKLVKRIILAKRSSGFCKVPKDVVDVLLSDANEKLTDDLIADNIIDMMIPGEDSVPLLMTLATKYLSECPAALQQLTEENMKLKKIQDQVGESLSWSDYLSLPFTQTVITETLRMGNIIIGVMRKALKDVEIKGHLIPKGWCVFVNFRSVHLDDKNYECPYQFNPWRWQDKDTSSCNFTPFGGGQRLCPGLDLARLEASIFLHHFVTQFRWHAEKDAIVNFPTVRMKKRMPVMVRRVES

SEQ ID NO: 205982 - protein, 200 aa, Glycine max
  Clone ID: PAT_MRT3847_28029C.1.pep
MDHSHKLPSFSCELRIIQAQNVESIKTTKNLFTRLYLPAGNNKRIQLNTKKVSSNTQCVPFWNESFNLDCSCPQEFLESLKKESLVLELRQNKIFRSHLVGKGEIPWKAILESPKMEFKEWVKMDLVSGISDCEDIMFKAPQVQVEIKIQVEKENNNNNRRKRLNNKWDECGCKHGHGQHAWCSADDYDIYALGAVLEAF

SEQ ID NO: 205983 - protein, 100 aa, Glycine max
  unsure (1)..(100): unsure at all Xaa locations
  Clone ID: PAT_MRT3847_2802C.1.pep
GRSLFPKIDNSNINRAESQQDNNIDGLKAEWVEQYXLGVYITFTTLPCGKKGLKRVRFSRKRFSEKEAEKWWEENQVTVYHKYGIEGYINNNTSQSQVKG

SEQ ID NO: 205984 - protein, 69 aa, Glycine max
  Clone ID: PAT_MRT3847_28030C.1.pep
PPGYCCTQTIRSARPPGEWPSMDYWLIQAPVLTRKSSKCPYLVGSPTLVKRARNVTASRSNGGTYLRCA

SEQ ID NO: 205985 - protein, 119 aa, Glycine max
  unsure (1)..(119): unsure at all Xaa locations
  Clone ID: PAT_MRT3847_28031C.1.pep
MSMGLNPNSCSHAWRLXLLMPAGLYCEINGYSGWTRTLMQRVQVAIDGAISSXQCVPRSYWVGSPHNSLGSNLWLGKLSFPQRTSPKVIRMSISIKGXSWSKECLIXNLPNGCPSMWRY

SEQ ID NO: 205986 - protein, 82 aa, Glycine max
  Clone ID: PAT_MRT3847_28032C.1.pep
TLSVHIVTGKKHAEKDLTKTNWLPDMKLSFFHIQIIPAEDPHVILKAQKHILLGTNREKTSACWLETSSALEENSNQVQTNI

SEQ ID NO: 205987 - protein, 55 aa, Glycine max
  Clone ID: PAT_MRT3847_28033C.1.pep
KKRSMELRKKRCVRKRMIASSYSVYEMYESHFSYKKFVCIKNVEINQSVSLGFSC

SEQ ID NO: 205988 - protein, 140 aa, Glycine max
  Clone ID: PAT_MRT3847_28034C.1.pep
RHKNSTVLISISSLSPHRNPKKKNLKNIPFLFTTGGFLKKEREIFPGPKSGLKPRGRAKQSFLKGAPKKNQGGAVKKPGGGEKPGVHQKKNAGKKTPFCRGGKKRKGPHGTPFQKRANPEGTRGPPLEGNKKRGGGGGNP

SEQ ID NO: 205989 - protein, 101 aa, Glycine max
  unsure (1)..(101): unsure at all Xaa locations
  Clone ID: PAT_MRT3847_28035C.1.pep
MSTLRDYQPLGRCRCNLQWHHAEPNADLFNAYCSRADPDRDRRIIGAEAVSFFHGSGLPXIVLAHICAFANHTQSGSIGRSKLYNAIMPVTGAQSKRELTP

SEQ ID NO: 205990 - protein, 79 aa, Glycine max
  Clone ID: PAT_MRT3847_28036C.1.pep
NACPISIMRKGRRITLAGDYYSPSSSDLVCNPYYARYSIATEVKACYCGAFVLTLKVGSSCIRGRIFQKQCSATPSTFI

SEQ ID NO: 205991 - protein, 101 aa, Glycine max
  Clone ID: PAT_MRT3847_28037C.1.pep
MKPVEGKSDDQAVTGTVRHSLGEASFSAIGPMSGRISYSGPVPYSGSISLRSDSSTTSTRSFAFPIIQSEWNSSPVRMAKADRSHYRKQRWWKDSFLCCKF

SEQ ID NO: 205992 - protein, 186 aa, Glycine max
  Clone ID: PAT_MRT3847_28038C.1.pep
MALWFGILLTFFASGESQSTMSFNQTDLQAAMTDMRSWSYYGFVILLKILNSQPNSLQNNDLTFLMPNDDELSQFSIALDQLHDFILSHSIPTPLVLSHLLHFPNGSVVPSSVPSRVISITNGGRTGLFVNNARIVTPNVCQSSSIRCHGISAALTFDNMVPSLRAPKPKKDPKNPTRPRAGRVDS

SEQ ID NO: 205993 - protein, 461 aa, Glycine max
  Clone ID: PAT_MRT3847_28039C.1.pep
MVLCRCLSFLTGKREKNKGTEQSSTGDLNTQLGEVLHPKISSESRDLKPATVDVTVPSGVQKNSRGNVRVMSLESPVKTEVEEAYEGEDEHEESPSIKRELSDFDLQVHEAAVIQGRYHPSSEEIKCPSLYEHQANIQLEDRDHKYSKKSDDIIQSGHVSDPGIGKADFCASPKLKRSCSDLERRDVLRKTSHLFPSSKSQSFENLQGLSAYQMVNLESPRSVMTHGSADRVMLKKHSSSQVLPSRSKRLWWKLFLWSHRNIHRMQLGKLKTIHPASAALKSQCGYSSDTLEAKHGKALRHVELPSPSSSYGEYFHNSCDDGNIDKQRWSRFQKENFGFWPQNQWVAFSTESSSFSRVDEWVKDLEIQQPPPEDDFDDDNIGTIAFPPSPDAIPQFIASSSTAQSVRHPDANLSKEILNANSVVQKFGLWLGECAVWWNGSCWCWCFPCGELSCAESECQG

SEQ ID NO: 205994 - protein, 50 aa, Glycine max
  unsure (1)..(50): unsure at all Xaa locations
  Clone ID: PAT_MRT3847_2803C.1.pep
TPVXRNFSLXXXRXNPFQHHXKCNKTXPKKXAAIASXKXXRXGXTQXXRL

SEQ ID NO: 205995 - protein, 199 aa, Glycine max
  Clone ID: PAT_MRT3847_28040C.1.pep
HFLLIPYRTLGHVNPLMQLSQVLARHGCKITFLNTEFNHKGANTAAGVGIDNAHIKFVTLPDGLVPEDDRSDHKKVIFSIKSHMPPMLPKLIQDIDALDANNNITCIVVTVNMGWALEVGHKLGIKGALLWPASATSLATCDCIPWLIHDGIIDSDGNPIKKQEIQLSTNLPMMDTENLPWCSLGKMLFHHIAQRDANY

SEQ ID NO: 205996 - protein, 147 aa, Glycine max
  Clone ID: PAT_MRT3847_28041C.1.pep
MTTRFKKNRKKRGHVSAGHGRIGKHRKHPGGRGNAGGMHHHRILFDKYHPGFFGKVGMRYFHKLRNKFYSPILNIDKLWSLVPQEVKDKASKENKAPLIDVTQFGYFKVLGKGVLPQNQPVVVKAKLISKIAEKKIKEAGGAVVLTA

SEQ ID NO: 205997 - protein, 60 aa, Glycine max
  Clone ID: PAT_MRT3847_28042C.1.pep
PSLAWIPLKPRRPFFFFFFFFKKERALHPLFSLDLWTIRDPLKATKPPNFGLAKLGFCDF

SEQ ID NO: 205998 - protein, 102 aa, Glycine max
  unsure (1)..(102): unsure at all Xaa locations
  Clone ID: PAT_MRT3847_28043C.1.pep
VYPLWQWIEKQDGIPSLQKDSQDPCRDFYNIYLDRPQGDSDGYDLVLDDAMRMANXASPICHSRRPNREATDTAVAGEYQRAISRLRDTHHGEEITYCYNSV

SEQ ID NO: 205999 - protein, 147 aa, Glycine max; identical to SEQ ID NO: 205996
  Clone ID: PAT_MRT3847_28044C.1.pep

SEQ ID NO: 206000 - protein, 100 aa, Glycine max
  Clone ID: PAT_MRT3847_28045C.1.pep
ARGSGHFRSVLAAINAAARRRVKSRFIIHVKRGVYRENIEVDKTNDNVMLVGDGMRNTIITSARSVQAGYTTYSSATAGHYSQLLIPFLFSLILLIQFIG

SEQ ID NO: 206001 - protein, 151 aa, Glycine max
  unsure (1)..(151): unsure at all Xaa locations
  Clone ID: PAT_MRT3847_28046C.1.pep
PGCEPTPSAGAWGEFSRVARDHSPRTYGGVSSSSAMNSREASPSPCDICGATQTLSLTIHNIRYRAQAGGYXANCVLKQHPGLFCPLCFELHDDSPLPPHHRLMGVRCPAVAHRSCACPSTNVSGAPAPAPPVFWPSCVESNFTYFKLPDR

SEQ ID NO: 206002 - protein, 26 aa, Glycine max
  Clone ID: PAT_MRT3847_28047C.1.pep
LNCLIPAGSPPCLRCSLSVVFYQRWK

SEQ ID NO: 206003 - protein, 70 aa, Glycine max
  Clone ID: PAT_MRT3847_28048C.1.pep
ANMVRAVAQTILVAYHDRVVTVDVPNVDVNQSLITEGIYNVSSVRADPCVAPPDENRTVAPTKSVRVGKA

SEQ ID NO: 206004 - protein, 308 aa, Glycine max
  Clone ID: PAT_MRT3847_28049C.1.pep
MVLEAEEEVGGGEFEHLPEGCIANIVSFTTPPDACVLSLVSSSFRSASVTDFVWERFLPSDYQAIISQSSKPSTLTNYSSKKDLYLHLCHNPLLIDAGKKSFALDKLNGKICYMLSARSLSIVWGDTPRYWRWTSVPAARFSEVAELVSVCWLEIKGGIKSGTLSEKTLYGAYLVFKQRSGGAYGFYNQPVEVSVEGRRRTVYLEEAETPRRPREQIVPGIFSRVRSRFLDSFDAAPAPPPPNAKGGGEYPKERSDGWMEVELGDFFNVGGEKEKEKEVEIGVYEVKSGGWKAGILVQGIEIRPKHKN

SEQ ID NO: 206005 - protein, 323 aa, Glycine max
  Clone ID: PAT_MRT3847_2804C.1.pep
MWWPFSRIGSSGFSSYSTAEEVTHGIDGSGLTAIVTGASSGLGAETARVLALRGVHVIMGVIDMIGAKTIKEAILKEIPIAKVDVMELDLSSMTSIRNFASNFNSSGLSLNILINNAGICAAPFALSKDNIELQFAINYLGHFLLTNMLLDTMKKATSESKKQGRIINVSSIGYRFTYREGIIFDKINDQSSYNNWCAYGQSKLANILHANELARRLKEDGIDITANSVHPGATVSTNIHIHSGLLNGLHKIAWLFGLEKILGYMAKNVQQGASTTCYVALHPQVSGISGKYFEDNNLAEVYSHGRDMNLAKKLWDFSINLTK

SEQ ID NO: 206006 - protein, 72 aa, Glycine max
  unsure (1)..(72): unsure at all Xaa locations
  Clone ID: PAT_MRT3847_28050C.1.pep
HYSRNTVVSNIERNYYPTCIYLSLKKYPDISNTLIYLTMFKNPVFHYHDPXFDYSYKSFTKNTPAYYAIQFI

SEQ ID NO: 206007 - protein, 53 aa, Glycine max
  Clone ID: PAT_MRT3847_28051C.1.pep
SLVFMVEKLELYFSLVNEEAMHTVYLDRVVTSPEAPFVVEVYKSVKKIISKFV

SEQ ID NO: 206008 - protein, 108 aa, Glycine max
  unsure (1)..(108): unsure at all Xaa locations
  Clone ID: PAT_MRT3847_28052C.1.pep
VGVQDATVEKSFRHVYEPRKLGMVDNSRNLVEYNIQLLTTSDIIIATCDACTDXKTSPYNSSAEVLGCYTDTGAGQYYTKGAPIDCGVRRYPIHITDGDNVLKQDVCM

SEQ ID NO: 206009 - protein, 35 aa, Glycine max
  Clone ID: PAT_MRT3847_28053C.1.pep
IQLKPTLNTPYVKAEIFLVFYLIDKSFLLMRNLSL

SEQ ID NO: 206010 - protein, 32 aa, Glycine max
  Clone ID: PAT_MRT3847_28054C.1.pep
FDPVPQLAASKARILTSISVEMLIVVGLEEVR

SEQ ID NO: 206011 - protein, 74 aa, Glycine max
  Clone ID: PAT_MRT3847_28055C.1.pep
KGPLLIYCQLKKDELDKKSGCAQRTVVHSYDLSPCMCVRDATLTSQSDSNLTYRLTPHNAVIGKISVPFNPTAP

SEQ ID NO: 206012 - protein, 39 aa, Glycine max
  Clone ID: PAT_MRT3847_28056C.1.pep
KVLSLHKDVSYRYDDQRKVVRRHNLLKHASQKFSLALFA

SEQ ID NO: 206013 - protein, 88 aa, Glycine max
  unsure (1)..(88): unsure at all Xaa locations
  Clone ID: PAT_MRT3847_28057C.1.pep
MQIFGKTLTXRKTITREVASSDTIDDVSAKMQDKEGIPPDEQRHIIAGTQLKDGRSLADYNVQNESALHLVHRLRGGMQIFVKTLNGK

SEQ ID NO: 206014 - protein, 84 aa, Glycine max
  unsure (1)..(84): unsure at all Xaa locations
  Clone ID: PAT_MRT3847_28058C.1.pep
VITSGKLRALRAKSMKFKDGYMISFGQPVKDYIDSVVRHVLLRXGALGIKVKIMLDWDPKGNQSPKTPFPDLVTIHTPKEEEYK

SEQ ID NO: 206015 - protein, 121 aa, Glycine max
  Clone ID: PAT_MRT3847_28059C.1.pep
LKQHETKGGKKAQKGKTDPEPQQLKYLLWESKKEEPKPKAKNAKTGGKCFLNGKTSGTSHVRQTHQAGWAQSACKPKRGGCDPTSREKNARADPIKKKRNPQADGGGPIGPRGQLFFSWKK

SEQ ID NO: 206016 - protein, 47 aa, Glycine max
  Clone ID: PAT_MRT3847_2805C.1.pep
CVPAGEAVQETNEVADAKLVAAGEAVQETNEVADTKLVDGVFSFSSS

SEQ ID NO: 206017 - protein, 132 aa, Glycine max
  Clone ID: PAT_MRT3847_28060C.1.pep
KTTGRYSQKEKVRDREMMELKKVALVKVALLLFLLGFSATTADATRFDPRSFITQVLPNNYYVKIKSTATACCDLCLCTKSNPPQCQCVDGSETGCHSCCKNCICNKKFPRTCFCGDITNFCYDKCNSTEAN

SEQ ID NO: 206018 - protein, 51 aa, Glycine max
  unsure (1)..(51): unsure at all Xaa locations
  Clone ID: PAT_MRT3847_28061C.1.pep
MPIRNIAVGRPXEASQPKTFKAALSEYISSFIVVFSGSSFGIADNELNCNG

SEQ ID NO: 206019 - protein, 92 aa, Glycine max
  Clone ID: PAT_MRT3847_28062C.1.pep
SADHIYYSTQGLVVVAEGGEKGGSVRINGGGNLYSGQSVTGGNGGNIRRGREFPKSGNVGARSFLLASTLPKEKSDKAMKKKDKSSTRMEAI

SEQ ID NO: 206020 - protein, 104 aa, Glycine max
  Clone ID: PAT_MRT3847_28063C.1.pep
CLNSVPSHRLKSIHGLLKRIRHRLFKPNYVAAPMLDGKFRAFNPIPYILSHYRATLKGFMIFLNTVIRTSRESFASLQLPSPNLSTPLSILIFHILLPSSFPPS

SEQ ID NO: 206021 - protein, 69 aa, Glycine max
  Clone ID: PAT_MRT3847_28064C.1.pep
YGCEKTTEGIFTLCGNQRELSQHIGTPVQPTKKRSDETFEFSPAKTSDKDSVFKISNKENFEPHNVLGN

SEQ ID NO: 206022 - protein, 121 aa, Glycine max
  Clone ID: PAT_MRT3847_28065C.1.pep
GRPLVVFDHLNERGGSEVHSASCAMLPNSNKHISLKSCKIEEAREQSTDDQLLGEAQNLHNCCVNKEDSTVLKDDKGNQYHTAKLHKFNSFTPFPGLRDSGPMVSMFARRLGAIKQFQHTE

SEQ ID NO: 206023 - protein, 57 aa, Glycine max
  Clone ID: PAT_MRT3847_28066C.1.pep
GSLARGGKVRGQTSKVVEQAKKKKPPGAAPKRMQYHPRFVPPVVGFGKKGGPNPPEK

SEQ ID NO: 206024 - protein, 119 aa, Glycine max
  Clone ID: PAT_MRT3847_28067C.1.pep
PGLFLFFLTSSGSTTVYDIGLATRIRDSFGVLDKSRGFLWLLQRRGPGSQRRMNRPEKTCTSKNGTGRCRINRCTRLLRPRPTRAEMLLLRRPLEALTRAECILHTTRLGLFALKRHDG

SEQ ID NO: 206025 - protein, 178 aa, Glycine max
  Clone ID: PAT_MRT3847_28068C.1.pep
MHRSPTRNLVPLDLEIEATLRRNRAERRRKLLQDRTVASILEQETHFSDLLSPDSPSSRESATQLPEFITMAEEHDQRITLEDYSNSSVPKFFTSIARPEVQANNINYPYSLIHLIQGNLFLGLPNEDPYAHLAMFIEICNTNKIIGVPDEAIRLSLFSFSLAEEAKRWLHSFKGNSL

SEQ ID NO: 206026 - protein, 78 aa, Glycine max
  Clone ID: PAT_MRT3847_28069C.1.pep
YGVFLIFSGFFPLSTRTNFYIETFHNKALHKSVVLVTSSKRPVLREKKKNTKTNTKLKSGCHTQRGGTHHKKKGTTLP

SEQ ID NO: 206027 - protein, 45 aa, Glycine max
  Clone ID: PAT_MRT3847_2806C.1.pep
RTSSLMTSLSSVVLVLVALILLPHVLADYENVPVYQIPIENLALY

SEQ ID NO: 206028 - protein, 178 aa, Glycine max
  unsure (1)..(178): unsure at all Xaa locations
  Clone ID: PAT_MRT3847_28070C.1.pep
LTTIPREYVIGVKLGAINNMCAYGLNPGISGTTLLGTITQTISQQTVWNQMATVRTPLNFDPSKQSFCQYSIDLLGGGILVDKTGDWITLIQNSAISNLLKVGGWKKSXXMGKIGDAWDAAVQRSDXSXLVQVVLTNKDTXQHCCACKVTEWEPHYLELRLAIEECGDYNGVEMRSME

SEQ ID NO: 206029 - protein, 74 aa, Glycine max
  unsure (1)..(74): unsure at all Xaa locations
  Clone ID: PAT_MRT3847_28071C.1.pep
LLXLNSMEMHSFHNRTFGPMALKPYLFTCLLSVYVGLGIYRLSLVFLIINTYTFFFFYLIYLNITRGWFFFSFY

SEQ ID NO: 206030 - protein, 40 aa, Glycine max
  Clone ID: PAT_MRT3847_28072C.1.pep
ARPATHSTDPGAIYQVDKVRLPKAIFGTDIFPGPAPAPTP

SEQ ID NO: 206031 - protein, 66 aa, Glycine max
  Clone ID: PAT_MRT3847_28073C.1.pep
LFLLYLPFKPLPNQFLKKFFINNTFFYINFVPKPQFLIWNWWGEKAIILISLIHNPLFFWFFFPFF

SEQ ID NO: 206032 - protein, 845 aa, Glycine max
  unsure (1)..(845): unsure at all Xaa locations
  Clone ID: PAT_MRT3847_28074C.1.pep
MLGFCSQAPAADSSSGEVFHYSVGFSTTKMKVQETRSHVHALGEEEKVMTRKQKAESKAHEVEHSPKKAKVEKEDGHINGKSETGVAEEYDEFCKATTEHLPLEQMRDILEANGLDSSGSDLEITRRCQDLLFYGALDKCSVCNGSLEFDGRRYVCRGFYSEWAGCTFSTRNPPRKQEPIKLPDSVQNSLASDLLKKYQDPXSHRPHRDLGLAEKPFTGMMISLIXFVTRIQHYCXTPIAKQGGKVSHSNVXDSLIGRVRVSAXLGGTSKLAEAMERSIPVVREAWLIDSIEKQEPQPLEAYDLVSDLSVDGKGIPWDKQDPGEEAIESLSAELKLYGKRGVYKDTKLQEQGGKIFERDGILYNCAFSVCDQGRGLNDYCVMQLIVVPENRLHLYFKKGRVGDDPNAEERLEEWDNVDGALKEFVRLFEEITGNEFEPWEREKKFQKKPLKFYPIDMDDGIEVRHGALGLRQLGIAATHCKLEPLVANFMKVLCSQEIYKYALMEMGYDCPDLPIGMVTNLHLKKCEDVLLEFIDKVKSLKETGPKAEAVWTDFSQRWFTLMHSTRPFNFRDYQEIADHAAAALEGVRDITQASHLIGDMTGSTIDDPLSETYKKLGCSISALDKSSDDYEMIVKYLEKTYEPVKVGDIEYGVSVENIFAVQTGGCPSYEDIIKLPNKVLLWCGSRSSNLLRHLQKGFLPAICSLPIPGYMFGKAIVCSDAAAEAARYGFTAVDRPEGFLVLAIASLGNEITELKTPPEDASSLEEKKVGVKGPGKKKTDESEHFVWKDDIKVPCGKLVASDHQDSPLEYNEYAVYDKKRARISYLVGVKYEEKEEKGAVIDTAE

SEQ ID NO: 206033 - protein, 50 aa, Glycine max
  Clone ID: PAT_MRT3847_28075C.1.pep
SHGTVMLVECMEFIDNFTSFGLRCIKKLPASTSKFTTNCVVYTYNSLVDK

SEQ ID NO: 206034 - protein, 43 aa, Glycine max
  Clone ID: PAT_MRT3847_28076C.1.pep
LGQSSNEYSYYILLILLIPASCSVLSLNKVMHTKNTLHLHTRS

SEQ ID NO: 206035 - protein, 87 aa, Glycine max
  unsure (1)..(87): unsure at all Xaa locations
  Clone ID: PAT_MRT3847_28077C.1.pep
LSXXDIIALIGDXCDGVIGQFXXKHWGXXLFSGXSKAXXKAFSNXAXXYNNVDFDAANKYGVAVGXTPGVLTXXTAXLXASLTLGSC

SEQ ID NO: 206036 - protein, 138 aa, Glycine max
  Clone ID: PAT_MRT3847_28078C.1.pep
YVDISVAVATEKGLVTPVVRNAESMDMVGIEKAIADLGKKARDNKLTIEDMAGGTFTISNGGVFGSLMGTPIINLPQTAVLGLHAIKEKPVAINGKVEIRPMMYLALTYDHRLLDGREAVTFLVKVKEYIEDPRKMLL

SEQ ID NO: 206037 - protein, 187 aa, Glycine max
  Clone ID: PAT_MRT3847_28079C.1.pep
PLTFSALSTFTSFRALSCTGTPSRAPAFSHNADLETLVPAWACHGVRITNALLRLSRKRPNSGTCFTLNAIQPFAITFDSSFPRPPGALPTLLCCRPRLRKTSTMVLPTSLATALTVFFVATAITPPYFLLSSVSPLRLPLFSFICFPLFFFALPLLFLSPSPTLTYPSPPPPPPPSTVALHTCTTA

SEQ ID NO: 206038 - protein, 45 aa, Glycine max
  Clone ID: PAT_MRT3847_2807C.1.pep
SDEYNLSSAENRSLSAISSRMLIEVRRSLNRQSSSNARVTHHFHH

SEQ ID NO: 206039 - protein, 57 aa, Glycine max
  Clone ID: PAT_MRT3847_28080C.1.pep
ALVEMHNWKVLLENDQLHIERRQGRVFEGWNEGKIYFPPTYKYSNNSDRYAGDERQS

SEQ ID NO: 206040 - protein, 92 aa, Glycine max
  Clone ID: PAT_MRT3847_28081C.1.pep
KKKRQADLPWTPAVLLIIVPNLNNPEVEGMKATLHPFPDVVAMNQMTSILFASAQMVSEKLLCYLTYVILYKMVSLMRIKELCDIFVNYFNY

SEQ ID NO: 206041 - protein, 156 aa, Glycine max
  Clone ID: PAT_MRT3847_28082C.1.pep
MRKGNKKKNKLVWMIATPFRVLGKARDMYVSSITKCGHNMNYSNPVDAAGRFQALPRSYSAATSRSDNNEDFAELLRAASARTLGNIIDVDLVVKQQAQTQTRPVSSNGLPKSTSVGMGRIDEDTPYDLGEGEVPVVPKAYPRSRSYAVGKTSAVL

SEQ ID NO: 206042 - protein, 80 aa, Glycine max
  Clone ID: PAT_MRT3847_28083C.1.pep
TGHPCAYPSYVVVTRCVAHLTVSQCLGLIAFTYRAHINVIGLCISGLIPNCGNRLCYSLSVRWPSSGLALIQVPEAHRSW

SEQ ID NO: 206043 - protein, 79 aa, Glycine max
  unsure (1)..(79): unsure at all Xaa locations
  Clone ID: PAT_MRT3847_28084C.1.pep
TRLDVDSSTPTFCQLSIDLLGGGILWDKTGXDWITLIQNSAISNLLRVAAWNICCXMAKIVISGNAAHKRSDCASLVQV

SEQ ID NO: 206044 - protein, 89 aa, Glycine max
  Clone ID: PAT_MRT3847_28085C.1.pep
NGKNSGFEKVKIWCSMGLWKIHLIWIFNLVKLLIRKISLVGKKRGSPLKGQFLGDGISMKGRCKTHGRSPFTSSVYSSLSSHSVVFSQP

SEQ ID NO: 206045 - protein, 123 aa, Glycine max
  unsure (1)..(123): unsure at all Xaa locations
  Clone ID: PAT_MRT3847_28086C.1.pep
KCLGQGENIDICYSIKXELHDALSALLGDFGVLMIPTVPGPPPKLQTNTSDLEIFRARAFSLLSIAGVSGFCQVSIPLGMYNNLPLSISLVARHGADKFLLHLVESLYDSIEDRKQHIIEHKL

SEQ ID NO: 206046 - protein, 549 aa, Glycine max
  Clone ID: PAT_MRT3847_28087C.1.pep
VRNTQTASHSTVYWPDGFCAISGSFCFGGLVPCVLRFIVIVSLATVFWANCLCDSLLYSAWLRLPSGVDSKTRKMFIEEVMELVELNPLRNSLVGLPGVSGLSTEQRKRLTIAVELVANPSIIFMDEPTSGLDARAAAIVMRTVRNTVDTGRTVVCTIHQPSIDIFEAFDELFLMKRGGQEIYVGPLGRHSTHLIKYFESIGGVSKIKDGYNPATWMLEVTTSAQELSLGVDFTDLYKNSDLYRRNKQLIQELGQPAPGSKDLYFPTQYSQSFLVQCQACLWKQRWSYWRNPPYTAVRFFFTTFIALMFGTMFWDLGSRRTTRGDLLNALGSMYSAVLFLGIQNASSVQPVVAVERTVFYREKAAGMYSALPYAFAQVLVEIPYIFAQAVTYGLIVYAMIGFDWTAEKFFWYLFFSFFSLLYFTFYGMMAVGVTPNHHVAAIVAAAFYAIWNLFSGFIVVRPKMPVWWRWYYWACPVAWTLYGLIASQFGDITERMPGEDNKMVKEFIEDYFGFKHDFVGICAVVVAGIAVAFALIFGAAIKTFNFQKR

SEQ ID NO: 206047 - protein, 393 aa, Glycine max
  Clone ID: PAT_MRT3847_28088C.1.pep
MSSSSSSSSSSEDESMSEQSNELGLDFILSLDNVPSKLPPHLELFKTRVLCNNDAPVHTDTVQYSGAYAILGVDNSVRLDSFCENFKVEVKRLTDSDIEFDMIGIDPAIANAFRRILIAEVPTMAIERVYIANNTSVVQDEVLSHRLGLIPIRADPRLFEYPENAGDDKNEKNTIVFKLHVRCQVGQPRITVKSDKLKWLPNGSELPCEDVKPNAGSKPKTFTSFTCSQDSLPEFSNNSIGLTYSDIILAKLGPGQEIELEAHAVKGIGKTHAKWSPVATAWYRMLPEVVLLEAVEDELAEELKNKCPVNVFDIEDIGKGKRRAKVARPRDCTLCRECIRGGKEWEDRVSLRRVKNHFIFTIESTGALPPEVLFTEAVKILEDKCERVITELS

SEQ ID NO: 206048 - protein, 64 aa, Glycine max
  unsure (1)..(64): unsure at all Xaa locations
  Clone ID: PAT_MRT3847_28089C.1.pep
ERXXSRXXXGXWKLVVRVXNEXKXXTQGGCECVTVGKRXXCSXXNILNXYXISVFYILSVAESX

SEQ ID NO: 206049 - protein, 68 aa, Glycine max
  Clone ID: PAT_MRT3847_2808C.1.pep
ARVMGKEVLIEIHCEKENGVELKILDHLENLHLSVTGSSVLPFGNSALCITITTQVCYIAMHQSSFMF

SEQ ID NO: 206050 - protein, 189 aa, Glycine max
  unsure (1)..(189): unsure at all Xaa locations
  Clone ID: PAT_MRT3847_28090C.1.pep
VAENNTHGLNDNKHNLVLVLKQILNAEEELKRRNSMQVVAMRGPSVPLQGDGTNDTGSMIRHMPPRLGSEGNLVAADVDGGGEGDDFANHTMHSRHVLRTSSMSPSSESTLRRTPSISIQQNVISHPSRANMGAAGSPSRFALSGHQGNPMNLPSVSVSGTSYIASSPSPSSXGGTSVFRDARQSSPWK

SEQ ID NO: 206051 - protein, 82 aa, Glycine max
  Clone ID: PAT_MRT3847_28091C.1.pep
RPLSLNMHLKCEPVHYSKLGVPQVGDSLFYAQRNPPKSSAEIRMIHFRGIVIVHKSLCHILSQVLMPVFALVFCCRHPKGKC

SEQ ID NO: 206052 - protein, 106 aa, Glycine max
  Clone ID: PAT_MRT3847_28092C.1.pep
RGPPPPRSQGGYRGNSVGPPPFRGLVGGYHKSQLGGVQKPGKFCFFGLPGGAPFFLSLGGGHLNLWEGVVKFFIYPGPPLIFGLCFFPRFFGTPKWGSPGSPFFRA

SEQ ID NO: 206053 - protein, 94 aa, Glycine max
  Clone ID: PAT_MRT3847_28093C.1.pep
TAPWGGSITNQFIAFVAKNAFPSELDPKQNMGLVTHVPNPIIIIGLILHGIVLFVSSWVSIRCGSSTCRCGCYSSTTTSMLIVPHALSRGAHRR

SEQ ID NO: 206054 - protein, 65 aa, Glycine max
  unsure (1)..(65): unsure at all Xaa locations
  Clone ID: PAT_MRT3847_28094C.1.pep
MRVPSVPLLAPLPIGFAVFMVHLRTIPVTGTGINPARSFGPAVIFNIDKAWDEQXIYWVGPFVGA

SEQ ID NO: 206055 - protein, 62 aa, Glycine max
  unsure (1)..(62): unsure at all Xaa locations
  Clone ID: PAT_MRT3847_28095C.1.pep
GAKGFSFPRRGXKPNWXIKNLWGEKWGKXVFPSFPLWHGXCGKNPMVYGAKGPPXHPPPGKH

SEQ ID NO: 206056 - protein, 216 aa, Glycine max
  unsure (1)..(216): unsure at all Xaa locations
  Clone ID: PAT_MRT3847_28096C.1.pep
FSQPCSLSKLAFHSPRLQLNKNSHPIRFLGRTGRFESPHVTLGFRAPQFQLPEPLTGKVWTLEDFEAYPALLVMFICNHCPFVKHLKKDIVKLTKFYVEKGXAVHSXSSSSVGHTPKLCGYPFXPYVYDESQDVLQHFGAVCTXPEFYLFKKDGRKPPFELVYHGQFDDSRPSNNVPLTGRDLSLAIDRVLSGQPVPSEQKPSVGCSIKWHPRKKF

SEQ ID NO: 206057 - protein, 67 aa, Glycine max
  Clone ID: PAT_MRT3847_28097C.1.pep
LINCNYLFHQKTLISELKFLFQVAMLYVMSLTILGCYTLFSIHSVFLFTYNFRKCDLQGNDVICGSY

SEQ ID NO: 206058 - protein, 80 aa, Glycine max
  unsure (1)..(80): unsure at all Xaa locations
  Clone ID: PAT_MRT3847_28098C.1.pep
RHSLLLALLLFAAVSTAAMAVAASDADDILIRQVVPDVERSXQEDNLLSAAHHFTCFKAKFAKTYATKDEHDXLFGVFKS

SEQ ID NO: 206059 - protein, 180 aa, Glycine max
  unsure (1)..(180): unsure at all Xaa locations
  Clone ID: PAT_MRT3847_28099C.1.pep
MTIQPLDLLRSNLSRVRIPEPTNRIYKHECCVSFDSPRSEGGLFVDMCTFLAFGKDFVGWNYEKTGNPVYLHIKQTNKLVPEDRPSKKPTLLAIGVDGGFDNNEPEYEETHSVVILPEYVSLPFPSVELPEKVRLAVDAILLAEGAERKEQLAAWTADKKKVSSYATNLQQIDNGXVIPP

SEQ ID NO: 206060 - protein, 94 aa, Glycine max
  Clone ID: PAT_MRT3847_2809C.1.pep
IQDSPTWSFSRSKSLSSMGDYVRTCWAWILSRKLIFATDLEMNDQKTKLLGSPNRGTWSHVFYKLRSEIRRFISTSDHATLPKTYHRSSPQVFS

SEQ ID NO: 206061 - protein, 48 aa, Glycine max
  Clone ID: PAT_MRT3847_280C.1.pep
KKDFTSEGKGCVKKFEILFYVPGSIRLNLNGPFMITRCFELIVVVVLY

SEQ ID NO: 206062 - protein, 89 aa, Glycine max
  Clone ID: PAT_MRT3847_28100C.1.pep
MQIIEKTLTRKTTIFEVESRDTIENVNGKIQYNECNPPDQQRLNFTRKHLDHSRTLIDYNIQNESSLHLVLKHRGSINEPSLIALARKY

SEQ ID NO: 206063 - protein, 73 aa, Glycine max
  Clone ID: PAT_MRT3847_28101C.1.pep
LAHINCIKFSNILIGFLKLIKKKRGVSPLKSYSCGGKSLLTSCLRQHYSTPPFNSWRILYILSKVETVLFPLL

SEQ ID NO: 206064 - protein, 134 aa, Glycine max
  Clone ID: PAT_MRT3847_28102C.1.pep
KHTKGCVMREMSLLESETEMQTTSWNPKSQASNDPLNFYMAKPSLEHNHEREMKTCRNQNLEFGLFYYLSDYKKQTQNLHRLPATERLRFQTYTKVSQIYNKVDSHDYENVHNLHSVIESKTFQLQIPSSAKQQ

SEQ ID NO: 206065 - protein, 360 aa, Glycine max
  Clone ID: PAT_MRT3847_28103C.1.pep
ELPSLNNFPDTPQSDDHEKRENTADVAVGVVDGENGNGQNLSLAKSACSSNSETSKGSGLSLSRSDIRVKARERARERTTKEKEKEKEKNDESHRHHHNVVVVPHHNHNVNLVSQTASFTELLTGSDPNKGCDEANNNMMFNKAAGRLQWCSSTTPMDYFLGLSSSRTTTHNHNHLHHHQYSSSSSSGFSLAQIQLGHSLPEAMNHVSAFNNNVSGDNHNHSSSDPHLQQQHLSLIPDHLMSAVVTSSAASSHHHHHHQPSGNDYNLNSTMSSGLAGYNRGTLQSNSPSLLPHSQRFSPIDGSTVPFFIGAASSAAAVAAPAMENNNNNNHHQHQFSSVFDGSRLQLYYGHSDQKGKAKN

SEQ ID NO: 206066 - protein, 78 aa, Glycine max
  unsure (1)..(78): unsure at all Xaa locations
  Clone ID: PAT_MRT3847_28104C.1.pep
NNFXSXXCXXXLXRTXXSTXSWXXXRXXXXXTXXRXQRXRLXPWXIXXYXLXXXXXLXXXXSATLEPNSELTYACXRX

SEQ ID NO: 206067 - protein, 37 aa, Glycine max
  Clone ID: PAT_MRT3847_28105C.1.pep
GTLLFACYNWRKNTIVHMLYCPCRTWGPASGKNQLPT

SEQ ID NO: 206068 - protein, 82 aa, Glycine max
  Clone ID: PAT_MRT3847_28106C.1.pep
SQPVQGSAEGFIRQGGGFLACGYRTGFHVQGFLLQMRSLRVKLLGLILSKKITLLVADLHRFGFPRALVRWPVFFCKEVRVR

SEQ ID NO: 206069 - protein, 76 aa, Glycine max
  Clone ID: PAT_MRT3847_28107C.1.pep
TYHYITYCTKFTHPNCTTTQCMMYTLFSFFLTTPLSVQLLLFTMSINLSKDKRLITILYKIPQANFKSPLYSQKQT

SEQ ID NO: 206070 - protein, 83 aa, Glycine max
  Clone ID: PAT_MRT3847_28108C.1.pep
LLTSKTQVVATQSARMLSALSRPTKNKAANKMSYIVEGDVKPLIKLAKTSSVDAAETAVAALANLLFDPFIAAEALAEDVVSA

SEQ ID NO: 206071 - protein, 79 aa, Glycine max
  unsure (1)..(79): unsure at all Xaa locations
  Clone ID: PAT_MRT3847_28109C.1.pep
NIIIVNIILNMHQFQGYFNHNVSHIHLXYHVDVVIQAMARSSSTXYHKCICETSIIVNIILNMXQFQGYXNHXXMEXHX

SEQ ID NO: 206072 - protein, 196 aa, Glycine max
  Clone ID: PAT_MRT3847_2810C.1.pep
GFPPRATSFQKLSLVSSTSSILHRSMDHIKSHKIEALIQSTKSHNYLIKLIQLLVPLSVFSFFVSPSSLLVFLYHFNLYFSTFSLQLFTHTIDKNCMFLLCNGLLVFVGITRSLSGSSGVAESESSSKYVEDGSQSPYSDVEATEAIILVEKEAMEKIHEPHGQNTGAEHAIEIKYSGEEEEEEGEESIGDIILEG

SEQ ID NO: 206073 - protein, 39 aa, Glycine max
  Clone ID: PAT_MRT3847_28110C.1.pep
PYLSCSFTPILHRCRPSHLTYSNVCSVHTIVVLVTQYNC

SEQ ID NO: 206074 - protein, 87 aa, Glycine max
  Clone ID: PAT_MRT3847_28111C.1.pep
LERLGGAGPSLTRYQLELCMSIYRTDTMINTDGKDSRQSTRTGIAAYDDEGHATGTGNMQSAVAHMMTAGSGSGGHSIAWSTFQLGW

SEQ ID NO: 206075 - protein, 143 aa, Glycine max
  Clone ID: PAT_MRT3847_28112C.1.pep
KGTLKIKYKLSESEKKQKLKSTTLGTTYKTGEISYAGGYKKEEEYKGEYYVGEHKGEYYGEYSSEHKGEYYGEYKVGEHYGEYKLEYKEGPSDKAKDKTYGEGGVAEGEKKKKEKKKKEYGYEYGYDSSSSSDSDQIVVPITH

SEQ ID NO: 206076 - protein, 38 aa, Glycine max
  Clone ID: PAT_MRT3847_28113C.1.pep
IILIDILIGNSHIHIIFVLHSYNFVPFHLSMIISTTTC

SEQ ID NO: 206077 - protein, 163 aa, Glycine max
  unsure (1)..(163): unsure at all Xaa locations
  Clone ID: PAT_MRT3847_28114C.1.pep
TLFAKFIVMSKIRAPKFVSEVIHRRADGYWIDKFYYHKDDKAPGLIVYARNSNPLPLDMLQVSSNNRYWCSGPAWKGKSNILKILKGLVRVPVELNLIGSTWTKSQSVKMSFHPQRLRQGGSASCLDLPIAKLVHPWNGPPTKSANSTHLSXRXLWTFTAMAS

SEQ ID NO: 206078 - protein, 112 aa, Glycine max
  Clone ID: PAT_MRT3847_28115C.1.pep
DMSILVSRMHRSLIAACLIRLKDGAIFSLSDNFHHNHCGIKPITMSLNAAYSTCLSYSCSITLCKIACNRIISSWLIQLNAGKPSVQDLCSHNRCASSSMEPSCSNYYDQSS

SEQ ID NO: 206079 - protein, 113 aa, Glycine max
  Clone ID: PAT_MRT3847_28116C.1.pep
SAAMNTEGKVGWEEIVDSRLQGNFDVKELNEMAALAYKCINRAPSKRPSMRDIVQVLTRILKSRNHGSHHHKNSLSATADEVFIDADQLENKISVTDHRREESLDSVAEVYEV

SEQ ID NO: 206080 - protein, 482 aa, Glycine max
  unsure (1)..(482): unsure at all Xaa locations
  Clone ID: PAT_MRT3847_28117C.1.pep
MGSSEYQTLHIFFFPFLAHGHMIPTVDMAKLFAEKGVKATIITTPLNEPFIYNAIGKSKTNGNKIHIQTIEFPSAEAGLLDGCENTESVPSPELLNPFFMATHFLQEPLEQLLQKQLPDCIVADMFFPWATDSAAKFGIPRLVFHGTSFFSLCVTTCMPFYEPHDKYASSDSDSFLIPNFPGEIRIEKTKIPPYSKSKEKAGLAKLLEEAKESELRSYGVVVNSFYELEKVYADHFRNVLGRKAWHIGPLSLCNKDAEEKARRGKEASIDEHECLKWLNTKKPNSVIYICFGSTVKFPDSQLREIAKGLEXASGQQFIWVVRKSGEEKGEKWLHDGFEKRMEGKGLIIRGWAPQVLILEHQAIGTFVTHCGWNSTLEAVTAGVPMVTWPIFADQFFNEKLVIEVLKIGVPVGAKTWLGMQGDSISCDAVEKAVKRIMTGEEAIEMRNKAKVLSHQARRAMEEGGSSNSDFKALIEGLSSLSH

SEQ ID NO: 206081 - protein, 276 aa, Glycine max
  Clone ID: PAT_MRT3847_28118C.1.pep
EFGSRWKGPPKFKPQYTKDEAIQHVRDLYRESLKKYGAEGSRGKSAEDGEQNIDELSFTELRDKLIALDPLNKKHIISINKAEAEFWRKSEGYRVGWSDEILGFDCGGQQWVSEACFPAGKLANPSMKDLEYIEELKLLIEKEDIPAPAPIEQRWTASSRSSLSPASSPSGDDIFSWVGIIMYLPTMDGRQRKDITEEFFHYRHLTQAKLWDRYSAYEHWAKIEVPKDKEELAALQARLRKRFPVDAYNKARKELDPNRILSNNMLEKLFPQSDTI

SEQ ID NO: 206082 - protein, 158 aa, Glycine max
  Clone ID: PAT_MRT3847_28119C.1.pep
CGKLANPSMKDFEYIEELKQLIEKEEIPAPAPIEQRWTASSRSSLSPASSPSEDDIFSWVGIIMYLPTMDARQRKDITEEFFHYRHLTQAKLWDCYSAYEHWAKIEVPKDKKELAALQERLRKRFPVDAYNKARKELDPNRILSNNMLEKLFPQSDTI

SEQ ID NO: 206083 - protein, 1070 aa, Glycine max
  Clone ID: PAT_MRT3847_2811C.1.pep
TRPLQLHAVWMMPFQVGIGLFLLYNCLGASVITALLGLLAVIVFAVVSTRKNKRYQFNAMMSRDSRMKAVNEMLNYMRVIKFQAWEEHFNGRILGFRKSEFQWLSKFMYSICGVIIVLWSTPLLISTLTFGTALLLGVRLDAGTVFTTTTVFKILQEPIRTFPQSMISLSQALVSLGRLDRYMSSRELMDDSVEREEGCGGHTAVEVKDGTFSWDDDGQLKDLKNINLKINKGELTAIVGTVGSGKSSLLASILGEMHKISGKVQVCGSTAYVAQTSWIQNGTIEENIIFGLPMNRQKYNEVVRVCSLEKDLEMMEHGDQTEIGERGINLSGGQKQRIQLARAVYQDSDIYLLDDVFSAVDAHTGTEIFKECVRGALKGKTVILVTHQVDFLHNVDLIVVMRDGMIVQSGKYDDLLASGMDFSALVAAHDTSMELVEQGAVMTGENLNKPLKSPKAASNNREANGESNSLDQPKSGKEGSKLIKEEERETGKVSLHIYKLYCTEAFGWWGIIAVISLSVLWQASMMASDYWLAYETSEERAQLFNPSMFISIYAIIAVVSVVLIVLRSYSVTVLGLKTAQIFFSQILHSILHAPMSFFDTTPSGRILSRASTDQTNVDVFIPLFINFVVAMYITVISIFIITCQNSWPTAFLLIPLAWLNIWYRGYFLASSRELTRLDSITKAPVIHHFSESISGVMTIRAFRKQKEFCGENIKRVNANLRMDFHNFSSNAWLGFRLELLGSLVFCLSAMFMIMLPSSIIKPENVGLSLSYGLSLNAVMFWAIYMSCFIENKMVSVERIKQFTNIPSEASWNIKDRLPPANWPGEGHVDIKDLQVRYRPNTPLVLKGITLSINGGEKIGVVGRTGSGKSTLIQVFFRLVEPTGGKIIIDGIDISALGLHDLRSRFGIIPQEPVLFEGTVRSNIDPTGQYTDEEIWKSLERCQLKDAVASKPEKLDTSVVDNGDNWSVGQRQLLCLGRVMLKQSRLLFMDEATASVDSQTDAVIQKIIREDFAARTIISIAHRIPTVMDCDRVLVVDAGRAKEFDSPANLLQRPSLFGALVQEYANRSSGL

SEQ ID NO: 206084 - protein, 112 aa, Glycine max
  unsure (1)..(112): unsure at all Xaa locations
  Clone ID: PAT_MRT3847_28120C.1.pep
SALPIKVVLFEKHLGVGANGCFVNVSSGDNRFTETTIFNCRHADILGGYYTIPPELRRFVPHYIRWGQHTLVIYILPSFFTAEXKNKRHESNIQISGLCYDGRYKLWTKHQK

SEQ ID NO: 206085 - protein, 238 aa, Glycine max
  unsure (1)..(238): unsure at all Xaa locations
  Clone ID: PAT_MRT3847_28121C.1.pep
ETDSGCRLPFGFTRKKHNCYNCGLLFCRACSSKKITNAPLAPSKSKAFRVCDQCFDKRQGGAHSVMASKSRNYNTQQVLKHQHKISDVTEDRGETTVTQGPMLSLGQSCYRKSMPSGRKDWKNHQEIQQDVEDSSSMLGGMPQWGQVPCPAMFQINCTENPVVHVSSSKNKLATVSPFNVESTAYNFSSNVETDTTKSDKVLLEEVHRLRAEAKRLEEQCELXNRXIQECXTKIEESW

SEQ ID NO: 206086 - protein, 76 aa, Glycine max
  Clone ID: PAT_MRT3847_28122C.1.pep
FYDISYVDLYHQEELLELQDPDLASTIRKQQQRSLEFWENNWHSDVPLKIKRLARDPQRFAWAVGIAQSRCINMQT

SEQ ID NO: 206087 - protein, 76 aa, Glycine max
  Clone ID: PAT_MRT3847_28123C.1.pep
SVVYDVCAFKLYVSLVHSACLPTSAPVQRELRRTQLGFYNRLLHSRSRVMWSLRRQFLPQLPGLHLSNRKKPGRSA

SEQ ID NO: 206088 - protein, 101 aa, Glycine max
  Clone ID: PAT_MRT3847_28124C.1.pep
AWSHQRLLNVVPSPSFRQILQFTNSFCCWPITVRPGAFKDPLGACIHMMTLIAHKSCVPGFTIQQDVPSQHKMAFNFASHGILILMPFMHMSWLSRSLTFQ

SEQ ID NO: 206089 - protein, 89 aa, Glycine max
  unsure (1)..(89): unsure at all Xaa locations
  Clone ID: PAT_MRT3847_28125C.1.pep
YAFGNYNLACDDGWSDKPVTSQVVSMMAQFFNSGGRWNHKRTHQRTHLRSRRGTRMTVGXRDECGVPCGLPFGFMLTAIGNKMLIELRF

SEQ ID NO: 206090 - protein, 116 aa, Glycine max
  Clone ID: PAT_MRT3847_28126C.1.pep
MEEPPVVRSRGRPRKRRREDDATVTGDAKTLPEAKKMMPIALVGRYVLKEFRRNTVLLGKVARYASGLYRVVYESGGFEDLDSSEIRRILLLDSYFDDDLIRRKVELEESVLPKIA

SEQ ID NO: 206091 - protein, 81 aa, Glycine max
  Clone ID: PAT_MRT3847_28127C.1.pep
VPAYASIFNKLGFGESQMLDKLLYKEEVKRCVMTFEQQFHYGVFYAYVKLREQEIPNVMWISECVAQDQKARINDGIVFTF

SEQ ID NO: 206092 - protein, 335 aa, Glycine max
  Clone ID: PAT_MRT3847_28128C.1.pep
TRPDKAKEREREKYRDREKERESYRDGDKDKGKDKIREKERETDRDKERTRDRVSRKTHEEDYELDNVDDKVDYQDKRDEEIGKQEKDSKLDNDNQDGQTSAHLSSTELEDRILKMKESRTKKQPEADSEISAWVNKSRKIEKKRAFQLSKIFEEQDNIAVEGSDDEDTAQHTDNLAGVKVLHGLDKVMEGGTVVLTIKDQPILADGDVNEDVDMLENIEIGEQKRRDEAYKAAKKQTGVYDDKFTDDPSTEKKMLQQYDDPAAEEGLTLDEKGRFSGEAEKKLEELRRRLTGVSTNTFEDLTSSGKVSSDYYTHEEMLKFKKPKKKKSLRKKDR

SEQ ID NO: 206093 - protein, 110 aa, Glycine max
  Clone ID: PAT_MRT3847_28129C.1.pep
MAPKPPSTGLFVGLNKGHVVTKKELPPRPSDRKGKTSKRVHFVRNLIREVAGFAPYEKRITELLKVGKDKRALKVAKRKLGTHKRAKKKREEMSSVLRKMRAGGAGDKKK

SEQ ID NO: 206094 - protein, 41 aa, Glycine max
  Clone ID: PAT_MRT3847_2812C.1.pep
FNCSTYESSLKKIETELVNYHASVMFCSHCLTYFLTRFCTS

SEQ ID NO: 206095 - protein, 38 aa, Glycine max
  Clone ID: PAT_MRT3847_28130C.1.pep
RLMLCILIPSLCVTATIKLFTLNLCLPHHFNIPYTIFN

SEQ ID NO: 206096 - protein, 100 aa, Glycine max
  unsure (1)..(100): unsure at all Xaa locations
  Clone ID: PAT_MRT3847_28131C.1.pep
MDTVFSLFVAIPSLTGLKSSAGEMNTPPKVSAPQATLLGINASLKDIVIAVVATVASAMLSNNAIAIXMFLRGDDSFYSFVPNNIYNIFVQKIFFTNKTC

SEQ ID NO: 206097 - protein, 110 aa, Glycine max
  Clone ID: PAT_MRT3847_28132C.1.pep
MAPKPPSTGLFVGLNKGHVVTKKELPPRPSDRKGFLLQRVHFVRNLIREVAGFAPYEKRITELLKVGKDKRALKVAKRKLGTHKRAKKKREEMSSVLRKMRAGGAGDKKK

SEQ ID NO: 206098 - protein, 110 aa, Glycine max; identical to SEQ ID NO: 206093
  Clone ID: PAT_MRT3847_28133C.1.pep

SEQ ID NO: 206099 - protein, 148 aa, Glycine max
  unsure (1)..(148): unsure at all Xaa locations
  Clone ID: PAT_MRT3847_28134C.1.pep
MDYFSLLNNALQQWHKTSEYIILGGGACAGYAARAVCQTGXVRPGEMAIIPKEALSXMQPPALSKAYLFTHSSATLPGFRVFVGSGWERLLTDGXTDRAYSLYLXTEIHLADLAAQSLIIAGGETFTYAITIAASGSTDITVTHSVVQ

SEQ ID NO: 206100 - protein, 125 aa, Glycine max
  unsure (1)..(125): unsure at all Xaa locations
  Clone ID: PAT_MRT3847_28135C.1.pep
MHVCGGHCNRAVTYAALLGGRICELRAYDSRVXNLLCSIVPALXLRLVTNNMRPPVMTXSIRLGAIHWLELKIAFTFGLIYTAYATCIDHHTGSVGSIIAXSIAFSVTDYMLSGGPLDRACLNHS

SEQ ID NO: 206101 - protein, 56 aa, Glycine max
  Clone ID: PAT_MRT3847_28136C.1.pep
IKSCNDCSSLLRSNTDLVRPRYIISPPPRWHKERSKERLDPLEGNFSLEQSACRLS

SEQ ID NO: 206102 - protein, 38 aa, Glycine max
  Clone ID: PAT_MRT3847_28137C.1.pep
GSQGLLEPRAPQAPQRFLNRLPMVGVKFLYKSCFTTDE

SEQ ID NO: 206103 - protein, 172 aa, Glycine max
  unsure (1)..(172): unsure at all Xaa locations
  Clone ID: PAT_MRT3847_28138C.1.pep
TTINCMRTYGLSPGVXSSPLLGSFPQPILQQAACNQMTTVRTPLNYDFTXFSFSQFSIXLVGARIXSDYSGYWNTLIXNSPPTNYLTNLVGKKGCXMVTTVMSDACSLQLDSLGLIDTPVTNRLTGSPHFDACLRTLSDPLSCEXIFPIQVSGPHNPPDMRTLDCAPDTSLP

SEQ ID NO: 206104 - protein, 56 aa, Glycine max
  Clone ID: PAT_MRT3847_28139C.1.pep
QVQYKPEHVQPSSQRAKNSTSTITMKSVCDHSNLLKPELMNIAIWEICTMSVPYNL

SEQ ID NO: 206105 - protein, 104 aa, Glycine max
  unsure (1)..(104): unsure at all Xaa locations
  Clone ID: PAT_MRT3847_2813C.1.pep
MIEISRRGVIKFKVLVFLSATILIAWLCRAYDMFPLRMNTVYGARTAEVKCSSWRLAVEAHIIFDCXTIPEXCVESTYVYLHGDQYISDFKTGNQQAYFYARDL

SEQ ID NO: 206106 - protein, 47 aa, Glycine max
  Clone ID: PAT_MRT3847_28140C.1.pep
APFDTGLVEYYLLWRTPACMTNVTAESLQFPTLFTPGCSTSSYSHGG

SEQ ID NO: 206107 - protein, 89 aa, Glycine max
  Clone ID: PAT_MRT3847_28141C.1.pep
RDPSHSQGHSHTFQFTAMHTSVHTHVQSADGSSSVTGLSRCRKQDPSRTLGLPRPLALQSTTSSPIPGPSLGEAPRAPGRLSPLTRSPE

SEQ ID NO: 206108 - protein, 98 aa, Glycine max
  Clone ID: PAT_MRT3847_28142C.1.pep
SSLGFEIFSKEGPPSDKPIFLPFLYETSYIDENHLYPLDDPTSDGYIFMFTNSCFLILNPSTNRVVRTYGVLYGDFRNYQAFVMASILPIKLGGTELS

SEQ ID NO: 206109 - protein, 111 aa, Glycine max
  Clone ID: PAT_MRT3847_28143C.1.pep
MDSAESEREKKQKHAESKRVSEWGERERVRRKEGKREKFIERERERRGESKRRHSQRRHTRAQPTTDLYKWDAKTLTQHYCNYPNFLPSPLHFHFTRQNPLKSTKTRHLFS

SEQ ID NO: 206110 - protein, 70 aa, Glycine max
  unsure (1)..(70): unsure at all Xaa locations
  Clone ID: PAT_MRT3847_28144C.1.pep
VRVEHVMPSTCTEEVRLTKNKSDQLKAQANGRGXKITPMRQPSGSKPRFMVVRATLETIFPIPFDVSMDL

SEQ ID NO: 206111 - protein, 269 aa, Glycine max
  Clone ID: PAT_MRT3847_28145C.1.pep
GPPPPPGPPPDDPPSKEPGQVQLPPPPPPSQVPPKAGAIQSDGAVLSTENKNSLSSQEIPKMVAGHPPPRQQPPVPGPTLIPSLQPDVLLPGISRFPPPPPPPDMRPSLSVTGLHAQAPPPGMMVPLMPRPPYGPPPGPPPMMRPPLVAGPPPNFQEEDHIATRPPPPPPKPSYVKSAASTVVKRPLAQHTPELTAMVPASVRVRREAAMSKTKPKPAVSTSRAVSGTSGPTIVKSESVSLSSAPKTQSIDDSYTAFLEDMKALGALDG

SEQ ID NO: 206112 - protein, 43 aa, Glycine max
  Clone ID: PAT_MRT3847_28146C.1.pep
AYPIGYLPGLLTPVPGLDEIITHSSNAPTTWQHAGYANAFSRI

SEQ ID NO: 206113 - protein, 86 aa, Glycine max
  Clone ID: PAT_MRT3847_28147C.1.pep
TCFTVNTCLQLYLTQKINLRHKPSNQPPQFTCALQGTVAEPKSTCADEPLLLHAFREKNVERLKDRLMRQAWRYMKSYQTICDKYP

SEQ ID NO: 206114 - protein, 99 aa, Glycine max
  unsure (1)..(99): unsure at all Xaa locations
  Clone ID: PAT_MRT3847_28148C.1.pep
TFVNYLDQYTVDGVHNLADKSPMCNLLNFRTAVSYXHEVRETASYMDTLEEHGDRTNTHARCIYGTQILTXMNHQMLYXLIGVDPGTNPVRHLLGSQGL

SEQ ID NO: 206115 - protein, 105 aa, Glycine max
  unsure (1)..(105): unsure at all Xaa locations
  Clone ID: PAT_MRT3847_28149C.1.pep
AVDPRVRPTVHSIISKMVINEELMASLDQPTHTVVMHRTEPTAQQNLALQLAEKLGSLVENNERVFDHKQGDLQGLXRDQKDGYRKNEGYMRRGGYRQQQCQTAY

SEQ ID NO: 206116 - protein, 106 aa, Glycine max
  Clone ID: PAT_MRT3847_2814C.1.pep
KNYWRRPSLSLRLSVKHGNSNSDDVKYNGVCSTYFTGRSWTIPPSSNFKIRPLPTRAGEGAASDSARVENPLFKTLELGAWRGVWYLCNIYFNIYKQQVLNALHYP

SEQ ID NO: 206117 - protein, 91 aa, Glycine max
  Clone ID: PAT_MRT3847_28150C.1.pep
VIIKKKDKNKKKKKKKKKKKKKKKKIKKKKKKKKKKKKKKRAAALKNQTFTNPGTCNRKIFFNRDTKIKFMGRRLTTSEREKPWFYQTKSP

SEQ ID NO: 206118 - protein, 94 aa, Glycine max
  Clone ID: PAT_MRT3847_28151C.1.pep
TCDLILFLSSQPTLLITLRFNKECQGEFSSPFSYNIITNIVLKLREFQSPKFPKLECPPSATNPWVYSKRYNMIAVDKIKNCTKQKERKKMTPA

SEQ ID NO: 206119 - protein, 169 aa, Glycine max
  unsure (1)..(169): unsure at all Xaa locations
  Clone ID: PAT_MRT3847_28152C.1.pep
DLVDETGDWITLIQHSSISNLLKVAAXTKSCLLVKIVMSXNALVKKTDWASLVQVLLTNSVSAYLFNACKWTKEEPHSWELILPIDVCGPNNGCEMXESEWPNQTXMPLEFXLIDNPKQSTPYDILLRIFQDYKIAVNTLIPTLSVPHATVTSSDNAESSDMIWNLSDL

SEQ ID NO: 206120 - protein, 47 aa, Glycine max
  Clone ID: PAT_MRT3847_28153C.1.pep
RFKKKLDEVKLCVLCYFVVLLCLVTIFRVSLNKMMDFKEMVVFSISM

SEQ ID NO: 206121 - protein, 70 aa, Glycine max
  Clone ID: PAT_MRT3847_28154C.1.pep
YVENKKRSSKSNGAVLLQCICGDIVGTHSHSHSSSSLHFLICLLTLFFLTHGLIYSMKELRRVTAKGCSY

SEQ ID NO: 206122 - protein, 62 aa, Glycine max
  Clone ID: PAT_MRT3847_28155C.1.pep
MNVAVQKNGKLRLACVKKRWLFFILSAFFFFFFFIFFFFFFFFFFFFFFYFFWLQNRFLRTR

SEQ ID NO: 206123 - protein, 109 aa, Glycine max
  Clone ID: PAT_MRT3847_28156C.1.pep
MFNAKLKSKVDQFNNKFSADSKFIFINSTSGGLDSSLGFTVANASCCPSLGTNGLCIPNQTPCQNRTTYVFWDQFHPTEAVNRIIAINSYNGSNPALTYPMDIKHLVGF

SEQ ID NO: 206124 - protein, 193 aa, Glycine max
  unsure (1)..(193): unsure at all Xaa locations
  Clone ID: PAT_MRT3847_28157C.1.pep
MNIEKKGRGRNREAEENHTFFMAKIIGRSRRRRITTTTTQQLCNRMVHHHVNVRCNLFHSMSFLGRFIWDRILLCSLGRPSYLRLPLRDPPPPATVNGGGGSLHGHPFTTTTTTIPCDSDSDLVNLKISLLGDCHIGKTXFVIKYVGDEQEKTSLQMKGLNLMDKTLFVQGARISLSIWDVASDPRSICQIPM

SEQ ID NO: 206125 - protein, 364 aa, Glycine max
  Clone ID: PAT_MRT3847_28158C.1.pep
MEAKTKSCVVLPFLLLVAIFMQQCVHGESQVPCLFVFGDSLSDNGNNNNLPSTTKSNYKPYGIDFPTGPTGRFTNGQTSIDLIAQLLGFENFIPPFANTSGSDTLKGVNYASGAAGILPESGTHMGANINLRVQMLNHLFMYSTIAIKLGGFVKAKQYLNKCLYYVNIGSNDYINNYFLPQFYLTSRIYTPDQYANILIAQLSQYMQTLHDEVGARKFVLVGMGLIGCTPNAISTHNTNGSCVEEMNNATFMFNAKLKSKVDQFNNKFSADSKFIFINSTSGGLDSSLGIYTSFTVANASCCPSLGTNGLCIPNQTPCQNRTTYVFWDQFHPTEAVNRIIAINSYNGSNPALTYPMDIKHLVGF

SEQ ID NO: 206126 - protein, 53 aa, Glycine max
  Clone ID: PAT_MRT3847_28159C.1.pep
NPEELAILPGTSTKFKVPKKKGNSYKISIGLAHALTSPSFYNPIKFHVSKLRI

SEQ ID NO: 206127 - protein, 73 aa, Glycine max
  unsure (1)..(73): unsure at all Xaa locations
  Clone ID: PAT_MRT3847_2815C.1.pep
NVXQXSXTGSSPXSPQGSKXXXNLQSIXSXPTLFVVPKLHXHXFLXYXISSXRIFXFCFRTSXXINXXXLXXX

SEQ ID NO: 206128 - protein, 83 aa, Glycine max
  Clone ID: PAT_MRT3847_28160C.1.pep
YAIDTVDLCIILHSIFDNLRSMLFFQALTPYMQSPVGNSSNKSIGKLMGPALGDHNQGNFSINLWRNAFQDAFQRLCPVRARR

SEQ ID NO: 206129 - protein, 53 aa, Glycine max
  Clone ID: PAT_MRT3847_28161C.1.pep
ARSFSIESKGRADLLPPQTQSVLHDKKKQSLLTTQCATTEEEEREAVGCSQTT

SEQ ID NO: 206130 - protein, 54 aa, Glycine max
  Clone ID: PAT_MRT3847_28162C.1.pep
KPSIYYFCNQRNWTCLKVMLTLTVKHLDDYSLFNSKIKVLRPLNITSHMQVFII

SEQ ID NO: 206131 - protein, 49 aa, Glycine max
  Clone ID: PAT_MRT3847_28163C.1.pep
TFSRTSIRRLTHTRYNVQYDVMMDLLHSTFYPLPPSKYLLPIFSSHALL

SEQ ID NO: 206132 - protein, 52 aa, Glycine max
  Clone ID: PAT_MRT3847_28164C.1.pep
MVQCCLNMDKSQVPSLLLCTKMGGWLSNWAARANGLVYFWGAQVSLPCNERL

SEQ ID NO: 206133 - protein, 105 aa, Glycine max
  Clone ID: PAT_MRT3847_28165C.1.pep
DLHKKRRLISLQVLSGRIWPAKYQIHKQKTAIRFKLSWNAFVKDNNLKVGDVCIFELVHGTKLTFLVHIFRETDSSNCSTSHASGQMRAACQSQRKELKTITATK

SEQ ID NO: 206134 - protein, 94 aa, Glycine max
  Clone ID: PAT_MRT3847_28166C.1.pep
MAGAIQKLPLEQIQEDPNKFYYHFLYKATLVLIFFVIIPLFPSQAPEFINQSLLTRNWELLHLLLVGVAISYGLFSRRNEETDKEHNNSFDTAQ

SEQ ID NO: 206135 - protein, 54 aa, Glycine max
  unsure (1)..(54): unsure at all Xaa locations
  Clone ID: PAT_MRT3847_28167C.1.pep
SLFGPSMFSLAELVLSLLDFYILXLCSWLEFLLLFLLLIVIVDICPSFFSFKYP

SEQ ID NO: 206136 - protein, 42 aa, Glycine max
  unsure (1)..(42): unsure at all Xaa locations
  Clone ID: PAT_MRT3847_28168C.1.pep
XLSVKSVTHREINGXYXXLXPXPVYLFLXECIXXVCGQXXRX

SEQ ID NO: 206137 - protein, 62 aa, Glycine max
  Clone ID: PAT_MRT3847_28169C.1.pep
WKMMPILRRTLPPRKPNQSLRKEKRNKLNPQNNRRLWQSINNFLRISNQPGSILCTIFTCGC

SEQ ID NO: 206138 - protein, 132 aa, Glycine max
  Clone ID: PAT_MRT3847_2816C.1.pep
VHFLFLFLSHYCLWGEDMGDPYGLPEDLRRLIPARSTHLNPSNTHLLEPLCLHHGLSSAVSSATTPHTSFDPNMVGDVFFPRGFTHHFAHHHDYSSSSGVNPVVTCYCCCYYYCLGSCILQHGKCKERVVWV

SEQ ID NO: 206139 - protein, 42 aa, Glycine max
  Clone ID: PAT_MRT3847_28170C.1.pep
KGYEERIDDFVELVIYNKGFFIVWSRLVEDVGWLVNLFYRRF

SEQ ID NO: 206140 - protein, 36 aa, Glycine max
  Clone ID: PAT_MRT3847_28171C.1.pep
KKRILVFSLPISLFRLLTLLKRHNCHYLLYTYIIGL

SEQ ID NO: 206141 - protein, 78 aa, Glycine max
  Clone ID: PAT_MRT3847_28172C.1.pep
KNPGLGGWGIMFSLLKPNHPPGFLKGPLGWGCKRPPLCPRAPCFGVKGEFPNFFYPPHLFFRFFGPKNPITPMFFLGP

SEQ ID NO: 206142 - protein, 221 aa, Glycine max
  unsure (1)..(221): unsure at all Xaa locations
  Clone ID: PAT_MRT3847_28173C.1.pep
VAAAVDAALQAISNVSVSSELQDSLLKAGVLWYLLPLLLQYDSTAEESARAESHGVGASVQIAKNMHAIKASLALSRLSGLCSDESATPYNQAAADALKVLLTPKFSSMLKDQMSKDLLSKLNANLESPEIIWNSSTRAELLKFVDQQRAAQGPDGLYDIKDSHDFVYKALSRELFIGNVYLRVYNDQPDXEISEPETXCLALIDFISYLVHNQCVEDADL

SEQ ID NO: 206143 - protein, 89 aa, Glycine max
  Clone ID: PAT_MRT3847_28174C.1.pep
GERVELIHFHIPQPWRSHPLLSQTTTFILIYKHNERYEGKSHRISHCICLCTSSTTLNLLLHSQTSYSPQVSTKLTFFPFLSSLPRVER

SEQ ID NO: 206144 - protein, 102 aa, Glycine max
  Clone ID: PAT_MRT3847_28175C.1.pep
KAKKTAKTVPNLIPGSSIFCLGRPSKRVLASGPHLWACFYFIPNRLGHKEFFPYIKQNIPDEKMCLYKKLLGLESRCVAGSPLNLASHHPISRKKVTQMGLS

SEQ ID NO: 206145 - protein, 47 aa, Glycine max
  Clone ID: PAT_MRT3847_28176C.1.pep
YIIIIKETIINQSIVHFTIGAKGLFYLPLCASVCMYKPLCIETHLQS

SEQ ID NO: 206146 - protein, 59 aa, Glycine max
  unsure (1)..(59): unsure at all Xaa locations
  Clone ID: PAT_MRT3847_28177C.1.pep
XNLKHAXXXRNAARXNTTTIGXVXLXCXXXFXLVXXXXGKVXGSSKXXRRGXXCMAXMW

SEQ ID NO: 206147 - protein, 110 aa, Glycine max
  Clone ID: PAT_MRT3847_28178C.1.pep
LLLATLFIYTALIVTVLCLLCALPIPIVRAILQGFLWYLILSLYLIKVLFLSFPHHSTPLIPWASHFLSAAFSLLHIYIIMLTIISVLMVCHILIVLLSYFILMLLCAPR

SEQ ID NO: 206148 - protein, 76 aa, Glycine max
  Clone ID: PAT_MRT3847_28179C.1.pep
HKRKATPLQILSPSHTAVRACSTRECLERGTLNSNATFLPELARGGTVYYSQQTRTPNIGWTYTLNPTMLTSYIRL

SEQ ID NO: 206149 - protein, 39 aa, Glycine max
  Clone ID: PAT_MRT3847_2817C.1.pep
SGESEDRSMNVRNYAFAQSTELDPLGGSKKSFMRFLIFF

SEQ ID NO: 206150 - protein, 52 aa, Glycine max
  unsure (1)..(52): unsure at all Xaa locations
  Clone ID: PAT_MRT3847_28180C.1.pep
SDVPXSSPXSSLAFQLSRYLILLFCFRLRFRLLGFSAIFLLSIIGSVELFEF

SEQ ID NO: 206151 - protein, 73 aa, Glycine max
  Clone ID: PAT_MRT3847_28181C.1.pep
FFFFFFPFSFSLSLSNPTILASLPSLSLPFVLFVSTPKPYCPCPSSSHLHDNLDDKWFAFPSFSLPPNLGLRR

SEQ ID NO: 206152 - protein, 100 aa, Glycine max
  Clone ID: PAT_MRT3847_28182C.1.pep
SSIMQIEGLDFYIYVPANLALSLVWPWLLSFPFVPFSRHQCCYMPYCSISKKKKKIKTHAATSSIIKNSQLNKQIFEKSITHEVTSHTLYYNFKRSALRS

SEQ ID NO: 206153 - protein, 420 aa, Glycine max
  Clone ID: PAT_MRT3847_28183C.1.pep
EFPTRPTRQTTEGGEYGAITSAVVMRDVDGKSKGFGFVNFANVEDAAKAVEALNGKNFDGKEWYVGKAQKKSERELELKERNEQSTKETVDKYHGTNLYIKNLDDSVGDEELMELFSEFGTITSCKVMRDPNGISRGSGFVSFSIAEGATRALGEMNGKMVAGKPLYVALAQRKEDRRARLQAQFSQSRPAAITPNVSPRMPLYPLGAPAIGQQFLYGQAAPATIPQAAFGYQQHFVPGMRPGGAPNFYVPLVQQGQQGQRPGGHRGSGPMQQLQQPLPLMHQQMLPRGHVYRYPSGSNMQNIQLAGVPGGMVTYGIGQQMPTQALASALANATPEQQRTMLGEALYPLVDKLEHEAAAKVTGMLLEMDQPEVLHLIESPDALKAKVVEAMDVLKKVTQQQSNSPADQLASLSLNDNVES

SEQ ID NO: 206154 - protein, 24 aa, Glycine max
  Clone ID: PAT_MRT3847_28184C.1.pep
RLGKVPYIHMCNNTLSKFFSFIST

SEQ ID NO: 206155 - protein, 60 aa, Glycine max
  Clone ID: PAT_MRT3847_28185C.1.pep
PLGEGGTPCSPITLKWKIQANFEKLRSWIIFEQSIKTPKLYHSPEAIHLRLLINLGGVYT

SEQ ID NO: 206156 - protein, 47 aa, Glycine max
  Clone ID: PAT_MRT3847_28186C.1.pep
FFYNRFHINRDTLILLKRILKSAGGLHVNNSLVEKDFHSCLLLLNIF

SEQ ID NO: 206157 - protein, 51 aa, Glycine max
  Clone ID: PAT_MRT3847_28187C.1.pep
KQEPTQPRTGGPTAKQPPGSEAADTKQNAEGIQQKGKGRTVQTGQRARTPR

SEQ ID NO: 206158 - protein, 45 aa, Glycine max
  Clone ID: PAT_MRT3847_28188C.1.pep
RSITLVFTTINHVLISYKSINLILKNFNLNLIEFLIFANQLNLFL

SEQ ID NO: 206159 - protein, 899 aa, Glycine max
  unsure (1)..(899): unsure at all Xaa locations
  Clone ID: PAT_MRT3847_28189C.1.pep
MIKPQVYQSQNTNQTLLFLQRLSVHSSTASLPLWLGSKVQRQKKLNHLVLVSRNVETNSTTTDTHTDKSTVIKVKAIVKVKVTVGGFFSSLRLDRGIDDITDLLGKSLLLELVSSELDPGKYTYAYLLHFIWLVIAKFANXLFFGECGAVLVENEHHKEMFLETIHLDGFPEGPIHFHCASWVHSKFDNPTNRVFFSNKCYLPQETPGGLRRLRAKELSNLRGNGEGERKSFERIYDYDIYNDIGLQXDPDKSLELQRPPLGGNERPYPRRCRTGRPHSEADPLSEKRSRKFYVPKXSASQEVKQLTFSTKTLHSVLLILLPPLGKIIKEKDLAFSYFHDIDSLFSHGXDLPPEETEKGFLGKIMPRLVKSISGDRTHVLRFETPETMSRDRIFPGLRDDXFARQTVAGLNPYSIRLVTECPLRSKLDPVIYGPPESAITSEIINKEIGGIMSVEKAIEKKKLFMLDYHDILLPYVNKVRKLKGKTLYGSRTLFFLNSEGTLRPLAIELTRPPSSSNKTGQWKQVFTPSWHSTSVWLWRLAKAHVLAHDSGYHQLVSHWLRTHCVTEPYVIATNRQLSELHPIYKLLHPHFRYTMEINAIAREALINADGTIESSFAPGKYSIETSSAAYXRVMAVLDILSTHSPDEEYIGEKMEPSWGEDPVIKASFERFRERLKKLETLIDDKEWKHKVEEQKWSWHCTGVAFEAYREASTDWNGGKMXEYRFKRLKTPKDLIGILNTIIWVTSGHHAAVNFGQYVYGGYFPNRPTIVRTKMPSEDPTEEEWKKFIEKPERALLKCFPSQLQATRVMAVLDILSTHSPDEEYIGEKMEPSWGEDPVIKASFERFRERLKKLETLIDERNGNTKLKNRNGAGIVPYELLKPFSKPGVTGMGVPCSISI

SEQ ID NO: 206160 - protein, 73 aa, Glycine max
  unsure (1)..(73): unsure at all Xaa locations
  Clone ID: PAT_MRT3847_2818C.1.pep
TITMGTPKHADVDFITVLLXDHIGGLQVLHXTCTWIDLXPVRGALVVNIGDFLQVFLSFFIFFNSLAQIFSLI

SEQ ID NO: 206161 - protein, 79 aa, Glycine max
  unsure (1)..(79): unsure at all Xaa locations
  Clone ID: PAT_MRT3847_28190C.1.pep
RNLGGVVYDGYLNGQLSVSRALGDWHMKGHKGSAYPLSAEPXLQEINLTEDDEFLIMGCDGLWDXMSNQCAVNHGQGEL

SEQ ID NO: 206162 - protein, 136 aa, Glycine max
  Clone ID: PAT_MRT3847_28191C.1.pep
MIKPQVYQSQNTNQTLLFLQRLSVHSSTASLPLWLGSKVQRQKKLNHLVLVSRNVETNSTTTDTHTDKSTVIKVKAIVKVKVTVGGFFSSLRLDRGIDDITDLLGKSLLLELVSSELDPGKYTYAYLLVYTLYVGS

SEQ ID NO: 206163 - protein, 61 aa, Glycine max
  Clone ID: PAT_MRT3847_28192C.1.pep
MMDAFERFRERLKKLETLIDERNENTKLKNRNGAGIVPYELLKPFSKPGVTGMGVPCSISI

SEQ ID NO: 206164 - protein, 249 aa, Glycine max
  unsure (1)..(249): unsure at all Xaa locations
  Clone ID: PAT_MRT3847_28193C.1.pep
INKLLHPHFRYTMEINALAREALINADGTIESSFAPGKYALEISSAAYALEWRFDKQALPADLIRRGIAVEDPFSPHGLKLTIQDYPFANDGLLLWDAIKLWVTDYVNHYYPEPSLVESDEELQAWWTEIRTLGHADKKDEPWWPHLKTPKNLIGILNTIIWVTSGHHAAVNFGQYVYGGYFPNRPTIARTKMPSEDPTEEEWKKFIEKPERALLKCFPSQLQAPRVMXAVLDILSTHSPDEGYIGEKK

SEQ ID NO: 206165 - protein, 125 aa, Glycine max
  unsure (1)..(125): unsure at all Xaa locations
  Clone ID: PAT_MRT3847_28194C.1.pep
KEFVPWSKNLFCPRYXSCLHVNCGGKDVNVKNDTGEHLYVVDNVQGGTATFFYSSNDHWGFSRTEVFMDVFDGQKRCYTVLCPSSNMPELCKTVCISPITLAFFDDCMENGNSRLNLLFVEIMIS

SEQ ID NO: 206166 - protein, 127 aa, Glycine max
  Clone ID: PAT_MRT3847_28195C.1.pep
QPHSARTYPLPTCFVPVPPPYTSLVVALAVASLLLLLLRVFSLLGAVFFFHLFLPARVRCFSQSLPAHRGRTLQSSVWECDRRRPLSVCEFVLVRWFLACTLVGKGLFPGCDSIGLSGVALPGLFLR

SEQ ID NO: 206167 - protein, 115 aa, Glycine max
  Clone ID: PAT_MRT3847_28196C.1.pep
RNLKLWRDEDETKAGPYVFHPRGLYPAPVSADEPAVGSSGSKLGWFKTIGLFAGRALLDSRIIDINLNKVFLRHVLGQPVKKNIASLKLVDPTLARSMERLQAYAEARKEIEAMT

SEQ ID NO: 206168 - protein, 45 aa, Glycine max
  Clone ID: PAT_MRT3847_28197C.1.pep
MPNHREMLTSRVRRSIVNDRHLCFYGQRPPHRYPPPHFEGEGFEF

SEQ ID NO: 206169 - protein, 126 aa, Glycine max
  Clone ID: PAT_MRT3847_28198C.1.pep
IIIAGNLNPYFSLFNFNYDYYYFCHNFRGALQMASVVASLPPPLLLPARKSHMGNFPSSPVSLLSEIIGAVSLSGNLSKGVMKNSISDFSMLRAFHISGHLFKAPRILQISWHPPLAGWCKCYTDR

SEQ ID NO: 206170 - protein, 49 aa, Glycine max
  Clone ID: PAT_MRT3847_28199C.1.pep
MGCILHYFISRDLYCSMVVFLYDSVTPTKPINHVDLPAQNDRSTGLDCA

SEQ ID NO: 206171 - protein, 39 aa, Glycine max
  Clone ID: PAT_MRT3847_2819C.1.pep
RGTPPDVAIITLLDCNFASLTRDDSDSSLDSMLPDSISS

SEQ ID NO: 206172 - protein, 95 aa, Glycine max
  Clone ID: PAT_MRT3847_281C.1.pep
ANVCICFLIHSLELSQDFETADKRQQDMAERSKELLKFEHNGTPLSSLESTLLVCDNKKESDSQTRRLPPDGMLLTAPLSPSQLLGKVKDFLGVM

SEQ ID NO: 206173 - protein, 53 aa, Glycine max
  Clone ID: PAT_MRT3847_28200C.1.pep
QNFNLNLYSRVTLDLSLWLCAYIRLPQSPSTRFSILILNVPFHVKTGFVLIFN

SEQ ID NO: 206174 - protein, 28 aa, Glycine max
  Clone ID: PAT_MRT3847_28201C.1.pep
LQLMPYKHITITTEFHYQMQVMLLLHLT

SEQ ID NO: 206175 - protein, 60 aa, Glycine max
  Clone ID: PAT_MRT3847_28202C.1.pep
RIRYICNADDGSQKNSRNQKTSALHLFDTHAHTLRLEDKDSAEKSAGCDHADETKGHIET

SEQ ID NO: 206176 - protein, 65 aa, Glycine max
  unsure (1)..(65): unsure at all Xaa locations
  Clone ID: PAT_MRT3847_28203C.1.pep
LLXVLLXXKXLTTRSXLSFFKXGVNKKEKKMXCFQXWIXFLLALSLXNSCALVYSYPTPNSPSHP

SEQ ID NO: 206177 - protein, 68 aa, Glycine max
  unsure (1)..(68): unsure at all Xaa locations
  Clone ID: PAT_MRT3847_28204C.1.pep
PFTGLKAVSVVATRETNIDMTLLAIFGGCNHRLRVWNTVGAKNNRTLXGTRPTLDDAQVAKEVEQLFR

SEQ ID NO: 206178 - protein, 38 aa, Glycine max
  Clone ID: PAT_MRT3847_28205C.1.pep
MNYRSKKKSRWIYHLDHHDNRHDHLNLTLSTWLMPDAW

SEQ ID NO: 206179 - protein, 69 aa, Glycine max
  Clone ID: PAT_MRT3847_28206C.1.pep
GHHTHVVAAIHSAHPMLSALDHPMLSNPRNASTCLQVDFISSAVEAAGTRRSGGSHWCIVSCWFVRWWC

SEQ ID NO: 206180 - protein, 81 aa, Glycine max
  Clone ID: PAT_MRT3847_28207C.1.pep
VKDAYVRIKLGMATSMGASALGYAGDAAFSVNGGLERAPPPKEYAKKMFIHMYKSLIMAQAQLLPRDSTRNPAAATMVLTF

SEQ ID NO: 206181 - protein, 143 aa, Glycine max
  unsure (1)..(143): unsure at all Xaa locations
  Clone ID: PAT_MRT3847_28208C.1.pep
PEVRLEEFRVGSQXFWALXRRHARLVVSDRVLWSKFDAPCVRFDSCYPEENYFPTLLSMWDPQGCVPATLTHVNWTGRVDGHPRTYEAWEVGPELIRRMREDRPRYGDGNSDGRSDPFLFARKFAPDALQPLMRIANGVIFRD

SEQ ID NO: 206182 - protein, 102 aa, Glycine max
  Clone ID: PAT_MRT3847_28209C.1.pep
PPPGKKKANYFGTATGLGREKNKKKGGLFSKGGPPPPPILFIMEPNPPGGGAQGTKNFMGGPKKGRFFQAWPTQKDPNLGPTKKAALFFTPRKFINRGHIKT

SEQ ID NO: 206183 - protein, 316 aa, Glycine max
  Clone ID: PAT_MRT3847_2820C.1.pep
MGLAGFLRKLQDIYSKHKLISTVFFCLLVSPPSFFYTFYAISHLSSVFLTSEGADNSVGATFHYIIVIAQVECFAVLGISMFSLLKPLLHILASEQKIDPEAELSIKNLILSLTKPARSLLFTWFFVRLFKLGYIFLGILFVFHQRVMFVVNSSCDQQAEQSSLASSIDTIIFVAAGVLVFAYLATYGNLAIEISIREEISGTEALKKASELLEGKRKLVAGFVVNVVLGVISVGLFVSCVYLNTCSKLSMDSKKSIMSQIGNFGIFQVEFYTWGCFSILYSICKKSRGETTTFHFQPYGSLQRMLQKEEEPLLPL

SEQ ID NO: 206184 - protein, 67 aa, Glycine max
  Clone ID: PAT_MRT3847_28210C.1.pep
SLSIYISLSGGVRFTTPKNKRPVPFLFQVVYPSKADDRKSPFKIVVPKGTIFMVNENLRLVFFPPPV

SEQ ID NO: 206185 - protein, 122 aa, Glycine max
  Clone ID: PAT_MRT3847_28211C.1.pep
TKARRPQKGKGATGSRTARATHEPEHTREAKPNTRNRRSQQTGERRNQKKKKGARREEEPDPQARPDKTKPPRARTTAPKGSTQKPSRARSSPGTEPRTNRPSKPSAKERRAAKPPAQARRT

SEQ ID NO: 206186 - protein, 326 aa, Glycine max
  unsure (1)..(326): unsure at all Xaa locations
  Clone ID: PAT_MRT3847_28212C.1.pep
MTLISNSDVESHADVQIPDTAHQISTDSWFQVGFVLTTGINSAYVLGYSGTIMVPLGWAGGVVGLILATAISLYANALIARLHEYGGTRHIRYRDLAGFIYGRKAYSLTWALQYVNLFMINAGYIILAGPALKATYVLFREDDGMKLPYAVGRPRFVCAMFAICIPHLSALGIWLGFSTVFSLVYIVIAFVLSIKDGIKSPPRDYSIPGTSTSKISTTIGASANLVFAYNTGMLPEIQATIRQPVVKNMMKALYFQFTVGVLPLYLVTFAGYWAYGSSTATYLMSDVNGPVWAKAMANIAAFLXSVIALHIFASPMYEYXDTKYGD

SEQ ID NO: 206187 - protein, 241 aa, Glycine max
  Clone ID: PAT_MRT3847_28213C.1.pep
PPSISNFHSDSFRPLVIEFVQFKDRLQHSSQYLVARVETSILQLKQNADNIEEEEGVLQSLKCGIHFLELSKEVGSKSLTFNEDLQSRPWWTPTSEKNYLLGPFEGISYYPREILTKDRETSLKRVIEKKSLLPRMIYLSIKSASASIKEHVEVNGSVTPDITSELKLLLECYAQFLGFSLTEAIEVVMGFSNGESSCVVSDSNLIDWLNFTVFLNAMELELPMNLCSQTEMDVGLEFGIS

SEQ ID NO: 206188 - protein, 433 aa, Glycine max
  Clone ID: PAT_MRT3847_28214C.1.pep
MTLISDVENLADAEIPDTAHQISTDSWFQVGFVLTTGINSAYVLGYSGTIMVPLGWAGGVVGLILATAISLYANALIARLHEYGGTRHIRYRDLAGFIYGRKAYSLTWALQYVNLFMINAGYIILAGSALKAAYVLFREDDGMKLPYFIAIAGFVCAMFAICIPHLSALGIWLGFSTVFSLVYIVIAFVLSINDGIKSPPGDYSIPGTSTSKISTTIGASANLVFAYNTGMLPEIQATIRQPVVKNMMKALYFQFTVGVLPLYLVTFAGYWAYGSSTATYLMSDVNGPVWAKAMANIAAFLQSVIALHIFASPMYEYLDTKYGIKGSALAFKNLSFRVLVRGGYLTLNTFVSALLPFLGDFMSLTGAISTFPLTFILANHMYLVANENKLTSIQKLWHWINICFFAFMSAAATIAALRLIDLDSKTYHVFADI

SEQ ID NO: 206189 - protein, 43 aa, Glycine max
  Clone ID: PAT_MRT3847_28215C.1.pep
INCMNSLLPQMHIAGYIALNYRLKCANAYCLHISKFCHLTNKM

SEQ ID NO: 206190 - protein, 83 aa, Glycine max
  Clone ID: PAT_MRT3847_28216C.1.pep
PKSLPGICAGSFFPEKFPRLGWGYMGFKFQFWGPKGFGGGGPLGGFGFILREKTPWDFFLGNFFFFCCPRPKKNLWLLANFFS

SEQ ID NO: 206191 - protein, 52 aa, Glycine max
  Clone ID: PAT_MRT3847_28217C.1.pep
YLSFGGGGYVNSGSMRLRMRSDENVLLGKYVACVYYMKLEYQDVLIITINDY

SEQ ID NO: 206192 - protein, 87 aa, Glycine max
  Clone ID: PAT_MRT3847_28218C.1.pep
IKLDARWFYQHDRCETMARSSFLSDECRLLLVFSSAFVTFVPCFRAAPISFHLSTLASYASRFSENFRWFLFGVVHQAYGTLFRTRG

SEQ ID NO: 206193 - protein, 57 aa, Glycine max
  Clone ID: PAT_MRT3847_28219C.1.pep
HVMRYYSALVTLTLELENVQPSFIRTFNIRPVPYMRCISVTRQFISVQANVPSSLLC

SEQ ID NO: 206194 - protein, 69 aa, Glycine max
  Clone ID: PAT_MRT3847_2821C.1.pep
ENQDFWVHFGRGPQKNRKLGSTTVGQLGICHQGFGQGHSIRFKYSLVIRQVMGPIFFQGKLSKSRLVFA

SEQ ID NO: 206195 - protein, 78 aa, Glycine max
  Clone ID: PAT_MRT3847_28220C.1.pep
ECYNHQLNVQAYQGSLHIHVLQFHGLQGGYDIVKTMDIIGIDLLSLIPYLITSGKSLKLWLKVRSKRTKGHYTMKHVK

SEQ ID NO: 206196 - protein, 149 aa, Glycine max
  unsure (1)..(149): unsure at all Xaa locations
  Clone ID: PAT_MRT3847_28221C.1.pep
AGVGPSTINNNSNGRQQMIXASSSQPSISGYGNSQRVHPHMSFVPRPSVFGLGQRLPLSMIQQPQSTSSNPMVNGPSNLQPSPNHSMSRPVSRTNSDLDRLCHGHRVQTVRGFLSLSNVCLQSSRQTLIVLYLSFIVQNDFTCGGSTKI

SEQ ID NO: 206197 - protein, 40 aa, Glycine max
  unsure (1)..(40): unsure at all Xaa locations
  Clone ID: PAT_MRT3847_28222C.1.pep
TSXDXXALPXGDCLXLFEVXXXLXSXRACVXIGGEXDQPM

SEQ ID NO: 206198 - protein, 176 aa, Glycine max
  Clone ID: PAT_MRT3847_28223C.1.pep
MATEEVNKPQSLPPYPEMIVKALEALNEADGSNKSAISKYIETTYGELPDETVLGSHLNKMKESGELAFKQNNYMKADPNAPPKRGRGRPPKPKVPLPPGTVVSPPRPRGRPPKDPNAPPKSPKAKATPATGRPRGRPKKVARSPAVPSPTAVSTGRPRGRPPKVKPQLTEVSVES

SEQ ID NO: 206199 - protein, 176 aa, Glycine max
  Clone ID: PAT_MRT3847_28224C.1.pep
MATEEVNKLQSLPPYPEMIVKALEALNEADGSSKSAISKYIETTYGELPDETVLGSHLNKMKESGELAFKQNNYMKADPNAPPKRGRGRPPKPKVPLPPGTVVSPPRPRGRPPKDPNAPPKSPKAKATPATGRPRGRPKKVARSPAVPSPTAVSTGRPRGRPPKVKPQLTEVSVES

SEQ ID NO: 206200 - protein, 73 aa, Glycine max
  Clone ID: PAT_MRT3847_28225C.1.pep
LINSFICIEIGGKMYMDIASHARAALMEVLSLSLSLSVWGRSGLYRILKSELIGSKYPYLFILGFFNFYNFNY

SEQ ID NO: 206201 - protein, 130 aa, Glycine max
  unsure (1)..(130): unsure at all Xaa locations
  Clone ID: PAT_MRT3847_28226C.1.pep
ALYKXESILGSKAEPHKSAVTIYNVPCCYSKLNHIQHALSSIKETLNTGFKLFNRISIDPALSNSRASQKFDPLFKKFDXSFINENAINAIKSLFGFGKKVTHCVNKSIQFVRLSSWLINIVILCACISL

SEQ ID NO: 206202 - protein, 37 aa, Glycine max
  Clone ID: PAT_MRT3847_28227C.1.pep
DFKLLHPLQAIEFLSMRATTNLLNLLTKTPTATLFLF

SEQ ID NO: 206203 - protein, 76 aa, Glycine max
  unsure (1)..(76): unsure at all Xaa locations
  Clone ID: PAT_MRT3847_28228C.1.pep
HGQVICVHTDYEWKLHLQNAKHFKKLIEVHFTALCRGPCHLIAPHLADTAKKSPQXIFLKVDLYELRPDAEEYLIE

SEQ ID NO: 206204 - protein, 104 aa, Glycine max
  Clone ID: PAT_MRT3847_28229C.1.pep
LTLFTSLLSVAFIFSCGRLYHKRASVHWDYDAEPCGSEVSVGHAFVDLQNTNIELQSDLKDLYIKIEGEIDVSGNRKACGIHILYILRKGFRKIHVRLARGLEI

SEQ ID NO: 206205 - protein, 55 aa, Glycine max
  Clone ID: PAT_MRT3847_2822C.1.pep
ALRPQPTLRYAGKTPTCLTLHSTNMQILTLAGAPLHYHSRRLVFLIPLFNWAQMI

SEQ ID NO: 206206 - protein, 36 aa, Glycine max
  Clone ID: PAT_MRT3847_28230C.1.pep
VTPPISAWRRSGFLHWLHLDVKGLSALCIFYASHLI

SEQ ID NO: 206207 - protein, 573 aa, Glycine max
  unsure (1)..(573): unsure at all Xaa locations
  Clone ID: PAT_MRT3847_28231C.1.pep
MGCVISREVSKGVISDVKEERDLSGESKRKVDGVSGSKDEVVEVQPGVREKEKGGEGVQRGKRRRSKANPRLSNPPKHLRWEQVAAGWPPWLTAVCGEALGGWIPRKADTFEKIDKIGQGTYSNVYKAKDMMTGKIVALKKVRFDNWEPESVKFMAREILILRRLDHPNVVKLQGLVTSRMSCSLYLVFDYMEHDLAGLAASPGIRFTEPQVKSXMHQLLSGLEHCHNRNVLHRDIKGSNLLIDNXGILKIADFGLASVFDPNHKHPMTNRVVTLWYRPXLCSLVASEYNAAIDLWSVGCILXDLLAGKTIMPGRTEVEQLHKIYKLXGSPYDVDRKTSMMHSAIVFNDRALNAAPAREXMLGFNPTLIERVESLIXVKSEREKFATDALRSQFCTTEPYACDPASLPDYPPAKVMDANRRDAEARSEAWAGTAADTASINVTRRNCYQESAAVISAKPYTGALKDQIFLLTMEDHLRLREKFPPPHEDGQLGFPLGSSNHIDPDIVPSDVSFGSTSYTFSKEPFQAWSGPIGNTASISVTKRKKHTAGDALDLSKPYKGALKDKVKGKKIIA

SEQ ID NO: 206208 - protein, 183 aa, Glycine max
  Clone ID: PAT_MRT3847_28232C.1.pep
MALASTNTDQSTITTPSKKPSKNSENLNPNVPHHRSPSSKSPALRSSKPNNSNPIAQSPQNRIRQRKFVVAKKKNQKGTQNDAVSCKCKHNGGAKCVCVAFQTLRASQEEFFLKEKKDCDYDFEEEREEEAKAVNAIEIYGTKSETVQGEEEKEEGGSTVKRRRERDRLLEEGRNKVPENGFG

SEQ ID NO: 206209 - protein, 53 aa, Glycine max
  Clone ID: PAT_MRT3847_28233C.1.pep
TFIEIAILKFKGESSLEDVAGSQIELAEYYYNLCHILTYITLFAKKKSCYIWK

SEQ ID NO: 206210 - protein, 669 aa, Glycine max
  Clone ID: PAT_MRT3847_28234C.1.pep
MPAGFAIQIPTTTFYVTMNTSRSSFLSSILTLAFFFLTTLPQSYSQKNDTHSICSQLSFSCGTLRNISYPFWGGNRPQFCGRNGFKLTCMHDQNTSVQVGSQRFNVLNINQTASTLRMARTDLVYDRCSSNFTNTSLSVSPFSFPSTVQNVTIFYECPSGINSVVGNNFTCQNDSNNKHAFYVVNGTQLKQFPGLQKCGVSVQMQVSEGVVWDSEGGIGALEKALEKGFDVRYDAELSSQCTACRDSGGACGTNENDLAQFSCYCSGGTHGSLCSTHKSQRKNRVLKLVLGFVATGFGLPLIAVIICRNKARIWKFILVQVGKIKKNDQVIEAFLESQGSLGLKRYSFSDIKKITNSFKIKLGEGGYGSVYKGKLLNGCSVAVKILNESKENGEEFINEVASISKTSHVNIVSLLGFCLDGSRKALIYEFMSNGSLEKYIHEKTAETKTTTPSLSWERLHQIAIGIARGLEYLHKGCNTRILHFDIKPHNILLDEAYRPKISDFGLAKLSTRDESIISMSNARGTVGYVAPEVFSKSFGGVSHKSDVYSYGMMLLEMVGGQKNMDVEASRSSEIYFPQLVIYKKLEQGNDLGLDGILSGEENEIAKRMTMVGLWCIQTIPSHRPTISRVIDMLEGSVDSLEMPPKPFLSSPPRSSTDFSTAISKSLASV

SEQ ID NO: 206211 - protein, 56 aa, Glycine max
  unsure (1)..(56): unsure at all Xaa locations
  Clone ID: PAT_MRT3847_28235C.1.pep
VAPAGLTRAVKSVDMQHESVTEAHPXDNDAFRVKNDAVNDXKRGYVGSHSKGDTCK

SEQ ID NO: 206212 - protein, 93 aa, Glycine max
  unsure (1)..(93): unsure at all Xaa locations
  Clone ID: PAT_MRT3847_28236C.1.pep
XDEXSFLDTXXCITKAXANPXVVXXNXEXTXFAXFRGXNSXTXAXCYXCPILVLEGPXXXSAVXSNGXXVXHXDXTTLXHNLKXNXGXVLPXS

SEQ ID NO: 206213 - protein, 86 aa, Glycine max
  Clone ID: PAT_MRT3847_28237C.1.pep
LEKETKFFFYVKLPLSQKLGRWSFWGLKNKLGVRTPLTCIVTRLLENCKSRKYQVKECPLPFVPKRQNFHSLKKSPWLWPISVFYY

SEQ ID NO: 206214 - protein, 160 aa, Glycine max
  unsure (1)..(160): unsure at all Xaa locations
  Clone ID: PAT_MRT3847_28238C.1.pep
WYVWSRAGVCVEDEKGTARGMPSXNDXIPIRAASYTEESTIDSFYVSDFGAFDQSYGIGDAVDLSGNPVYNSLKVNSQTISPGSVHISSLGQGPTSLEKSPLTNQIEPHRLRLQKVQSSNPGTILVGNTDYQEESAMADASPRTXIFTDGDTDDKNQPYD

SEQ ID NO: 206215 - protein, 84 aa, Glycine max
  Clone ID: PAT_MRT3847_28239C.1.pep
VFLFLFFFLEGFWSSKPESLTNLVLSLRDNDCLPWLPCQRKPSLTMTSPPYYHPSATTSAGTSTSTPVINHVRSFQPPNHDGPL

SEQ ID NO: 206216 - protein, 50 aa, Glycine max
  Clone ID: PAT_MRT3847_2823C.1.pep
SNWWEGAAYQALNAIGAPRYRWVRLNHIIYDYCQDKSRFSVTPPECLAGI

SEQ ID NO: 206217 - protein, 161 aa, Glycine max
  Clone ID: PAT_MRT3847_28240C.1.pep
TRPPTRPAAAAATKPSIDSSSSPSLLTNNHPPPSKMDAAVDRLKDGFAKFKTEFYDKKPELFEPLKAGQAPKYMVFSCADSRVCPSVTMGLEPGEAFTVRNIANMVPAYCKIKHAGVGSAIEYAVCALKVELIVVIGHSRCGGIKALLSLKDGAPDSFHFL

SEQ ID NO: 206218 - protein, 170 aa, Glycine max
  unsure (1)..(170): unsure at all Xaa locations
  Clone ID: PAT_MRT3847_28241C.1.pep
PDYFKRVMISELALFKKVMHTRCGGAIEVMGLMQGKTDDHAIMVMDAFVLRVKSTETILNARADAYXYMVEYSHTNNQAGRXDNALGWHHFHAGYGGWLAEIDGSTXMLNHAIEEPMLLVXIDPTRTAMAWRVESEALQTHPERHEPCDEPVNEYPSIHIIEIEDIGGNC

SEQ ID NO: 206219 - protein, 126 aa, Glycine max
  Clone ID: PAT_MRT3847_28242C.1.pep
LGEELYFTVGSQHIPFGASPQDVWTELGRPCGIHQKQVDQMVIHSASDLRPRTTLCGDYFYNYFTRGLDILFDGQTHKIKKFVLHTNFPGHADFNSYIKGHFGGYGLKLRGTFPGGNYQQTKGFYT

SEQ ID NO: 206220 - protein, 58 aa, Glycine max
  Clone ID: PAT_MRT3847_28243C.1.pep
KTRGRELTQHRGLKRRLCWHDSSIHMRYTVGCRSDRDVSYAEAFFDNVRRRNFRWSGG

SEQ ID NO: 206221 - protein, 358 aa, Glycine max
  Clone ID: PAT_MRT3847_28244C.1.pep
MEEGQRKTTTLLLCSHIVVLLLLSLVAETSAKVSAVIVFGDSSVDAGNNNFIPTIARSNFQPYGRDFEGGKATGRFCNGRIPTDFISESFGLKPYVPAYLDPKYNISDFASGVTFASAATGYDNATSDVLSVIPLWKQLEYYKGYQKNLSAYLGESKAKETVAEALHLMSLGTNDFLENYYTMPGRASQYTPQQYQIFLAGIAENFIRSLYGLGARKISLGGLPPMGCLPLERTTNIVGGNDCVARYNNIALEFNDKLKNLTIKLNQELPGLKLVFSNPYYIMLNIIKRPQLYGFESTSVACCATGMFEMGYACSRGQMFSCTDASKYVFWDSFHPTEMTNSIVAKYVVLRVLYQFLQ

SEQ ID NO: 206222 - protein, 118 aa, Glycine max
  Clone ID: PAT_MRT3847_28245C.1.pep
YTMPGRASQFTPQQYQNFLAGIAENFIRSLYGLGARKVSLGGLPPMGCLPLERTTSIAGGNDCVARYNNIALEFNNRLKNLTIKLNQELPGLKLVFSNPYYIMLSIIKRPQLYGMLLS

SEQ ID NO: 206223 - protein, 100 aa, Glycine max
  Clone ID: PAT_MRT3847_28246C.1.pep
SYMQSISQALQNVESSIHERSSSFNQVGPLVSLQGKIAIRFVFNMYDTMANVEGAQGALLKYLNSICYNGWFMIKILFVLIFFIYGCTFFLLASRHLGVE

SEQ ID NO: 206224 - protein, 74 aa, Glycine max
  unsure (1)..(74): unsure at all Xaa locations
  Clone ID: PAT_MRT3847_28247C.1.pep
KTVRPIDLRYTLRHDFSEGGRADLFANDQNIRWKPSSLEEVDPRELXAVFKPLRPDVGELRLLFWKENVLLSLL

SEQ ID NO: 206225 - protein, 338 aa, Glycine max
  Clone ID: PAT_MRT3847_28248C.1.pep
MFSQNMILPPENPRPAGFASKPMGNEIAKPPPSILVGRFKALLKQRDDELRATSVPVPPPSTDEIVQIYELLLSELTCNLKPIITDLTIIAEQQREHAKGIADAICARILEVPVDQKLPSLYLLDSIVKNFGQEYIRYFSLRLPEVFCEAYRQVQPSLHSAMRHLFGTWSKVFPPSVLHKIEAELQFSQAVNTQSSTPNPVRASESSRPSHGIHVNPKYLRQLERSTVDSASKTHQFLSSSSRLGISSSSPLRIGVDRPLSASIDEYAVDNPGVDYGVAKALGRDVDLTEWQRKLYSGDGRNRFPTSFTYSLSNGHQRQSSRALIDAYGSDKSQETKQ

SEQ ID NO: 206226 - protein, 66 aa, Glycine max
  Clone ID: PAT_MRT3847_28249C.1.pep
ECQALIRFAICKRGTQLGSGGASQVRPLRSDDKKIQRLSADFRENMRTWKYQFESSLSKLSFLVKT

SEQ ID NO: 206227 - protein, 76 aa, Glycine max
  Clone ID: PAT_MRT3847_2824C.1.pep
AAVFIFLLHQTLKTKSFAKQGSHFRIHENQGTSVHQKNQRHSNCYFCSNRKITTKKSANFSILHISELKIHTFKYR

SEQ ID NO: 206228 - protein, 117 aa, Glycine max
  Clone ID: PAT_MRT3847_28250C.1.pep
VHKVTAWRRQASTLRESRLGVNGWMRMKMMVIIVKVDILTHAYYNINNDNNNNIGVGGLRRIPPTQTLIDSNCTVISHLRSTQLESHAPNESRRQRLIHVHRRASMLSQRVPFRANI

SEQ ID NO: 206229 - protein, 51 aa, Glycine max
  Clone ID: PAT_MRT3847_28251C.1.pep
NPSSPKCRQLLIRLWGCNTALKEAEALPKSVQVITDPAAFKMQSKFYPSFC

SEQ ID NO: 206230 - protein, 1024 aa, Glycine max
  unsure (1)..(1024): unsure at all Xaa locations
  Clone ID: PAT_MRT3847_28252C.1.pep
MGMKGPPLWLSVDHNVVLTSPNDRRLFHLFKRPNGRRPWLGLAPPFVPEGPPLLAQYLKLLSQDSPQEWIFKELPIIGNMECRLAVVLPPAREAAALAVGLLFAPPHLGTSRVSGFVAWDTPLLKQVLGFFIPENMPVGVAQGRSWRRCWCKTPLARFTARGGGPACYHFEVKREFLKGALKRFSQFFISPLVKMEAMEREVLAVDSEFNQVLQSDACRLQQLQCHTSAHNHPLNRFFWGNKKSLVDAMEKGINLREHILKLYKESRTRGLLHFSFIGCSLVRLQGYHPYTYNETKVFEGTTEFVTWSFXGGEYRICYLEPAVKDVHILDISWTLPCLHQEYLKKPEDYLAHLLGHEGRGSLLSFLKSRGWATSLSAGVGEEGIYRSSIAYVFVMSIHLTDSGIEKIFDIIGFVYQYLKLLREDTPPEWIFKELQNIGNMDFRFAEEQPPDDYAAELAENLHFYPPEHVIYGDYVFKTWDEQLLKQVLGFFVPENMRVDVVSKSFLKSEDFQYEPWFGSRYVEEDIAQSFRELWRNPPEIDASLHLPSQNEFIPSDFSIRASDTCVDDFANSTSPRCLIDEALIKFWYKPDSTFKVPRANTYFRITMKGGYADVKSCVLSELFIHLLKDELNEITYQASIAKLETSVTYVGDMLELKVYGFNEKLPVLLSKFFSVSKSFMPTDDRFKVIKEDMKRALKNANMKPLSHSTYLRLQVLCESFYDADEKLHYLNDLFLDDLKAFIPGLLSQIYMEGLCHGNLSKEEAIGIAKIFKMNFPVNPLPIELRHAERVICLPSSANLVRDVNVKNKSEKNSVVELYFQIEQDFGLGSIKLKALIDLFDEIVEEPFFNQLRTKEQLGYVVECSPRVTYRISGFCFCVQSSEYHPVYLQSRIENFLNGLEELLDGLDGDSFENYKSGLMAKLLEKDPSLTYESNRLWNQIVEKRYIFDLSKKEAEELKNISKHDIVEWYKTYLKPSSPKCRQLLIRLWGCNTDLKEAEALPKSVLAITDPAAFKMQSKFYPSFC

SEQ ID NO: 206231 - protein, 82 aa, Glycine max
  Clone ID: PAT_MRT3847_28253C.1.pep
KSFTSFNKTTNTYQIKNSLLYIKNAPIIFFNLFFPSLFIPIIPFFFFPLLLFHSFFFMGKYKLLLNFFYTNLELDFKKIPGR

SEQ ID NO: 206232 - protein, 129 aa, Glycine max
  Clone ID: PAT_MRT3847_28254C.1.pep
EQFVTEVTENYETTCWGCGLRVLLPSCASAFKCGWCGAITDHNKMKRDQKCIRWRVVRDRCFVSVVLVFMFFVIFGGVWTVYSVVFSISILCGVFHSIVTAILSIATISFFSFAAFRCAGTPPIYYGEA

SEQ ID NO: 206233 - protein, 117 aa, Glycine max
  Clone ID: PAT_MRT3847_28255C.1.pep
VAHLFFNCSKVLPLWWETLAWVKSVGAFPKDPKDHFLHHCRLNASRTKDMRWSCWWIALTRTIWHHRNKLVFDNQAFNASKLMEDALFLLWSWLKVMEKDFDTHFNQWSSNLSDVFV

SEQ ID NO: 206234 - protein, 53 aa, Glycine max
  Clone ID: PAT_MRT3847_28256C.1.pep
WGIIFSRIRSTIIHKYSTEPRLAESYLYGYIHLIQHWQHHHQCRHPYCQISHP

SEQ ID NO: 206235 - protein, 126 aa, Glycine max
  Clone ID: PAT_MRT3847_28257C.1.pep
WNSGRVKALIAIPKIKPYTGVNLRQKGVKKERDLFFNTLFWGLNFWDNPSTLKREVDEPRNTFPLELYDYVIFTRACYMIPLFAVTGAGSGDQTEWETRFHTHAAEIISGKRWKIWIEFCARLFAI

SEQ ID NO: 206236 - protein, 131 aa, Glycine max
  Clone ID: PAT_MRT3847_28258C.1.pep
MTLVVNSPLLPLQSTRWLKSKQESRLFSHGPTIIGGGMSRSIFGTGKRNGNRNEVKAFFFNPEQDPIVKEALKEPVAFLGGMFAGILRLDLNEEPLKEWVTRTVEAAGISEEEANTEESTTEEAPQEIQIE

SEQ ID NO: 206237 - protein, 50 aa, Glycine max
  Clone ID: PAT_MRT3847_28259C.1.pep
NKGTIIYKHNWTHCKLLQVDKEIIFSLYTVSYDSGPGSILSELSILTAKM

SEQ ID NO: 206238 - protein, 155 aa, Glycine max
  unsure (1)..(155): unsure at all Xaa locations
  Clone ID: PAT_MRT3847_2825C.1.pep
MRYIRSNSFKRFFSFRRRSSREQILSPNSKGEGNNEILPHEEEPSRRPSWKCFSYEELFDATNGFSSENLVGKGGYAEVYKGTMNGGEEIAVKRLTRTFRDERKEKEFLTEIGTIGHVNHSNVLPLLGCCIDNGLYLVFELSSRGSXASLIHDEK

SEQ ID NO: 206239 - protein, 161 aa, Glycine max
  unsure (1)..(161): unsure at all Xaa locations
  Clone ID: PAT_MRT3847_28260C.1.pep
MSCKSCLDPDAXAAIGRQRLSXIALWFCPYNNSXNXNISSVDTVSQIVSEQPLSIVTEDAAPTQNPATKWAVEGTGILLATGLLTITLAWLIAPRVGKKTARSGLHILLGGVCALAVVVFFRFFVLTRIKYGPARYWAILFVFWFLVFGIWASRTHGAHTT

SEQ ID NO: 206240 - protein, 50 aa, Glycine max
  Clone ID: PAT_MRT3847_28261C.1.pep
FLFFFYFSFSFFSCSILLLSMGGSIKPPLTRTIPRRRNKKKILLLMRPLS

SEQ ID NO: 206241 - protein, 89 aa, Glycine max
  unsure (1)..(89): unsure at all Xaa locations
  Clone ID: PAT_MRT3847_28262C.1.pep
YGCEMHVSYLDIKPHNTLLYENFTAKVSVSGLAKXYPVNHSIVPMTAAXDTMGYMAPDLVIXDNIGGISHKADSYSYGMLVMEIGRKRT

SEQ ID NO: 206242 - protein, 61 aa, Glycine max
  unsure (1)..(61): unsure at all Xaa locations
  Clone ID: PAT_MRT3847_28263C.1.pep
IGHAKNSHPKIPYTLIYHKLKTHSFWENRTPDRFPPRIKSPGXVEYFQVLPFFLFCEAQSL

SEQ ID NO: 206243 - protein, 34 aa, Glycine max
  Clone ID: PAT_MRT3847_28264C.1.pep
NLPTVSVYFKVLALFLYVFKTHKDNLKLSKVINI

SEQ ID NO: 206244 - protein, 86 aa, Glycine max
  Clone ID: PAT_MRT3847_28265C.1.pep
KTSWNLLSIFLSANQEGGGAPVFSTKKSNEVSRKKDEKLHVTTGGYDKDVTRTELSADPAKKMGRVGCQSTAVIGAPCGRVLHPLK

SEQ ID NO: 206245 - protein, 59 aa, Glycine max
  unsure (1)..(59): unsure at all Xaa locations
  Clone ID: PAT_MRT3847_28266C.1.pep
IQAFRTFISRYMIYVHXERTIRDDEYVTXGSENMSQRSIEGSRHTEIAMGAYQPHHTWP

SEQ ID NO: 206246 - protein, 282 aa, Glycine max
  Clone ID: PAT_MRT3847_28267C.1.pep
SPTRPPTRPHDPLQQPTTNQFNGGNKLPGDHCGDSGFDQRVLTAPIKSAVDKFQLIPEFLKVRGLVKQHLDSFNYFVRTDIKKIVRANNLIMASRYPHIYLRFLNVGIGKPSMMIDEVTEGLTPQTCRLSDLTYAAPICADVEYTLRSHDKPDNKRTLRVEIGRMPIMLRSCCCVLHGKDEAELAKLGECPLDPGGYFVIKGTEKVILIQEQLSKNRIIIDTDKKGNITASVTSSTEKIKTKTVVVMEKEKLWLQLNKFSKKVPLMVVMKAIAMVSDQDDRV

SEQ ID NO: 206247 - protein, 91 aa, Glycine max
  unsure (1)..(91): unsure at all Xaa locations
  Clone ID: PAT_MRT3847_28268C.1.pep
GVCSHVWPPPMGGAGCACAHLLLAGHRDRIRLNSVSRLLPALFSRRICSARFRFGSLSLSRYPNTXSGGRARVFACCFPLXRXARSGVNRL

SEQ ID NO: 206248 - protein, 66 aa, Glycine max
  Clone ID: PAT_MRT3847_28269C.1.pep
HGQNQLDAVCRLHIELDLGMMYFHSDLVHDRFFSSQNHMPEGVKTLIVLEHLVRCGSWVVSQILKH

SEQ ID NO: 206249 - protein, 197 aa, Glycine max
  Clone ID: PAT_MRT3847_2826C.1.pep
MDPSHDERGPPNESLTHQSSSRRHGDAPPPTVAPPQMMYYYPQGYAPQPMPHQGYPPGYAPYPNEYHQQPYHYPAGPYFSTPPTYHNGGGSKAFIRGFIMCSCLIFTCLFVATLIMALVLHPQLPVYTINSLSVANFNTTQLLTANWNTSIMIHNINNRLIGLFSDFKVDLLHKNYIVAVSNLPNFELNKNEVKRID

SEQ ID NO: 206250 - protein, 58 aa, Glycine max
  unsure (1)..(58): unsure at all Xaa locations
  Clone ID: PAT_MRT3847_28270C.1.pep
VTGLDQKTLLLGDGPVTDFGHTNLEQIPWKSTEAYIILXSTRIFTDKDYAAAHLKDGA

SEQ ID NO: 206251 - protein, 71 aa, Glycine max
  Clone ID: PAT_MRT3847_28271C.1.pep
APVCSARDVHIMCTCVLLSSDTVETLARASLSHARLRATLGVLYSVRHITCVYSTLFYTDTHSIHLLSHHT

SEQ ID NO: 206252 - protein, 52 aa, Glycine max
  unsure (1)..(52): unsure at all Xaa locations
  Clone ID: PAT_MRT3847_28272C.1.pep
VVFQFXTSXFXWHXKITLNLLRXVNILIXISRXXXXXXXXYLIYSISPYFXQ

SEQ ID NO: 206253 - protein, 27 aa, Glycine max
  unsure (1)..(27): unsure at all Xaa locations
  Clone ID: PAT_MRT3847_28273C.1.pep
YMVRKKVYLLKKPSVSQRTRGSARXFR

SEQ ID NO: 206254 - protein, 56 aa, Glycine max
  unsure (1)..(56): unsure at all Xaa locations
  Clone ID: PAT_MRT3847_28274C.1.pep
SILVCMYCFGLLNCETLVVIDDCLISEVTEKALFYLFNKGDCFKXKNQCGTIKDTL

SEQ ID NO: 206255 - protein, 85 aa, Glycine max
  unsure (1)..(85): unsure at all Xaa locations
  Clone ID: PAT_MRT3847_28275C.1.pep
MGFFRFRGGDKEAKKFSSPLGGGAKGGPLLWQGIPRGLWGSYKKVXNSQKGLLIQRDPAPFFFGGEKQKLKFRIPGGLRRKKLTL

SEQ ID NO: 206256 - protein, 98 aa, Glycine max
  Clone ID: PAT_MRT3847_28276C.1.pep
EDFAHFALKSDTTTAPQSDHDLLILYGWNKLATAGPGITTRSVMVHVCDRAKRDASTADGCKFSVQTMRDCISKGKQMVTANRSPARQHGHAVHCETG

SEQ ID NO: 206257 - protein, 237 aa, Glycine max
  unsure (1)..(237): unsure at all Xaa locations
  Clone ID: PAT_MRT3847_28277C.1.pep
MFYFLKRLCLLCFLLLSFDVSLCSCASLRDLASCLDNHDIKNFTTLPYKEHDHSSAYNYYKILNFSIQNLRFAEPVIPKPIAIVLPESLEQLQKSVACCREGFMRGRVGCGGHSYEGTSYVADDGTPFVIIDMMNLNHVWVDMETETAWVEGGATLGETYYAISQESNEHGFSGGSCPTVGVGGHIGGGGFGLLTRKYGLAADNVADALLVDXANGKLFDRETMGEDVFWAFRGGGG

SEQ ID NO: 206258 - protein, 167 aa, Glycine max
  Clone ID: PAT_MRT3847_28278C.1.pep
SPNSKQRTCDYCGSFTALLYCRADSAKLCFFCDRKVHFPNQLFSKHKRAQLCDACGDSPASVLCSAENSVLCQNCDCGKQKHLASEAHQRRPLEGFSGCPSVTELLTILGLSEKSLLSNEGTSQIDDDLSDLHVWSAPSINGLEDLITTTASSQKERVGACGRHKEE

SEQ ID NO: 206259 - protein, 138 aa, Glycine max
  unsure (1)..(138): unsure at all Xaa locations
  Clone ID: PAT_MRT3847_28279C.1.pep
NXXXXXXALXXNXXXXXNXXCXAXEXXXXXXXXSSVXXXXXXXXXHXXXXXXXXXXXLXLTXYVXXXXXXLXXXXXXYXXXXXXISXXXXXXXXXXXXCTCXXXMLXXXXLXSXXXXXXFXXXXLXCXXXXXFXXSVE

SEQ ID NO: 206260 - protein, 78 aa, Glycine max
  unsure (1)..(78): unsure at all Xaa locations
  Clone ID: PAT_MRT3847_2827C.1.pep
NKAVGVIKAGQTFTIEPMINAGVWRDRMWPDGWTAVTADGKPSAQFEHTLLLXVPQTGVEVLTGRLQTSPNVFPWLGS

SEQ ID NO: 206261 - protein, 81 aa, Glycine max
  Clone ID: PAT_MRT3847_28280C.1.pep
AYSGQRSSELGTTVRQDSHMNKAKLINMLDEVDQRYMQHHSQIQIVIFSIEQSAGIGSTRTYTDLALHTVSNQLQRLKDAI

SEQ ID NO: 206262 - protein, 153 aa, Glycine max
  Clone ID: PAT_MRT3847_28281C.1.pep
MGNVTGTVAAKFAFFPPEPPTYDVSREEDGRVVVSGVTADKNVDVHILHTKGGNEIVATFWKHPFARVTVLYSHGNAADLGQMHDLFIELRAHLRVNIMSYDYSGYGASTGKPSEFNTYCDIEAVYNCLKNEYGIKQEQLILHGQSGGRGPAL

SEQ ID NO: 206263 - protein, 187 aa, Glycine max
  unsure (1)..(187): unsure at all Xaa locations
  Clone ID: PAT_MRT3847_28282C.1.pep
MSSPSKRRDMDLVKLSSXMMSDYKVETVNDGMQEFFVEFHGPKDSPYQGGVWKVRVDLPDAYPYKSPSIGFVNKIFHPNVDXEMSGSVCLDVISQTWSPMFDLVNVFEXVLPQLLLYPNASDPLNGDAAALMIRDHATYEQRVKEYCEKYAKPEDVGAVQEESSSDDEPSEDDYASSDDAIVGQPDP

SEQ ID NO: 206264 - protein, 352 aa, Glycine max
  Clone ID: PAT_MRT3847_28283C.1.pep
MEAQRDERVSKLLGAQTHVWNHIFSFINSMSLKCAIELDIPDIIHKYGQPMPLSKLTTSLSIHPSKANCIYRLMRILTHSGFFSQHKVNENELEMGYVLTDASTLLLKDNPLSMVPFLHAMLDPTLTQPWLQLPTWFKNDDPSPFQTAHGMKIWDYADREPRLNDLFNDAMASDTQLVANVVIERCKGVFNGLESLVDVGGGTGTMAMAIAKSFPQLECTVFDLPHVVATLQGSENLKYVGGDMFESIPSADAILLKWILHDWNDEQCVKILKKCKEAIKSKVIIIDMVVENEKGDDESIETQLFIDMVVMVLYPGKERTEKEWAKLIFSTGFSDYKITPVLGLRSLIEIYP

SEQ ID NO: 206265 - protein, 489 aa, Glycine max
  Clone ID: PAT_MRT3847_28284C.1.pep
MGRKGGWFSAVKRVFVSDSKKEQKHHHHHHHHKSKLGCFGTHHYEDLEGAPIAVVPSLPPRKDPKPISEAENNEQSRQAFSLVLATAVAAGAAVAAEVACLTNTPRSNGKANQEMAAIKIQTAYRGYLARRSLRGLRGLSRLKTLVQGQSVQRQAATTLQCMQTLSRLQSQVRARKVRMSEENQALHRQLQQKREKEFDKSQANQIGEKWDDSLKSKEQVEAKLLNRQVAAMRREKALVYASTHQQTWRNSSKSATNAAFMDPNNPHWGWNWLERWMAARPWEGQNTTYHIGHASAKSVASQTMSVGEITKLYSLRDQNNDIKISPASQKPTCPPSHNSPSTTASKVPLANGAKAKVLSSPRGGSWGSDGDSKNMFSKTSENSRRHSIGVSQVRDDESNSSSSPSTKVATKAKSSSSKVRSALVGEHSNGTPEKAASALIKKRLSFPASPAGTRRYAVSTRPGNVASNKSVANATIPEEKVRMRNGGSR

SEQ ID NO: 206266 - protein, 99 aa, Glycine max
  Clone ID: PAT_MRT3847_28285C.1.pep
MGHTWLGSLVIFMTISAVQAQLKTGFYSSSCPNAEATVRSTVESYFNKDPTIAPGLLRLHFHDCFVEGCDGSVLISGSFAERNALANTGLRGFEVIEDA

SEQ ID NO: 206267 - protein, 50 aa, Glycine max
  unsure (1)..(50): unsure at all Xaa locations
  Clone ID: PAT_MRT3847_28286C.1.pep
MSDEEHQFQSKGNARSSKTXPQQAGNNPKNGYIVIKGRPCKVVEVSTFKT

SEQ ID NO: 206268 - protein, 78 aa, Glycine max
  Clone ID: PAT_MRT3847_28287C.1.pep
QRGSIIMILYLCMEITPQRSHFSFAKHAQILTKDNSSNQQNEAFTPTHSTKISILIQSNKSQKEQNPPLIKPQNQSLS

SEQ ID NO: 206269 - protein, 44 aa, Glycine max
  Clone ID: PAT_MRT3847_28288C.1.pep
VWDAHVVMFEMEIEHIIGGHLWPSLTKINKFGRAYVFLTHRYSL

SEQ ID NO: 206270 - protein, 159 aa, Glycine max
  unsure (1)..(159): unsure at all Xaa locations
  Clone ID: PAT_MRT3847_28289C.1.pep
RARRREVRQFRGIYHFLAPIRHEVRVRGGAQGLPPSLXGWLVHRSPDFGGFKGMKEIMSEESKPELALWKRWVVAQAVTTSAGLISYPLDTVRRRMMMQSGIEQPVYNSTLDCWRKIYRTEGLASFYRGAVSNVFRSTGAAAILVLYDEVKKFMNWGRI

SEQ ID NO: 206271 - protein, 497 aa, Glycine max
  Clone ID: PAT_MRT3847_2828C.1.pep
IRLEIERERQRELQGLLEHRAVSDFAHRNRIQSLLRGRFLRNERTVEDERPPSMAASELVQLRQRHTVSGLREGFRSRLENIVLGQAGTSPDSTSNSNASETRGDGSQANSLVDGQQENYEQQIRSLETDVRQLPNRTGTLESSTSESISWQEASNQGGNWQEQIAEEGGGNWQRSPFDQTRDGRAVSDWPQEPPRNLTGEDPHPQEAQRIWHDDNTRETVGNWSEGPSGASRNRRGVPIRRFNRFHPPDDDNVYSMELRELLSRRSVSNLLRSGFRESLDQLIQSYVERQGRAPIDWDLHRNLPTPTPASPERDPDQQGEERDEGQHETINRPSLVLPSPPVPPPQPLGHQDLHQTGWSRQSMHRSEIEWEIMNDLRSDMARLQQGMNHMQRMLEACMDMQLELQRSVRQEVSAALNRSGGENGSSAETSDDGSKWGHVKKGTCCVCCDNHIDSLLYRCGHMCTCSKCANELIRGGGKCPLCRAPILEVVRAYSIL

SEQ ID NO: 206272 - protein, 64 aa, Glycine max
  unsure (1)..(64): unsure at all Xaa locations
  Clone ID: PAT_MRT3847_28290C.1.pep
MKALILVGGLGTXRLMPLALRFPKPVEDLANRPMIWHQMEALMAIGVTELMLVINHQPQGRWKI

SEQ ID NO: 206273 - protein, 64 aa, Glycine max
  Clone ID: PAT_MRT3847_28291C.1.pep
KCSNKFITFSLKASQFLHQWNTLPFKKVTNHIYSLRKLKVFFTKIRIIYLRNSQSHKYKKAFPK

SEQ ID NO: 206274 - protein, 79 aa, Glycine max
  Clone ID: PAT_MRT3847_28292C.1.pep
CNTKTLAPYGDPFGETGPLAYRKKKSGALGVGFPPKQSQKNKNKIFQVGKNTGNGNFHFITYLNTKGFYFKRDDENLEI

SEQ ID NO: 206275 - protein, 176 aa, Glycine max
  Clone ID: PAT_MRT3847_28293C.1.pep
MFTNNSYLQNNNNLASPYPSRAVSVESSNVKKRLYQAWKGNNKFLCGGRLVFGQDASSLFLTSFLIGGPATTFCIRMLASLKEEDPHFSNPVLIGGVILTVLDFIFLFMTSGRDPGIIPRNAHPPELDEPLDINTPSMEWVNNRAPNLKLPRVKDVLVNGHTVKVKFCDTCLLYRP

SEQ ID NO: 206276 - protein, 41 aa, Glycine max
  Clone ID: PAT_MRT3847_28294C.1.pep
TQRKPTLEFPRMSQGIALVQMLQALALTQMVADGTATTLLP

SEQ ID NO: 206277 - protein, 74 aa, Glycine max
  Clone ID: PAT_MRT3847_28295C.1.pep
ADNIAPHHLFYQHGVKWWLTVGWTIKTTPPVLFFLSPKGCTHGRQVRTHLECAIPKSSPFITPHQNRWAQCPWG

SEQ ID NO: 206278 - protein, 157 aa, Glycine max
  Clone ID: PAT_MRT3847_28296C.1.pep
MALSPLGMLLVIATILLPFNIVVAKEFVVGDDHGWTIGFDYAAWAADKTFQVGDLLVFKYAVGKHNVFKVNGTAFQSCTIPPASEALTTGSDRIVLAIPGRKWYICGVVGHCNAGQKLVITVQPQTLPPTPAPAPSPFQHRPHFGRWIPKKLFTIFH

SEQ ID NO: 206279 - protein, 452 aa, Glycine max
  unsure (1)..(452): unsure at all Xaa locations
  Clone ID: PAT_MRT3847_28297C.1.pep
ISHKRGMKLRLMNGIAYNETWFGSWGYKFGRGCFGVTQSMYHKAIQAIRSMSLYLIIHHIANSSHGIPLIFSRNQTLSDQSLVTLGDLFCYMLDLKSCLPRETXISSYKTNALVETNCRWSPKRIEMATRVIVEALKRTEFKWVSRQEVRDAARAYISDTSLVDFVLRSLGNHVEGNYLVRXSLNLVTKVLEYCLEDISDVYPYNEGLVMSNKVXTSIRRAQLMKDMLYLYKYILIDXKPIMRSEFLSAIPLAARIILGTKYFIKDYFGDIPHQVELGSDDKLNIYCTIWLRNNVGSGXYLNKAIMPPHECITLKRNATINDLKLEVERDFREICXELRSFMVESFGNLSVNNETMAFGLIEVGGKVVLEGWHGXHMNXMIEQICESDMNNGIMDCTCGTIEDDGERMVSCDICEIWQHTRCVXIPNDEEIPHIFLXCKKCEQEIVLFPSLP

SEQ ID NO: 206280 - protein, 32 aa, Glycine max
  Clone ID: PAT_MRT3847_28298C.1.pep
SSRCFTGVSIGIHNADTSTFIFFENSWEITLR

SEQ ID NO: 206281 - protein, 58 aa, Glycine max
  Clone ID: PAT_MRT3847_28299C.1.pep
GYRQRAVSTLVRLFQKALDQGVLNLGPRIATIYANARDTISMLFLSKKAKKTRQSARP

SEQ ID NO: 206282 - protein, 79 aa, Glycine max
  Clone ID: PAT_MRT3847_2829C.1.pep
KEPPLTVEDNVKKKIPFQLANKFFDYKKKKQVAKHPILDHHIPVFKKQPPHKPSKEPPDPHEPKKTPNVPYPNQAPQRT

SEQ ID NO: 206283 - protein, 73 aa, Glycine max
  unsure (1)..(73): unsure at all Xaa locations
  Clone ID: PAT_MRT3847_282C.1.pep
MEPPTEDDASLQRMIRLLPYIIGLLLLGTTKGIRFCPQICSIIAXGNTGIILGLRIGHADRTYYCGARAKHSG

SEQ ID NO: 206284 - protein, 125 aa, Glycine max
  unsure (1)..(125): unsure at all Xaa locations
  Clone ID: PAT_MRT3847_28300C.1.pep
LEPIRLEKPTRTIDAKVVVDFVRSNLFCRFGVPKAIVSDQGTHFCNKSMHAMLKKYGVVHRVSTPYHLQTNGQTEISNRXIKRILKKIVQSSRKDWSTKLDDALWAHRTVYKAPIGMCPYQVVFG

SEQ ID NO: 206285 - protein, 44 aa, Glycine max
  Clone ID: PAT_MRT3847_28301C.1.pep
KVDDSGMLHRLLKECPNAECGDRYLHANHLDRHYLGKCGLTYAY

SEQ ID NO: 206286 - protein, 100 aa, Glycine max
  Clone ID: PAT_MRT3847_28302C.1.pep
FIFFFFFFFFFFFFFFFFWFFLDYSFCLFLFYKPKPIGLYSLKEKVSLNPQRTPINDFLHKNGRNFGHSTPPKRGLFPKILFLSVARKNNSKREPKKPGG

SEQ ID NO: 206287 - protein, 216 aa, Glycine max
  Clone ID: PAT_MRT3847_28303C.1.pep
YGCEKTTEGYGCEKTTEGHGNGDEEEEEEEEGGFDLECSYAIVQRAKQQLLYKLRRFEKLAELDPVELEKRMQDQEEDEDDTFMEEEDGHDEKNQASCKENDFRKLIFQALCQSRVHDRQQIPEDFKKLVSDLILEEERALDSLEDKDMVIRRICKRLELWKEVESNTIDMMIEDDFSREDGVWRKNIEQIRNMAGELELAIFGFLVEEFSEELVC

SEQ ID NO: 206288 - protein, 85 aa, Glycine max
  unsure (1)..(85): unsure at all Xaa locations
  Clone ID: PAT_MRT3847_28304C.1.pep
YXLXPPPPPPXXNXXXIXXXXXXXXXXXXXSXXXXXXXXXXXXXXPTLXXPXXXXTXYXXXLXHXSXXXXXSRXXFXAYVRVXAT

SEQ ID NO: 206289 - protein, 179 aa, Glycine max
  Clone ID: PAT_MRT3847_28305C.1.pep
MYLLSLSNELVPTSLPTLGSVGQGLGVFQPGFVYRLVGIHSSDFPVCEGDLSTEPRFYMPPEQFCIGEPRHNMVSSFPNWRQCKDLRCGVKLAAVNSSKKFLMHRYGQSLRWVQSLKIMVILSTNSCSSQTNSAQVQFPRFKVRWSEYVIISIVIWSPQFIGSSKKILCILSKVQLLLL

SEQ ID NO: 206290 - protein, 101 aa, Glycine max
  Clone ID: PAT_MRT3847_28306C.1.pep
VRGTPAVGNGHEGINLVGGQQGPGRHKRKSVHTRNIPQQWGGRPDLEGKRKQSCRRQQWEKHLRGNMQSKCRRGKPQCQSRTVPEELVGGDLNWLLWINVG

SEQ ID NO: 206291 - protein, 315 aa, Glycine max
  Clone ID: PAT_MRT3847_28307C.1.pep
MFPQPWIFLIATIIAISLFMSSLVESFPVADKVKSLPEQSPVSFQQFAGFVPVDDKNQRALFYYFVEAETNPASKPLVLWLNGGPGCTSVGVGAFTEHGPFVTNQGEAIEKNQYSWNKEANILYLESPAGVGFSYSLNLSFYKTLNDEITARDSLVFLRRWFAKFPEYKNRDFYITGESYGGHYVPQLAELIIKSKVNFNLKGIAIGNPLLDFDTDMNAVDEYYWSHGIISDYAYKIRTSLCNSSRVLREYFSGQISKDCLVAAQKVSEVYSFTNFIDPYYVVGEKCLSYNVSQAGFLREMLNSGMFQFRNSHYV

SEQ ID NO: 206292 - protein, 152 aa, Glycine max
  Clone ID: PAT_MRT3847_28308C.1.pep
LHISMALHRLLKRKGGVDELNDDFPLASPATKIRRLVSTSSLYSSPSTTNQTCLSLFTNRFRLLPFQDAELPPILEEDEPLPNEERALVLFKPLVHSPSSFSLTLDSDLMKGIRNSKSFIPSNQMCFTFLNFHLKFILIPIVVRSTLYNRLI

SEQ ID NO: 206293 - protein, 101 aa, Glycine max
  unsure (1)..(101): unsure at all Xaa locations
  Clone ID: PAT_MRT3847_28309C.1.pep
MMSPPAVVTEEEGRSNVSSTVASGSSQSLDRFSQNGAGLKERNYLGLSDCSSVDSCASTVPSLCDEKKENMXNLKATELRLGLPGSQSPEREPDLLSLALE

SEQ ID NO: 206294 - protein, 110 aa, Glycine max
  Clone ID: PAT_MRT3847_2830C.1.pep
MLCGINVFTLLFVIEGLTYEETKEMRKSGLNSDPLLKLTRNGVYVNVVERVREAFKTVKLDCIHVGTSDCKKIGVKLRDLVPCVPILFKDEQIILWRGNFKEEQPSDSQC

SEQ ID NO: 206295 - protein, 113 aa, Glycine max
  Clone ID: PAT_MRT3847_28310C.1.pep
MMSPPAVVTEEEGRSNVSSTVASGSSQSLDRFSQNGAGLKERNYLGLSDCSSVDSSASTVPSLCDEKKENMNLKATELRLGLPGSQSPEREPDLFSLSPAKLDEKPLFPLLPT

SEQ ID NO: 206296 - protein, 112 aa, Glycine max
  Clone ID: PAT_MRT3847_28311C.1.pep
GSSSSRIGSRLLFLSVYGRPLNFLSLSLCFTFSLLHFLVKKKSSEPKIGFLLSLISQSFKFSLVRTSNSSSPTPNCSSFFKFSARFCFSALSGRTMHDILFFLLKKLGKDFV

SEQ ID NO: 206297 - protein, 87 aa, Glycine max
  Clone ID: PAT_MRT3847_28312C.1.pep
NRLTQMNCLASTGKQLNRFSKPKSMAKSRSQSKTCHDGKARRFLLKLGSEYYSSGQAICGPKMLLGIENCYFEFLPRSKVVLSRISA

SEQ ID NO: 206298 - protein, 51 aa, Glycine max
  Clone ID: PAT_MRT3847_28313C.1.pep
QQNMYAQLLPLALPAPPMQGMGGGYAPSPPLPMGGMGMPPKPTFVMPPKDG

SEQ ID NO: 206299 - protein, 68 aa, Glycine max
  unsure (1)..(68): unsure at all Xaa locations
  Clone ID: PAT_MRT3847_28314C.1.pep
VPRNFRLLEELERGEKGIGDGTVSCGMDDGDDINMRCWTWTIVGPHDTGREGRMYGLKLLXDEDDPEK

SEQ ID NO: 206300 - protein, 124 aa, Glycine max
  unsure (1)..(124): unsure at all Xaa locations
  Clone ID: PAT_MRT3847_28315C.1.pep
MDSFKQIWGSAEGCSSSESGWTMYIASPMQEDAAGCSNENDGSHDNNIYAENRRXKQGAQVDEEESDDSMASDASSGPVHYHHAYAHSQGSHGTAASKKDKQDHGSKCSSKKNANKQEKKRVDS

SEQ ID NO: 206301 - protein, 38 aa, Glycine max
  Clone ID: PAT_MRT3847_28316C.1.pep
IPMPIKFMYIKMGPEIKSGLSFSPLDCKLEVCCWPSFV

SEQ ID NO: 206302 - protein, 87 aa, Glycine max
  Clone ID: PAT_MRT3847_28317C.1.pep
FNMSGLPSLSEKLEKFLTLLRSEDGKLESQIVNVLQDIVEIIIQDVMFDGHLLLQTPQQTPHEYHVERGQKFVNIDTSFTHNTSVME

SEQ ID NO: 206303 - protein, 306 aa, Glycine max
  Clone ID: PAT_MRT3847_28318C.1.pep
MAAAANSEGNAQKPSSETFQLFSSSASAFGIFDDAAQQVPPIPPPPCVEVLASEVPSSLKHNVDSVNLDGVILLKGRVNTQQVFGLSNSDLVPGKYEGGLKLWEGSLDLIKALRSDIKNGLISFAGKRVLEVGCGHGLPGIFAFLEGAAAVHFQDFNAEVLRFLTIPNLKANLSRETQLSSFNSTICDEAEVCFFAGDWSGIDKLLPHVTTDAKHNQGDGYDFILMAETVYSINSLQNLYNLIKKCLQHPDGVVYMAAKKYYFGVGGGTRRFLSVVEKDGVMTSSLVAEITDGSSNVREVWKLAYK

SEQ ID NO: 206304 - protein, 115 aa, Glycine max
  unsure (1)..(115): unsure at all Xaa locations
  Clone ID: PAT_MRT3847_28319C.1.pep
TPSLNYYPPGSQAPHHKPEGRRRFTWLAQRGSSWALLCGYGNINPLSIDYASRPRLRPRLTQGGLAWPWNPWSSGGRVSHPSFATHACILTRATSTDRSPCRFTGSTTIHXDPHT

SEQ ID NO: 206305 - protein, 360 aa, Glycine max
  Clone ID: PAT_MRT3847_2831C.1.pep
MQSRILCFSTRRLPLHQRRFLSHFIPDHQYDPPFSPSPKPYYKSKKNHAEKKKKNNSENGDPNKNGAPKLPFKSNLPFDFRYSYSESDPSVGPISFRESPKFSPFGPGRIDRKWTGVSAPVQGEPDRERVEEERNRILGEPLSEVEVAELIERYRHSDCARQINLGKGGGGVTHNMLGDIHNHWKKAEAVRIKCLGVPTLDMDNVCFHLEDKSGGKVIYRNINILLLYRGRNYDTKNCPVIPLMLWKPYAPIYPRLVKNVIEGLTYEETKEMRKSGLNSDPLLKLTRNGVYVNVVERVREAFKTQEVVKLDCIHVGTSDCKKIGVKLRDLVPCVPILFKDEQIILWRGNFKEEQPSDSQC

SEQ ID NO: 206306 - protein, 70 aa, Glycine max
  Clone ID: PAT_MRT3847_28320C.1.pep
DYDELIPKVMARARSLTAKYMLADRQLSCLQHTENADLKFAIAKHEAQYCLRLTGDTHDYLDTAKHLKWS

SEQ ID NO: 206307 - protein, 43 aa, Glycine max
  Clone ID: PAT_MRT3847_28321C.1.pep
SIVQLILIIQTIRLRTTSNAIKPPRQHTSSLQCIIAKLSPTGT

SEQ ID NO: 206308 - protein, 43 aa, Glycine max
  Clone ID: PAT_MRT3847_28322C.1.pep
KLGRRILIVAADQRPQFKTLFMTCVFIWHAFIFFYTILYGMCL

SEQ ID NO: 206309 - protein, 136 aa, Glycine max
  Clone ID: PAT_MRT3847_28323C.1.pep
LEPYSAYHYYCAPGNAQHLEQPVSTCDPYSNPHAQEIVQLLPHPTWGEYGYPTKKGDGWVGDARTWELDVGGLSSRLYFYQDPGTSPAKRIWTSIDSGTEIFVSDKDEVAEWTLSDFDVILTQSGTNLMNKAERKK

SEQ ID NO: 206310 - protein, 28 aa, Glycine max
  Clone ID: PAT_MRT3847_28324C.1.pep
SFRTQAQHARICFMRLFSTVFYEIIMTH

SEQ ID NO: 206311 - protein, 105 aa, Glycine max
  Clone ID: PAT_MRT3847_28325C.1.pep
FTQATPLSWLSEDTRYICVLCCMFFLFALFIVLFAYIYIYICFLYNNLCVFTIVGQQCKYNSTTCTYFIIIIHVTLLIKKNVGYRGNFFWGYQAVRTKLKGIKLC

SEQ ID NO: 206312 - protein, 57 aa, Glycine max
  Clone ID: PAT_MRT3847_28326C.1.pep
SQHRMCVPNIGTVLVRVVHSVEYWFVPSGALSLCIVYIMYLAHFNNALGDRARSRTS

SEQ ID NO: 206313 - protein, 82 aa, Glycine max
  Clone ID: PAT_MRT3847_28327C.1.pep
ARTFCSSSPPTSTSSVGKVPGLVTWRITCGRWFFDWNFYLWIRIGPWFSRDSCPFLVLLISYYCAWASLLFKDTRKNKIFDT

SEQ ID NO: 206314 - protein, 59 aa, Glycine max
  Clone ID: PAT_MRT3847_28328C.1.pep
NTFKSNWARTSGVGKSGVYTLSYKQKSCFPLGHSRVPDTALTMAILLHKRYINIGSQLY

SEQ ID NO: 206315 - protein, 227 aa, Glycine max
  unsure (1)..(227): unsure at all Xaa locations
  Clone ID: PAT_MRT3847_28329C.1.pep
EGCINKSCGLHGLGASIGRALDGRFLVICLEYLRXYAGNYVVNDAQRKLDFLIPRLPNGELPSGFLGFAVNMINLDSSNLFCVTPSGYGLRETLFYNLFSRLQVYKTRAEMIQALPCISEGALSLDGGMVRSCGVFSLGNREDVDVRFPRPERSMRLDNHHIEIERQLKDVKWKKEKIMEELKREQILLDTTRFNYNKKKADYLKFLAQSSSDATQAQTAPDRFACR

SEQ ID NO: 206316 - protein, 83 aa, Glycine max
  Clone ID: PAT_MRT3847_2832C.1.pep
GTLAIHSSTSQYLHLGPRYLDIARWPLPARLSVGRLADKLPRASLAARLSVPLHDGLVMSQRHSPITVALRHIMRFRNSTELL

SEQ ID NO: 206317 - protein, 193 aa, Glycine max
  unsure (1)..(193): unsure at all Xaa locations
  Clone ID: PAT_MRT3847_28330C.1.pep
FKEDEQRLGSTSVIAIIVDEDSAESTTTVHLNNEEGGRDKRVVHRFIYGGADMNDRPLQXAERCTRDWAERQXGIFIDMDLEQTEDTQVIICIAIDAPSXSSNFSRNMITGTSQAECAVHTNDSITGGLQAENLHERSALYVSCICISFTSSVALQMICCSKILDDTTPNXSTDPNGEIVYEVSSYLVKYDTP

SEQ ID NO: 206318 - protein, 120 aa, Glycine max
  unsure (1)..(120): unsure at all Xaa locations
  Clone ID: PAT_MRT3847_28331C.1.pep
IERPMDGTLAGSLTFDKPKTRRLTIRPTELNMEVRLKVRNLVRIIVRKRDKLRGQVGINPYFMAWTVLCTGLLSKGLNMVSCDHACYDGWITKLVTSQMANMMDSLCGGDXKLMRERTHL

SEQ ID NO: 206319 - protein, 253 aa, Glycine max
  unsure (1)..(253): unsure at all Xaa locations
  Clone ID: PAT_MRT3847_28332C.1.pep
KIIKCLVENIVVDISFNQLGASGTLCFLEEVDNLINQNHLFKRSIILIKAWCYYESRILGAHHGLISTYALETLVLYIFHVFNNSFAGPLEVLYRFLEFFSKFDWENFCVSLWGPVPISSLPDVTAEPPRKDGGDLLLSKLFLDACSSVYAVFPGGQENQGQPFVSKHFNVIDPLRVNNNLGRSVSKGNFFRIRSAFAFGAKRLARLLDCSEDELFSEVNQFFFTLXXEHGSGERPDVPSIDLRHLSLSSHDQ

SEQ ID NO: 206320 - protein, 88 aa, Glycine max
  Clone ID: PAT_MRT3847_28333C.1.pep
GQKPSQCFTKQNYVGLWGTIILTPCKSTKFNHASIMGGRVSKTYIQFYTLCFVRRIKGQIFFPTKTFFFGGGAPQKKIKNNNPLLFFF

SEQ ID NO: 206321 - protein, 98 aa, Glycine max
  Clone ID: PAT_MRT3847_28334C.1.pep
SPQPRGGNNFFRTPPIILFVERKRFQPVPWGVKKNGKKKVPMETKSPRVAQKKKKIVGLGLPGGLVFLGPKKSWFYPLGFSFLENLFLEKILKFPPFF

SEQ ID NO: 206322 - protein, 155 aa, Glycine max
  Clone ID: PAT_MRT3847_28335C.1.pep
ARGHAGIPRKSQLRVPCSSRLLPINPKPQNGDVRRTGSIQVNNLYDSSSTRYLLGDWVSESEKIPSNSHKTTLQNQVVVLRVSLHCKACARKVTKHISKMEGVTSFSIDMEAKKVTIIGHVTPLGVLASVSKVKNAQLWPSSTSSLPSLSSSMPM

SEQ ID NO: 206323 - protein, 142 aa, Glycine max
  unsure (1)..(142): unsure at all Xaa locations
  Clone ID: PAT_MRT3847_28336C.1.pep
WSFAKTSATLRGGFLADCGFLTTGFKQMPNALRVAPEDMASARSQLHYXRANHLERQDAHLDNLRECRLRESDLXHSPEEASQLRRKAPSRIEWLQKADEPTIAQIEXLHSMQRMRNAPDTNDNSETLLSIDMRRLQGAGQA

SEQ ID NO: 206324 - protein, 154 aa, Glycine max
  Clone ID: PAT_MRT3847_28337C.1.pep
PRVRKRKKCSNKKAPKPPRPPRAPSWDVADQKLIREITELAMLKRARIERMKALKKMKAAKASSSSSSSTFAMVFTVVFCIVVLLQGMSSGKSSVTIFQGSPEPAGVMEGGLIDVQHQLNPSSSDSNAPSLEPHKIVQQVTGLDLPAKLRRGAG

SEQ ID NO: 206325 - protein, 65 aa, Glycine max
  unsure (1)..(65): unsure at all Xaa locations
  Clone ID: PAT_MRT3847_28338C.1.pep
XXYSXGSWXRXXNXPNAGXCXXWXAXEKFAGXNXYXLDSTXSGNYNAVVVVVWWWCXLXPXXXXR

SEQ ID NO: 206326 - protein, 169 aa, Glycine max
  Clone ID: PAT_MRT3847_28339C.1.pep
SSRIGSRVSKSLRSLCFRVQLSQQGFCLRRIQYHHGMVINTPVLHASSSSEEEERAGKASHAAMEGLSLAEKSTEAVEESNKGIENGSKRETFADLIEEKGRESSFSSEFLSSETTHGEHSRSSTEDSSSSPSVGWPVQEIAASDCASPHGSEDGEKKHLVLENKEFEK

SEQ ID NO: 206327 - protein, 44 aa, Glycine max
  Clone ID: PAT_MRT3847_2833C.1.pep
IQGQQKYNLMATAMDHKSVRANATARKLGIPLLITSPSVVFSQP

SEQ ID NO: 206328 - protein, 75 aa, Glycine max
  Clone ID: PAT_MRT3847_28340C.1.pep
FVENKRSNASILKQPYMMPPPARDLDKAHNGQKQVGKVVTMAWKRGKAPPVWSTNFWRLTHQQTPVGSCCVISKC

SEQ ID NO: 206329 - protein, 60 aa, Glycine max
  Clone ID: PAT_MRT3847_28341C.1.pep
MRVMELLDTNLEGKAKHKNYQVETWSKILSSLSPKGLNENRKVHKLVLKKRFKSFNLTFE

SEQ ID NO: 206330 - protein, 256 aa, Glycine max
  unsure (1)..(256): unsure at all Xaa locations
  Clone ID: PAT_MRT3847_28342C.1.pep
ARDEAFPLTKKWWPSWDIRTKLNCLQTCIGSAKLTERIRKAVEIYDEDPPESVQKYVLHQCRKXNLFRVGRYKVAPLEPDEVETLLGFPRNHTRGGGISRTDRYKSLGNSFQVDTVAYHLSVLKEMYPNGINLLSLFSGIGGAEVALHRLGIPLKNVVSVEKSEVNRNIVRSWWEQTNQKGNLYDMDDVRELDGDRLEQLMSTFGGFDLIVGGSPCNNLAGSNRVSRDGLEGKESSLFFDYFRILDLVKNMSAKYR

SEQ ID NO: 206331 - protein, 54 aa, Glycine max
  Clone ID: PAT_MRT3847_28343C.1.pep
PTRTPIRYITHPIFRDGTFINLHSPILPTPSSHIISFSNHQSKFNLLSYLEHHQ

SEQ ID NO: 206332 - protein, 76 aa, Glycine max
  unsure (1)..(76): unsure at all Xaa locations
  Clone ID: PAT_MRT3847_28344C.1.pep
MAETFLFTSESVNEGHPDKLCDQICDADLDSCLEQDPDSNVGCETCTKTNLFMVLXEITTKANVYFXRIVRDTCTN

SEQ ID NO: 206333 - protein, 64 aa, Glycine max
  unsure (1)..(64): unsure at all Xaa locations
  Clone ID: PAT_MRT3847_28345C.1.pep
AAGTRTHGXRLLFIQGPLFYLLPKYMQVLYLFCVKYHRAPFFHSLLPLVTIHSSYLSRPLHFWP

SEQ ID NO: 206334 - protein, 57 aa, Glycine max
  unsure (1)..(57): unsure at all Xaa locations
  Clone ID: PAT_MRT3847_28346C.1.pep
DVTELTRDDRRKEDSKNDLLYPYGHEELAVCXDVDQDRAVIDKYSYYHSIYAKLSYG

SEQ ID NO: 206335 - protein, 99 aa, Glycine max
  unsure (1)..(99): unsure at all Xaa locations
  Clone ID: PAT_MRT3847_28347C.1.pep
MLTLNSMAWPLHETDLKDKAVTQLNLIALNPIFFNWIGREETRTDPISNHNSNLNGNWNGTCTGPLXKARVVWRVSIERPIAWGLXQGPFRSFPSFFAP

SEQ ID NO: 206336 - protein, 60 aa, Glycine max
  Clone ID: PAT_MRT3847_28348C.1.pep
PQLYIASLASIPMVTCNISHTQQGQMFDAQYPAKEATRTTDQATPLRLSNKHFSGTPRCN

SEQ ID NO: 206337 - protein, 109 aa, Glycine max
  unsure (1)..(109): unsure at all Xaa locations
  Clone ID: PAT_MRT3847_28349C.1.pep
MSSSLSIMPFPIGVDASTVTIALFKPLKQKHHFVRGRVSVIRPLHRRLNSVSPPRCSSPGDDAVITLHVWGMMCEGCTNSVKKILXNRPQVLSAHVNLTSETATRFLLP

SEQ ID NO: 206338 - protein, 56 aa, Glycine max
  Clone ID: PAT_MRT3847_2834C.1.pep
FLELWAIYFSIVSDYSYDLIGLITKHVMSMMAEMINSLCGGDEKLMRERTHLLLAS

SEQ ID NO: 206339 - protein, 61 aa, Glycine max
  unsure (1)..(61): unsure at all Xaa locations
  Clone ID: PAT_MRT3847_28350C.1.pep
LWISLFRVISVIIGLSLCAYMRRLMATGARCQIRVSYMTHVSDILLKLPYLLSCIHIGXDL

SEQ ID NO: 206340 - protein, 399 aa, Glycine max
  Clone ID: PAT_MRT3847_28351C.1.pep
CRPNRLDYIPVINWFLLALSLVLVCTISSIDEIGNAYGIAELGVGTDFGFTVAGLMMMTTILVTLIMLLIWQIHIVIVLSFAVVFLGLELTFFSSVLWSVTDGSWIILVFAVIMFLIMFVWNYGSKLKYETEVKQKLSMDLMQELGCNLGTIRAPGIGLLYNELVKGIPGIFGHFLTTLPAVHSMIIFVSIKYVPVPMVPQSERFLFRRVCQRSYHIFRCIARYGYKDVRKENHQTFEQLLMESLEKFIRREAQERSLESEGDDDTDSEDEYSGSRVLIAPNGSVYSLGVPLLADFNDTTIPIPNFEASTSEEANPESPKPPVLDAEKSLARELSFIRKAKESGVVYLLGHGDIRARKDSWFIKKLIINYFYAFLRKNCRSGITNLSVPHSHMMQVGMT

SEQ ID NO: 206341 - protein, 510 aa, Glycine max
  Clone ID: PAT_MRT3847_28352C.1.pep
MQSSHMGLGGREQCGVMEMDVNQVTQSAPDSPPFCDTKGSDNDCSDQDSEHPLPPGRLENSSLNRASTGNGNLKERMGQLRSESSASETEGLARDLKRQKNLDFKPGKDPGAPLPTNASIDLCPIGRICSFCQSSKISEVTGPMLHYANGNLVTGDAAMKPNVIPVHRICIDWAPQVYFVGEVVKNLKAEVARGAKLKCSKCNLKGAALGCYVKSCRRTYHVPCAMDISDCRWDHEDFLLLCPVHSNVKFPCEKIRSKKKATQKHPTFSHLPSHHSNRLEASQDASKKLVFCGSALSNEEKVFLINYASKVGATVTKFWTSNVTHVIAATDAHGACSRTLKVLMAILNGRWVLKMDWIKACMQEINPVEEEPYEINLDNQGCQGGPKAGRLRALANEPKLFSGLKFYFSGDYVSTYKEDLEELIEVGGGTVLRIKEELEAHRHECKGDSSKLLVVYNLDPPQGCKLGEEVSILWQRLNDAEDLAANTLQVIGHTWILESIAACKLQPFVY

SEQ ID NO: 206342 - protein, 285 aa, Glycine max
  Clone ID: PAT_MRT3847_28353C.1.pep
MTGKEIFHKMKEKVLGSSDPDSGKGKSKMKKHITHGFHLVKGRSGHAMEDYLVAQFKQVDNKELGLFAIFDGHSGHSVPDYLKSHLFDNILKEVMRPNFWTEPAEAVKRAYSITDSTILDKSGELGRGGSTAVTAILINCYKLLVANIGDSRAVLCKNGVAKQLSVDHEPSIESEDIKNRGGFVSNFPGDVPRVDGQLAVSRAFGDKSLKIHLSSEPYVTVEMIEDDAEFLILASDGLWKVMSNQEAVSAIRDVKDARSAAKVLTEEAKNRKSSDDISCVVVKFQ

SEQ ID NO: 206343 - protein, 53 aa, Glycine max
  Clone ID: PAT_MRT3847_28354C.1.pep
VVPIKGHWFNQIAPIYHPYRELIACNKGSAMVVHGLGTLFLKKFPLSPLNKNL

SEQ ID NO: 206344 - protein, 40 aa, Glycine max
  Clone ID: PAT_MRT3847_28355C.1.pep
NEFSFFVIFGREDGLCNVKNGEFLVNDFRVNDENSLVVLV

SEQ ID NO: 206345 - protein, 54 aa, Glycine max
  Clone ID: PAT_MRT3847_28356C.1.pep
KVFSSPILYVINSIRYARLINKVQGSALLIKVNQKLIVIIEFSSVKYMHLIDNL

SEQ ID NO: 206346 - protein, 57 aa, Glycine max
  Clone ID: PAT_MRT3847_28357C.1.pep
SSLIGHNLGGLISNFSCHGEIFTQCCCGYFCHCLTLNNATLSIKWHPLLASSFFVIL

SEQ ID NO: 206347 - protein, 56 aa, Glycine max
  Clone ID: PAT_MRT3847_28358C.1.pep
EDDRRGLRISLTLQHIGTDNPRHRDESMAFTIVVGIRPFAPSPRSTRYRPSGKSEF

SEQ ID NO: 206348 - protein, 42 aa, Glycine max
  unsure (1)..(42): unsure at all Xaa locations
  Clone ID: PAT_MRT3847_28359C.1.pep
KHWXICMXLARGHIVNYLNSTGGDTMHTLSNFMPRHVQAVRT

SEQ ID NO: 206349 - protein, 92 aa, Glycine max
  Clone ID: PAT_MRT3847_2835C.1.pep
MASIIMSFAPATGRVFAATAAKGAGGSKEEKGLLDWILGGLQKEDQLLETDPILKKVEEKNGGTTSNTGRNKNSVAVPQKKKGGFGGLFAKN

SEQ ID NO: 206350 - protein, 79 aa, Glycine max
  unsure (1)..(79): unsure at all Xaa locations
  Clone ID: PAT_MRT3847_28360C.1.pep
MVPHNGDYGGGPSCLWLRSDDCAIIWSYNGTIXLGFKVXTIVQDGKTIKRQIRCTAQLEQXRTITSXYYCKDHGIIIVY

SEQ ID NO: 206351 - protein, 92 aa, Glycine max
  unsure (1)..(92): unsure at all Xaa locations
  Clone ID: PAT_MRT3847_28361C.1.pep
PYFLIKLSKIFISLHSILLTTTIFLKQPKXIXLYLFPTYKXKKINKTNXHXIFFXTLXXKYKNFXTIYPSHSHLLHSQNIHNFXHPFXSFPL

SEQ ID NO: 206352 - protein, 124 aa, Glycine max
  Clone ID: PAT_MRT3847_28362C.1.pep
MEAKTKPWLDLSLLLLAAYCMQQCVHGQSQQTPCMFIFGGYLSDNGNNNNLRTYSKSNYRPYGIDFPAGTTGRFTNGLTQADIIAELLGFTERIPPNANTSGSDILKGANYASGSAGIRPETGT

SEQ ID NO: 206353 - protein, 64 aa, Glycine max
  Clone ID: PAT_MRT3847_28363C.1.pep
KKKKKKKKKKKKGGIPIMGVIDTGNNLWREIQRGTSFPENGRYQVWEKFGKNFCYFKNVEREKV

SEQ ID NO: 206354 - protein, 54 aa, Glycine max
  Clone ID: PAT_MRT3847_28364C.1.pep
LLRFNSWALKNKRSSVVSPIGSLLDLKDKFPKPSSVWSIGTKEGTIDTNSGWMF

SEQ ID NO: 206355 - protein, 97 aa, Glycine max
  Clone ID: PAT_MRT3847_28365C.1.pep
GSYGQMTVSSLSMFVARVCRFIHHPVSLLGPGLMRGISCYSECTGCPWRYFLPSHPCFDWLGFRRRQVSSSQVCLYYQLEAVSFLNVSVRQTKPRRP

SEQ ID NO: 206356 - protein, 116 aa, Glycine max
  Clone ID: PAT_MRT3847_28366C.1.pep
MCTIGFSRRIRIIILVVLIPKPIIPVMRVPQFLCLSSRRPRFKVVVGRRRTPSGFLGVVGSGEMGKVGFFHLGRGLFLLGLLGGVFRLWNGPVRRKISWWFLKKFFWLFMLGEGEH

SEQ ID NO: 206357 - protein, 53 aa, Glycine max
  Clone ID: PAT_MRT3847_28367C.1.pep
FLQILVKKICCLFNLDSFLLVICFAIWRRVGLAKQEFELLIDLIIFQKFCFGV

SEQ ID NO: 206358 - protein, 62 aa, Glycine max
  unsure (1)..(62): unsure at all Xaa locations
  Clone ID: PAT_MRT3847_28368C.1.pep
KTTRGREYQGKDRAQAEVRRRESELAEAEMPGLRARRTEDGPPQPFXGGRRTGALHKIIQTG

SEQ ID NO: 206359 - protein, 121 aa, Glycine max
  Clone ID: PAT_MRT3847_28369C.1.pep
KSSFRFEIISPHSCPGASSDDKNLRFLYDESRSPRYTQKYSRNAGLTKSPIKIEVVDDRFRDKEHRNRRLSNIESKLKQISIDDQKNVDKSQLPVARPSGEILREKASSLQVCEPPQAQII

SEQ ID NO: 206360 - protein, 62 aa, Glycine max
  Clone ID: PAT_MRT3847_2836C.1.pep
SSFISHMYGFLMFPKSKKGTKGTNVEPKRVQLSMSFHSNMLWSSGEIIVWQGTNVPCPINKN

SEQ ID NO: 206361 - protein, 119 aa, Glycine max
  Clone ID: PAT_MRT3847_28370C.1.pep
SHYKFVLVIEGTWTESYVTEKLFYALDSGAIPIYFGAPNIMDFVPPHSIIEGVKFKSMEELASYVKAIAKDPVAYGEFHAWRRCGVLDNYAKTRALSLDTLPCRLCQAISKKGGRNAAA

SEQ ID NO: 206362 - protein, 40 aa, Glycine max
  unsure (1)..(40): unsure at all Xaa locations
  Clone ID: PAT_MRT3847_28371C.1.pep
XSXQFNWIGRXVSQKWSTNSHFLFIIELTDQLALLSNISX

SEQ ID NO: 206363 - protein, 987 aa, Glycine max
  Clone ID: PAT_MRT3847_28372C.1.pep
MRSCVCYTLLLFIFFIWLRVATCSSFTDMESLLKLKDSMKGDKAKDDALHDWKFFPSLSAHCFFSGVKCDRELRVVAINVSFVPLFGHLPPEIGQLDKLENLTVSQNNLTGVLPKELAALTSLKHLNISHNVFSGHFPGQIILPMTKLEVLDVYDNNFTGPLPVELVKLEKLKYLKLDGNYFSGSIPESYSEFKSLEFLSLSTNSLSGKIPKSLSKLKTLRYLKLGYNNAYEGGIPPEFGSMKSLRYLDLSSCNLSGEIPPSLANLTNLDTLFLQINNLTGTIPSELSAMVSLMSLDLSINDLTGEIPMSFSQLRNLTLMNFFQNNLRGSVPSFVGELPNLETLQLWDNNFSFVLPPNLGQNGKLKFFDVIKNHFTGLIPRDLCKSGRLQTIMITDNFFRGPIPNEIGNCKSLTKIRASNNYLNGVVPSGIFKLPSVTIIELANNRFNGELPPEISGESLGILTLSNNLFSGKIPPALKNLRALQTLSLDANEFVGEIPGEVFDLPMLTVVNISGNNLTGPIPTTLTRCVSLTAVDLSRNMLEGKIPKGIKNLTDLSIFNVSINQISGPVPEEIRFMLSLTTLDLSNNNFIGKVPTGGQFAVFSEKSFAGNPNLCTSHSCPNSSLYPDDALKKRRGPWSLKSTRVIVIVIALGTAALLVAVTVYMMRRRKMNLAKTWKLTAFQRLNFKAEDVVECLKEENIIGKGGAGIVYRGSMPNGTDVAIKRLVGAGSGRNDYGFKAEIETVGKIRHRNIMRLLGYVSNKETNLLLYEYMPNGSLGEWLHGAKGGHLKWEMRYKIAVEAAKGLCYLHHDCSPLIIHRDVKSNNILLDAHFEAHVADFGLAKFLYDLGSSQSMSSIAGSYGYIAPEYAYTLKVDEKSDVYSFGVVLLELIIGRKPVGEFGDGVDIVGWVNKTRLELAQPSDAALVLAVVDPRLSGYPLTSVIYMFNIAMMCVKEMGPARPTMREVVHMLSEPPHSATHTHNLINL

SEQ ID NO: 206364 - protein, 981 aa, Glycine max
  Clone ID: PAT_MRT3847_28373C.1.pep
MRSCVCYTLLLFVFFIWLHVATCSSFSDMDALLKLKESMKGDRAKDDALHDWKFSTSLSAHCFFSGVSCDQELRVVAINVSFVPLFGHVPPEIGELDKLENLTISQNNLTGELPKELAALTSLKHLNISHNVFSGYFPGKIILPMTELEVLDVYDNNFTGSLPEEFVKLEKLKYLKLDGNYFSGSIPESYSEFKSLEFLSLSTNSLSGNIPKSLSKLKTLRILKLGYNNAYEGGIPPEFGTMESLKYLDLSSCNLSGEIPPSLANMRNLDTLFLQMNNLTGTIPSELSDMVSLMSLDLSFNGLTGEIPTRFSQLKNLTLMNFFHNNLRGSVPSFVGELPNLETLQLWENNFSSELPQNLGQNGKFKFFDVTKNHFSGLIPRDLCKSGRLQTFLITDNFFHGPIPNEIANCKSLTKIRASNNYLNGAVPSGIFKLPSVTIIELANNRFNGELPPEISGDSLGILTLSNNLFTGKIPPALKNLRALQTLSLDTNEFLGEIPGEVFDLPMLTVVNISGNNLTGPIPTTFTRCVSLAAVDLSRNMLDGEIPKGMKNLTDLSIFNVSINQISGSVPDEIRFMLSLTTLDLSYNNFIGKVPTGGQFLVFSDKSFAGNPNLCSSHSCPNSSLKKRRGPWSLKSTRVIVMVIALATAAILVAGTEYMRRRRKLKLAMTWKLTGFQRLNLKAEEVVECLKEENIIGKGGAGIVYRGSMRNGSDVAIKRLVGAGSGRNDYGFKAEIETVGKIRHRNIMRLLGYVSNKETNLLLYEYMPNGSLGEWLHGAKGGHLKWEMRYKIAVEAAKGLCYLHHDCSPLIIHRDVKSNNILLDAHFEAHVADFGLAKFLYDLGSSQSMSSIAGSYGYIAPEYAYTLKVDEKSDVYSFGVVLLELIIGRKPVGEFGDGVDIVGWVNKTRLELSQPSDAAVVLAVVDPRLSGYPLISVIYMFNIAMMCVKEVGPTRPTMREVVHMLSNPPHFTTHTHNLINL

SEQ ID NO: 206365 - protein, 82 aa, Glycine max
  Clone ID: PAT_MRT3847_28374C.1.pep
KCHATALIVVIVHFSTLVTSTAEEMVILGIVTSPTSTLPLGSLRSMNPDSEAKFSAIAISPLCIFILGRVGGRVGGRLGRTR

SEQ ID NO: 206366 - protein, 81 aa, Glycine max
  Clone ID: PAT_MRT3847_28375C.1.pep
TDLSPHDSTLLSDIVEVDKLPSFKREEDDETRYAFYILTRHGLRYECSSSSQIQVDSWLSALHSDCKLETDTSTPNGSIEL

SEQ ID NO: 206367 - protein, 88 aa, Glycine max
  Clone ID: PAT_MRT3847_28376C.1.pep
KVATYVSVTLTTTGHSRIIQQRQKTLHAKSNILPISQLSRSLPVRCIEYRYPVCNKFCHLPQSMVKHPTRSPPVPNIFAVLVKRMSLL

SEQ ID NO: 206368 - protein, 88 aa, Glycine max
  Clone ID: PAT_MRT3847_28377C.1.pep
KTPSQKGAPKRLQSQKHISFPALRPPFKKRGLWELLFPGFSSNPLQFGGICPRHFFFWFRTILPPYKFGRFGFPWIKKLATNKILRDR

SEQ ID NO: 206369 - protein, 109 aa, Glycine max
  unsure (1)..(109): unsure at all Xaa locations
  Clone ID: PAT_MRT3847_28378C.1.pep
KIQYSVYKATKAKVLYCTNEAALYXECDKKVHTANKLTSKHQKIPLSLSASHIPKYNIXPKIINYFFYLENQALLYRNYNISIHTXNTYISNHQEWLLTSMRVNLKATE

SEQ ID NO: 206370 - protein, 73 aa, Glycine max
  Clone ID: PAT_MRT3847_28379C.1.pep
TLSQGHPSGLTPLPSALQMGPHLLLTTTLSHTAIMRPYSATKMQVTTYYTNPEWTGTYSGSDITTLTSVHTAV

SEQ ID NO: 206371 - protein, 75 aa, Glycine max
  Clone ID: PAT_MRT3847_2837C.1.pep
KAQAHQVNFYVHHKCPIPIWPASVPNKDATGGSKGWILPCCRPNPTGHNTKDMELQKQPGAWLKPHFKLELNKIQ

SEQ ID NO: 206372 - protein, 28 aa, Glycine max
  Clone ID: PAT_MRT3847_28380C.1.pep
AGLFEGLKAYTTEEGLYFYFDRMKMLKA

SEQ ID NO: 206373 - protein, 115 aa, Glycine max
  Clone ID: PAT_MRT3847_28381C.1.pep
IRLEEEATVKRLEPLFSHLGIVKYMGGSGKGQFAELANQVTIASTMVGLVEGMVYAHKAGLDVGLYLDAISTGAAGSKSFDLYGKRILNRDLDPGFFVNHFVKDLGICSRTKIRA

SEQ ID NO: 206374 - protein, 53 aa, Glycine max
  Clone ID: PAT_MRT3847_28382C.1.pep
DIVVCFFVFISTTIVLLLASWGRIYIFVSINKYNLINFKYYKITSLSFINNNI

SEQ ID NO: 206375 - protein, 93 aa, Glycine max
  Clone ID: PAT_MRT3847_28383C.1.pep
MSSRRSRSRQSGVSTEITDAQITDLISKLQQLIPELRARRSDKVSASKVLQETCNYIKSLHREVDDLSDRLSQLLATTDSNSAQAAIIRSLLM

SEQ ID NO: 206376 - protein, 91 aa, Glycine max
  Clone ID: PAT_MRT3847_28384C.1.pep
KLKKEKVSNRFSHLKEKKWVERRHEPSSLSWALSHRHDTSLTSKFDSSTFKSQCILWCSTHTQPPLKSTKSATMYQALTRRLDGQINVCGC

SEQ ID NO: 206377 - protein, 74 aa, Glycine max
  Clone ID: PAT_MRT3847_28385C.1.pep
LMKNHGKDRKVGECGTFWHEARPMFHDAITISFSSLQFSSRKMATAKPEKTPDFFCGGTRVTGRGLSQKRRLHR

SEQ ID NO: 206378 - protein, 88 aa, Glycine max
  unsure (1)..(88): unsure at all Xaa locations
  Clone ID: PAT_MRT3847_28386C.1.pep
APKRSTLTFPSMAHNGGRLPCMLVWPPYRVKKFETDSYLPYLDDAQLAHEVXYVHTKGWIACLEYEYEHGDGYREHNRSSGYYDGLYW

SEQ ID NO: 206379 - protein, 68 aa, Glycine max
  Clone ID: PAT_MRT3847_28387C.1.pep
CGARGGRFRAFYLHDTISFLNFMLPSFIFDLHNQSKLSQPQTLIWPSSLRDKAWYIVADFVLFSGGWV

SEQ ID NO: 206380 - protein, 47 aa, Glycine max
  unsure (1)..(47): unsure at all Xaa locations
  Clone ID: PAT_MRT3847_28388C.1.pep
QRLVHRIERVLERHLLLLHLERHPFLGRQNLMXCITLSVVMVLRIAI

SEQ ID NO: 206381 - protein, 54 aa, Glycine max
  Clone ID: PAT_MRT3847_28389C.1.pep
KNKPVVLLKINGLLYLMNSIVLINLKIIYHILFNLLLIIGDHSICSGVGGWGGG

SEQ ID NO: 206382 - protein, 152 aa, Glycine max
  Clone ID: PAT_MRT3847_2838C.1.pep
MPPQKGVVKKAWSSGGCGRVGALEMGSCPGPIETPALLLSTRKGLPHFISPDLLTSLPSPDSHLLQISPLHFLEGLASTTISKLGGLHQMLGLHQYGMAAVARDSIQCLPESKGATKLGASFETPCGRLLIKPKDYVEMISCMRPNIWATLA

SEQ ID NO: 206383 - protein, 79 aa, Glycine max
  unsure (1)..(79): unsure at all Xaa locations
  Clone ID: PAT_MRT3847_28390C.1.pep
WYGEEMTLIPGTIVEEAHIKLIVELEKSVPTLIGNECPNDEKLLRCITFDRPKTLCFTIYPMESNTVVXKKSLNFVRFI

SEQ ID NO: 206384 - protein, 301 aa, Glycine max
  Clone ID: PAT_MRT3847_28391C.1.pep
MGDKEKFELDRNEDPMSYSSGMHSDWRFGGANIASSSVAMVGLGNSMNVSRGDLIGSSSCSSASMVDSFGPNYWENPTSSQNLGFCDINNVHNNGGSSSTVAIRKDGFGFGRVGQDHHGTLEMGWNHANSMLPNGPVMFPHSLSQFPTDSGFIERAARFSCFSGGNFGDMVNSYGIAQSMGLYGARDAIAGHGMKSVTGGQSQGGDMNVVEATKDVSPSVEHLVAAKGSPLKTESSDDGGGQDDSPMLEGTSGEPSSKGLNTKKRKRSGQDGDNDKANGAQELPSEGAEDSYKKEYVPKLI

SEQ ID NO: 206385 - protein, 56 aa, Glycine max
  Clone ID: PAT_MRT3847_28392C.1.pep
DMTLSWGVMSHLHVASMSSDCHVSCYCEHSFVISALNEHILTLGPFCRLLAAARAE

SEQ ID NO: 206386 - protein, 85 aa, Glycine max
  unsure (1)..(85): unsure at all Xaa locations
  Clone ID: PAT_MRT3847_28393C.1.pep
LHIXLXXNPXSXIASLXPXSSQXTXXYPXXMKSNNYQPSNMHMXSFSSENXYXXNPXNTXXXFQRKPQHTXXPPRXXSSXIXXSD

SEQ ID NO: 206387 - protein, 44 aa, Glycine max
  unsure (1)..(44): unsure at all Xaa locations
  Clone ID: PAT_MRT3847_28394C.1.pep
KYFNRXLKSCWGHSFHXEGKKRXKKSKPKSKKSSNEAQNMSSLA

SEQ ID NO: 206388 - protein, 1618 aa, Glycine max
  Clone ID: PAT_MRT3847_28395C.1.pep
MGTNQTGKRFYQVKVKSLDTTSIKELGRLMEPLQMQAFRKTYGKILELTLAEVSIEAIASLTQYYDQPLRCFTFGDFQLVPTIEEFEELLGCPLGGRKPYLSSGCLPSLSRIATVVKDSTRGLDRIKQTRNGIAGLPRRYLEDKARGMANQGDWVPFMDVLALLIFGVVLFPNVDGLVDLAAIDVFLAYHHSKESPVVAVLADLFDTFDRRCEKSSARIICCLPALCVWLVSHLFQQDTRHPCPLLSHCSCTEKRRIDWDQLLAGIGGRTISWFPRWKEGKEGVLFSCGGYPNIPLVGTRGCINYNPALAITQLGYPMRGAPTEEGISPFLVRDFGAQNSKTIQRIHKAWETPLRKDQELRGIRNGIIGGYHEWLKVHIRGLDWLAKLKVISEESFEAPEEDEEVQALKSELGKAKFAKEKFKLAATHIRKECAGLREENAITVRALEQETKRARKEEYGRNKFRGALWGSNSELKLRREERDQSRAHSMVLKEELVACSRSKRSLSQCLCKTDTNMLAIIAKYQEELGLATAHEHRIADEYAQVYAEKEARGRVIDSLHQEATMWMDRFALTLNGSQELPRLLAKAKAMADTYSAPEEIHGLLGYCHVKYEAAHREERDHRCRCQFGCRSRPDSLGNCAPSSLKHSRTGKGHTGARWHPSPGIPTERLTLMDCRPTTHHPSCKKMRATLLLPSLKESLLNSPTKDVEFYPPIPEGPAPGTLPQPNIAAPPIVLSTEGPPPATEERRKLDLLEERLRVVEGFGDYPFADMTDLCLVPDVVIPPKFKVPDFEKYKGTTCPKNHLNMYCRNMGAHSKDEKLLIHFFQDSLAGAAVVWYTNLEASRIRTWKDLITAFLRQYQYNSDMAPDRTQLQNMFKKEGETFKEYAQRWRDLAAQPKAPTQREAPQIPTPNTTRPAGNSNTTRNFPPRPFPEFTPLPMTYEDLLPSLIANHLTVVTPGRVLEPPFPKWYDPNATCKYHGGVPGHSVEKGLALKYKVQHLMDAGWLTFQEDRPNVRTNPLANHGGGAVNAVESDRPHRSKPLRDVATPRRFIFEALQKGGVIPHSGCKEDSCLLHSGELHDMETCLGVEELLQRMIDQGRLEVGSEGKEEQHICMQSTDGSSVAKPKPLVIYFTKSAASQKPGHPLVAKPVPFPYQSSHAVPWRYTPPREKEEEATDVSSLSAKGKGKVVEEQDGEAPHASNKDIPAKGLPEKKDGKKEVSLEEASEFLRIIQQSEFEVIEQLNKTPARVSLLELLMSSEPHRALLVKVLNEAHVAQDISVEGFGGLVNNITANNYLAFAEEEIPAEGRGHNKALHVSVKCMDHIVAKVLIDNGSSLNVMPKSTLEKLPFNASHLKPSSMVVRAFDGTRQEVRGEIDLPVQIGPHTCQVTFQIMDINPPYSCLLGRPWIHSVGVVPSTLHQKLKFVVEGHLVIVSGEEDILVSCPSSMPYVEAAEESLETAFQSFEVVSISSVDSFSGQPCLSDAAVMMARVMLGNGYEPGMGLGKDNGGITSLINAQGNRGKYGLGYKPTQADMKRSIAGRKSSGQSSRWRQESEGSPPCHISRSFISAGLGDKGQVVAIYEDDVPSTLDLVRPCPPDFQLGNWQVEKRPGIYATSIM

SEQ ID NO: 206389 - protein, 236 aa, Glycine max
  unsure (1)..(236): unsure at all Xaa locations
  Clone ID: PAT_MRT3847_28396C.1.pep
AMYVAIQAVLSLYASGRTTGIVMDSGDGVTHTVPIYEGYALPHAILRLDLAGRDLTDYLMKILTERGYSFTTTAEREIVRDIKEKLCYVALDFEQEMATAASSSSLEKSYELPDGQVITIGNERFRCPEALFQPSFLGMESCGIHETTFNSIMKCDVDIRKDLYANTVLSGGTTMYPGIADRMQKEITALAPSTMKIKIIAPPERKYSVWIGGSILASLSTFQQXMWISKAEYDES

SEQ ID NO: 206390 - protein, 62 aa, Glycine max
  Clone ID: PAT_MRT3847_28397C.1.pep
PSDPSHDKFSKPAPTSILMHQERIGLTSSGKGNLLSNEECTSRILVCFLFLFWLLVGELAYW

SEQ ID NO: 206391 - protein, 49 aa, Glycine max
  Clone ID: PAT_MRT3847_28398C.1.pep
YYCTSFLLLNDLITVYYISIKCNHHIEHPTISLKSYFSLLFNTSKYTNF

SEQ ID NO: 206392 - protein, 74 aa, Glycine max
  Clone ID: PAT_MRT3847_28399C.1.pep
GAPCCDDPYSCCPNDYPICNPYVGTCFKSKNNPFGVKAFGGTPVKPPWTFGGKNKVTSALADKGNVNVQEGAHF

SEQ ID NO: 206393 - protein, 183 aa, Glycine max
  unsure (1)..(183): unsure at all Xaa locations
  Clone ID: PAT_MRT3847_2839C.1.pep
GAPPPPKGQPPFKGHPPLGGGRGGPPPSPGKXPQRPPSGLGGVQKPPPKSLRQNKIPGHKPPGGETPRGAGGHPXRPPPLAGGERGELNPGSSGPPPFFPLKPKNPPPLFGEPRGPQPLKLAGGKKGKKIPGKAPRGPRRWKPKKERGGGGGPQPVGXPPPGKNGEIGGIXPVGKKKKTPRGP

SEQ ID NO: 206394 - protein, 59 aa, Glycine max
  Clone ID: PAT_MRT3847_283C.1.pep
DAYVMQRQHDRKGQLRQLKNMSLDELHRGANGVYDASFPCMGLRSRHRSELRHWCLVTM

SEQ ID NO: 206395 - protein, 64 aa, Glycine max
  Clone ID: PAT_MRT3847_28400C.1.pep
SHSNRAPALVSNVGPLPVAPEVRSHRGGKHHVRVQSRGIRPNRVVSAIHHRSVSLESSQIPCLH

SEQ ID NO: 206396 - protein, 84 aa, Glycine max
  Clone ID: PAT_MRT3847_28401C.1.pep
PTRPTAARRRQKGTTLRPYVMASDLLSLPYCLSTTQIPPRSHIRHRISTLSNDKFLNRSLQQLNCAESKQDIQLTQNGNRCSSN

SEQ ID NO: 206397 - protein, 257 aa, Glycine max
  unsure (1)..(257): unsure at all Xaa locations
  Clone ID: PAT_MRT3847_28402C.1.pep
VKTRKKSKKLSTGAIVAIVVGSVLGLALLLLLLLLCLRRRRRQPAKPPKAVVEEHSVPAEAGTSSSKDDITGGSAEVERNKLVFFEGGIYSFDLEDLLRASAEVLGKGSVGTSYKAVLEEGTTVVVKRLKDVVVTKKEFETQMEVLGKIKHENVVPLRAFYFSKDEKLLVYDYMSAGSLSALLHGSRGSGRTPLDWDSRMKIALGAARGLTCXHVAGKVVHGNIKSXNILLRGPDHNAGVSDFGLNPLFGNGAPSNR

SEQ ID NO: 206398 - protein, 106 aa, Glycine max
  Clone ID: PAT_MRT3847_28403C.1.pep
VYNPNACCAAFCFSYYGFLCLTPKYQIGSKGVRDWVLSQLLSKSLVSPSPLSASNSLYAGEHQNGDVTEQGSYHSSSPASSLIPFDSSISPYRDQINQVTPLLHLV

SEQ ID NO: 206399 - protein, 116 aa, Glycine max
  Clone ID: PAT_MRT3847_28404C.1.pep
ILWILFFKIHTARTKRTARKCTRGKASLKQLATKGERKSVPTTVGVKNPHRYQTGTAALSEIKKYQKSTELLIHKLPLQRMNREIAHDFKTDMLFQSHPTLAFQEADEAYLIRLFD

SEQ ID NO: 206400 - protein, 43 aa, Glycine max
  Clone ID: PAT_MRT3847_28405C.1.pep
YWDQLRTVSGPDINPVRARMTECYYMCGRDFCEDDREFRQTEP

SEQ ID NO: 206401 - protein, 92 aa, Glycine max
  Clone ID: PAT_MRT3847_28406C.1.pep
IRGQEKDTQNVIQFYFFSTLVCDVFLSLSYDLKSTVQVFLIVLINGLIFLFPKHWFLSHMLGVVLSGFRFEYNFLISKGDICPPWLTLACLH

SEQ ID NO: 206402 - protein, 76 aa, Glycine max
  Clone ID: PAT_MRT3847_28407C.1.pep
ALDALLINEYSCLVSRCLIWYQENEQCMVTGGDVLQKRGLKESERWTNVYFLLGFFLLYRVLCFLVLARRVSRSKT

SEQ ID NO: 206403 - protein, 52 aa, Glycine max
  Clone ID: PAT_MRT3847_28408C.1.pep
NFPFFPTSQKPHSASDFPKRNFFSTSFNSIILHRKGPLGTMFHKARNKRGDF

SEQ ID NO: 206404 - protein, 39 aa, Glycine max
  Clone ID: PAT_MRT3847_28409C.1.pep
PRPVGSTPASFVSSLSAMAEPPPASSSIRVAWRSATYAL

SEQ ID NO: 206405 - protein, 87 aa, Glycine max
  Clone ID: PAT_MRT3847_2840C.1.pep
TFLPPYFLKMWNWNSPMNTDLISFGFRIGPNKKTNNSNSYMNIFASLFLENVELEFPEEFRSHFLWLQNGPIRKPIISIYFLTIFAS

SEQ ID NO: 206406 - protein, 371 aa, Glycine max
  unsure (1)..(371): unsure at all Xaa locations
  Clone ID: PAT_MRT3847_28410C.1.pep
MATPVEPPNGIRTEGKHYYSMWQTLFEFDSKYVPIKPIGRGAYGIVCSSVNRETNEKVSVKKEQNDFVDIIKIQNAFENRVDALRTLREXKLLRHLHHENVIALXDIMMPXVHKNRDTDLHQIIKSSQALSNDHCQYFLFQLLRGLKYLHSANILHRDLKPGNLLINANCDLKICDFGLARTNCSKNQFMTEYVVTRWYRAPELLLCCDNYGTSIDVWSVGCIFAELLGRKPIFPGSECLNQLKLIINILGSQREEDIEFIDNPKAKKYIKSLPYSPGTPLSQLYPNAHPLAIDLLAKMLVFDPTKRISVTQALQHPYMAPLYDPNCDPPAVIPIDLDIDEDLGEEMIRDMMWKEMLHYHPESAMESAGLC

SEQ ID NO: 206407 - protein, 366 aa, Glycine max
  Clone ID: PAT_MRT3847_28412C.1.pep
MQRGWSFYKDFLPVVVIIGNEFNDMGTLTLFKAATLQGMNNHVFLAYAYALATIILIPITFFSRRSRVVPVPPLSFSIVSKIVLLGVIGSSSQVLGYAGISYSSPALASSIGNLVPAFTFILAVICRMEKLAAKSRSSQAKVIGSIISIAGAFVLTFYKGPSIINALTHLPLLLQQPINFLKSEDESWAIAGILLIADYFLASVWYIVQVDILKVFPDELTTVFFYNVTATILSTTVGFFAVPNASAWKIGLDISLISIVCSGIFGKLMSNVVYAWALYLKGPVYVTSFKPLQIVIAVAMGVMFLDDSLYIGSVVGATIVSIGLYAVLWGKAKEEIEEDVGSQESPTIENVPLLQSHRTETSEKNV

SEQ ID NO: 206408 - protein, 62 aa, Glycine max
  Clone ID: PAT_MRT3847_28413C.1.pep
YPFKWATWYKIQYIKWTSLKFCTIRQSGSNINLTKATMRCIFQKKNILTVKSFMSSKQVGPN

SEQ ID NO: 206409 - protein, 57 aa, Glycine max
  Clone ID: PAT_MRT3847_28414C.1.pep
SAGPGIFFLFFQRGPFFWGPFWFFLPPFKKKKKKKKKKKKKKKKKKKKKKKKKKKKK

SEQ ID NO: 206410 - protein, 186 aa, Glycine max
  unsure (1)..(186): unsure at all Xaa locations
  Clone ID: PAT_MRT3847_28415C.1.pep
VVQLHIEKKVCSEVNEWMVEIRSSGKNIGETAIGHAVTVRQRDKEMLEQQRKAEEQSISGLGDLAYTLEAEELEEDSVLQFDLTPLYRACHIHDLQGIQEKFREYYYTTXLLQLNSDLEITSAQPFVESYQTFFAQIAGFFIVEDRVLRTTGGLLVADQVETMWETAVAKMSSLLEEQFSCMESAP

SEQ ID NO: 206411 - protein, 45 aa, Glycine max
  Clone ID: PAT_MRT3847_28416C.1.pep
QNLATSVAGDIIGARTELADATSTPLEPYREVRGLHMFRECELIH

SEQ ID NO: 206412 - protein, 76 aa, Glycine max
  Clone ID: PAT_MRT3847_28417C.1.pep
PRVRLYYILLFSIVSPNLISNCVRIFRKINIEGKMNSTSCINCMYHNRVSLGLWKGYMRRSLIYFIQIDAHNSFVI

SEQ ID NO: 206413 - protein, 40 aa, Glycine max
  Clone ID: PAT_MRT3847_28418C.1.pep
YFYRDLIMALSFNFIAIYLMCTLSQSRDNYENLALSEIIT

SEQ ID NO: 206414 - protein, 74 aa, Glycine max
  Clone ID: PAT_MRT3847_28419C.1.pep
IAKAYGFKERKFIEEISCAMTHETYSSLNIGIQHLLDLILTYQTFIGKPPCFTFSSSTLLSCCITLFCGSILFG

SEQ ID NO: 206415 - protein, 221 aa, Glycine max
  Clone ID: PAT_MRT3847_2841C.1.pep
KCGIGIPFLWLQDRPNKKTNNSNSYMNIFASLFLENVELESPEEFRSHFLWLQDRPNKKTNNSNSYMNIFASLFLENVELEFPEEFRSHFLWLQDRPNKKTNNSNSYMNIFASLFLENVELEFPEEFRSHFLWLQDRPNKKTNNSNSYMNIFASLFLENVELEFPEEFRSHFLWLQDRPNKKTNNSNSYMNIFASLFLENVELEFPEGFLSHLPWLLDRPN

SEQ ID NO: 206416 - protein, 78 aa, Glycine max
  Clone ID: PAT_MRT3847_28420C.1.pep
LHSIYLLFFFLSFSFYFILIYLFFFLNFVCLTFSFFSIFFWALFSLDHLLLKTEANFKHHHINVNIDMFKSYGSYLSW

SEQ ID NO: 206417 - protein, 138 aa, Glycine max
  unsure (1)..(138): unsure at all Xaa locations
  Clone ID: PAT_MRT3847_28421C.1.pep
GPKPPKRKKGSPRGAGGGDRGPPGWRKRHEARPVSVRRPGAQGXXXXMSDPXXIKDSKRAXTRGGGGXAXIXHXXEAQXLEAXGIDYGXESEXXTXXGDAHHSSQHNXRXPXGGGXRXLXEALXXXXEGAXXXXPARP

SEQ ID NO: 206418 - protein, 52 aa, Glycine max
  unsure (1)..(52): unsure at all Xaa locations
  Clone ID: PAT_MRT3847_28422C.1.pep
LDQINEPKRPSDKPLRLPXQDVXKIGGIGTVPVGRVETGVVKPVCGDLVHGC

SEQ ID NO: 206419 - protein, 175 aa, Glycine max
  Clone ID: PAT_MRT3847_28423C.1.pep
MDSPYTRIVFEKIQKFEPEHARKIIGYLFFQGHGEQEMAKLASCPDYFICEVVVQAKKELQRLAAKPDMLPISRTVNPQQGLSDLSVISPRTPTSPNFQMPPPYWDPQSAANINPDFMGNELLGFYCRTSEADTDAHFGESNRCCKNWDWENRQRSLWLRCFCCQFWWKSLEKDF

SEQ ID NO: 206420 - protein, 69 aa, Glycine max
  Clone ID: PAT_MRT3847_28424C.1.pep
MNKASNFIDCSALPWVGIPHAKYIHHFVDRMKTIVRIHSDCDILNYWRRGPLLPCWVFQKRVYDCLLEK

SEQ ID NO: 206421 - protein, 133 aa, Glycine max
  unsure (1)..(133): unsure at all Xaa locations
  Clone ID: PAT_MRT3847_28425C.1.pep
EVLTILSQLTSDDKSKENHHEAVTRHRLVDNDRFNDENVAWQXRSEVMGYMHSKDDTFQEACSFTDQVMILNHPGQIANGYAHGLHCHTSHIVVMEAALMTKIDRRSGNELEKEPRLLKNGDASYVKRIPTKP

SEQ ID NO: 206422 - protein, 61 aa, Glycine max
  Clone ID: PAT_MRT3847_28426C.1.pep
LLALQRLECWLRRLFMHGKPSFPLQRLMIALSFASSFIQTQTQTHLDSNLNKTTNSLSSLI

SEQ ID NO: 206423 - protein, 143 aa, Glycine max
  Clone ID: PAT_MRT3847_28427C.1.pep
LSAEPTADSWQSRLTILQDDIRRLNHLLFNVLALEEVAFLPAIELAFSEEAFHRYVMPRIFRATRPKRVMVPWIVERTRVWGGTKVAKVYKHDVSFTARFLYDHVWYPYFETNVASAMKHLDNGLEDTTAKGLEDSRFGCAVM

SEQ ID NO: 206424 - protein, 80 aa, Glycine max
  unsure (1)..(80): unsure at all Xaa locations
  Clone ID: PAT_MRT3847_28428C.1.pep
SFICLIXAKDVXQVTEXGEYSAKDYXDPPPAPLIDPDELTKWXLXRAAIAEFIATLXXXYITVLTXIGYKRQSDTKIPGN

SEQ ID NO: 206425 - protein, 70 aa, Glycine max
  Clone ID: PAT_MRT3847_28429C.1.pep
KLFFFSSFLLYHRPVQANSCCHTLTYLLLSTPSDAPPLIITITILLTTTQPMMMQTQLNFNHQWHHQLIP

SEQ ID NO: 206426 - protein, 243 aa, Glycine max
  Clone ID: PAT_MRT3847_2842C.1.pep
LRGRTRGLGINKRGVHFFRPVPKEYMHSAELRDIMQFGSSNTAVFFKMRVAGVLHIFQFETKQGEEICVALQTHINDVMLRRYSKARSAVGESLNEDTSNDFKPSNLELSEKRLQELSKLVEESQTNADQLLDNLREKQKQEEDMLQELEGLQRSLTAGKQSLAEVTNDRDKLRSLCDEKDKALQAEILEKRSMEAKMAELSNLVTKNTTKKDCTQTNNQVSQKLEDDLKLCKGELRVTEELS

SEQ ID NO: 206427 - protein, 81 aa, Glycine max
  Clone ID: PAT_MRT3847_28430C.1.pep
QICFHNILEKAITSYCDITGKSGECAFICRNFLELQIVWNSISSSALKFLSGERNNSNHALVCYKKATLISPEIMELPCQH

SEQ ID NO: 206428 - protein, 163 aa, Glycine max
  Clone ID: PAT_MRT3847_28431C.1.pep
MSRPTVTVVSAKGEATKDTVPVPNVFKAPIRPDIVHAVHTGMNKNRRQPYAVSEKAGHQTSAESWGTGRAVARIPRVSGGGTHRAGQAAFGNMCRSGRMFAPTKVWRKWHQKINLNQKRFATASALAASGSPALLLARGHAISTVPEVPLVISSTAFADAAIK

SEQ ID NO: 206429 - protein, 91 aa, Glycine max
  unsure (1)..(91): unsure at all Xaa locations
  Clone ID: PAT_MRT3847_28432C.1.pep
NICGAVFPNSDKIRKMEFIFIHIPITSVPKVFDSPLSIIIRGKDTVYPIKXHIHVAAPFGAIKLPISNEGGSSRLKKNKEDRVYYDDFDDD

SEQ ID NO: 206430 - protein, 75 aa, Glycine max
  Clone ID: PAT_MRT3847_28433C.1.pep
EKNIPILSLDIKMLQQHVLPFIPHLLIIHNQFTRKSQVLLVAKSLKLKHTSLSIVFVVFLRAACGGGVLGPELSM

SEQ ID NO: 206431 - protein, 49 aa, Glycine max
  Clone ID: PAT_MRT3847_28434C.1.pep
NKYSFSKCIVFFPSLPFLFNYVYVIGAHHPINSALYGPCYEQTHALLAF

SEQ ID NO: 206432 - protein, 87 aa, Glycine max
  Clone ID: PAT_MRT3847_28435C.1.pep
SSRSRAAALFFFFFYSSHLVVRDLLFFSYFYSFHFQRGRLALFFLHCYPSFSAPRFLQGLHWGKEPGGVPPITSFPPLKKVLVVQLR

SEQ ID NO: 206433 - protein, 90 aa, Glycine max
  Clone ID: PAT_MRT3847_28436C.1.pep
SESPIVCGLAAKGSVIDYDNILVVVICASNNVLSQQNIQIPSVRLHRSIMKIPKDCASHGHSGSSRIRLRLRTGITAHCSTRSQYTHVRT

SEQ ID NO: 206434 - protein, 54 aa, Glycine max
  Clone ID: PAT_MRT3847_28437C.1.pep
LYTDITSIFGLNGDDTKGILKTHSMLHLYLILKANDFTPTEHTYVYQHIVLSIT

SEQ ID NO: 206435 - protein, 66 aa, Glycine max
  Clone ID: PAT_MRT3847_28438C.1.pep
VACRIVVKHHNDESLPIRIRKQAMIVRRQKTSKSCIELIRAPLGYLRFRILLAAALATAMRILIAS

SEQ ID NO: 206436 - protein, 337 aa, Glycine max
  unsure (1)..(337): unsure at all Xaa locations
  Clone ID: PAT_MRT3847_28439C.1.pep
MDQDDDEAGTTNLSTSDADVAEKETTNNLNGVPKQNNAFEETTGFQVLPLKKEEPTYSDPDTEIVPVKLPKRSSTKDRHTKVEGRGRRIRIPATCAARIFQLTRELGHKSDGETVRWLLEHAEPAIIEATGTGTVPAIAVSVGGALKIPTTSSNSNEEAAAAAASSNKKRKRPSNSEFVDINININDAVSQSSGLAPVHVAHGLVPVWAVSNXSMVVPANAFWMTPNPPMGPANQQHQLWALSPSVFNVAARPISPLVTTNIPEAWPIMTACSNDSNSAVSTSTVGAKVATESSMAPSVSSSGTKSARTRLLRDFSLQIYDKQELQFLGRSGTHAQS

SEQ ID NO: 206437 - protein, 65 aa, Glycine max
  Clone ID: PAT_MRT3847_2843C.1.pep
QVRKVVSINYQHDERVRQCTSIGLDIEPKDFPARELCTTTQLIYLEHRMLHPICGYKKINKGGHR

SEQ ID NO: 206438 - protein, 58 aa, Glycine max
  unsure (1)..(58): unsure at all Xaa locations
  Clone ID: PAT_MRT3847_28440C.1.pep
KVKLVVFPTRAPKVKVGDFSLXKLGNAPQVQGPFLPIVREKPPFALVKVTNKKKAFKE

SEQ ID NO: 206439 - protein, 257 aa, Glycine max
  unsure (1)..(257): unsure at all Xaa locations
  Clone ID: PAT_MRT3847_28441C.1.pep
MLSWKVLLVSAAVLFAALGLRVSLPVAATNLPLLWSFFLLCFKPPYLFVVLNAIIISIVASSRFHHSSNPQSPEPTPPRVESMPAPTVPEPPLFQVKAVLEVEKKVIEEDVVALKRKDSTEIPSPEEKPLVSARFTHRKFLKSSSEGNNXLIIIILMREYALGFTWKAITEGRSMPLSRHMKKSDMWHNRNVTPQPQETFNDALSVSSGRLRKEPSLSQDELNRRVEAFIQKFNQEMRLQRQQSLEQYMQMINRGAA

SEQ ID NO: 206440 - protein, 50 aa, Glycine max
  Clone ID: PAT_MRT3847_28442C.1.pep
MFRFFKNGEFTYVWMSKKKKKKKKKKKKKKKKKKKKKRANHSKKPKITIR

SEQ ID NO: 206441 - protein, 98 aa, Glycine max
  unsure (1)..(98): unsure at all Xaa locations
  Clone ID: PAT_MRT3847_28443C.1.pep
ITTVAISTPISGQKNGSGRSFLSGLKLMVKNEISSSVLXRWASXLCAVAESYTSLWYPGRTPSPWLDGTLPVDLGFDYLGLGSYLNSLKXTVSAELVH

SEQ ID NO: 206442 - protein, 140 aa, Glycine max
  unsure (1)..(140): unsure at all Xaa locations
  Clone ID: PAT_MRT3847_28444C.1.pep
MIRNTNRSDRRVLTSPVVHPCDNIALSTLLPSLITLSNAISNFQHSSFPCNKRNARIAIRLTRLLQPFLHEIRDHHSGLADPATLSLSELHLTFQKLLFLLEDLTRKGAKXYMLMESDRVATQFRVISRSVATALDXFPF

SEQ ID NO: 206443 - protein, 131 aa, Glycine max
  unsure (1)..(131): unsure at all Xaa locations
  Clone ID: PAT_MRT3847_28445C.1.pep
FLCGGDAKLMPEWTHPLWACXPRMAICKKEVWRVKCSLPSGLPLTVICTSIYNEMLISYRCEKLLPPAKPPSMCLQSFTKFVSLRVTGDDHLICVHEYVKPYSSGSKXKSFLADRNTTHAGGIDTTGATVQ

SEQ ID NO: 206444 - protein, 108 aa, Glycine max
  Clone ID: PAT_MRT3847_28446C.1.pep
FFQSLAWQGFLPFLRGLGPPFLQFSMGFFSVVLMVRMLLCFFPFNPFPPRVFLGGHRKHGLFVLGFLAVLPLSPHVFGSARSSCFLNTIKKKPTSKQQNKKNKKKKYV

SEQ ID NO: 206445 - protein, 86 aa, Glycine max
  Clone ID: PAT_MRT3847_28447C.1.pep
LFLKMLKYNEQQCDQGTAIKKLHHRKEKENVCHLICTSTLYSTLTEMSQRLFCEMNETWFHPNITFDFNICAAKILIIEPIFTLLL

SEQ ID NO: 206446 - protein, 85 aa, Glycine max
  Clone ID: PAT_MRT3847_28448C.1.pep
LEPSNFAYFNSSFNRVVGMYVFILRNRTCFNVFSFRVFIKCLGSSTRFFLHKNKEREYNRHIFTKKKLLVMTHNITFLNIPFSVL

SEQ ID NO: 206447 - protein, 29 aa, Glycine max
  Clone ID: PAT_MRT3847_28449C.1.pep
ICEINVFHFSFLTRNHMYVWNEIHHFSPP

SEQ ID NO: 206448 - protein, 56 aa, Glycine max
  Clone ID: PAT_MRT3847_2844C.1.pep
PPLKRRCFTPKPRYSRAFPATVPKRSDFHTVYHLRFFFNPEIGRFVNQFSSARNNL

SEQ ID NO: 206449 - protein, 44 aa, Glycine max
  unsure (1)..(44): unsure at all Xaa locations
  Clone ID: PAT_MRT3847_28450C.1.pep
SRVDSARAVCVXDVRIWRAYTLDEKLLMHFFQESLTGGSCHLVH

SEQ ID NO: 206450 - protein, 133 aa, Glycine max
  unsure (1)..(133): unsure at all Xaa locations
  Clone ID: PAT_MRT3847_28451C.1.pep
PPKTPFFEPLHFFSRGLFKVFQLKLNGPGIFTFPQKFFPWENLFLNGPFFKFFWGGFLTPPVFLKYFFSWVFQGGNFFFFFFLSFPLFLLLRGLAFFLKKXKKKKKXXKXXKXKXXNTQKXXKXXKXKXXKXK

SEQ ID NO: 206451 - protein, 46 aa, Glycine max
  Clone ID: PAT_MRT3847_28452C.1.pep
VVLVLCGGLYVSNIPIETLMYSQSTCFVTHFLIYFGGHRCNMFILK

SEQ ID NO: 206452 - protein, 84 aa, Glycine max
  Clone ID: PAT_MRT3847_28453C.1.pep
VPFLFLTKLFLLSPINLRLIPYHHSKSKKRETNPSRQGNRTNFINSQRLPVIEPAVGKKPLDKLFKPGLQNGHELVPHLFPGPY

SEQ ID NO: 206453 - protein, 54 aa, Glycine max
  Clone ID: PAT_MRT3847_28454C.1.pep
RDLFSYSYQDVSYYLKNFVFGKRTIVLLHINEVLLMKFEDFNKKQTILFASYAN

SEQ ID NO: 206454 - protein, 57 aa, Glycine max
  Clone ID: PAT_MRT3847_28455C.1.pep
NNTLHHVLALTFCVSTCNGYFSSTTLGIWRSIRPQFLLELQLHLQRRILICVGKCMD

SEQ ID NO: 206455 - protein, 56 aa, Glycine max
  unsure (1)..(56): unsure at all Xaa locations
  Clone ID: PAT_MRT3847_28456C.1.pep
VSGVLMMQVLLDLEDIDAGRPLRSKTMIXFTEALGGGVSLXPHKSWRSWCVLRWVC

SEQ ID NO: 206456 - protein, 71 aa, Glycine max
  Clone ID: PAT_MRT3847_28457C.1.pep
YAIGVYLLLVILIEYGLSSCATEDMLSGWGEDTGERDFNFHFVILQFTNFIVCTSPISIHVKELKLILKFI

SEQ ID NO: 206457 - protein, 99 aa, Glycine max
  unsure (1)..(99): unsure at all Xaa locations
  Clone ID: PAT_MRT3847_28458C.1.pep
MHLAVLDFSTSTGARGLPAIVVVAVAALDLTGSSSWWTDINCTPLRHDRSFDHLXILYRIVAAVALVQLVRVQWRVSEYCWIMHDVIHLLTFIENAVRC

SEQ ID NO: 206458 - protein, 51 aa, Glycine max
  Clone ID: PAT_MRT3847_28459C.1.pep
FLVGVKVGMLCKAPDPLDRPTKPNIVFMLEGCKIGLYIPSSQDPNFKPSWE

SEQ ID NO: 206459 - protein, 67 aa, Glycine max
  unsure (1)..(67): unsure at all Xaa locations
  Clone ID: PAT_MRT3847_2845C.1.pep
PPVGWVPLPGFWQKKKCWLNXXLFHPPGKKKISAGPYGVGGTGSPIKERVNFWAPALGSKNFPHFLV

SEQ ID NO: 206460 - protein, 85 aa, Glycine max
  Clone ID: PAT_MRT3847_28460C.1.pep
MVSYMGIDTFDDHVTSAAAPATLYKAVVTDAHNVIANALDALNSDENGEANGGPGTTINIAFDDDGETHFSTAKIEADDEANLRY

SEQ ID NO: 206461 - protein, 89 aa, Glycine max
  unsure (1)..(89): unsure at all Xaa locations
  Clone ID: PAT_MRT3847_28461C.1.pep
PLLRVLSLMFILLPRIGMLSTPSTTPLTGVSTPTRADIRTTIYYIYDPNVTSTXTQWVTQTTIQFIFPRLSCATAPSTMXRTCFVFCHM

SEQ ID NO: 206462 - protein, 45 aa, Glycine max
  Clone ID: PAT_MRT3847_28462C.1.pep
FSFQAATYDSSFKSYMNNQYMKLIFRIIKPGMTFNNSINPPTMLW

SEQ ID NO: 206463 - protein, 70 aa, Glycine max
  Clone ID: PAT_MRT3847_28463C.1.pep
VSLSLSQTRPSAWAAAGAVAAALRVRRRRRIGTREDRRAGCRCGHIRTWPCSPLLVAEIMVRRILRYYLP

SEQ ID NO: 206464 - protein, 47 aa, Glycine max
  Clone ID: PAT_MRT3847_28464C.1.pep
RQGGIRHQSYIDTRSGVRSHSVFSPVLRMHLAHQQLCRHMFIFGNLS

SEQ ID NO: 206465 - protein, 64 aa, Glycine max
  Clone ID: PAT_MRT3847_28465C.1.pep
VYGLSINPLGECSELRRSQYTCKRLMIRIYACGSNEPKIQVSLSSPMPTRDVFFSLKRRPPRKE

SEQ ID NO: 206466 - protein, 50 aa, Glycine max
  Clone ID: PAT_MRT3847_28466C.1.pep
TGVDPKDIKLVITQGGVATPKAVKALKAPGGDNVPAITELIIELASSSEF

SEQ ID NO: 206467 - protein, 399 aa, Glycine max
  Clone ID: PAT_MRT3847_28467C.1.pep
MAFGNYKQKQQQEEEEQEHRMEEDEDESEEEEEQFWDDWEGEDEEGEQRDSEFVCLFCESRYSSCGSLFDHCASLHRFDFHAIRTTLSLDFYASFKLINFIRSLVAENRCWSCGLTCQSNRDLQNHLHDLVDFNEIKTLWNDDRYLIPFMEDDSLLYSFGDCDEEGEDEQITPIDEDLIKDLMNIEESIHDDQDVVNKMVVDDDKHEIASVSNDHLNKASSSKELINGKDLCCDKDPEGHLMVNSQNHIAKHIKKINESYFGSYSSFGIHREMLSDKVRMDAYGQAILKNPSLLNSAVVMDVGCGTGILSLFSAKAGASRVIAVEASAKMAAVASQIAKDNGLLLSKSQNGVDGFQKGVIEVVHGMVEEIDKTVEVQPHSVDVLLSDWMGYCLLYESML

SEQ ID NO: 206468 - protein, 50 aa, Glycine max
  Clone ID: PAT_MRT3847_28468C.1.pep
CKTYMAAPLDDAQLNEKPTSSGLVAEGFCHCVLALRCVARWILRCLKLPS

SEQ ID NO: 206469 - protein, 227 aa, Glycine max
  unsure (1)..(227): unsure at all Xaa locations
  Clone ID: PAT_MRT3847_28469C.1.pep
MEEDDDESEEEEEEEEEEEEEEEEEEVWDDWEGEDEGERESEFVCLFCDSRYSSCGSLFDHCASLHRFDFHTIRTTLSLDFYASFKLINFIRSRVAENICWSCGLTCQSNCDLQNHLHDVVDFNEIKTLWNDDRYLIPFMQDDSLLYSFGDCDEDGEDEHITRIDEDLIKDLMNIEESIHDDQDLVKKVVVDDDKHEIDSVSNNHLNRASSSKKLINGKDSXGHVVQ

SEQ ID NO: 206470 - protein, 56 aa, Glycine max
  Clone ID: PAT_MRT3847_2846C.1.pep
QYSLYIHLNDGMLLSSLNQITCYNKRTYPPHGYYSMPCLVIMINNPFSSLHDTNTR

SEQ ID NO: 206471 - protein, 49 aa, Glycine max
  Clone ID: PAT_MRT3847_28470C.1.pep
RRALSVRLCNLIARVSLGHCTGLCASEPCPIVLNIFLHLPGLGPDSKNQ

SEQ ID NO: 206472 - protein, 32 aa, Glycine max
  Clone ID: PAT_MRT3847_28471C.1.pep
WHSANLRNITSKVMKGDSNGQIAISLMYLQCH

SEQ ID NO: 206473 - protein, 88 aa, Glycine max
  unsure (1)..(88): unsure at all Xaa locations
  Clone ID: PAT_MRT3847_28472C.1.pep
VRFSAGAFCFPGGPVVSGGVCGGCLWPPGPGFFRLGPFXRPLRFGGRXGVXVGGALWXSPPXSLPRLGGGSPYPAFPRLALXVGREPE

SEQ ID NO: 206474 - protein, 347 aa, Glycine max
  Clone ID: PAT_MRT3847_28473C.1.pep
NAPALEKLEALNQRQKMVLQRKTEEATMATKRLKELLEARKSSPRDNSVYSNGHLQPALVNEKSLQRWLDQEMEVMVHVHEVHAEYGKQNQVQAALEEELALLKQDRFSDGQTIPKGKSKYLRLLSMSPDAKVERIASLENMLCMSSIALKAMASQLTETEEKERTLNNRGRWNQLRSMGDAKNVLQYLFNATAEARCKLWEKNMELQDLKEQLNELVALLQQSEAQREELVREQKIKEQAVAIRLNTPALENSRSLKHLADEMSGPLSPMSLPAPKQLKFTPGVVNWSGRESATFLDEARKMIPIGELSTKRLAAIGQAGKLWKWKRSHHQWLLQFKWKWQKPWKL

SEQ ID NO: 206475 - protein, 139 aa, Glycine max
  unsure (1)..(139): unsure at all Xaa locations
  Clone ID: PAT_MRT3847_28474C.1.pep
FHSRRDSCSSDAKHYHAWSYIQRAMQTLXGWEDKLYDGTYLLKGHIFNICAWNHRYMAITWCAFLVGRKARRETDELYTIEAIIVYPENESWLRYLHGLYXGETTSWVNDPQDGLACXLTVRTNSYYKSALSTIIDHIC

SEQ ID NO: 206476 - protein, 68 aa, Glycine max
  unsure (1)..(68): unsure at all Xaa locations
  Clone ID: PAT_MRT3847_28475C.1.pep
MSGPLSPMSLPAPKQLKFTPGVVNWSGRESATFLDEARKVXLSTKRLAAIGQAGKLWKWKKSHHQWLL

SEQ ID NO: 206477 - protein, 71 aa, Glycine max
  unsure (1)..(71): unsure at all Xaa locations
  Clone ID: PAT_MRT3847_28476C.1.pep
NLXRXIIXFNTXXXGFRXXXXIXXGMGVFGPXXCLKXSCPXMAXXXQTXAVNXAVXXITKQRSAILAINXC

SEQ ID NO: 206478 - protein, 190 aa, Glycine max
  Clone ID: PAT_MRT3847_28477C.1.pep
MALSARRKIVKEKGQVPDAFEDQVATYLYDLEQSSSDLKSELRHLQISSAKEIDVGNRKAVILVVPFRLLNNFHRVQPRLVHELEKKLSGKQVVVVAQRRILQKVGRNNRVKQQKRPVSRTLTAVHDAILEDTVFPCEIVGKRLRFKLDGSKLIKVYLDKKDQQTYEDKLETFATVYKKLTGKSAVFTFP

SEQ ID NO: 206479 - protein, 504 aa, Glycine max
  Clone ID: PAT_MRT3847_28478C.1.pep
SSPSMKRNISPSAVPQLHGNTRALPMRVAAMCKVLVPTIFDKQGARLLAVVFLVVSRTWVSDRIASLNGTTVKLVLEPDKASFIRLIGISVIQSAASSFIAPSIRHLTARLALGGRIRLTQHLLKNYLRNNAFYKVFHMASKNVDADQRITHDLEKLTTDLSGLVTGMVKPSVDILWFTWRMKLLTGRRGVAILYAYMLLGLGFLRTVTPDFGDLISQEQQLEGTFRFMHERLCTHAESVAFFGGGAREKAMVESRFRELLLHSKYLLKKKWLFGILDDFITKQLPHNVTWGLSLIYAMEHKGDRASVTTQGELAHALRFLASVVSQSFLAFGDILELHRKFVELSGGINRIFELEELLDAAQSENFTSVSAIPPVRDVHSSDVISFSKVDIVTPSQKMLARELIFDIKHGGSLLVTGPTRPGKSSIFRVLRGLWPIASGRLSRPSEVVDEEDGSGCGIFYVPQRPYTCLGTLRDQIIYPLSCEEAEVKVLKMYGKGKYLGWEK

SEQ ID NO: 206480 - protein, 61 aa, Glycine max
  Clone ID: PAT_MRT3847_28479C.1.pep
TLFIYHFISFIPLLNTLPNFSYPNKSSFTSFFPSPHFHLTHNFITITKLYLFIKYYILIFF

SEQ ID NO: 206481 - protein, 96 aa, Glycine max
  Clone ID: PAT_MRT3847_2847C.1.pep
KKIISNSAKLRRGFVFTLPNWTTMSVCLAYGQGWHIVKQRKGFSHLNILSKYESLQRTFIYFSLLKHGLCKTLQSFPPLTLLLLMGKLFYHSLCIA

SEQ ID NO: 206482 - protein, 174 aa, Glycine max
  unsure (1)..(174): unsure at all Xaa locations
  Clone ID: PAT_MRT3847_28480C.1.pep
NMKDPERNRLCKTIDCQKLSQEACXSHAAQNERLPVQMVVQVLYFEQMRLRNAMNGGHNQLFFGQFPHRSGSGAGSGAISPRDNYASVRRENRELKLEVARMRMRLTDLEKDHVSMKQELVKSHPANKLFKSFTRKLSKLNSLFRINSIKPLIGGKASSETRFPFPKRRRHSVS

SEQ ID NO: 206483 - protein, 113 aa, Glycine max
  unsure (1)..(113): unsure at all Xaa locations
  Clone ID: PAT_MRT3847_28481C.1.pep
VIQMGIKPSRPEHQLISSLFELIGSIASSLSAFGVGSICNKKVFKAALVGTDGSVFTKCPHFKARGALGTQXILSWEGGRDGKALAKGPDPIXILSCQDGSGVGSALISAFTI

SEQ ID NO: 206484 - protein, 89 aa, Glycine max
  Clone ID: PAT_MRT3847_28482C.1.pep
HLMIKKKFAVRRRIHTHNPCMVIIIPYTHATWNQPPMSAYSVRTTTYFKNRYSSTAHSFRSESQTNRANPTTTTFQHPTNYKDSKMNYY

SEQ ID NO: 206485 - protein, 53 aa, Glycine max
  Clone ID: PAT_MRT3847_28483C.1.pep
HNRASRSDQANSDRLLAARSSCKRTVRKNLSVALGKRQHPHILMIMRLFTPLG

SEQ ID NO: 206486 - protein, 83 aa, Glycine max
  unsure (1)..(83): unsure at all Xaa locations
  Clone ID: PAT_MRT3847_28484C.1.pep
NLRAPNSIFERKTVQQGHIYLDENKSLILKIVESQNSGKLSECAEVIYSRLQXNLMSLAAIADSQPQPPTMSGQYPSKWMMQQ

SEQ ID NO: 206487 - protein, 173 aa, Glycine max
  Clone ID: PAT_MRT3847_28485C.1.pep
ITREADNIQWIVDILIGKKMSDEFVKIWAEQKELATLHSKISTVYRHEISRITAQLCIGIGRGHILVPKEIRFSLLSTWLEALYEDFGWMRRASRAVDRKLIEDGLSQTILTLPLLQQQSVLLNWFDRFLNKGDDCPNIQKAFEIWWRRAFIKQYSAEPENSQLQITLSDYPS

SEQ ID NO: 206488 - protein, 160 aa, Glycine max
  Clone ID: PAT_MRT3847_28486C.1.pep
ELVNLLKDDNDTIQEGVLNVLAKAGGTIREQLAVTSSSVDLILERLCLEGSRRQAKYAVHALAAITKDDGLKSLSVLYKKLVDMLEDKTHLPAVLQSLGCIAQTAMPVYETRENEIEEFILNKILKSDSKEDNMKTFWDDKSGLCMVKIYGIKTFVKSYL

SEQ ID NO: 206489 - protein, 60 aa, Glycine max
  Clone ID: PAT_MRT3847_28487C.1.pep
GTFFFLEQTHRDGFLIVGGGEANTLCVHSRLSKLEASSALFNSFAVLLSSSSATSHNRNF

SEQ ID NO: 206490 - protein, 141 aa, Glycine max
  Clone ID: PAT_MRT3847_28488C.1.pep
WGSKQDLPFGSIPFSTMGPSTSGVGQMMHYQAPESLQNVKPSNKWDVYSFGVVLLELLTGRVFSDRELDQWHEPGSEEEEKNRVLRIADVAIKSEIEGRENVVLAWFKLGISCVSHVPQKRSSIKEALQILDKIPVAAPVH

SEQ ID NO: 206491 - protein, 358 aa, Glycine max
  Clone ID: PAT_MRT3847_28489C.1.pep
MQAMENIHQREILEEQRFELPPGFRFHPTDEELITHYLSQKVLDSCFCARAIGEADLNKCEPWDLPWMAKMGEKEWYFFCVRDRKYPTGQRTNRATGVGYWKATGKDREIYKAKALIGMKKTLVFYKGRAPSGEKTSWVMHEYRLEDEHSVHNPPKKAMNDWAICRIFQKSNGGKKMPISGLVRFSNFAKDMPSLMDSSPYNDSESKPVLGESSQPTCFSDPNQSEDQRTQDENIADSYETLMLASSYSSNPSDISPASWTFSKSAPTVSHQSLQVGNSHSSDYFMLHQEQSMLGMLIENHGASAGQRTQKAQDSKGSDADMSSVMYNNYEMFQRSFGNQEYSSPSVGHVYSSGLWGF

SEQ ID NO: 206492 - protein, 65 aa, Glycine max
  Clone ID: PAT_MRT3847_2848C.1.pep
SITLNLSLLFVPLLSTLSLSDLYAKHMDLSDCSFLMDAFLLTVYGPANKGSNSCSINTLIKSCQE

SEQ ID NO: 206493 - protein, 73 aa, Glycine max
  Clone ID: PAT_MRT3847_28490C.1.pep
YQSMGYPPAGYPPPGYPPNLGYTPPTYQVQGFPPAYAHQYAQTPPRQQNSSGPACLEGCVAALCCCCLLDACF

SEQ ID NO: 206494 - protein, 275 aa, Glycine max
  Clone ID: PAT_MRT3847_28491C.1.pep
KEQMTIRKKAFAIIEEVFERHGATALDTPVFELRETLMGKYGEDSKLIYDLADQGGELLSLRYDLTVPFARFVAMNGLVSFKRYQIAKVYRRDNPSKGRYREFYQCDFDIAGTPSLSEIMGPDFEVVRILTELLDELDIGEYEIKLNHRKLLDSMMQICGVPPEKFRTICSSIDKLDKQSFQQIRKEMVEEKGLTAETADRIETFVKEKGSPLALLSKFKQEGSDFSKHKGASEALKELEILFIALEKSKRIDKVVFDLSLARGLDYYTGGIFES

SEQ ID NO: 206495 - protein, 106 aa, Glycine max
  Clone ID: PAT_MRT3847_28492C.1.pep
AKGTTFTRDCFVQVVSQIIAHTEEVFFKKTIHNLRHVAYICGKELKDIPYFICPYKPQEFMAMMVRLNLSLLEDIRDDIDFCFKLAKEESVIILPSTIINYVALEI

SEQ ID NO: 206496 - protein, 53 aa, Glycine max
  Clone ID: PAT_MRT3847_28493C.1.pep
KLGIKSTKIVACLFVYYFSICDPIYWPRVLFNTYNVTFGRSPLTLSLRFKPKH

SEQ ID NO: 206497 - protein, 63 aa, Glycine max
  unsure (1)..(63): unsure at all Xaa locations
  Clone ID: PAT_MRT3847_28494C.1.pep
AHHHLSSALPNTPIVXKPSLNAIQLPMIIANLNPHSTXIFDDTSGHIQAGKHMALYTALACSY

SEQ ID NO: 206498 - protein, 75 aa, Glycine max
  Clone ID: PAT_MRT3847_28495C.1.pep
GVAKGHPLFLRYFGDTYKIKSLHGVAMLIFQGKGWGIFQSPQYVGKLNRGRGVDFWHLGYFGSQTPPPKKGRNKT

SEQ ID NO: 206499 - protein, 146 aa, Glycine max
  Clone ID: PAT_MRT3847_28496C.1.pep
WTCPECNFLNFARNRRCLKCKTAGPTKEANTNEVERKKGDWTCPQCGFMNYARNTKCLRCPETRPKKHPGDWNCPGCGFMNFASKMKCLHCQEPNPSSKKYSGDWSCPKCDFYNYARNMACLKCNAERPKEQPTVDYEDHEWRRSN

SEQ ID NO: 206500 - protein, 293 aa, Glycine max
  unsure (1)..(293): unsure at all Xaa locations
  Clone ID: PAT_MRT3847_28497C.1.pep
MVEQSVLVLEKQGPNPVLSEGIHDWVFECHGLLHNAVLIIASFLFVLYLALQAKKSFLRLSHGRSYIIISYYASLWLVSILKVLSWESEGLERSLPLDYAWNXLSLFMTSGMLFLEGSSTTGLEALTRTFGISGIIVGFDILLKEXGFDTLKAIYLFAFGIPIFINSGYPTPHVKWNLWVIHKLLLTLVYGFILFMYHSRWRERLPARPAYYKYVTIMFILNAIALFACGITGNGAAFGFWLYHFTVVCYHAAYLPLLYITFLADFFQEEDLHLENVYYSEMKDAGFFEADWN

SEQ ID NO: 206501 - protein, 173 aa, Glycine max
  Clone ID: PAT_MRT3847_28498C.1.pep
MVEQSVLVLEKQGPNPVLSEGIHDWVFECHGLLHNAVLIIASFLFVLYLALQAKKSFLRLSHGRSYIIISYYASLWLVSILNLLWCFSQVNLFFPPISLIQQKLKIADSLVLMSQFSVHVWMIRNIQNRVKILACVILIKCSHVWVQPEEWIDFELKKLTFLLDNKIYRSFAA

SEQ ID NO: 206502 - protein, 305 aa, Glycine max
  Clone ID: PAT_MRT3847_28499C.1.pep
MVEQSVLALEKQQGSNPVLSEGIHDWVFECHGFLHNAGLIIASFLFLLYLALQAKKSFLKLSHGRSYIIISYYASLWLVSILNLLWCFSQAWECSPGKEFAWNLLSLFTTSGMLFLEVSLLAFLLQGNSTTGLEALTRTFGISGIIVGFDILLKAIYLFAFGIPIFINSDYPTPHVKWNLWVAHELLLTLVYGFILFMYHSRWRERLPGYIVYLPLFAARPAYYKYVTIMFILNAIALFACGITGNGAAFGFWLYHFTVVCYHAAYLPLLYITFLADFFQEEDLHLENVYYSEMKDAGFFEADWN

SEQ ID NO: 206503 - protein, 43 aa, Glycine max
  unsure (1)..(43): unsure at all Xaa locations
  Clone ID: PAT_MRT3847_2849C.1.pep
PWSDNGDYYEIDVANVHXRKEEEKELKEFKAKAQQKGSFGRSG

SEQ ID NO: 206504 - protein, 60 aa, Glycine max
  Clone ID: PAT_MRT3847_284C.1.pep
QKIYPDEWNNFLERVKSTEEDIKGSEFDELVEERRLWASYRGQTLTRTGYFSFTPPPPPP

SEQ ID NO: 206505 - protein, 148 aa, Glycine max
  Clone ID: PAT_MRT3847_28500C.1.pep
MTTRFKKNRKKRGHVSAGHGRIGKHRKHPGGRGNAGGMHHHRILFDKYHPGFFGKVGMRYFHKLRNKFYSPIVNIDKLWSLIPQDAKDKALKSKDTAPLIDVTQHGYFKVLGKGVLPQNQPIVVKAKLISKIAEKKIKEAGGAVLLTA

SEQ ID NO: 206506 - protein, 309 aa, Glycine max
  Clone ID: PAT_MRT3847_28501C.1.pep
MAATMNFYNETSQQVQSDPFRGELMEVLEPFMKTCPSSTPSILSSDSPSPSPLNFPSSSLLSPHPNFYTHTPPPSYLLQSQQSLIGFEQPPSSLLGLNHLSPSQISQIQAQIEAQQSQNQNPHSLNFLGPKPVPMKHVGGPPKPTKLYRGVRQRHWGKWVAEIRLPKNRTRLWLGTFDTAEEAALAYDKAAYRLRGDFARLNFPSLKGSCPGEEYKPVHSAVDAKLDAICANLAEMQKQGKTEKGARSAKKSKQGPNQEAKPEPQASAESEGSADSSPLSDLTFDVTEPQWEHFNLQKFPSYEIDWDSL

SEQ ID NO: 206507 - protein, 81 aa, Glycine max
  Clone ID: PAT_MRT3847_28502C.1.pep
KTFDSAWRINYVIPESKSYIATNKISLKNQPICSVIGDCSSCTAGYYYESFSFILSQFISVLCFVYISELGCLSSQFSSTS

SEQ ID NO: 206508 - protein, 45 aa, Glycine max
  Clone ID: PAT_MRT3847_28503C.1.pep
MEEKLKIGKLSFCAQHDAIAQRGNTRFVQRSHMEKPDISEGALNA

SEQ ID NO: 206509 - protein, 77 aa, Glycine max
  unsure (1)..(77): unsure at all Xaa locations
  Clone ID: PAT_MRT3847_28505C.1.pep
GHASPVHTEGCDTYVTVDAPDQPQPKRAFSVHTRLXLRCGRIYLHDGRPEQPDLTVHXSAILTLPRRQMIYPAQHYK

SEQ ID NO: 206510 - protein, 79 aa, Glycine max
  Clone ID: PAT_MRT3847_28506C.1.pep
CLLCCYFYQDRYQYPPLQKQPCSQGWTIKTSKNKDEFRKQKVRKSSGFVCALVWVLRMISHSQGTSAAMLHEPLVLERA

SEQ ID NO: 206511 - protein, 233 aa, Glycine max
  unsure (1)..(233): unsure at all Xaa locations
  Clone ID: PAT_MRT3847_28507C.1.pep
SDPAFGLYHLMELKALKPLLSIHHIVNEISPLNFXKIIDMPEDSSFFTYVSFRASVLVAVIETLQGYVNVYEGLSSFPEIFLPILKLLNEIAEQKNMSNALXDKIKDVAELIKLKVDKHHTLRRPLQMRKQKPVPIKLLNPKFEENYVKGRDYDPDRERAELRKLKKHLKREAKGAARELRKDNYFLLEVKEKERSLQEKDRAEKYGRAKAFLQEQEHAFKSGQLGKGRKRRR

SEQ ID NO: 206512 - protein, 79 aa, Glycine max
  Clone ID: PAT_MRT3847_28508C.1.pep
TENKKHAFTFRGSNSLKGACSIDQRVFTLETWCGYEYHRAGEALGPPDFKGPPGAPRTPPDGGGFSSRWTLPPGGPFPG

SEQ ID NO: 206513 - protein, 59 aa, Glycine max
  Clone ID: PAT_MRT3847_28509C.1.pep
LHAFQTIVANKGAKSFFKGAGANILRAVAGAGVLAGYDKAAVHFVWKRKFWIWAAGLKN

SEQ ID NO: 206514 - protein, 254 aa, Glycine max
  unsure (1)..(254): unsure at all Xaa locations
  Clone ID: PAT_MRT3847_2850C.1.pep
MAILAPRFSFSVIPRNHHKLKRPFSHKPFIQRKQLWHQLGLQSLVSPFSLPPTSSKLCATSRLSIEETEQQIGTLTRPEDLKGSLAYLFRTETGGGLVKVHVTRRNDRYSVYIEISSLDISGGVGEALLLCWGVYRSDSSCFVDLDTIGLSENAAMGMNVSPLVQNSDGKFAIELEFDAKHVPLYLSFFLMSSLDSGXEIRSHRRTNXCMPVGSLPGYPCPLGXSYSPDGSVNFSIFSRHAEXWVLCLYDENGV

SEQ ID NO: 206515 - protein, 49 aa, Glycine max
  Clone ID: PAT_MRT3847_28510C.1.pep
VARVSSNHSLLVVEHAHSERGQSDLWWVKTLIGCCARYTIQGSLSYYRK

SEQ ID NO: 206516 - protein, 178 aa, Glycine max
  Clone ID: PAT_MRT3847_28511C.1.pep
MHAYSSEFGSRRLAKKKADLYDEEQDQDVTLAQDLEDMWEQEFLQFRPGARETEADKKNDRTSLHRKLDRNLILLVREKLGDQDLWMLPQVEWQPGETLRGTAERILATLSENNMEAKFLGNAPCGHYKFKFPKAIRTESDLGVKVFFFKALLLTGDFVQTGKKGRHVWASKEELGDY

SEQ ID NO: 206517 - protein, 61 aa, Glycine max
  unsure (1)..(61): unsure at all Xaa locations
  Clone ID: PAT_MRT3847_28512C.1.pep
SVYQTRNWVFRSVPNSVDGLTKFNVTYNSICGQLVESXFPSSAFVGNECHCGYPLAPFREL

SEQ ID NO: 206518 - protein, 64 aa, Glycine max
  Clone ID: PAT_MRT3847_28513C.1.pep
GAEGPVKKFMMESLVKVPANTDPCTMPAPFDPPSLNAQLQRKESSIQQVDSWEKSYWENQTITS

SEQ ID NO: 206519 - protein, 75 aa, Glycine max
  Clone ID: PAT_MRT3847_28514C.1.pep
AVSSPTPLCLQIVMARQASIAAAWEAVLLSSNYARSVVHIITSRCGCMSVPCCTFLIKVVWCKMVDRPLFCSVRS

SEQ ID NO: 206520 - protein, 60 aa, Glycine max
  Clone ID: PAT_MRT3847_28515C.1.pep
TNIRCVHGRDRIVHRIPIRHRLSCKSSRIHGVYTRSSILIHQILSSVTLCLLSSLLSCSV

SEQ ID NO: 206521 - protein, 121 aa, Glycine max
  Clone ID: PAT_MRT3847_28516C.1.pep
EDPRERDCLLTILHRVYGKFMIHRPFIRKSVSNIIYRFVFETERHNGIAELLEIFGSVISGFALPLKEEHKIFLLRALVPLHKPKSVGIYHQQLTYCVVQFIDKDQRLASSVIKGLLKYWP

SEQ ID NO: 206522 - protein, 92 aa, Glycine max
  Clone ID: PAT_MRT3847_28517C.1.pep
PRVHSLVRLILRSPFSEDIGPGCSNNDIEHRVTSVPRHTLGSTRILHVYIGVCSAPGSSCYVPFQKLVRGHQSGKFTRFISDGLAIFIPVTM

SEQ ID NO: 206523 - protein, 75 aa, Glycine max
  Clone ID: PAT_MRT3847_28518C.1.pep
LAFKIMVPSKHITNFITNTNNRISVMGLLLSRNWPSKLIYPVLYINKVSKDDDPAPIWRTWWLWDMLDWRAFAAL

SEQ ID NO: 206524 - protein, 345 aa, Glycine max
  unsure (1)..(345): unsure at all Xaa locations
  Clone ID: PAT_MRT3847_28519C.1.pep
MDRGDQMTLPGSASYYMQRGIPGAGNQPVLHNSPNIGPLSNPNLPCQSSIGGGGTIGSTLPLESSGISAPCVNVSAPSGALPGETVKRKRGRPRKYGPDGAVSLALTPTPASHPGALAQGQKRGRGRPPGSGKKQQLASLGELMSGSAGMGFTPHIITIAVGEDIATKIMSFSQQGPRAICTFVSXIGSPRVYCDRFRVWLSHHGGTVTYEGRFEIVCLSGSYLVADSGGXANRTVALSVSLAXSPDGRVIGGGVGGVLIAASPVQVILGSFSWGASKTKIKKKEGSEGAEVAMETDHQTVHNPVAVNSISPNQNLTPTSSLSPWPASRPLDMRNSHIDIDLMRG

SEQ ID NO: 206525 - protein, 83 aa, Glycine max
  Clone ID: PAT_MRT3847_2851C.1.pep
EFLFRLNARVAMSICINMITLPFIAILRGVICSAAPLFCRSQFFFESCENRHPDTYGLRLAQYKNSLYSMRFILVLRAELSIN

SEQ ID NO: 206526 - protein, 40 aa, Glycine max
  Clone ID: PAT_MRT3847_28520C.1.pep
QTILNWLRAGQRMTVEASILHDSRFLSILHKSLLISFPPS

SEQ ID NO: 206527 - protein, 119 aa, Glycine max
  unsure (1)..(119): unsure at all Xaa locations
  Clone ID: PAT_MRT3847_28521C.1.pep
GLCTLSYGNYYIRFSAQASSSPALASHNVGYTHMLPTRELKLASESFSDGKTSTQELHTVTENRMSAIWNHMADAGIKYIPSCNFXIYDQILDTTTMHRSIPSRYNRNGGDIGFDEYFS

SEQ ID NO: 206528 - protein, 64 aa, Glycine max
  unsure (1)..(64): unsure at all Xaa locations
  Clone ID: PAT_MRT3847_28522C.1.pep
VSFKTNDRPSLGNLSGAKLFFNALPQKVIXPPFTLKSHPARQFKNNNPFRFLVPPQEFQRKTLA

SEQ ID NO: 206529 - protein, 86 aa, Glycine max
  unsure (1)..(86): unsure at all Xaa locations
  Clone ID: PAT_MRT3847_28523C.1.pep
RLEQVDINILNNTRVLFGIPIEKMQAGPVLMEMVYHSXKRTPVNFSTICLLIQYDKPIIQALSLQRIRRLSISHRPHLICQPFINT

SEQ ID NO: 206530 - protein, 98 aa, Glycine max
  unsure (1)..(98): unsure at all Xaa locations
  Clone ID: PAT_MRT3847_28524C.1.pep
LADKAVTSSVGPDNLAAETSFHHINGTNGSISSLCSRNLRVLDASDDVYEAVVIDSDRLPDNPSTFAANMRXSLHHWKKGKKGIWLILPSKQSDFVPI

SEQ ID NO: 206531 - protein, 59 aa, Glycine max
  Clone ID: PAT_MRT3847_28525C.1.pep
MGPRSNYSKLPGPEKMILRGFCYLLFTFFKCTLLSFIYFLLSKTFFCIKVIKIIFFYLL

SEQ ID NO: 206532 - protein, 71 aa, Glycine max
  Clone ID: PAT_MRT3847_28526C.1.pep
CEVVEVGTSKTGKHGHAKCHFSGIDVFTAKKLIDIVPSSGDWNIPHGNRTHYHLIDITKDRWGTLLTKNNN

SEQ ID NO: 206533 - protein, 196 aa, Glycine max
  Clone ID: PAT_MRT3847_28527C.1.pep
MEEWYYKKSQVPAFGSWDWNDNLPFTQDIVPFPNHSLAPWPHFSLSSATMEECHYKKSQVPAFGSWDWNDNLHFTQCFESARQAGLLRCSYSESEERDLYVTGDLYENNVVTPAMIVVPRRRAKVVDQHEKETKLKNWISDDVDSEPPSPTPLPRPTSKPVDEDLYKISPGLLYAKAKKKRGLCFFSSCLLPTCVA

SEQ ID NO: 206534 - protein, 33 aa, Glycine max
  Clone ID: PAT_MRT3847_28528C.1.pep
PSRRLSSVHSLIVISKPAKAFQVIIRIIPVMEI

SEQ ID NO: 206535 - protein, 40 aa, Glycine max
  Clone ID: PAT_MRT3847_28529C.1.pep
PILMKIYIASHNNIQFLRAPSFKSHNVKHAYPYMCIHLVP

SEQ ID NO: 206536 - protein, 48 aa, Glycine max
  Clone ID: PAT_MRT3847_2852C.1.pep
LCAIKPVCLVKGRTILTLFVEGAQNMSIWFGKKNKKTQPIKIKWSGLV

SEQ ID NO: 206537 - protein, 141 aa, Glycine max
  unsure (1)..(141): unsure at all Xaa locations
  Clone ID: PAT_MRT3847_28530C.1.pep
VGYNPDKIPFVPISGFEGDNMIXRSTNLGWXGGATLLYALYHIIEPNKPSYKPLKLPLQDVYKIGGIGTVPMGHVXTGVFKPGMVVTFSPTGLTTEVKSVEMHHXSLTYAHPCDNVGFNVKNVAFKDFKRGYFSSNSKDDP

SEQ ID NO: 206538 - protein, 179 aa, Glycine max
  unsure (1)..(179): unsure at all Xaa locations
  Clone ID: PAT_MRT3847_28531C.1.pep
MAGLNFEATYTDNHDILKIFAAEGVEFLLSCEGKVPVSECNGKIICLFFTANWCRPCRAFIPRLVELYETLRKRGINLEIIFISFDRDEDGFKEHFKNMPWLAVPFDMXITIEEDLIGCIEDYGADAFPFTRKRHEELKAIDIRKREEANLEELLGHKGCHFLISGDDRKVPIFELAGK

SEQ ID NO: 206539 - protein, 389 aa, Glycine max
  Clone ID: PAT_MRT3847_28532C.1.pep
MAGLNFEATYTDNHDILKIFAAEGVEFLLSCEGKVPVSECNGKIICLFFTANWCRPCRAFIPRLVELYETLRKRGINLEIIFISFDRDEDGFKEHFKNMPWLAVPFDVSLHRRLIDRYRIDRIPSFVPLCSDGITIEEDLIGCIEDYGADAFPFTRKRHEELKAIDIRKREEANLEELLGHKGCHFLISGDDRKVPISELAGKTIGLYFGAYWSPPCCAFTVQLTDAYNNLKVEKGDCFEIVLISTDRDLEEFNVNKSSMPWLAVPYEDRTRHDLRRIFDVKGIPALVLIGPDGKVISVNGKLMVSSYGAEAFPFTESRIRDLEAALRKEGEALPQQVEDVKHEHVLKLDMAKAYVCDSCKKQGKFWTFSCDVCDYDLHPSCLEKVNKD

SEQ ID NO: 206540 - protein, 207 aa, Glycine max
  Clone ID: PAT_MRT3847_28533C.1.pep
MIAKTNTIMPIIGKLYCSSSETVLVVRRRPHVVNGGGFVVMDCSAQRVVFRVDGCGVRGKQIEFHINIGKGCSLVNLTFSSVQGGMVEALSIYKKWKCYSLDYEGSRKLVFSLREPNSCLVKNNAIRIFTRNRGRDFKISGCFPDKCCSIVDSKGNEVAQVGMMKEVEELIESKDLYHVVVNPGMDQAFVFGVIAVLDYIYGESTHR

SEQ ID NO: 206541 - protein, 237 aa, Glycine max
  Clone ID: PAT_MRT3847_28534C.1.pep
MLRRDNITHSHPKESRREEKQRGRRHRRRGSTSSSSMATPDSDATTQPQDSDTAPNSSPPNALVPAAPAVCLLRFATDSAGGALMGSVFGYGAGLFKKKGFKGSFVEAGSYAKTFAVLSGVHSLVVCILKRLRGKDDVINAGVAGCCTGLALSFPGAPQALLQSCLTFGAFSFIMEGLNKQQPALAVPMSWKKTVQHNACPPLVLPLQLSLPDELKDAFSFFSESLKKRSKGPYPTS

SEQ ID NO: 206542 - protein, 68 aa, Glycine max
  Clone ID: PAT_MRT3847_28535C.1.pep
SSNFNPLSSGNILTNVYLFTFYSYNLLNPLYIIIFKFSFNYTTNSLKINHFLFLTSTYLSINPSTIIF

SEQ ID NO: 206543 - protein, 66 aa, Glycine max
  Clone ID: PAT_MRT3847_28536C.1.pep
LFHKLSKLLTVLTHVTPAAKMGCLPLSDQNLLSPHSPLTLVIAMSIHQSPFFNYYGRPLFGNHHFP

SEQ ID NO: 206544 - protein, 63 aa, Glycine max
  Clone ID: PAT_MRT3847_28537C.1.pep
RSGGLPFAPPRFNWRSFRAFFRKVGPPYPTPVWNRVGLGPFFVLWVKRESPPLGLPLLAPDFF

SEQ ID NO: 206545 - protein, 429 aa, Glycine max
  Clone ID: PAT_MRT3847_28538C.1.pep
MQDSPPHELTMASSIEKLLESGRPFLRGDLESIDKNLPRLVGVLQSVGAGECWHKHGSFLHHLVDIFRILKLWKAPHSVCLCGLFHSAYSNSYVNLAIFDPSTGREVVRALVGEEAESLIHLFCIVPRQPLIHDDLLFHYSDEELVQHLAQSEISLRNAKKMEKGLFDDDGELEGWRKKLQGLVPAEGVQVKHIRTGEGVHVSRRIVAVFIMMTMADFCDQLFGFQDLLFDNANGRLEFSGNNFGALWPGDGKPGLWLNSISRMGAVYTLIAREEEIFIQERKRKVGVAVVPDLERNEDIELVLPPVFDYCRKVLEAGDQIVARDLYWEAVCEGGSKAEELLLESIEKNPFVGEPYVVLSQVYLTEGRFEEAEKHAERGLKLLLEWGCPWDKRTSWEGWVAWTRVLLMRAKDKSWPQTSWGILNLGLVN

SEQ ID NO: 206546 - protein, 95 aa, Glycine max
  Clone ID: PAT_MRT3847_28539C.1.pep
KKRARGMFQASLLYLPGVKEGHLIPRGFGNEQFLEDKAKGFVKNASSTEFSEVEEENGEQKIKARGPQRTEGGPPGTEASGAPFPFLPGPSKNLP

SEQ ID NO: 206547 - protein, 95 aa, Glycine max
  Clone ID: PAT_MRT3847_2853C.1.pep
HKDDCTANRWIGAAKAMHTNQEGYRLVRAHTLRAVRYTIAGCCHTETLIDYRGRVAIQLKGCMFTTASVYDIAIPYDHWTNHDLRMRASANYSLT

SEQ ID NO: 206548 - protein, 54 aa, Glycine max
  Clone ID: PAT_MRT3847_28540C.1.pep
TSETIISSFLERKNIDSQRSNSLGKKTSHCATNNHTTNTSYIGAPTKPDYHTAQ

SEQ ID NO: 206549 - protein, 101 aa, Glycine max
  Clone ID: PAT_MRT3847_28541C.1.pep
PTRPHCLSLQGGGYIFFGNAYDSARVTWTPISSVDSKHYSAGPAELVFGGRKTGVGSLTAVFDTGSSYTYFNSHAYQALLSWLNKELSGKPLKVAPDDQTL

SEQ ID NO: 206550 - protein, 54 aa, Glycine max
  Clone ID: PAT_MRT3847_28542C.1.pep
LLFNALGRQSFFMRVIYNIHSSVNTGDYNLAFKSLLSIDNTSHLLIFNLIIYYE

SEQ ID NO: 206551 - protein, 51 aa, Glycine max
  Clone ID: PAT_MRT3847_28543C.1.pep
VNLNQFILKIPDWIGWKICKTEAFALHYELYSKYPIQSYPSNTLTFYSNCL

SEQ ID NO: 206552 - protein, 34 aa, Glycine max
  Clone ID: PAT_MRT3847_28544C.1.pep
HQPKSGVGPDSAHSSRRTRLRSRVAESAPATAAR

SEQ ID NO: 206553 - protein, 41 aa, Glycine max
  Clone ID: PAT_MRT3847_28545C.1.pep
AISFYNLLHQHMTNRPIQNHMDPNPKKLFMHACTFHGSLKN

SEQ ID NO: 206554 - protein, 141 aa, Glycine max
  unsure (1)..(141): unsure at all Xaa locations
  Clone ID: PAT_MRT3847_28546C.1.pep
YACGEIQDKGALKLXQEEFITARSTEERAATTLSADGCPYLYAGVHDCRMHTIPRDLAIGVKLSTINNMXAYGLNSAISGSGILCTIPQYISQKTCWNQMAAERTQLNSDSSMQSLCQLYIDLLGGXIVADKTGDWITLIQ

SEQ ID NO: 206555 - protein, 54 aa, Glycine max
  unsure (1)..(54): unsure at all Xaa locations
  Clone ID: PAT_MRT3847_28547C.1.pep
RLTLYIXXSXXRYIYREKSIKAGKWRTLCLTLFLTTPSAFTLDNYIANLRFHLL

SEQ ID NO: 206556 - protein, 117 aa, Glycine max
  Clone ID: PAT_MRT3847_28548C.1.pep
HGKMPVKAMFPIHTSPRCKKKYHLKMSPVPNHFIHVNPLLPNVESFPSFSNRPNMLWAFFCTVGKGKARLNSLLSFVLVRPVCCNWFLKPKLQKTKVVFNQLQFYQKKKKKKKKHPQ

SEQ ID NO: 206557 - protein, 183 aa, Glycine max
  Clone ID: PAT_MRT3847_28549C.1.pep
MKRPLSPSASGVNVEDRKMKKKAKAVENEDDNVERVEGLAHFDDNLLFEVLKHVDARTLAMSGCVNKQWHKTAQDERLWELICTKQWANTGCGEQQLRSVVLALGGFRRLHALYLFPLSKPQQTPSSSSSSTSSSSSSAWGPTIPQVIRSKPLRLGKDEVHLSLSLLSIRYYEKMNFNNRTTR

SEQ ID NO: 206558 - protein, 51 aa, Glycine max
  Clone ID: PAT_MRT3847_2854C.1.pep
KESNEILSHVSQWPQSPCPTQPQSTLEHTQSYPTRLMSAVTPCLRSILASD

SEQ ID NO: 206559 - protein, 65 aa, Glycine max
  Clone ID: PAT_MRT3847_28550C.1.pep
SKKKKKKKKKKKKKKKKKKKKKKKKKKKKKNKKKKKKKKGGAPPFVALSPRYLIRARSLGGTQFS

SEQ ID NO: 206560 - protein, 118 aa, Glycine max
  Clone ID: PAT_MRT3847_28551C.1.pep
HQFESCFLQSDISCVLFLQHSLLPFYASVFFPLPYSNSLNIWSDKWFPNSLDNVIHWDQNPDIDVSQTVSDIIIPDSNQWGVEKMKGMFFESTCLKVCSIPLRRTRMCGNLLMMEFTQ

SEQ ID NO: 206561 - protein, 199 aa, Glycine max
  Clone ID: PAT_MRT3847_28552C.1.pep
MAAKGQKFVRFKDWKSLSSSSIEHNDSSNGGFLKRKVQPSLSSVSDGSITNLSCRNHVLDPQGATLQKWNKIFVITSVMAISVDPLFFYIPMIDDKKQCLALDGTLKITASVLRTFFDLFYILHIIFQFRTGFIAPSSRVFGRGELVNDPWAIVMRYLSSYFIIDILSIIPLPQLVILAMIPFPKCSVPYVGKDLLKLP

SEQ ID NO: 206562 - protein, 101 aa, Glycine max
  Clone ID: PAT_MRT3847_28553C.1.pep
TMARVTFLSFLPLFLLTLDARGSPNPFPPKPTPNLKPLFTTHHRPVRDAPRSVDQPHFARPSLRCPPTGHRVRHRGDPLRHDAILAATPVRSGSIGWVAYS

SEQ ID NO: 206563 - protein, 52 aa, Glycine max
  Clone ID: PAT_MRT3847_28554C.1.pep
MQCMRRSPTRSNSHTRCEPDPRALESEGGLIETWNSQHPELQCAGVTVSKRT

SEQ ID NO: 206564 - protein, 90 aa, Glycine max
  Clone ID: PAT_MRT3847_28555C.1.pep
EKYYSQSFCSMKVVTIVPPTNKLFTSVRRSHKRISVIYATCAKFWRDSRKQHTSVIERSDSPGSCYSSRLPFVDQQVGFDHVHVPPPFVK

SEQ ID NO: 206565 - protein, 134 aa, Glycine max
  Clone ID: PAT_MRT3847_28556C.1.pep
TMLVLFDHSSIRYFLDGKTGCFPQIESLHSHLFLVRLRLFAACLVELRNRRRVGSKGHSAINPGINACRCWLSLPAQDVKRAPILRLHNRPVDSVILYNVIRSGAFWCRRCAREADDKSSASAISRVYRRSGAD

SEQ ID NO: 206566 - protein, 338 aa, Glycine max
  Clone ID: PAT_MRT3847_28557C.1.pep
MPSSESSTGFSETICVTGAGGFIASWMVKLLLEKGYTVRGTLRNPDDPKNGHLKEFEGASQRLTLHKVDLLHLDSVRSVINGCHGVFHTASPVTDNPEEMVEPAVNGAKNVIIAAAEAKVRRVVFTSSIGAVYMDPKRSIDLVVDESCWSDLEFCKNTKNWYCYGKAVAEEAAWDTAKEKGVDMVVVNPVLVLGPLLQPSINASTIHILKYLTGSAKTYANATQAYVHVRDVALAHILVYEKPSASGRYICAESSLHRGELVEILAKYFPDYPVPTKCSDEKNPRAKPYTFSNQKLKDLGLEFTPVSQCLYEAVKNLQEKGHLPVPARQQEDSTTVKP

SEQ ID NO: 206567 - protein, 35 aa, Glycine max
  Clone ID: PAT_MRT3847_28558C.1.pep
MVLMTLNPNTVFQSKLELYLVNLHIISLHLYVHIS

SEQ ID NO: 206568 - protein, 138 aa, Glycine max
  unsure (1)..(138): unsure at all Xaa locations
  Clone ID: PAT_MRT3847_28559C.1.pep
MPSSESSTGFSETICVTGAGGFIASWMVKLLLEKGYTVRGTLRNPGMPIYLNDPKNGHLKEFEGASQRLTLHKVDLLHLDSVRSVINGXHGVFHTGFPVTDNPEEMVEPAVNGAXDVIIAAAEXAKVRRVVFTSSIGA

SEQ ID NO: 206569 - protein, 93 aa, Glycine max
  unsure (1)..(93): unsure at all Xaa locations
  Clone ID: PAT_MRT3847_2855C.1.pep
SFQWPQKRPKWDCLIKWSINNADGTCPAHGLKSEAPRWCMDSMQSHATDAAXRLIESTLGRRTPXPDLRDHGFFCAHIDNLYAEAQDHAETMD

SEQ ID NO: 206570 - protein, 49 aa, Glycine max
  Clone ID: PAT_MRT3847_28560C.1.pep
RSGSTRWLGQKHFHILWGGVANLKKWEREKEKEREDNIPTFGGGLYFKP

SEQ ID NO: 206571 - protein, 48 aa, Glycine max
  Clone ID: PAT_MRT3847_28561C.1.pep
RRKSESFSVSYKCIAGFIQVSKENLYWQPKVALDMCNIMRCSWTCVIL

SEQ ID NO: 206572 - protein, 81 aa, Glycine max
  unsure (1)..(81): unsure at all Xaa locations
  Clone ID: PAT_MRT3847_28562C.1.pep
MQPISAPHVRTSIKIVSTLNESYHTNQPPLAGKIKRLVLTQEGRTKLNIYPDREFYAFXRLLKQVDDGLVSKPDNLYRERL

SEQ ID NO: 206573 - protein, 94 aa, Glycine max
  unsure (1)..(94): unsure at all Xaa locations
  Clone ID: PAT_MRT3847_28563C.1.pep
KSFIAGHKITITDGIDKTSATLQLIKLCRLXDFLMRNFKXMTKVLWEASEDKAXLWSQFQYDSCNNLEMQEAYFVKLENVLQELFLHRKKEADN

SEQ ID NO: 206574 - protein, 65 aa, Glycine max
  Clone ID: PAT_MRT3847_28564C.1.pep
YNLIRSIQSNELQQFVQASPLKTEADEIISSLKLELITRVQKKKKKLGTFIQQFLQIQTNERIPR

SEQ ID NO: 206575 - protein, 44 aa, Glycine max
  Clone ID: PAT_MRT3847_28565C.1.pep
KNTCFINKIIIPYQFLHLIIHDPPLEPGWVGDPFLRITITEPPY

SEQ ID NO: 206576 - protein, 305 aa, Glycine max
  Clone ID: PAT_MRT3847_28566C.1.pep
MCESSSSRVTWEGCSVLLDINDGDRLVFARLSPAAKLKIGNKNCSLQPLIGCPFGTVFQVDGPFLSPAQVNGNNAEEVRDGQVSVESRDKVNNDNNPEEVRDGRANVDSRDNRALVDNNTAQSLTGEDIEAMRRQGAGGNEIIEALIGSSGSIEKKTSFSQEKYRLKKQKKYAPKVLMRRPVARSICEAYFKKYPSKIGFLRVDTLSLLLSMGNVSSNSDILVVDMVGGLLTGAVAERLGGTGFVCNSYIGQAPYSMDIARIFNLSDEICKRIVRTPISDLLSQKESPEQTLLPDDACNCETHSN

SEQ ID NO: 206577 - protein, 78 aa, Glycine max
  unsure (1)..(78): unsure at all Xaa locations
  Clone ID: PAT_MRT3847_28567C.1.pep
TNESYYHXFXTXSXXXXLVXXKYXWAFFVCXTIXIXKLFXXIXPSVTGXNSIXCRPXILTNXCXAXXXQSLXWXMAXG

SEQ ID NO: 206578 - protein, 60 aa, Glycine max
  Clone ID: PAT_MRT3847_28568C.1.pep
KKLAILSSLLNILQDRHFCFRPPTMCLLITGCFNGHRRIIGQPSCTRGSSVSLVLGTFLI

SEQ ID NO: 206579 - protein, 86 aa, Glycine max
  Clone ID: PAT_MRT3847_28569C.1.pep
GEKTTEGESIIGHSNLQHKMEESKGFVGGESQKPHPEMPSISFQIPMPGRNRSGGLYPWGWRQRAIIPQHTVRNSNGASENTNLKV

SEQ ID NO: 206580 - protein, 98 aa, Glycine max
  Clone ID: PAT_MRT3847_2856C.1.pep
MPFPIRITLRGSSNAGNKNLTEKEVYVNHAELAWHQMRTEWVGDQSKKLRRSPKGSTLSVTRTYEEVLASREPFKRPILLSEMVSFLVEIWLEDDLYD

SEQ ID NO: 206581 - protein, 78 aa, Glycine max
  Clone ID: PAT_MRT3847_28570C.1.pep
LGDFPEVIEEYLEHGCMKCIAFNRRGTLLAVGCNDGSCVIWDFETRGIAKILRDDECSSPITSICWSKYGHRILVSAG

SEQ ID NO: 206582 - protein, 81 aa, Glycine max
  Clone ID: PAT_MRT3847_28571C.1.pep
LGVWGFFFNTPKLNGYFYVFRKIEWLCSSEIHLPFCGSVVIQTLFCAWQQTYYPVGGNNCCLGVCLVVESCGRAGSVVSCA

SEQ ID NO: 206583 - protein, 86 aa, Glycine max
  Clone ID: PAT_MRT3847_28572C.1.pep
HASAWVVEKLREAKEVAEAMAGTKRKTIIRKIRGDGKKVNQHKNRFQYDEHNYALNSNSGAQSVHEGMPHRFSSTFAAPGRRQNES

SEQ ID NO: 206584 - protein, 59 aa, Glycine max
  unsure (1)..(59): unsure at all Xaa locations
  Clone ID: PAT_MRT3847_28573C.1.pep
RILLLTVKRQQSDWKNRAVTQLXHPGANSALASWHIMEKACTERCTKQLDSLNGQWHPP

SEQ ID NO: 206585 - protein, 91 aa, Glycine max
  Clone ID: PAT_MRT3847_28574C.1.pep
ACRLQSCLPKQSFAPTLECLSNRTSLNATLDHCEDQSERKGRNRKVYPRVPIPDSRVEVLVQVFTSLIFSLNIELSKRLKKFQSDSKSYIK

SEQ ID NO: 206586 - protein, 71 aa, Glycine max
  Clone ID: PAT_MRT3847_28575C.1.pep
FKFWGGLGHLSASLGGWQAPSLPGSHFNFLFRAMLASPVFGGRCSGRNNMGGFQFLLCNQLVVCPWANPDF

SEQ ID NO: 206587 - protein, 139 aa, Glycine max
  Clone ID: PAT_MRT3847_28576C.1.pep
LTLHNAYTYIAEALSSRKAFFRVIARLKDARVLLMRMPDMSAPMIQLAGSCNDGYENLAHCLYYLMHGGHDPESRCSTVRNIPGCAMTTFGKQTVSECPQQAANNYGINDEYAQALAGRCNVLVRYKIMRSSNCDSIKF

SEQ ID NO: 206588 - protein, 43 aa, Glycine max
  Clone ID: PAT_MRT3847_28577C.1.pep
YMPPCRQINSFTQGPKGKNYTFTPLRKQVHPPPLYTNSQNWTR

SEQ ID NO: 206589 - protein, 64 aa, Glycine max
  Clone ID: PAT_MRT3847_28578C.1.pep
KNRESAARSRARKQAYTTELEHKVSRLEEENEKLRRQQELEKMLSSNPPPEPRYQIRRTSSASF

SEQ ID NO: 206590 - protein, 110 aa, Glycine max
  unsure (1)..(110): unsure at all Xaa locations
  Clone ID: PAT_MRT3847_28579C.1.pep
KIYKMNNFCAHILLFAAHRWPLGKPILVSESXDVNDHNACNKSWIDVHLRSRDYDSHDIERYTPANIIVLHYHITCLIFPXPTGVMIGLDLAYNLHSSIGNCFPGSKPLL

SEQ ID NO: 206591 - protein, 98 aa, Glycine max
  Clone ID: PAT_MRT3847_2857C.1.pep
RGRRGSMCSFSSQLSRYFLPLFLFSVFLFLFSSFCLFFFRLSFLAASFVPFIHLFFLLYYHAMLCNSVTKHAFSFFLRLYSHIGIVSIFGKKEKKNSL

SEQ ID NO: 206592 - protein, 73 aa, Glycine max
  Clone ID: PAT_MRT3847_28580C.1.pep
RKHVHFDISSGICDRQLHRLGPKYLTASMRQQHSRQDKRRLRPCFQSRPSPLRSSPRHTIRLQGQCLNCTLLS

SEQ ID NO: 206593 - protein, 62 aa, Glycine max
  Clone ID: PAT_MRT3847_28581C.1.pep
SCPSDLSSSKAPFTRQTHSFVSLQQTWLSLFPQAPKREPPSLRRCIWLEKNMEYGLVGWVCM

SEQ ID NO: 206594 - protein, 771 aa, Glycine max
  unsure (1)..(771): unsure at all Xaa locations
  Clone ID: PAT_MRT3847_28582C.1.pep
MRRSSLVSALLIANILMATRLTLTLPFSRSISPLLSRSLSQLKQFPKSHPCPLWSSSFSFCLHTLRKSTSPIRASSSFSPSMAASSPLNDAVEGNPLLQNFDFPPFDVVEPKHVRPGIRALLGKLESELEELERNVEPSWPKLVEPLEKIVDRLSVVWGMINHLKSVKDSSELRSAIEDVQAEKVKFQLRLGQSKPIYNAFKAIQESPDWQTLSDARKRIVESQIKEAVLNGVSLEDDKRESFNKIEQELEKXLSQKFGEILLDASYGVMEAQXLPDAHMVCNQTPPVGNKPSLMTFREVETVCHEFGHALQHMLTKQDEGLVAGIRGIEWDAVELPSHILKLEKVSLLNYNRSLLLRGHFKMATVDKAEELPEKLRRASWDPAVQGDEDRTKFSKSQGALEAGDLTHWDITFWSESFSDIFAGVYAAGYYIYKWADVLSADAFSAXKCWFGYEIEPSDGLAPVSGRPFLFFCVADSSXDVIGQFLGREPTPDALLRHSGLXMDEVFARSRVLSRDGTSARLPVAHMVCNQTPPVGNKPSLMTFREVETVFHEFGHALQHMLTKQDEGLVAGIRGIEWDAVELPSQFMENWCYHRETLMGIAKHFETGESLPEEVYLKLVAARTFRAGSLSLRQLKFASVDLELHTKYVPGGPESIYDVDRRVSEKTQVIPPLPEDRFLCSFSHIFAGGYAAGYYSYKWAEVLSADAFSAFEDAGLDNDKAVKETGRKFRETILALGGGKPPLDVFVQFRGREPTPDALLRHNGLLQVAAS

SEQ ID NO: 206595 - protein, 407 aa, Glycine max
  unsure (1)..(407): unsure at all Xaa locations
  Clone ID: PAT_MRT3847_28583C.1.pep
NSARDKIEQELEKLSQKFGENVLDATKKFEKLITDKTEIEGLPATALGLAAQSAVSKGHENATAENGPWIITLDAPSFIAVMQHARNRSLREEIYRAYVSRASSGDLDNTGIIDQILKLRLEKAKLLNYNNYAEVSMATKMATVDKANQLLEKLRRSSWDAAVQDIEDLKEFSKSQGALEAGDLTHWDITYWSERLRESKYDINEEELRPFFSLPKVMDGLFNLAKSLFGIEIEPADGLARAESARAAFFCVKDSSGSPIAYFYFDPYSRPAEKRQGAWMNEVFARSRVLSRDGTSARLPVAHMVCNQTPPVGNKPSLMTFREVETVFHEFGHALQHMLTKQDEGLVAGIRGIEWDAVELPSQFMENWCYHRETLMGIAKHFETGESLPEEVYXKLVAARTFPAGSL

SEQ ID NO: 206596 - protein, 170 aa, Glycine max
  Clone ID: PAT_MRT3847_28584C.1.pep
LVKKGQSPEYQNLLRMGLAESIDGLQYTRMSLVPETDYSPFPSNWRPDHEKLLLEYIKLEDPKTLEEQRDCIREQGLVSPQDYISRLVWNYKRNSLPMDQLSLVRSNESVVGNQHLLVGSNQDDQDHTNKEEENDGRMNAATNVTQRMCNFGILSNTIVTRGLFVGSFKR

SEQ ID NO: 206597 - protein, 96 aa, Glycine max
  Clone ID: PAT_MRT3847_28585C.1.pep
LVEFHEGSFGTHANGHAMAWKIMRAGYYWLTMENNCCIHVRKCHKCQAFTDNVNALPVPLNILAAPCPFSMWGIDVIGVIEPKASNGHCFILVGID

SEQ ID NO: 206598 - protein, 67 aa, Glycine max
  Clone ID: PAT_MRT3847_28586C.1.pep
ITLVVPDGRFSEPYHDGCRKNCANVLVHGLTNDDSIAWLSFRQVAALSTLPGCVQASFVIVSPSSNS

SEQ ID NO: 206599 - protein, 179 aa, Glycine max
  unsure (1)..(179): unsure at all Xaa locations
  Clone ID: PAT_MRT3847_28587C.1.pep
GASGSFNSVSVKAIPNHAPRGAFGPANGIFTYDELLVATKCFSESNLLGEGGFGYVYKGVLPCGKEIAVKQLKSGSQQGEREFQAEVETISRVHHKHLVEFVGYCVTRAERLLVYEFVPNNTLEFHLHGEGEXFLQWSMRIKIALGSAQGLAYLHEDCNPAMIHRDIKASNILLDLSLN

SEQ ID NO: 206600 - protein, 44 aa, Glycine max
  Clone ID: PAT_MRT3847_28588C.1.pep
EVLLKVSVKLVIPVMGSWVKESLAPFFSGVDMKGRFSHSLRENT

SEQ ID NO: 206601 - protein, 43 aa, Glycine max
  Clone ID: PAT_MRT3847_28589C.1.pep
QRVICYAVTTIHMLKSMRSIVNNLTIYVLLAYANCSKPLKFRV

SEQ ID NO: 206602 - protein, 36 aa, Glycine max
  Clone ID: PAT_MRT3847_2858C.1.pep
LVITNFDRRLMMKRVKKYLFIANFNYSLLYILYYKS

SEQ ID NO: 206603 - protein, 76 aa, Glycine max
  Clone ID: PAT_MRT3847_28590C.1.pep
QNKRGPLCTVSFTPFKQIFVAMLNFFVLKKKNFLESVAGSTLVINGMYFNLWGYSIMEERQHVFKDTQAYKNVECP

SEQ ID NO: 206604 - protein, 47 aa, Glycine max
  Clone ID: PAT_MRT3847_28591C.1.pep
DLYLCKRKALKNNPFNIFCMIPSALLGQNNGNKPEKVSQFSISWIPF

SEQ ID NO: 206605 - protein, 111 aa, Glycine max
  unsure (1)..(111): unsure at all Xaa locations
  Clone ID: PAT_MRT3847_28592C.1.pep
LASSLFAFSPFRFSWSGPVPVXLLRLFPGSLFVLGAGVFXLSPSLLSCRCALXMVCCFLFGAWLSLXFSLSWCLLFLVPCPCCVLLRLVCVSGRSPSLLPFMIQLLLLLEP

SEQ ID NO: 206606 - protein, 46 aa, Glycine max
  Clone ID: PAT_MRT3847_28593C.1.pep
IMLHSFKTSNIVFFFLTKYFNTVYFFWKKKSLTAFNYSTLERCHFC

SEQ ID NO: 206607 - protein, 64 aa, Glycine max
  Clone ID: PAT_MRT3847_28594C.1.pep
CRHANAWLGRGLRLIALSRKILLMEKILYGNLLYKESKKRHEILLLPYGPVKKGITGGIIDKNM

SEQ ID NO: 206608 - protein, 45 aa, Glycine max
  unsure (1)..(45): unsure at all Xaa locations
  Clone ID: PAT_MRT3847_28595C.1.pep
LLSKPHMMQFXSFLSTNKIKRHILTTTSPYPSACSTDLNYNYLSK

SEQ ID NO: 206609 - protein, 76 aa, Glycine max
  Clone ID: PAT_MRT3847_28596C.1.pep
LQKKRQRSFSQPIHTFTRLLFLHYTTNISNLTSQHRHISHTHFNITQHSTGGTPILLYTLKFTVSTCFLLLRYQKP

SEQ ID NO: 206610 - protein, 99 aa, Glycine max
  unsure (1)..(99): unsure at all Xaa locations
  Clone ID: PAT_MRT3847_28597C.1.pep
AQLPATTGTCTPSPIDGLLVMLNEPHFSLKLHALCNLTDGLIAXRPGIAPTPPKMECLHEPEESVHHQRALAGLLVSKDFYYLCEPSDSVTHALGACPV

SEQ ID NO: 206611 - protein, 114 aa, Glycine max
  Clone ID: PAT_MRT3847_28598C.1.pep
VLRYFSCSPTTCSVQLQSPFPTIINNPQISCIQVQNLTKHPLMTNQLQMHEIHNLLHFHSRVRKILNFKDRFLYHIFPDQIFAHINNKHPTYSPTMKIQDELLINYFSIAWCRI

SEQ ID NO: 206612 - protein, 55 aa, Glycine max
  unsure (1)..(55): unsure at all Xaa locations
  Clone ID: PAT_MRT3847_28599C.1.pep
TCSSLHTHRLHAFHGCLIADLSIHAIQLNPLRRWWISWKSTCTAQMLIFXLSKPG

SEQ ID NO: 206613 - protein, 75 aa, Glycine max
  unsure (1)..(75): unsure at all Xaa locations
  Clone ID: PAT_MRT3847_2859C.1.pep
MILSRRCPCMIFLRPCRSIIFSRPCPSIIFSRRCPSIIFXRRCPSIIFSRPCPSIIFSRPCPSIIFSRPCPRLIF

SEQ ID NO: 206614 - protein, 49 aa, Glycine max
  Clone ID: PAT_MRT3847_285C.1.pep
QRHRRSPTNHLRLRDARGHPPGKAESTKPTARHETKQGHQEKTQGESPR

SEQ ID NO: 206615 - protein, 126 aa, Glycine max
  Clone ID: PAT_MRT3847_28600C.1.pep
LLLKLGGEQIYAGPLGRHCSHLIQYFEAIQGVPKIKEGYNPATWMLEVTSAGTEASIKVNFTNVYRNSELYGRNKQLIQELSIPPQGSRDLHFDSQYSQTLVTQCKACLWKQHLSYWRNTSYTAVR

SEQ ID NO: 206616 - protein, 77 aa, Glycine max
  Clone ID: PAT_MRT3847_28601C.1.pep
SYWYIEIPVDAYITCLALREIQCDRCPFSLLLLFYCFVFSFFKFDFALCGRMVVGMYAGLWLGLGGGGGGWLGGGGG

SEQ ID NO: 206617 - protein, 63 aa, Glycine max
  Clone ID: PAT_MRT3847_28602C.1.pep
VWHRPKPNSAFCPFFKVPIEKQTHRLSCLFMKLRTHLNKRGTTICLFQTLLRAFSPLHECVHK

SEQ ID NO: 206618 - protein, 327 aa, Glycine max
  Clone ID: PAT_MRT3847_28603C.1.pep
FLFLLLLTMLDEVYRRYRQYYQQMQAVVTSFEYVSGLSNAAPYASLAIKAMSKHFRCLKNAITDQIQFANKAHFHISNRKDESPRFGNSDRGPYGQRPGFLEHQPVWRPQRGLPERAVTVLRAWLFEHFLHPYPTDTDKLMLAKQTGLSRSQVSNWFINARVRLWKPMVEEIHMLETRQAPKNLQKEEHCTNKPSDHLPSDNSIVSENPSTSTDKFQEAPYKRAINELPNIPVRTQEQLNLPCTSNQPGGVGVSMGGSASNSVSLTLGLYQNHGIGLAEPFPLNAAQRFGVALETNNEGYVMSDYESQNRHFGRDVIGGQLLHDFVG

SEQ ID NO: 206619 - protein, 46 aa, Glycine max
  Clone ID: PAT_MRT3847_28604C.1.pep
VTDSRGTPQNYLHVQIYCDTNLPAKPTILTLRIKPLLNVRDYETNE

SEQ ID NO: 206620 - protein, 128 aa, Glycine max
  Clone ID: PAT_MRT3847_28605C.1.pep
PFSLKSYAKGCKKQFGVSPRPPWVPPFYGGHSIKLVLPKFGSPLLFFNGLRAPFSSGGVLKNISDSFVALPPVNGFPCLALLGANANHSDPEWLVDPWKKEFLVFKGWVPPYYDDLVAPPGAPLFLSQ

SEQ ID NO: 206621 - protein, 103 aa, Glycine max
  Clone ID: PAT_MRT3847_28606C.1.pep
FGKTFALVPTTLSVICESTVVTLALAYSWLKMYREAISSYDHALAFSPCRVCTSPALAYTFHLPDDFTTAFASSHKALWLKPDDQFCTRLFTSALIYESLTGV

SEQ ID NO: 206622 - protein, 31 aa, Glycine max
  Clone ID: PAT_MRT3847_28607C.1.pep
DDMCIYTRMEHCSLRSIKSSILSFAIKLGMD

SEQ ID NO: 206623 - protein, 39 aa, Glycine max
  Clone ID: PAT_MRT3847_28608C.1.pep
ECETRQSCSDTSPQTLETPMYPLLVPHFTLHDSNIYSTN

SEQ ID NO: 206624 - protein, 70 aa, Glycine max
  Clone ID: PAT_MRT3847_28609C.1.pep
FIIIIYLHSALPIFEYCENFANDVHFSKCRYSSIFNYFNLRCTWLIPFSVSQIRGLSFAVGLNFTYLLKS

SEQ ID NO: 206625 - protein, 81 aa, Glycine max
  Clone ID: PAT_MRT3847_2860C.1.pep
SEERHASFHGDQNNMAYIQHSANAPISGAIGSSGYSSPPVSKKRKGQELFFWPTTKDPSISKLGQQVKLAHSIIHTSSGVS

SEQ ID NO: 206626 - protein, 69 aa, Glycine max
  unsure (1)..(69): unsure at all Xaa locations
  Clone ID: PAT_MRT3847_28610C.1.pep
GKHTWLDNVPLPHWYTFSFYILLTSYXXXTXLXNXNXXTLXHXXIIXXXXWVKEXNPFVCFYKNKQGLL

SEQ ID NO: 206627 - protein, 63 aa, Glycine max
  Clone ID: PAT_MRT3847_28611C.1.pep
VVWGLDKEWDQVFERVWLVERATRESLGGMGLLGAHPSNLWGSLSHSLALSVLCFSGETPQNK

SEQ ID NO: 206628 - protein, 72 aa, Glycine max
  Clone ID: PAT_MRT3847_28612C.1.pep
GSLRLPLWLSFHHFQFFAAPCILPLTRIRVHRHVNVPSLNDVFFRWTIQQCIGTCHLAASLLLSQPPHFAGC

SEQ ID NO: 206629 - protein, 43 aa, Glycine max
  Clone ID: PAT_MRT3847_28613C.1.pep
KFCYRGMICRGSQTICLILRVDRNFVIYRILMYFLSYAFVLMV

SEQ ID NO: 206630 - protein, 360 aa, Glycine max
  Clone ID: PAT_MRT3847_28614C.1.pep
TGLLGDGISGHEATRVFVAPFCHSTQCSRANTHQCLSCPAASRPGCHKNTCGLMSTNPITQQTGLGELGEDVLAIHATQGSTQQLGPMVTVPQFLFSCAPSFLVQKGLPRNTQGVAGLGHAPISLPNQLASHFGLQRQFTTCLSRYPTSKGAIIFGDAPNNMRQFQNQDIFHDLAFTPLTITLQGEYNVRVNSIRINQHSVFPLNKISSTIVGSTSGGTMISTSTPHMVLQQSVYQAFTQVFAQQLPKQAQVKSVAPFGLCFNSNKINAYPSVDLVMDKPNGPVWRISGEDLMVQAQPGVTCLGVMNGGMQPRAEITLGARQLEENLVVFDLARSRVGFSTSSLHSHGVKCADLFNFANA

SEQ ID NO: 206631 - protein, 320 aa, Glycine max
  Clone ID: PAT_MRT3847_28615C.1.pep
MMTQESSEVLGKHASSGSHVRGSSEYIRLVISDEQRVVEAETLLTRAESRIKSFWWWMKSFLWCVVFVILVFILVKWGVPLFFVKVLYPIMEWEATAFGRPVLALVLVASLALFPVFLIPSGPSMWPRGVIFGYGLGFVIIMVGTTIGMVLPYLIGLLFRDRIHQWLKRWPQNAALIRLAGEGNWSRQFQVVALFRVSPFPYTIFNYAVVVTNMRFWPYLCGSVAGMVPEAFIYIYSGRLIKTLADAQYGKHHLTTVEIVYNIISFIIAIVTTIAFTVYAKRTLNQLKMAELNDEVTFVSVEMEKLPLERPKQLSLSKFS

SEQ ID NO: 206632 - protein, 123 aa, Glycine max
  unsure (1)..(123): unsure at all Xaa locations
  Clone ID: PAT_MRT3847_28616C.1.pep
MVSRPNLDNANMKMPSYFNFPALDVSVAFPQATPASTIPPXSXDYFHFNDLLKPEEQAERNRVRECMGKEIAPIMTEYWEKAEFPFHVIPKFAALRVAGGTIKGYGCPVLSIAGRAVAAAEVA

SEQ ID NO: 206633 - protein, 169 aa, Glycine max
  unsure (1)..(169): unsure at all Xaa locations
  Clone ID: PAT_MRT3847_28617C.1.pep
KDKSNSFHKGGGKGRGKTQNQKGQPPPPPPEGKKPKKFGGGGGTNPPPRGGVTTKRLSKDTPPPLGPPGVTGGPKTGPPKGGPXGPFEKGKGPLKGLTPPPERAPTGPRSFEPNSRPGLRGEPPPPGNKPHPQGGKSPHRGAKPPPRGGPWGKNNPVPQKELLSGGGGP

SEQ ID NO: 206634 - protein, 480 aa, Glycine max
  Clone ID: PAT_MRT3847_28618C.1.pep
MEEEAPPVPPAPPIVAMLPSPGMGHLIPMIEFAKRAVRYHNLAVTFVIPTDGPPSKAQKAVFQALPDSISHTFLPPVNLSDFPPGTKIETLISHTVLLSLPSLRQAFHSLSSTYTLAAVVVDLFATDAFDVAAEFNASPYVFYPSTATVLSIALHLPTLDKQVQCEFRDLPEPVTIPGCIPLPVKDFLDPVLERTNEAYKWVLHHSKRYREAEGIIENSFAELEPGAWNELQREQPGRPPVYAVGPLVRMEPGPADSECLRWLDEQPRGSVLFVSFGSGGTLSSAQINELALGLENSQQRFLWVVKSPNDAIANATYFNAESHEDPLQFLPEGFVERTKGRGFLVKSWAPQPQVLAHQSTGGFLSHCGWNSILESVVNGVPLIAWPLFAEQRTNAFMLMHEVKVALRPKVAEDTGLVQSQEIASVVKCLMEGHEGKKLRYRIKDLKEAAAKALSPNGSSTDHISNLVLKWTNKTTISTSG

SEQ ID NO: 206635 - protein, 84 aa, Glycine max
  unsure (1)..(84): unsure at all Xaa locations
  Clone ID: PAT_MRT3847_28619C.1.pep
LSXHLQKSSVXHHSYLPSIQIXSFIFLXXFXXXNIHSNXNFPXANQLXQXXFPLNSKPSXFSSXLLXXXXFXNQHLLHLNXXXX

SEQ ID NO: 206636 - protein, 56 aa, Glycine max
  Clone ID: PAT_MRT3847_2861C.1.pep
ALRIIYFRNKGKKRVATSRDHTMSMKFFMNSLDVFLHSTPKGLMNFKLNPSDHWLF

SEQ ID NO: 206637 - protein, 120 aa, Glycine max
  Clone ID: PAT_MRT3847_28620C.1.pep
SYFNSEDIYFRGFLPFTLKRFFMLKIFGVFLLFSILVFPFSLSAYFESTKKEIVLVFSNNFRFVGHPIHILLFVMKPCYTSFWITDLYRDILHQKIFQIDFICLSSLFAIRSQIYFKTCL

SEQ ID NO: 206638 - protein, 348 aa, Glycine max
  Clone ID: PAT_MRT3847_28621C.1.pep
NTYEELPTSLPNIGARVIFDERQPAGGMAHHSSDTPHLQSDNIGKEVGDEYSLSVGDHSRVDSFVDGDPGDSQQSVPKLGRRKPGRKSKSGIARTRSVKAVVEEAKEFLGKAPKKIENASLQSLNTDHIREDSREDSSHTEKAIGNTRRKRQRAQTSRITESEQNAGDSEGQSDSITAGGRRKKRQTVAPLTQVTGEKRYNLRRHKIAGKDSSTQNISNATKSVEKEAAAGKLEGDKNTPEVVETSLAVDDDNVQDTNLVQVSTVKTVEFSDHRAVRFELPKDVVDDNAAATETLNRVEENGTPEYQDEDGSTIHEVENDDDDEEEEEEEEHPGEVSIGKKIFRFFTT

SEQ ID NO: 206639 - protein, 92 aa, Glycine max
  Clone ID: PAT_MRT3847_28622C.1.pep
VGVWQCAIFISRGYGVLIIVCHFCVTLVLSIPSLKAIQLIGLQVEQCYSSIACINSCDHRKIINKLDILAILKNNLVSASFCSHYLAGYTRS

SEQ ID NO: 206640 - protein, 67 aa, Glycine max
  Clone ID: PAT_MRT3847_28623C.1.pep
FFFTPQIFIFFNSMPTQQIKMPVHPMKKKNLNPLFKTFHYYNYYYPMSPKGIFPPILSLGTRHFWTK

SEQ ID NO: 206641 - protein, 85 aa, Glycine max
  unsure (1)..(85): unsure at all Xaa locations
  Clone ID: PAT_MRT3847_28624C.1.pep
XXMXEXLXXXEESSNYKVLLHHTGDEXRXXXXPQXXXPPXXXXXEVDSCXLXXPPPITILGNDENSQDKXSLSKDTDSXEGESKN

SEQ ID NO: 206642 - protein, 70 aa, Glycine max
  Clone ID: PAT_MRT3847_28625C.1.pep
LEVEPIWFMPGSPTLSPQGLDPTMRTPAKIALLRDCMTSRRHPWALCSRSSTDSPLLWLHAMTLGHDNYP

SEQ ID NO: 206643 - protein, 73 aa, Glycine max
  Clone ID: PAT_MRT3847_28626C.1.pep
LSKGALAVYGTPALPEIIKNCMAQDLSWKGPAKEWEEVLLSLGVPGSEPGSDGEEIAPQAKENVATTHNNKNK

SEQ ID NO: 206644 - protein, 63 aa, Glycine max
  Clone ID: PAT_MRT3847_28627C.1.pep
SLYPIRLNVISLAILGALVIRFILKAESYVFDPTAEAVCSLLADAPLCSPFSTVPLGSLIPSA

SEQ ID NO: 206645 - protein, 63 aa, Glycine max
  Clone ID: PAT_MRT3847_28628C.1.pep
WRACIAILNTNTFSFYFSQKKKGPKIMNDSFFVEQICSIKWEGEREGFKNHPINKKDCHSVFD

SEQ ID NO: 206646 - protein, 111 aa, Glycine max
  Clone ID: PAT_MRT3847_28629C.1.pep
FRIHADNTCEEHAKRVMGNNQKKGKSLNLPKPSRKKTKKKKKSAPEGKLECPFRKKKQRIKETPEFEKIKEKLAFEEHKRDSNMRNLDSWTLQFGNNLVPRASIVSPSCTE

SEQ ID NO: 206647 - protein, 93 aa, Glycine max
  Clone ID: PAT_MRT3847_2862C.1.pep
FLKLRSFFIYLQNNTNCFCIRLKDVSSTLGIDFLILGLNHTQPSLPALLSAYLSAPFPCKILNSFSVNLLYMFIEHVWLMHTHFSLFICPMYQ

SEQ ID NO: 206648 - protein, 97 aa, Glycine max
  Clone ID: PAT_MRT3847_28630C.1.pep
SAPPVKNIALSKYQCWQSIYQNMYFLVATSNSSSTEISYSFYHVAQSHKCVLCCFRENIAYWRDKITSENTCTHLPICFLCTHCTCKISLVNPTLYG

SEQ ID NO: 206649 - protein, 159 aa, Glycine max
  Clone ID: PAT_MRT3847_28631C.1.pep
MDTQARPVPPRVKLGIQGFEVSKLGFGCMGLTGAYNSPLDDEAGIAVIAHAFSRGVTLFDTSDVYGPLTNEILLGKALKQLPREQVQVATKFGIRHDESGTRTVCGRPEYVRACCEASLRRLGIDCIDLYYQHRIDTTTPIEETIGELKKLVEEGKVKY

SEQ ID NO: 206650 - protein, 59 aa, Glycine max
  Clone ID: PAT_MRT3847_28632C.1.pep
PSFTLGLVAKRLLFKGNFSQNSEGPTPPPNYFSSNIIFSILFHSTQPDSPLRAKVSKTV

SEQ ID NO: 206651 - protein, 74 aa, Glycine max
  Clone ID: PAT_MRT3847_28633C.1.pep
AFSHKGSIQEIKLLLLVLLVHIYVGRRTGDPPFPLKPLFFSTYMFLGLHSIMSLRHRFNLAYSQFYAHENDITK

SEQ ID NO: 206652 - protein, 53 aa, Glycine max
  Clone ID: PAT_MRT3847_28634C.1.pep
LTTPDNNIHHKSDRFFIFSFSILKNSSLYNYDMIYLLQSFVRHLIKIKLKIKS

SEQ ID NO: 206653 - protein, 91 aa, Glycine max
  Clone ID: PAT_MRT3847_28635C.1.pep
MLEDGNGSAGNDAMGDVSGTKKLKARSHADKAILGTGWKLLAAPYIEDTKDMDHHSLDNTTQLIHHSAITNDHSQTLENSAASEQEQMEPF

SEQ ID NO: 206654 - protein, 73 aa, Glycine max
  Clone ID: PAT_MRT3847_28636C.1.pep
TRAESRSTSPWSFGNGQRQVVHKLLGIDARRLVARWQKLALLMPLQLGNAVSQASRCCLLKPTSSYLSNGGTI

SEQ ID NO: 206655 - protein, 58 aa, Glycine max
  unsure (1)..(58): unsure at all Xaa locations
  Clone ID: PAT_MRT3847_28637C.1.pep
LKFLLYGRTGWIGGLLGKLNKKXNFTYESAKLQLEDPSSFMNYIQNFKPLHIFNKQVV

SEQ ID NO: 206656 - protein, 839 aa, Glycine max
  Clone ID: PAT_MRT3847_28638C.1.pep
MSDDDQSEHFLVQSLKTLRRHVFSWHNQWHAINPALYLQPFLDVIRSDETGAPITGVALSSVYKILTLDVIDQHTVNVGDTMHLVVDAVTSCRFEVTDPGSEEVVLMKILQVLLACVKGKASVMLSNQHICTIVNTSFRIVHQAGTKGELLQRIARYTMHELKIHRVLEAFSERYYEQSPHILANKDAALVLSYSIILLNTDHHNVQVKKKMTEEDFIRNNRRINDGNDLPREFLSEIYHSICKNEIRTTPEPGFGFPEMTPSRWISLMHKSKKTAPFIVSDSRAYLDYDMFVLLSGPTIAAISVVFYDAENEEVYQTCMDGSLAVAKISAYYHLENVLDDLVVCLCKFITIWDPLSVEESVLAFGDDTKARMATETVFTIANRYGDYIRAGWRNILECILIFHKLGLLPTRLASDAADESKQATQAIHKCHVDSIFTESKFLQAESLLHLAKALINAGAQHLKGSRISEDEDTSVFCLELLVAITLNNRDRVGHLWRDVYEHISNIVQSTVMPCALVERAIFGLLRICHRLLPYKENITDELLRSLQLVLKLDARVADAYYEQITREVSRLGLRKVCLDQREEVRNHALLSLQQCLTGAVGTHIPHELWLTCFDQVIFTVLDDLLEIAQAHSQKDYRNIEGTLVIALTLLSKVFLQLLQELSQFETFCKLWEDMLGCMEKCVKMKIQGKRSEKLQELVPELLKNILLVMKAGGILVHSSGSGDNSLLELAWQHMKNIAPSLQSELILSAVPKQPELAFLCPYEHPHNLSLTLINSFDQVKHEVKLPVIWYSLFLIIAPRDLYFLGHVSTCYVNDVNRKIFEMIMIINMYTHNKTSKDT

SEQ ID NO: 206657 - protein, 128 aa, Glycine max
  unsure (1)..(128): unsure at all Xaa locations
  Clone ID: PAT_MRT3847_28639C.1.pep
PCKQCVCIVLWYVLSTVPVFGKIVLPPFFFSNPFDVFSQIVKWFASGVIWKHLGITLAESILAFVIGSLGGVLIGFWFARQPLVAAVVDPYVKMLNALPHEERAPXIQRSIYLALGCGFRISDLQRQD

SEQ ID NO: 206658 - protein, 166 aa, Glycine max
  Clone ID: PAT_MRT3847_2863C.1.pep
MAAVASSPTPRKSRSKNLENFDPNKQQQSPVFKPSCSSSSSPLVKPKNPNNKVKYFSPQNKIRQRKFLVAKKKKETKKEEKEGSGAADSCKCKATGANANKNHKCVCVAYNNLRKSQEEFFKNKDDGVVEEGGFESETESVVVEEEKDGESLLGEWFVCDTVGGRR

SEQ ID NO: 206659 - protein, 1507 aa, Glycine max
  Clone ID: PAT_MRT3847_28640C.1.pep
MGHLKIQMQTGLIPTEDEYVQCDAGYPNKTTIACMINAEISAVLAVMRRNVRWGVHYMSDDDQSEHFLVQSLKTLRRHVFSWHNQWHAINPALYLQPFLDVIRSDETGAPITGVALSSVYKILTLDVIDQHTVNVGDTMHLVVDAVTSCRFEVTDPGSEEVVLMKILQVLLACVKGKASVMLSNQHICTIVNTSFRIVHQAGTKGELLQRIARYTMHELVRSIFSHLQNIDNTESAFIKGTATLKQEMEGSKIKKGLRLSTGPRNVLGRLSGTYQEKRKMLTNGLNNDHALASRQLENGRLNSAQDAQPLSTGIASSTATDLTAAVIDENKAIACNGNEIDPHELQLMTEPYGVPCMVEIFHFLCSLLNVAEHMGVNPRSNTITFDEDVPLFALNLINAAIELGGPSFRCHPRLLSLIQDELFRNLMQFGVSMSPLVLSMVCSIVLNLYHHLRTELKLQLEAFFSCVILRLAQSKYGASYQQQEVVMEALVDFCRQKTFMVEMYANFDCDISCSNVFEDLANLLSKSAFPVNNPLSSIHVLALDGLIAVMQGMAERIGSRSLSSEQSPVNFEEYTPFWMEKCDSFGDPNDWVPFVRQRKYIKRRLMIGADHFNRDVKKGLEFLQGTHLLPDKLDPQSVACFLRYTAGLDKNLIGDYLGNHDEFCVQVLHEFARTFDFQDMTLDTALRVFLETFRLPGESQKIHRVLEAFSERYYEQSPHILANKDAALVLSYSIILLNTDHHNVQVKKKMTEEDFIRNNRRINDGNDLPREFLSEIYHSICKNEIRTTPEPGFGFPEMTPSRWISLMHKSKKTAPFIVSDSRAYLDYDMFVLLSGPTIAAISVVFYDAENEEVYQTCMDGSLAVAKISAYYHLENVLDDLVVCLCKFITIWDPLSVEESVLAFGDDTKARMATETVFTIANRYGDYIRAGWRNILECILIFHKLGLLPTRLASDAADESKVTIENGHGRSNSISLSSTHLQYITPKRSSGLISRFSQLLSLGAEEAQSIPTEEQLVAHQQATQAIHKCHVDSIFTESKFLQAESLLHLAKALINAGAQHLKGSRISEDEDTSVFCLELLVAITLNNRDRVGHLWRDVYEHISNIVQSTVMPCALVERAIFGLLRICHRLLPYKENITDELLRSLQLVLKLDARVADAYYEQITREVSRLVKANASHIRSQSGWRTISSLLSITARHLEASEAGFDALIFIMSDGAHLLPANYVLCVDVARHFAESRVGLVDRSIVALDLMAGSINCLEKWSNNAKKAVKEDEVEKMLQDIGEMWFRLVQGLRKVCLDQREEVRNHALLSLQQCLTGAVGTHIPHELWLTCFDQVIFTVLDDLLEIAQAHSQKDYRNIEGTLVIALTLLSKVFLQLLQELSQFETFCKLWEDMLGCMEKCVKMKIQGKRSEKLQELVPELLKNILLVMKAGGILVHSSGSGDNSLLELAWQHMKNIAPSLQSEVFPEQDSEQLQIQHKQIEPVGSLGPDANISVPSNEKVGQDGAVIS

SEQ ID NO: 206660 - protein, 86 aa, Glycine max
  unsure (1)..(86): unsure at all Xaa locations
  Clone ID: PAT_MRT3847_28641C.1.pep
FQKYSYFTEREISDCTLLGWSNKYPDNLRXAAELAVSSLQAVLHRTLSDYKSAGHDPESTSLEIRLIQSQDDICTPQVKLKAEIYS

SEQ ID NO: 206661 - protein, 144 aa, Glycine max
  unsure (1)..(144): unsure at all Xaa locations
  Clone ID: PAT_MRT3847_28642C.1.pep
HASDQVNLEYLGRVVFNNEGLLYPDSVVGTDSHTTMIDGLGVAGWGVGGIEAEAAMLGQPLSMVLPGVVGFKLSGKLRNGVTATDLVLTVTQILRKHGVVGKFVEFYGDGMGELSLADXATIANMSPEYGATMGFLPVDHVTLQ

SEQ ID NO: 206662 - protein, 65 aa, Glycine max
  Clone ID: PAT_MRT3847_28643C.1.pep
NQNSKKPIIAPVLLGTNLKKSASLNHAKNSNNKNSHSLSSTVTSNTNLNPTKAPPPPHGPPRSQT

SEQ ID NO: 206663 - protein, 361 aa, Glycine max
  Clone ID: PAT_MRT3847_28644C.1.pep
MKSVIVIGMNVDAGVGWLNVEHCSMLLKPPLSLNFRFSPQTSIFRARNSRNSRMAPPILSLALPSNTGRVLSIQSHTVQGYVGNKSAVFPLQLLGYDVDPINSVQFSNHTGYPTFKGQVLNGQQLWDLIEGLEGNDLLFYTHLLTGYIGSESFLNTVLQVVSKLRSTNPGLSYVCDPVMGDEGKLYVPQELVSVYREKVVPVASMLTPNQFEAELLTGFRIQSEGHGREACRLLHAAGPSKVIITSINIDGILLLIGSHQKEKGEPPRQFKIVIPKIPAYFTGTGDLMTALLLGWSNKYPDNLEIAAELAVSSLQAVLHRTLSDYKSAGHDPESTSLEIRLIQSQDDICTPQVKLKAEIYS

SEQ ID NO: 206664 - protein, 93 aa, Glycine max
  Clone ID: PAT_MRT3847_28645C.1.pep
VEARRKGQRAMAGITTSPFKLSQFPTLFSSSDSKLFGMPLSNPYSLKFDPSSLSTTSLSYVKARYYGGGGGTPRSPNDSRFRKSSDSDDDDKA

SEQ ID NO: 206665 - protein, 40 aa, Glycine max
  unsure (1)..(40): unsure at all Xaa locations
  Clone ID: PAT_MRT3847_28646C.1.pep
XXYDFXXHNLRNKFXQTRSLPPFIHSSXLFLCQVKSITRX

SEQ ID NO: 206666 - protein, 52 aa, Glycine max
  Clone ID: PAT_MRT3847_28647C.1.pep
DYPMPSFRSLMDRIYLKTFHTTLHNGPELKVLTVHTTINLCRCSLCLNTCPS

SEQ ID NO: 206667 - protein, 63 aa, Glycine max
  Clone ID: PAT_MRT3847_28648C.1.pep
LFTFWERLLTGEMVGYHRPGPRYKPFRQGGKGRHPSLGDQTPSSAGEPRSFEGAPPGTKKQKS

SEQ ID NO: 206668 - protein, 68 aa, Glycine max
  Clone ID: PAT_MRT3847_28649C.1.pep
IKPSTGVTSVTSDCGSFCMHFEIFLSRFHSCDTDHSRYVAFPDCINVPFDDNEDHFIFSFQIFLFTIF

SEQ ID NO: 206669 - protein, 71 aa, Glycine max
  unsure (1)..(71): unsure at all Xaa locations
  Clone ID: PAT_MRT3847_2864C.1.pep
SFHPSSIXNXXAVDQRXISYPYFFLPGKGRXSGFLXPCGGPGGVXXXXXSYYITXXXFXXTSKKCPPPPQX

SEQ ID NO: 206670 - protein, 196 aa, Glycine max
  unsure (1)..(196): unsure at all Xaa locations
  Clone ID: PAT_MRT3847_28650C.1.pep
RRAAKVLTFVAVLIRVGPLSLTPYVAEEGQNNGHDVNCYTESCPQAEHIIAEQVMLLYKRHKNTALYWLRNILHDCAVHSCDATLELDSTRRSLSEKETDRSFGXLRNFRYMDTIKDAAERECPGVASCADILHLSAREGIAYLGGPHIPLKTGRRDGRRSRADVGEQDHPHHKECISAHTDKDGAMGIDTPGVEA

SEQ ID NO: 206671 - protein, 77 aa, Glycine max
  Clone ID: PAT_MRT3847_28651C.1.pep
YGIRRATHPSHDAYIHTCNQRPLNHCDPTVYSAITRLHTLPHTIGHITLHLCMAMDMTNGLMFCYIALRRHLTTSQL

SEQ ID NO: 206672 - protein, 87 aa, Glycine max
  unsure (1)..(87): unsure at all Xaa locations
  Clone ID: PAT_MRT3847_28652C.1.pep
ERIGALVLYIFVVTFACRGVYVTIQAPFLSRQKKELTEAYMEXLIPEPSPTNIKRFKKGMWKKTMPKGLKMKKLIERPDGTLVHDTS

SEQ ID NO: 206673 - protein, 74 aa, Glycine max
  Clone ID: PAT_MRT3847_28653C.1.pep
TADTVHRIPSSFMIKDVMVHLGLSVERSIVQRGHRFRYHLVVPDSWPATVAVVAELLACFLHQSLWSFTIIARV

SEQ ID NO: 206674 - protein, 164 aa, Glycine max
  Clone ID: PAT_MRT3847_28654C.1.pep
YGCEKTTEGETEDEDSSAPTFTITVDVKSGTSTGVSAADRAKTVLALSSPESKSEDFRRPGHVFPLKYRNGGVLRRAGHTEASLDLVALAGLPPISVLSALVDENDGSMQSLLNLRKLASEYTLPIVSITDLIRYRRKREKLVERTSVSRLPTKWGLFQAYCYS

SEQ ID NO: 206675 - protein, 88 aa, Glycine max
  Clone ID: PAT_MRT3847_28655C.1.pep
DTLRQAYRKIFKKEKIGNIETLLIGSAAGAISSSATFPLELARKHMQVGALSGRQVYKNAIHALASILEQVGIQCMYKGLGTSCMKLG

SEQ ID NO: 206676 - protein, 61 aa, Glycine max
  Clone ID: PAT_MRT3847_28656C.1.pep
CLLEKIQRPLPLSTYQPLSFHLPQNLLITRLADPFTARLDPMIELLNHSLIKCLLSYVMVQ

SEQ ID NO: 206677 - protein, 137 aa, Glycine max
  Clone ID: PAT_MRT3847_28657C.1.pep
MATDMQRLVGTSEDDEEMGMDVKDEDDEDDDYEENGGEQGNASVSGMVEIDDGNGIGTATGDNRFQQHQQFQEQVGTPGGGTRRSRPLEEKERTKLRERRRRAITARILAGLRRHGNYNLRVRADINDVIAALAGKL

SEQ ID NO: 206678 - protein, 66 aa, Glycine max
  unsure (1)..(66): unsure at all Xaa locations
  Clone ID: PAT_MRT3847_28658C.1.pep
GGXGAGQAPGDHSQVILYPQAMIKETVHGGHNTLSISHSYTQQGXHIPTNKTHISAAILSTPKVQA

SEQ ID NO: 206679 - protein, 64 aa, Glycine max
  unsure (1)..(64): unsure at all Xaa locations
  Clone ID: PAT_MRT3847_28659C.1.pep
MLVYHDLLTGDELLWDCFRYNEIDNGMLWEVEGKCGVKGAVGVDIGANPXSAEGVEDDGVDDAA

SEQ ID NO: 206680 - protein, 288 aa, Glycine max
  unsure (1)..(288): unsure at all Xaa locations
  Clone ID: PAT_MRT3847_2865C.1.pep
ARNSARGEIRREEERRLGEDPLSRKDSRWGDRDSEGTWRKGPEADSEWRRGPPEKEWRRETRDDERPHRRDEDRLRRLGGDDEERESSLRPDDDRIPRRGLDDDRGPRRGPDEDRFSRRGTDDDRPSWRNADDDRPPRRIGDDDRGSWRHTDDDRPPRRGLDDDRPPRRXLDDERGSWRTAEEDRGPRRGMDDDRGPRRGGADDERSSWRNADDDRGPRRGMDDDRGPRRGLDDDRGPWRNAAEDRISRRGADDDRGPWRNMDDDRVPRRGDDARPGPWRPFVKPGGW

SEQ ID NO: 206681 - protein, 92 aa, Glycine max
  Clone ID: PAT_MRT3847_28660C.1.pep
MGEALSRGRSMDEGAARAAAEDRRTAATRGLMIRTHRGPIQALPTLTQLLNITDAGATPDARDNVKAPLVKTEADATTPRDLIDTTKGQTTP

SEQ ID NO: 206682 - protein, 107 aa, Glycine max
  unsure (1)..(107): unsure at all Xaa locations
  Clone ID: PAT_MRT3847_28661C.1.pep
MHVGAIEIIIDSLASTDCNIIGAMLLVDTYHTNLENKKRXIFVVPLRGGRPIWVVTFPNTILRIEPNMTLRLXFLRTTTNRDSVQGKDLDMVKVKEAXAAVGLTSRY

SEQ ID NO: 206683 - protein, 84 aa, Glycine max
  unsure (1)..(84): unsure at all Xaa locations
  Clone ID: PAT_MRT3847_28662C.1.pep
PLPXXGXXEGASXWXNIPSPIPSKNXXKXIXEXYCTIRAYSRVITINVRLLLRXCKLAWLCYLPFSLLMIQXSCLHPFLLCENP

SEQ ID NO: 206684 - protein, 464 aa, Glycine max
  Clone ID: PAT_MRT3847_28663C.1.pep
MAPKDPKQVADAASSGGGGGFFASIASSLSNFGSAMSKSVNGLVGYEGLEVVNPDGGTEDAEEEARKGRWKQEERDSYWKMMQKYVGSDITSMVTLPVIIFEPMTMLQKMAELMEYSYLLDMADKTEDPYMRLVYASSFFISVYYAYQRTWKPFNPILGETYEMVNHGGITFISEQVSHHPPMSAGHAETEHFTYDVTSKLKTKFLGNSVDVYPVGRTRVTLKRDGVVLDLVPPPTKVSNLIFGRTWIDSSGEMILTNLTTGDKVVLYFQPCGWFGAGRYEVDGYVYNSADEPKILMTGKWNEAMNYQVCDSEGEPLPGTELKEIWRVADTPKKDKFQYTHFAHKINSFDTAPKKLLASDSRLRPDRMALEKGDLSTSGYEKSSLEERQRAEKRNREAKGHKFTPRWFDLTDEVTPTPWGDLEVYQYNGKYTQHCAAVDSSECIEVPDIRPEFNPWQYDNLDAE

SEQ ID NO: 206685 - protein, 82 aa, Glycine max
  Clone ID: PAT_MRT3847_28664C.1.pep
LHNALNDKHHQLRVSQVRYSLAPKRPCCTRSPFTKPPGRGPWRNGVPMMQQLLTTGSTATNRPVRLTTLTARVCSTWYVWWL

SEQ ID NO: 206686 - protein, 188 aa, Glycine max
  Clone ID: PAT_MRT3847_28665C.1.pep
MTIALGKFTKDENDLFDIMDDWLRRDRFVFVGWSGLLLFPCAYFALGGWFTGTTFVTSWYTHGLASSYLEGCNFLTAAVSTPANSLAHSLLLLWGPEAQGDFTRWCQLGGLWTFVALHGAFALIGFMLRQFELARSVQLRPYNAIAFSGPIAVFVSVFLMKPLEKEDESKYSCYTKTRSKEPRSEYGS

SEQ ID NO: 206687 - protein, 104 aa, Glycine max
  Clone ID: PAT_MRT3847_28666C.1.pep
RHVTLKRDGVVLDLVPPPTKVSNLIFGRTWIDSPGEMILTNLTTGDKVVLYFQPCGWFGAGRYEVDGYVYNSADEPKILMTGKWNEAMNYQVCDSEGEPLPGTE

SEQ ID NO: 206688 - protein, 361 aa, Glycine max
  Clone ID: PAT_MRT3847_28667C.1.pep
MPFTMKIQPIDSPVPEEATRLEPVKSAVRSRLKRLFERQFSGVLRNSSAAEKIAYPAEEPPHSAKDGSADFEPSSVCLAKMVQNFMEENHEKHSVSVKCARSRYNSFDDASDAETHSLFGESNYSFSGETQEILKDLVTCASVSERNLLADTTKIIEKNKTTCKRKDDCCRKIVTEALLALGYDASVCKSRWEKSTFCPAGEYEYIDVIMGKERVVVDVDFRSEFEIARPTKTYKAILQTLPYVFVGTCERLQSIVAIASEAAKLSLKKRGMHVPPWRKVEYVTAKWLSPYTCSRGVKEETEEKEHLAKELVVLSTSCGSFREDDEKSKSKLVVQNQKPPEMKPKSSQSGLAAVFLENPKF

SEQ ID NO: 206689 - protein, 68 aa, Glycine max
  Clone ID: PAT_MRT3847_28668C.1.pep
RPEAPSPTTVYEQSLTHSPSHSHPMCSRPCPQSPQSFFKNLSALRLSLHLQRGWNPPHQAQLLTHTRL

SEQ ID NO: 206690 - protein, 40 aa, Glycine max
  Clone ID: PAT_MRT3847_28669C.1.pep
TDATLSRNLTRVSLIIDPPFTGQLRGSCSTHYIKLKKTSS

SEQ ID NO: 206691 - protein, 440 aa, Glycine max
  Clone ID: PAT_MRT3847_2866C.1.pep
MCSFKTWFNLFIIFLALAATPIFSLTDSSNQLSTNFLEIAKKPEVFDWMVKIRRKIHENPELGYEEFETSKLIREELDKLGIPYKHPVAVTGVIGFIGTGKSPFVAIRTDMDALPIQEMVEWEHKSKVPGKMHACGHDAHVAMLLGAAKILKQHEKQLQGTVVLVFQPAEEGGAGAKKILDAGALDNVTAIFGLHVMPDIPVGEVASRSGPLSAGSGVFEAKISGKGGHAAIPQLSIDPILAATNVIISLQHLVSREADPLDLTFAKLQGGGAFIVIFPYVTIGGTFRAFSREKLEQLKQRIKQVVIGQAAVQRCNATVNFLDETRPSYPPTVNNGDLPKLFVDVAGNLLGPNNVNIEKTPIMAAEDFAFYQEVIPGYFIMLGVKSASPEPHQSLHSPYLKISEDALPYGAALHASLATSYLLRYQQDVAKVVGKYHDEL

SEQ ID NO: 206692 - protein, 68 aa, Glycine max
  Clone ID: PAT_MRT3847_28670C.1.pep
LIMVAVTLSVVVDTVCMDVAVAGHITDVAGRAAIKLAKLLLQKLNIRLMINTMQCYVISTFDNLFSVK

SEQ ID NO: 206693 - protein, 51 aa, Glycine max
  Clone ID: PAT_MRT3847_28671C.1.pep
LVVVPPVMAKTLCSSLCASVTIIALMTLVSKYIISAFPFCPKKKKKGRPSR

SEQ ID NO: 206694 - protein, 89 aa, Glycine max
  unsure (1)..(89): unsure at all Xaa locations
  Clone ID: PAT_MRT3847_28672C.1.pep
MGRKMSEGISSMSFKLKEFFQPGPNHADKLVEDTTSEALDEPXWALNLNLCNLINTDKLNCVELFRGIKKRIILKSPKFHYPSLFLLQT

SEQ ID NO: 206695 - protein, 64 aa, Glycine max
  Clone ID: PAT_MRT3847_28673C.1.pep
KGKQLIEMPRPDKPNWPTMHVSMIFISNEMVLVLPTSVDYMPLMPHVGKPILITYLPNAFAKIQ

SEQ ID NO: 206696 - protein, 46 aa, Glycine max
  Clone ID: PAT_MRT3847_28674C.1.pep
CNRCGHLCTTPLALILSAEQASEVELSKHVRMPHLQDSVRSPSLCS

SEQ ID NO: 206697 - protein, 257 aa, Glycine max
  Clone ID: PAT_MRT3847_28675C.1.pep
MAKFVHVVCDLGSFRTWTWDIRMNIILGTAKGLAYFHEGLKKKKKKKKVKSSNRGSNRQWNPKVSDFGLAKLLSADHSYVTTRVMGTFGYVAPEYACTGMLTEKSDVYSFGILIMELITGRSPVDYSKPQGEVNLIEWLKSMVGNRKSEEVVDPKIAEKPSSKALKRALLVALRCVDPDAAKRPKIGHVIHMLEAEDLLFRDDRRTGGESSRSHRDYQLEHKDSKLDKRQIGGEITDQSEDDSTTSSRLHPQPHRSR

SEQ ID NO: 206698 - protein, 261 aa, Glycine max
  unsure (1)..(261): unsure at all Xaa locations
  Clone ID: PAT_MRT3847_28676C.1.pep
LIFRGQAEKEFKVEVEAIGRVRHKNLVRLLGYCVEGAYRMLVYEYVDNGNLEQWLHGDVGAVSPLTWNIRMNIILGTARGLAYLHEGLEPKVVHRDVKSSNILIDRQWNSKVSDFGLAKLLXSDHSYVTTRVMGTFGYVAPEYACTGMLTEKSDVYSFGILIMELITGRSPVDYSKPQGEVNLIEWLKSMVGNRKSEEVVDPKIAEKPSSKALKRALLVALRCVDPDAAKRPKIGHVIHMLEAEDLLFRDVCSFPFSNFTF

SEQ ID NO: 206699 - protein, 117 aa, Glycine max
  Clone ID: PAT_MRT3847_28677C.1.pep
PEMMLILLQPNKKLQKVQRMFHKKVYPESPVDGKDCIQSHKGKIKNVPHEYFQEYENGKFTNPDKGKRFHSDTKSRKWSQHCMTNWNPPQHGLICSSSTGNNEHWIKTDAEYLVLEL

SEQ ID NO: 206700 - protein, 107 aa, Glycine max
  Clone ID: PAT_MRT3847_28678C.1.pep
MPSRNSPIRRPEEATHPDTLKAALAEFISTFIYVFTGSRSGIAYNKLTDNGAATPAGLIFAFIAHAFALFVADYDSANICGGHVNPDVNLGAFVGGNITFLRGIRYV

SEQ ID NO: 206701 - protein, 39 aa, Glycine max
  Clone ID: PAT_MRT3847_28679C.1.pep
DRVSDRTCFLDVRRIGNQRCLGIPAVCDCDIRLLAHSAR

SEQ ID NO: 206702 - protein, 75 aa, Glycine max
  Clone ID: PAT_MRT3847_2867C.1.pep
MFGVENHFRYTTENSVKFGAHRDTDHRELKQPLAMEVWNSVLQRLKPRSKITVLANGPLTNLAKVVSVKNISSRI

SEQ ID NO: 206703 - protein, 125 aa, Glycine max
  Clone ID: PAT_MRT3847_28680C.1.pep
MPHQVMVRSQPANGHRRRGVGEVAGSAAADCTAVCCCCPCTVVNLVVLAVYKLPKGLVEKAAHKRRRRMPKKNNTGDVKNGVVLLQAQRSSSVETLDIAVGPTRLEEFMKKEWEDQEKGKCQKGT

SEQ ID NO: 206704 - protein, 53 aa, Glycine max
  Clone ID: PAT_MRT3847_28681C.1.pep
TLSISLVRKRTFFYSQFSSTHYKRLRLQNHIIVQNKLSLPTPDYHTVKPYPQN

SEQ ID NO: 206705 - protein, 162 aa, Glycine max
  Clone ID: PAT_MRT3847_28682C.1.pep
MGASSSPPPTIPPRHQGSWSTGASSPSLMVPTSLGLFSGHQNAARTFNSHSHMDWNTVGFMRTFSYNSHMDWLNGGFMPEFGGLSIDWSLNVTSCSVSGGLRQGMSSVLRTSYGARRGSQCVSGLQMARETSSSGGLREWTSPFAGKDIFSVPRQFVTSPPM

SEQ ID NO: 206706 - protein, 65 aa, Glycine max
  Clone ID: PAT_MRT3847_28683C.1.pep
MGIFGCSLFKHVEPITFCGKTPGKIVPPRGPSDFGWDPILDPEGYHQAFPQIPKEENTKFYHCSK

SEQ ID NO: 206707 - protein, 214 aa, Glycine max
  Clone ID: PAT_MRT3847_28684C.1.pep
TLSFSGRREKERKRRRREKEKEEEERRKKEKLKKKKKKEKEERGKKGAVTNSWGKYGVIRETDMWTKRPEFTAWLAEVKQVNLENMSNWEEKQMFKEFMEDHNTATFPSKKYYNLDAYYRREMEKEMKKGFKKVQATERTIFNDEEQRRQELLQAREKHKEEQVMALKHSMQTGMAQAMKEQAQLREEMAYQYKLGNFEAAAAIQRRLDPDAAI

SEQ ID NO: 206708 - protein, 33 aa, Glycine max
  Clone ID: PAT_MRT3847_28685C.1.pep
FLSMFGFVLENHVEYSIIMNSLLKLLFVASKNN

SEQ ID NO: 206709 - protein, 41 aa, Glycine max
  Clone ID: PAT_MRT3847_28686C.1.pep
RGGFFLYLAHTLTTLSLTSLHYSIHYFNYHIYYNTIYLLNS

SEQ ID NO: 206710 - protein, 246 aa, Glycine max
  Clone ID: PAT_MRT3847_28687C.1.pep
SSWPSRLRQLLSSGGAIGPSVKVDSEPPPKIKAFIEKIIQCPLQDIAIPLSGFRWEYNKGNFHHWRPLLLHFDTYFKTYLSCRNDLTLLDNLEDDSPLPKHAILQILRVMQKILENCPNKSSFDGLEHFKLLLASTDPEILVATLETLSALVKINPSKLHGSPKMICCGSVNSYLLSLAQGWGSKEEGLGLYSCVMANEKAQDEALCLFPSEEIGHDQSCRIGTTLYFELHGPNAPSRDIVQMQFP

SEQ ID NO: 206711 - protein, 274 aa, Glycine max
  Clone ID: PAT_MRT3847_28688C.1.pep
ETVKTESDASSTISSESGSIGCVNNANLAKRKTTQNNSSGSSQWTLLDLYSGCGAMSTGLCLGASLAGIKLVTMWAVDINAHACKSLKLNHPETHVRNEPAEDFLNLIKAWAKLCEEFALLGSERSDSDPDMDEDENEAVRKEESGNQSDSEEFEVEKLLAVCYGDPNDVKKPGLYFKVRWLGYASSYDTWEPIEGLSDCKEAMKDFVTKGYKKRLLPLPGDANFICGGPPCQGVSGFNRFRNAAAPLEDTKNKQLLVYMDIIDFLKPKYVLME

SEQ ID NO: 206712 - protein, 85 aa, Glycine max
  Clone ID: PAT_MRT3847_28689C.1.pep
VGVELGCGCDVGGGSRRHGCRSYESATFSCVLVVFFLASVVVAFYHLVTTMPFYDVLTTMPFYDLLTTIPFYDLLTTMPFYHLLP

SEQ ID NO: 206713 - protein, 43 aa, Glycine max
  Clone ID: PAT_MRT3847_2868C.1.pep
GGLQCAKGLHQPACLLHMCRKFSKLRQVNNRRIVLRLNTVYLY

SEQ ID NO: 206714 - protein, 596 aa, Glycine max
  unsure (1)..(596): unsure at all Xaa locations
  Clone ID: PAT_MRT3847_28690C.1.pep
MRGHDWINTLIPDELLIEIFRRLDSKSSRDAGSLVCTRWLRLERFTRAAXLLAARFSNVTTVHIDERLSVSIPAHLGRRRASGNSSVKLHYVNDKHGSASDQSDLDSLCVSDSGLTALAEGFVKLEKLRLIWCSNVTSEGLXSLARKCTSLKSLDLQGCYVGDQGLAAVGQCCKQLEDLNLRFCEGLNDIGLVELALGVGNALKSLGVAACAKITDVSMEVVGSHCRSLETLSLDSEFIHNKGVLSVIKGCPHLKVLKLQCINLTDDVLKVVGARCLSLELLALYSFQRFTDKGFGLCGIGNGCKKLKNLTLIDCYFLSDKGLEAIATGCKELTHLEVNGCHNIGTLGLESVGKSCQHLSELALLYCQRIGDAGLVQVGQGCKFLQALQLVDCSSIGDEAMCGIASGCRNLKKLHIRRCYEIGNKGIIAVGEKCKLLTDLSIRFCDRVGDRALIAIAEGCSLHYLNVSGCHLIGDAGVIAIARGCPQLCYLDVSVLQKLGDIAMAELGEHCPLLKEIVLSHCRQITDVGLAHLVKGCCTVLESCHMVYCSGVTSVGVATVVSSCPNIKKVLVEKWKVSQRTQRRVGSVISYLCMDL

SEQ ID NO: 206715 - protein, 173 aa, Glycine max
  unsure (1)..(173): unsure at all Xaa locations
  Clone ID: PAT_MRT3847_28691C.1.pep
MRGHDWINTLLPDELLIEIFRRLDSKSNRDASSLVCTRWLRLERLTRAAIRIGASGSPDLLIHLLAARFSNITTVHIDERLSVSIPAHLGRRRSSGNSSVKLHDVNDKHGSASDQSDLDSLCLSDSGLXSLAEGFPKLEKLRLIXWGSNVTSEGVSSLAXKCTSLKSWDLQGC

SEQ ID NO: 206716 - protein, 489 aa, Glycine max
  Clone ID: PAT_MRT3847_28692C.1.pep
NSARARAGSSCGGGENNNNNDGGKQGVELSTAQRQELQMKKSKLVTMLDEVEQRYRQYHHQMQVVITSFEQAAGVGAAKSYTALALKTISKQFRCLKDAISSQIKTTSKTLGEDDCLGVKVEGSRLRYVDHQLRQQRALQQLGMRTRGRTRGQRGLPERAVSVLRAWLFEHFLHPYPKDSDKVMLAKQTGLTRSQVSNWFINARVRLWKPMVEEMYLEEVKQEPNNSSQDNTTKRSKESSKELWSEANATAQESGAMRLDHINILQSKAESFNNNNNNQTTSPTEISNNSHNSLQSAGFHLADMQSPNKPIRSTSEMQNSPGSILSVDMEMKPRHHGETNNNTIITREGNNNTTKFGIESHGGGGGGFGAFPNMEDIGRFHHHHHHVTDQQSLAPRFHGNGVSLTLGLPHSTENNNNLSLSGTTHQHGFLSQNMHLGMRSTTNNANNEFCGAINTTPPSNSHSGTSYESIDIIQNRKRFAAQLLRDFVA

SEQ ID NO: 206717 - protein, 46 aa, Glycine max
  Clone ID: PAT_MRT3847_28693C.1.pep
DFEKGSRTNSSVKRAHLTLFFFAHNKFLFYIINKNLTSGCREVHHR

SEQ ID NO: 206718 - protein, 96 aa, Glycine max
  Clone ID: PAT_MRT3847_28694C.1.pep
TGLANGLLSKGNDILCCDYASFDGSITKQVMSKMAEMINSLCGGDEKLMRERTHLLMAWCSRMAIRQKDGWRVECGITTGCPLTDVCNSMFNAMLI

SEQ ID NO: 206719 - protein, 68 aa, Glycine max
  Clone ID: PAT_MRT3847_28695C.1.pep
LFSMLSFVILAPFIVIFQVRTFLAFSGNIIFYPLVSFSHFLALFIYVLWSLFFLAPRRFPSIPPPPPK

SEQ ID NO: 206720 - protein, 95 aa, Glycine max
  unsure (1)..(95): unsure at all Xaa locations
  Clone ID: PAT_MRT3847_28696C.1.pep
XXSXXXXGSXXSYYMSXXTCXXXXXFXXXLXXXXXXXXXYXXVSLXCVGARXGXXXVVXXCCXVVLXXVXLFGXLCVVSXXXCXXXXAXXXXLNV

SEQ ID NO: 206721 - protein, 434 aa, Glycine max
  unsure (1)..(434): unsure at all Xaa locations
  Clone ID: PAT_MRT3847_28697C.1.pep
MILMSSSIVLCDNLILFNQKLLLKSFVSRGSSNFVIQLSSKTRRLNGFISKAEKHSGHSRKSSWWQKFFFEDDGNWLGLRDDDMVEAEAEAEGEGESTQELSEGDKFEAWKQRAEAIVELREAQEDGRNQAYRKWEDWLLDGDGTNGEDNTSSWEQGMRDYRENVRADSGDVPAEKGXFVEPARYLIFGREDDDMLYEDRVFQYASSNSAKFLAVLIIVPCAMDFLVHDYILMPFLDRSVRTVPLAAQMLDVRRYQKLQIIEELRTERGRFELEVEIGKSPPLSDDEVWWELRHKALELREEWRLENRRAFANIWSDTVYGISLFIILYFNKSKVALLKFTGYKIINNISDTGKAFLIILITDIFLGYHSESGWQTLLEIIVEHYGLEVDQSAITIFICLIPVVIDACVKLWLFKFLPRLSPRVTNIFREMKRH

SEQ ID NO: 206722 - protein, 58 aa, Glycine max
  Clone ID: PAT_MRT3847_28698C.1.pep
QWFTTVPSASPSSARSTTAACSPCPTWTSGKWPYATSAPPSLVSSSSTTISVARSPFT

SEQ ID NO: 206723 - protein, 69 aa, Glycine max
  Clone ID: PAT_MRT3847_28699C.1.pep
PRVSPDDDRRGLDHFRIVQLWSLNLFYWHIYSPYFYNLAGLIYCLPIVKFLETIIDMTSSYCLHRRMLT

SEQ ID NO: 206724 - protein, 88 aa, Glycine max
  Clone ID: PAT_MRT3847_2869C.1.pep
MLLLKKNDTRFVNSSIKYQHKFFSPLEITKQWFKTFLFLRSKSTKSCEVINTQLTDGTTQTRMQTKTYKIVISVSRTITVWTLINTNS

SEQ ID NO: 206725 - protein, 94 aa, Glycine max
  unsure (1)..(94): unsure at all Xaa locations
  Clone ID: PAT_MRT3847_286C.1.pep
CCEKTTEGNVLSTVGNYQRAGXQYENAADSVDEDGSFVLDEQEQAQTLTVSCWLNSAACSLRLDDYPGAIMLCTQVLDVDXYNVKAXYRRAQHI

SEQ ID NO: 206726 - protein, 95 aa, Glycine max
  Clone ID: PAT_MRT3847_28700C.1.pep
SAVIISRCSFIHHGNSTMFTSEEHLLIFIVSSVLTFLGVLFLYLAISVVAFGAPFRRAVFQLWSYCLGRPVPLRIVCNPARTKAAQMLCAPAERT

SEQ ID NO: 206727 - protein, 71 aa, Glycine max
  Clone ID: PAT_MRT3847_28701C.1.pep
WVYQTLRWDCLFHPGLPTFMSAHLAAHEHLRQWCIPRVYLYISMPRISNNTAYLITELMNIVLHHSSWSQN

SEQ ID NO: 206728 - protein, 110 aa, Glycine max
  Clone ID: PAT_MRT3847_28702C.1.pep
KGIATYLKSRDNKRFLPLLLLLKINAPETEAPNLTEGNIHKSLAGHRPDLSDETSVGHHSKEEDYGLITFQRFYLRSRRPLNSVPGVVTKRQQEPEPVEAPSLRPEDLRA

SEQ ID NO: 206729 - protein, 143 aa, Glycine max
  Clone ID: PAT_MRT3847_28703C.1.pep
MENPDSSLPLSIKKENVTPITSKIAELNESRSELLGRVQSLKQDLQSWRSKLDTQVKVYRDELSELKKTLNVEVDHLRAEFQDLRTTLQQQQEDVTASLRNLGLQDVSDVKHAPSQETKIEEIVKEEQVVVPEEDNSSKVTEN

SEQ ID NO: 206730 - protein, 54 aa, Glycine max
  Clone ID: PAT_MRT3847_28704C.1.pep
PVVLFFFFCFCSNRHSFVIRNFVYLCSPLKTATKRTIARDELNAHYLRMRMSSQ

SEQ ID NO: 206731 - protein, 130 aa, Glycine max
  Clone ID: PAT_MRT3847_28705C.1.pep
MVRVSVLNDALESMYNAEKRGKRQVMIRPSSKVIIKFLLVMQKHGYIGEFEFVDDHRSGKIVVELNGRLNKCGVISPRFDVGVKEIEGWTARLLPSTQFGFIVLTTSAGIMDHEEARRKNVGGKVLGFFY

SEQ ID NO: 206732 - protein, 83 aa, Glycine max
  Clone ID: PAT_MRT3847_28706C.1.pep
MCVFNVMSEWVNLNFIKFGPQFLLSFLLSMSALGSSHIFLLFTCGTCFCFFIFFFFFLLFVFFFFKTTFSCACAVSRNKCKTL

SEQ ID NO: 206733 - protein, 64 aa, Glycine max
  Clone ID: PAT_MRT3847_28707C.1.pep
RKAAVKAFFKGGRGGPEELETWGLCLGTGVTRNSSVHGNFQLRLGVANSHGNSFFSSRYKRAFG

SEQ ID NO: 206734 - protein, 54 aa, Glycine max
  Clone ID: PAT_MRT3847_28708C.1.pep
ISIASYLHQAILKFRRCDYIYGQLMTHCVGPKEVSTNSIVPVLHKMVVSWEKRF

SEQ ID NO: 206735 - protein, 68 aa, Glycine max
  unsure (1)..(68): unsure at all Xaa locations
  Clone ID: PAT_MRT3847_28709C.1.pep
VIRXIXYIXIRXKFFMTYDITXDLTFYXLFXXXLXXXWNSXXXXGXXKXXXSXXXXRAEFRAXVXVXX

SEQ ID NO: 206736 - protein, 70 aa, Glycine max
  Clone ID: PAT_MRT3847_2870C.1.pep
ESYSKKTSLSNALLTTLRHTLANLLRVHLGTSNCIIHSKEEKFFCSSQKVSCNQEIDCLLNCKFPEHKGK

SEQ ID NO: 206737 - protein, 97 aa, Glycine max
  Clone ID: PAT_MRT3847_28710C.1.pep
SHDITKQDSLFHQGRLRNTRCSKQISCQKIITSYAYSSFKLEGTHQSISYQETCATNSCNRPNRDIVLLKCEERLVGEAIASFVSKHRSSNQVWVQR

SEQ ID NO: 206738 - protein, 68 aa, Glycine max
  Clone ID: PAT_MRT3847_28711C.1.pep
LGQPWGSFSSRHNSEPRGLFWSALWFGPPPAIRKVILVPPVFSQGTPLVRGKTAHMRHWARGAPPHQG

SEQ ID NO: 206739 - protein, 73 aa, Glycine max
  Clone ID: PAT_MRT3847_28712C.1.pep
GISPVTIKTRHYLCCQKLSLWARTTTHRESDSTVCSFSSSLQKTNWALCILDLEKFQINWFVNHFIIIKKCLL

SEQ ID NO: 206740 - protein, 103 aa, Glycine max
  Clone ID: PAT_MRT3847_28713C.1.pep
MGAGVIGGSSGLRHRHWLTMESGVIFQRTPGGVISSYTRLLFLYPLDVACLVFLHSLLPFFVYYLLVVGVSGPPPPPPPPPPPPPPPQRRRTSYSDDGKPSLE

SEQ ID NO: 206741 - protein, 57 aa, Glycine max
  Clone ID: PAT_MRT3847_28714C.1.pep
KGDLLLYIVCALIPLLQANYMISVLNMKCETQPSLYLFYSPCTQRNNIVTAGFQLRV

SEQ ID NO: 206742 - protein, 91 aa, Glycine max
  unsure (1)..(91): unsure at all Xaa locations
  Clone ID: PAT_MRT3847_28715C.1.pep
NAQNEPXSKRHNGYNGGTKAPGGRAKNGAKCSAGESSTEPYIRGHYXAHAHESAATSYKTKXQARQKGQIGSTNPTHYEKPKAQRAAEDKA

SEQ ID NO: 206743 - protein, 64 aa, Glycine max
  Clone ID: PAT_MRT3847_28716C.1.pep
PNSILHSLVLVRHISTSFKSCHFWRLGKLRYFFYRLFDLKILYRGLALHKYQSQARIKREIYYL

SEQ ID NO: 206744 - protein, 152 aa, Glycine max
  Clone ID: PAT_MRT3847_28717C.1.pep
MAKSASNSVMQTLKRFRYRNKRNPVDMAKSASNSLMQSLKRFIKKPWEITGPCADPEYKSALPLAVEYRLSCPATVKEKPIIPNSLPETVYDIKYFTRDQRRNRPPIRRTVLKKPDVEKLMKEQTFAVSDFPPVYLNSAVEEDINARGGGYQ

SEQ ID NO: 206745 - protein, 353 aa, Glycine max
  Clone ID: PAT_MRT3847_28718C.1.pep
LKALGHIYVQLGQTDKGQDFIRKATKIDPRDAQAFLELGELLILSDTRAALDAFKTARTLFKKGGQEVPIELLNNIGVLQFERGEFELAQQTFKEALGDGVWLSFINEEKKSSIDAATSTLHPKDMKLFHDLESNGHHVEVPWDKVTVLFNLARLLEQLNDSGTASILYRLVLFKYPDYIDAYLRLAAIAKARNNILLSIELVNDALKVNNKCPNALSMLGELELKNDDWVKAKETLRAASDATEGKDSYATLSLGNWNYFAAVRNEKRNPKLEATHLEKAKELYTRVLIQHSSNLYAANGAAVVLAEKGHFDVSKDIFTQVQEAASGSVFVQMPDVWINLAHVYFAQGNFTL

SEQ ID NO: 206746 - protein, 97 aa, Glycine max
  Clone ID: PAT_MRT3847_28719C.1.pep
MSSSSSEDESMSEQSNELGLDFILSLDNVPSKLPPHLELFKTRVLCNNDAPVHTDTVQYSGAYAILGVDNSVRLDSFCENFKVEVKRLTDSDIEFDM

SEQ ID NO: 206747 - protein, 87 aa, Glycine max
  unsure (1)..(87): unsure at all Xaa locations
  Clone ID: PAT_MRT3847_2871C.1.pep
MASAAIFSSXRRRRSPSLEAFLAPVDLSDVALLGTLISVAGDIASCFSGHRFPFQRRNLRALIGKVEIFRSMLGCLRDSATAGALPP

SEQ ID NO: 206748 - protein, 298 aa, Glycine max
  unsure (1)..(298): unsure at all Xaa locations
  Clone ID: PAT_MRT3847_28720C.1.pep
PGATHASAQMLPPELMPKAAVANVAAAPLPPTSAPPSQPSQAPAHGIDPTKIQLPCASCKAILNVPHGLPRFACPQCGVDLAVDVSKVKQFFPAPLLPEEVNEVAVEVERDEDEGGMVGETFTDYRPPKVSIGPPHPDPVVETSSLSAVQPPEPTYDPKIKDDLENSKALSCLQIETLVYASQRHLQHLSNGARAGFFIGDGAGVGKGRTIAGLIWENWHHYRRKALGISVGSDLKFDARRDLDDVGATCIEVHALNKLPYSKLDSKSVGVREGXVXSTYNSLIASSEKGRSRLQQLI

SEQ ID NO: 206749 - protein, 41 aa, Glycine max
  Clone ID: PAT_MRT3847_28721C.1.pep
TALVRERVYSGFRYSLVTKIVTIYKSFLLNYCDVLLLYIRC

SEQ ID NO: 206750 - protein, 99 aa, Glycine max
  Clone ID: PAT_MRT3847_28722C.1.pep
SVDPLHKFTFSNSTTNLVTSFTVGSRAAGGSAVSRTIGLVCNCSLPPGTLLSLTFAKLPLPLIFPFYLAMFTYISLKIVLRLPTPLRAWPTARTPVYTL

SEQ ID NO: 206751 - protein, 106 aa, Glycine max
  unsure (1)..(106): unsure at all Xaa locations
  Clone ID: PAT_MRT3847_28723C.1.pep
NNLRTHVITFALGYSQTVFIDLGANSGCGMSTILMKMTSLFERAQNPPQGXHPYCNTKMYHATTAIPLYDDHTCDQSVINEKLVHELEPRAYDTHLMHEPAYDLMD

SEQ ID NO: 206752 - protein, 87 aa, Glycine max
  unsure (1)..(87): unsure at all Xaa locations
  Clone ID: PAT_MRT3847_28724C.1.pep
FISDQFTSWWFFNWGFIHWRLVNPQLKNHPFIRXSIQAXQCTSLQCISHQFRSHQCTMLQLRSHQYTKHPFISDQFRSXQCTSYQLR

SEQ ID NO: 206753 - protein, 56 aa, Glycine max
  Clone ID: PAT_MRT3847_28725C.1.pep
AQNGKECKSVCEHLPVLLQNFPHDLVMLLVGNRGITGSLERQGVDTGSRLDPVNKE

SEQ ID NO: 206754 - protein, 48 aa, Glycine max
  Clone ID: PAT_MRT3847_28726C.1.pep
FDHIQSPPLSKNFIGLEPTQFYKKNNFGAGLNFTFQPISTPFLSLPGP

SEQ ID NO: 206755 - protein, 191 aa, Glycine max
  Clone ID: PAT_MRT3847_28727C.1.pep
MQPTSNGSDSQATEQRTPPPQWMPMQYPAAAMVMQHHMMPPQHYAPPPPQPYMAYHHYQQQLPHALHAHHQGSSAENKTVWVGDLHHWMDENYLHRCFASNGEISSIKVIRNKQTGLSEGYGFVEFYSHGTAEKVLQNYAGILMPNTEQPFRLNWATFGTGDKRSDNVPDPSIFEGRLTADGTDSMLHETF

SEQ ID NO: 206756 - protein, 78 aa, Glycine max
  Clone ID: PAT_MRT3847_28728C.1.pep
CVRLRWITRGLFSMASVGSHRDEVNYAMDGGGEEEEDEKAPQEEDDTDMQEDEEEYTFRQKTVMNPCGLRCDQDDNGI

SEQ ID NO: 206757 - protein, 52 aa, Glycine max
  unsure (1)..(52): unsure at all Xaa locations
  Clone ID: PAT_MRT3847_28729C.1.pep
XXPFMIFPSLCKEVMVKPYYNHWYMVVANAMLIPMHIALCRLYWNCLLTLSG

SEQ ID NO: 206758 - protein, 93 aa, Glycine max
  Clone ID: PAT_MRT3847_2872C.1.pep
TAARRRQKGSKHGGANRNQAHLGLPGSSPEGGALCRKQPSSPGRAGWQALPHFPINRGRREEQKCSTLLVSEIHLKLVRKIVSVKKIQAEALP

SEQ ID NO: 206759 - protein, 61 aa, Glycine max
  Clone ID: PAT_MRT3847_28730C.1.pep
ATAVRGSIRAALSIHRFGLGPLGDLIPLAHIAFISQCQCRPSRVLSPLVIYPISRQFPAPQ

SEQ ID NO: 206760 - protein, 90 aa, Glycine max
  Clone ID: PAT_MRT3847_28731C.1.pep
SVGGIYISMGSSLSLLSSAWEEIVRHSLFGLSLNFTFGSKDGAVILRSGSFKKRESETTSKGTSTTNSSSKLKDCRPEHMVLVRNPSCIK

SEQ ID NO: 206761 - protein, 67 aa, Glycine max
  Clone ID: PAT_MRT3847_28732C.1.pep
APRGPAGNNPGGESSKAGDPFCFLPRNKHDTIQWPLMTPLNCCARRPLYLISFVIYNYPLKVLPLAI

SEQ ID NO: 206762 - protein, 87 aa, Glycine max
  Clone ID: PAT_MRT3847_28733C.1.pep
LLCLLQSYDAREREVNLGLASLMINPCLEPNFLHVFARRIVLMEHIRLHLHVGLKLTSFASAYTCSTLAASRFCSFSDTIFSPYFST

SEQ ID NO: 206763 - protein, 58 aa, Glycine max
  unsure (1)..(58): unsure at all Xaa locations
  Clone ID: PAT_MRT3847_28734C.1.pep
GVHVVCKSFPRIKIVPPKIEMGXKEDFRVKRGMGEFEDGYFGPDDDDEQGVVSSQRLL

SEQ ID NO: 206764 - protein, 82 aa, Glycine max
  Clone ID: PAT_MRT3847_28735C.1.pep
YDKDFRSDIIESILCGSLFPSEFSINDIVKRWVEIFSGFDKVEVKALEKILEQKQRLQEEMQKYLVLRQTSQEKDIPEAQKK

SEQ ID NO: 206765 - protein, 63 aa, Glycine max
  Clone ID: PAT_MRT3847_28736C.1.pep
PCRIISPHLNVGGPIKPDASNGNTQVFINGREITKVELRMLQLAGVQCAGNPHFWVNEDGSFQ

SEQ ID NO: 206766 - protein, 80 aa, Glycine max
  unsure (1)..(80): unsure at all Xaa locations
  Clone ID: PAT_MRT3847_28737C.1.pep
GSCLHADALIRRAEIYQDYMKLIPIPNHXGTMIPFTSWMGLSRSMKQIYGQPLNCLANILLEQWGQLRIGSEDELASSMY

SEQ ID NO: 206767 - protein, 200 aa, Glycine max
  Clone ID: PAT_MRT3847_28738C.1.pep
MAGMQKLPYGDVDSSLRALAGRAEGFGRLAIGGLHGPLYFVTTLSDDGPGSLREGCRRKEPLWIVFEVSGTIHLSSYLSVSSYKTIDGRGQRVKLTGKGLRLKECEHIIICNLEFEGGRGHDVDGIQIKPNSRHIWIDRCTLRDYDDGLIDITRQSTDITVSRCCFGQHDKTMLIGADPTHIGDRCIRVTIHHCFFDGTR

SEQ ID NO: 206768 - protein, 95 aa, Glycine max
  unsure (1)..(95): unsure at all Xaa locations
  Clone ID: PAT_MRT3847_28739C.1.pep
ATHTLDGGAIDYEGAMASKLTIANNVTDXHLDMILKSSTFNEFKAHNEDWTKPYDAFCIMLNYLHTYHLTQXGHLAHYSQDHRQKLVSKYSLHYQ

SEQ ID NO: 206769 - protein, 85 aa, Glycine max
  unsure (1)..(85): unsure at all Xaa locations
  Clone ID: PAT_MRT3847_2873C.1.pep
XXIXXXXXXXNXXXXXLXXXXXXXXXXIXXXXXXXXXXXXXXXLXXXXXXFXLAXXTPXXXXSHXXLIDIXXXXYXXXXXXSXGE

SEQ ID NO: 206770 - protein, 74 aa, Glycine max
  Clone ID: PAT_MRT3847_28740C.1.pep
TRFIYVVKRQYCCVSFMSSLSELSFCMTYIIFSVLLALILIPSWLIGMAKLKLGWEYCSLNFTHFLFFLGAFLS

SEQ ID NO: 206771 - protein, 52 aa, Glycine max
  Clone ID: PAT_MRT3847_28741C.1.pep
ITVLQIRGLLHNIHPGSPASLVHEPCQLANSVTSVALEDRPIGSYPPKRVSV

SEQ ID NO: 206772 - protein, 54 aa, Glycine max
  Clone ID: PAT_MRT3847_28742C.1.pep
ASFANYSFLFLQVLEKASNTRIANNYPNRKSIFPTGSSKGPILQANSAILFLFC

SEQ ID NO: 206773 - protein, 57 aa, Glycine max
  unsure (1)..(57): unsure at all Xaa locations
  Clone ID: PAT_MRT3847_28743C.1.pep
VPGVTHPSHRCEKTHKGGGTLFTLTKDQKPCETVFLXASXXNSLGAYXYDHQQPPFS

SEQ ID NO: 206774 - protein, 180 aa, Glycine max
  unsure (1)..(180): unsure at all Xaa locations
  Clone ID: PAT_MRT3847_28744C.1.pep
ADFGLSSYERWKEHAXAIRGIFGYLDPEYISSGTFTKKSDVYSFGVLLFEIIAGRNPQQGLIQYVRELAAMNTEGKVGWEEIVDSRLEGKCDFQELNEVAALAYKCINRAPKKRPSMRDIVQVFTRILKSRYQRNHHHKKSLSATVDEVSIDIDQLETKSSVTDHRREESIDSTADIYDL

SEQ ID NO: 206775 - protein, 194 aa, Glycine max
  Clone ID: PAT_MRT3847_28745C.1.pep
MESSEYHTLHIFFFPFFAHGHVIPTLDMAKLFAEKGVKATIVTTPLNAPFISKAIGKSKTKHNRIHIQTIELPCAEAVLPDSCENTDSITSQDLFESFCMATCFLQEPFEQLIEKQHPDCIVADMFFPWATDSAAKFGIPRLVFHGYSFISLCATSCMELYKSHNDAESSSVGIPNLPGEIRIEMTMLPPYSKS

SEQ ID NO: 206776 - protein, 248 aa, Glycine max
  Clone ID: PAT_MRT3847_28746C.1.pep
MEFGFRHQLGLVCVILLFPALCNCQEYFTKSRATYYGTPDGFGTPTGACGFGEFGRLMDGYGGRVAGVSGLWRNGAGCGTCYQVKCLMPKLCDVNGVTLVATDYGQGDRTDFIMSPSAFSRLGVNKIASEEIKKKGTVDIEFKRVPCKYTGNVLFHVQQTSSNPGYLAVVILNVNGKYDVTAVEMWQKSQQRWVPLRRSYGAVFDFANPPSGEILLRFKVGSNWKLPKIPIPAYWKPGATYDTKVQVY

SEQ ID NO: 206777 - protein, 155 aa, Glycine max
  Clone ID: PAT_MRT3847_28747C.1.pep
RETEGDAIEFTKAQLPGAMSQDSKAWKHAVEQFKAGEHSAAGILVNTFEELEKMYVRGYEKVGRKIWCIGPLSLHDKLFLERAGRDGNETSLDESECLNFLSSNKPCSVIYVCFGSLCRINASQLKEIALGLEASSHPFIWVIGKSDCSQEIEKW

SEQ ID NO: 206778 - protein, 62 aa, Glycine max
  unsure (1)..(62): unsure at all Xaa locations
  Clone ID: PAT_MRT3847_28748C.1.pep
MLLAFYKKKKKKKKKKKKKKKKKKKXKKKKFKKKKKKKKKTWGGGPDPNSPFRGFYPPSRAV

SEQ ID NO: 206779 - protein, 51 aa, Glycine max
  Clone ID: PAT_MRT3847_28749C.1.pep
LSSLQIQSKYGFANKESSFKRSISETTLERLSELFGSFSIFQQRGEPKGTT

SEQ ID NO: 206780 - protein, 79 aa, Glycine max
  Clone ID: PAT_MRT3847_2874C.1.pep
LMRVHFVFSQLFNKNRHFVFFPPFAILTLEPNQPTVTPPKLQTQNANRNQDLPFWRNFCFLTTRQTAPHLSKLFQTKGL

SEQ ID NO: 206781 - protein, 150 aa, Glycine max
  unsure (1)..(150): unsure at all Xaa locations
  Clone ID: PAT_MRT3847_28750C.1.pep
MVAAKEVEHVEGMVLVGSLLVAMADPKHPHPAPGLPPPPSPPVSPPPPFRGAPPPPPLNPPSHHPSSPPHPXSYPSLLTEPPPTPPFFVPPPCPLLPPPRSLTPPHPPPTPPSLFPPPFPPDSPLXYPPPPYPPFPPTPPPHPLLSPPPP

SEQ ID NO: 206782 - protein, 66 aa, Glycine max
  Clone ID: PAT_MRT3847_28751C.1.pep
DTGLNKMELTPTQIFIPLKHTHVEHTTLKSRFGANLIIREHTYHLHTYYPHLSNMKIYLTSPNSSI

SEQ ID NO: 206783 - protein, 89 aa, Glycine max
  Clone ID: PAT_MRT3847_28752C.1.pep
SEKLGLLLNTYKKNPRDLKKKKKLPKAFFSSPGPLNSLLTGGNMLGPPKQWGLGIRDFSHHHELPHGPILNKGTWAHICTKKNRFGYKN

SEQ ID NO: 206784 - protein, 123 aa, Glycine max
  Clone ID: PAT_MRT3847_28753C.1.pep
AAWTRLPPHREPRRLHQERGSTRLYAERDPTRLQAWRDPKRQHRQCIQSDNASVSSTLPRCRKLQVAKGQATPSVASQPSQMNVTSLDWDHGSLTNSLQTTPFERSETDVVEAPTTEDEGCTR

SEQ ID NO: 206785 - protein, 100 aa, Glycine max
  Clone ID: PAT_MRT3847_28754C.1.pep
MFSPKYSPLQIFSPDPLLFFLSSLSFLDWFSLPLERSDLLFMKSYFSFRRRFSLILLRALFDYFPLGFISGFISFLVFFLSIRVYLFTFYLIRLKTNNIP

SEQ ID NO: 206786 - protein, 550 aa, Glycine max
  unsure (1)..(550): unsure at all Xaa locations
  Clone ID: PAT_MRT3847_28755C.1.pep
MKDSNSDLFDPVMAMESEWSRGGTTSDADFAFAFNDSNFSDRVLRIEIMHDPVDARPDSDACATIADWARHRKRRREDIKKDNGADLASVPDEQVLNGHQSEADECENQDEEADAMVEEPHSGDEATNSNDSDWSMDCSAGAVVRVKTLHISSPILALKMPLIYKIFEMSMXNSEHXNVFPQGNVSNEAPLMKLLLVRFQHYDEDSLVMVNVNSLDGCDDVSSFLLNWNMDCSAVVRVRTXTSVLLFWHAKSPFLLADVSQPLTDAGXEQSPGRYKDITKFQEEXMALPLAGLGNILTSDDLQVASEDAVYDFELKWSRQQYTKLEDRREVLGTRLAQLIRFPYMTCRKLKKVLTCSDFDHEIASKLVLEGLFFKSEAPHRQRPLAAVETASSNRRFVERAYKYRPVKVVEFERPRQQCVVYLDLKREECNNLFPSGRVYSQAFHLGGQGFFLSAHCNMDQQSSFHCFGLFLGMQEKGSVSFAVDYEFAARSRPTEEFVSKYKGNYVFTGGKAVGYRNLFAIPWTSFMAEDSLYFINGVLHLRAELTIKH

SEQ ID NO: 206787 - protein, 110 aa, Glycine max
  Clone ID: PAT_MRT3847_28756C.1.pep
MAPKHPSTGLFVGLNKGHVVTKKELPPRPSDRKGKTSKRVHFVRNLIREVAGFAPYEKRITELLKVGKDKRALKVAKRKLGTHKRAKKKREEMSNVLRKMRAGGAGDKKK

SEQ ID NO: 206788 - protein, 82 aa, Glycine max
  Clone ID: PAT_MRT3847_28757C.1.pep
KIKGAPLPQNFGGSPPILKNLVKSFKTGLFFFAPKTLKILKMFPPGPIKIFSIWINPPFRNKNFYLPSLFCLQLKMGKKFPC

SEQ ID NO: 206789 - protein, 66 aa, Glycine max
  unsure (1)..(66): unsure at all Xaa locations
  Clone ID: PAT_MRT3847_28758C.1.pep
SSLLFLSLFTFFILPSYSLRTFCIIESPETVQDFATMELQEIHDNIRSQRNKIFLHMEXVRRLMIQ

SEQ ID NO: 206790 - protein, 48 aa, Glycine max
  Clone ID: PAT_MRT3847_28759C.1.pep
NLLSPFKIVHLIKIGNPATKKKKREREKKPTGIPQNSDDEVVVDLDAL

SEQ ID NO: 206791 - protein, 64 aa, Glycine max
  Clone ID: PAT_MRT3847_2875C.1.pep
EERFVVFVAPGTGALFVSSLSFAFFVPHPTRLEVVHPLFHGCAPSYACGCALHSAQCPMRLMCL

SEQ ID NO: 206792 - protein, 254 aa, Glycine max
  unsure (1)..(254): unsure at all Xaa locations
  Clone ID: PAT_MRT3847_28760C.1.pep
MMPYPKNTNEEAKANKARKPKPPPSFVSRFTTTFSSMARKPLLKQTLATLFLFFVLYAIFNAFFHPTDSSAFDAAATFSSASSVLLSAGTTKSLYVKVFLYDLPRRFTSGVIHHHTLARGSGGVGGSASRATPDDVADALKYPGHQHMAEWYLFADLSRAESERAGSGSPVVRVADPEEADLFFVPFFSSLSLIVNPVRPPGSNSGLEKPVYSDEENXEALVEWLEKQEYWKRNNGRDHVIVASXPNAMYRGID

SEQ ID NO: 206793 - protein, 143 aa, Glycine max
  Clone ID: PAT_MRT3847_28761C.1.pep
SFFFFYFSFFPFFFFLFFFFIFFFFFFFFFGGRGTFCPLYGPKLWLFQGHLKIMNRPIKKLSYAKDNLKNPLKDKIFYPQGPVLIPQGRKKNRVVVAPHIRGTRLQTSSAGKKEGDQLLPGTTRDGFLDVFGPVCSRPPGSPP

SEQ ID NO: 206794 - protein, 91 aa, Glycine max
  Clone ID: PAT_MRT3847_28762C.1.pep
KFEALAAHDALVELSGAMNTTACSLMKIANDIRFLGSGPRSGLGELILPENEPGSSIMPGKVNPTQCEAMTMVAAQVMGNHVAVTVGGSNG

SEQ ID NO: 206795 - protein, 134 aa, Glycine max
  Clone ID: PAT_MRT3847_28763C.1.pep
GSSTARLRQLHHIPSKTSLSCSIDGLDLHSFFLNQHTVSLKAASPRSCGVIIHYHKSLLQTLSTNNMLSKLTFAIVALQASLALAGKAVITNRCDYDVWDWSISTGHASSSFMVPAGSSHSEGYTGSSTSLKVS

SEQ ID NO: 206796 - protein, 89 aa, Glycine max
  unsure (1)..(89): unsure at all Xaa locations
  Clone ID: PAT_MRT3847_28764C.1.pep
MVSEDLEKHELDELQKQLGNKLKFESATSALKAHLQYTXPSASRSLHKTFXLGKRQVATVLRSTYRAASFWKAGLGHFEYDQLHVVESF

SEQ ID NO: 206797 - protein, 187 aa, Glycine max
  unsure (1)..(187): unsure at all Xaa locations
  Clone ID: PAT_MRT3847_28765C.1.pep
MAKAYPTASADDHKAADRGKKKLIGFMAEKRRAPLMLRMAWHSAGNLMTRGTQDRXGRFRTIKHXDXLVLRANDGLGIDVRVLEPLKEEIPIWSYADCYQLAGAAXVEDTAXYSEVPFHPAREDXPETPRXGRLPDATTGADPSTDASAKDMRLTDHDIADLSXGHYLVAAHKEXRSGLEGTCTSNP

SEQ ID NO: 206798 - protein, 79 aa, Glycine max
  unsure (1)..(79): unsure at all Xaa locations
  Clone ID: PAT_MRT3847_28766C.1.pep
KGPSWAGCVRTVLSASRLRVGWGCSGVGRVAGSVQLWGRSRCRCLQCPXWRNTHLDLQLGXEHQXQXXGCCTSQXCFFX

SEQ ID NO: 206799 - protein, 62 aa, Glycine max
  Clone ID: PAT_MRT3847_28767C.1.pep
VPCHQCSRNMQLEDLIMWQPLCLQSLVQAFQIFVPSSHERTTSTQNVPLLLQLWLSHNKHNS

SEQ ID NO: 206800 - protein, 77 aa, Glycine max
  Clone ID: PAT_MRT3847_28768C.1.pep
TGSIPHDTIKLFKKILITIFQFKLGKINFGKTDPINQLGSKKITEPFANFGGLPMKTNFQKGPMSVFAQQGIAPPKL

SEQ ID NO: 206801 - protein, 109 aa, Glycine max
  unsure (1)..(109): unsure at all Xaa locations
  Clone ID: PAT_MRT3847_28769C.1.pep
LLDTFHVIDRSELPKWIENMERDHFLWKKKRKRFRFILLGPSKTYRLWYRLLFKSLVAIQNTKIQQQRLSQVLLEMIXXNNHNHHNIKVCRSCLCHIYSYIHFMPLSSY

SEQ ID NO: 206802 - protein, 71 aa, Glycine max
  Clone ID: PAT_MRT3847_2876C.1.pep
HKLSLWSPKNSTRKTCLDVVSLCSSHCIHMLNPVTSLGNHTQFSQTGKLLAVFGWCTIHMPHILGPFSPEI

SEQ ID NO: 206803 - protein, 83 aa, Glycine max
  unsure (1)..(83): unsure at all Xaa locations
  Clone ID: PAT_MRT3847_28770C.1.pep
XXYSXXLLRXCXXXSXVXXXLFXDXTXCXXXXXXXXXXXXXXXLXRPVXVSVCXTXMNXXTXMXXXXXXXXPXXEPXXEXAYX

SEQ ID NO: 206804 - protein, 105 aa, Glycine max
  Clone ID: PAT_MRT3847_28771C.1.pep
TKWPQLIFGLPNFICTKKGKNNMDKAIFPYLQKKPLFILSSPDPYLFLGRPEYQPLKKKKKKFPSSTESPFKFQITWDEKPRTRSPQQLQRDPRQKRGPRVAPPN

SEQ ID NO: 206805 - protein, 104 aa, Glycine max
  Clone ID: PAT_MRT3847_28772C.1.pep
STAIFSSYNWFHPRVTVLSHGVDAPYRTHFMQRTRSIIVTTSVFGCSSQRMSISSSRLSIGALQLWLVENLPFLEHYSYMLLVESDLVLDPVQDQINVVSKADM

SEQ ID NO: 206806 - protein, 83 aa, Glycine max
  Clone ID: PAT_MRT3847_28773C.1.pep
RETRWPITLASSFYRKELRSPRGALSFGACNFKTPMSIIKSFYSPPKWFFFFSPHLVPSLGGPINKFFAPINVLCFSFLLPKN

SEQ ID NO: 206807 - protein, 23 aa, Glycine max
  unsure (1)..(23): unsure at all Xaa locations
  Clone ID: PAT_MRT3847_28774C.1.pep
YLTPFYRIYIILMVFXGCDLVRY

SEQ ID NO: 206808 - protein, 39 aa, Glycine max
  unsure (1)..(39): unsure at all Xaa locations
  Clone ID: PAT_MRT3847_28775C.1.pep
VFKSWPRKLTFLELWRSHGRGFXSVGQLHALCIHTNSVL

SEQ ID NO: 206809 - protein, 99 aa, Glycine max
  Clone ID: PAT_MRT3847_28776C.1.pep
ESSASQFPYVYGNLPTGSYNASIILRTRMEVTAGRRAGAIKLINKHHFMARIASRHCSYSTRQPLCAPSLLSCKLSFVPSKALPSSPVRRTRGRAGNSG

SEQ ID NO: 206810 - protein, 66 aa, Glycine max
  Clone ID: PAT_MRT3847_28777C.1.pep
PNPKVCFDMTIGGQSAGRIEMELYADVTPRTGDNFRALCTGEKGVGRNFKPLHYKGSTFHLGNPYF

SEQ ID NO: 206811 - protein, 133 aa, Glycine max
  Clone ID: PAT_MRT3847_28778C.1.pep
IPLTYFANCLLSSSTTSPNRYTTQRGRPSLKPFGFGGRVPPGFYFSFTSSLTYSFIRAIFRLFLYAFVTSYSLCSSLSLRDGHASLLPAGLPYTNLFTDTTCSPVIPLNLFPLIPTPPPPPPPPPPKKEDVIQ

SEQ ID NO: 206812 - protein, 49 aa, Glycine max
  Clone ID: PAT_MRT3847_28779C.1.pep
GFRFFLRTYSFFYLLAIISAKIIPMNRSSSVSNFRNLTVAGSLSLYDFQ

SEQ ID NO: 206813 - protein, 42 aa, Glycine max
  Clone ID: PAT_MRT3847_2877C.1.pep
MTTPDSRTYKWNNIRSNMSEHVYSTLRLCRAKQQLGAYFVQI

SEQ ID NO: 206814 - protein, 73 aa, Glycine max
  unsure (1)..(73): unsure at all Xaa locations
  Clone ID: PAT_MRT3847_28780C.1.pep
HXHXXRXXXNXEKHXRHXHRXXXXSXXACXAKLHXLNWIRXHXDVSXSGPHXNIRDSISXTVPVXLGPQLTPX

SEQ ID NO: 206815 - protein, 198 aa, Glycine max
  unsure (1)..(198): unsure at all Xaa locations
  Clone ID: PAT_MRT3847_28781C.1.pep
VIRATSGEPKGHRRRGRXTGGXPAEXQAGKPTTPGRTEAEQXHKKKKRSGAPAEXXXRKTKLPHATIFKPQQPERRXVADTFXRIFAASAFSTHVYFFCPLDPCDRGTCRSALNIEFFLIKPLPCDPLSLPKYXPSXRIRCLIXDEQARRQVSTGSKGQRHDLERRGARESRAXPAPDANAELPLXMQKRQRQAHSKS

SEQ ID NO: 206816 - protein, 306 aa, Glycine max
  Clone ID: PAT_MRT3847_28782C.1.pep
MVMEGRICEELKPRYYALCAIGGMLSAGTTHLAITPFDVLKVNMQVHPIKYYSISSCFTSLLREQGPSVLWKGWTGKFFGYGAQGGCRFGLYEYFKEVYSNVLVDQNRSFVFFLSSASAEVFANVALCPFEAVKVRVQAQTCFAKGLYDGFPKLYASEGTRGFYRGLIPLLGRNIPFSMVMFSTFEHSVDFLYRNVVKRKKEDCSIGQQLGVTCLAGYAAGSVGSFISNPADNIVSSLYNRKADSLALAIRNIGLANLFTRSLPIRMLLVGPSITLQWFFYDTIKILGGMSTSGGVRTDMRGNGAG

SEQ ID NO: 206817 - protein, 467 aa, Glycine max
  unsure (1)..(467): unsure at all Xaa locations
  Clone ID: PAT_MRT3847_28783C.1.pep
MTSMATFFAQTSFPSHSLSKTFDTHFAPAPKVNVFVNFRARRHVGVRVSNALIEPDGGKLVELVVTDFERDLKKGEALSLPRIKLSRIDLEWVHVLSEGWATPLKGFMREAEFLQTLHFNSLRLDDGSVVNMSVPIVLAIDDAQKHRIGDNKKVALFDSKGDPVAILNNIEIYKHPKEERIARTWGTIAPGLPYVEQTITNAGNWLIGGDLEVIEPIQYNDGLDHFRLSPTQLRAEFTRRNADAVFAFQLRNPVHNGHALLMTDTRKRLLEMGYKNPVLLLHPLGGYTKADDVPLDWRMKQHEKVLEDGVLDPETTVVSIFPSPMHYAGPTEVQWHAKARINAGANFYIVGRDPXRHEPXQLRKEICMMLXPWKESIEHGTGTRAXLNILPFRVAAYDKTQGKMAFFDPSRPQDFLFISGTKMRTLARNKESPPDGFMCPGGWKVLVDYYDSLVLSSNGKVQEAVPA

SEQ ID NO: 206818 - protein, 60 aa, Glycine max
  Clone ID: PAT_MRT3847_28784C.1.pep
VIRPGTKVLSKDAGAVAAVIVVSVASVSNVTVTEAPSGIDDGLSVPLFNHPLAVFGGKDC

SEQ ID NO: 206819 - protein, 38 aa, Glycine max
  Clone ID: PAT_MRT3847_28785C.1.pep
LKLIYQLAPMASKKNTVVFEDYFPSMMDKLDTDGFMND

SEQ ID NO: 206820 - protein, 127 aa, Glycine max
  Clone ID: PAT_MRT3847_28786C.1.pep
MQNLRHDAVSEGAYPPWIAGSDEENYPLTRKVQRDIWIHQHPLNCSIPDVKFLVTDWERLPGFGIGAHIAGMCGLLGIAINEGRVLVTNYYNRADHGSCKGSFPSSWSWYFFPENFLKCRLRAFELM

SEQ ID NO: 206821 - protein, 349 aa, Glycine max
  Clone ID: PAT_MRT3847_28787C.1.pep
AKESSLPSSLPPPPPSGTRISPAVLFIIVVLAVLFFISGLLHLLVRFLIKHPSSASAQSNNRHQELSTSDALQRQLQQLFHLHDSGLDQAFIDALPVFQYKEIVGLKEPFDCAVCLCEFSEKDKLRLLPMCSHAFHISCIDTWLLSNSTCPLCRGTLLTQGFSVENPIFDFDDLMEDEMCPWNGENGFNTRQKTVVVEESVEKEKGVFPVRLGKFKKLSSVEGGGESEVGETSSSNLDARRCYSMGSYQYVVGNSDLRVALNHDEIGKGQVTRLNKGMELDDGKVSVEEGDVEGKKISSVSKGDSFSVSKIWLWPKKGKLPTSLDGQIGMPMPSFLNTDFPRMRDTEGA

SEQ ID NO: 206822 - protein, 63 aa, Glycine max
  unsure (1)..(63): unsure at all Xaa locations
  Clone ID: PAT_MRT3847_28788C.1.pep
XGFFFFFFFLRTNNSSLFINKIKSPPTKKGVPESSEQNKITPYNLLKKGDHGAWYLLFLITPI

SEQ ID NO: 206823 - protein, 138 aa, Glycine max
  Clone ID: PAT_MRT3847_28789C.1.pep
MSRSREHAIGDAVNTEILRKQSSQKSIAEEGVVVEEKKNKGSCEMGKKECLNNSKSMNEGVHDLAEKMKELEMMDTGDVEHELDIEEALHYYSRLKSPVYLDIVDKFFMDMHSEFSVQESSISVKRSKSKGRPDSIRL

SEQ ID NO: 206824 - protein, 188 aa, Glycine max
  Clone ID: PAT_MRT3847_2878C.1.pep
VLLVWTMILLSRYPDWQARAREEVSQVFGNQKPTFDGLNQLKIVTMILYEVLRLYPPGVGVPRKVIKDVKLGNLSFPAGVEIFISTILVHHDSELWGDDAKEFKPERFSEGVLKATNGRFSFFPFGGGPRICIAQNFALLEAKIALSMILQCFSFELSPTYTHAPTMVMTIQPQYGAPVILHKVEKYE

SEQ ID NO: 206825 - protein, 116 aa, Glycine max
  Clone ID: PAT_MRT3847_28790C.1.pep
MLGCMHIPNEDRNASGCESLKNWGIWSKPFRMKAQYSELKATTTLGCGAHAGTVGQTVAHPLDVFHQIMHMVGWEDADSTFAGEEKSKLVYTGMDDAFTYNVPTDRVGAFFKGLFP

SEQ ID NO: 206826 - protein, 102 aa, Glycine max
  unsure (1)..(102): unsure at all Xaa locations
  Clone ID: PAT_MRT3847_28791C.1.pep
APVLDSTTSHIAVKFGELVTKMDRRSGKELXKEPKFFKNGDAGMVKIIPTKPMGAETFSEYPPLGRSAVRDMRQTVAVGVIKNVEKKVPAGAKVTKAAANKK

SEQ ID NO: 206827 - protein, 65 aa, Glycine max
  Clone ID: PAT_MRT3847_28792C.1.pep
GKVQRPVSMISCNATDKEGFCRSSPKFAVMFAKRALVYWYVGDPHAIIWSSVRLLRISLLLRSIY

SEQ ID NO: 206828 - protein, 36 aa, Glycine max
  Clone ID: PAT_MRT3847_28793C.1.pep
YLVHYLWGRLAFYMHLILPRKIPSHGARDWGKSLTD

SEQ ID NO: 206829 - protein, 126 aa, Glycine max
  unsure (1)..(126): unsure at all Xaa locations
  Clone ID: PAT_MRT3847_28794C.1.pep
NRKKRGHVTXGHGMNRESTGKHRWRTRVTARGMDANRMLVRQITPRGFFFRXGMRYFHKGRFKSHSRMRNIDKLWTLGPQEVKDEGSKENRGPLSDVTEVGYLKALGKGVSSQNQTGGGQAKLYSK

SEQ ID NO: 206830 - protein, 91 aa, Glycine max
  Clone ID: PAT_MRT3847_28795C.1.pep
SISTVHNFLRNKCTTNNIFHSSSTSIPSFLHDHHYHSFLLYLPIILIQINCHLILPSKHHIHKPKRSLIISTFVSYSINLNTSAFPFYKPL

SEQ ID NO: 206831 - protein, 129 aa, Glycine max
  unsure (1)..(129): unsure at all Xaa locations
  Clone ID: PAT_MRT3847_28796C.1.pep
GSRSPSKPVNLRDADLIHFRDKYHKAPDGSITKTTAQEHVLVAKTXRLHAYNSSILIGKLEFGIVAGPXSLNAGIPDGSALDDDWHCLNTWLRXLETHWGPSSQVGMNPMMIFANICNARINIEQMADA

SEQ ID NO: 206832 - protein, 307 aa, Glycine max
  Clone ID: PAT_MRT3847_28797C.1.pep
VSRKLEGTHSAASFCSTSALPWKPPWESSSGSLLFCLPHSLFFLLSISTFPSSTRLLARSFFSDTVPIDNKEKEQLVTSVKPTYSPTPPNRHLRTPHSGYHFDGTTRKFFEGWYFKLSIPERRQSFCFMYSVESPSFRKPLTPLEVAQYGSRFTGVGAQILGADDKYICQFSPESQFFWGSRHELMLGNTFVPNQNSKPPNKEVPPQEFNDRVLEGFQVTPLWHQGFIRDDGRSNYVETVKTARWEYSTRPVYGWGDVGSTQKSTAGWLAAFPVFEPHWQICMAGGLSTSWIEWDGERIEFDNAPSY

SEQ ID NO: 206833 - protein, 51 aa, Glycine max
  Clone ID: PAT_MRT3847_28798C.1.pep
KETLPRYHSNLDLRKRKGKLSSGSFISNIDTRLLRRMQIHDSSILCFHFII

SEQ ID NO: 206834 - protein, 58 aa, Glycine max
  Clone ID: PAT_MRT3847_28799C.1.pep
KFTKCLVQLNILLFKCVLLNFLLSLLNNLCGKMCVSTFPSFFISYFQESNVAINCILV

SEQ ID NO: 206835 - protein, 92 aa, Glycine max
  unsure (1)..(92): unsure at all Xaa locations
  Clone ID: PAT_MRT3847_2879C.1.pep
WVRAKFAFNKAPQPPFFGGAAPSLVKAGPSPPPLVWDFNPGPPKGGGGPPETFGFPLFXKNPNPPRFWKFWGVFPPNKRPQNPFYLDWVFGG

SEQ ID NO: 206836 - protein, 70 aa, Glycine max
  unsure (1)..(70): unsure at all Xaa locations
  Clone ID: PAT_MRT3847_287C.1.pep
YVKHMMRFCXHALRRSGSRSHASLNVLRPVGKCLQHGSPSXLTWHRIRNIADVYFEKDELRRHVSVLYGL

SEQ ID NO: 206837 - protein, 63 aa, Glycine max
  Clone ID: PAT_MRT3847_28800C.1.pep
IFARKNEMKVSPARFWEKGPGYGVGSLKNQVKKGATDRPKLKFGHGLTHDLGGQAPPGQTDNA

SEQ ID NO: 206838 - protein, 109 aa, Glycine max
  Clone ID: PAT_MRT3847_28801C.1.pep
LPYGCGRRQKGDTPEEDDEKSVGVVDPSEIMKGSKMYYRYMGSLTAPPCTEDIIWTVDKKVRTVSRGQVKLLKDTVLKYYAKWNARPLQPLNQRAIQLYVPKTKNKPVY

SEQ ID NO: 206839 - protein, 43 aa, Glycine max
  unsure (1)..(43): unsure at all Xaa locations
  Clone ID: PAT_MRT3847_28802C.1.pep
XTPTTPITLHGKGKISSIDXAIEVWRCNLNAYETCTVRNVQIE

SEQ ID NO: 206840 - protein, 74 aa, Glycine max
  Clone ID: PAT_MRT3847_28803C.1.pep
PLKLINYTSDLGRRTCPIYNDSYYLLSSHIIGHSLSFHLYSYHFLDKRFPIYIPHVHTSCSTDGDLSPFFSHSL

SEQ ID NO: 206841 - protein, 119 aa, Glycine max
  Clone ID: PAT_MRT3847_28804C.1.pep
NRIINMTNLNYYRGCFGDQHNCWYTQQTHVKGQKCPLLNFLKRNCLLFPLDVHTAIGFFSLCLHIFFIGPPLPPFMPLVTATVVIALFSFVAISLFFSLADLLHMHGWEGLEIRISYTD

SEQ ID NO: 206842 - protein, 69 aa, Glycine max
  unsure (1)..(69): unsure at all Xaa locations
  Clone ID: PAT_MRT3847_28805C.1.pep
MGCSVHCARFFSHLKVSCCGDNCGCGNSCNCGNGCCGYMMXPHFIYTDSTNNDILFIRVASVNAQFDGA

SEQ ID NO: 206843 - protein, 77 aa, Glycine max
  Clone ID: PAT_MRT3847_28806C.1.pep
EAISRQRSNQLSGEIVTRAVLFEAIHGRRNLLRSTKILYNTRASDFPERGPRGRRMRKRKRKPSLKDASGLSGNLIA

SEQ ID NO: 206844 - protein, 185 aa, Glycine max
  Clone ID: PAT_MRT3847_28807C.1.pep
TELLMNPQAMEKAQKEVRSILGERRVVAESDLHQLEYMRAVIKEIFRLHPQVPVLVPRESMEDVVIEGYRIPAKTRFFVNAWAIGRDPESWEDPNAFKPERFLGSDIDYRGQDFELIPFGAGRRGCPAITFATAVVELALAQLLYIFVWELPPGITAKDLDLTEVFGISMHRREHLHVVAKPYFP

SEQ ID NO: 206845 - protein, 105 aa, Glycine max
  Clone ID: PAT_MRT3847_28808C.1.pep
MHQAIPYRSWRPLHNPTTHFSPLPLIAHSHNDDDKMRNIVNNNNNNIHSSAGRMVLNMVSENAVIVIGRRGCCMSHVVKHLLLGLGVNPAVYEVEEKDEEGVAKQ

SEQ ID NO: 206846 - protein, 182 aa, Glycine max
  Clone ID: PAT_MRT3847_28809C.1.pep
GRLRPKQESMADPYYSYGAPVGADGASIARSSFAGYIPSEPSNSTTELRGIGSDYLQRDIGLFYSADDTLGSRVHSEPVKGYSPLADPCLSKKRDTTPLGINNGVPDVSSERPASKSSYDGLPISAADSNILFVGGLPKDCTRREVGHLFRPFIGYKDIRVVHKEPRRSGDKAMTLCFVEVC

SEQ ID NO: 206847 - protein, 79 aa, Glycine max
  Clone ID: PAT_MRT3847_2880C.1.pep
NWEANFNYNYCPRMILMVSTLGHNEYLPSDNSASIPKDTILGTKQSHQGTMAADFKPEIKKDILIVRMVFLLSLLAVML

SEQ ID NO: 206848 - protein, 49 aa, Glycine max
  Clone ID: PAT_MRT3847_28810C.1.pep
MPLQNSMYLLVILKVSCIQYKTTYFLFMAMGTLITYAETFVNQKRRGPR

SEQ ID NO: 206849 - protein, 144 aa, Glycine max
  Clone ID: PAT_MRT3847_28811C.1.pep
SRVTLTPTQSVICEWTSGSVKFHLTTWRGPRIYASITHITYHFHFKFENFPKITGVLNNDRSRLMSYIKGLLQNCLTSTNSKLTPPKLHIWLLILASHNLSSKSTKPPLQIIAFTPFEMWAPCSFAICLKNGSFRLLLMNCAHL

SEQ ID NO: 206850 - protein, 80 aa, Glycine max
  Clone ID: PAT_MRT3847_28812C.1.pep
RTKSHLQISGPKRYVSVHQYTLQMICSHVYIQTYKLLLAAWCVTTSFMTETAFSTPLAMSSALDKLCDQHYRPHQRLMAR

SEQ ID NO: 206851 - protein, 94 aa, Glycine max
  Clone ID: PAT_MRT3847_28813C.1.pep
MQLRHPNRPADLAILDEIDSGLDVDALRDVANAVNRILTPEKSLLMITHYRRILDLLNPTHVHVMDKGKIARSGDISMGEAIEADGYETVSALT

SEQ ID NO: 206852 - protein, 99 aa, Glycine max
  Clone ID: PAT_MRT3847_28814C.1.pep
NTNCHLSFLHMFDPFPYSIQPHKRLGSRESSPGRRASSALFLVQVQIIGVLQRCVRHDHHRSVDQRHQDVPMCAGDHQQLCGQHHSMLISLHFGHCFVH

SEQ ID NO: 206853 - protein, 54 aa, Glycine max
  Clone ID: PAT_MRT3847_28815C.1.pep
RQHTRIIMTCGCFGAKSIKAKRPSYVPGEIDGYPLDNVRQFSDKELRLATDNYN

SEQ ID NO: 206854 - protein, 63 aa, Glycine max
  Clone ID: PAT_MRT3847_28816C.1.pep
LVFGLNFVRERERVLFCDCYCFFIVVIGRREEGFWRFFTFFLLANVSLFVLLERSIEGFDPAT

SEQ ID NO: 206855 - protein, 360 aa, Glycine max
  Clone ID: PAT_MRT3847_28817C.1.pep
MTCGCFGAKSIKAKRPSYVPGEIDGYPLDNVRQFSDKELRLATDNYNPNNKIGRGGFGTVYQGTLRDGRHIAVKTLSVWSKQGVREFLTEIKTLSNVEHPNLVELIGFCIQGPSRTLVYEYVENGSLNSALLGTRNENMKLDWRKRSAICLGTAKGLAFLHEELSPPIVHRDIKASNVLLDRDFNPKIGDFGLAKLFPDDITHISTRIAGTTGYLAPEYALGGQLTKKADIYSFGVLILEIISGRSSARRTNGGGSHKFLLEWAWQLYEERKLLEFVDQDMEEFPEEEVIRYMKVALFCTQSAANRRPLMIQVVDMLSKAIQLNEKELTAPGFFTNEGESSRNNSNPVSSFITITQVTPR

SEQ ID NO: 206856 - protein, 35 aa, Glycine max
  Clone ID: PAT_MRT3847_28818C.1.pep
TFFFLRKILIFLIPYNLLWFYPCNFNGVYKNNTHN

SEQ ID NO: 206857 - protein, 227 aa, Glycine max
  unsure (1)..(227): unsure at all Xaa locations
  Clone ID: PAT_MRT3847_28819C.1.pep
MAVLSSGEFLGAFLVFVVIHYWRLNRHTPIAKWPILGMLPGVFLNMPTIFDYITSVLKREGGTFMFEGPCLSNMNIMFTSDPMNVQHITSTKFQNYGKGNDFREIFEILGDGIFRSDSQLWNYNRTILHSVFRKASFQLFVHQTIMNKIESCLLPFLDRGWKEGMEVDLQDVFQRLTFDNICSIVLGFDPNCLSMEFPEVACEKAFTEAXDALLYRHXRPKCLWELM

SEQ ID NO: 206858 - protein, 52 aa, Glycine max
  unsure (1)..(52): unsure at all Xaa locations
  Clone ID: PAT_MRT3847_2881C.1.pep
VTRTASTVHTNPLELGFGLFHLGVMCSSLTLSKTKGVGNMRXXXXXXXVSLV

SEQ ID NO: 206859 - protein, 127 aa, Glycine max
  unsure (1)..(127): unsure at all Xaa locations
  Clone ID: PAT_MRT3847_28820C.1.pep
MGYEDSKLEILKEICKSSSNIGGHIKGQGTATASADTSDNPCINQSIAEATEENLEEYEAGMVACNASTNTSMTITGANRGQIVRQIGDTLKAKVKPLGRLMTIEMAKRLAEGNXEIDESDDMRDHC

SEQ ID NO: 206860 - protein, 71 aa, Glycine max
  unsure (1)..(71): unsure at all Xaa locations
  Clone ID: PAT_MRT3847_28821C.1.pep
FFFFFFFFIFFFXXXXXPLKKQIFMQIPKIRITVATNKRSIIITIEVYSNKPNVILVSIVASLTKHAMGDQ

SEQ ID NO: 206861 - protein, 46 aa, Glycine max
  unsure (1)..(46): unsure at all Xaa locations
  Clone ID: PAT_MRT3847_28822C.1.pep
DPKTWEGAAEDLTPLKKKKCHFPFFLFSHQLIXLTLASDHTNFSES

SEQ ID NO: 206862 - protein, 71 aa, Glycine max
  Clone ID: PAT_MRT3847_28823C.1.pep
TLTLLGGYTTLLGFFTALYGILLGLFRSHLLRLSAYLLGLGLRGLALALGVATFSLLWATALFLGAGLVGC

SEQ ID NO: 206863 - protein, 57 aa, Glycine max
  Clone ID: PAT_MRT3847_28824C.1.pep
SIVTLLSQPEENRLQRKPDVPDVAENTSYSTTFVLLYNAKKKKEYPLKDIRDPEKVF

SEQ ID NO: 206864 - protein, 96 aa, Glycine max
  unsure (1)..(96): unsure at all Xaa locations
  Clone ID: PAT_MRT3847_28825C.1.pep
DRKNWTCPWLRPDGXTQHTVEDYNDNGAMAPILVHTVLISTHHDETATNDDIATDLTEHLINPVIPEXHLDENTIFHLNPSGXYVIGWPHGDAGLT

SEQ ID NO: 206865 - protein, 104 aa, Glycine max
  Clone ID: PAT_MRT3847_28826C.1.pep
YYFVCSGGAFWATFLIANIAALIARRAMTTGTFSCVKQAGGLGCVPRLKIIHTSRKFMGGVYIPVINWVLLAGSLVLGWSISSIGEIGNAYGNDFVSISLFLSP

SEQ ID NO: 206866 - protein, 83 aa, Glycine max
  Clone ID: PAT_MRT3847_28827C.1.pep
PDLELLPFFHIVPLPMNRPLPLVCPPLWPVPCSWAWLAFPPLWPCYTFFPLIHVPSLFNLPSCPNYLLSFFLPSFFFLLLSFF

SEQ ID NO: 206867 - protein, 65 aa, Glycine max
  Clone ID: PAT_MRT3847_28828C.1.pep
CKSVICKVIACRTINTTVTCRYLNARLFYVMKLGISLIQRYILTFGSYDPCIIESPIIYIFFFFF

SEQ ID NO: 206868 - protein, 56 aa, Glycine max
  Clone ID: PAT_MRT3847_28829C.1.pep
EWEFSLMVCLLKVNFMKIGQGGERNQFKLVLSLGPPAFTHYDCVSNVFWNYEGITI

SEQ ID NO: 206869 - protein, 102 aa, Glycine max
  unsure (1)..(102): unsure at all Xaa locations
  Clone ID: PAT_MRT3847_2882C.1.pep
DFHGGNITHWSEVLGELTKIGKLSPYDVETPNGSMXDHKIDQSRIEISKSTFGXTIKATHLLAKILTKGTYKTKIDLXLTHIINXIIKMGATGAIPENTCIA

SEQ ID NO: 206870 - protein, 122 aa, Glycine max
  unsure (1)..(122): unsure at all Xaa locations
  Clone ID: PAT_MRT3847_28830C.1.pep
DIVPFIVWFAIKAFQEQKWIHLILMHVLLGVTLIIPLANAVSLTSWTVVGFFSGFIAYICTQEWCNRCNYVLSXGGLKGEAAFMSILLFLALXKNGFTLNWWGNNHEGCPLANCPSKKGNCS

SEQ ID NO: 206871 - protein, 82 aa, Glycine max
  unsure (1)..(82): unsure at all Xaa locations
  Clone ID: PAT_MRT3847_28831C.1.pep
PLSEVVAVRSCVVLFVSSSSCVRCLASFSSLSPACPGFVGAASVFAGAASRFSSCFFAAVWAPSVGFCFPPPVXGGFSCLIN

SEQ ID NO: 206872 - protein, 273 aa, Glycine max
  Clone ID: PAT_MRT3847_28832C.1.pep
MCIALFLWQCHPLYPFLLLNNRDEYHNRPTKPVSWWEDCDILAGRDEIAMGTWLACSTQGRVAFLTNVLELHTLPEAKSRGDLPVLFLKSSKKPKEFAESLKSEAHYYNGFNLIVADIVSNSMVYISNRPKGQPITIQEVPPGLHVLSNDKLDSPWHKALRLEFSFKEHVAKHGEGEIPVKEVIQKLMKDTVKADKNSLPRICSLDWEFNLSSIFVEVETPLGLYGTRSSAALTVRSSGEASFYEVYLDDTKWKEHVIDFRIGKLNYVTDEVA

SEQ ID NO: 206873 - protein, 370 aa, Glycine max
  Clone ID: PAT_MRT3847_28833C.1.pep
MDSLLLLKEIATSILIFLITCLSIQTFLKSYRQKLPPGPKGWPVVGALPLMGSMPHVTLAKMAKKYGPIMYLKMGTNNMVVASTPAAARAFLKTLDQNFSNRPSNAGAPHLAYDARDMVFAHYGSRWKLLRKLSNLHMLGGKALDDWAQIRNEEMGHMLGAMHDCSKRDEAMVVAVMLTYSMTNMIGQVILSRRVFETKGSESNEFKDMVVELMTVAGYFNIGDFIPFLAKLDLQGIERGMKKLHKKFDALLTSMIEEHVASSHKRKGKPDFLDMVMAHHSENSDGEELSLTNIKALLLNLFTAGTDTSSSIIEWSLAEMLKKPSIMKKAHEEMDQVIGRDRRLKESDIPKLPYFQAICKETYRKHPSTP

SEQ ID NO: 206874 - protein, 73 aa, Glycine max
  unsure (1)..(73): unsure at all Xaa locations
  Clone ID: PAT_MRT3847_28834C.1.pep
PQDLSPPNAVSYXTAARSKLIWQGNHMVGLFGAQWRVFLGGPKGERGPFKFPNPWKNIRRFFPFQQIRLVPAN

SEQ ID NO: 206875 - protein, 205 aa, Glycine max
  unsure (1)..(205): unsure at all Xaa locations
  Clone ID: PAT_MRT3847_28835C.1.pep
MAQILLHGTLHATIFEVDRLNAGGGGGNFFSKLKQNFEETVGIGKGVTKLYATIDLEKARVGRTRIIENEHTNPRWYESFHIYCAHMASNIVFTVKDDNPIGATLIGRAYVPVSEVLDGEEIDRWVEILDEEKNPILEGSKIHVKLQYFDVTKDRNWARGIRSPKXPGVPYTFFSQRQGCKVFXLYQDAHVPDNFXVPKIPLAGG

SEQ ID NO: 206876 - protein, 161 aa, Glycine max
  unsure (1)..(161): unsure at all Xaa locations
  Clone ID: PAT_MRT3847_28836C.1.pep
KNCKNRDKKGKKKSTNKEKQLKEAKREKKSNKRKXNKCPITLLKSNSEKKPHKRNKGHQKKHPIKKKKRKNHERGEKKKXKKKKNRGKKGTQKYHKSDKQTPHQWGKKRRKKGKANSIKIRQMLKKGTHGDLLKITPKRKNRKIYKKKKKKKTTIFPILKL

SEQ ID NO: 206877 - protein, 809 aa, Glycine max
  Clone ID: PAT_MRT3847_28837C.1.pep
MAQILLHGTLHATVFEVDRLNAGGGGGNFFSKLKQNFEETVGIGKGVTKLYATIDLEKARVGRTRIIENEHTNPRWYESFHIYCAHMASNIIFTVKDDNPIGATLIGRAYVPVSEVLDGEEIDRWVEILDEEKNPIQEGSKIHVKLQYFDVTKDRNWARGIRSPKFPGVPYTFFSQRQGCKVSLYQDAHVPDNFVPKIPLAGGKNYEAHRCWEDIFDAITNARHFIYITGWSVYTEISLVRDSRRPKPGGDQTLGELLKKKANEGVKVLMLVWDDRTSVGLLKKDGLMATHDEETAQFFEGTEVHCVLCPRNPDDGGSIVQDLQISTMFTHHQKIVVVDGAMPGEGSDRRRIVSFVGGIDLCDGRYDTAFHSLFRTLDTAHHDDFHQPNFPGAAITKGGPREPWHDIHSRLEGPIAWDVLFNFEQRWRKQGGKDVLVPLRELEDVIIPPSPVTFPEDHETWNVQLFRSIDGGAAFGFPETPEDAARAGLISGKDNIIDRSIQDAYINAIRRAKNFIYIENQYFLGSSFAWSADDIKPADIGALHLIPKELSLKIVSKIEAGERFAVYVVVPMWPEGVPESASVQAILDWQKRTMEMMYKDIIQALRAKGIDEDPRNYLTFFCLGNREVKKPGEYEPSEQPDPDSDYQRAQEARRFMIYVHTKMMIVDDEYIIVGSANINQRSMDGARDSEIAMGAYQPYHLATRQPARGQIHGFRMSLWYEHLGMLHDSFLQPESEECINKVNQVADKYWDLYSSESLEHDLPGHLLRYPIGIASEGDVTELPGFEFFPDTKARILGGKADYLPPILTT

SEQ ID NO: 206878 - protein, 119 aa, Glycine max
  unsure (1)..(119): unsure at all Xaa locations
  Clone ID: PAT_MRT3847_28838C.1.pep
PVKDQRGCGSCXAFSAMGAVEGINRIVTGELISLSEQELVDWDTXGYNQGCNAGLMDYAXFEFIINNGGVDSDKDYPYRAVDGRYYTYRENAXVLSIDDYXDVPAYDEVXLKKALAKQP

SEQ ID NO: 206879 - protein, 82 aa, Glycine max
  Clone ID: PAT_MRT3847_28839C.1.pep
LTRTQKMRLWQNRKLLLICEEKLQICTNEDAKAGAYIRTRKLNCYLKSMSQETIVTKHTHLVGESIKINRSSDTEELEQVPE

SEQ ID NO: 206880 - protein, 98 aa, Glycine max
  Clone ID: PAT_MRT3847_2883C.1.pep
VPFLNFPFDKEIGSSGRAKSYVVAPAGSGPLSANGVGKRVGSAFTRMPAPATSCFGLLFLITIRILPHAPRLVLFRCTGITSVDPHYLSIKLRVSISV

SEQ ID NO: 206881 - protein, 58 aa, Glycine max
  unsure (1)..(58): unsure at all Xaa locations
  Clone ID: PAT_MRT3847_28840C.1.pep
YVYESIYKKLFNYSIELGCASVLKNGKALTSYHDHAYVXARYLITFDVSYRCYPGYSL

SEQ ID NO: 206882 - protein, 87 aa, Glycine max
  Clone ID: PAT_MRT3847_28841C.1.pep
QWSRGVGVKYPVWLRLTIVFLRSEDQCKIVFLGMQIVNIVQSFYNHHQCSHIRASVRLASDQIVVKMIHSQRWFSSVVLVRSPPWTY

SEQ ID NO: 206883 - protein, 117 aa, Glycine max
  unsure (1)..(117): unsure at all Xaa locations
  Clone ID: PAT_MRT3847_28842C.1.pep
GVRAQLQDLDVFLTVVDINKGALFVAEFNSKAXIGVLLINERXTNIELVGLKEQQHKHQHEEQPLEVRKYTAELPEQDIFVIPTSYPAVVNATSDLNIFAFGINAENNQRNFLASSK

SEQ ID NO: 206884 - protein, 91 aa, Glycine max
  Clone ID: PAT_MRT3847_28843C.1.pep
LQYIFLYLSPLYPNPIPFLSLYILHYLLSFDPLATNLQPQFQTFPTCYHLLNKTNIFYSNYVHNIYNVITFFNTIKFQNIYIQTTLIIFNI

SEQ ID NO: 206885 - protein, 363 aa, Glycine max
  Clone ID: PAT_MRT3847_28844C.1.pep
MARRSLPLLKHLLSRRIPARSVTYMHRPGDGSPRPVTLIPGDGIGPMVTGAVEQVMEAMHAPVYFEKFEVHGNMKAVPPEVLDSIRKNKVCLKGGLVTPMGGGVSSLNVQLRKELDLYASLVNCFNLPGLPTRHDNVDIVVIRENTEGEYSGLEHEVVPGVVESLKVITKFCSERIAKYAFEYAYLNNRKKVTAVHKANIMKLADGLFLESCREVATRYPGIKYNEIIVDNCCMQLVSKPEQFDVMVTPNLYGNLVANTAAGIAGGTGVMPGGNVGAEHAVFEQGASAGNVGSDKIREQKKANPVALLLSSAMMLRHLQFPAFADRLETAVEKVILEGKCRTKDLGGTSTTQEVVDAVIDALD

SEQ ID NO: 206886 - protein, 88 aa, Glycine max
  Clone ID: PAT_MRT3847_28845C.1.pep
HNEVPALSYGILCIHGHLISVDMLKTGSLQSLMICTYFHRTAAITFTMMEANKLNMADMYTNIFTLLNPSHPRSHEPYPVHEHFHAIY

SEQ ID NO: 206887 - protein, 95 aa, Glycine max
  unsure (1)..(95): unsure at all Xaa locations
  Clone ID: PAT_MRT3847_28846C.1.pep
KXSSYXALXXYDXYAXXXXXLCICESXCIAYGYXMLXXEXNXXGXXSEGRKXKAEXXINENEIRVTSLRRTMNYISDXTXVLQEKGXXXIVLXXW

SEQ ID NO: 206888 - protein, 176 aa, Glycine max
  Clone ID: PAT_MRT3847_28847C.1.pep
MATEEVNKPQSLPPYPEMIVKALEALNEPNGSNKSAISKYIETTYGELPDATVLGSHLNKMKDSGELSFKQNNYMKADPNAPPKRGRGRPPKPKTPLPPGTVVSPPRPRGRPPKDPNAPPKSPKAKATPGSGRPRGRPKKVPRSPAVAAPTAVSSGRPRGRPPKVKPQLTEVSVES

SEQ ID NO: 206889 - protein, 435 aa, Glycine max
  Clone ID: PAT_MRT3847_28848C.1.pep
MDNSNLQRLFTLFLFSLIAPSLAQQSFRPRALVVPVKKDASTLQYITQIKQRTPLVPENLVLDIGGQFLWVDCDNNYVSSTYRPARCGSAQCSLARSDSCGNCFSAPKPGCNNNTCGVTPDNTVTGTATSGELAQDVVSLQSTNGFNPIQNATVSRFLFSCAPTFLLQGLATGVSGMAGLGRTRIALPSQLASAFSFRRKFAVCLSSSNGVAFFGDGPYVLLPNVDASQLLTFTPLLINPVSTASAFSQGEPSAEYFIGVKSIKIDEKTVPLNTTLLSINSKGVGGTKISSVNPYTVLEDSIFKAVTEAFVKASSARNITRVASVAPFEVCFSRENVLATRLGAAVPTIELVLQNQKTVWRIFGANSMVSVSDDKVLCLGFVNGGENPRTSIVIGGYQLEDNLLQFDLATSRLGFSSLLYGSRTTCANFNFTSAA

SEQ ID NO: 206890 - protein, 128 aa, Glycine max
  Clone ID: PAT_MRT3847_28849C.1.pep
TSMKTHWNSHSQKQQVPSLKLNQFSQFHQHPSLSEPVYAGSGSSLPSPECKTDHHHEHNQIAEQSPTFPTLSSLNKVKKKKNEAKYGMSKEKKKKTRSRLKNLVFYSFSNEGRRKQRKFRSGSCSLRY

SEQ ID NO: 206891 - protein, 98 aa, Glycine max
  unsure (1)..(98): unsure at all Xaa locations
  Clone ID: PAT_MRT3847_2884C.1.pep
QLPNHTVHTGSDCGAIAHLHXEHGQNFLDMLDGISLFVLLXDTRDPSSIVALDAIYGTFLYIDWGIDGSYWISSEXKGLNDRLXHIAPFTPCHSYSSI

SEQ ID NO: 206892 - protein, 90 aa, Glycine max
  Clone ID: PAT_MRT3847_28850C.1.pep
TPFDNCFVQQGLKGPPPLRRPGKRFPTGKPLKLERFLPRGGVLRPPRPQKKKKKPGRPPPQNLLLMGPAKDLKKKVFNVLKKLKKKIFFF

SEQ ID NO: 206893 - protein, 97 aa, Glycine max
  Clone ID: PAT_MRT3847_28851C.1.pep
MGNEEEEEEVVAEVEAVEAVYGTDCVLLRSFPPHFHISLKPRTADVSSQQFVEAVLEIQASSQYPKEPPSVDLVDCKGLDEQRKKYLLNCIQSKAYE

SEQ ID NO: 206894 - protein, 52 aa, Glycine max
  Clone ID: PAT_MRT3847_28852C.1.pep
LVDYIFYALPNSSQAHISTLIMHRPVSPHFLLSLSISMNFNPPFIFIYKIRT

SEQ ID NO: 206895 - protein, 74 aa, Glycine max
  Clone ID: PAT_MRT3847_28853C.1.pep
GLGVCQKTMFLKKLTQALSWLGRCWKKKKKPLFAPIFKASFFWPHLRVGPPWQNSTPRATYFYAKPPNLTLLNI

SEQ ID NO: 206896 - protein, 58 aa, Glycine max
  Clone ID: PAT_MRT3847_28854C.1.pep
FSSRYLLFFEFVLIGFSFVPTSCSSSTFKGLRMAHYIYSQLSNASIIIYPNLPHYVFT

SEQ ID NO: 206897 - protein, 347 aa, Glycine max
  Clone ID: PAT_MRT3847_28855C.1.pep
IGQGTYSNVYKAKDMMTGKIVALKKVRFDNLEPESVKFMAREILILRRLDHPNVVKLQGLVTSRMSCSLYLVFDYMEHDLAGLAASPGIRFTEPQVRSVKCYMHQLVSGLARGHNRHVLYRVIKGSNLLIDNEGTLKIADFGLASIFDPNHKHPMTSRVVTLWYRPPELLLGATDYSVGVDLWSAGCILGELLAGKPIMPGRTEVEQLHKIYKLCGSPSDEYWKKSKLPNATSFKPRDPYKRHIRETFKDFPPSALPLIDTLLAIDPVERKTASDALRSEFFTTEPYACDPSILPKYLPSKEMDALRRDDEMRRVRAAGKAQADGPKKHRTRNRAAKAFPAPEANAE

SEQ ID NO: 206898 - protein, 70 aa, Glycine max
  Clone ID: PAT_MRT3847_28856C.1.pep
GETGTEINRKRIKMNVNNDLVLLMMLQRVNSDHLCKVGSIFNITPRCSLSLNIWPYRMSGCQARNFWTPT

SEQ ID NO: 206899 - protein, 79 aa, Glycine max
  Clone ID: PAT_MRT3847_28857C.1.pep
PHGLPANYIHTSHVLYRGVLRFSIFLLFLLDTPICFFAYHSGMPTNENVLMLRQGFILPLRLQNLLPGTTSFSTQLYSV

SEQ ID NO: 206900 - protein, 47 aa, Glycine max
  Clone ID: PAT_MRT3847_28858C.1.pep
NFRRFRSSFHASRRDMAPICPGYRFSIRSIDHRSLMFLPLCVLIRSR

SEQ ID NO: 206901 - protein, 76 aa, Glycine max
  unsure (1)..(76): unsure at all Xaa locations
  Clone ID: PAT_MRT3847_28859C.1.pep
GSGLSSSCFRPSSSSMVSPNSNPLPPPLQPIDWXTPGVPPLNWVGAHTPSPTWRSPKKGRTVPPSDQFGALMGDRS

SEQ ID NO: 206902 - protein, 51 aa, Glycine max
  Clone ID: PAT_MRT3847_2885C.1.pep
TRHALSSGASDEGSSHVGTNSRTELGFLANFTSSGSVNVSQSSSSSVLERR

SEQ ID NO: 206903 - protein, 85 aa, Glycine max
  Clone ID: PAT_MRT3847_28860C.1.pep
KNGCDLYVVGQGNCRSSKVFSNLLEWCECLELGVIGDILASNNFGSRSSLLVVQQYGYGGMAFGNNLHQKGTNNDGFESLVVKTE

SEQ ID NO: 206904 - protein, 115 aa, Glycine max
  unsure (1)..(115): unsure at all Xaa locations
  Clone ID: PAT_MRT3847_28861C.1.pep
VSNIVNLADHAKGNVLDWPKRFNIICGIARGLLYLHQDSRLRIIXRDLKASNVLLDHEFNPXLSDFCMARTFWGDQIEGNTRRVVGTYGYMASEYAIYGLFSVKSDVFSFGVLML

SEQ ID NO: 206905 - protein, 54 aa, Glycine max
  unsure (1)..(54): unsure at all Xaa locations
  Clone ID: PAT_MRT3847_28862C.1.pep
FQSIPSNGELDSFKMAGXVRFGTGVILQGKIRLGSKAGVKLEGSHRGSLGSQGI

SEQ ID NO: 206906 - protein, 47 aa, Glycine max
  Clone ID: PAT_MRT3847_28863C.1.pep
PSYYLFLTSLVTLRETHGQITLSVIKRRTKSSLHLNTPPGAYILPHK

SEQ ID NO: 206907 - protein, 66 aa, Glycine max
  Clone ID: PAT_MRT3847_28864C.1.pep
MGHDLLSNRLSLDHFSSASVFVACPTTYEIYCIKQTISTNYQISELDYEATLIIQEQLHLTGEEKI

SEQ ID NO: 206908 - protein, 88 aa, Glycine max
  unsure (1)..(88): unsure at all Xaa locations
  Clone ID: PAT_MRT3847_28865C.1.pep
XPXXXXXPXXXPAPXXXXXQXXXXKAXXPTHXSXXXXXXXXXXXXXXXXXXXPGXXXXXXXXEXXXLEPXQXXHSXXXXXXXXXPSXR

SEQ ID NO: 206909 - protein, 113 aa, Glycine max
  Clone ID: PAT_MRT3847_28866C.1.pep
IIKQLNMVDPDEKDSVGNLPSRALHIVSPDLKIKLSFLYPATTGRNMDEVLRVIESLQKASKFKVATPANWKPGDPVVISPGVTNEQAKEMFPKGFETVDLPSKKEYLRLTKV

SEQ ID NO: 206910 - protein, 250 aa, Glycine max
  Clone ID: PAT_MRT3847_28867C.1.pep
MPRSLHASNSPLFIISLAHVLIYHTGNFSASKMPGLTIGDTIPDLQVETNQGKIKLHQFCADGWTILFSHPGDFTPVCTTELGKMAQYAKEFYQRGVKLLGLSCDDVQSHNEWIKDIEAYTPGAKVNYPIIADPKREIIKQLNMVDPDEKDSTGNLPSRALHIVGPDLKIKLSFLYPATTGRNMDEVLRVIESLQKASKFKVATPANWKPGDPVVITPDVTNEQAKEMFPQGFESVKLPSKKEYLRLTKV

SEQ ID NO: 206911 - protein, 71 aa, Glycine max
  Clone ID: PAT_MRT3847_28868C.1.pep
SDEYYANSIKDEIRPVVELHEELDIDGLVPGEPDRNDMVDYFSEQLSGFAFSLMLVVQSYGSRCENSPIIY

SEQ ID NO: 206912 - protein, 122 aa, Glycine max
  unsure (1)..(122): unsure at all Xaa locations
  Clone ID: PAT_MRT3847_28869C.1.pep
VRXXNYYXCLXXXSLXILTPFAIAVEXPKMWAAGWQTALSEIGPNFVWWVAAQSVFYHLYNQVSYMSLDQISPLTFSIGNTMKRISVIVSSILIFHTPIQPVNALGAAIAILGTFLYSQAKQ

SEQ ID NO: 206913 - protein, 77 aa, Glycine max
  Clone ID: PAT_MRT3847_2886C.1.pep
FAITLKNVNHLLIIGEGCGEFVHGVHIVVPLRLCVRLGININIKQSSNSHGLSARKSTIKMWVLLNLENRYGVRTYV

SEQ ID NO: 206914 - protein, 56 aa, Glycine max
  unsure (1)..(56): unsure at all Xaa locations
  Clone ID: PAT_MRT3847_28870C.1.pep
KEVDEQMINVXIKNSSYFLDWISLNVKSTVCHITPRGLSMASRCIGNSPSIQEMFT

SEQ ID NO: 206915 - protein, 87 aa, Glycine max
  unsure (1)..(87): unsure at all Xaa locations
  Clone ID: PAT_MRT3847_28871C.1.pep
QXXXKEXKSKXKXXXXXKXKXKXTXXNEVNDXXWLXLRSRXKXINGVNXMDKXKVXLVKKTKHQSRVSGLIVFYNIGVVVXXXQPNX

SEQ ID NO: 206916 - protein, 48 aa, Glycine max
  Clone ID: PAT_MRT3847_28872C.1.pep
HAYVAASNVISMRHDHLLYTQGILVHRRRCTQHHYQDALAYSVVTGLG

SEQ ID NO: 206917 - protein, 106 aa, Glycine max
  Clone ID: PAT_MRT3847_28873C.1.pep
MSYYNQQQPPVGVPPPQGYPPEGYGKEGYPPPGYPPAGYPPAGYPPPGYPPQQGYPPPPYPAQGYPPPYAPQYAQPPPRQQNSTGPGCLEGCLAALCCCCLLDACF

SEQ ID NO: 206918 - protein, 155 aa, Glycine max
  Clone ID: PAT_MRT3847_28874C.1.pep
YSMIGFDWKATSFFWFYYYILMCFMYFTLYGMMIVALTPGHQVAAICMSFFLSFWNLFSGFIILITQIPVWWRWYYWASPVSWTLYGLITSQLGDKNAELEIPGAGSMGLKEFLKQNLGFDYDFLPVVAAAHVGWVILFMFVFAYGIKFLNFQRR

SEQ ID NO: 206919 - protein, 136 aa, Glycine max
  unsure (1)..(136): unsure at all Xaa locations
  Clone ID: PAT_MRT3847_28875C.1.pep
RAGAQQRQAHRTEHTKGTESATARQEHTRPRGPRGKEKKQGDNKGKDXNXAKEAPQGGETXPNHTEPSQXXEKDKQKGPEXQAPPGKQGGAQEXGXKEQRQEXXPTRTKAETPAPDKAEEXGDKXAPRDKXRKTSK

SEQ ID NO: 206920 - protein, 79 aa, Glycine max
  Clone ID: PAT_MRT3847_28876C.1.pep
QGPNKIKTIDYNMIQQRFALTRLASNSLTWPTKSILNTIVYKLLRRAYIFEITCRLAANSLLPGKCQQCSMPSIVCKWN

SEQ ID NO: 206921 - protein, 65 aa, Glycine max
  Clone ID: PAT_MRT3847_28877C.1.pep
FFFFFLFFLFFFRGIRVMFGFYSNIQFFQRVLPGITNFNYQLMITTNFYYLFMHLYALQHNSAPL

SEQ ID NO: 206922 - protein, 208 aa, Glycine max
  Clone ID: PAT_MRT3847_28878C.1.pep
MSDDQFQASGNWWETARSVRFESRESQSSSGLTNNIGSYAASWQQHQQHDMATRSSSMDNNSVSGGSSVVFHDQKQLQVHDSSPAATSTNDPNFHMMALGLSSQAMDWSQASLPLRGEKGSENSFRSMLQENLSSSGTNFQQQECGSNSIGLSQHHHHHHQQVHWKPEKLFSAESSSNEFKRGFSLDQTQFFPHTAPGTALSQAKACL

SEQ ID NO: 206923 - protein, 62 aa, Glycine max
  Clone ID: PAT_MRT3847_28879C.1.pep
NCFEFNTGAKIPSVALGTWPAEPGVVPKAVTTAILAGYRAIDRAQAYHNQAEIGSALKKLFD

SEQ ID NO: 206924 - protein, 51 aa, Glycine max
  Clone ID: PAT_MRT3847_2887C.1.pep
LKTWGHRYAKDFLLSLLSYPTEVTLHSQVPFPKKHISTKPATLFDCPLYKR

SEQ ID NO: 206925 - protein, 131 aa, Glycine max
  Clone ID: PAT_MRT3847_28880C.1.pep
MSLLVNSPLLPLQSTRWLKPKQEARFLSHGPTIIGGGMSTNIFGTAKRNGNGNGVKAFFINPEQDLIIKEALKEPVAFLGGMFAGILRLDLNEEPLKEWVTRTAEAAGISEEEANTEESTTEEAPQEIQIE

SEQ ID NO: 206926 - protein, 908 aa, Glycine max
  unsure (1)..(908): unsure at all Xaa locations
  Clone ID: PAT_MRT3847_28881C.1.pep
MIDGEFEESLIIIVLWISAILVCLVMGMRNQLLHQGNGGAGAGGGRTNGFIPSSFRALSSYLRIVSSGASTVARSAASVASSIVERDDDPDHDQVIWAGFDKLESEGEVIQQVLLLGYRSGFQVWHVDESNNVRDLVSRHDGPVSFMQMVPNPIASKKSEDKYANSRQLLVVCTDGFFAGSNNVQDGSTTPYNGSTTNSHDQINGSYLPTTVRFYSMKSQSYVHVLKFRSVVYSERCSSRVVAVSQSTQIXCFDATTLEREYTLLTNPIVMSCPGSGGIGYGPLAVGPRWLAYSGSPVAISNSGHVCPQQLTPSXDFPAASGGEFEIERIPTCMIEARSKDLXSNFRLYSDSKSTTNKDCCDSLQSVNSVSKGNGTINGHSTDADNIGMVIVKDIVSKNVIAQFWAHKSPISALCFDPSGTILVTASIQGHNINVFKIMPASETLPASVAGPSYVHLYRLQRGFTNAVIQDISFSDDSKWIMISSSRGTSHLFAINPQGGHVNIQSFDDSFTAKNSGLGTTTNHAVRQSHSSAMQMPKQQSLFVTGPPITLSVVSRIRNGANGWRGTVSGAAAAATGRKNALSGAIASSFCNYRGNEGNFSKAKYQLLVFSPSGSMVQYALRTITGQDSAVVSGLSPAYESIPQADTRLVVEAIHKWNICQSHSRREREDNVDIYGENGISDVNKIYPEEVGEEKNTSPKIKNGVMKVNLCLEEEHLLYISEAELQMHEAQTSLWAKPEIYFHSMLQESTIMDEEAAASGGEFEIESMPTCMIEARSKDLVPIFDHIQTPKVPQTRTPAMDSKTNEQLLHRSSRLAGNGRISPRTILESPESVTKAGDAVSEFRSGIEGTEWDNHLVASETLNFVNNNDTFRPNTQHEIVNNRMEHLNTGAHLMYVNSDRKPENEESF

SEQ ID NO: 206927 - protein, 146 aa, Glycine max
  unsure (1)..(146): unsure at all Xaa locations
  Clone ID: PAT_MRT3847_28882C.1.pep
KKGIIPKNNRPPIRKGGGGGGPKKKPGRNPPPLAGFFRKFYQRKSPGTNRGETGAIPEPKRAKKSCLQRQTAQFKFPHHGSGPPGHPPGTPRKXGPGPGGQPIVPKGRGKKAGQKQGQRGNPGEKEIPPQFHPTNKPEETGETRGG

SEQ ID NO: 206928 - protein, 70 aa, Glycine max
  Clone ID: PAT_MRT3847_28883C.1.pep
LVFPERKNFPITKKIHPFFLSKFCLGVVPPRGITILGAPLTPLVLPPKTQNFRGVFMTPPLFGAILLVQI

SEQ ID NO: 206929 - protein, 44 aa, Glycine max
  Clone ID: PAT_MRT3847_28884C.1.pep
VFYVNLLYLCPIFCSYLSQWHYISYFISFYFNSTDVVHQIMDDL

SEQ ID NO: 206930 - protein, 130 aa, Glycine max
  unsure (1)..(130): unsure at all Xaa locations
  Clone ID: PAT_MRT3847_28885C.1.pep
LHANGKGFSEFSGLRCSXGFLPFIRKYSESSILEFAFKPIPGXPGRIQEGVTEAKLEVGINGFGRIGRNFLRCWHGRKDFPLDVIAINDTGGVKQASHLLKYDSILGTFDADVKPVGSNVIFVDGKGIKV

SEQ ID NO: 206931 - protein, 77 aa, Glycine max
  unsure (1)..(77): unsure at all Xaa locations
  Clone ID: PAT_MRT3847_28886C.1.pep
RWPDGLGTAAADDTDCATTHAEADTCTRYLSYTESTNSETFIMQVAPSTAQXDGAEMGVPDGNHGCLXTPNCYCNGW

SEQ ID NO: 206932 - protein, 45 aa, Glycine max
  Clone ID: PAT_MRT3847_28887C.1.pep
HKNRARTKKVKKRKKSNNKKKKKGDQFKGSKLTNPCLQHYTYYKG

SEQ ID NO: 206933 - protein, 70 aa, Glycine max
  Clone ID: PAT_MRT3847_28888C.1.pep
HHSLESAWGGKSKETVNSESSIYKKGLGHFVKNAAQVIYSVPKTMQIIIQGSTTYHPLNIVNSKGHLIGG

SEQ ID NO: 206934 - protein, 60 aa, Glycine max
  unsure (1)..(60): unsure at all Xaa locations
  Clone ID: PAT_MRT3847_28889C.1.pep
FFCDKTTECDARFSKEVEYLLKKGWIPCLEFYFDHGFMYRVHNKSPIYYYXLYWTMCNLP

SEQ ID NO: 206935 - protein, 52 aa, Glycine max
  Clone ID: PAT_MRT3847_2888C.1.pep
SWPLKISQCLECYPLASWHFSSLGLSHLLVVAEKLTCPDREPFHSKVEKRSP

SEQ ID NO: 206936 - protein, 138 aa, Glycine max
  Clone ID: PAT_MRT3847_28890C.1.pep
MSSLEHQPLLPRLDSHSHGQNLSSDAIEEFLEHRPIALRWWSKLIVWESRLLWLLSGASIVVSIFNYMLSFVTLMFTGHLGSLELAGASVASVGIQGLAYGIMLGMASAVQTVCGQAYGAKKHGAMSIILQRAIILHI

SEQ ID NO: 206937 - protein, 102 aa, Glycine max
  unsure (1)..(102): unsure at all Xaa locations
  Clone ID: PAT_MRT3847_28891C.1.pep
FRDTDSTXFVIVTIPTVMAIRESSRLSADVKKENVPVNILIVSHILPPCTRDCEXVCYKKIXQLRALDILHIDPXSFSLLMIQAPLRDAAMRCVTALNFLRD

SEQ ID NO: 206938 - protein, 245 aa, Glycine max
  Clone ID: PAT_MRT3847_28892C.1.pep
VHKKLQKLTRNVSEAIASFRNSLNLDSPPSSNADASSRKLAWGSVVRNLTQLYPGSQLPEKLMSNIRKHYDSLPLSYAQANSARENVFLHIKLMEQASESDQPAILIQEECDGEIQGSALRLTFACNSPISWPAMSGALDSSSICCKRMQIFEKKGFTLGVVLLVVLPGHDKLVRTRVENALKFAMKRPKTGAVKLPFGLCGCQEENSKGRELVEIEEEISDGYRGKEFENSSQRIQLQVPLPSS

SEQ ID NO: 206939 - protein, 89 aa, Glycine max
  Clone ID: PAT_MRT3847_28893C.1.pep
KLFKLRCDVLHLPQGRTLPVGTGIAWPRTRSGGLLVRTVRLTSAYLEVDFLLILKTEVLTLLASWHPRAPEYRLLAPGQSPWVVFDTPP

SEQ ID NO: 206940 - protein, 65 aa, Glycine max
  Clone ID: PAT_MRT3847_28894C.1.pep
FMMSTPASSPTIQKHHHLKPCNVCLQGLRPITWFTKALSTRVSSSTKRVIPRAGARAELNSASAI

SEQ ID NO: 206941 - protein, 78 aa, Glycine max
  Clone ID: PAT_MRT3847_28895C.1.pep
IGQQPDIEIAAEWTFNLQKDDRGKKKKKKKKKKKKKSQKVQNKKWHKKKKKKTTKKKKTKKKKKKRGGLHLEFPPPPF

SEQ ID NO: 206942 - protein, 36 aa, Glycine max
  Clone ID: PAT_MRT3847_28896C.1.pep
IAGGGSTESQWLLRCSGLTPIASRLNLLLSFSASSA

SEQ ID NO: 206943 - protein, 97 aa, Glycine max
  Clone ID: PAT_MRT3847_28897C.1.pep
CASIKIRHGSRAAPPGPWGAKCSWRQVAKGEHLGQTPGFSSRLPHLPASLLSWLSPSLLVCNKGAAVITHEQCLAQSGRSAVLVHMEEPKQAPCTVL

SEQ ID NO: 206944 - protein, 45 aa, Glycine max
  unsure (1)..(45): unsure at all Xaa locations
  Clone ID: PAT_MRT3847_28898C.1.pep
KGHIRLKNIRVTEMGSGGLGHLDLRXLDSSRCLHFTQGLCLRGVG

SEQ ID NO: 206945 - protein, 45 aa, Glycine max
  Clone ID: PAT_MRT3847_28899C.1.pep
GGGKPLVVEEVEVAPPQAGEVRLKILYTCLCQTSVYFWSAKGQAP

SEQ ID NO: 206946 - protein, 167 aa, Glycine max
  unsure (1)..(167): unsure at all Xaa locations
  Clone ID: PAT_MRT3847_2889C.1.pep
CRGKTSSARAPHGAQRPLMAQEEMLSXLAWGVKTARLSQHRRPEATAMHVGAIEIIIDSSASPHCFIVGAMLPIDTNHTNPENAARINVEAPFRGGQSIQPVALTNPTVHIELNISAPLQLLSTTTNGDSVQGKDLAMVKVNVACAACGLTSSYTPTSLMESGLQKD

SEQ ID NO: 206947 - protein, 81 aa, Glycine max
  Clone ID: PAT_MRT3847_288C.1.pep
NSGCVIGLLRSRRMKHVSSLRPSAPKTQQRDEVRQDVIEKQTQEKQTSKIGWALSEMCSLSAPTKIAVIRLVRQQKNTNNG

SEQ ID NO: 206948 - protein, 68 aa, Glycine max
  unsure (1)..(68): unsure at all Xaa locations
  Clone ID: PAT_MRT3847_28900C.1.pep
MNNAIRIVLLCCTMNYNPTKDMRFTGSVYLPHIPGPMMKICMLVDAKHVEXAENIGLDWIDLDALTKL

SEQ ID NO: 206949 - protein, 139 aa, Glycine max
  unsure (1)..(139): unsure at all Xaa locations
  Clone ID: PAT_MRT3847_28901C.1.pep
HNWQRVEQGIDEAKSLTRCASQRSWVXLYGCTSRCSRELLLACEDIETALDRXHLHGGLTKXASLPWPTRMRSGEYTGRALDYLHACDISHRDVKTNYILLPTLLGYGAYCGLSRDMPNRRLTWGTQLHKGPQRYVDPA

SEQ ID NO: 206950 - protein, 184 aa, Glycine max
  unsure (1)..(184): unsure at all Xaa locations
  Clone ID: PAT_MRT3847_28902C.1.pep
KKGGGWSSGKNARHVFVVMPERNVGCGTAMISAYSQRGYASQALSLFVQMLRSGTEPNEFTFATVLTSCIGSSGFVLGRQIHSHIIKLNYEAHVYVGSSLLDMYAKDGKIHEARGIFQCLPERDVVSCTAIISGYAQLGLDEEALELFRRLQREGMQSNYVTYTSVLTALSGLAALDHGXQVHN

SEQ ID NO: 206951 - protein, 270 aa, Glycine max
  Clone ID: PAT_MRT3847_28903C.1.pep
AIMADETPNEMKEEVPEIVPFDPTKKKKKKKITIVDPADDPVEKLAEKTENLSVSEGVETAFAGLKKKKKKPVEMSNLNDESGDANEDLDDHPEDDEGEMVAPQARYPWEGSDRDYEYEELLGRVFNILRENNPELAGDRRRTVMRPPQVLREGTKKTVFVNFMDLCKTMHRQPDHVMAFLLAELGTSGSLDGQQRLVVKGRFAPKNFEGILRRYVNEYVICLGCKSPDTILTKENRLFFLRCEKCGSGRSVAPIKAGFVARVGRRNTGT

SEQ ID NO: 206952 - protein, 130 aa, Glycine max
  Clone ID: PAT_MRT3847_28904C.1.pep
WFLLIFCFIYDQLVYKGFWLVVHSICGQGLWNFILMFKDYFLHTSRITVYFVKVVRSKMIESCVCLISGNSTAKRECVVGTLRSVIKNPIILFFFFFLLFSVDQEDQLLQSRLVLLLVLAEGTQGHSPYF

SEQ ID NO: 206953 - protein, 395 aa, Glycine max
  Clone ID: PAT_MRT3847_28905C.1.pep
ISRVSDDTVETTQDDTLETTQDDIVETTQDDTVEATQYSDVLLSFRFDDHDLPFKFREVIVSDLRLLTLLEAGLPSWVIFLQSYPVLCNLYRPWMCPLARLLYFLISFVTVLIGFYDLYKNVPVLKATASRICGPLLDWIETWEMVSRVKYLGTMLFLHNFQKAVRWFLAFTHTMRSFFSFLVQPLVESLVEIFGFLLPSFKFLFELAESIFSVIWLVVDTSFDIVGNVLELLFSPFWFVLNVVWSIATCILYPLFWVLWELLYAPVRLVLVIFSFVASICSYICNMLGNTWQFVSRIFQFAASSEATVSASEVSMWRTLWNDLFSQIFRALKSILYGFVAFFTACNRHRLSIYNHVQEFVQRLYGTCQRSRQDDSRDNGKTCLPLNLTEEKKNV

SEQ ID NO: 206954 - protein, 168 aa, Glycine max
  unsure (1)..(168): unsure at all Xaa locations
  Clone ID: PAT_MRT3847_28906C.1.pep
AIMADETPNEMKEEVPEIVPFDPTKKKKKKKITIVDPADEPVEKLAEKTENLSDSEGVETAFTGLKKKKKKPVEMGNLNDESGDAIEDLDDHPEDDEGEMVVPHARYPWEGSDRNYEYEELLGRVFNILRENNPELAGDRRRQXMRPPQVLVRAQRNCVCHYMDLCKR

SEQ ID NO: 206955 - protein, 36 aa, Glycine max
  Clone ID: PAT_MRT3847_28907C.1.pep
FFEYVMFCGGGQIGVILLYRSAVKSLISRPLSSIFR

SEQ ID NO: 206956 - protein, 55 aa, Glycine max
  unsure (1)..(55): unsure at all Xaa locations
  Clone ID: PAT_MRT3847_28908C.1.pep
MCQKENANLILLFDHGTYDKLLSXAPKNKLINPSFLSHILRINGSLARKAIKNLT

SEQ ID NO: 206957 - protein, 82 aa, Glycine max
  Clone ID: PAT_MRT3847_28909C.1.pep
SYETCPGGGILWGPLLYNIFLPSGFKRERFTQIFSSLGSRVFSNFRALNCLEKIFVRNLHTLFLHYLRWLNRFFRIVGDLKH

SEQ ID NO: 206958 - protein, 204 aa, Glycine max
  Clone ID: PAT_MRT3847_2890C.1.pep
DILAFAARDSVSKVGGISYDVPSGRRDGRVSIGDEVLDNLPRPSLSADDLISNFERKGLSADEMVTLSGAHSIGVSHCVAFSEDLRRVSDTVTQDPSLDSSYAETLKTQCPPPPPTSDPTVSLEPSTPIRLDSKYYEGLINHRGLLTSDQTLYTSQSTRGMVQSNANNGASWADKFALAMLRMGSIEVLTGSDGEIRKQCSFVN

SEQ ID NO: 206959 - protein, 50 aa, Glycine max
  Clone ID: PAT_MRT3847_28910C.1.pep
STRPEFSREKFNLNRSSLHFTKASWQTRPRTSMRALKLRSKIVVFLTFSV

SEQ ID NO: 206960 - protein, 114 aa, Glycine max
  unsure (1)..(114): unsure at all Xaa locations
  Clone ID: PAT_MRT3847_28911C.1.pep
MATSMISTATVTTVYRSIASMCVXFTGTKSTXALPTLKTINDITYIANIGRRLQCIASRPTFIPKKDKTLSYVPYIDDTQSTLEVEYLNMNEWIPCLQFXQEHGNVYREHNTSP

SEQ ID NO: 206961 - protein, 53 aa, Glycine max
  Clone ID: PAT_MRT3847_28912C.1.pep
GSTCTRTDIYLIKELRVNWCACISINSYLETKMQETRKGKKERKIAMIDDEHV

SEQ ID NO: 206962 - protein, 61 aa, Glycine max
  Clone ID: PAT_MRT3847_28913C.1.pep
EARELGPILRWNKKGDPTEARKHRRMVKSPKDPTRPRRPLSAIFWLMEELTKGFNQKHPQN

SEQ ID NO: 206963 - protein, 51 aa, Glycine max
  Clone ID: PAT_MRT3847_28914C.1.pep
VVPTFVQVVGETMLQLVAVQELIVHFELVGPILMGRYLRRVVIVPRRSLMM

SEQ ID NO: 206964 - protein, 49 aa, Glycine max
  Clone ID: PAT_MRT3847_28915C.1.pep
TMKHRNFTVQTLASYRYEECKQNHDRKRMWRANKIQLSSMSTRSFLESG

SEQ ID NO: 206965 - protein, 92 aa, Glycine max
  unsure (1)..(92): unsure at all Xaa locations
  Clone ID: PAT_MRT3847_28916C.1.pep
GXGGCTSLCDARVHTYVARVREFGSLSPEPYWNETKNKSLSPSPKKKRRTMADQLTVEQISEFRRSLYLVRQGRRRDCSLSLSLKVCVFDLI

SEQ ID NO: 206966 - protein, 63 aa, Glycine max
  Clone ID: PAT_MRT3847_28917C.1.pep
FPSNLIIDGVEIPLFKILVGLKSRKFLLKKFWVWTKNILNWPHGFYDKDLKTTWGFNMPIQNF

SEQ ID NO: 206967 - protein, 183 aa, Glycine max
  unsure (1)..(183): unsure at all Xaa locations
  Clone ID: PAT_MRT3847_28918C.1.pep
ALILQALGFDRXDTQIYIAAGEIYGGEHRLAQLRAAFPRIVKKETLLVNDELQQFQNHSSQMAALDFMVSVASNTFVPTYYGNMAKLVEGHRRYSGFKKSILLDRKKLVELFDMHQNGTLPWNEFSNAVRQVHEKRMGQPTHRRVDVDKPKEEDYFYANPYECLCEGTKCDDLLGPLNSSQIR

SEQ ID NO: 206968 - protein, 47 aa, Glycine max
  Clone ID: PAT_MRT3847_28919C.1.pep
MVPKELPVTTIRRTRGAAGQIGYALVPMIARGVMLGPDQPVILHMLD

SEQ ID NO: 206969 - protein, 164 aa, Glycine max
  Clone ID: PAT_MRT3847_2891C.1.pep
MLQINISSSQEAIALFFFFFISFSALLSQKSHFAFTLRSHLRIHNMTSARNKHPLPPAVHFVKIILTTSLADGILLPKKFTRKYGDGMSNPVFLKPADGTEWKIHYTKHGGEIWFQKGWKEFATYYSLDHGHLLFFEYEGTSHFDVHIFDSSALEIDYPSHGTH

SEQ ID NO: 206970 - protein, 75 aa, Glycine max
  Clone ID: PAT_MRT3847_28920C.1.pep
YAFCDSVLYKFKFGWCLRMSCYSERTQLQMAFKSCSSIALMLTLNLLLYLHCSRCGGYACPIPMQELDAAQNHNH

SEQ ID NO: 206971 - protein, 86 aa, Glycine max
  Clone ID: PAT_MRT3847_28921C.1.pep
WLLVAQLLHKGVIACEENQENSNKLQCVEASLSTLLSEGTNVAKMQGAHERLEALENAIESIENGLEGVFRHMIKTRACLLNITTQ

SEQ ID NO: 206972 - protein, 128 aa, Glycine max
  Clone ID: PAT_MRT3847_28922C.1.pep
GLGITILRDAPAHGLYFWTYEYAREKLHPGCRKSCGESLNTMLVSGGLAGVVSWVFSYPLDVIKTRLQAQTLSSRKYKGILDCLRKSVEEEGYVVLWRGLGTAVARAFVVNGAIFSAYEITLRCLFDK

SEQ ID NO: 206973 - protein, 82 aa, Glycine max
  Clone ID: PAT_MRT3847_28923C.1.pep
LQKHYESNTLRVFSSCLARPSITDILLLACLVPEYKKLPQGWFPKGGSVAVGAPRVGRLGHVTTPGCPFKVLPGTQKIFFVG

SEQ ID NO: 206974 - protein, 101 aa, Glycine max
  Clone ID: PAT_MRT3847_28924C.1.pep
FWLLKISPRYARFPFFAPPLYTPPKREMGSPRRTGRDFPGGPPRAVFLAPSFLLKAFFLPPTKNFVFLWAYKRTLLPPVFKKKPLPFPLLGGGFFFPPLPC

SEQ ID NO: 206975 - protein, 69 aa, Glycine max
  Clone ID: PAT_MRT3847_28925C.1.pep
LASPASVFPLLLTVLRPSTVAVWRHLRVLSKRSSFGSSVPLGVQAHLFSLFWSFSLQACSSSLFFSFPC

SEQ ID NO: 206976 - protein, 163 aa, Glycine max
  Clone ID: PAT_MRT3847_28926C.1.pep
MEKNAATGENSSTTSTNSGGNETVSSPIISDSLSIGTNLQLVIQKLNGENYVEWAQSVKLALDGKGKLGYLTGDTSQPGVTDPSLPRWKSENSLIIAWLINLMDSCIGKSYLFLPTAKDVLEAVRDCYSDLENSSQIYELKTQVGQSKQGDKDVTTLYNLMGT

SEQ ID NO: 206977 - protein, 72 aa, Glycine max
  unsure (1)..(72): unsure at all Xaa locations
  Clone ID: PAT_MRT3847_28927C.1.pep
QVGTNPFSMEWTGLANRQLSTGNDILSCDHASSDGSITKPSMSNTVXMTNRLSGGDEKLMRERTHQPMACSS

SEQ ID NO: 206978 - protein, 66 aa, Glycine max
  Clone ID: PAT_MRT3847_28928C.1.pep
RLKIEEQSSAPRSPFAAAPSPCPSQSDFNLTAFFFSSEIEHKDLRIEVLNTKSFILVSFCCVKFFN

SEQ ID NO: 206979 - protein, 99 aa, Glycine max
  unsure (1)..(99): unsure at all Xaa locations
  Clone ID: PAT_MRT3847_28929C.1.pep
DEYSFRKNFQKPXLWSVILIFVMGFIAGGFILGAVHNAILLIDDVILFGADAALFTWNSCFGKKAIDGCISRYPDAELKTAQNGQFGKGCGEGTCGNPP

SEQ ID NO: 206980 - protein, 37 aa, Glycine max
  Clone ID: PAT_MRT3847_2892C.1.pep
HALVQMVRALMRCMSSSLYSIGSIRSKRSVMVHIKVI

SEQ ID NO: 206981 - protein, 116 aa, Glycine max
  unsure (1)..(116): unsure at all Xaa locations
  Clone ID: PAT_MRT3847_28930C.1.pep
MVKSIAPPNHXTVCAGSSTLCKLVSWWNRVGSDEKPALLLHQADWLLWFLHGRLGVTDFNNALMASFNRLYHYXVGYDPEVDSYPSWLVSQPYYHLLPSVVAPGTPISSFKGGNWK

SEQ ID NO: 206982 - protein, 38 aa, Glycine max
  unsure (1)..(38): unsure at all Xaa locations
  Clone ID: PAT_MRT3847_28931C.1.pep
SCXYGVATGGPFWXGXLXDXXXNXXLXSHTXMTYFKLX

SEQ ID NO: 206983 - protein, 56 aa, Glycine max
  Clone ID: PAT_MRT3847_28932C.1.pep
PKKNFFGFFPFPFGQPKKFEEKGEKENTRGSLFYFTRIFMFGAIHIRRIIKTLTNK

SEQ ID NO: 206984 - protein, 145 aa, Glycine max
  Clone ID: PAT_MRT3847_28933C.1.pep
SCGASLHWKDGKVATFHCSFLTNLTMDITAVGTKGTLHVHDFIIPYEEKEASFYAATETGFDDLVSKWIPQPSKHIIKTDIPQEALMVTEFARLVADIKFNNSKPEKKENSTGILQLRGVLSLFRFRNEMYVLFLWLVELRSLFH

SEQ ID NO: 206985 - protein, 361 aa, Glycine max
  Clone ID: PAT_MRT3847_28934C.1.pep
MAETPTIRFGVIGCADIARKVSRAISLAPNAALYAVGSRSLDKARAFAAANGFPAAAKVHGSYEAVLDDPDVDAVYVPLPTSLHVRWAVLAAQKKKHVLLEKPVALHAAEFDEIVEACESNGVQLMDGTMWMHHPRTAKMRDFLSDSNRFGQLRSIHTHFTFAADADFLENDIRVKPDLDALGSLGDEGWYCLRAILWAANYELPKTVIASHNPELNKAGVILSCGASLHWEDGKVATFHCSFLTNLTMDITAVGTKGTLHVHDFIIPYEEKEASFYAATETGFDDLVSKWIPQPSKHIIKTDIPQEALMVTEFARLVADIKFNNSKPEKKWPTISRKTQLVLDAVKASIERGFEPVQIQE

SEQ ID NO: 206986 - protein, 28 aa, Glycine max
  Clone ID: PAT_MRT3847_28935C.1.pep
CALFKWMKYYILVHECKRALISLRFADE

SEQ ID NO: 206987 - protein, 95 aa, Glycine max
  Clone ID: PAT_MRT3847_28936C.1.pep
SSRELNLVVFKKRVGNATSFYQHGNLPADWARLTFTKSLIELMEPLVSEKQKPPPLEFHKRSPHMPQNVDVSTMKRGGCIYTWGGERLYAQVSDW

SEQ ID NO: 206988 - protein, 112 aa, Glycine max
  Clone ID: PAT_MRT3847_28937C.1.pep
QVHQHVLLITKSTSIKDTWNKHEFSVLLDKERSSENHQEIEDSQITTDSVLDSHSPTSTSLCTVSGSTSTNSGSVTENESLKKKRGSVDMVPEIWYTMVNRRKGVPHRSPFY

SEQ ID NO: 206989 - protein, 77 aa, Glycine max
  unsure (1)..(77): unsure at all Xaa locations
  Clone ID: PAT_MRT3847_28938C.1.pep
FFISSCIQWQPQQTMVSTXFMXRQPMXXTSLKXXPXVGEALFGLKSGRGGRVTCMASYKVKLITPEGEVEFECPDDV

SEQ ID NO: 206990 - protein, 33 aa, Glycine max
  Clone ID: PAT_MRT3847_28939C.1.pep
KLETPVILISKCQTLSVKVVKSDISLSIRCLRF

SEQ ID NO: 206991 - protein, 190 aa, Glycine max
  Clone ID: PAT_MRT3847_2893C.1.pep
MAGYSKTSTTTSASLLILFLLFGFSMAKEMLVGGKTDAWRVPASESDSLNQWAEKSRFQVGDYLVWKYDGGKDSVLQVSREDYGNCSISNPIKEYNDGTTKVKLEHPGPFYFISGAKGHCEKGQKLVVVVLTPRGGRFTGIAPSPSPSPSSAFAEFEGPAVAPTSSATALNGGILMMAMGVVAAMWVFPM

SEQ ID NO: 206992 - protein, 48 aa, Glycine max
  Clone ID: PAT_MRT3847_28940C.1.pep
FSGCILTGDDESGPATVSQKPEPHRIRRRTGSSPGTLARSLSHRHFLP

SEQ ID NO: 206993 - protein, 66 aa, Glycine max
  unsure (1)..(66): unsure at all Xaa locations
  Clone ID: PAT_MRT3847_28941C.1.pep
SGLDDQSPTAFDPXAEAYADNSGAGSKESVHIRVRQRIGRKSLTTVQGLKKECSCHRILHDVNKDR

SEQ ID NO: 206994 - protein, 461 aa, Glycine max
  unsure (1)..(461): unsure at all Xaa locations
  Clone ID: PAT_MRT3847_28942C.1.pep
MAAESSRSSAKRPFMEEDDDEFSKKPPAKRVRFPKGKKVKPGDEVVVDKANVEEGEEVDLVNAKTATNAAKEREKLRRFLKGKKVKPGDEVVVDKANVEEGEVDLMNPKIAAAKERAKLRNQITAELLRESAGGITNDLSAAEVTYEDNENFVDDGIQIEPFNLDXIEYMSEFMLKEILFDIDERTRISIPXFSVATNVEDVGPPDLSSKDIGIMKRRIANVLEPGETVLQALRRLKGNSDRKAKMSAETKIVFDQLTEDAMKLMENGEYNVPRDRTADGEYSXLFSLGLPRQIMICLLMTSSMIQVTLLEMQIILLGIFFHLTCLLVLRFGCCKMFMXNVYHEKQEVFDREAEGYEKLAQANYDMFADDDEHDTSKPSTDENNAVSQSSSDAINSGPEGGASQSDYVYDESSGYYYSSNLGYYYDPNTRLYYSAASGQWYSFNEETSTYEEVHEVASNVS

SEQ ID NO: 206995 - protein, 101 aa, Glycine max
  Clone ID: PAT_MRT3847_28943C.1.pep
NQINHAKEAELGFIGDGTLCAQIIGGGFSYLNSGVELQDTQKLVPSNAGKVNSGVTDEESRLWGESPLEYGLEEIKQLISTSSCNNFMLDDSKTGEMAMYY

SEQ ID NO: 206996 - protein, 264 aa, Glycine max
  unsure (1)..(264): unsure at all Xaa locations
  Clone ID: PAT_MRT3847_28944C.1.pep
MAAESSRSSAKRPFMEEDDNEFSKKPPEKRVRFPKGKKVKPGDEVVVDKANVEEGEVDLVNAKTATNAAKEREKLRRFLKGKKVKPGDEVVVDKANVEEGEEVDLMNPKIAAAKERAKLRNQITSELLSEGAGGITNDLSAAEVTYXNENFVDDGIQIEPFNLEKEREEGYFDAAGNFVEYIRENEIKEPYXDAWLDNVEVDPKYAALSSVATDDEDEGPPDLSSKDIGIMKRRIANVLEPXETVLQALRRLKGNSDRKAKMSA

SEQ ID NO: 206997 - protein, 71 aa, Glycine max
  unsure (1)..(71): unsure at all Xaa locations
  Clone ID: PAT_MRT3847_28945C.1.pep
HPFFFKDKSVLAKNTVGGTILCSDQLANXTREGTFTASVDQQSTYCIKGMITAQATAGFPENTGRAYGLCY

SEQ ID NO: 206998 - protein, 67 aa, Glycine max
  Clone ID: PAT_MRT3847_28946C.1.pep
PTLPPNQPLTKDPLLSRDQTLNPPPETQEKQNTTKTTEANTSVPTVIVSPTSAFIVPPSTTHAKMAS

SEQ ID NO: 206999 - protein, 52 aa, Glycine max
  Clone ID: PAT_MRT3847_28947C.1.pep
PGNIYLKPPENDREKGSMYVKTKFQRYQRILHKSISPAKSFELSLKKQILST

SEQ ID NO: 207000 - protein, 76 aa, Glycine max
  Clone ID: PAT_MRT3847_28948C.1.pep
AIALWDQNTKNPLLTIGRANPTCDSSVAFTVDESVAHDNRLAIEINILFERALATDLDIDQIHIALMELLKPPGDG

SEQ ID NO: 207001 - protein, 67 aa, Glycine max
  Clone ID: PAT_MRT3847_28949C.1.pep
MSVCKCQKKKKKKKKKKKKKKIKKKQKRKKRKKKKKKKTKRNMGGPFKGNNIICLGKNTKKMYHCAP

SEQ ID NO: 207002 - protein, 183 aa, Glycine max
  Clone ID: PAT_MRT3847_2894C.1.pep
MAGYSKASALWILFLLFGFSVAKEILVGGKTDAWKVSASESDSLNQWAEKSRFQVGDYLVWKYDGGKDSVLQVSKENYVNCSISNPIKEYNDDTTKVQLEHPGPFYFISGAKGHCEKGQKLVVVVLTPRRGTRFTGFAAPSPAPSASAEFEGPAVAPTSTANALNGGILMVAMGMIAMWVFFM

SEQ ID NO: 207003 - protein, 75 aa, Glycine max
  Clone ID: PAT_MRT3847_28950C.1.pep
VVSLVTYFERKYYPLLRNAFRGIISYVITSCVITYGPIISTYGPIILTCGPIIYALITYALRTYALITSWLIYDG

SEQ ID NO: 207004 - protein, 69 aa, Glycine max
  Clone ID: PAT_MRT3847_28951C.1.pep
HNFSFGCEFPISGAAEVEEEDDMFILVAPQNAVGNCIIDDLRAMTNAAEHRPVILINARLKVQFLAPFV

SEQ ID NO: 207005 - protein, 60 aa, Glycine max
  Clone ID: PAT_MRT3847_28952C.1.pep
RSIGQGSCNIGSYIIGHWMASVFYVTGDTPYDSRSMTEEADTAEHDAEECLRARHEEHNT

SEQ ID NO: 207006 - protein, 187 aa, Glycine max
  unsure (1)..(187): unsure at all Xaa locations
  Clone ID: PAT_MRT3847_28953C.1.pep
MYFNRVGVKAANAAKMKVVAVPSRREADCHGLANVVLHSLLEFQPELWGXLPPFDDWLDNTLPIDPIHLSGLYVSGCLEEATENATLAFPDQAVGLYFGWAKVDTDGNFKILVSINIDFSCVGYKRIHVYLIDANSDLKHKQKMQIHLVGYIRAWDNKEFTSTELEKLEEYKSIARASLYLPSFTCL

SEQ ID NO: 207007 - protein, 67 aa, Glycine max
  Clone ID: PAT_MRT3847_28954C.1.pep
PPPTEKIPFPSKLVVGPKEGSGGKLTVETQTKENGQPHQDHFKIVKTKGDALFKAIKVSLLANPHSN

SEQ ID NO: 207008 - protein, 101 aa, Glycine max
  Clone ID: PAT_MRT3847_28955C.1.pep
GTDIVNTGKKTVLNLKHKVLWGNYGSLIRTPFKATNCNAPPLRAKWVSKAHPYFFTVFFARRKRVRIGSLPMTMFLSKGPLLEILNNRPPLVFLTNNLPNA

SEQ ID NO: 207009 - protein, 59 aa, Glycine max
  Clone ID: PAT_MRT3847_28956C.1.pep
LMALISELLANTILLVMRHFSLLRLACLFGIRIALTVIYTWTELIGTTIRFHANIILRI

SEQ ID NO: 207010 - protein, 86 aa, Glycine max
  Clone ID: PAT_MRT3847_28957C.1.pep
RLAMSIELSKVLSRGGECRWWWGGSARARAGGVYCKSVAAPAECAGIQMLLTLLIVLHRANSDLHGSDMDVIIIQIGRSPAVLRNV

SEQ ID NO: 207011 - protein, 220 aa, Glycine max
  Clone ID: PAT_MRT3847_28958C.1.pep
MDSLEDSGCWDFLDYSFIDQAPPDFLWSNNNNSVSTEIDIPGDAVACQENTKKRGRTDSCFKAGSKACREKLRRERLNERFCDLSSVLEPGRPVRTDKPAILDDAIRVLSQLKTEAQELKKTNEKLLEEIKCLKAEKNELREEKLVLKADKERIEKQLKALPVAPAGFMAPPVAAAAAAYQAGVNKMAVYPNYGYIPMWQYLPQSVRDTSHDHELRPPAA

SEQ ID NO: 207012 - protein, 56 aa, Glycine max
  Clone ID: PAT_MRT3847_28959C.1.pep
EVIILKVFHKSSKHIHGILSSIYTCKLKSYSMQPLVSLTLIFTFWDILQPRTGTTL

SEQ ID NO: 207013 - protein, 131 aa, Glycine max
  unsure (1)..(131): unsure at all Xaa locations
  Clone ID: PAT_MRT3847_2895C.1.pep
YGCEKTTEGLSPFQLVYEKSCHLPVEMEHKAYWALKFLNFDEKASREHRKIQLLELKEMRLTAYESSRLXKEKVKTYHDKKLLKKEFKLGQEVLLFNSRLKLFPGKLKSKWSGPFVIKKVRSYGAIELYDP

SEQ ID NO: 207014 - protein, 82 aa, Glycine max
  Clone ID: PAT_MRT3847_28960C.1.pep
LIICQNQPTFKINFSILILGTLKIHLKPTNDRNKTNPTFLPSCYLPYKILSSKLSPLTKSLNSIHLLNKRYHKIKKVNPGMD

SEQ ID NO: 207015 - protein, 94 aa, Glycine max
  Clone ID: PAT_MRT3847_28961C.1.pep
QCERHRANASAIDTCWALRSSLRAVRRRTQGSPVSPCRGRPWTKFCRYTNCYSRNSPSISDLSSPISPSLSKSKWVVLIFRFFEFKCHNLGSNS

SEQ ID NO: 207016 - protein, 36 aa, Glycine max
  unsure (1)..(36): unsure at all Xaa locations
  Clone ID: PAT_MRT3847_28962C.1.pep
XXXRYFTLXNTGDKKRFTVYQLYALRVMSIMNRTYY

SEQ ID NO: 207017 - protein, 107 aa, Glycine max
  unsure (1)..(107): unsure at all Xaa locations
  Clone ID: PAT_MRT3847_28963C.1.pep
MAMLKKLLENVWDDPEAGPEPERVLGLITLLTIVESNGDGLRNTLXMTLTXQTTTTTTTTTTTATTPGADHKGRSVWQSVSHSGSKTIAESMGDQTVDNTLTDYDSV

SEQ ID NO: 207018 - protein, 442 aa, Glycine max
  unsure (1)..(442): unsure at all Xaa locations
  Clone ID: PAT_MRT3847_28964C.1.pep
HASATRTGEAVVDIQDRLPEARVVYCSATGASEPRNMGYMVRLGLWGDGTSFTDFREFLGALDRGGVGALELVAMDMKARGMYLCRTLSYEGAEFEVIEAPLEDKMMDMYKKAAEFWAELRVELLSASAFLNDKPNSSQLWRLYWASHQRFFRHICMSAKVPAAVRLAKQALVEEKSVVIGLQSTGEARTEEAVTKYGSELDDFVSGPRELLLKFVEENYPLPEKPELLPGXEDGVKELQRKXRHSATPGVSVKGRVRKVAKWQPPSDAESDEESESDSGIESTDSDDEFQICEICTTEEERKKLLQCSCCSKLVHSTCLMPPIGDIVPEEWSCHLCKEKTDEYLQARQAYIAELQKRYDAASERKTKILDIIRALDLPNNPLDDIVDQLGGPDKVAEMTGRRGMLVRASLEKGVTYQARNTKDXTMEMVNMHEKQLFMGCK

SEQ ID NO: 207019 - protein, 133 aa, Glycine max
  Clone ID: PAT_MRT3847_28965C.1.pep
RFFRHMCMSAKVPAAVRLAHKALVEEKCVVIGLQSTGEARTEEAVTKYGSELDDFVSGPRELLLKFVEENYPLPEKPELLPGEDGVKELQRKRHSATPGVSVKGRVRKVAKWQPPSDAESDEESECEFLRNKF

SEQ ID NO: 207020 - protein, 61 aa, Glycine max
  Clone ID: PAT_MRT3847_28966C.1.pep
TNHYLQIHNLNFPNFNPKRTFTKPYTKKKRFPHVLKKPITTLKLSNLLKGQKTPLYSKGVL

SEQ ID NO: 207021 - protein, 41 aa, Glycine max
  Clone ID: PAT_MRT3847_28967C.1.pep
PTRPHMLLPTHSLTRSGTLSFKRIQAYLYVNTTTYLFYSVT

SEQ ID NO: 207022 - protein, 39 aa, Glycine max
  Clone ID: PAT_MRT3847_28968C.1.pep
RAASSGSSPALVSCYVSSPCQLLGTSPLKSGIMQPLQSG

SEQ ID NO: 207023 - protein, 55 aa, Glycine max
  Clone ID: PAT_MRT3847_28969C.1.pep
IVGSNNEAFNLTIRISRSWASNKPKEGVLSRQKECGVCDHLRFEDYSLTCFAGRV

SEQ ID NO: 207024 - protein, 53 aa, Glycine max
  Clone ID: PAT_MRT3847_2896C.1.pep
GNYFTVMGQMNMDLQNLLKKMSVNERISYINRIPSVNEIHDPVIKPLSLNNVI

SEQ ID NO: 207025 - protein, 126 aa, Glycine max
  Clone ID: PAT_MRT3847_28970C.1.pep
MEFGYCAVFLILLLPISCADSTSVEKQFRECLLTQLDGNSEYIEKITFTSSSSLYPQVWDSLAQNPRWVSSTRKPLIILTPFHESEIQEAILCSKQLELQLRVRSGGHDYEGLSYLGKVPFVMVDL

SEQ ID NO: 207026 - protein, 57 aa, Glycine max
  Clone ID: PAT_MRT3847_28971C.1.pep
RSFFHSELHIRRRIQTQGVRIAKLRDHILYITVPSLSQYPLSIYVMHSPVCLFTSLT

SEQ ID NO: 207027 - protein, 184 aa, Glycine max
  Clone ID: PAT_MRT3847_28972C.1.pep
MRVFSRFKFLSRAVHEEQEGEHDGERNRYPLTEASLCTSLTLTVWRKSLVISCKGFTVIDSYGNLVYRVDNYIMHPNELILMDASGNSLLTMRRSRKLGLVDRWFVYEGEMGKQSTRSKSVKSKERPVCCVRKRVNILDGKANKVQAYVYRAASDSDKRHPAFTVEGSYAHRTCKVLDEYKNAV

SEQ ID NO: 207028 - protein, 160 aa, Glycine max
  Clone ID: PAT_MRT3847_28973C.1.pep
MSGGIARGRLTEERKSWRKNHPHGFVAKPETLPDGTVNLMVWHCTIPGKTGTDWEGGYFPLTLHFSEDYPSKPPKCKFPQGFFHPNVYPSGTVCLSILNEDSGWRPAITVKQILVGIQDLLDQPNPADPAQTEGYHLFIQDAAEYKRRVRQQAKQYPPLL

SEQ ID NO: 207029 - protein, 182 aa, Glycine max
  unsure (1)..(182): unsure at all Xaa locations
  Clone ID: PAT_MRT3847_28974C.1.pep
XXXXIXSXXXXXFHXXXXXLSPTXAXXXLXXXLXXTXHXLXXYXXTXXYXXXXLTHXXLXTXVXXXXXASLXXXLXIYXPXIXXXFXQWXXAXXXXXXXXDTLXXRXXXXXXTTXXXTHCXRXLSXXTHXSXXIHXXXXIXXXXPXTLXTVPQXQXFXIXTXXFXXAXXMFXXXWXXXIXIF

SEQ ID NO: 207030 - protein, 62 aa, Glycine max
  Clone ID: PAT_MRT3847_28975C.1.pep
NEAVMLLLLLMLSVTPQTLIISILIVTCLPTLIYYYYIHNHNLSISLEEKKNPEKSARLDPI

SEQ ID NO: 207031 - protein, 105 aa, Glycine max
  Clone ID: PAT_MRT3847_28976C.1.pep
QLEQDPVQILDALLPLYLNSQVLRALQESLASELAARMSAMSNATDNAIELKKNLSIVYNRERQAKITGITQEIMFEVNASIYHNVIGVFTYYKGRNVCHSKNSS

SEQ ID NO: 207032 - protein, 131 aa, Glycine max
  Clone ID: PAT_MRT3847_28977C.1.pep
KLKGEICDINGVCVDAAEDEFFRLTTKEGKLTVERDVVRTKTIDFSPILQFEQDPVQILDALLPLYLNSQVLRALQESLASELAARMSAMSNATDNAIELKKNLSIVYNRERQAKITGEILEIVAGANALQ

SEQ ID NO: 207033 - protein, 252 aa, Glycine max
  Clone ID: PAT_MRT3847_28978C.1.pep
NKGELVAQPLITNQGIPINIRGQIDRIDTYTKGDHSYVNIIDYKSSESSATLDLTKVYYGLQMQMMTYMDIVLQNKERLGLTDIVKPGGLLYFHVHEPRIKFKSWADIDEDQFQKDYIKNFKMSGLLNRDQEVLDALDIRLEPKYNSDIVPIALTAKGAINQRSSKVADENIIYQLIEHNKKNFIETATHIMDGHTEVAPLKYKQVLPCQFCNYKSVCHVDGLIDSKRYRTVDESIKPLDLIQQLRNEGGER

SEQ ID NO: 207034 - protein, 68 aa, Glycine max
  Clone ID: PAT_MRT3847_28979C.1.pep
FLFRCKLLRSTQLQLVSIYTTSLHKILIPTLITKYYKAIHAMKCMIIAAAREPLFLFEPARINTLPLN

SEQ ID NO: 207035 - protein, 84 aa, Glycine max
  Clone ID: PAT_MRT3847_2897C.1.pep
VNSTFGSRRSSPAQLHISVFPSATHHCTATSSYCSLNHECGRACLEPLTWHLPCSRSRSWVSSSRHHSVLSTLCYAYHISYFKG

SEQ ID NO: 207036 - protein, 107 aa, Glycine max
  unsure (1)..(107): unsure at all Xaa locations
  Clone ID: PAT_MRT3847_28980C.1.pep
WEGGYFPLTLHFSEDYPSKPPKCNFPQGFFHPNVYPSGPVRSSILHXHSGWRPAITVKQIFVGIQDLLDQPNPADPAQTEGYHLFIQDAAEYKRRVRQQAKQYPPLL

SEQ ID NO: 207037 - protein, 137 aa, Glycine max
  unsure (1)..(137): unsure at all Xaa locations
  Clone ID: PAT_MRT3847_28981C.1.pep
KSSAHNVKLNALNPENPIDSEWLVIKTWXPHLRPSQGADADLSGXSLNRNAPCGDLPTLRATKERYIQQRXGIIGTIFMMDPSDNHEPHHSKQLCLSQSPRXAKADSLXEGDLMAYPTGGGWWMYITEHTPDVAAAI

SEQ ID NO: 207038 - protein, 265 aa, Glycine max
  Clone ID: PAT_MRT3847_28982C.1.pep
EHFEWNCLQSSSRWLLLIQALASRPGGPPFVHVTGVDDSQSFHARGGGLHIVGKRLSDYAKSCGVPFEFHSAAMCGSEVELENLVIQPGEALVVNFPFVLHHMPDESVSTENHRDRLLRLVKSLSPKVVTLVEQESNTNTSPFFQRFAETLSYYTAMFESIDVALPRDDKQRINAEQHCVARDIVNMVACEGDERVERHELLGKWRARFSMAGFAPCPLSSLVTDAVRNMLNEFNENYRLGYRDGALYLGWKNRAMCTSSAWRCY

SEQ ID NO: 207039 - protein, 548 aa, Glycine max
  Clone ID: PAT_MRT3847_28983C.1.pep
MQTSKKHPTSAGIHLYLQPAQDIDPYTHYQILQSNSCHDNSSSQGTTISFETSKEQYFTLESSPAINDLIGCDSPSYASVSSNRSPFSPQASHSDQHQSSDNTYGSPTSAHSRYDDDGYELKNKLRELEISLLGPDSDIVDSWHCSYKGGRHRASSPTAKHNWDQIVEMIPKLDLKEVLIRCAQAVADDDIETAVGFMNNVLAKMVSVGGDPIQRLGAYMLEGLRARLESSGSIIYKALKCEQPTSNDLMTYMHILYQICPYWKFAYTSANAVIGEAMLNESRIHIIDFQVAQGTQWLLLIQALASRPGGAPFIRVTGVDDSQSFHARGGGLHIVGKRLSDYAKSCGVPFEFHSAAMCGSELELENLVIQPGEALVVNFPFVLHHMPDESVSTENHRDRLLRLVKSLSPKVVTLVEQESNTNTSPFFQRFVETLSYYTAMFESIDVALPRDDKQRINAEQHCVARDIVNMVACEGDERLERHELLGKWRSRFSMAGFAPCPLSSSVTAAVRNMLNEFNENYRLQHRDGALYLGWKSRAMCTSSAWRCY

SEQ ID NO: 207040 - protein, 61 aa, Glycine max
  Clone ID: PAT_MRT3847_28984C.1.pep
NLKSKNKWDFFLSSNKQSGVGVPNPLLIFYTYNPGGLFAIKLMHCTWQTLSNSIIPIKPFC

SEQ ID NO: 207041 - protein, 81 aa, Glycine max
  Clone ID: PAT_MRT3847_28985C.1.pep
QVKKFISCLQLLRLIFDFDNNMLSPYLERSCGLCTFRSPRIRQPSYLCRDYSFLQLNILVILLHTIEYVGPKHLIICKSML

SEQ ID NO: 207042 - protein, 68 aa, Glycine max
  Clone ID: PAT_MRT3847_28986C.1.pep
GRPTKARARQHTKERRKDKEPKEENTARPRKKAQAPKHKEGGTQHEEAEQETEQRRKQQRRNQQGKTR

SEQ ID NO: 207043 - protein, 186 aa, Glycine max
  unsure (1)..(186): unsure at all Xaa locations
  Clone ID: PAT_MRT3847_28987C.1.pep
GANFRGDINILLVGDPGTSKSQLLQYIHKLSPRGIYTSGRGSSAVGLTAYVTKDPETGETVLESGALVLSDRGICCIDEFDKMSDNARSMLHEVMEQQTVSIAKAGIIASLNARTSVLACANPSGSRYNPRLSVIDNIHLPPTLLSRFDLIYLMLDKADEQTDRRLAXHIVSLHFENPENVEQDVL

SEQ ID NO: 207044 - protein, 86 aa, Glycine max
  unsure (1)..(86): unsure at all Xaa locations
  Clone ID: PAT_MRT3847_28988C.1.pep
DIAHADLAPTHPIKLSPALNISVLYYEILSTPDRACNIANQASDEAIAALDIPXEEYHKDSTPIMQLLRDNITXWSADTNEDGSDD

SEQ ID NO: 207045 - protein, 78 aa, Glycine max
  Clone ID: PAT_MRT3847_28989C.1.pep
MSCCGGNGGCGTSCNCGNGCGGCKIYPNLTYTDSTTTEILAMELEPVKAQFEGAEMGVPAENDGCKCGPNCSCNPCTC

SEQ ID NO: 207046 - protein, 24 aa, Glycine max
  Clone ID: PAT_MRT3847_2898C.1.pep
RNPSHDLMIFTSQACCRRLYYHKV

SEQ ID NO: 207047 - protein, 107 aa, Glycine max
  unsure (1)..(107): unsure at all Xaa locations
  Clone ID: PAT_MRT3847_28990C.1.pep
REENNESQGRKKTANRRAEEQETEKKXKKRTXRXPXKXGEKKXGXGRXXHKXXXXKPKENXKXERKKKQTEKEQRXEKXREKXRXRQRRKRRKXXRXXKKXXQXRNA

SEQ ID NO: 207048 - protein, 51 aa, Glycine max
  Clone ID: PAT_MRT3847_28991C.1.pep
REKTYHHKGDAFCERGAHHQLLHYPTSSAENSENSTLNIMILWELTKIFTL

SEQ ID NO: 207049 - protein, 111 aa, Glycine max
  Clone ID: PAT_MRT3847_28992C.1.pep
GSRKVVSLLSSGLGHARVRKHKKLQIPFSENILLDNQICETDHHSKCLQVPHTIFTENSVQGLGQTVRNSIYMMGNPSSELSSNVRSPLERTRQTASTRYHFLELQQMNDQ

SEQ ID NO: 207050 - protein, 52 aa, Glycine max
  Clone ID: PAT_MRT3847_28993C.1.pep
PTFLYRAITKLSKLKKQLLRCDYQKQHPSTLNPGLCIASPMWSISYMNYFPI

SEQ ID NO: 207051 - protein, 34 aa, Glycine max
  Clone ID: PAT_MRT3847_28994C.1.pep
QIYLGRKAVTTCPTKNVHLKKEVKSEKCIRGTNH

SEQ ID NO: 207052 - protein, 114 aa, Glycine max
  Clone ID: PAT_MRT3847_28995C.1.pep
EFKAGVWKKKKRPVPYPGISKKKGSRVFFLFLGDRPKLPERGKKTPLWGKFRVGFYSGGVGKGPILFPILFLQFLGDLIKENCLWGISFSKEMLQPFLQCWRFFLPKLERKVKN

SEQ ID NO: 207053 - protein, 47 aa, Glycine max
  Clone ID: PAT_MRT3847_28996C.1.pep
HSCNKTTERDPIELNSAEIIRNLIDHEFTPLIHYVIQDPEQYESSEC

SEQ ID NO: 207054 - protein, 422 aa, Glycine max
  Clone ID: PAT_MRT3847_28997C.1.pep
DRSGNMYRRGGEAKHVHRHGKSHIAPECSLPPPPSSSSSSSSSSSWQSRWANLPPELLLDIIQRLEASETSWPARRALVACASVCKLWREITKDVVKTPEQCGFITFPISLKQPGPRDSPIQCFIRRERMTSTYCLYLGLSPALSGDMSKLLLAAKKIRRATCTEFIISLVSDDFSWASNTYVGKLRSNFLGTKFTILDGEPAHETSLPLNCKLQQRVHLKQVLPNKVAAAANYKVATVSYELNVLRTRGPRRMRCMMHLIPIFAIQEGGNAPTPLKFTTNYLNDHASTTTEHASTTTPDSKGKKPEVVEFDSTGTANTPESIQRAREPLVLKNKAPRWHEQLQCWCLNFKGRVTVASVKNFQLVAAAEPCQNVSAAEQEKVILQFGKIGKDIFTMDYRYPLSAFQAFAICLSSFDTKPACE

SEQ ID NO: 207055 - protein, 47 aa, Glycine max
  unsure (1)..(47): unsure at all Xaa locations
  Clone ID: PAT_MRT3847_28998C.1.pep
VXGLXGGSGLXXGIXGGIYKGIGIGGXIYKGIXFARGXXWXXANXVX

SEQ ID NO: 207056 - protein, 67 aa, Glycine max
  Clone ID: PAT_MRT3847_28999C.1.pep
LSDHWFLSPFPPVCNTSLKEFSSSRFCNIRRSVLNRLYPRCWKSKVISNNLYFPRTIIHERNFRCEN

SEQ ID NO: 207057 - protein, 166 aa, Glycine max
  Clone ID: PAT_MRT3847_2899C.1.pep
MRTFLVAACVIALAQAAVSHTKDLLKRSPFFDVFANLQDDKTGIFQGEKYDSGYIKIKEAFGQAGEMFYWHFPARTSAEQAPLVIWLTGGPGCSSEMATLNENGPFFIQKDGTLVKNSQSWTESANVVWVDQPPGTGFSKAHFHYVFNEDQIAANMGLFLQGFLAA

SEQ ID NO: 207058 - protein, 46 aa, Glycine max
  Clone ID: PAT_MRT3847_289C.1.pep
LENVPENIWLFCRYNMKKLTYEERKAKLIARVAAINSAADSDEDDE

SEQ ID NO: 207059 - protein, 73 aa, Glycine max
  Clone ID: PAT_MRT3847_28C.1.pep
LKKKKQAAGLKNPPGKKGAPTPQGGEKRPPPTSGSKTPGQGAKHPTSPNKKKRGGPPREKTPPPPKGGAKKGG

SEQ ID NO: 207060 - protein, 110 aa, Glycine max
  Clone ID: PAT_MRT3847_29000C.1.pep
RPQQSRNETQTNAKHLCTRRGPSSILTRRPLSFCVAALAQRTNNVQCPPAVFARKKKKKKKKKKVVVSEDLSPCMCVRDATVSSQRYSNLTYRLLPHNAAIGKISVPFNP

SEQ ID NO: 207061 - protein, 55 aa, Glycine max
  Clone ID: PAT_MRT3847_29001C.1.pep
PTRSSTRTRTRGRTRGEILINREHRVPHLKSGNKSNRWLISRISQCLSTCVSTIC

SEQ ID NO: 207062 - protein, 88 aa, Glycine max
  unsure (1)..(88): unsure at all Xaa locations
  Clone ID: PAT_MRT3847_29002C.1.pep
KGELVMISFQKSDRHEFKSAIFGSMRKRIASMLXVKREIEIEQGINNSLSRKVHKKWKKSIVVRPPPSLKKLREEEAAAEAAEPERAA

SEQ ID NO: 207063 - protein, 50 aa, Glycine max
  Clone ID: PAT_MRT3847_29003C.1.pep
TTISTPLQFRMNKLLNFMIMQFSNNYNYKIIVFPSGGVREVDRTRSRSCN

SEQ ID NO: 207064 - protein, 63 aa, Glycine max
  Clone ID: PAT_MRT3847_29004C.1.pep
LQLSYSRIPMMGYTLFFCPMDLLPQYSEGEDSDSPSGNPSCPKRLLTGQSSLPQGVENVIALT

SEQ ID NO: 207065 - protein, 572 aa, Glycine max
  unsure (1)..(572): unsure at all Xaa locations
  Clone ID: PAT_MRT3847_29005C.1.pep
SDWVIRIAVFCIERNFLLRKRVLYFVYGVKKAVQNCVWLGLVLIAWHLLFDKRVQRETRSNFLEYVTKVLVCFLVGTLVWLLKTLMVKVLASSFHVSTYFDRIQESLFNQFVIETLSGPPLVEIRKAEEEEERLADEVQKLQNAGVTIPPDLRASAFSNIKSGRLRSGMLPKSPRFKSDKFSRPLSKKSDEPNMITMDNLHKLNPNNISAWNMKRLMNMVRNGALSTLDEQILDNSMDDENAXTQIRSENEAKAAAKKIFQNVARRGCRSLFPGDVLRVSRAVGAATAMKPFEAASGALCGRISAWTSWAGEAGLGGGPLALAVMVTISAVLDLHRMLNFIVGIVILVIWLLILELATTKFLLFVSSQVVVVAFIFGNTCKTIFEAIIFLFVMHPFDVGDRCEIDGVQMVVEEMNILTTIFLRYDNQKVIIPNNVLATKAIYNYYRSPDMGDAIEFCLHISTPVEKISLIKHRIQSYIDNKKEHWYPSPLIVYRDYDQLNMVRMAIWPTHRMNFQDMGERFVRRSLLLEEMIKIFRELDINYRLLPLDINVRATPTTSDRLPPSWASVPTPS

SEQ ID NO: 207066 - protein, 139 aa, Glycine max
  unsure (1)..(139): unsure at all Xaa locations
  Clone ID: PAT_MRT3847_29006C.1.pep
ISAAGAEDDAVDAVTPPEGSDNSIIDADESPRFIPLVRDCPSHASHTCTGNDPCHNXDARPMNRPCRLAFCLVDSMHKCMAXIEDSLRDTADQNNLSPMSSVPASSLNPPLLIQTEKFRAVLKPCSHVPCYYHPRHHPR

SEQ ID NO: 207067 - protein, 126 aa, Glycine max
  Clone ID: PAT_MRT3847_29007C.1.pep
SPDMGDAIEFCVHISPRVRKISLIKHRIQSYIDNKKEHWYPSPLIVYRDYDQLNMVRLAIWPTHRMNFQDMGERFVRRSLLLEEMIKIFRELDINYRLLPMDINVRATPTTSDRLPPSWTSVPTPS

SEQ ID NO: 207068 - protein, 75 aa, Glycine max
  Clone ID: PAT_MRT3847_29008C.1.pep
CNSVLYLMFCNILFSSNSVRCASIAFTSSSISKTVQPGVPIGTKIEKSVGSMRIRRDEIGKGEFPWALERSLMLL

SEQ ID NO: 207069 - protein, 324 aa, Glycine max
  unsure (1)..(324): unsure at all Xaa locations
  Clone ID: PAT_MRT3847_29009C.1.pep
MGEEENKPEEPMAKEKNPEEEATQEKKPEQESKEEVAAAAAAPPPPPPPPPPEIVLKVFMHCEGCARKVRRSLKGFPGVDDVVTDCKSHKVVVKGEKADPLKVLERIQRKSHRQVELLSPIPKPQEEKKVQEEEKPKPNPEEKKEEPQIVXVLKVGMHCEACSQEIKRRIQRMKGVESAEPDLKNSQVSVKGVYDPAKLVEYVYKRTGKHAVIMKQEPEKKEKVEEAKEEEMKSDGEGEENKEKKEKEEAKGEEAKAEEPTTPTITEDTNKVVPEVKINEYFYNPPRYGMEVYAYPAHPAHPGYFHSYPPQIFSDENPNACTVM

SEQ ID NO: 207070 - protein, 103 aa, Glycine max
  Clone ID: PAT_MRT3847_2900C.1.pep
VGVAPWLPFGQWVCRCWGQDSRVGSGPPLWGPFWLDRGSFRSVSAFPPMSHVQMAAALFVFLRGLWRLYLRRAPPFGSVPGGPLCSRQALWVSLKNTCPLKMF

SEQ ID NO: 207071 - protein, 331 aa, Glycine max
  Clone ID: PAT_MRT3847_29010C.1.pep
MAAFILISKSKLQSTVLVLVLNLSFFFLFCLLLKAYYLHPPNSNSQSNGPLKTFNHERLFRDVSVEGCTDLHKYSDYESKCLYVKSHLDCRSKGYINYLQIFYCSFGKFQILGQTILALWLVVLFYLLGDTASNYFCNSLEGLSNILRLSPTIAGVTLLSLGNGAPDFFASVVSFTGSSSNGAVGLNSILGGSFFVSCAVLGIISILVGPNQVQVDKASFIRDVLFFLFSLLILLIILYIGKITLLASICYVSIYFLYVCAVSATHLIYGGDKMINERQYQYSDDESSSSSLEASIPLLGYVDEEKTKLAEIVGGLKEKDQNQNQKQDSHS

SEQ ID NO: 207072 - protein, 185 aa, Glycine max
  Clone ID: PAT_MRT3847_29011C.1.pep
MGEEEKKPEEQPKAEEKKPEEEKKKEEAAAAEKPSEEKKPEQESKEEVAAPPPPPPPAEIVLKVFMHCEGCARKVRRSLKGFPGVDDVVTDCKSHKVVVKGEKADPLKVLERIQRKSHRQVELLSPIPKPQEEKKVQEEEKPKPTPEEKKEEAQIVMTVLKVGMHCEACSQEIKRRIQRMKGKYA

SEQ ID NO: 207073 - protein, 225 aa, Glycine max
  Clone ID: PAT_MRT3847_29012C.1.pep
MEEEADYRLIVITASVGFLLLFLYVLKSILLKSKNLPPSPPYALPLIGHLHLIKEPLHLSLHKLTDKYGPIIFLCLGTRKVLVVSSPSAVEECFTKNDITFANRPQTLAAKHLNYNKTTIGVASYGHYWRNLRRLTTVELFSTTRLAMLTSVRVEEVQLMVKQLFEECKGRQQIMIDLRARLLEVSFNIMLRMISGKRYYGKHAIAQEGKEFQILMKEFVELLGK

SEQ ID NO: 207074 - protein, 44 aa, Glycine max
  Clone ID: PAT_MRT3847_29013C.1.pep
QGTPDSLSTKMIYHHSRNNKGQIPREESIAKGTDSAKLGIGIDL

SEQ ID NO: 207075 - protein, 113 aa, Glycine max
  unsure (1)..(113): unsure at all Xaa locations
  Clone ID: PAT_MRT3847_29014C.1.pep
ASRSKLCIIGCGPGAHTVSIDASRAELTPVLCERWTVNGVCPGGQLTTTTDVQYLWGCSGCMLSTDLMDRCRQQSARFSAEVVTETGTAVYLXQRTFRVYSDFSIVKAEYGVV

SEQ ID NO: 207076 - protein, 66 aa, Glycine max
  Clone ID: PAT_MRT3847_29015C.1.pep
VEGWAHWALICEQGAFVERLVQEVKGGRWAVICMIGLFESAIVLLKGQLECLRDRRPDAANGNEWV

SEQ ID NO: 207077 - protein, 84 aa, Glycine max
  Clone ID: PAT_MRT3847_29016C.1.pep
MVEKGGFALGTPYRWKKLRKTEARVKPLQESLGKPVKAEKFSSSPKGVKKGSTSFDPKAIGKGSASFEPKVVEKGSTSFEKSSK

SEQ ID NO: 207078 - protein, 65 aa, Glycine max
  unsure (1)..(65): unsure at all Xaa locations
  Clone ID: PAT_MRT3847_29017C.1.pep
ITKLVSRQXDYKSAYASEVGGISFLTDVNVDKSDHRLLIIYSLSDWRKVSFNHVRMVIIGITSNF

SEQ ID NO: 207079 - protein, 44 aa, Glycine max
  Clone ID: PAT_MRT3847_29018C.1.pep
IIIQSGILFHRQPKLLVDGPYGAPAQDYQNFDVLLLIGLGIGAT

SEQ ID NO: 207080 - protein, 95 aa, Glycine max
  unsure (1)..(95): unsure at all Xaa locations
  Clone ID: PAT_MRT3847_29019C.1.pep
FKGPKYKLSLSFPKEGPFKPPKVKFQTSCFLPNCDVQRNKCLHRLQDKWSFAXDVTAILQSIQSLHGEPHISSPLNQQAAQLWSNQEXEFRKMVE

SEQ ID NO: 207081 - protein, 44 aa, Glycine max
  Clone ID: PAT_MRT3847_2901C.1.pep
LLRLKPLRSFDSFHFFHNGQRPSSRTRQWSRRQIRYALVPMIAR

SEQ ID NO: 207082 - protein, 62 aa, Glycine max
  Clone ID: PAT_MRT3847_29020C.1.pep
FQWNSQQYLYLEPLWMLKICSSLSSICDIVGIQFPFSHLYASAAFSLGDACLRLCRSSVRLK

SEQ ID NO: 207083 - protein, 471 aa, Glycine max
  Clone ID: PAT_MRT3847_29021C.1.pep
TLLPLIHHPHPKRPELHHLLLLPFPHSSTPHKPPSFQRSKTLLRASTVESPTPKRRGRKKKPETQTPSNNTPPPQNADNKTEEDELHDYDDGVDFPYSDPPLICCFGLARKEFVPAVRVQDYPMHPDIYSEWKMLQWKPPEFARAPGGPPSNVAVAHARLGGRAAFLGKVGDDEFGEEMVLMMNEERVQTRGVKIDSKCRTGCSYMKVKFEEEGRMKMETVREAAEDSLLANELNLAVLKEARIFHFNSEVLTCPSMESTLFRAIKWTKKFDGLVFFDLNLPLPLWRSHDETREIIKKAWNEADIIEVSRSELEFLLDEEYYERKRNYRPQYFAENYEQTKNRQEYYHYTAEEVSPLWHDRLKFLFVTDGTLGIHYYTPSFDGSVMGTEDVLITPYTCDRTGSGDAVVAAILRKLTTCPEMFENQDVLERQLRFAVAAGIISQWTIGAVRGFPTESATQNLKEQVYVPSLW

SEQ ID NO: 207084 - protein, 47 aa, Glycine max
  Clone ID: PAT_MRT3847_29022C.1.pep
STSQFYKFFLIKQKRDLVHIPFLGSLPSENSISHRGRRHARPQRRRR

SEQ ID NO: 207085 - protein, 78 aa, Glycine max
  unsure (1)..(78): unsure at all Xaa locations
  Clone ID: PAT_MRT3847_29023C.1.pep
LVHVFLXLSLKFKVXXVFPPCLSLSCGGLXECWXQRLLSHVLEDXXXIGSLWXXSXVVENXSPQRSXPXCLVXXAXQT

SEQ ID NO: 207086 - protein, 110 aa, Glycine max
  Clone ID: PAT_MRT3847_29024C.1.pep
PPLPTASKKPLKGVSISTFVWRYKNSYLIQIKFKVYLSLSHFSFLNSNPCFFLLYSPLYIFPTPTFYYSLPHFQTNTYIQPPPNTTNTTLTHCYYLLRQEHTTPPRPPFF

SEQ ID NO: 207087 - protein, 126 aa, Glycine max
  Clone ID: PAT_MRT3847_29025C.1.pep
FSSREKNHQTQRRKILLSLHSRGKELRLHLHYQLLRYFSNIFYFPLSKLYIYIYIYIYWVTFIYNNNSLELIMLIWIYGQVRKEKLGDRITALQQLVSPFGKVNFFVCSFFHFIFFPFTAALTMIW

SEQ ID NO: 207088 - protein, 65 aa, Glycine max
  Clone ID: PAT_MRT3847_29026C.1.pep
CVVHVFHCSLAIHSLVMPLTGVDSSLSFWSVEIIHIRYCSVSSCPDVRTVLLVTNCSPIDVFCSL

SEQ ID NO: 207089 - protein, 71 aa, Glycine max
  Clone ID: PAT_MRT3847_29027C.1.pep
TNVKGVFAAGDCRRGQSLVVWAISEGRQAAAQVENYLIKEDQDHRNQDGLVKRQQGLNMKQQGSNKHTVMT

SEQ ID NO: 207090 - protein, 53 aa, Glycine max
  Clone ID: PAT_MRT3847_29028C.1.pep
LVFEEGRKPFNLNMDDDWWGNLVSCAKAHSLLLLFPSIFLPIIQQTLCVLNYS

SEQ ID NO: 207091 - protein, 77 aa, Glycine max
  unsure (1)..(77): unsure at all Xaa locations
  Clone ID: PAT_MRT3847_29029C.1.pep
QLLDRPCSVGHCRHYHSDYIEAVEXHVTGVEVVIPHSVPEGKGLLVSCVQDPNTLISYEPNWVYRLAIEDIPKDHYM

SEQ ID NO: 207092 - protein, 143 aa, Glycine max
  unsure (1)..(143): unsure at all Xaa locations
  Clone ID: PAT_MRT3847_2902C.1.pep
DHRRPPTLKFLNHAQKKDPGEGKHPRTPQKRKHKQQRKQTNRKKKKHKPRREQPNTSSRKRKNGEAQKARPXKRRKTTKPTNKTDTGPPPTHRQKAQEXXKGPKKPHPGPRSQKPETEPQKKTPQTPPNARAQHKRKEPPNAH

SEQ ID NO: 207093 - protein, 64 aa, Glycine max
  unsure (1)..(64): unsure at all Xaa locations
  Clone ID: PAT_MRT3847_29030C.1.pep
QLXLFXILRXFSAPXIFSLSHLPSXHMHLLNXSXSXQSFDFXLQPXLGPSLXALFAAXNXAXXR

SEQ ID NO: 207094 - protein, 73 aa, Glycine max
  Clone ID: PAT_MRT3847_29031C.1.pep
LAPSFVSNAVLPDVSSTVFLRHFYLLVFLGVYPFFPTIKRAKQIYQKENRGTLTNRVEFQVKVGARSFVSQSR

SEQ ID NO: 207095 - protein, 75 aa, Glycine max
  Clone ID: PAT_MRT3847_29032C.1.pep
VRTTVSTPPNGTAARTLHIGTAPTTPHNVLYIIYTLHGVRGAGALHYPNFFSLPSYFITLLSFLLLSILFPSFFN

SEQ ID NO: 207096 - protein, 81 aa, Glycine max
  Clone ID: PAT_MRT3847_29033C.1.pep
IITFKCGAVIVILSHWISCFKCITYFWPLLTFPPRRLLYTTHTVALVCDFGNQFFTHRSVISDASVKFFITLQSNLVLPLE

SEQ ID NO: 207097 - protein, 45 aa, Glycine max
  unsure (1)..(45): unsure at all Xaa locations
  Clone ID: PAT_MRT3847_29034C.1.pep
MGSNRTIVWFKRDLKIEDNPALTAVAYEGSVLPVYVWCPXEEGQF

SEQ ID NO: 207098 - protein, 93 aa, Glycine max
  Clone ID: PAT_MRT3847_29035C.1.pep
MGSNRTIVWFRRDLRIEDNPALTAAAKEGSVLPVYVWCPKEEGQFYPGRVSRWWLKQSLAHLDQSLKSLGSRLVLIKTHSTAVALVECVKAIQ

SEQ ID NO: 207099 - protein, 225 aa, Glycine max
  Clone ID: PAT_MRT3847_29036C.1.pep
MGSNRTIVWFRRDLRIEDNPALAAAAKEGSVLPVYIWCPKEEGQFYPGRVSRWWLKQSLAHLDQSLKSLGSRLVLIKTHSTVTALVECVKAIQATKVVFNHLYDPVSLVRDHNIKEKLVEQGISVQSYNGDLLYEPWEVYSESGRAFTTFNAFWKKCLHMQMDIVSVVPPWQLIPAEGKVEECPLEELGLENESEKPSNALLGRAWSPGWRNADKALTEFVEQHL

SEQ ID NO: 207100 - protein, 78 aa, Glycine max
  Clone ID: PAT_MRT3847_29037C.1.pep
PPQKKCFSGQGSFPPPPFCFLFPPGSFSPYSYLSGRPLWVGIFNSLVAILFCKIMSVEGMPSLNAEVVYAYPCEREIK

SEQ ID NO: 207101 - protein, 67 aa, Glycine max
  unsure (1)..(67): unsure at all Xaa locations
  Clone ID: PAT_MRT3847_29038C.1.pep
GLRGLGLRRHHDVGLLLLRRRLLVLLRRLLAHGGRCHXGSWPRIISLGSLRILEREKEEPDAWADAW

SEQ ID NO: 207102 - protein, 64 aa, Glycine max
  Clone ID: PAT_MRT3847_29039C.1.pep
HASASNPKSPPPPLCLLPGESHRGVLPPHGAYTLRPKSHPIQTTPKSQFARTTLTADLGMKANF

SEQ ID NO: 207103 - protein, 55 aa, Glycine max
  Clone ID: PAT_MRT3847_2903C.1.pep
QVEAEWIDPYEPGVFITLVALHDGTKVFKRVRFTRRRFGEPQPETWWSENRARVY

SEQ ID NO: 207104 - protein, 124 aa, Glycine max
  unsure (1)..(124): unsure at all Xaa locations
  Clone ID: PAT_MRT3847_29040C.1.pep
RQQRLTEEFVPRADLLLFVISADRPLTGSEIAFLRYSQQWKKKAGFGWNKPXLYQNILELKKPLSFIKDNIQKWLIPENALYFPVSARSALEEKLMAPSIAGRLIENYSPSILNIGATSSFDLE

SEQ ID NO: 207105 - protein, 110 aa, Glycine max
  Clone ID: PAT_MRT3847_29041C.1.pep
HLQMALVGICVAPLLMLRIVQWIPYMNTPRIFLRNTLTHIYKSRPALAPQKKLLNCLAITLCVNYNSPGALCRKTTNCIKHGSYQAGNCFPLSLSCSTRPCPAEGTVDPL

SEQ ID NO: 207106 - protein, 73 aa, Glycine max
  unsure (1)..(73): unsure at all Xaa locations
  Clone ID: PAT_MRT3847_29042C.1.pep
PGGRLPMTWYPQRYLAKVPITNIDMHPNPSTRYPXKTYRFYKXPVIFPFKHKLSYSRFSQILSLTPKQVSIQI

SEQ ID NO: 207107 - protein, 86 aa, Glycine max
  Clone ID: PAT_MRT3847_29043C.1.pep
RAAANLAWAKTSEYPGGSFPSGALKANTFLPSWSRSGLGAIFWTCPRGRPWEKRSLPKAVQSYPRVEPPPRSEKKRWNLTMPSRGP

SEQ ID NO: 207108 - protein, 64 aa, Glycine max
  Clone ID: PAT_MRT3847_29044C.1.pep
WPMLTCLRSPFFSRSFHSYRIFCKSKIASWSIEGVITPKSRQSNIIAEAKSRTLSQAMLESLYT

SEQ ID NO: 207109 - protein, 131 aa, Glycine max
  unsure (1)..(131): unsure at all Xaa locations
  Clone ID: PAT_MRT3847_29045C.1.pep
ARNSARAHCGHLYTPITKYAYHYQLLFARGFPQNXSRLTDTGGPXVARSTARAVARDAAGANCLAPSSIAALHVHALANGNQTIAADPDTIIPKMEVTPLTMPISSSHDPLHGLVIDLKPAHHIMLLGMMT

SEQ ID NO: 207110 - protein, 51 aa, Glycine max
  Clone ID: PAT_MRT3847_29046C.1.pep
WDTSTLSNTYAYRLIFHGTSSHDFLWWGLLPSFISADFTRNKIGLFSNRFN

SEQ ID NO: 207111 - protein, 121 aa, Glycine max
  unsure (1)..(121): unsure at all Xaa locations
  Clone ID: PAT_MRT3847_29047C.1.pep
AAFGYIKCTHHFFIKYENXADDTLHFAAAPHEAVHFGEIQEQVVVNFSQEGFPTACTTQGRTATSLTDDGCPYLHALGPDRSQSTIPGETDTGVGTTTIYYMCAYGLNPGTPGYGLMGSRP

SEQ ID NO: 207112 - protein, 53 aa, Glycine max
  Clone ID: PAT_MRT3847_29048C.1.pep
QSIKLYCNIPFCGHKRVRYLQFPIWDTRQQNLSRANHDNLQNIIFYVSFQTCS

SEQ ID NO: 207113 - protein, 45 aa, Glycine max
  Clone ID: PAT_MRT3847_29049C.1.pep
PMQAPSHIQANMGLISRKYRHSNNNLYNYNSKDHTIANFHAFTYF

SEQ ID NO: 207114 - protein, 215 aa, Glycine max
  unsure (1)..(215): unsure at all Xaa locations
  Clone ID: PAT_MRT3847_2904C.1.pep
MVSSPHLIPWXESSGKDKSSAFHQGSGAGAQGSNVTGSYVMDIACGGRHSVVITDAGALLTFGWGLYGQCGQGNNADQLRPTLVPSLLGTRVEKIAAGLWHTLCVSVNGQIYAFGGNQFGQLGTGSDQPETSPRQLDASRFENKHSSIVSCGARHSALLTDDGHLFTWGWNKYGQLGLGDSVDRNIPGQVSIAGCRPRNVACGWWHTLLMGDKTV

SEQ ID NO: 207115 - protein, 69 aa, Glycine max
  Clone ID: PAT_MRT3847_29050C.1.pep
SLSSLSPCRPFFFFFFFQLAKGQEINNGAKCNSPEVTGGGPNFRVNYPLRLVSPYRTDAYSKFGKTFIV

SEQ ID NO: 207116 - protein, 223 aa, Glycine max
  Clone ID: PAT_MRT3847_29051C.1.pep
MNESLDSFFGALLNAQTPLMEFIPRYERGLEQRREEERKEDFNTSNFQPILQTKEPVEEQFRKLYTLTVFKIFQKELLQCFSYLGFKIFEEGGLSRYMVRRCGNDMEKHVVTFNASNISISCSCQMFEYEGVLCRHVLRVFQILQLREVPCRYILHRWTRNAEDGVFPDMESWSSSQELKNLMLWSLRETASKYIDAGATSIEKYKLAYEILREGGRKLCWHR

SEQ ID NO: 207117 - protein, 97 aa, Glycine max
  Clone ID: PAT_MRT3847_29052C.1.pep
KETIKEHKSIRNINILVSMSHSFLNSPSSQKSQNHRLCCKMVNQEEQQLHQLSHRMLQDHESGGVATSSAKSSGMIIRGGAGGDNVSSSGEVGGSTT

SEQ ID NO: 207118 - protein, 63 aa, Glycine max
  Clone ID: PAT_MRT3847_29053C.1.pep
MQPRSGLYTVGDFMTKKEDLHVVKPTTSVDEALEILVENRITGFPVIDDNWKLVSCSFLPICI

SEQ ID NO: 207119 - protein, 53 aa, Glycine max
  Clone ID: PAT_MRT3847_29054C.1.pep
SFPVASANPIFFPFLFTIVDGALLCLVKKKKKKKKKKKKKKKKKKKKKKKKKK

SEQ ID NO: 207120 - protein, 50 aa, Glycine max
  Clone ID: PAT_MRT3847_29055C.1.pep
TIFFNKVSRTKLYQLRRLVITRSHTATYLGAGCRVIQWPPSVIRSSADDH

SEQ ID NO: 207121 - protein, 37 aa, Glycine max
  Clone ID: PAT_MRT3847_29056C.1.pep
DTFEYTTTIMRPKGIALELAQIYITRQIDFEQVKVKC

SEQ ID NO: 207122 - protein, 189 aa, Glycine max
  Clone ID: PAT_MRT3847_29057C.1.pep
NKKNGERNSKGYLPTRPPKNAFSSAFLLSSSTMADDLSSFAKDALLVKGLKSSTLVWRLIVLTLAMVSGVYICSICLKQIGTSSKIGFLDIKVVQKPCPEPNIEPWEIPFVHYPHPQTYSRAECACHPVRYFAILSMQISGSGWFETFLNSHANISSNGEIFSVNVRRSYMSTITETLDTIYNLDWLSS

SEQ ID NO: 207123 - protein, 501 aa, Glycine max
  Clone ID: PAT_MRT3847_29058C.1.pep
MPATPFSCSFLTLQPRFNSYVNPIFRSLTFQLSSSPLPFNANFSSVRLHSSLSRAAETDSPTGGRSGALTPGPAVAGEVQKIDVNPPKGTRDFPPEDMRLRNWLFNHFKEVSRLYGFEEVDYPVLESEALFTRKAGEEIKDQLYCFEDRGNRRVALRPELTPSLARLVIQKGKSVSLPIKWFTVGQCWRYERMTRGSRRENCQYNIEIIEWTSLPESRFQEVAMLQSVCWFDITESDVGFKVSSRKVLQEVLNCYSVPENLFGKVCVIIDKIEKIPADEIKKELKAVGLSQEAVQELLQVLSVKSLTELEERLGSSGEAVADLKQLFSLAEKIGYSKWLQFDASVVRGLAYYTGIVFEGFDREGKLRAICGGGRYDHLFSTFGADDIAACGFGFGDAVIVELLKEKGLLPELNLQIDDIVCALDEDLQGCAAMVANILREKGQIVELVLESKPLKWVFKRAARLNAERLVLVGNSEWQRGVVGVKILSTAEQYEVKLDDLK

SEQ ID NO: 207124 - protein, 107 aa, Glycine max
  Clone ID: PAT_MRT3847_29059C.1.pep
VGGPPWGTIAPPPLPSRWRFLSSCWPLRFPLWHPVFPLCACLVSYLSLLAPRSSHFPPPVFLFSPRVSFCRFFYRSPISPTTPFSHFFPSLNLLRFFNRFALPLSNP

SEQ ID NO: 207125 - protein, 46 aa, Glycine max
  Clone ID: PAT_MRT3847_2905C.1.pep
HRSPPRDVASTATSTKSRSGLAIRILRSPLTQIGPPFKPCVGGRVG

SEQ ID NO: 207126 - protein, 45 aa, Glycine max
  Clone ID: PAT_MRT3847_29060C.1.pep
VYKSLKPLIILFLFSVSTSTLVSFLALVLWFYSFRRTATTTARGL

SEQ ID NO: 207127 - protein, 48 aa, Glycine max
  unsure (1)..(48): unsure at all Xaa locations
  Clone ID: PAT_MRT3847_29061C.1.pep
LEPKHLEQHDFICSYYSTSPXDINLRNLYCDWGRINIKXIFSFLSYTI

SEQ ID NO: 207128 - protein, 41 aa, Glycine max
  Clone ID: PAT_MRT3847_29062C.1.pep
RAFKMLININLSMCYSKVVCFGCTLSKDNILLLMMLLRVLM

SEQ ID NO: 207129 - protein, 74 aa, Glycine max
  Clone ID: PAT_MRT3847_29063C.1.pep
QPPPPPPPPHPPPPPPPPSPPPPSPPPPSPPPPPPSPPHPPPPPPPPFLPQANMIIEIIERDATIMRNKNIGPE

SEQ ID NO: 207130 - protein, 130 aa, Glycine max
  Clone ID: PAT_MRT3847_29064C.1.pep
PQKESCFKWHCGVVTLRIVSATSSLVVGEVAKVKDDKTFFGHDLGGIGFPGWGGDGGDIGWSGLVFNISVFAAPLFIIRRVIKTRSVEYMPYTLSMYLTINAVMWFFYGLLLRDYYVALPNTLGFVFGII

SEQ ID NO: 207131 - protein, 55 aa, Glycine max
  Clone ID: PAT_MRT3847_29065C.1.pep
TAQDVLSTGSSQEHQNLVLLGSGTRNLTQHIILKCLPTMALFQLDRSTDNANYTL

SEQ ID NO: 207132 - protein, 57 aa, Glycine max
  unsure (1)..(57): unsure at all Xaa locations
  Clone ID: PAT_MRT3847_29066C.1.pep
XLIALXLRIKRPVFLISDVRSPPIHVYFCKIPRCLYCWCCAHANRRLPRHPITHFLP

SEQ ID NO: 207133 - protein, 139 aa, Glycine max
  Clone ID: PAT_MRT3847_29067C.1.pep
MAPSKDTMFRSADMSLTQLYIANEIGREVVSGLGELGVMDFRDLNADTTAFQRTFTQEIRRLDNVERQLRYFRAQMEKSDIAMRSIYDFNNPFTAPSASEIDELADKSQSLEQRISSLNESYETLKKREVELTEWQWVL

SEQ ID NO: 207134 - protein, 120 aa, Glycine max
  Clone ID: PAT_MRT3847_29068C.1.pep
MEFVNRIVDIATRAVNSNVVINVCLLASFATLGVRSMNQQKTIEALQDEKESLTKSNKSIRKTLWDWKQQLYAEASADSAVVPLARLKAIYGEAPPPPRATLADTVTKDANSSGANKIIA

SEQ ID NO: 207135 - protein, 111 aa, Glycine max
  unsure (1)..(111): unsure at all Xaa locations
  Clone ID: PAT_MRT3847_29069C.1.pep
TGAGTQADESEEDPEEETHESPTRGETNGKETGRAERNNDGEGVATTWENXRARSTGEKGTGRSGKTLHHEGXSLHRRQPGXTAEGGDYRXGKGMGGDSTHGEMYADVNLK

SEQ ID NO: 207136 - protein, 64 aa, Glycine max
  unsure (1)..(64): unsure at all Xaa locations
  Clone ID: PAT_MRT3847_2906C.1.pep
DIQPLARDNGTGMVYAGSAXDDAPRAVLPNFVGRPLQTRVMGDMGRNDAYIGDEAPSRRGAATL

SEQ ID NO: 207137 - protein, 105 aa, Glycine max
  Clone ID: PAT_MRT3847_29070C.1.pep
RFRISRLLPTSLALPSPAARSTTASTTALAPTRRRYSTQHQPSVTCTALSPVTPPHVGLWLAAFIPCAAKGLSLSALLVRLLFGIPNGLSQVSLLLSIKADYYLH

SEQ ID NO: 207138 - protein, 95 aa, Glycine max
  Clone ID: PAT_MRT3847_29071C.1.pep
TDRVGRITAAMNTVTEVMTTDTAKEQDTTTPMMMAMELIGKLEGGAINYSVEGQERMHRCMRESSVKIVKNLKDVALLTHVIPTIATMTTVYMMV

SEQ ID NO: 207139 - protein, 39 aa, Glycine max
  Clone ID: PAT_MRT3847_29072C.1.pep
RVQKFLTSHQFPLRGLFNSHLTFRQNVLGFETKLPIVIF

SEQ ID NO: 207140 - protein, 177 aa, Glycine max
  unsure (1)..(177): unsure at all Xaa locations
  Clone ID: PAT_MRT3847_29073C.1.pep
DSRPLVVFYAAWCGHLXKLAPKYHKLGSIFKKSKYDLIGNVYCDEHKNXCPMYEASGYPTFQWFXKDLLKLYSLXGPRTAESLVEFVNSEGXTNVKIATVPSTVEVLTSENFNXFCLDEAKYVLVLNAMHHRCGHCLMLASTYERVTSAFKSEEDVLLVYLDADEYMXLARKYDMSG

SEQ ID NO: 207141 - protein, 80 aa, Glycine max
  Clone ID: PAT_MRT3847_29074C.1.pep
SSEDIENNNVAPSVRGDIRGNARDRELSSSKLRRRSSVIITLDRVNHGREHRRRQDRRRHSADGSRFLALQHRQDPALEP

SEQ ID NO: 207142 - protein, 90 aa, Glycine max
  Clone ID: PAT_MRT3847_29075C.1.pep
TGLLNRDDDLTLRAILRSVLVRVFATVALQSIASILLVREIFAVRTIIPLRLISITWVLLARRTTRHPYKSRNKPHLFTANAQKSRLSTF

SEQ ID NO: 207143 - protein, 191 aa, Glycine max
  Clone ID: PAT_MRT3847_29076C.1.pep
MTFFESACFIASQMFANWLIGNNTEKITAPSSAVIFFAAICFTFITRGWTENPGSASLKEYSRSLYAYILGDKRIWLLAWAQTCLHFSIGIFWILWAPTVVADGREVHLGLIYPCFLGSRMLGSTAFPCLTSGPSSLRTEDCLVFAYIILALLLSIVAYDYQEVGVLVILFCLFHACVGFVLPSLARLRTM

SEQ ID NO: 207144 - protein, 100 aa, Glycine max
  Clone ID: PAT_MRT3847_29077C.1.pep
LGFCVLRESDPVLLQYNPTHFLHHYRIDYNNNPTYCHMVALLPKNSAPVKYSQPSTTKMTRKQENHDESIYKHKKNKLQILHPKGAKQPICISYKEATYI

SEQ ID NO: 207145 - protein, 70 aa, Glycine max
  Clone ID: PAT_MRT3847_29078C.1.pep
AGNLHPHECSRLPPLIPPQILSSALNPSFLVSKRTKQYLLNLHQAQAIMLMLNKAYQLSLSPRHSTLAQF

SEQ ID NO: 207146 - protein, 49 aa, Glycine max
  Clone ID: PAT_MRT3847_29079C.1.pep
RKESSVGACIQHYGVVQGASSAVSFNGGQVFRDPSMSGSYVSALSSALL

SEQ ID NO: 207147 - protein, 117 aa, Glycine max
  Clone ID: PAT_MRT3847_2907C.1.pep
KFNPCFLTPANFFFWDPPPFLGAGGESPFFYPPPVNVGDPGKISRKSKRTPPPLITTPGLGSGISGLNSLPLWDPSKKKSPLPPKTSGIPFLKPPKVFSPPGRHRLGKAFSSPSLLF

SEQ ID NO: 207148 - protein, 90 aa, Glycine max
  Clone ID: PAT_MRT3847_29080C.1.pep
SPKTLNLTNSCLNTSLRMSFSHTAQQRVSYIRRPPFNFKKLDSNRGDPGRRNRDLAVARFHRRTPPRRDMIARRMMEEHRYPLDRQLTVS

SEQ ID NO: 207149 - protein, 38 aa, Glycine max
  Clone ID: PAT_MRT3847_29081C.1.pep
VFLSCVPTMDVRMKGITELHTLLQFLQFSEIFPLALSG

SEQ ID NO: 207150 - protein, 67 aa, Glycine max
  Clone ID: PAT_MRT3847_29082C.1.pep
IRIDTGKHWWSKHRSFMVGSTSGEFYSLPFCLNKCFPFCVTVRSYLIKKGGFSSCQSESQARLKGRT

SEQ ID NO: 207151 - protein, 133 aa, Glycine max
  Clone ID: PAT_MRT3847_29083C.1.pep
MATSENNSSARPQREAKKRAAAAISQIHGNAAKKKRVVLGDVTNVSSSDVAVSVSKKPVQTHKNVKLEKPAAPVATPEKVEERHDPQLCGPYVSDIYEYLRGMEVDPSKRPLMDYVQKIQRDANANMRGVLVD

SEQ ID NO: 207152 - protein, 100 aa, Glycine max
  Clone ID: PAT_MRT3847_29084C.1.pep
NGGTKKTPGGKKKRGGEKKKWGGTKFFPQKAPPKGGPHRPTPQTDAAPPQRGAPPPRGGRPPPGGGAPHPGGGHRPRRPPPPPPWGPRPSVFPGRPLPGG

SEQ ID NO: 207153 - protein, 48 aa, Glycine max
  Clone ID: PAT_MRT3847_29085C.1.pep
YSSQNRQATQLQISASHADFLRIKFAGNVERIMRNTPKISKHNINNSE

SEQ ID NO: 207154 - protein, 39 aa, Glycine max
  Clone ID: PAT_MRT3847_29086C.1.pep
YQWPYDDYASARRNEIGITGRIPLPQFQEATLQTRSYMN

SEQ ID NO: 207155 - protein, 68 aa, Glycine max
  Clone ID: PAT_MRT3847_29087C.1.pep
KCFFLQFHCFFGQLFLCPFWPSISPLLSSGAQWWSLSQLMGTLLGRSQGTYGLGVLFSQKWNFFILCC

SEQ ID NO: 207156 - protein, 147 aa, Glycine max
  unsure (1)..(147): unsure at all Xaa locations
  Clone ID: PAT_MRT3847_29088C.1.pep
EKWKQKELVRRANEILQVAMSRLEKELVHILLQHKQHLEPEYLYFHFNRVDMVFDESFRSVEDEXXFEASRSSGASQSXASTVDLVNPAVLERLKSIASVMFASKYHQEFCQVFVTSRRDALAEYFVILEMEKLRIEDVLKLEWHCL

SEQ ID NO: 207157 - protein, 274 aa, Glycine max
  Clone ID: PAT_MRT3847_29089C.1.pep
MGRQPCCDKLGVKKGPWTAEEDKKLINFILTNGQCCWRAVPKLAGLKRCGKSCRLRWTNYLRPDLKRGLLTEAEEQLVIDLHADCCLRWSKIAARLPGRTDNEIKNHWNTHIKKKLLKIGIDPVTHEPLKKQAAASSQDSSSSPAEHLPQPGNNLDDQVKETEGILLNSEENSSSSQAENSSGDDSLLLDSICSDDSLLNSMWLDETPLVEALWDTTPNLENTSNNMGLLPSWEDNCAWLLDCQDFGIHDFGFTCFNEIESHALQTIGMKEEGH

SEQ ID NO: 207158 - protein, 268 aa, Glycine max
  Clone ID: PAT_MRT3847_2908C.1.pep
EVLYLWISGVHLATWTAPSRECLTCWEPLIRLAAPSCVSVCLEWWWYEIMILLCGLLVDPTASVAAMGILIQTTSLIYVFPSSLGLAVSTRVGNELGANRGRRARMSAVVAVFFAAVMGFSAVVFATAMRRRWGRMFTGDEGILRLTGAALPILGLCELGNCPQTVGCGVVRGTARPNVAANVNLGAFYLVGMPVAVGLAFWLEVGFCGLWLGLLSAQVCCAGLMLYMIGTTDWEYQACRAQLLTALDEGSDGHKQPLIATLDNNNYS

SEQ ID NO: 207159 - protein, 61 aa, Glycine max
  Clone ID: PAT_MRT3847_29090C.1.pep
AYKILLLKGVNNKQFGQVLHIHFFGGGKIETGLGFQKKLEQTVSKGSFTFWTWNYHCTEGG

SEQ ID NO: 207160 - protein, 92 aa, Glycine max
  unsure (1)..(92): unsure at all Xaa locations
  Clone ID: PAT_MRT3847_29091C.1.pep
XLFPLSSXXLNNCXXIGXIPRPLYSEYXHQLFLXSGSHTXLAFSVFANILKRGFHSKCNYPSTHSXKASVFVGRLKKHFXXTIXWXAQGFQL

SEQ ID NO: 207161 - protein, 71 aa, Glycine max
  Clone ID: PAT_MRT3847_29092C.1.pep
DLYLRVKHALVATIIILNAGNSNQGKDTVENYKIFTLPNVATPTEKHICCIFMSCSPRLWKIHYRIKPNTA

SEQ ID NO: 207162 - protein, 75 aa, Glycine max
  Clone ID: PAT_MRT3847_29093C.1.pep
VFTVIFHLHFNLQYCLQVVHQCISLLLSRLFITNYPLLLCWALACDNVPPHTLYLLLVPPPPPPPSRRHCTHVAR

SEQ ID NO: 207163 - protein, 40 aa, Glycine max
  Clone ID: PAT_MRT3847_29094C.1.pep
DARKSQSLIVNRIVVMYNRPLGGLLGRVRTCDVTSGPTKE

SEQ ID NO: 207164 - protein, 51 aa, Glycine max
  Clone ID: PAT_MRT3847_29095C.1.pep
LVNFIQSQCYVTICLMTNKLRYMYRSRKCFCEWLLFYLLLRAEPPRECQCH

SEQ ID NO: 207165 - protein, 77 aa, Glycine max
  unsure (1)..(77): unsure at all Xaa locations
  Clone ID: PAT_MRT3847_29096C.1.pep
MVKYSRESENLNKSXDATCADLRLRYKNTRQTAFAIRTLPLDKSVXHTWKDALAHXQAIPFRTFCGGVGRRTNLTAD

SEQ ID NO: 207166 - protein, 157 aa, Glycine max
  Clone ID: PAT_MRT3847_29097C.1.pep
LSSKRVQSFQPSRGEELTNFIKRIASKEGSPINLTKEVLLTVSTIVSRTALGNKCRDHKKFISAVREATEAAGGFDLGDLYPSAEWLQHISGLKPKLEKYHQQADRIMQNIVNEHREAKSSATHSQGEEVADDLVDVLMKEEFGLSDNSTLLSSSRS

SEQ ID NO: 207167 - protein, 50 aa, Glycine max
  Clone ID: PAT_MRT3847_29098C.1.pep
RNRKVYPRSPIPDRRVGALIQDFTSLNLKFTRELRKRQKKFTSDKKSYIK

SEQ ID NO: 207168 - protein, 158 aa, Glycine max
  Clone ID: PAT_MRT3847_29099C.1.pep
KHNTDPFICKLQMQKGKADSVSILSSLPEDVALKIASLLQVRDLCALGCCSRFWRELCFSDCIWESLVRNRWPLLSSFHFPSSSTHSPNFKKWRKLYLERQVELGLRARSVVKFLEACSRSESLEVGDYLKAVDTLIGTMFGFKTSEVLVQPSNECAD

SEQ ID NO: 207169 - protein, 47 aa, Glycine max
  Clone ID: PAT_MRT3847_2909C.1.pep
LSSMLAFVGFWFQAIYTGVGPIVYLMALLADPGHCNILSAFTHLCNV

SEQ ID NO: 207170 - protein, 134 aa, Glycine max
  unsure (1)..(134): unsure at all Xaa locations
  Clone ID: PAT_MRT3847_290C.1.pep
DFDHLVFKLVEGGGSLVGFECSRDEILACVRIFVIPKTRCYTILPMERNMVCRQKIVNIVWYIMKKRDKCXSVKLKSTLYSMEWTGLANSILHMGTDFVVRDYASFDGLITKRGFSKMAEMINSLCDGDEKLMR

SEQ ID NO: 207171 - protein, 117 aa, Glycine max
  Clone ID: PAT_MRT3847_29100C.1.pep
LLLVWKIGLQKWRKLYLERQVELGLRARSVVKFLEACSRSESLEVGDYLKAVDTLIGTMFGFEDVQRFLFNPQMNVLINLVGLHYWLTTLGISGDNLVEALGLMRSPIGVSASSGGK

SEQ ID NO: 207172 - protein, 110 aa, Glycine max
  Clone ID: PAT_MRT3847_29101C.1.pep
RTKPECGMYLICNCLHLPGDNLVEALRTHEISDRRVCIKWWKVGRWYYGFRMRDESHSRWVSLADLATEDDEHVLGVLRRGTVHEVLRVQISVVGRPSTPWSCQITQRLE

SEQ ID NO: 207173 - protein, 131 aa, Glycine max
  Clone ID: PAT_MRT3847_29102C.1.pep
RCCPQNCFATSGAGFVCLRLLFDVLEGTLLLRLHLGVSCQKQMALTLFLPFPFFFFHSFSQFRVQKLFVWKIGLQKWRKLYLERHVELGVRARSVVKFLEACSRSESLEVGDYLKAVDTLLGPCLGLKTCT

SEQ ID NO: 207174 - protein, 80 aa, Glycine max
  Clone ID: PAT_MRT3847_29103C.1.pep
FYKRVFGKFFVATDSNAEINSPITVHASEYHRFGWLLFLALRVHAFSRFKDLVTCTNGLISILVSLIIHSLYLICIPTFM

SEQ ID NO: 207175 - protein, 92 aa, Glycine max
  Clone ID: PAT_MRT3847_29104C.1.pep
LTGKPIPAWINRLARVGSFCNCLLPESLQVAAVRHLPEHLALSDDEELESDGLSDSEESEDEDSNHHLLTTSNGGELTIIKEKPMTLARDLL

SEQ ID NO: 207176 - protein, 54 aa, Glycine max
  Clone ID: PAT_MRT3847_29105C.1.pep
RPRPFFFFSNKKKPFIGAGRSYKRETTFEGPHIERISSDFSLDYKLHRASSFLP

SEQ ID NO: 207177 - protein, 115 aa, Glycine max
  Clone ID: PAT_MRT3847_29106C.1.pep
LITNDFPFASIPRVISLECPRIRITRDFRLFIPPNKTQQKEKKNENLKTILFLALSDIHKSSFILNIISIFFFLIINLIMCIIIFLFLLSKYLITHWGFIKHFSYALIALRVVKS

SEQ ID NO: 207178 - protein, 69 aa, Glycine max
  unsure (1)..(69): unsure at all Xaa locations
  Clone ID: PAT_MRT3847_29107C.1.pep
SSPPPNPGPKGKPKSPQIFKGGHDLKPPQINPGGVTQNQAFXPFRFQGEADFRGPLETPPWAKFEVIFL

SEQ ID NO: 207179 - protein, 52 aa, Glycine max
  Clone ID: PAT_MRT3847_29108C.1.pep
FLMFCACQSLISRREGTSTFDARLIQMPFRGISHRLSFCSSESYTPGSISPV

SEQ ID NO: 207180 - protein, 118 aa, Glycine max
  Clone ID: PAT_MRT3847_29109C.1.pep
GNSGPQIVLATYFGDVVHNFDVIDSALTGTYAFHVDLVRHPEQLSQVIDHLGPKQILSAGVVDGRNIWKNNFKKSIETVEAAIQKLGKERVIVATPSLLVHTPHTLGSEENLDEEGRP

SEQ ID NO: 207181 - protein, 71 aa, Glycine max
  unsure (1)..(71): unsure at all Xaa locations
  Clone ID: PAT_MRT3847_2910C.1.pep
LPCQSWVRIAAQFIRCDRCLPNHTVLAXPQFTEASLVGLMEDSNVCAVHVQRATRMPTVSQLAGRIRGKRT

SEQ ID NO: 207182 - protein, 107 aa, Glycine max
  Clone ID: PAT_MRT3847_29110C.1.pep
MGEEEESALLLSRSKRSSSTFTYCILLLIASMFLLAVYFSSSATAKLHHPVVILISSDGFRFGYQYKVPTSNIRRLIQDGTEADSGLIPCLPTLTFPNHYSIVTGLY

SEQ ID NO: 207183 - protein, 123 aa, Glycine max
  Clone ID: PAT_MRT3847_29111C.1.pep
KTVLFKLDYSLNKSEDYLSKKINKHHRNKFCLFLIIFFIIIAKNTNSRVRPCLLKYHTPLLVVLVLFINILNLKNIFLEYLAISDKRNDKKNIIKKEGIVKNYQPIFLCTYLQKVGFYDLIKN

SEQ ID NO: 207184 - protein, 57 aa, Glycine max
  Clone ID: PAT_MRT3847_29112C.1.pep
AEKKKKKKSGRCGRSKRTNPTMPRNRRYIASIESNKLNALLQRLNRENCENTELNQL

SEQ ID NO: 207185 - protein, 69 aa, Glycine max
  Clone ID: PAT_MRT3847_29113C.1.pep
HIPSFFFFFFPSPRGFHLKLFFIIFFKPYSLPLLKTNTFLHTLIIKNFFFLPKGLCFPCFGRTSISLCT

SEQ ID NO: 207186 - protein, 57 aa, Glycine max
  Clone ID: PAT_MRT3847_29114C.1.pep
VSKDECGWLLHLVLIIPACQVARPSASPACTGVRCYRPFTVSTLLRSAGHGSVEVVN

SEQ ID NO: 207187 - protein, 58 aa, Glycine max
  Clone ID: PAT_MRT3847_29115C.1.pep
GRRLCFCTLRCGMQVGLLKGSGVGSTVGVMSLMFVSTGTFVFPLELLLWIEYSPLFYR

SEQ ID NO: 207188 - protein, 59 aa, Glycine max
  Clone ID: PAT_MRT3847_29116C.1.pep
GGWKTIFKKIVPWPGPWFCQFIPIYLTRNRALRPMPGLEACFLTFVEMEVQAFQGIARK

SEQ ID NO: 207189 - protein, 80 aa, Glycine max
  Clone ID: PAT_MRT3847_29117C.1.pep
MSGIIHKIEETLHVGGHKTEEHKGEHHGEHKGEHKGEHHGEHKGEHKGEQHHGAHQAGLVDKIKDKIHGDGHDTGEKTKK

SEQ ID NO: 207190 - protein, 417 aa, Glycine max
  Clone ID: PAT_MRT3847_29118C.1.pep
TTTTNTDRSKEAVGMMALHDALRRVCLNSDWTYSVFWTIRPRPRVRGGNGCKVGDDSGSLMLMWEDGFCQGRGSGCLEDIDGEDPVRKAFSKMSIQLYNYGEGLMGKVASDKCHKWVFKEPTECEPNISNYWQSSFDALPPEWTDQFESGIQTIAVIQAGHGLLQLGSCKIIPEDLRFVLRMRHTFESLGYQSGFYLSQLFSSTRNTSSSTSVPSKPSTIPIRPPPPLFNWGQRPLSSATSMLSSPNFQQHEARLGFPKDEAHMFLMPHASSEGARIEDMMGEHENDIKWPNGLSFFNALTGRTDDAKLLFNPESLGNKPGDQNQHHTIGQNPNSDGSNMQNASGGTNPNEFLSLDSHQDDARKMDKFKRSFTLPSRVASSTSSTSMDQHQQQQQQGVEYTNSEGGMYPDVMETFLE

SEQ ID NO: 207191 - protein, 526 aa, Glycine max
  unsure (1)..(526): unsure at all Xaa locations
  Clone ID: PAT_MRT3847_29119C.1.pep
EFLVHFGPRAASCRAKEKWGSEEVVFWVNLAQKQLQQAIDKEKIWSRLTTSESIEVLEKDLAVFGFFIALGRSTRSFLLTNGFDTLDDPIEDFIRYLIGGSILYYPQLSSISSYQLYVESFIKYSTWLESPSNVKAAEFLSTGHKKLMECMEELGMIRDKALETEGKKAAHRRRSTVQSTIKESGSFDEALKSVEETVVRLEKLLQELHVSSSSSGKEHLKAACSDLEKIRKLWKEAEFLEASFRAKADSLQEGVDSGRTYSPVGEEEEYIKGKSKKNPNVRVDRSKRNVGKSRGFWSIFGRPVTKKPGLESDADPYENNIEQSAPNVGVVDQEPNEIRRFELLRNELIELEKRVQRSAYQSENNEDLLVIDDGAPYSDDAGGVQMVRVEKKENILEKSFRYFGKLKETGTDVWQGXTQLLAIDVAAAMGLLRRALIGDELTEKEKKTLKRTLTDMASVVPIGVLMLLPVTAVGHAAMLAAIQRYVPSLIPSTYAPERLDLLRQLEKVKQMTASNMGSDEEVDEDK

SEQ ID NO: 207192 - protein, 71 aa, Glycine max
  Clone ID: PAT_MRT3847_2911C.1.pep
RCVSAWVSRLRCPVLRTTTTSCKRTYLEWMISDPVSLWMQNLNRLLAKTWDACLSPIEKPLAKTSRWPFVK

SEQ ID NO: 207193 - protein, 151 aa, Glycine max
  unsure (1)..(151): unsure at all Xaa locations
  Clone ID: PAT_MRT3847_29120C.1.pep
GWLNKMIQFKEKSRMXGAFIAGDEGVGVALLTXPVLMASDILLYQSDFVPGGEDQKQHLELTRDLAERVNNLYGGRKWKKLGGRGGTIFKVPEPLIPPAGARIMALTDGLSKMSKSAPFDQSTINILDPKDLISNTDHTLQKLIHFPGVGI

SEQ ID NO: 207194 - protein, 148 aa, Glycine max
  Clone ID: PAT_MRT3847_29121C.1.pep
MTTRFKKNRKKRGHVSAGHGRIGKHRKHPGGRGNAGGMHHHRILFDKYHPGFFGKVGMRYFHKLRNKFYSPIVNVEKLWSLIPQDAKEKALKSKDTAPLIDVTQHGYFKVLGKGVLPQNQPFVVKAKLISKIAEKKIKEAGGAVLLTA

SEQ ID NO: 207195 - protein, 256 aa, Glycine max
  Clone ID: PAT_MRT3847_29122C.1.pep
LLPPHPSFSTYTPSAYLLENQERIEGVEEQPSSLLGLNHLSTSQISQIQAQAQAQNSLSLNFLGPKPVPMKHVGGPAKPTKLYRGVRQRHWGKWVAEIRLPKNRTRLWLGTFDTAEEAALAYDKAAYRLRGDLARLNFPNLKGSCPGEEYKPMQAAVDAKLDAICANLAEMQKQGKNEKGARSGKKSKQGPNLEAKPEPEASGSGAAALSPESEGSADSSALSDLTFDVTEPQWEDASAHFNLQKFPSYEIDWDSL

SEQ ID NO: 207196 - protein, 39 aa, Glycine max
  Clone ID: PAT_MRT3847_29123C.1.pep
MDEDMQELLQAGPKYCLIVTLALAAWTRPGYSSRPMAAA

SEQ ID NO: 207197 - protein, 73 aa, Glycine max
  unsure (1)..(73): unsure at all Xaa locations
  Clone ID: PAT_MRT3847_29124C.1.pep
MDTDGVVSFNHVSPEDSHEVHVLAVDDXLVDRKVIERLLKISACKVTAVDSGIRALQFLGLDEQRRTSESDGF

SEQ ID NO: 207198 - protein, 326 aa, Glycine max
  unsure (1)..(326): unsure at all Xaa locations
  Clone ID: PAT_MRT3847_29125C.1.pep
ALTSPSSLLFDFSFISFAGKPKDPFRRKTHRNLCGSQLRFRLHRAPLTRSIYICMYMGKTRWLIILVTCLCLLSFSDGRELKVRHKKQHYQYNHTVATILVEYASAVYLSDLTELFTWTCSRCNGLTKGFEMIELVVDVEHCLQAFVGVADDPHAIIIAFRGTNEHSLQNWIEDLYWKQHDINYPGMDDAMVHRGFYTAYHNTTIRPAILDAVERAKKFYGDIEIIATGHSMGGAMASFCGLDLTVIIIXPALQVMAFGQPRIGNAAFASLYTKLVPNTIRVTNDHDIVPHLPPYYYYLPQKTYRHFPREVRRLGIGGGRLVASVG

SEQ ID NO: 207199 - protein, 214 aa, Glycine max
  Clone ID: PAT_MRT3847_29126C.1.pep
PRVRLLLRLFDFSFISLAGENPFRRKTHRNLRGLRFRFRFHRAPLTHVFNYSIFSLTFPFSWNTFPIFSPNCEHMGKTSWLIILVTCLCLLAFSDGRELKVRHKKPHYQYNHTLATILVEYASAVYLSDLTELFTWTCSRCNGLTKGFEMIELVVDVEHCLQAFVGVADDPCAIIIAFRGTNEHSLQNWIEDLYWKQHDINYPGMDDAMVHPGF

SEQ ID NO: 207200 - protein, 137 aa, Glycine max
  Clone ID: PAT_MRT3847_29127C.1.pep
AHLSLGTAAVVAMPKSCFGTQRSTSLFPEGILMPLDGNVADIHEICSGFNNSCSNGANLDALQLKGLIVTTSSICIHVSMHPHIANIFGSVNKHAFPTGFGPGVTAALHRILNAGAQNKYMPAACVIYWNKINKSML

SEQ ID NO: 207201 - protein, 53 aa, Glycine max
  Clone ID: PAT_MRT3847_29128C.1.pep
LLFITSKECCVLLKVCEGLYSLQYEIFFLYNLNRSIYRKLCLFFFPNVVKRPI

SEQ ID NO: 207202 - protein, 434 aa, Glycine max
  Clone ID: PAT_MRT3847_29129C.1.pep
MATLNLFSQPWQPTISPFCCSNTNNNNNVVYAYHNHNNSKLHFFSNSRQFSVLSQLSTNSSKSVSGSSGLQNSSFVSGIEYRKRPLYSVFPTKPAQVSSVEDLYEFICSGPLLDKIGITQEQVAESIDNWLLYGRYLCRLFQLNELFLTEPQKARIYHYYVPVFLWCEQQITEHQSKFKDGEDIPPLVIGFSAPQGCGKTTLVFALDYLFEVIGRKSATVSIDDFYLMAEGQNKLREANPGNALLELRGNAGSHDLAFSVETLTALTKLTREGMKLKLPRYDKSAFNGRGDRADPSTWSEVEGPLTVVLFEGWMLGFKPLPVDAVKVVDPQLETVNKNLEAYYDAWDKYIKSWIVIKIKNPNCVFQWRLQAEIAMREAGKPGMTDDEVRDFVSRYLPAYYAYLPTLYSEGPNGSDPQHLLTIEIDEGRNPILAT

SEQ ID NO: 207203 - protein, 92 aa, Glycine max
  Clone ID: PAT_MRT3847_2912C.1.pep
MAGRGGAARPNGPAAGNKICQFKLVLLGESAVGKSSLVLRFVKGQFHEYQESTIGAAFLTQTVCLDDTTVKFEIWDTAGQERYHSLAPMYYR

SEQ ID NO: 207204 - protein, 375 aa, Glycine max
  Clone ID: PAT_MRT3847_29130C.1.pep
SQSGEEISSGTVTVYKQSSSYPITAPSPLSGLPEFSHLGWGHWFTLRDLELATNRFSKENVLGEGGYGVVYRGQLINGTPVAVKKILNNTGQAEKEFRVEVEAIGHVRHKNLVRLLGYCIEGTHRMLVYEYVNNGNLEQWLHGAMRHHGYLTWEARIKILLGTAKALAYLHEAIEPKVVHRDVKSSNILIDDDFNAKVSDFGLAKLLGAGKSYVTTRVMGTFGYVAPEYANTGLLNEKSDVYSFGVLLLEGITGRDPVDYGRPANEVNLVDWLKMMVGNRRSEEVVDPNIEVKPSTRALKRALLTALRCVDPDSEKRPKMGQVVRMLESEEYPLPREDRRHRRRNREGSGEIESQKEYSDTDRSEIQDSREERRG

SEQ ID NO: 207205 - protein, 78 aa, Glycine max
  Clone ID: PAT_MRT3847_29131C.1.pep
CIFWGADYVNCFFKNISKYNASKQIQLQIAVNIWEKFAIKKLVNKKGWLPEVLVNKRQNNTYCTKKILCSLCLNSMKI

SEQ ID NO: 207206 - protein, 164 aa, Glycine max
  Clone ID: PAT_MRT3847_29132C.1.pep
MGAGRGVSISLDGVRDKNLMQLKKLNLALFPVRYNDKYYVDALASGEFTKLAYYSDICVGAIACRLEKKEGGGQVRVYIMTLGVLAPYRGLGIGTKLLNHVLDLCSKQNISEVYLHVQTNNEDAINFYKKFGFEITETIQNYYTNITPPDCYVLTRYTASTTKK

SEQ ID NO: 207207 - protein, 45 aa, Glycine max
  unsure (1)..(45): unsure at all Xaa locations
  Clone ID: PAT_MRT3847_29133C.1.pep
CFRAXADRVRAQRXSXXSCPSHXRAXPRFASIXXACLLXXXXXSA

SEQ ID NO: 207208 - protein, 384 aa, Glycine max
  Clone ID: PAT_MRT3847_29134C.1.pep
MEEKQRVIIVGAGPSGISAAACFTKQSIPYIILEREDCSASLWKKYSYERLHLHLRKQYCQLPHKPFPASFPPYVPKKQFLQYLDDYVSHFGITPLYRRTVELAEYDQGCHNWRVMALNGDSGQLEEYRGRFLVVATGETTDPFVPELQGLSGFPGKLIHSTGFRSGKDFKDQHVLVVGSGNSGMEIALDLVNHGAKTSILVRSPVHFLSREMVSLGLFLLKYLSLSTVDSLMVMLSTMIYGDVTKYGVARPNEGPFYMKVKYGKYPVIDVGTYKKIKSGELKVLPSEIESVRGKDVLFKNGESHPFDSIVFCTGFKRSTNKWLKGDDYLLNDEGLPKPSYPIHWKGNNGLYCVGLSRRGFYGAAADAENIANDVSSFTQHPCP

SEQ ID NO: 207209 - protein, 156 aa, Glycine max
  Clone ID: PAT_MRT3847_29135C.1.pep
MDYHQDNPAVFFTTIKNTKQLKVPEEFLKHLNKDLWSNSVLIGPSGDKWQVTILKKGNNVYMDNGWSQFLKDNSVVLDEFLLFTYHGGNCFYVQIFGGNGLERLCRKEAREEQAATPQFFDLPFSNKASISDGCEIKKTEASAPSWRGQTRASKEK

SEQ ID NO: 207210 - protein, 97 aa, Glycine max
  Clone ID: PAT_MRT3847_29136C.1.pep
KLAFQAQKVCQLMMFLEAQAGLRRPEQPLFWKRLKASPNLFQTAWPSNHTFQQKNRKKGHVTTTVVFLFIFVSLQSSLSLCLLPYYFVGLYLVLTIP

SEQ ID NO: 207211 - protein, 37 aa, Glycine max
  Clone ID: PAT_MRT3847_29137C.1.pep
MKRVLNYRGSRFFFYDIFCYLITEISEERQEKQCCVL

SEQ ID NO: 207212 - protein, 57 aa, Glycine max
  Clone ID: PAT_MRT3847_29138C.1.pep
MRECISIHIGQAGIQVGNACWELYCLEHGIQVYFLNPKSPYCNFFNLHFSDSICSRC

SEQ ID NO: 207213 - protein, 99 aa, Glycine max
  unsure (1)..(99): unsure at all Xaa locations
  Clone ID: PAT_MRT3847_29139C.1.pep
ARTLLILDPSTQSLGRFSIDLVGGXILVDRTGDWITLIQNSPVSNLLXVAAWKKGCLMAKIATSENATSTRSDWASLVQGTLTNSNNAXHFDACQWTKS

SEQ ID NO: 207214 - protein, 61 aa, Glycine max
  Clone ID: PAT_MRT3847_2913C.1.pep
DPPVVGFHHKLLRLETLQINFESRLYILCKPSAIRLIIFIQVIMSSLSSIALDCKKFFFAL

SEQ ID NO: 207215 - protein, 64 aa, Glycine max
  Clone ID: PAT_MRT3847_29140C.1.pep
DPIKNHFLYIGCNQTTVLIRISEILTKNQNKIKCVNPWDVLEQLEHGEPWFIFGIGRAYQNLVT

SEQ ID NO: 207216 - protein, 148 aa, Glycine max
  unsure (1)..(148): unsure at all Xaa locations
  Clone ID: PAT_MRT3847_29141C.1.pep
MATKFAHALTLFVLVASMLSMSMANMDWSFGSNSNYSDWWSRFRNRHQNKTEQEPRKIIVGGSEGWHFGFNYTDWAFKNGPFYLNDTLVFKYDAPNATSFPHRVYIFPNLWSYLNCDAKSAKMLANPTQXGREGFHFVLNRWQPYFFA

SEQ ID NO: 207217 - protein, 84 aa, Glycine max
  Clone ID: PAT_MRT3847_29142C.1.pep
PSHSVSLISESIVNSLPRVKSFQLSLLLEFSLRCFTLWSAVVFGSNFGFDRGFVPNWNCCSFKLSILSDFELLIFNGVVYAFLT

SEQ ID NO: 207218 - protein, 147 aa, Glycine max
  unsure (1)..(147): unsure at all Xaa locations
  Clone ID: PAT_MRT3847_29143C.1.pep
FKHAGENIVFASXSPFENVDLGNGKVGHVNQANNXMYLFPGIGLGTLLSGAHLITDGMLQAASECLASYMAEEDILKGILYPSVDSIRDVTAEVGAAVLRAAVEEELAEGHGDVGPKELSHMSKDEAVEYVRSNMWYPVYSPLVHEK

SEQ ID NO: 207219 - protein, 604 aa, Glycine max
  Clone ID: PAT_MRT3847_29144C.1.pep
MWKLVRYAAASNLARSRRFSAAIPGPCIVHKRGADILHDPWFNKDTGFPLTERDRLGLRGLLPPRVISFEQQYDRFMNSFRSLENNTQGQPDKVVSLAKWRILNRLHDRNETLYYRVLIDNIKEFAPIIYTPTVGLVCQNYSGLFRRPRGMYFSAKDKGEMMSMIYNWPAHEVDMIVLTDGSRILGLGDLGVQGIGIPIGKLDVYVAAAGINPQRILPVMLDVGTNNQKLLEDRLYLGLRQPRLEGEEYLSIIDEFMEAVHARWPKAIVQFEDFQMKWAFETLKRYQKKFCMFNDDIQGTAGVALAGLLGTVRAQGRPLTDFVNQKIVVVGAGSAGLGVLKMAIQAVAKISGCSELAAKSQFYLIDKDGLVTTERNNLDPAAAPFAKNPRDIEGLTEGASIIEVVKKIRPHVLLGLSGVGGIFNEEVLKAMRESVSTKPAIFAMSNPTMNAECTAIDAFKHAGENMVFASGSPFENVDLGNGIVGHVNQANNMYLFPGIGLGTLLSGAHLITDGMLQAAAECLASYMAEEDILKGILYPSVDSIRDVTAEVGAAVLRAAVEEELAEGNGDVGPKELSHMSKDETVEYVRSNMWYPVYSPLVHEK

SEQ ID NO: 207220 - protein, 54 aa, Glycine max
  Clone ID: PAT_MRT3847_29145C.1.pep
MVRGPARYDTQIIYKPYPTSIFCRPVPHPMISIYEVGMNKKGVDDFPFFLYLAH

SEQ ID NO: 207221 - protein, 90 aa, Glycine max
  Clone ID: PAT_MRT3847_29146C.1.pep
TSPLPLTYTSSNTCVMLFVLAGFFPSPITTFYSILVLNPLPFNPIFSLFPCINSRTPTSQSANTDPKFFSFSPFHANSPTGSSKFTTLLC

SEQ ID NO: 207222 - protein, 45 aa, Glycine max
  unsure (1)..(45): unsure at all Xaa locations
  Clone ID: PAT_MRT3847_29147C.1.pep
IGLSKLXYLTXDVNLATIYQQKALYINERQLGQDHPCPKKRNGNP

SEQ ID NO: 207223 - protein, 68 aa, Glycine max
  Clone ID: PAT_MRT3847_29148C.1.pep
EISLNKIKVTPPYIEWGNAASRLITKCSFLQGYLLGNAATTRREKNYQIPFAHGMGLISDELYGGIAL

SEQ ID NO: 207224 - protein, 77 aa, Glycine max
  Clone ID: PAT_MRT3847_29149C.1.pep
HKSGKVLYKDNIGKLKQPYQDPTHYTYYKTFCDAKDIKVNLSTISLMPNRGYPSNTQLLDTYVHTTNNTPILIKNTM

SEQ ID NO: 207225 - protein, 34 aa, Glycine max
  Clone ID: PAT_MRT3847_2914C.1.pep
TILNKVLTHDQSHFQSMPLVLFIEHQLDFLVKQV

SEQ ID NO: 207226 - protein, 64 aa, Glycine max
  Clone ID: PAT_MRT3847_29150C.1.pep
TACEKTDREGTHSSSPSRKQHLQFGKFFFFSAAKSKKSVPVKTGAPKTLPLSLKHYSSAQFDLM

SEQ ID NO: 207227 - protein, 59 aa, Glycine max
  Clone ID: PAT_MRT3847_29151C.1.pep
LLLVLFIYISRGSCSMMAKEAGEACSQGMPLNFTLLGPQPEVKQNAGSGASVTDAKTSS

SEQ ID NO: 207228 - protein, 291 aa, Glycine max
  unsure (1)..(291): unsure at all Xaa locations
  Clone ID: PAT_MRT3847_29152C.1.pep
MLPYHTLEGAQVALGRGLTLAETIWFKYSANKPDFVLHCHNTLFLCLFYSIAPIPFVLMELSGYEKLNKHKIQPSVKRSFKEMFKCYKDVMETFVIAVSPLQIISYPTIKWIGIRTGLSLPSGWELFWQLFIYFVIEDFSNYWIHRMLHCKWAFEKIHKVHHEYVAPIGLSAPYAHWAEIIILGIPXFLGPALVPGHITTYWLWFILRQLEAIETHSGYDFPWEXTKYIPFYGGPASHDFHHYVGGKSQSNFASVFTYCDYIYGTHKGYQYRKQMRKKNSTDTFIAQNYKM

SEQ ID NO: 207229 - protein, 80 aa, Glycine max
  Clone ID: PAT_MRT3847_29153C.1.pep
SPFSPPGLNFCSLRANGSFLLDPFFCSKGFFVSPRFYRETRKYFPFINSVELNSDQKIKNVIYTSPADISIHPTGALVCA

SEQ ID NO: 207230 - protein, 98 aa, Glycine max
  unsure (1)..(98): unsure at all Xaa locations
  Clone ID: PAT_MRT3847_29154C.1.pep
CHIHAKAGDSVGFNVKVVSVKDLVRGXLHSQSQDDTSHDVTNFRAQVIIMKQLCQDADSYAHVIHXLTSHITVIYAELMSTIQRRFGTKLEKEPKFLT

SEQ ID NO: 207231 - protein, 482 aa, Glycine max
  Clone ID: PAT_MRT3847_29155C.1.pep
MAEEAPASETSVTMPQPAEVITVDGTLTSSENDKSGISVDAAAHGGEKTVSNAEPSGSDPQKSLELANELMEKGNKAIKENDFGEAADNFSRALEIRVAHYGELAPECVHTYYKYGCALLYKAHEESDKAPDEADPLADVPKKEDGSQHGSNKDGSVKSSLNAESSTASFSSNAEQDVTSNDQGGAVDDGSTKNDPEEDDEDSDAEDLAEADEDETDLDLAWKMLDIARAIVEKQSVNTIEQVDILSTLADVALEREDFETSLSDYQKALTILEQLVEPDDRKIADLNFRICLCLEVSSKPQEAIAYCQKATSVCKARLHRLTNEVKSCSDLTSASELAQDVPACPKSESNNSILDKQSEIETLKGLSSELEKKLEDLQQLVSNPKSILAEILGIAAAKAGNVKESSSAMVSSSQLATANGSGGFDSPTISTAHTNGSGGVTHLGVVGRGVKRASNATPAEGSTPKKPALESTEDKGDGNAH

SEQ ID NO: 207232 - protein, 89 aa, Glycine max
  Clone ID: PAT_MRT3847_29156C.1.pep
MKSWSLDEWRNYFGSANSDIFEIIEHAIIVAASDCPKEFRVRRDWIAERLFSCRLTRCVGCDRVELAVGADSKKEKHDGDDGDYDKSGF

SEQ ID NO: 207233 - protein, 52 aa, Glycine max
  unsure (1)..(52): unsure at all Xaa locations
  Clone ID: PAT_MRT3847_29157C.1.pep
DEGKAIKTVFASSKDHHSILKIIHTIQNLLPLKKKKKKKKKKKXXTKTIDAF

SEQ ID NO: 207234 - protein, 74 aa, Glycine max
  Clone ID: PAT_MRT3847_29158C.1.pep
ESEFEFVGIWFSEFWICKMKSWSLDEWRKYFGSANSDIFEIIEHAIIVAASDCPKEFRVRRDGIAERLFSCKLT

SEQ ID NO: 207235 - protein, 60 aa, Glycine max
  Clone ID: PAT_MRT3847_29159C.1.pep
RINKIVSLLLYMYITPRTTSQYLLFPPCFRPPENRSCVSLSQLHKMCAHVLAPSETITSK

SEQ ID NO: 207236 - protein, 67 aa, Glycine max
  Clone ID: PAT_MRT3847_2915C.1.pep
NSSLAQAWGCFYLHILLRRDHNANSVIKERNRNILHLHLHNCCCLADNLVHANLKIWMCSPMLYLLM

SEQ ID NO: 207237 - protein, 192 aa, Glycine max
  Clone ID: PAT_MRT3847_29160C.1.pep
WRGQKGNKIFDNQSLKFLNLLRFFMRGVPDLAKFDWINVRQNGSGFDKQQQQQQKHEPTHTHTHKKTRMLINDKKQHRRVFALLGCCFKILELQTKTSGKKRKERPFSSVVVKRKIGNPGNNQKNLNVSFFLAIAVWVRNVAPRRQTNTACLRNWFLFEQAKNHLCCVERERRGCEWWSFWVCFDFDQTGRV

SEQ ID NO: 207238 - protein, 93 aa, Glycine max
  unsure (1)..(93): unsure at all Xaa locations
  Clone ID: PAT_MRT3847_29161C.1.pep
GXHGXLXXIXXXIXXXESXHXXXAXXIRYXXXCHIHRYLDRRCHCPHXXTLLXEXXPXXXXXXXXXXXAXXXRXXXXXSXSSRIPSLRTRXAT

SEQ ID NO: 207239 - protein, 100 aa, Glycine max
  Clone ID: PAT_MRT3847_29162C.1.pep
MFAKYNGKMNRPSSGGDLQSMGAEASCNPPILRRNASSSSNISGLASQTYPTNSVPLKRTTSWSFDEKLLIQSLYKGLAFVSKTYSIVLYLRDVDRLVYK

SEQ ID NO: 207240 - protein, 69 aa, Glycine max
  Clone ID: PAT_MRT3847_29163C.1.pep
LYRQIQKRLSVRWNEAYNTPICAISSHTSVHNKVFGTALPSKHRYQNTNTIIIKRHFLLILSKHRKFYI

SEQ ID NO: 207241 - protein, 69 aa, Glycine max
  Clone ID: PAT_MRT3847_29164C.1.pep
KKVCSNSVEGLEHRQSWWSYVRGNDYTEILRRGNSAQLIENVINTTDDDLSVRPFAHQLAKRELMYVTD

SEQ ID NO: 207242 - protein, 55 aa, Glycine max
  unsure (1)..(55): unsure at all Xaa locations
  Clone ID: PAT_MRT3847_29165C.1.pep
MYIDWNYTESTITYTLVNVVPPVKAQIQASXMALPDQNDGCKLRPNCSCIPCTCN

SEQ ID NO: 207243 - protein, 134 aa, Glycine max
  Clone ID: PAT_MRT3847_29166C.1.pep
MNGYMSKQKLHVCMCVCVWSLEPLLDFVIMTTDESCVDWIPGLKNFRLKDLPDFIRTTQIKITMVECFIESANNVHRASAVIINTSDELESDVLNAHTSMVPSLYPIGPFPSFLNQSPQKNHLASLGSNLWKEE

SEQ ID NO: 207244 - protein, 122 aa, Glycine max
  Clone ID: PAT_MRT3847_29167C.1.pep
TFGGLRTPLASITIRPAGAYFSSNSQFLGPAFPGNTPRELDPPFWGWLRIMRFPIPGSTIYRALGNSPLPKMKFGRPPPQSFPVPLEPLPPRMRFFTKRTLPLGETCPGPFDWVAKPRPTGN

SEQ ID NO: 207245 - protein, 90 aa, Glycine max
  unsure (1)..(90): unsure at all Xaa locations
  Clone ID: PAT_MRT3847_29168C.1.pep
PXWKXFLXTELXLXRXLRRXXRXQXXQQXGRGVHVDKFXEKTXFSAXSRTREKSQXRXREDXXQRXDXXKLSKXXXXGXESSXMXXTKWX

SEQ ID NO: 207246 - protein, 116 aa, Glycine max
  Clone ID: PAT_MRT3847_29169C.1.pep
KKKGQNGGVSAACGDAPAHTGSEVQCSGQMNLSPTRQQSYVYPETYCYPHQVVYLATRNNNRLCPMPMGTMGGPSYYVSSLPYMCAGFDHDSPYYRFQSPPFEIFSDENANGCFIV

SEQ ID NO: 207247 - protein, 38 aa, Glycine max
  unsure (1)..(38): unsure at all Xaa locations
  Clone ID: PAT_MRT3847_2916C.1.pep
VMTXLXLDWLNWXXNXXXXTXRGXXERSDTVIKVDAPG

SEQ ID NO: 207248 - protein, 273 aa, Glycine max
  Clone ID: PAT_MRT3847_29170C.1.pep
MPSPTPIPTAVFGGVETPNGDSSNTKPHPKQESRDLSPFLSCSYPITLKFIDVAYRLKIEDKQKNGGSIKRFFTPHESSPSDQGSRAGASQERTILKGVTGIAHPGEILAVLGPSGSGKSTLLNALAGRLHGHGLTGTILANSSKLTKPVLRRTGFVTQDDILYPHLTVRETLVFCAMLRLPRALLRSEKIAVAEAAIAELGLGKCEDTIIGNSFIRGVSGGERKRVSIAHEMLVNPSLLILDEPTSGLDSTAAHRLVLTLGSLAKKGKTVIT

SEQ ID NO: 207249 - protein, 34 aa, Glycine max
  Clone ID: PAT_MRT3847_29171C.1.pep
KKRPPLIRGIYKSLSPMDYCEKYCLIKVQRTLVP

SEQ ID NO: 207250 - protein, 56 aa, Glycine max
  unsure (1)..(56): unsure at all Xaa locations
  Clone ID: PAT_MRT3847_29172C.1.pep
EXLRXLHAXXXXLLQLXVXYEXSHXRYYXXWXXPXNVPCQMKXXXXPEXRXRXAXX

SEQ ID NO: 207251 - protein, 149 aa, Glycine max
  unsure (1)..(149): unsure at all Xaa locations
  Clone ID: PAT_MRT3847_29173C.1.pep
RPSRYGGGGFSFKNRGAVLGPXVFVPSGGAPMQEFVAGVPKVFSLSLGFXPPPVSGAPQMFVGAPKNVFAGPGAPNYSFPGAGKGGGYFKGPSTFAGAGVGAPPQGWGPPRPPWGGEKRKAPPKNLTITGGPGGLPNLGKALVGVIGGE

SEQ ID NO: 207252 - protein, 195 aa, Glycine max
  Clone ID: PAT_MRT3847_29174C.1.pep
EGVELDIEDDILARIEERLSLEYSKQVMHYGPEPNGRNLDYFTNKTQLELSGPLMATIVLYLSNAATQGGQILFPESVPGSSSWSSCSNSSNILQPVKGNAILFFSLHPSASPDKSSFHARCPVLEGDMWSAIKYFYAKPISRGKVSATLDGGECTDEDDSCPAWAAVGECQRNPVFMIGSPDYYGTCRKSCNAC

SEQ ID NO: 207253 - protein, 63 aa, Glycine max
  Clone ID: PAT_MRT3847_29175C.1.pep
MSRVEKIRFVVEEGFSGGFVGDVDRGEESDLGDGGKGVVVRVAELVEDDYKGPAGTSSRGEVV

SEQ ID NO: 207254 - protein, 83 aa, Glycine max
  Clone ID: PAT_MRT3847_29176C.1.pep
GENPPAFGVFRQITLVKAPSKIPGKGLPYPFWEGGFPLQPNLKDCAGHPPVGPRNRGEKRTVFFRALTVLDSPGKNLKKTLFP

SEQ ID NO: 207255 - protein, 74 aa, Glycine max
  Clone ID: PAT_MRT3847_29177C.1.pep
QASGGRACTCLSSKNGKRLLQGCLCRILGWQRAYSGCITPHSQQGQHEEYRCLAGLLQKPIVRTIPSTVLERIV

SEQ ID NO: 207256 - protein, 36 aa, Glycine max
  Clone ID: PAT_MRT3847_29178C.1.pep
RTPHPSQFYFICWTILIKGNCHLQGSEMKSLLHYSH

SEQ ID NO: 207257 - protein, 38 aa, Glycine max
  Clone ID: PAT_MRT3847_29179C.1.pep
SLHIIKYSPYKPFTMISLSSPLFILIMIYVIISFIQVD

SEQ ID NO: 207258 - protein, 51 aa, Glycine max
  Clone ID: PAT_MRT3847_2917C.1.pep
FGNNFFLKSQAVFPIKRQYPTSEPTPIMNKTKGGQPMEFLKTLKTWVPPPF

SEQ ID NO: 207259 - protein, 141 aa, Glycine max
  Clone ID: PAT_MRT3847_29180C.1.pep
MSSVCLSKCVNDARDPRVPVRATYVNLYKWPESDAEFVRRRGGGSHMCGGHPRVVDSISCRQMYLRSYKFSRKESVPEKTQKCFGRVKERVKKQGRSHHGIRRRKCLVWRKMREISCAALFRIFHRFLSCGASVDVVHAKS

SEQ ID NO: 207260 - protein, 117 aa, Glycine max
  unsure (1)..(117): unsure at all Xaa locations
  Clone ID: PAT_MRT3847_29181C.1.pep
ATCGSGRGGLPSGAWIRFAVNNRSSDINTRIRTALGKGKKIVFLTRVDPFPVALLAVLFGVNNEILSSNATNPMLTRLXLENCKSLKYLVDELPSAFVNYYAILYSLKQSALLCATS

SEQ ID NO: 207261 - protein, 152 aa, Glycine max
  Clone ID: PAT_MRT3847_29182C.1.pep
MGDSTCLMQQPFCYASGISNEASENNPIHALEQSISFGRFMSESLAWEKWSSFSHNRYVEEAERYSRPGSVAQKKAFFEAHYKKLAAQKAAALLEQANNEAQNNSTGQEDEGVIDNDNDTHNLQISPNSEMVVKEEQDAKVLSVTSDEHDVL

SEQ ID NO: 207262 - protein, 54 aa, Glycine max
  Clone ID: PAT_MRT3847_29183C.1.pep
FKPFDKYTGAIGASESVGQKNIHYEIHKLDDGENTRKIPMAMDLNWIQNKLRRH

SEQ ID NO: 207263 - protein, 592 aa, Glycine max
  Clone ID: PAT_MRT3847_29184C.1.pep
MGDSTCLMQQPFCYASGISNEASEAHLEKNCETCAFQNNPIHALEQSISFGRFMSESLAWEKWSSFSHNRYVEEAERYSRPGSVAQKKAFFEAHYKKLAAQKAAALLEQANNEAQNNSTGQEDEGVIDNDNDTHNLQISPNSEMVVKEEQDAKVLSVTSDEHDVLVRLTASEHDSNSSVEASVTPESNKVEGAEAVMEEVAVVGSSMKVELQSHLEDVGAQKEESEKLSAIVTPPILTPIVKVSKSDQEVLASVGKKKPPVSSFKLSKANGTSYLTSTPVKSTAAISFKRDNIATPMSNKPANETSKFTTTPVKSTAAISFKRDNIVTPMSNTPANGTSVFTTTPVKSTAAITFKRDNIVTPMSNKPANGTSKFTTTPVKSTAAISFKRDNIVTPMSNKPANGTSKFTTTPVKSTAAISFKRDNIVTPMSNKPANGTSKFTTTPVKSTAAISFKRNNIVTPMSNKPATLSTADKKRSTPRSVNFTPIRELNRLTASVMRKFESTRAGAGSSKASKDNSTTLRTPTMASKEMQNQSSLTPLTEKKRNKTPLDLSSAPGNHTGGSKWRLLSGENRMRSPLISSPFSLRPEERAP

SEQ ID NO: 207264 - protein, 125 aa, Glycine max
  unsure (1)..(125): unsure at all Xaa locations
  Clone ID: PAT_MRT3847_29185C.1.pep
ACGNFADDTMNFEAFPHKLMHLGEIKDKNVLKLSQQEFLTDRSTQVRSATTLKDDGRPYLYTMQHDRXVSTIPRDFVIGVKLTTINNMCAYGLNPGISRSRLLGTILQSISQQTVCNXMASARTP

SEQ ID NO: 207265 - protein, 53 aa, Glycine max
  Clone ID: PAT_MRT3847_29186C.1.pep
PGLDLGFQTPQSSFLWEQLEESSRLKAPHSIDSALEASGLRLPNRTKTLKIPT

SEQ ID NO: 207266 - protein, 84 aa, Glycine max
  Clone ID: PAT_MRT3847_29187C.1.pep
ARVRRSGSSEHTFTAPKPLFRTVDAKKRGKPKGGGGHKQRLTDVNYLRQLDHPNTSKTNLYCNKGENWAILFDCMPTSTQTIPC

SEQ ID NO: 207267 - protein, 68 aa, Glycine max
  unsure (1)..(68): unsure at all Xaa locations
  Clone ID: PAT_MRT3847_29188C.1.pep
GGKIYYVLGKGLLHEDKGNAKIIHYSDVDWEKSPLDTRSTXGYCVLAGGNLISWNQFSELIILSGNNK

SEQ ID NO: 207268 - protein, 69 aa, Glycine max
  Clone ID: PAT_MRT3847_29189C.1.pep
MYQIILVLFFFYTRIQTAPYYIEFTRKIAIFKKKKKKKKKKKKKKKKKKKKFFKKKKKNPPQKKKKKKN

SEQ ID NO: 207269 - protein, 80 aa, Glycine max
  unsure (1)..(80): unsure at all Xaa locations
  Clone ID: PAT_MRT3847_2918C.1.pep
VSPPPPSLSLPSPYHYTSPPTPFPAPAPKYIYKXPAPAFYIYAPPPAPIYKYVLIAEAPYTIYHVPVFIHEFTQALFKIN

SEQ ID NO: 207270 - protein, 110 aa, Glycine max
  unsure (1)..(110): unsure at all Xaa locations
  Clone ID: PAT_MRT3847_29190C.1.pep
PRVRATRTHTPFSNTIDKSKLGKIRCIGAGYPLNTTMAVIALTCPFIEDAKGDISKYHIAGXHSDQLPIYEPGLDGAVNQCLDKNRFFSTDVXKHVFKANIPVSFVNTPT

SEQ ID NO: 207271 - protein, 44 aa, Glycine max
  Clone ID: PAT_MRT3847_29191C.1.pep
EHALHNYVLRGQFSMPCHFWYTYHKSYGACVKQSIHPHSLSSSA

SEQ ID NO: 207272 - protein, 170 aa, Glycine max
  Clone ID: PAT_MRT3847_29192C.1.pep
MSSLYRGESRRYNNKPRGRHNLTTQKKQEIKEAFELFDTDGSGTIDAKELNVAMRALGFEMTEEQINQMIADVDKDGSGAIDYEEFEYMMTAKIGERDTKEELMKAFHIIDHDKNGKISALDIKRIAKELGQNFTDREIQEMVEEADQDNDREVSAEEFITMMNRTRFHH

SEQ ID NO: 207273 - protein, 123 aa, Glycine max
  unsure (1)..(123): unsure at all Xaa locations
  Clone ID: PAT_MRT3847_29193C.1.pep
AIDGDSLYYNLHRAVHTLSGGPKQPAANAGALSEDRRDPLXDELTAFLDEADQGXSSSHTVRNSGGTSAEATSLLGTHRLRERESAHVAIYMEDGXGVMHRHGASIWQYIEATQSAYIRQNNS

SEQ ID NO: 207274 - protein, 92 aa, Glycine max
  Clone ID: PAT_MRT3847_29194C.1.pep
MVFSSIPVYSDPPNWQQQQQNQHQANGINSPQLLSPLPQPPQAPHVGVEAGQTRSGPMADRAKIPAQEGVLKCPLCESTNTKFCYFNNYSLS

SEQ ID NO: 207275 - protein, 78 aa, Glycine max
  Clone ID: PAT_MRT3847_29195C.1.pep
IEQVSADIAVSSLFSSLFKVVVIKLMFGNGYKNIHKLKASNLKVKSTSRNASKQTVTLNLECFPRADKTLLGLNSLEI

SEQ ID NO: 207276 - protein, 48 aa, Glycine max
  Clone ID: PAT_MRT3847_29196C.1.pep
STYLCLYDCLISFHYHIEVVNLTSFLIKWRVMEKLFVSVVMWYQWLRL

SEQ ID NO: 207277 - protein, 121 aa, Glycine max
  unsure (1)..(121): unsure at all Xaa locations
  Clone ID: PAT_MRT3847_29197C.1.pep
RTAARRRQEGEAVVLLFAPVDAHFTDTGELSTWREAPAFRNGRECRNRARSDLRIHIDMTLDTTYLPWSTCGEFSGLRDAXCTENIVSHFMETTRQTTEMLHIITATFHGFAICLNQFDAN

SEQ ID NO: 207278 - protein, 99 aa, Glycine max
  Clone ID: PAT_MRT3847_29198C.1.pep
SFSRLRQRTEAAYAPTLLLRRFRCIPTNVARHRQRQPNPNKQAGVPSPNLQDAKQDTERVFLYCPCPIHRRPSYFVRIPGHQRCGGSSCRLRARDPSRK

SEQ ID NO: 207279 - protein, 57 aa, Glycine max
  Clone ID: PAT_MRT3847_29199C.1.pep
FGLPFYLRQVRDSVVKGFILAQCIKFTKICHIWLNPNVVIYSVPLSHDFLKWKKRFN

SEQ ID NO: 207280 - protein, 464 aa, Glycine max
  unsure (1)..(464): unsure at all Xaa locations
  Clone ID: PAT_MRT3847_2919C.1.pep
MAKHSVAMAKKRWPIMLAAFLSVSIGTVSLMRSNNSDSCNTNHFPGPRDVRRHSRHYCTSPPSPSSLFGNCKFYRANYNVLVFVNCIPPYLSSFPPPPVCMWSMLGLMISQPLDLAQVTLLLMELAFLLRSAGSDVVWITNQKPPQPDDVVIYTLENKMLDRGVQVVDARGAWASDGARVAARVAWASALAGMWLAPPLCGRGPEGLPYVCWGLHELRGRALXIKMPETFVVHLGNSKELMEVAEDSVAKRVLREHVRESLGVGSSDLLFAIINSVSRGKGQDLFLRSFYESLQLIQEKKLQLPFLHAVIVGSDMNAQTKFEMELRKFVVEKKIQNRVHFVNKTLAVAPYLAAIDVLVQNSQARGECFGRITIEAMAFRLPVLGTAAGGTMEIVVNGTTGLLHPVGKEGVTPLAKNIVKLASHVEKRLTMGKKGYERVKERFLEPHMSQRIALVLKEVLQKAKQ

SEQ ID NO: 207281 - protein, 60 aa, Glycine max
  Clone ID: PAT_MRT3847_291C.1.pep
IYFKISLRSISLIKLIPQAHGLCYMLISDANYYCLCNVVSSSTQKNKKNYAALISDQGEL

SEQ ID NO: 207282 - protein, 83 aa, Glycine max
  unsure (1)..(83): unsure at all Xaa locations
  Clone ID: PAT_MRT3847_29200C.1.pep
MTNDHKRHNPRLNIDEDINGDPVERTVLELYYEXLPETAENFHALCAGKKSIRPHTVKSQHYNGYFFHQNIKRFIVQGGDIVN

SEQ ID NO: 207283 - protein, 79 aa, Glycine max
  unsure (1)..(79): unsure at all Xaa locations
  Clone ID: PAT_MRT3847_29201C.1.pep
LFKKQQSXCPSKXXQDCCXXESCFXXEGXTCAAFSDDGEIGVAMMMLASFVDGFSPSGPFCPFPSLWVLQQQLCXPSMK

SEQ ID NO: 207284 - protein, 48 aa, Glycine max
  Clone ID: PAT_MRT3847_29202C.1.pep
KNKQFFIFLQKHMGDINNFLAFSLFGSILGHSIIMGIGGKKINGKKGN

SEQ ID NO: 207285 - protein, 122 aa, Glycine max
  Clone ID: PAT_MRT3847_29203C.1.pep
LWALFPPRRKVGVSPPPRGPWGCGASPKQCSPLHGGLKRQSFCFLGGVVSPCRGSASPPLFWGLSNGPFFSAHVCRERCPFRCNRDGGVFSPPGCFVTGSGGAALQPFQRRCSYSELVKVFF

SEQ ID NO: 207286 - protein, 124 aa, Glycine max
  Clone ID: PAT_MRT3847_29204C.1.pep
SSRRECNKSPRVESQSNSLLSDSASFNPVNNLIESRILLLSLFNFNSHSSTSISISNQLHQNKNLEFHHENQKRKEMNIDKSSTDNLVSIIRKLGHLGILLDVPLHILDRILPYFPHTNPQDPT

SEQ ID NO: 207287 - protein, 70 aa, Glycine max
  unsure (1)..(70): unsure at all Xaa locations
  Clone ID: PAT_MRT3847_29205C.1.pep
SLAAAINGCSGVIHLACPNIIGHVXDPEKQILEPAIKGSINVLNAAMEAVVKLMMATXFVSYIIPSPNWP

SEQ ID NO: 207288 - protein, 39 aa, Glycine max
  Clone ID: PAT_MRT3847_29206C.1.pep
PLEMTHTRAATKLKVIRPLYRIQSYLRVHATSQPFDSVT

SEQ ID NO: 207289 - protein, 58 aa, Glycine max
  Clone ID: PAT_MRT3847_29207C.1.pep
YTMCFYLLILLFFSLSTQCQTDLLKVYKAKLTYKIMLLILKAQPQCFLLLPISHNNLL

SEQ ID NO: 207290 - protein, 240 aa, Glycine max
  Clone ID: PAT_MRT3847_29208C.1.pep
TYSAPAHFSLSRSLEFLGLPLEPLASHVRTEALSSSAMNSRQSSLSPCDICGATQTLSLTIHNIRHRAHTCRHCTNCVLKQHPGLFCPLCFELHDDSPLPPHHRLMCVRCPAVAHRSCAFPSTNPSAAPAPAPPFFCPTCLDSNFTYFKLPDRKTGAVDVQSAKVLVTAARIAAVSMSKAAAVARFDAERRAREAAVARKRAKDALEHLAEILAREQAEQDEEDINEQNGTVSAGRRRGA

SEQ ID NO: 207291 - protein, 50 aa, Glycine max
  Clone ID: PAT_MRT3847_29209C.1.pep
TYRIVYPQSPIPNIRVEALIQNFTRVNFKLYRELKNTQKKFISDTKSYIK

SEQ ID NO: 207292 - protein, 75 aa, Glycine max
  Clone ID: PAT_MRT3847_2920C.1.pep
AEVPFTSCFSRPFSTQPHALFILHEGCCSDWFRSQEHRSHGPIVIPRYVRSLSIMTRAHKEFGRRGSHPGISGPG

SEQ ID NO: 207293 - protein, 57 aa, Glycine max
  Clone ID: PAT_MRT3847_29210C.1.pep
PSRSATRYCTLGVCVRSGQMTLWSYPIALSTESPERPYMFMLVWPWVANSMLHSICD

SEQ ID NO: 207294 - protein, 43 aa, Glycine max
  Clone ID: PAT_MRT3847_29211C.1.pep
KKKLKEKNHIHYLLHIPYSRMIRDCKVLMESVTIMHYSIFYIS

SEQ ID NO: 207295 - protein, 130 aa, Glycine max
  Clone ID: PAT_MRT3847_29212C.1.pep
GGAPPFSPPPGGKKGGFWGPGPLKKKSPPFPGTWVWDWAPKAPWGGGFLGPKGWGKRAPQKAPGVKPFWRGQIFGAPPGLVVKAHFSKARGPFPFWGEPWGGLGVVYCQNLGGLKKEKVPGGPPPFFFFP

SEQ ID NO: 207296 - protein, 131 aa, Glycine max
  Clone ID: PAT_MRT3847_29213C.1.pep
HPGACIDLTQTKSGIAIGFAFTANRRSPVAFGSIARRQAYRCRLGAGGARGPSSNCTLTKHNGEAISKNKWFARSPYDGSDQRMDCPVGNLGAIFARRFSNTVVGSFHPCYSCLCGPREWFLLLRIPCAVH

SEQ ID NO: 207297 - protein, 133 aa, Glycine max
  Clone ID: PAT_MRT3847_29214C.1.pep
MKIGHRTPPRQKRATDPPPQFDSSDLGSPQKVWSLLCEKDEKLRRDPHVFSRQKKINAKMRAMLLDWLMDVCADKQLHRETFHLCIDYIDRFIALSDHQMQPQRLQLFGSTALVIASKVEEIYPPKIAEIAEY

SEQ ID NO: 207298 - protein, 71 aa, Glycine max
  Clone ID: PAT_MRT3847_29215C.1.pep
QNLIKSLTCFNIFFFKYMDLENLVWPDPYLKRYGIWQLLSFILKTIFWRGKGRGMFIFWLLQGRQFRIRGI

SEQ ID NO: 207299 - protein, 77 aa, Glycine max
  Clone ID: PAT_MRT3847_29216C.1.pep
LKSIIFLVTINFFQLKIRLSFINLSFNYIKKTNSYTIIYKITYRMNYKVFFFSDLKYKFLSNNMILFSIKTSKKSSI

SEQ ID NO: 207300 - protein, 78 aa, Glycine max
  unsure (1)..(78): unsure at all Xaa locations
  Clone ID: PAT_MRT3847_29217C.1.pep
HAIRIIIVHGIAALAVYSTVGTYIEIAARRXRPPLNEALTYXAGRHYTFDDSTNYTRTELILYWQMAMNPLYKSDTWV

SEQ ID NO: 207301 - protein, 65 aa, Glycine max
  Clone ID: PAT_MRT3847_29218C.1.pep
KNIFTQDDLCLASSKLLLFITFFFKVFVFSQWFNSSLYYSSEVLRPLEHLMLALNAHFFFMQSLC

SEQ ID NO: 207302 - protein, 190 aa, Glycine max
  Clone ID: PAT_MRT3847_29219C.1.pep
MFRRILSHHRTLSACAHNATTRSLATRRHAPNVPPPPSFLIPRSRPLSSKTSQSNEAAESSNKAKKDVANVEDPFSAPTYNIPEKPVTFVEGASYSVVILAGLGIAAAAGYAVFKELIFQPKEYKIYNKALKRIQDDGQVRVRIGFPITGYGQESRNRAARQRIPHRVWTDEEGVEHVEVNFYRCKRKSL

SEQ ID NO: 207303 - protein, 164 aa, Glycine max
  unsure (1)..(164): unsure at all Xaa locations
  Clone ID: PAT_MRT3847_2921C.1.pep
MAASSSSLSVSDDSSSHRRRRHQRHRRYRDKDSLKIQKKRKPQSQSRGEPRYTYHRHSSDSDSYSSSSLSDYSRSESSSDSEHKTSRRTKRNKKDERPKKDKKXGLKQKKTKEDKFLGRDKDDGVRRSAVSGKKILLKLEKTKEDKVAESKRNELLNFLNASFD

SEQ ID NO: 207304 - protein, 109 aa, Glycine max
  Clone ID: PAT_MRT3847_29220C.1.pep
RQCLADTVGHRTLAQACIVCLMRSFRTLISQAIMVISVRMLRCISQPQSLLAIQLRQLLHGMQSQQQRSNFSSTHRPPQQRRQQIQYRLTQGMPQTPLPLRAIASVRKR

SEQ ID NO: 207305 - protein, 61 aa, Glycine max
  Clone ID: PAT_MRT3847_29221C.1.pep
SFFFFFFFQRLATGGGNLVVSLPFFQLRSVFRKNIFSQKKKRPIFFHFLISPFLVRWLVAT

SEQ ID NO: 207306 - protein, 94 aa, Glycine max
  Clone ID: PAT_MRT3847_29222C.1.pep
HSTINHWCFHSSIYASVTHEQLPSCLMVATTTPVATAGATATTNNTVISITLPRTIPLHCSGYSRSFFSSVGPLLLLFPTFILPNPIIKHQKRL

SEQ ID NO: 207307 - protein, 89 aa, Glycine max
  Clone ID: PAT_MRT3847_29223C.1.pep
FTRLSTCFLVHAASRFFCLRILRLYLQLRGKICQSCRNYSANQQSVSRDDGSGLYLGTHWRCDKPEIVSCSTQAQNFPPPYFYKDFFLK

SEQ ID NO: 207308 - protein, 55 aa, Glycine max
  Clone ID: PAT_MRT3847_29224C.1.pep
VAIPLSFGNTYKFYNKMIRYVYQVNSSPPLGLCIPISGMQHPFVQCNWTRRPPVF

SEQ ID NO: 207309 - protein, 87 aa, Glycine max
  Clone ID: PAT_MRT3847_29225C.1.pep
MATDDEKLRLPMLRVVNRCVYSTTKAAVIGLTKSVAADFIQQGIRCNCVCPGTVDTPSLQERIQARGNPEEARNDFLKRQKTGRFAT

SEQ ID NO: 207310 - protein, 86 aa, Glycine max
  Clone ID: PAT_MRT3847_29226C.1.pep
LDAGDKEKLKAEIDKTVTWLDDNQTATKDEYESQQKELEAVANPIMMKFYGAGGEGGMPGGMPGGAPGGAAPGAGGDDGPTVEEVD

SEQ ID NO: 207311 - protein, 48 aa, Glycine max
  unsure (1)..(48): unsure at all Xaa locations
  Clone ID: PAT_MRT3847_29227C.1.pep
MLNSVAVNDPFITXXYMXYMXKYXSVXXHWKXHDVTVXDEXXLLXXXK

SEQ ID NO: 207312 - protein, 102 aa, Glycine max
  Clone ID: PAT_MRT3847_29228C.1.pep
LTWSWPSTLNLRATATCTTATAPTLHQWQRLGSHLHRTGSAGHVAGGWFPHYFCGHFFLFPCVWVWVPCCCRRYYPTSWVGLHGSFIPKSGSTPNRTHQHIS

SEQ ID NO: 207313 - protein, 66 aa, Glycine max
  Clone ID: PAT_MRT3847_29229C.1.pep
VFSNGTALTANADQLQKESERKDNHRRVSPRSLRPDRRVGALIQDFASLSLGVNQSTEREAGEVSV

SEQ ID NO: 207314 - protein, 359 aa, Glycine max
  unsure (1)..(359): unsure at all Xaa locations
  Clone ID: PAT_MRT3847_2922C.1.pep
MGQALSRIHRMIVSSSVKEKKKNTAISRVQPLAMASNCSIEGPLVEEFTYQAGSAPFKSCHASTIVEVDKDHFLVAYFGGTFEGAPDVKIWVQTYKNGRWQAPVIADEEPNVPMWNPALFKLPSDELLLFYKIGQEVQKWSGFMKRSYDKGKTWTGREQLPPGILGPIKNKPILLENGDLLCGSSVESWNSGGAWVEVTTDFGRSWSKYGPIYIENKPLSVIQPVPYQTANGKLRVLLRSWXGRIYMSESFDGGKSWGYAKPTQLPNPNSGIDGVKLKDGRLLLAYNTISRGVLKLALSEDDGDSWHEALTLEDTLGMEFSYPAVIQASDGRVHVTYTYKRTQIKHVVVRPRRCKSTCF

SEQ ID NO: 207315 - protein, 109 aa, Glycine max
  Clone ID: PAT_MRT3847_29230C.1.pep
LGLLLLLFCGCVCVFSHLKTSSCGGNWGSGSSCTCGNGCTGCKMYPDSSYTASTTTPTSVMGAAPGNAQLVGAEMRVPADNDGSKCGPNCYCDPCIRKLGGERASYKPR

SEQ ID NO: 207316 - protein, 229 aa, Glycine max
  unsure (1)..(229): unsure at all Xaa locations
  Clone ID: PAT_MRT3847_29231C.1.pep
PPPSAASPPRPPPPRPSPSSPPPHFPHPPPLSRSPPPRPPLFSPLYPSLPPPRAPPPSPPSLPPSPRTPRCPSPPPPPPSSPSPPXRPPVLPPPPPPPPPPPPXPVRAPPPPPSPPTLSPPPPPLPPPPPPPPPPPPSPPSPPSSPPPPXPPPPPPPPPPPPVHPPPPAPPTPPPHSHPPPIPQLKPHPPPHPIPSPTPTPQPQSPSKLNNQSKKFYSFFKVKQVHVFK

SEQ ID NO: 207317 - protein, 133 aa, Glycine max
  unsure (1)..(133): unsure at all Xaa locations
  Clone ID: PAT_MRT3847_29232C.1.pep
SRAPILAGLRRRCSGLYKVHIDTIDXSCRMAAGRKYCSRDEASXTASSXGRVRKYMDDVIGKHRCXCEPEPLINGAYLISLCXPLCFPRHKPPEPTIDGRTLAKHYLSGRMSAELVFDGCSAEQCERQVRDRN

SEQ ID NO: 207318 - protein, 75 aa, Glycine max
  Clone ID: PAT_MRT3847_29233C.1.pep
HGYRLPHGMNLLSYINTRIGCSSHYHSSLKLPATTYPKVGGKLIPDGAIIFNLNFLFLGFGVCRFGKCFHISDPG

SEQ ID NO: 207319 - protein, 51 aa, Glycine max
  Clone ID: PAT_MRT3847_29234C.1.pep
ENVVLPERDLKETNIIYCHGWVNQKLKGGRTGLNGSFKNLRLDWDLPLLGP

SEQ ID NO: 207320 - protein, 189 aa, Glycine max
  Clone ID: PAT_MRT3847_29235C.1.pep
NCVYQKEDQSGKIGVCLARELRRRQKGALKTNITTLGPLVLPYSEQVMFLVSLVRGKVLKMSGVKPYIPDFKLALEHFCIHAGGRAVLDELQKNLELSEWHMEPSRMTLHRFGNTSSSSLWYELAYTEAKGRVSKGDRVWQIAFGSGFKCNSAVWKAVRDMPFLKDWRGNPWDDSINNYPVHLPSASSN

SEQ ID NO: 207321 - protein, 118 aa, Glycine max
  Clone ID: PAT_MRT3847_29236C.1.pep
MASLKVAFLAAVLCMVVVSAPMAHAAITYRQVTNNLINYINYLQNKRTPPSKYYNEVKSLNTTTKTTTNHQTAYNCLKSTTSQISNFKANNTTSLPNKYQVSIPYKISTSTNYTTIKV

SEQ ID NO: 207322 - protein, 142 aa, Glycine max
  Clone ID: PAT_MRT3847_29237C.1.pep
RREKPRAKKSEGAKHTRTGNQKKKKKKTKTKGKKPTKKKKTKKKKTTLKKKTKKKTFFKKKAKRKQTLQNWGKRGGPFKHKGEKGLPPWKSLGKTKPFLNQIFKKRLLESPLKVNQKGGGNPQILKKKGFNKRRLKKQSFRG

SEQ ID NO: 207323 - protein, 44 aa, Glycine max
  Clone ID: PAT_MRT3847_29238C.1.pep
VILAIGNRLHPLVIDYERVNLLKKTFLLKFLGQTFCSFNLGFPS

SEQ ID NO: 207324 - protein, 109 aa, Glycine max
  Clone ID: PAT_MRT3847_29239C.1.pep
VEKRQMTKAVAILDEMNVAGVGPNEHTYTTLMQGYASLGDTEKAFQYFTVLRNEGLEIDVYTYEALLKSCCKSGRMQSALAVTKEMSAKNIPRNTFVYNILLPLPTTFS

SEQ ID NO: 207325 - protein, 130 aa, Glycine max
  Clone ID: PAT_MRT3847_2923C.1.pep
SLKVRAVPCAFHTDQQLAAVSYVFHSLPSPSKVHVSMLFKHRQQLNLGPLWCPSAPWCIPSLVLRCIFAQPLPVSASRTFSSINSFLCVTPPGCSRALSSASTGMDAFSHAARARLWPIIIYEVVLAGNL

SEQ ID NO: 207326 - protein, 204 aa, Glycine max
  Clone ID: PAT_MRT3847_29240C.1.pep
MTSELEISPADTRKAPGKEHQAAGVGILLQIMMLVLSFVLGHVLRRKKVYIIPEASASLLIGLIVGILANISDTETSIRAWFNFHEEFFFLFLLPPIIFQSGFSLAPKPFFSNFGAIVTFAIFGTFIASIVTGILVYLGGLLFLMYRLPFVECLMFGALISATDPVTVLSIFQELGTDVNLYALVFGESVLNDAMAISLYRTMS

SEQ ID NO: 207327 - protein, 50 aa, Glycine max
  Clone ID: PAT_MRT3847_29241C.1.pep
PMGICSSGSLASNDICKTSRFFPRHDLPDFSFWEVCVGGHKFRVGVVCND

SEQ ID NO: 207328 - protein, 170 aa, Glycine max
  Clone ID: PAT_MRT3847_29242C.1.pep
ANELGRGSSKDAKFSIVVTVLTSFSIGFILFVLFLFLREKVAYLFTSNEDVATAVGDLSPLLAVSLLLNSIQPVLSGVAVGAGWQSIVAYVNIGCYYLIGIPVGIVLGNIIHLQVKGIWIGMLFGTLIQTIVLTIITYKTNWDEQVIIARNRISKWSKVDLDRETVTSDN

SEQ ID NO: 207329 - protein, 300 aa, Glycine max
  Clone ID: PAT_MRT3847_29243C.1.pep
ALFIIIHVFLSWLLTIQFKFGIPGAMISTILAFWIPNIGQLIFITCGWCDETWKGFSFLAFKDLGPVVKLSLSSGAMLCLELWYNTVLILLTGNMKNAEVEINALSICININGWEMMIALGFMAAASVRVANELGRGSSQAAKFSIVVSVLTSFVIGFILFVLFLFLREKIAYLFTSNEDVVTAVGDLSPLLALSLLLNSIQPVLSGVAVGAGWQSTVAYVNIGCYYLIGIPVGIVLGNIIHLEVKGIWIGMLFGTLVQTIVLTIITYKTNWDEQVTIARNRISKWYKVELDHETSTSDN

SEQ ID NO: 207330 - protein, 75 aa, Glycine max
  Clone ID: PAT_MRT3847_29244C.1.pep
KKGDGFCKRLKHSGTLKYLSDSDIKKHINVRPLYRYQFIFPRLLSVYFFYRVTQITLPAHPFITSRWGKPRSSPT

SEQ ID NO: 207331 - protein, 491 aa, Glycine max
  Clone ID: PAT_MRT3847_29245C.1.pep
MEGNLEKKLLSREKKSEEEEEEEKLSLVKRVWEESKVMWIVAAPAIFTRFTTFGINVISQAFIGHIGSRELAAYALVFTVIIRFANGILLGMASALSTLCGQAYGAKEYDMMGVYLQRSSIVLFLTAICLLPLLIFTSPILMLLGQDESIGQVAGTISLWSIPILFAYIVSNNCQTFLQSQSKNVIISFLAALSIIIHVSLSWLFTMQFKYGIPGAMISTILAYWIPNIGQLIFITCGWCPETWKGFSVLAFKDLWPVAKLSISSGAMLCLEFWYSTILILLTGNMKNAEVQIDALSICININGWEMMIAFGFMAAASVRVANELGRGSSKAAKFSIVVTVLTSFVIGFILFLLFLFLREKVAYLFTSNEDVATAVGDLSPLLAVSLLLNSIQPVLSGVAVGAGWQSTVAYVNIGCYYLIGIPVGIVLGNIIHLQVKGIWIGMLFGTLIQTIVLTIITYKTNWDEQVIIARSRINKWSKVESDHETTTSDN

SEQ ID NO: 207332 - protein, 113 aa, Glycine max
  Clone ID: PAT_MRT3847_29246C.1.pep
DFRSSMVVKKESRSPTKREDSEVQLLACCSLTDHNAQVHSACAVETKLPFPSPTVETVWNPRELSKPTLLHPSSTACLERLTADPSLLPRPRAKTVLSGSVRPEGASINWVSC

SEQ ID NO: 207333 - protein, 99 aa, Glycine max
  unsure (1)..(99): unsure at all Xaa locations
  Clone ID: PAT_MRT3847_29247C.1.pep
KRKGLLYRTTQERPTTTQXAEGGPHPHAKEHERPAATTPGETDKGEKQTTTNKKSAEGHNPGIPGARRTGTKPKPNXQQXAXNQXATXRTPRKXETSKQ

SEQ ID NO: 207334 - protein, 56 aa, Glycine max
  Clone ID: PAT_MRT3847_29248C.1.pep
LRGTNRGGAGQASFTLFYSLCRPARNQNGPKKLCCYICNLVPGSPYQCYVSNLRFL

SEQ ID NO: 207335 - protein, 129 aa, Glycine max
  Clone ID: PAT_MRT3847_29249C.1.pep
MGAYLKIMAPPDNLFTGPIPQQLGLVVPLSAFDGSKNPLSGPIPGLLSNRRGNLPKFNPSSFLRKKDFFGYPFPPLKKKGLSPLAHFGIGLGKGPPNLGLNFPRGCIWFKNTAPQKALQESKIPPPKPE

SEQ ID NO: 207336 - protein, 85 aa, Glycine max
  unsure (1)..(85): unsure at all Xaa locations
  Clone ID: PAT_MRT3847_2924C.1.pep
TKMDGLGNIERGRGGLFTNGFTKNERINYXRLFSLAPKKYSILLILALVAHFDLFFYKINFKTTFLNYDLKEEGFFKTPLKIFFF

SEQ ID NO: 207337 - protein, 76 aa, Glycine max
  Clone ID: PAT_MRT3847_29250C.1.pep
GIRLDSSRIGSRLLLLFMISDFIFWRTEHAYLSHNKLITENRNDQMNCNSHCPEKDITYMERFPELGCIHDSYMYC

SEQ ID NO: 207338 - protein, 65 aa, Glycine max
  Clone ID: PAT_MRT3847_29251C.1.pep
IIGPQWITLALLTSASGYWSIMRCRGLGIVSLIHAMFSLKVVSVYLDTRTVCNVTCVVLWICIIF

SEQ ID NO: 207339 - protein, 76 aa, Glycine max
  Clone ID: PAT_MRT3847_29252C.1.pep
ILDRLDQAVSNMMTREIALLIIQPEYAHAPSESSQEFASVPPNSTIYYAPVILAWVKDKASWDLNTRDEVEASRKQ

SEQ ID NO: 207340 - protein, 73 aa, Glycine max
  unsure (1)..(73): unsure at all Xaa locations
  Clone ID: PAT_MRT3847_29253C.1.pep
HEAVCMEFILAFILLDEHLGDMTYFXGNYFGFVDLALFPFYTCFXVYETFCSLIIENECPMFVAWAXRCLQKE

SEQ ID NO: 207341 - protein, 88 aa, Glycine max
  unsure (1)..(88): unsure at all Xaa locations
  Clone ID: PAT_MRT3847_29254C.1.pep
MAKLVLSLXCFLLISSCCFAFRSREXLQSNECQIYKLNDLKPYNRIESEGRLIETWNANYKPFQCAVDALSRCTLNRFALRRRSYRNG

SEQ ID NO: 207342 - protein, 56 aa, Glycine max
  Clone ID: PAT_MRT3847_29255C.1.pep
MFLRLREDHRGGGTIREPIPSATKAAPYPWGSIRFSLLPKLCSHFQRSTIHLHLSK

SEQ ID NO: 207343 - protein, 40 aa, Glycine max
  Clone ID: PAT_MRT3847_29256C.1.pep
RLRLELSKRVIKKQNLKLFIQLIHFNLPSTHNSPILNPNL

SEQ ID NO: 207344 - protein, 37 aa, Glycine max
  Clone ID: PAT_MRT3847_29257C.1.pep
MFHHQDILCNLMMVNHYTVTKADYFLSVPYRCTSKCL

SEQ ID NO: 207345 - protein, 52 aa, Glycine max
  Clone ID: PAT_MRT3847_29258C.1.pep
VGKRQKMMTSQTSTAVATNSSDNPRVSECVFHFLIFWLSIIQNQTWQAWRGF

SEQ ID NO: 207346 - protein, 82 aa, Glycine max
  unsure (1)..(82): unsure at all Xaa locations
  Clone ID: PAT_MRT3847_29259C.1.pep
LLDLEKFLLLNGINLNLSDTTQKVIAEYIWIGGSGMDLRSKARTLPGPVSDPLXLSKRNYYGFSTGXLSGEDSEVILFPQAI

SEQ ID NO: 207347 - protein, 87 aa, Glycine max
  unsure (1)..(87): unsure at all Xaa locations
  Clone ID: PAT_MRT3847_2925C.1.pep
TFPPRKEGAVMGALNLFSPSQRAHLRFXALYSTLSVIIVCLLYIPDMLCKRRSIYNHKVCQQVYASSRRSFNMSHTLAVGMIHSQIT

SEQ ID NO: 207348 - protein, 173 aa, Glycine max
  Clone ID: PAT_MRT3847_29260C.1.pep
MATPKQSYEQQQQPNVQRVRNSGMINSNQSPMRDDKEEEMSRSALAMFRAKEEEIERRKVEVRDKVHAYLGRVEEETKRLAEIREELEGLTDPLRKEVAIVRKKIDSVNKELKPLGQTCQRKEREYKEALDAFNEKNKEKAQLVTKLMELVTESEKLRMKKLEELSKNVDTLH

SEQ ID NO: 207349 - protein, 52 aa, Glycine max
  Clone ID: PAT_MRT3847_29261C.1.pep
VSHWRPQDVQIAPNRLSKCYLVLSFKNPVWPRHRKQECLIDSEDGLIRSPSH

SEQ ID NO: 207350 - protein, 60 aa, Glycine max
  unsure (1)..(60): unsure at all Xaa locations
  Clone ID: PAT_MRT3847_29262C.1.pep
RQIQSRIQGFSSXLSSQTRKTERIYKISIMHQLHSXXYIPALKPKXXHIMLFQFISHCSL

SEQ ID NO: 207351 - protein, 157 aa, Glycine max
  Clone ID: PAT_MRT3847_29263C.1.pep
PPPPPPFICPYQGGSLCPSGFPPFLKGPLFPPPSYFPPPPKGDFFPTHLIWAPPVFSPPRLFKRPPLYFIFFSPFKKLFPFPPALVNLCPLKPPPPFFFFFLFFFFFFSFFFFFLPFIFHFFLLLFFFPSFPFFFFTFFQEKTHAWAYASVAPALPV

SEQ ID NO: 207352 - protein, 146 aa, Glycine max
  Clone ID: PAT_MRT3847_29264C.1.pep
GTRQLSSKLLSGSKPSFNNNFKQSRFYSTPTLKFQVKPYDLHRLDKGPSLEVETNKEDLVSAFKTMYEIRQMEIIADKMYKAKKIQGFLHLYNGEEAVVTGIESGIRPDDHVITAYRDHGFILTRGGNAEQVFAELQGKVTGTSRG

SEQ ID NO: 207353 - protein, 85 aa, Glycine max
  Clone ID: PAT_MRT3847_29265C.1.pep
KKKKRGPGGFNPPTKRPKPWNLGKGRTNPLHLGGGGEKKKTRGRKTPPRPKPRVFTTPKKGKRISQKGGYFVRTWFPQTLSLKDR

SEQ ID NO: 207354 - protein, 57 aa, Glycine max
  Clone ID: PAT_MRT3847_29266C.1.pep
IKVLYCDSGGCLPHVPLTGARWSSGLNGPAVSIGQEGWLHALCVSSCGELQSAQGAG

SEQ ID NO: 207355 - protein, 51 aa, Glycine max
  Clone ID: PAT_MRT3847_29267C.1.pep
KGSTKISTTLRLLKKLQPYPLMAGRELNPGRFLGQYTQGAENIRLIDEACH

SEQ ID NO: 207356 - protein, 124 aa, Glycine max
  Clone ID: PAT_MRT3847_29268C.1.pep
MACRPSSFLALLLITTILLATTWQAVARRHIGPKHSNNGDKKEPQFLFPPEGNFHFPGFGGVGLPPFFGFTPQNPNTGGSGLGSGPAGRGYVPGGDDTFVPNPGFEVPNPGSGGGVPVPVPVNP

SEQ ID NO: 207357 - protein, 77 aa, Glycine max
  Clone ID: PAT_MRT3847_29269C.1.pep
YLEAPGNVTIKYLGSVVTVSGGKSCLVGSGCCCNSGPAMEATEYLYLDRQMSHKSQLSSQVRRTGLAYVTLAFLGGG

SEQ ID NO: 207358 - protein, 69 aa, Glycine max
  Clone ID: PAT_MRT3847_2926C.1.pep
VNPPSQILLQKPRPVLIPYILGPVVALLGISTSRLVSQLVANTSRGFYLQLLRAIQLVVRAGPASRNLR

SEQ ID NO: 207359 - protein, 99 aa, Glycine max
  Clone ID: PAT_MRT3847_29270C.1.pep
PGQAVARRHIIPKHSNKGDKKEPQFLFPPEGNFHFPGFGGVGLPPFFGFTPQSPNTGGSGLGSGPLGRGYVPGGDDTFVPNPGFEFPNPGSGGGVPVNP

SEQ ID NO: 207360 - protein, 428 aa, Glycine max
  Clone ID: PAT_MRT3847_29271C.1.pep
YLCSACIQSARAQMKMTRVPIHGGFSWLSFNEETTTTDDSSFTMTGLLEQLNTTRDLSDYLWYSTDVVLDPNEGFLRNGKDPVLTVFSAGHALHVFINGQLSGTAYGSLEFPKLTFNEGVKLRAGVNKISLLSVAVGLPNVGPHFETWNAGVLGPISLSGLNEGRRDLSWQKWSYKVGLKGEILSLHSLSGSSSVEWIQGSLVSQRQPLTWYKTTFDAPAGTAPLALDMDSMGKGQVWLNGQNLGRYWPAYKASGTCDYCDYAGTYNENKCRSNCGEASQRWYHVPQSWLKPTGNLLVVFEELGGDPNGIFLVRRDIDSVCADIYEWQPNLISYQMQTSGKAPVRPKVHLSCSPGQKISSIKFASFGTPAGSCGNFHEGSCHAHKSYDAFERNCVGQNWCTVTVSPENFGGDPCPNVLKKLSVEAICS

SEQ ID NO: 207361 - protein, 84 aa, Glycine max
  unsure (1)..(84): unsure at all Xaa locations
  Clone ID: PAT_MRT3847_29272C.1.pep
WNCCYCQQRQQGFSFSFSFLMERLKGVSFKTPNGERRFQEGLEPKKGGGKFESFPKLGGAPDQKWFRKLGNGAPLTRKVEXRGI

SEQ ID NO: 207362 - protein, 102 aa, Glycine max
  Clone ID: PAT_MRT3847_29273C.1.pep
ELVLNEASIAVWQKPIDNNCYHNRDIDAHSASYDTDDDPDDTWNARLNACISALPTIEYRRDVTKGSGLVKQPPDRLHIMHLNAILCIDELSRADTIYRFDI

SEQ ID NO: 207363 - protein, 426 aa, Glycine max
  unsure (1)..(426): unsure at all Xaa locations
  Clone ID: PAT_MRT3847_29274C.1.pep
MVICLKLIIMWNVALLLVFSLIGSAKASVSYDSKAITINGQRRILISGSIHYPRSTPEMWPDLIQKAKDGGLDVIQTYVFWNGHEPSPGKYYFEGNYDLVKFIKLVQQAGLYVHLRIGPYVCAEWNFGGFPVWLKYIPGISFRTDNEPFKYQMEKFTTKIVDMMKAERLYESQGGPIILSQIENEYGPMEYEIGAPGRAYTQWAAHMAVGLGTGVPWIMCKQEDAPDPIINTCNGFYCDYFSPNKAYKPKMWTEAWTGWFTEFGGAVPHRPAEDLAFSIARFIQKGGSFVNYYMYHGGTNFGRTAGGPFIATSYDYDAPLDEYGLPRQPKWGHLKDLHRAIKLCEPALVSXDPTVQQLGNYEEAHVFRSKSGACAAFLANYNPQSYATVAFGNMHYNLPPWSISILPNCXNTVYNTSSPAAHWFIT

SEQ ID NO: 207364 - protein, 146 aa, Glycine max
  unsure (1)..(146): unsure at all Xaa locations
  Clone ID: PAT_MRT3847_29275C.1.pep
IPGSTNPSDKPSLRRQKNNKWGYQVPKPWLNPPGNLLVVFEDLGGNPIGTFLVKRDIDSECADIYKWQPNPISYQMQTSWKAPVRPXVHLSCSSGQKISSITFASFGTPAGSCGNFHEXSCHAHKSYDAFETNCVGQNWCTVTVSP

SEQ ID NO: 207365 - protein, 128 aa, Glycine max
  Clone ID: PAT_MRT3847_29276C.1.pep
GDPTVQQLGNYEEAHVFRSKSGACAAFLANYNPQSYATVAFGNQRYNLPPWSISILPNCKHTVYNTARVGSQSTTMKMTRVPIHGGLSWKAFNEETTTTDDSSFTVTCPVEQINATRDLSDYLWVLTE

SEQ ID NO: 207366 - protein, 135 aa, Glycine max
  unsure (1)..(135): unsure at all Xaa locations
  Clone ID: PAT_MRT3847_29277C.1.pep
MRTGEQCAGRSGRTGPGHCYRLYSFAGDSNEYDEHCTCEDEKDPVHGGALLXKFMHIKKDENFPFPTFLKDSSVLEGENCLTAVEALDNKDELTLLRKAMEHYALSACHYRMLTTGIKNTGHEHKCYPNMPLGYA

SEQ ID NO: 207367 - protein, 69 aa, Glycine max
  Clone ID: PAT_MRT3847_29278C.1.pep
KKEMYRIGRTTCCGGHLFSCFETDDLLLALEVDLRFNLTDLDLHCETCKMCASGQSATIIGEEHSKTSW

SEQ ID NO: 207368 - protein, 432 aa, Glycine max
  Clone ID: PAT_MRT3847_29279C.1.pep
MDKLYGLSHLFMTVFLHNFSMFMVVPAITDVTMAALCPGQDECSLAIYITGFQQAMIGLGTLVMMPLLGNLSDKYGRKAILTLPMILTIIPVGILAYSRTKKFFYVYYVFKILISMVCEGSVPCLALAYVADNVPESGRSTVFGILSGIGSAAFVCATLSARFLSSALTFQVSTLIAVIGALYMQFFLRDSVIDDKHLYTPIISQGNPIISKVNGNLESKKHLLKALRSIKDLTSFLNSSLTINQAAIVAFFNSLADVGLHGSLLYFLKAQFHFDKNQFADLMVISGIAGTVSQLLLMPILAPILGETRLLSVGLFFHCVHMFLYSMAWSSLVPYASAMFSILYVFSHPCIRSIVSKEAGPHEQGKAQGCISGICSIAHIVSPLVFSPLTALFLSEKAPFDFPGFSIMCIGFASMISFVQSLMLRVAPPILN

SEQ ID NO: 207369 - protein, 56 aa, Glycine max
  unsure (1)..(56): unsure at all Xaa locations
  Clone ID: PAT_MRT3847_2927C.1.pep
VLLTKKSHSSXRRRKKGKKNXKGRXXNXSQXKVYXXGDXLXXXWXXSLEXXIMVXA

SEQ ID NO: 207370 - protein, 76 aa, Glycine max
  unsure (1)..(76): unsure at all Xaa locations
  Clone ID: PAT_MRT3847_29280C.1.pep
RVALDXQSXLGVSPRRVICHGPYLTPKXKTPLXAXTLEYCEALXSTERPLIPTTHHPLKSKRSXXHAHNHSRSPHL

SEQ ID NO: 207371 - protein, 200 aa, Glycine max
  unsure (1)..(200): unsure at all Xaa locations
  Clone ID: PAT_MRT3847_29281C.1.pep
MGCTMREKHIRANRRPRSVKPDSDSCDKDAISKSIAESGLKPFKYHLDLNDSSQSPNSNPNVEETGWGYCTEEQLEEILLKNLEFIYNETVSKLVALGYDGDVAVNAILRNGHCYGGMDELTNILHNSLAFLNTNSDGDGGGYSRNGGNXPESEPVVSDLERGEEYSLPLMEGQLQQVMAHSDKRDAMWLALMRDLNDGR

SEQ ID NO: 207372 - protein, 74 aa, Glycine max
  Clone ID: PAT_MRT3847_29282C.1.pep
KLEKVFDDEFKNKKVVFCPQQPEDDKCGEIGIRIGHNNGTRGLVVFKKKPLVVRFQKLYKESLAKKKKGLSPRE

SEQ ID NO: 207373 - protein, 109 aa, Glycine max
  unsure (1)..(109): unsure at all Xaa locations
  Clone ID: PAT_MRT3847_29283C.1.pep
TRTCSKLCTSSQSPNTSVLEERTPNGIXNKYYGSLVKRQGWLPRDQQQYEDXRLLKLTANSIAENQKLFFEKLSNADDKMRQEDELSVKLGQIRAKCSVPQQEYGGHLC

SEQ ID NO: 207374 - protein, 34 aa, Glycine max
  Clone ID: PAT_MRT3847_29284C.1.pep
CTVPLIQANSNLSNLYTKPNQSGSFLSNHFLDTA

SEQ ID NO: 207375 - protein, 58 aa, Glycine max
  Clone ID: PAT_MRT3847_29285C.1.pep
MSNAVTGSTFAQIIDRVVQASQNDFEESGVDQQTLQEMKEIWQKKLSALHVAQMPWDP

SEQ ID NO: 207376 - protein, 57 aa, Glycine max
  Clone ID: PAT_MRT3847_29286C.1.pep
AQVTRTLPPLLKRLVVKNKCFLKGEISYKITLFKKNNQVIGMTLLIQGKGKNPKGNP

SEQ ID NO: 207377 - protein, 57 aa, Glycine max
  Clone ID: PAT_MRT3847_29287C.1.pep
RKPLCQGKECSRTLSGDLTTSNPPIFSPAEGCSTVILLSSSDKSTRSFVKAMMNDQE

SEQ ID NO: 207378 - protein, 62 aa, Glycine max
  unsure (1)..(62): unsure at all Xaa locations
  Clone ID: PAT_MRT3847_29288C.1.pep
SESWSGCGVRVASXRGECWLKSEETPLCLVQSELRISSDALHKGKNKQKQYLLLHSVVFCVV

SEQ ID NO: 207379 - protein, 162 aa, Glycine max
  Clone ID: PAT_MRT3847_29289C.1.pep
MHRSPTGNLVPLDMEIEAMLRRNRAERRRKLLQDRTAASILKEKTHFSDSPSSRESATYLPEVVSMADEHQQRVTLEDYSSSSVPQFFTSIAHPKVQAHNINYPYSLIHLIQGNLFQGLPNEDPYAHLATFIEICNTVKMAGMPDEAIRLSLFSFFLAREAQ

SEQ ID NO: 207380 - protein, 386 aa, Glycine max
  Clone ID: PAT_MRT3847_2928C.1.pep
MSSLWFLKLSLKCLDHLAWPLLALGYPLCASVQAIETDSNKETRDLISYWILLSLIYLFEYAFSGILQWFQFWPYIKLMIIFCLVTPDFGRASYAYNNLIRTCISLNPQAIICRLNNWRKFFVKKDDFLLHVERYLNENGTEALEKLIASKNTNLLKNTTYKPDAEATNAIIATDNNETQQTNETKLQTQQKTIKDLEVIEKKEILAGKQDISVVPNLVPSQNASPAMVETKILVGKDTASGELPESSTHKEVQKEWTCALCHVTTSSEKTLIDHLHGRKHKATCESLKAQNQPVPHKVKSDQSKDDLKQKNVIYQINSKTKSGEKVGKEAMDHKVQKLQKKLYEPAGTSNSKFLCEVCNVYCPCEIALASHKNGKKHLAKIKTSI

SEQ ID NO: 207381 - protein, 58 aa, Glycine max
  Clone ID: PAT_MRT3847_29290C.1.pep
PRVRAKLSPKGTTVIPTPNRFFYGPRLSIPITKRGIEVCSLLIRKGITVTGILGFCLT

SEQ ID NO: 207382 - protein, 56 aa, Glycine max
  unsure (1)..(56): unsure at all Xaa locations
  Clone ID: PAT_MRT3847_29291C.1.pep
RLKEKKTEHTRIHFNVPPTIVVDKSKLSEPNLINDYKHEXXIIEPXIVCKSITFPS

SEQ ID NO: 207383 - protein, 77 aa, Glycine max
  Clone ID: PAT_MRT3847_29292C.1.pep
GAVFWPCFVFRGEPVAFVVCPVALLCVSLCFPRCGAVPRDGRVVALVFLSCGVSGCFCLRVSPVRRSPWSPFCRRQA

SEQ ID NO: 207384 - protein, 33 aa, Glycine max
  unsure (1)..(33): unsure at all Xaa locations
  Clone ID: PAT_MRT3847_29293C.1.pep
DFXPSMSGSEQHNSDLKRGSSPVXSFDXIQSLX

SEQ ID NO: 207385 - protein, 104 aa, Glycine max
  Clone ID: PAT_MRT3847_29294C.1.pep
FLGKIITKLPLVKMQTRHVFTQDCLFSKSPLFVQTTQKKKTFFFYSKKHSFLKPPWAHCAMFWGDTPSFRRQCFLRVGPPYIKPNEENSIHQNQSTSKISMVLN

SEQ ID NO: 207386 - protein, 116 aa, Glycine max
  Clone ID: PAT_MRT3847_29295C.1.pep
MDKALVYGTRDSGFDPQWSRFYFWVISLNTKSLMTCAIVQVSVVFYPLETPQEIFALIMKNTEITTKSLVGQRKSHDYFSQEHYTKHQVEMTFKTYLTSSGKKRMKYKNMMGEIDL

SEQ ID NO: 207387 - protein, 152 aa, Glycine max
  Clone ID: PAT_MRT3847_29296C.1.pep
ISGSCHGSSWGHKIDDRSKTSDGLLQSLGSFIVVEREGQIIACAALFPFFEEKCGEVAAIAVSPDCRGQGQGDKLLDYIEKKASSIGFEMLFLLTTRTADWFVRRGFSECSIDYIPEKKRKTINLSRKSKYYMKKLLPNKSGITVSSRFTSS

SEQ ID NO: 207388 - protein, 41 aa, Glycine max
  Clone ID: PAT_MRT3847_29297C.1.pep
ECSTLLCPFTRAHDSVSDTSSVDYKTKCVIPPTRNKVAVFV

SEQ ID NO: 207389 - protein, 202 aa, Glycine max
  unsure (1)..(202): unsure at all Xaa locations
  Clone ID: PAT_MRT3847_29298C.1.pep
MESSGKMEDYEVIQQIGRGALGATFLVLHKIENKRYVLKKIRLAKHADKSKVTAQQEMDLIAKLHYPYIVEYKDAWVEKDDYICIITGYCEGGDMAANIKKARGSYFSEEKVCKWLTQLLLAVXCYLHFNRVLHRDIKCSNIFLTQENNIRLXEFGLAKLLNTEDLTSXXCWNSNYMCPEAFAGMPYGYKSDMWSLGCCMFE

SEQ ID NO: 207390 - protein, 49 aa, Glycine max
  Clone ID: PAT_MRT3847_29299C.1.pep
THTSLGQDLTSFKLLLLLPYNTLESSLVCCTRIVTISDSDCCRHLPISR

SEQ ID NO: 207391 - protein, 45 aa, Glycine max
  Clone ID: PAT_MRT3847_2929C.1.pep
IKKSCISGVGTCHYHWKLDYEFEGPYMVRHLVIKPTKCFLCSFVA

SEQ ID NO: 207392 - protein, 34 aa, Glycine max
  Clone ID: PAT_MRT3847_292C.1.pep
SYSATPRIKMRAFKFLRLLRTPMCQTTSCKGWMN

SEQ ID NO: 207393 - protein, 105 aa, Glycine max
  Clone ID: PAT_MRT3847_29300C.1.pep
FQEFLNFFLLLCVRFLKGKKITLCAGHRLCESFFFPILSYLVDPLLFDFRLCGRFKPPPVLSQVFGQIPGQACENFDLSVPTSIWVMTLRGEPSIFLPFFTLFFL

SEQ ID NO: 207394 - protein, 92 aa, Glycine max
  unsure (1)..(92): unsure at all Xaa locations
  Clone ID: PAT_MRT3847_29301C.1.pep
VTDXXHLRXERHEIXXHXXXSXXENSNXXGVXXKQXQRDSXCNNXFPDHNKXXXXKXFXXXXVXCVXLTXVXXXTHLXXSRAEFRAYVRVRE

SEQ ID NO: 207395 - protein, 75 aa, Glycine max
  Clone ID: PAT_MRT3847_29302C.1.pep
LDYTLFQPLSYSSLSTSVNSSERETAQNLKETNFIKFCQPCRVSFLPSFLPSLPFPSFLFSLPCPLIVTPETHHG

SEQ ID NO: 207396 - protein, 53 aa, Glycine max
  unsure (1)..(53): unsure at all Xaa locations
  Clone ID: PAT_MRT3847_29303C.1.pep
XLLRXCNXASXFHLFGLXXIKTEXEXEDXRXXKRPPXWLXSGTITCSKAHTPT

SEQ ID NO: 207397 - protein, 155 aa, Glycine max
  unsure (1)..(155): unsure at all Xaa locations
  Clone ID: PAT_MRT3847_29304C.1.pep
RVPRKVIDKMVGIQRRFLWGGGVDQHKIAWVKXETVCLPKDKGGLGIKDINKFNLALLSKWKWNLFNHGGXAARVLESKYXARGVLXEVSSDSNVSLWWRDLKLAIHNPQYETALQGGIVWKVGNGEKIKFWEDRWLDGDTTLLAKYPRLYLISY

SEQ ID NO: 207398 - protein, 94 aa, Glycine max
  unsure (1)..(94): unsure at all Xaa locations
  Clone ID: PAT_MRT3847_29305C.1.pep
GGVRINLTGQEYVIKNHQRDGGLCPQGFQALDIPEPEGPLRILGDVTSGSXVAVNDRGDKNIGPRVGLARARSRATGRAERKATQGQFLRKRPG

SEQ ID NO: 207399 - protein, 78 aa, Glycine max
  Clone ID: PAT_MRT3847_29306C.1.pep
STRKFCWSEESRTAPKGSQNKGRDFESKIESKDVAENDGYEFGSPEKEAPSKEPGIDPAKLKEIKREEEIVKGKQALG

SEQ ID NO: 207400 - protein, 48 aa, Glycine max
  Clone ID: PAT_MRT3847_29307C.1.pep
LSKIPDIRSIHFVFNSLLCSEEQWNFSCKSIQTIECLFLKKMELKCDF

SEQ ID NO: 207401 - protein, 386 aa, Glycine max
  Clone ID: PAT_MRT3847_29308C.1.pep
MEGEEGSQQPQLVLADKLFLLRQPDVQDIDKVRYKEDVFTHVKENDMVPLYETLVADSVLDLDRALLDSMRAKIDDELTKLDEKIADAEENLGESEVREAHLAKSLFFIRIMDKEKALEHLKVTETKTVAVGQKMDLVFYTLQLGFFDMDFDLISKSIDKAKNLFEEGGDWERKNRLKVYEGLYCMSTRNFKKAAKLFLDSISTFTTYELFPYDTFIFYTVLTSIISLDRVSLKQKVVDAPEILTVIGKIPYLSEFLNSLYDCQYKSFFSAFAGLTEQIKLDRYLHPHFRYYMREVRTVVYSQFLESYKSVTIEAMAKAFGVTVDFIDVELSRFIAAGKLHCKIDKVAGVLETNRPDAKNALYQATIKQGDFLLNRIQKLSRVIDL

SEQ ID NO: 207402 - protein, 234 aa, Glycine max
  Clone ID: PAT_MRT3847_29309C.1.pep
MEEEGSQQPQLVLAEKLFLLRQPVQDIDKVRYKEDVFTHIKENEMVPLYETLVADSVLDLDRALLDFMRAKIEDELTKLDEKIADAEENLGESEVREAHLAKSLFFIRIMDKEKALEHLKITETKTVAVGQKMDLVFYTLQLGFFDMDFDLVSKSIDKAKNLFEEGGDWERKNRLKVYEGLYCMSTRNFKKAAKLFLDSISTFTTCELFPYDTFIFYTVLTSIISLDRVSLKQK

SEQ ID NO: 207403 - protein, 83 aa, Glycine max
  Clone ID: PAT_MRT3847_2930C.1.pep
GKAQMMASSGRGRDTGRSEGTGKTNPRGRRSKAKWMHPNDLPFHDTLHPNNPGSAYKPGPNTRDCYYVSTEIGLPHSEPLEGK

SEQ ID NO: 207404 - protein, 80 aa, Glycine max
  Clone ID: PAT_MRT3847_29310C.1.pep
NNTAHGRTKKLNLFNLCLLFQSLTTQRKSEKNSQRNSPPTWTIPYPENFSLNSQHYMIRTYMNKNNYYHSSSHLHFPNFN

SEQ ID NO: 207405 - protein, 81 aa, Glycine max
  Clone ID: PAT_MRT3847_29311C.1.pep
TLRTPPSTTLSSAASSIHRTRSTTFSFSSCSPPTLRFNLHSSLSLTSASASSPTTASTTELDACPPSARSFPTSRFRSFRK

SEQ ID NO: 207406 - protein, 109 aa, Glycine max
  Clone ID: PAT_MRT3847_29312C.1.pep
VITVGFFFRLTFWEFSWDVMEPIAFFTTTTGLVIGYAYFLFTSRDPTYQDFMKRLFLSRQRKLFKRQNFDIERFKELQCKCKTPLHASTVLKNRIGVELDLEDALHRDH

SEQ ID NO: 207407 - protein, 69 aa, Glycine max
  Clone ID: PAT_MRT3847_29313C.1.pep
PPPPPPAPCPPHPATARPPPSSPPTSQARPQPLTQHSHWPITIKHHSPLLILFSTPRIANACKWQGKPE

SEQ ID NO: 207408 - protein, 69 aa, Glycine max
  Clone ID: PAT_MRT3847_29314C.1.pep
QKLVASFLLQTQRSFFPLSKFPPAPLFSPYNIITPDSGSFKSPNFIIRYFHRFFASYFIQFSLFQRSQC

SEQ ID NO: 207409 - protein, 53 aa, Glycine max
  unsure (1)..(53): unsure at all Xaa locations
  Clone ID: PAT_MRT3847_29315C.1.pep
VRDKFARVTQMASILNLEKVCQTPDFWGENSVPKSXRLTPAXVRRVSGLRSSF

SEQ ID NO: 207410 - protein, 109 aa, Glycine max
  unsure (1)..(109): unsure at all Xaa locations
  Clone ID: PAT_MRT3847_29316C.1.pep
KGSKGLHVITPSLKDLLQAHLYVLXTSNEALPYILQHEGLVNQSQPKMSKNWVLKMHNKTFSDWFKDTIIGDENASETLRKQADGLKRNVITKQGYDINKYCFYTKAQD

SEQ ID NO: 207411 - protein, 476 aa, Glycine max
  unsure (1)..(476): unsure at all Xaa locations
  Clone ID: PAT_MRT3847_29317C.1.pep
MAPETDSIEMFFFPFVGGGHQIPMIDAARVFASHGAKSTILATPSNALHFHNSISHDQQSGLPIAIHTFSADISDTDMSAAGPFIDSSALLEPLRLFLLQRPPDCIVIDMFHRWAPDIVDQLGITRILFNGHGCFPRCVTENIRNHVTLENLSSDSEPFVVPNLPHRIEMTRSRLPVFLRNPSQFPDRMKQWDDNGFGIVTNSFYDLEPDYADYVKKRKKAWLVGPVSLCNRTAEDKTERGKPPTIDEQKCLNWLNSKKPNSVLYVSFGSVARXLPPGQLKEIAFGLEASDQTFIWVVGCIRNNPSENKENGSGNFLPEGFEQRMKEKNKGLVLRGWAPQLLILEHAAIKGFMTHCGWNSTLESVCAGVPMITWPLSAEQFSNEKLITEVLKIGVQVGSREWLSWNSEWKELVGREKVESAVKKLMVESEEAEEMRTRVKEIAEKARRAVEEGGTSYADAEALIQEIKGRRLARQD

SEQ ID NO: 207412 - protein, 92 aa, Glycine max
  Clone ID: PAT_MRT3847_29318C.1.pep
AASNVLIRKLIAAGGMFHHQSSRIAMASHMKMHSIGGSPGTSFRISDTQIFLYTGVENASDASTDQGSAGMSSTSSEHTAYDSAAENRPSTT

SEQ ID NO: 207413 - protein, 103 aa, Glycine max
  unsure (1)..(103): unsure at all Xaa locations
  Clone ID: PAT_MRT3847_29319C.1.pep
TNSNSTEHFVACTRTKSEPHSWELIXANERCGPNNGFEMWSSEWANKTKWHLSFLIDNTKQSTELAMNGGISQDFENAGDTFMPPFCDPQAPDITDENAVSSA

SEQ ID NO: 207414 - protein, 377 aa, Glycine max
  Clone ID: PAT_MRT3847_2931C.1.pep
MYRRRRGETEKKKMEMYQIWSRRIALGAFAFVLLFLSASADDVVVLSEDNFEKEVGQDRGALVEFYAPWCGHCKKLAPEYEKLGSSFKKAKSVLIGKVDCDEHKSLCSKYGVSGYPTIQWFPKGSLEPKKYEGPRTADSLAEFVNTEGGTNVKIATAPSNVVVLTSENFNEVVLDETKDVLVEFYAPWCGHCKSLAPTYEKVATAFKLEEDVVIANLDADKYKDLAEKYDVSGFPTLKFFPKGNKAGEEYGGGRDLDDFVAFINEKSGTSRDVKGQLTSQAGIVESLDVLVKEFVAASDEEKKFVFTRMEEEVEKLKGSASRHGKIYLKAAKNYLEKGSDYAKNEIQRLQRILDKSISPAKADELTLKKNILSTYAA

SEQ ID NO: 207415 - protein, 110 aa, Glycine max
  Clone ID: PAT_MRT3847_29320C.1.pep
KDSLTSLLIQMGMSCQIAHILKHKILQNMNTSENGGCLLPGDRYPDWWTFHSEDSSVIFEIPQVNKRNLKTMMCHVHYSSPVNIATDGLKNLLVINHTKTTIQLYKSDAL

SEQ ID NO: 207416 - protein, 78 aa, Glycine max
  unsure (1)..(78): unsure at all Xaa locations
  Clone ID: PAT_MRT3847_29321C.1.pep
QSATSLLNDKAVCGMHLFTCTXVQTLRVRALNKDARDPEALANPDVVCLHCAGPWNKSCSQLGLSHPEHVLVKRASSA

SEQ ID NO: 207417 - protein, 113 aa, Glycine max
  unsure (1)..(113): unsure at all Xaa locations
  Clone ID: PAT_MRT3847_29322C.1.pep
MAMMWIRIILLVAVCMLSLSVEAMVRHYKFNVVVKNVTRLCSTKPIVTVNGKFPGPTIYAREDDTVLVKVVNHVXYNVSIHWHGARQLHTVCADWAAYITQWPIQPGQAFVDN

SEQ ID NO: 207418 - protein, 42 aa, Glycine max
  Clone ID: PAT_MRT3847_29323C.1.pep
HYIFWQHWKIVYHNGECFSNFMIIFLAVEKLEKCNILVLSTN

SEQ ID NO: 207419 - protein, 140 aa, Glycine max
  Clone ID: PAT_MRT3847_29324C.1.pep
MILRFLELSSILEPSMQPKSDKVAILSDAARVVIQLRNEAMRLKEMNDELHAKVKELKGEKNELRDEKNRLKEEKEKFEHQVKVANIQPSFLPQAPDAKGQVGSHKLIPFIGYPGIAMWQFMSPAAVDTSKDHLLRPPVA

SEQ ID NO: 207420 - protein, 231 aa, Glycine max
  Clone ID: PAT_MRT3847_29325C.1.pep
MDMNSSGGACGWLYDYGFDIPVAGSDFMASDSGGFSWGPQSYNFKGPSNMSLEMEYSLDSTVMENGPSKRLRTESCASGSKACREKLRRDKLNERFLELSSILEPGRQPKTDKVALLSDAARVVIQLRNEAERLKEMNDELQAKVKELKGEKNELRDEKNRLKEEKEKLEKQVKLTNIQPSFLPQAPDAKGQVGSHKLIPFIGYPGIAMWQFMSPAAVDTSKDHLLRPPVA

SEQ ID NO: 207421 - protein, 223 aa, Glycine max
  Clone ID: PAT_MRT3847_29326C.1.pep
EPKSPRVRPLRLPLQDVYKIGGIGTVPVGRVETGVLKPGMVVTFAPTGLTTEVKSVEMHHEALQEALPGDNVGFNVKNVAVKDLKRGFVASNSKDDPAKEAANFTSQVIIMNHPGQIGNGYAPVLDCHTSHIAVKFAELVTKIDRRSGKEIEKEPKFLKNGDAGYVKMIPTKPMVVETFSEYPPLGRFAVRDMRQTVAVGVIKSVEKKDPTGAKVTKAAQKKK

SEQ ID NO: 207422 - protein, 182 aa, Glycine max
  Clone ID: PAT_MRT3847_29327C.1.pep
MASRQMEEIRKKLADLNYPRANAPAQSLLFAGMERYALLEWLFFRLLGDKSPFSQQNLQGDGHDRDEETGRIQYLAEIAKFLGITTTVDTDAIQGHGSYEDRTEMLRLIVDLVEATICSDNPEWSVDEQVAKDIQLIDSIAEKQAQIFSEECKLFPADVQIQSIYPLPAYSILELNNQNLNL

SEQ ID NO: 207423 - protein, 54 aa, Glycine max
  Clone ID: PAT_MRT3847_29328C.1.pep
RRGSLRGVLHSWSPVLYCACLLEGGDSSLGVTFHCPYYLLCTSVHPELIFIFNI

SEQ ID NO: 207424 - protein, 149 aa, Glycine max
  Clone ID: PAT_MRT3847_29329C.1.pep
MASRQMEEIRKKLADLNYPRANAPAQSLLFAGMERYALLEWLFFRLLGDKSPFSQQNIQGDGLDRDEETGRIQYLAEIAKFLGITTTVDTDAIQGHGSYEDRTAMLRLIVDLVDATICADNPKWSVDEQVAKDIQLIDSFAEKQAQIFS

SEQ ID NO: 207425 - protein, 48 aa, Glycine max
  Clone ID: PAT_MRT3847_2932C.1.pep
SKFGLERIMVMVKSFWPNRSLNLYFTSNKKELEFNTLVNIWKLKLGLN

SEQ ID NO: 207426 - protein, 96 aa, Glycine max
  unsure (1)..(96): unsure at all Xaa locations
  Clone ID: PAT_MRT3847_29330C.1.pep
PLLDVRSQLVALCFLKRCSIEIVIKKTCGQMSKVLGTAPEDKARKWSQLHYVSSNNLETQEAXLVNLVNVLRELYLHSSEEARQXTRKVVSGIEWL

SEQ ID NO: 207427 - protein, 86 aa, Glycine max
  Clone ID: PAT_MRT3847_29331C.1.pep
SQKPYVYARILDFCVPSAKYNGRYDEHRETCALDHGIAGHYEIDASSISYARERGIIVEAERPDGDRDCHRERALESRRQRDPYEH

SEQ ID NO: 207428 - protein, 102 aa, Glycine max
  Clone ID: PAT_MRT3847_29332C.1.pep
KIGSRGKNPLFSQFFFSPSPPKRFWSPRFLQPQWKQLPPGKKKLGPNGSIINPTQAKKTFFFLGNQIYPGEFYSRGKKKFFLKVLFKVIWNFPGVGFAISPF

SEQ ID NO: 207429 - protein, 45 aa, Glycine max
  Clone ID: PAT_MRT3847_29333C.1.pep
RTSYFFIYVLFFDIQIKLMTNQNISNKLCMQIIVSLILIYDQTIS

SEQ ID NO: 207430 - protein, 123 aa, Glycine max
  Clone ID: PAT_MRT3847_29334C.1.pep
NLSKSVLGVSESRELKFFFFLSIFAPMRIRKRPALFPSSLSPLRLSDPHLINRSPVVVQLSDATSTAPKLSFSSSAHHAAFAPPSSLDRFQPSDQPLPSIGKQSNGSDDPSGIGESGAHRQHN

SEQ ID NO: 207431 - protein, 46 aa, Glycine max
  Clone ID: PAT_MRT3847_29335C.1.pep
KCQFRSLVFSCTWTQYFVPNALSLVYHLNINHNKIMIYAFYVFFLS

SEQ ID NO: 207432 - protein, 98 aa, Glycine max
  unsure (1)..(98): unsure at all Xaa locations
  Clone ID: PAT_MRT3847_29336C.1.pep
ELTSDFKMIARALTMTGHALVKMAKCSNDYQSAIETYLKALTDHRNPDPLXTLNEAEMAKTELDHQEYLDPKLADDQIEKGTXLIKHHNYPDAVTHYA

SEQ ID NO: 207433 - protein, 45 aa, Glycine max
  Clone ID: PAT_MRT3847_29337C.1.pep
ITHVHGKFLVYNQCNRLIKTLLNQLYKNAFTDFFHLSNRRELSHY

SEQ ID NO: 207434 - protein, 436 aa, Glycine max
  unsure (1)..(436): unsure at all Xaa locations
  Clone ID: PAT_MRT3847_29338C.1.pep
MQNPDANQLPEVDSLPDGFVESTTEPLAPATPSPEQEKPLNSYKDDGPSDLIHSNERSNDLGEKEFQNNHDCSAESPSRSSMQQTEGAQITPPVANSVPESLLSSCCEVNEQQQGECQSSDGSTVVPLETKALPVKSTCPPETVDSSKNKKPETSEKRKSAKRTLKSEKELLEFTLKYQQVLAERDAALAVRDKLESLCRELQRQNKMLMEECKRVSTEGQNLRLDLSAKFQDAIKDVSNKLEERKDDXLSQLKENDMLRNKLRQLVEQYELSEQQHAQKLKQKSLELQLADLKIKQHEEKLVQERSQIKVYAEQVSQLLATEKSLRLQLTTDGEKFQQFQEALSKSNEIFETFKQEIEKMAKSIKELKKENQFLKSKSEKSDVTLIELVDERERMKKQLEKTKNQKEKLESLCRSLQAERKQNSSENKSNNSVQT

SEQ ID NO: 207435 - protein, 92 aa, Glycine max
  unsure (1)..(92): unsure at all Xaa locations
  Clone ID: PAT_MRT3847_29339C.1.pep
ARPLMNHNKKLLKILDPKLEGQYSCXTALKVAHLAYQCLSQNPKGRPLMSQVVEILENFQSKGGNEEDQMLQTGGTSVTLYEVPKGSNDTPT

SEQ ID NO: 207436 - protein, 176 aa, Glycine max
  unsure (1)..(176): unsure at all Xaa locations
  Clone ID: PAT_MRT3847_2933C.1.pep
FNVACAAAGLTLKNTPTPLMESGLQKDRGGIVDVFGRMAXVDHNGNXPQEKDSEEGNFCFDVKSRSRVXKVCSTKAQFGSGKTFKYXDINGAGSHSSEDFPEKEDQEKPKKIDARLRQRIDPQYNEVQAQMETNLFKLSLDDVETPKGSMLDLKIFSILKIALSQKTHVVRKPLSA

SEQ ID NO: 207437 - protein, 166 aa, Glycine max
  Clone ID: PAT_MRT3847_29340C.1.pep
GFGRAEGGPIPGLTPGSARVWGPSARAAPEYVMTGHLTARSDVYGFGVVLLEMLIGRRALDKSRPSREHNLVEWARPLLNHNKKLLKILDPKLEGQYSSKTALKVAHLAYQCLSQNPKGRPLMSQVVEILENFQSKGENEEDQMLQTGDTSITLYEVPKGSNGTPT

SEQ ID NO: 207438 - protein, 48 aa, Glycine max
  Clone ID: PAT_MRT3847_29341C.1.pep
HMLEPGMGFLNKGELISTSYPHRSPSTTTSIHLNLNYRKMDKQKTYNR

SEQ ID NO: 207439 - protein, 60 aa, Glycine max
  Clone ID: PAT_MRT3847_29342C.1.pep
QRRQRKKIMSRCVSCALIPNKNFLVSPIQIPIHNAVKVRGNNRTCGLRVQFSRGASPAVF

SEQ ID NO: 207440 - protein, 41 aa, Glycine max
  Clone ID: PAT_MRT3847_29343C.1.pep
VCGQPESDFLSLRNRHQGVEEIGRFLKSSNEAFVSGFKVGT

SEQ ID NO: 207441 - protein, 87 aa, Glycine max
  Clone ID: PAT_MRT3847_29344C.1.pep
MRISGAAGFIAYNVVNRLIRSYPQYPMGVLDPLGNCSKLKTLTPSKKAPNCQDLKGDIGSADLVNYHLISECIDTIMHYDAQTPDDN

SEQ ID NO: 207442 - protein, 74 aa, Glycine max
  unsure (1)..(74): unsure at all Xaa locations
  Clone ID: PAT_MRT3847_29345C.1.pep
VILAISWGIYSVMTQYNAXNTLFFGTQLSVLLTLLCIITMILLVHTTTCMVITKHNTIFWKRSPTFSGLRKGLT

SEQ ID NO: 207443 - protein, 138 aa, Glycine max
  Clone ID: PAT_MRT3847_29346C.1.pep
RGLPWLPLFEQFFFLPKPLFWFVQVLSPMLFLGSKKPFFPPVKRGFWGNFFPPPPFGEKAVFCFFWGLESWYFCFPGPADLEEVFFFFVGRFSPVSFGRGQNPWGVFFFPDSGLTVFPVNIGGGFIIIFFFHRVPKKV

SEQ ID NO: 207444 - protein, 84 aa, Glycine max
  unsure (1)..(84): unsure at all Xaa locations
  Clone ID: PAT_MRT3847_29347C.1.pep
RTIKSTFWSRGDLVGRGNEDQPPFAQKRVTHVVHHRGLWWGSNREINLLGGLKNLRSXTQPIKGRFFWGIIRFIFQRYMQQLLC

SEQ ID NO: 207445 - protein, 277 aa, Glycine max
  Clone ID: PAT_MRT3847_29348C.1.pep
MTAETPVLSSFFNTVKSINTANSKKKKKHKATQQEGNRNALERHFAVHGFDFLICGVAQMLRTSKGSCWSCFSLPPPSTSCFFDFKRCPSILRHPQIKRRGRSKWKGWGASDIFPVCCGGDGEIQKVDHIKHRIGIEIAWHHIKHGLSSIINFFEPPGVREEVERLEGDEIVMVVVVMVVAVGRGRNRGRQRSNRRRGCYCPWWQLRFVRVGSERGTCKDDGEWREKQESLQISPNLYIIFYFLFLNYDGCSVKPGEKFNSYNILRRFSITVLKCAS

SEQ ID NO: 207446 - protein, 82 aa, Glycine max
  Clone ID: PAT_MRT3847_29349C.1.pep
PFPLDGSNGYSFFFVLYPLPVFFGAFQDVVGFLAVFVVECPQMEFLRVTCGFFPPSVLENWAFDSESHKQESKIKNNCKEEK

SEQ ID NO: 207447 - protein, 47 aa, Glycine max
  Clone ID: PAT_MRT3847_2934C.1.pep
PVPPPPPARPFVSLSEWQPFYLQSEPSNSVLPIPNLSSLPNRLPSPH

SEQ ID NO: 207448 - protein, 165 aa, Glycine max
  Clone ID: PAT_MRT3847_29350C.1.pep
LEPLSAKEISEVILVGGMTRMPKVTESVKSIFGRDPAKSVNPDEAVAIGAAIQGAVLAGEVTDLLLLDVTPLSLGIETLGGVFTRLINRNTTIPTKKSQVFSTAADFQSAVEIKVYQGERELVRDNKLLGNFQLVGIPPAHRGVPQVEVTFDIDADSIVHVHAKD

SEQ ID NO: 207449 - protein, 48 aa, Glycine max
  Clone ID: PAT_MRT3847_29351C.1.pep
TINIEETFFILQTVRHLKDYYRNPLVQAVKEPELKDLTPFSHIAFQPK

SEQ ID NO: 207450 - protein, 124 aa, Glycine max
  Clone ID: PAT_MRT3847_29352C.1.pep
DNVVSVLPYRLHGCKPLSIFRFFPCHSNITVLQKMIPNIIEQLSNKFVLVRFTLLMLNLLSCFLFLFSLFSLQHHFMAFDPFKVHFANTFKGKTQGTNGKAFKIDRLYTVEFQKFKDNCLFCES

SEQ ID NO: 207451 - protein, 48 aa, Glycine max
  Clone ID: PAT_MRT3847_29353C.1.pep
PLRACLRALASSSDRRGSVEDEHVSIVRARNACHGASPPSTAPNHLAP

SEQ ID NO: 207452 - protein, 49 aa, Glycine max
  Clone ID: PAT_MRT3847_29354C.1.pep
SLWLILILLDDATFILHLYLIHWPRFLLFLRFYFLFFILNGLNYLLMKC

SEQ ID NO: 207453 - protein, 65 aa, Glycine max
  Clone ID: PAT_MRT3847_29355C.1.pep
VCPVLHVTLCLLITKVVGAFWVRDQGGDLIFSHIGVKIRYPDLLMDQSFLFQNPFWEFMLLLVIK

SEQ ID NO: 207454 - protein, 134 aa, Glycine max
  Clone ID: PAT_MRT3847_29356C.1.pep
KNWLNNRKARLARTARDVKAAAGDDNPVPEKQRGPVPGSYDSPGSPGQNVVLVGVRGDEIGRGKVFQVHGKWYGKSLEELSAHVVDISELKADKGMRLPYPSEATGNTFAEAETKLGVMRVLWGSNRVFALRPE

SEQ ID NO: 207455 - protein, 239 aa, Glycine max
  Clone ID: PAT_MRT3847_29357C.1.pep
MILRYIFFADKVEIQDITKQTSFFVLVGPKSGQVMENLNLGDLVGKPYGTHLHFNVDKQPITIGVGNIISEDGFSLLMSPAAAASIWKAILSQGAIPMGSNAWNKLRIIRGRPTPGMELTNEFNVLEACLWNSVSLNKGCYKGQETISRLITYDGIKQRLWGFHLSAAAEPGSIITVDGKKVGKLTSYTSGRKQSEHFGLGYIKRRAASEGDTVIVGDNIKGTVVEVPFLLQQRPPSGS

SEQ ID NO: 207456 - protein, 597 aa, Glycine max
  unsure (1)..(597): unsure at all Xaa locations
  Clone ID: PAT_MRT3847_29358C.1.pep
MFCLKSLLCVLAPQFLGYPPLEQPKLAHTADTKVLTAIISLSHGDFLSCWCSSNLLKMEEDASLEYDIFAAVGWILDYTSLDVRNATNLEFNLIPNSMPKASYAHHRTSLFVKFFANLHCFVPNICEEQERNLFVLSTQRXPDMQRNXSFTSIIFASDAPKAAIASKNLHSLLSHAESLIPNFLNVEDVQLLRVFFGELQSLFTATGFGENQVQDSKFEESLYWDKLSKFNRNEHYQKAQSAGGCPSSLTGKEHADLNKKGGNFKEGMSENSAFPDMDQHNTRAEDTNQGKGLNRLNQVDDKGIPGKTASGGAREMDKDAQNVETSGSDSSSAKGKNVVDNMDNGELSKSNERLKRTAVEENPEDEKIELSQRRKRKRTIMNDKQVMLIERALKDEPDMQRNAASLQSWADKLSGHGSEVTSSQLKNWLNNRKARLARTARDVKAAAGDDNPVPDKQRGPVPGSYDSPGSPGDVSHVARIASGDNKSEPSLALARFVDIGSPEFGHCNAGQYVVLVGVRQDEIGRGKVFQVHGKWYGKSLDELSAHVVDISELKADKGMRLPYPSEATGNTFAEAETKLGVMRVLWGSNRVFALPPE

SEQ ID NO: 207457 - protein, 31 aa, Glycine max
  Clone ID: PAT_MRT3847_29359C.1.pep
GVIPQARLPPPSPLARVAHERVDPSLPPGAV

SEQ ID NO: 207458 - protein, 68 aa, Glycine max
  Clone ID: PAT_MRT3847_2935C.1.pep
REKLPQLEAFSMKIQIMQHQKKKRLFFSFSFPPLVRRLTPKTKFPVFIFKTQGRQTPNEKEKAGPHIS

SEQ ID NO: 207459 - protein, 44 aa, Glycine max
  Clone ID: PAT_MRT3847_29360C.1.pep
LLTVTDLSQLPNPGSGCCSDFLLYLACVLPSYTCVIGNLTRSHK

SEQ ID NO: 207460 - protein, 170 aa, Glycine max
  unsure (1)..(170): unsure at all Xaa locations
  Clone ID: PAT_MRT3847_29361C.1.pep
PSVYCSENGVTAVIXDQGSSDXTXIFILSKHAFSRMAQTTDAAASXLALGVVDIEYRRVACXYPDKNIPIKIDESSNNPYYLAFVIWYQQGRRDITAVQLCETQNFVCQLLDRSHGAVWTTTSPPSGPLSLRMLFSDEEEGEETWVVPVNNIPGDWKAGETYDSGVQVNQ

SEQ ID NO: 207461 - protein, 51 aa, Glycine max
  Clone ID: PAT_MRT3847_29362C.1.pep
LQSGVSICVKKFHEDLLAEFMYPIISSKEYRLKTGEIYIYIYIYIYRGGGG

SEQ ID NO: 207462 - protein, 85 aa, Glycine max
  Clone ID: PAT_MRT3847_29363C.1.pep
KKDHCLGSLLRNIGYIFSWQNFIKAEHGSHLFFCGLHKEPKRCLFGQGKSFNFANPWVLKSEKWEVTRKWCNGIQKPPFLECLCL

SEQ ID NO: 207463 - protein, 85 aa, Glycine max
  Clone ID: PAT_MRT3847_29364C.1.pep
ELGSGGGRRDGMRGGGGGRRGQRGVEARENRIVGLDVDAELGESGLSEEDMERRREKKTTTENQRREQQSRKRCNEEGAGSVQVA

SEQ ID NO: 207464 - protein, 368 aa, Glycine max
  Clone ID: PAT_MRT3847_29365C.1.pep
MATVPARLCYLSTNPTTRNLNFSVLKPNVLSLRSFSLPQKHYLRLRPCKCSSTAPVSTTTYEFSDGSSEVELRLNIGGLDVRSSRDILVDTNDTSLAIRVLRPGSPITLIETNPLFDRVKSSETIWYIDDDQLVVNFKKQDPDLKWPDIMESWESLTAGSPQLLQGTSIYLVGDSTEINQKVAQELATGLGYTPLSTKELLELYTKQTVDSWLLAEGSDSVAEAESAVLESISSHARAVVATLGGQHSAAGRAGKWQHLYAGFTVWLSKTEALDEDSARLETHKNVKDGIISYTNADVVVKLQGWDPAYAKSVAQACLSALKQLIQSDKKLPGKKSLYIRLGCRGDWPNIKPPGWDPSSEGNTTLGTQ

SEQ ID NO: 207465 - protein, 115 aa, Glycine max
  Clone ID: PAT_MRT3847_29366C.1.pep
PVTGLARYLKKAVSFPPLGTGVPFYLPPVLKYLPQKFLNLPGTLALPKKKNRFTLSHFFLRLRNYNKLGNLFKGVIIPTGEVFPNITRFLFLKKSPPALFKKSFTLKPPNSLKKK

SEQ ID NO: 207466 - protein, 59 aa, Glycine max
  Clone ID: PAT_MRT3847_29367C.1.pep
LELRMSILSIRRRSLVTRGRGLSPVRRIPLGLVYDGSDSPMQFSSHIRQRSACVDWFNP

SEQ ID NO: 207467 - protein, 74 aa, Glycine max
  unsure (1)..(74): unsure at all Xaa locations
  Clone ID: PAT_MRT3847_29368C.1.pep
MIEAVLNDRLXGKKVRVKCNDDDTIGDLKKLVAAQTGTRADKIRIQKWYTIYKDHITLKDYEIHDGMGLELYYN

SEQ ID NO: 207468 - protein, 217 aa, Glycine max
  Clone ID: PAT_MRT3847_29369C.1.pep
TFVMAYHSVKAAKVFFDAITDRSKGYGFVRFGDDNQRTQAMTQMNGVYCSSRPMRIGAATPRKSSGHQQGGQSNGTANQSEADSTNTTIFVGGLDPNVSDEDLRQPFSQYGEIVSVKIPVGKGCGFVQFANRNNAEEALQKLNGTTIGKQTVRLSWGRNPANKQFRMDFGNPWTGAYYGAPMYDGYGYALTPRHDPSIYAAAYGAYPLYGGHQQQVS

SEQ ID NO: 207469 - protein, 115 aa, Glycine max
  unsure (1)..(115): unsure at all Xaa locations
  Clone ID: PAT_MRT3847_2936C.1.pep
MVEEWFDCVDEEDTFIAATIAEEPYTTLIVDLAKRVPTXLAIECPKDEKLSRRKIFDKPNTRCFTILPMELNLAPRQKALQPARPTMNNTDTLHCQAGLKPILHGMPWIGQTHTE

SEQ ID NO: 207470 - protein, 27 aa, Glycine max
  Clone ID: PAT_MRT3847_29370C.1.pep
NYDALTELGDHIILSVHEYGKHYFIRC

SEQ ID NO: 207471 - protein, 44 aa, Glycine max
  Clone ID: PAT_MRT3847_29371C.1.pep
SFLSPLIFPNILPPPGERVFYSTPIIPFPLPIEPYCPLQKNHKL

SEQ ID NO: 207472 - protein, 62 aa, Glycine max
  Clone ID: PAT_MRT3847_29372C.1.pep
RVELSSTGCAATPSEESVSHAFVLCATLRSGTCSRPRVLENVHGRVGARVGRPRVFRSRTSF

SEQ ID NO: 207473 - protein, 203 aa, Glycine max
  Clone ID: PAT_MRT3847_29373C.1.pep
MLDLKYMWVLVSINRFIQDTLEDEKTRNGLKLRWTSNLRIQKQEFFEFSEQSVLSNLYWGIDSIEAAIQAQQPEERSFRLRNSEQMLQVPAMLDEEEVTATIPNRYLVCCSYFYLSVVRKLQGDEWQAALHFLQAVLVSPKLVWTEFASQLCESLFPQSGITMMQRNKSSRSLESVSSEDEMDEAIKEVARKYKEWLVYYQVM

SEQ ID NO: 207474 - protein, 68 aa, Glycine max
  Clone ID: PAT_MRT3847_29374C.1.pep
PFRPPFRQPFGRWEKTTERLLPSSPYSWVPIGGRFFLTHPLLGRVASLNPSSSSFHLNLNSKSQRPPW

SEQ ID NO: 207475 - protein, 110 aa, Glycine max
  Clone ID: PAT_MRT3847_29375C.1.pep
IDTNTCCYSKEEALKKINRDNLPTDSDLLKGSMIITFQKYWLACNSRTIHMYSLLLTGYISGGDQPLQLKNRFNNLFKELFSDHRIFATESYGNTSISSVLIHNFSLKRG

SEQ ID NO: 207476 - protein, 140 aa, Glycine max
  Clone ID: PAT_MRT3847_29376C.1.pep
PRVRAVPGAFTPTCSQKHVPGFVEKSGELRAKGVDTIACISVNDAFVMKACNGTFTKAIGVELDLSDKPVGLGVRSRRYALLAEDGVVKLFNLEEGGAFTFRTSSTFFEIIVILLLPLFNRVGVLLITWMGYYNNFLGWC

SEQ ID NO: 207477 - protein, 58 aa, Glycine max
  Clone ID: PAT_MRT3847_29377C.1.pep
IKHHGHRTFFAFCHFCVYFYLLLLEFPPFPSLYLGVGSPVFTPRSRKYRVNLKPHHNA

SEQ ID NO: 207478 - protein, 210 aa, Glycine max
  unsure (1)..(210): unsure at all Xaa locations
  Clone ID: PAT_MRT3847_29378C.1.pep
TRPRTRGRTRGWQWCPGRCNRGLAAIIFSASDDTTMTKNIRATHAPVDGHIGVRPLLHVVQDIFHRAASLIPGIVQGKQVQMDAMKDSAYQSDLANVIDISYHTINKISCEICCKCSSGXDVHATTMGILGMLSSYSWDXXVVIALAAFAANLGEXFGLVAQLYATNRLAKSVAKLKHIHETLEQVDDLGPKFQTVNNLFKAMLDVTNNI

SEQ ID NO: 207479 - protein, 85 aa, Glycine max
  Clone ID: PAT_MRT3847_29379C.1.pep
PNFSISVSVSSSLKEIMVSNVGEAMKRNRHMQPYAQNQQQQLQKQLQCNTRKAGKFITSSSNLEEDGASSASLLLTCISCSPSDA

SEQ ID NO: 207480 - protein, 47 aa, Glycine max
  unsure (1)..(47): unsure at all Xaa locations
  Clone ID: PAT_MRT3847_2937C.1.pep
LTPTLPENIXFSILRSQIHSLMHASLLISSRAYIXSNLYHYYSILTI

SEQ ID NO: 207481 - protein, 66 aa, Glycine max
  Clone ID: PAT_MRT3847_29380C.1.pep
VESKNNYCEMISTHTHTHTHTHTLTMMIILPHLQSTPTCSAGVTTLSCTVTSVPRGVAIEFPDSSS

SEQ ID NO: 207482 - protein, 58 aa, Glycine max
  Clone ID: PAT_MRT3847_29381C.1.pep
KYTVKKCDQMDMGFGQKMLYMETTPNFYFSIITPHIFNTKYFCNCLSYSIPSVVFSQP

SEQ ID NO: 207483 - protein, 76 aa, Glycine max
  Clone ID: PAT_MRT3847_29382C.1.pep
WVCGPRVGTIYLVNTLPGKRITLEVESFDQFANVRPRFRISKGFRRIIRLLSSFDSRSKTNPLFRFPHFRGQPIFP

SEQ ID NO: 207484 - protein, 101 aa, Glycine max
  unsure (1)..(101): unsure at all Xaa locations
  Clone ID: PAT_MRT3847_29383C.1.pep
MEEQTVPLKLRVPLTLSISISNVASASCIGPLCAISSTSCASGVPPSSAGPTKRRGTIEETDYLMGPLKSVHRRRADPRVSMGSVLMEILNELKNIXXSEH

SEQ ID NO: 207485 - protein, 54 aa, Glycine max
  Clone ID: PAT_MRT3847_29384C.1.pep
RVHCAYTSLDEAFQIWKDAFHVQQYSQIYFARLHSMRTLLYYLVTHWKPNFSVC

SEQ ID NO: 207486 - protein, 168 aa, Glycine max
  Clone ID: PAT_MRT3847_29385C.1.pep
MIPSPVPQSLITILLLLLPTTTLSVVLSLPLDPKQVKALQSLNIPSPKDPCSQPTCFLCDTYTPLRHLTCLQLTNCSTSIHHSLCCTALKSLCTLLTLHLLNCPITPSSPTHFPPQLLSLTSINSLPHLSGACLCRLKNLTHLTLSYLTMKPYLMLCHFTGLQTLIIC

SEQ ID NO: 207487 - protein, 97 aa, Glycine max
  Clone ID: PAT_MRT3847_29386C.1.pep
CQCIHSIVHTPHKIQTNLKKIKHHPNPKTTAAQQIHSHLRNPRNKTIHHTCNNNQSFFFWLFFWQFQSRKQTQLKLTCSNGGTFPEIAIKAESEVWC

SEQ ID NO: 207488 - protein, 56 aa, Glycine max
  Clone ID: PAT_MRT3847_29387C.1.pep
DAAVAVLNAHADTSVDRVEQRLRISHFLTPFSPRHLYQINVSQITTTTKPLSFAPA

SEQ ID NO: 207489 - protein, 66 aa, Glycine max
  Clone ID: PAT_MRT3847_29388C.1.pep
MAETETFAFQAEINQLLSLIINTFYSNKDLIKKHSEFISYPISLWVEKTTEKEISDDEDEEEKKDE

SEQ ID NO: 207490 - protein, 89 aa, Glycine max
  unsure (1)..(89): unsure at all Xaa locations
  Clone ID: PAT_MRT3847_2938C.1.pep
EKHGYGVDEFNXTSYDXWVNMGVSPALPETLKNYIMLLSLGFKIVFLPGRYLDKLXASEANLXKAGFHTWLQLILNDPHIITTNALSYK

SEQ ID NO: 207491 - protein, 104 aa, Glycine max
  Clone ID: PAT_MRT3847_29391C.1.pep
TCVNTHLASAKSSRKSLHMQKLYQSKKQRLLLQYFSFPFHHLLDNFDISLLQLLDLLHLDTLPITSSFHPAHKLLTHIPLRSEKKILTILNMSNIAKSPQIHLI

SEQ ID NO: 207492 - protein, 62 aa, Glycine max
  Clone ID: PAT_MRT3847_29392C.1.pep
MSPRTQRKKKENMHIQNFSSFITKSIKGDTHKENGAKRYQYKLPLPRCRSAEVVVNSCGLWS

SEQ ID NO: 207493 - protein, 94 aa, Glycine max
  Clone ID: PAT_MRT3847_29393C.1.pep
LSNMTHLSHRKSVTPPMGRGYPLYQKGDQLSRQATFAHKDAVETSGSENVTMIPSLPDQRCFIFSVMFYKFPPLSRVSVCDPSPAKTFYMIQQK

SEQ ID NO: 207494 - protein, 95 aa, Glycine max
  Clone ID: PAT_MRT3847_29394C.1.pep
PFPNRLFFVNQINGPLPSSKFSHHWRLRPATTPPVVRVNPLLLFYCSLIQPSPLKKIFASFWWYVQNKKMVVCRELPLIFKKKKQKKKKIPGMIT

SEQ ID NO: 207495 - protein, 65 aa, Glycine max
  Clone ID: PAT_MRT3847_29395C.1.pep
LSRLNRVYEIWDCVQFLRIKKTIFHIKEFAKHVTSQPKNSEFTFFISLLKFQIHILMSNLFNPAI

SEQ ID NO: 207496 - protein, 62 aa, Glycine max
  Clone ID: PAT_MRT3847_29396C.1.pep
IGHAGQQKSVFFFLFKKKKPRMLDTNTPYYYSLRGLYIPLQETGLPTNVNHYTFGVELKKNR

SEQ ID NO: 207497 - protein, 139 aa, Glycine max
  unsure (1)..(139): unsure at all Xaa locations
  Clone ID: PAT_MRT3847_29397C.1.pep
VRFVSGKTLNYVIIGAGSHSXEDFPDKEDQERPKKIDARLRHRIDPHYTEVQAHMETNLTKQSLDDVETPKGSMLELKISESKIALAKNTVGGTILRSDLLALYLTXGNLRASVDLHRTHRIKGRIDTVATAGIPEIQV

SEQ ID NO: 207498 - protein, 82 aa, Glycine max
  unsure (1)..(82): unsure at all Xaa locations
  Clone ID: PAT_MRT3847_29398C.1.pep
MTFLRAQVPSTXPSPSTPLSSPSSIQSFPPPIPSSPFFTHSPPPAFTPPTTPLIFPTPSYPPSXSSPPSSSPPTSPSPSSSP

SEQ ID NO: 207499 - protein, 376 aa, Glycine max
  Clone ID: PAT_MRT3847_29399C.1.pep
RPTHLFFSLSLSLSKHPQHNNRILFFFVLLNKTEKKKVVNFPVAFLFHTISISMARPNQEAVETFVSITGLPEAVALQKLEEHGGNLNEAVNAHFTEGDRNLTTGSHNSSAVFPQDDFMDIDDEHDAEIPRRIPPLLPASAANVNPFSLLDPTIGRGIFGTRFDSTRPAPFVTHPREVREIPIEVKDGRIAQSTPQAGHVPSIEDVTGTVDAHGPDIHGTVIIDDEDDEDIPPAQIAHQDEQTQKILADTSLNSSVRPSAPESENLPDYSNDIEEEMIRAAIEASKQEAEENYRNHKLDRQIDLSESGSQPRQSYLEDPELAHAVSLSLKTAEQEKALRVHGGDSGSPTAGPSKSSEAGNTDYHQKHPQTMRMLLI

SEQ ID NO: 207500 - protein, 43 aa, Glycine max
  Clone ID: PAT_MRT3847_2939C.1.pep
WLCSKIFTQQIVLFLKDKVLIVFTSSFTDMLMFLSLLMLTIII

SEQ ID NO: 207501 - protein, 88 aa, Glycine max
  Clone ID: PAT_MRT3847_293C.1.pep
GLTPPPPTFFAGGHGRSPFPFMLVKFGGGRSRLAFYLFARGVGGGFSIPFKFGSPGFFPPLRFGTSPRLLFFRFPIKRLLFPLPAVVN

SEQ ID NO: 207502 - protein, 40 aa, Glycine max
  Clone ID: PAT_MRT3847_29400C.1.pep
VNSSMLLACVNLNRNALDPEDAEEVYDDYDVNNVSDNLSH

SEQ ID NO: 207503 - protein, 279 aa, Glycine max
  Clone ID: PAT_MRT3847_29401C.1.pep
RTPKIAFMFLTKGPLPMAPLWEKFFRGHEGLYSIYVHSLPSYNADFSPSSVWYSSPRPSQVAEWGMMSMCDAERRLLANALLDISNEWFILLSESCIPLQNFSIVYLYIARSRYSFMYGCEKTTEWGRGRYDGNMAPEIDMSDWRKGSQWFEINRELALRIVEDNTYYPKLKEFCKPHKCYVDEHYFQTMLTINTPHLLANRSLTYVDWSRGGAHPATFGKDDIKEEFFKKILQDQTCLYNNQPSSLCFLFARKFAPNALGPLLDIAPKALGIGKRHSF

SEQ ID NO: 207504 - protein, 121 aa, Glycine max
  unsure (1)..(121): unsure at all Xaa locations
  Clone ID: PAT_MRT3847_29402C.1.pep
ITHIHTKKRNRLDHKKMHDLXYIKCNQQLXSRYNIRDEIDLITLNEIDECNEWLVGQVDDDNDLVHADDPHLIKMYTGRKTSSKKRKQPSSGGIIIGAAQASNKGPAASSISRGKGKAHDV

SEQ ID NO: 207505 - protein, 96 aa, Glycine max
  Clone ID: PAT_MRT3847_29403C.1.pep
LFFFFFFFFFFFFFLFFFFIFLFFLFFFFFFKKKPATLFKGASTKSGLKIKPMPRTWGFEKINQENGLARKHQIGGHQMGKGPTLGFPLIKSHLQI

SEQ ID NO: 207506 - protein, 37 aa, Glycine max
  Clone ID: PAT_MRT3847_29404C.1.pep
FPKPTYLFLARQKFYAFPTRLFSIELPTEVSCKMWQS

SEQ ID NO: 207507 - protein, 211 aa, Glycine max
  Clone ID: PAT_MRT3847_29405C.1.pep
MDQLGIIQPSSSTKVERRLVEKNRRNQMKNLYNKLNSLLPSYNPKEALPLPDQVDEAINYIKSLEAKVKMAQEKKENLQGIRKRSRGCFSNNSANFAATSGFPKSPQLEIHEVGSSLQVVLTCGLDHQFIFYEIIQILHEENIEVRSVNSSLAGDSVLHVVHAEIPQSFLQFGATKVSERLKRFVNGSCSDVETQPELWDFEIGTDDMWGF

SEQ ID NO: 207508 - protein, 74 aa, Glycine max
  Clone ID: PAT_MRT3847_29406C.1.pep
RIKIHNDQEAEPAEFEESVGQALTDLTNTNNELNSDMKDLYIDSIEHMDGIGNHQDVVIHVRYRLREGLPKIHV

SEQ ID NO: 207509 - protein, 49 aa, Glycine max
  Clone ID: PAT_MRT3847_29407C.1.pep
LQILTTRDRCIMSTATPFNNPNSDTRDHDKTDVAHIHTIKDQENALKVS

SEQ ID NO: 207510 - protein, 51 aa, Glycine max
  Clone ID: PAT_MRT3847_29408C.1.pep
TKPTNPTLIHYTYLNFLVLHPSTLFHSATFFFSINHPGIILWQMLISLKTL

SEQ ID NO: 207511 - protein, 67 aa, Glycine max
  Clone ID: PAT_MRT3847_29409C.1.pep
LSELMRCIRALPLIGHMVSITLQALGVFKHDDVYWAVRQAPLKITCHCQSPNYVDMPAITSARALYP

SEQ ID NO: 207512 - protein, 38 aa, Glycine max
  Clone ID: PAT_MRT3847_2940C.1.pep
WTFLSSQFLRHQLNISGKIVRSRRLDCSCPKSEKELNY

SEQ ID NO: 207513 - protein, 63 aa, Glycine max
  Clone ID: PAT_MRT3847_29410C.1.pep
LNRLVQHQAVVNHCVQVMHLSYLLNRRKLLVRTHQPVHFLRNQFLDIRAFRYRHNRTRRLTRR

SEQ ID NO: 207514 - protein, 94 aa, Glycine max
  unsure (1)..(94): unsure at all Xaa locations
  Clone ID: PAT_MRT3847_29411C.1.pep
TRPPTRPPTRPRTRGQFRKFLPHYIRWHLYTLLIYIFPFFFTAEIKYKRNLSNINISGXFYDGRYKFWSKHDKNSSLXNKEKIELILNSKAFPC

SEQ ID NO: 207515 - protein, 42 aa, Glycine max
  Clone ID: PAT_MRT3847_29412C.1.pep
CSGCESDDQSLPCILVSCLAPLPFRRRSIHYVTFHWVWERSS

SEQ ID NO: 207516 - protein, 91 aa, Glycine max
  Clone ID: PAT_MRT3847_29413C.1.pep
LVDSIGKLPRKLWLKCSIPEKNEKRREQEKAHWYTCACICIKNILSLPCYLRKSTNQEKHNQSQQMETNGQLIVASIVNNIIEAMHVFENE

SEQ ID NO: 207517 - protein, 127 aa, Glycine max
  Clone ID: PAT_MRT3847_29414C.1.pep
NQKTFFSFFFKKKKRGGGLETSLTNQLKGPLRGEKIPGVQEPYKRISQGLRPHITPGKKDYHSWGGGLFFLKAGGRGYIPPTPTKGVGKGGIALFGEGILCNPQFFLRLNFFKVKGGGGFFPSFASP

SEQ ID NO: 207518 - protein, 85 aa, Glycine max
  Clone ID: PAT_MRT3847_29415C.1.pep
SQPQNNCFVIPSPSVGASHSTPDQHVILANIGGFQTGVHDFSAWRECRSEMLVIQTMDGQNLQGQGLSHSLGIHMTLRSSNAFYP

SEQ ID NO: 207519 - protein, 285 aa, Glycine max
  Clone ID: PAT_MRT3847_29416C.1.pep
MRKSNHLIGLLNFLTFLLSIPILGGGIWLSSRANNTDCLKFLQWPLIIIGVSIMVVSLAGFAGACYRNTFLMRLYLVVMFLVIAVLIGFIIFAYVVTDKGSGRRVMNRAYLEYYLEDYSGWLEERVASDSYWGKIVSCVRDSKACGRMGITINGMPETPDMFYIRHLTPIQSGCCKPPTDCGYVYQNETVWIPGSGLMGANPDCTRWSNDQEQLCYACDSCKAGVLASLKKSWRKVSVINIVVMIILVIVYIIAYAAYRNNRKMDNDEPYGEARMTKAQPSAFHL

SEQ ID NO: 207520 - protein, 39 aa, Glycine max
  Clone ID: PAT_MRT3847_29417C.1.pep
LRYKEKRQNRLFSKKIRYQVRKLNADKRPRIRGSFVKRL

SEQ ID NO: 207521 - protein, 49 aa, Glycine max
  Clone ID: PAT_MRT3847_29418C.1.pep
QYTFPSLFQYVVIRKCVLTFSDNKMLQFFPQVCGFLMKFLESLMHFCIF

SEQ ID NO: 207522 - protein, 83 aa, Glycine max
  unsure (1)..(83): unsure at all Xaa locations
  Clone ID: PAT_MRT3847_29419C.1.pep
QTAPXXXGKRYFNLGRGQKKFLLKSLQKEFVTLSTTTLRTSTTNIISWMPITRCYYILILHAIITTKFVLKLMHGTFQSSCSI

SEQ ID NO: 207523 - protein, 77 aa, Glycine max
  Clone ID: PAT_MRT3847_2941C.1.pep
VSVLRPNHFGTFNNNTNMNIGSSSNNPQIHCSSLNNATGMPFRSYALNISLCYPSTWWSFSVSTVSEFTTIQQYSFF

SEQ ID NO: 207524 - protein, 148 aa, Glycine max
  unsure (1)..(148): unsure at all Xaa locations
  Clone ID: PAT_MRT3847_29420C.1.pep
DPWGRWEGFITVLAGYRTIKRETNSNECGPRTYCDLNPQNPVVXNRGRGKLSVLQGTLRSDKRMPFSIGGGAGAKNAIVMNMPNAXSFRWGQSFVGDLRSLKLAKXRIPYIKCTXRFLIALGNLADDTXINFEAFSHKLVHFGEIQEK

SEQ ID NO: 207525 - protein, 103 aa, Glycine max
  unsure (1)..(103): unsure at all Xaa locations
  Clone ID: PAT_MRT3847_29421C.1.pep
SKLGLKTTIGITFARXLLEPPVLGIGNVALSDXLISLVENDAMFKFVLLLQYTTPSAILLGAIASLRGYAVSEASALLFWQHVFALFSFSLYIVIYFRIIMYV

SEQ ID NO: 207526 - protein, 157 aa, Glycine max
  Clone ID: PAT_MRT3847_29422C.1.pep
AQDTFLFTSESVNDGYPDKLCDQISDAALDACLVHDPDIKVACETCTWTNMVMVVRQITIDVNDDSELIVPDTCREIGFICDDVGLDADRCYAVGQQLIYTGPDISQGVLCHITCHAGVVCAGDQGHMCVYCTRETSEYMYFSLVLATRLWARLTEL

SEQ ID NO: 207527 - protein, 243 aa, Glycine max
  Clone ID: PAT_MRT3847_29423C.1.pep
SGVKKTYLPHFICLFNIATMPGRRCINRNPTSAFIEPIHEIQFEQVLGPINRYTNYPNTIGGFPMQTQLQNTQQTLQQGLSGFHHNLYGIRESSLRNVRIGSPVQNQFPNTSQTLHGGVLGIHHNSYEIGESSSSRNVRMRMTIEEPQLSSSLYPTGQVSRNPSPPWAGRNTTYDPSYDTRGLPVDPHLRCLTYMNCNQPWAIRNTLYDPSYALRGLASDPHLRCLSLENAANHGNGDRLGSN

SEQ ID NO: 207528 - protein, 64 aa, Glycine max
  Clone ID: PAT_MRT3847_29424C.1.pep
RGPPCIMQMIREPTTKYANLMPPRWRTTTTHLTANQERLCSQERRPSPIVESRLAVIHFNQDRR

SEQ ID NO: 207529 - protein, 63 aa, Glycine max
  Clone ID: PAT_MRT3847_29425C.1.pep
HASELSSTYHESVPLCYYTLRLDALQYVEKRSQSLQIDHVHTRTLKEAAKKVCSIYNQRSGTA

SEQ ID NO: 207530 - protein, 340 aa, Glycine max
  Clone ID: PAT_MRT3847_29426C.1.pep
MGRAPCCDKANVKRGPWSPEEDSKLKDYIEKHGTGGNWIALPQKAGLKRCGKSCRLRWLNYLRPNIKHGEFSDEEDRIICSLYANIGSRWSIIAAQLPGRTDNDIKNYWNTKLKRKLMGLLPSSHQRIAPYQQFSSQNPSSFPSHSSLSSSQYRDYYYNSSHHYYIPAPTSSFTCLEPISAPSSNYTNTTTTSNSLSFYQHQEPLVSVSPRQYYPITDSSMLVFGSETSCSSSDGSCSQVSLGREIKQEDMGFQNFMFGDHQNMNKFMNINHDGGEEYVNQWTQRPNGYIFQTQQTALDYDLEVIKNLICSNSSSNSNNGYLSVDENKTEEKGVYYNYCN

SEQ ID NO: 207531 - protein, 86 aa, Glycine max
  Clone ID: PAT_MRT3847_29427C.1.pep
EEPRKAKEGGVKTLTLPGHCPIQTGWAPLGWMNSTQRGRGRNHSLLPSTQTLTLSTEAERGQEEEGPQPLTSPQGARLPPDCPRQV

SEQ ID NO: 207532 - protein, 110 aa, Glycine max
  unsure (1)..(110): unsure at all Xaa locations
  Clone ID: PAT_MRT3847_29428C.1.pep
LAFTRGMVKPSLTQCTYRRVKISLTPIGGGVAAXTAIPTILPDAATSMARHGEGDLAXDLYKMTTTXIHCTGSLVIPIRTSATTTLNAEGWPHLPMHLLPISEKVEQLFS

SEQ ID NO: 207533 - protein, 326 aa, Glycine max
  Clone ID: PAT_MRT3847_29429C.1.pep
MGRAPCCDKASVKRGPWSPEEDTKLKEYIEKHGTGGNWIALPQKAGLKRCGKSCRLRWLNYLRPNIKHGDFSDEEDRIICSLYVNIGSRWSIIAAQLPGRTDNDIKNYWNTKLKKKLMGLLPLSHHRKQPSFPSSFTLQNPPLSPSAHQLYGEYCTYTPTTTTSFTSNIEPPFSLPSSNYASTSDITTSVSHPFYQNQDSMQCYYPIMRDNSSNNNNNMLMFGSEGSCSTSSDGSCTQGREIIKQEERIGYHSYNNDYNFMLNHSNNINDGEKSCFGEWFSQTLLTPLDYDLEDIKQLISSSSSTTIFNNVDENKTEEKAMYYYYY

SEQ ID NO: 207534 - protein, 131 aa, Glycine max
  unsure (1)..(131): unsure at all Xaa locations
  Clone ID: PAT_MRT3847_2942C.1.pep
HYDRNLLELDRHGSDSRTTPLKLLCGLSCPYAXDTIALPGPDDVLSARHEXGXPLCHSPCECERTRMSHSXPQCRTAFTXSTHMGLKVEGLDVHEHHAGELDNEITSLLGHIFMEXMLWKEDADLSYYIAH

SEQ ID NO: 207535 - protein, 78 aa, Glycine max
  Clone ID: PAT_MRT3847_29430C.1.pep
RVTRGLSLFLTYTHTISLFYVSFSFQLGNISTRRVVVASGGVGVVLRSIKRIDIYATFRRLCLVPNWRKKKVHSSLGI

SEQ ID NO: 207536 - protein, 49 aa, Glycine max
  Clone ID: PAT_MRT3847_29431C.1.pep
LAVGVAESRRFLRDLLLLIENEGCSAAALNLLWTNSSLSLIYSFFFDRT

SEQ ID NO: 207537 - protein, 119 aa, Glycine max
  unsure (1)..(119): unsure at all Xaa locations
  Clone ID: PAT_MRT3847_29432C.1.pep
MSENMYPPRLLVFDHTHLKMAWVKHQIRQKDGYLSYSPPLLSSSFSSPPYPLGATFHKDSSLPSSTPPPPPPSSGTRISPAVLFIIXVLAGLFFISGLLHLLGRFLIKHPSSASAQSNT

SEQ ID NO: 207538 - protein, 69 aa, Glycine max
  Clone ID: PAT_MRT3847_29433C.1.pep
KTWGHWLVKKKSVFGLIFGKLQGTGDHEKKPWLTIQGKWLQSNNFRVESMEPPSRRGAFSERGSKGGTF

SEQ ID NO: 207539 - protein, 40 aa, Glycine max
  Clone ID: PAT_MRT3847_29434C.1.pep
GVFMCTFNFSKLPYVHCYSVPITVSIHEALHFSSSRLRFE

SEQ ID NO: 207540 - protein, 210 aa, Glycine max
  unsure (1)..(210): unsure at all Xaa locations
  Clone ID: PAT_MRT3847_29435C.1.pep
MPEAHSHYLCNKPNGKHDGATNTSSIIEHNNKKALKYIEDVTSNADEIQKRVLAEILSSSAHAEYLQRHGLDGRTDRETFKKIMPVVTYEDLKPDIDRIANGDTSPILCSKPISEFLTSSGTSGGERKLMPTIEEELERRSLLYSLLMPVMEQFVPGLDXGKGMYFLFIKSEAKTPGGLLARXVLTSYYRSSHFKNKHIVXPLTNYTSPI

SEQ ID NO: 207541 - protein, 110 aa, Glycine max
  unsure (1)..(110): unsure at all Xaa locations
  Clone ID: PAT_MRT3847_29436C.1.pep
IVQGCLRSPIPLDIXNKILMINLKDCISLHSLPRSIYKLKSLKTLILSGCLKIDKLEEDLEQMESLMTLIADNTAITKVPFSIVTSKSIGYISMCGYEXFSCDVFPSIIL

SEQ ID NO: 207542 - protein, 783 aa, Glycine max
  unsure (1)..(783): unsure at all Xaa locations
  Clone ID: PAT_MRT3847_29437C.1.pep
MWDGTSSKNHGTYPNPQRDVVARARQGVPSKNFKASSPFPWFHLQHLLSLVSYPSYIFGFTPVHSTVLLPHHSVPISSSPRKMNGAGRQGLRSGAAGVHHQRQYSDNFLDSSSNGNRWLQSAGLQHLQSSSNQLPPLQDYNLYGGAQGGRMYRNAPRSFNGGNEYYMEPSTPPGGYRASMQKKNGEDLSGXFSPGLLDLQSFDTELLPPELPVSNAYDANSLYQPGRGRSFDDSETYMLSKQTGRARAPENILKSLPADKEKSNSVAKIKVVVRKRPMNKKELAKNEEDIIETYSNSLTVHETKLKVDLTQYVEKHEFVFDAVLNEEVTNDEVYRETVEPIVPIIFQRTKATCFAYGQTGSGKTYTMKPLPLKASRDILRLMHHTYRNQGFQLFVSFFEIYGGKLFDLLNDRKKLCMREDGKQQVCIVGLQEYRVSDVETIKELIEQGNATRSTGTTGANEESSRSHAILQLAIKRSVDGNVSKPPRVVGKLSFIDLAGSERGADTTDNDKQTRIEGAEINKSLLALKECIRALDNDQGHIPFRGSKLTEVLRDSFVGNSRTVMISCISPSTGSCEHTLNTLRYADRVKSLSKGNNSKKDVLSSNFNLKESSTVPLSSVTGSAYEDRVTDGWPDENEGDDFSPSEEYYEQVKPPLKKNGKMESYATTDDKLKKPSGQIKWKDLPKVEPQTTHAEDDLNALLQEEEDLVNAHRTQVEETMNIVREEMNLLVEADQPGNQLDDYITRLNAILSQKAAGILQLQTRLAHFQKRLKEHNVLVSSTGY

SEQ ID NO: 207543 - protein, 61 aa, Glycine max
  Clone ID: PAT_MRT3847_29438C.1.pep
ATKKNFTATSIRYIQYYSPYKTQLVYFPLITTMINYNNTYFFKKTNSLMIKFNTNQLNSKH

SEQ ID NO: 207544 - protein, 329 aa, Glycine max
  Clone ID: PAT_MRT3847_29439C.1.pep
MSRRTMSMMSSKVDPFQHLKLVPNSDGTITRQRDDPPISPSLNPTLPVLTQDATINRSNNTFARIFLPREALDSSPSNNLPLVVYFHGGGFVLFSAASDFFHDACVNLADDTNSIVVSVEYRLAPEHRLPAAYEDAVEALHWIKAQSNDWLRNHADFSNCYLMGSSAGANIAYHVGLRVAAELNVYGDNYLAPLKIRGLILSQPFFGGTKRVPSEVRLVDDPVLPPHVCDLLWEGSLPLGVDRDPEYCNPTAGDGPVILDRVRQLAWRVLVSGCHGDPLLDHQMALARLIEEKGVAVVTRFDQGGCHGNEVRARKHQNQLYNLVKDFIA

SEQ ID NO: 207545 - protein, 67 aa, Glycine max
  Clone ID: PAT_MRT3847_2943C.1.pep
GSRGFIYSSKPMASKGGVLSGTASSNVWRLPLLQYATMAIHHPLCRPVEIMLGPELNQALYCHLWSG

SEQ ID NO: 207546 - protein, 75 aa, Glycine max
  Clone ID: PAT_MRT3847_29440C.1.pep
MVEPSREKMYVDHAFSISDEDIMMDAAYTVSNKAPMKEIALAVSLLVFGTLAIIIGSLMAYNHVGGDTTHEFGEL

SEQ ID NO: 207547 - protein, 89 aa, Glycine max
  Clone ID: PAT_MRT3847_29441C.1.pep
PTRPSFHDENGVPPNVNETEIVHEENISNAGKGSWFRKHIYEVTYVEDNTVEVNWEASKNHADEEINTVSITQVDPSGIKRNSEIDGDS

SEQ ID NO: 207548 - protein, 239 aa, Glycine max
  unsure (1)..(239): unsure at all Xaa locations
  Clone ID: PAT_MRT3847_29442C.1.pep
METIGSVDDLLDFSSDIGEEDDYDDKPRKACPSLNSKCAGPSLFNPLVQEFAEEELEWLSNKDAFPSVETFVDLSSIQPGTTKNQKSAPVLECSTGSSNSNNSTNSISLLNSCDHLKVPVRARSKSRSRHRPGLAENSSQQVWWRQPSNGTSKADEGMKISSIGRKCQHCGAEKTPQWRAGPSGPKTXCNACXVRFKSGRLVPEYRXCSSPTFHSDLHSNSXRRSRDEEAEQMGMDKCK

SEQ ID NO: 207549 - protein, 171 aa, Glycine max
  Clone ID: PAT_MRT3847_29443C.1.pep
KTLPTMVAGKVFSVLPLLGLALGASIRLDARQSDGSSNSNSTAGPYGLSNADCSNVTLSVPINITLTNFTGVDNTYSNQSYITQQVIEFTQAQANWTSEHVSNTTFALNRTFSIAGTYCKPRQGGDKDVLINLVHGIGFDSSYWDFAFSPEYSVVKVAASYGYATFRYDRI

SEQ ID NO: 207550 - protein, 56 aa, Glycine max
  Clone ID: PAT_MRT3847_29444C.1.pep
NKFLKTTFLELLYFLETKTVFENKKRINVFSLFPLDVPTSNRYFIFYGCKYWIIEI

SEQ ID NO: 207551 - protein, 109 aa, Glycine max
  Clone ID: PAT_MRT3847_29445C.1.pep
RTSTVRVSCVEDADDRYAYQTAVSIGGHVFKGILYDYGPENNNHNNSNNNSNNNYTAGETSASVVAAAQPLNLAAISSAALVDTSSLYSAPANAFMAGSGTQFFPHTRS

SEQ ID NO: 207552 - protein, 131 aa, Glycine max
  unsure (1)..(131): unsure at all Xaa locations
  Clone ID: PAT_MRT3847_29446C.1.pep
SLGSGVPPGGVPRVMEDLYPGPDGFFNPSGFAAFCRSGPAGXGGAPRVPDAFPLFGQGKNGLISPPGVCPGVNPPGKKCSVGECPPLVQSVGFAGGGNVNFPGFQRVLGPPPGNACHGEEKTDLAPWVWIL

SEQ ID NO: 207553 - protein, 527 aa, Glycine max
  unsure (1)..(527): unsure at all Xaa locations
  Clone ID: PAT_MRT3847_29447C.1.pep
MEDAKKLYESLSNATAQDPIILKDKDLRSVCETLFDQLNSTFRRFFSALPLRHHDPHAWSLPPPYSRLWPIVEDLSLVLRCCLLLLTLPHSDQKFLLLKCRSLLRVLNSFLSLDVAERRGLRFRNFLSDVDLELPSCPSYLCALLEVFADELLRNQSLRRYLMKVDSVSSTIEKLFVCHFNQGDIASVLEVITTHFIMSVSNEKAFEDFTSGFFFTXNKDFRFPKLSLAPSMMLLLDPVVFSAPKMFQAHTFSMVSEAPGSGLSAEILAPDMNCDLTALQKXIIFDSMHVSSLQIDGFCVELKCSYNSYLLERDQLTFKAYIQQGTRNKLNQVLSKSDNSWDSYQCKMSSKTKADLLADYIAFMKDRQYIFVDSCWDATTLILDCIIHQAFSQDATGDAVYHIKENTSAQDICLLAAILKLMSVSLLQAIKYLSNGSDSDCLKTMGSASVREKYDFLISIIDLFQQFKFCLPIQTLFNNVMKTQKSNYKVSKSMLVHFIGLLSISFGNGLDLLAKGCILVLMALMCL

SEQ ID NO: 207554 - protein, 93 aa, Glycine max
  unsure (1)..(93): unsure at all Xaa locations
  Clone ID: PAT_MRT3847_29448C.1.pep
HYPSQTGRGLRHAKWXLASHRRHLRRRRLLHPHVTLLHKNTMSTLHRSTIINNNNLLLLXXXXXXXXXLHHYQHSHIPXPQLQTSEYPXSTXQ

SEQ ID NO: 207555 - protein, 51 aa, Glycine max
  Clone ID: PAT_MRT3847_29449C.1.pep
ETFFFYYFFLYALVASSSSSYYSSPAFCFNIAMNFSLSSGDIPAVEQSPTP

SEQ ID NO: 207556 - protein, 83 aa, Glycine max
  unsure (1)..(83): unsure at all Xaa locations
  Clone ID: PAT_MRT3847_2944C.1.pep
AIQMSSFVFVSLTILFCVSSLEKSFAFHTTYDIGIXHSRRSCAQSLCWGFILYRSWIASNGQGVVSVVLHGGKVCKQLIPRDG

SEQ ID NO: 207557 - protein, 55 aa, Glycine max
  Clone ID: PAT_MRT3847_29450C.1.pep
FSPFIIFFIYLLYSTKKHTNDDPIKFERCSWAPDAQALRSTSRGQLRVQTRRTPA

SEQ ID NO: 207558 - protein, 208 aa, Glycine max
  Clone ID: PAT_MRT3847_29451C.1.pep
MPWGFHLSKAQPLAMAAAASMCMSFNLATAFKGLSFSSSSSSFFAGSGSYSLRAGPTSVVSLPRRCPLTIENAHKKGAGSTKNGRDSQGKRLGVKIYGDQVAKPGSIIVRQRGTKFHAGKNVGLGKDYTIFSLIDGVVKFEKYGPDRKKVSVYPQEVQPENPNSYRARKREYFRVRRERKKARQEGAILKSQLVLASADDAAITNPVC

SEQ ID NO: 207559 - protein, 90 aa, Glycine max
  unsure (1)..(90): unsure at all Xaa locations
  Clone ID: PAT_MRT3847_29452C.1.pep
PNLLKANYWPLXFFKSDQSSSYDDDDFSKPCWDLCMCTRSMPPQCSCEDIRLNSCHSDCKSCMCTRSQPEQCLCFDTNDFCYKPCKSRDD

SEQ ID NO: 207560 - protein, 46 aa, Glycine max
  Clone ID: PAT_MRT3847_29453C.1.pep
SSVGLKRHRERGRVSCNLECLPRYVLRNTIEITDIFYSSSIRSSLY

SEQ ID NO: 207561 - protein, 104 aa, Glycine max
  Clone ID: PAT_MRT3847_29454C.1.pep
MHAYVSSEFGSRQLRVLKRGLQQVTGHGGLRGLPRVFFRANDIRLGTLVGEDKYGNKYYEDNKQFFGRHRWVIYTTEMNGKNTFWDVDGSMVPPEWHRWLHCMT

SEQ ID NO: 207562 - protein, 697 aa, Glycine max
  unsure (1)..(697): unsure at all Xaa locations
  Clone ID: PAT_MRT3847_29455C.1.pep
MPSLSLSETDTTTPKPISNKKKPKTQSLTDPDLDGVSGKKTKKRKASDLLEPEAMXAAYSYNNGDDETSSDLVEPEPASREDDSQNKKKKKKKVVKSEEKEQPLLVTEPKEEKKDDPNAISNFRISEPLREKLKEKGIESLFPIQAMTFDTVLDGSDLVGRARTGQGKTLAFVLPILESLINGPAKSARKTGYGRTPSVLVLLPTRELACQVHADFEVYGGAMGLSSCCLYGGAPYQGQELKLRRGVDIVIGTPGRVKDHIEKGNIDLSQLKFRVLDEADEMLRMGFVEDVEMILGKVENVNKVQTLLFSATLPDWVKQIALKFLKPDKKTADLVGNTKMKASTNVRHIVLPCTSSARAQLIPDIIRCYSSGGRTIVFTETKECASQLAGILNGAKALHGDIQQSTREVTLSGFRSGKFMTLVATNVAARGLDINDVQLIIQCEPPRDVEAYIHRSGRTGRAGNTGVAVMLYDPKRSNIPRIERESGVKFEHVSAPQPDDIAKAVSGEAAEMIIQVSDSVVPAFKSAAEELLNSSGLPVIELLAKALAKAVGYTDVKQRSLLTSMENYVTLVLETGKPIYTQSYGYSILRRFLPEEKVEAVKGLSLTADGNGVVFDVPAKDLDIYLNGQENASNVCLEVVKTLPQLQQKEPQSRGGRFGDNGGRGGNYRFGGRGGGGRNGRFSNGGGRGGNWGGKRW

SEQ ID NO: 207563 - protein, 70 aa, Glycine max
  unsure (1)..(70): unsure at all Xaa locations
  Clone ID: PAT_MRT3847_29456C.1.pep
GQENASNVCLEVVKTLPXLQQKEPQSRGGRFGDNGGRGGNYRFGGKGGGGRNGRFSNGGGRGGNWGGKKW

SEQ ID NO: 207564 - protein, 141 aa, Glycine max
  unsure (1)..(141): unsure at all Xaa locations
  Clone ID: PAT_MRT3847_29457C.1.pep
MLRVKSAMSVLKLPAVDAVEPVPAVQMAAAEVQATTTVQFNSKPTEEVAAIRIQKAFRGYLARRELRALRGLVRLRSLMEGPVVKRQAISTLRSMQTFAHLQTQIRSRRLXMLEENQELQKQLLQKHAKELESIRVCVSCP

SEQ ID NO: 207565 - protein, 138 aa, Glycine max
  Clone ID: PAT_MRT3847_29458C.1.pep
MSVEILDGATIVGFVEDEEAFNVCVSDLFTQLDTDKDGLLSYAEMLKELQRLRVFETHFGVDVKRDPDELARVYESMFVQFDHDLNGRVDLEEFKEETKQIMLAMANGLGFLPVQMALEHDSLLMKAVQREYCPKIAA

SEQ ID NO: 207566 - protein, 52 aa, Glycine max
  Clone ID: PAT_MRT3847_29459C.1.pep
LSAICEESLTLLEPRICEHCCLPNDTQYQQNFGSRITMDGSLLHFQHSHYKT

SEQ ID NO: 207567 - protein, 166 aa, Glycine max
  unsure (1)..(166): unsure at all Xaa locations
  Clone ID: PAT_MRT3847_2945C.1.pep
LRQRLLGLFGMFFYFVCMLLCSNSPSEIVWRPVLWGFFLQFSMGLAVLRWDWGSNQFDSLSELVLTFLEFTHNGTDFVYGFLSTPPKICGMDPVFAFHTAQIVIYFGAAVALLYHFGIMQFVIKKMGWLVQITLDTTATESLNACACIFLGMSEAPLLIXPYLDKM

SEQ ID NO: 207568 - protein, 165 aa, Glycine max
  Clone ID: PAT_MRT3847_29460C.1.pep
MDDPPLQKIAISGPTLASLIQRFSTSPSSLHGLLFGHVTPLPLTLSDDDDDTSSSATLLATVTGFLTSPSFHDSSGTVLPSSLPTSSPLLGWFSARRRSPLRPSMREFSVTSSLSSLFQFSSQIQNPNSISSESSLFPPCIFLLLASPSSFDHHHSHVHTHDYRA

SEQ ID NO: 207569 - protein, 113 aa, Glycine max
  Clone ID: PAT_MRT3847_29461C.1.pep
MECLRNRSECTLTKLLESSSITQLPLGLGLTFFGFLADVKQRSLLTSMENYVTLVLETGKPIYTQSYGYSILRRFLPEEKVEAVKGLSLTADGNGVVFDVPAKDLDIYLNGQE

SEQ ID NO: 207570 - protein, 138 aa, Glycine max
  Clone ID: PAT_MRT3847_29462C.1.pep
MSVEILDGATIVGFVEDEEVFNVCVSDLFSQLDTDKDGLLSYAEMLKELQRLRVFETHFGVDVKRDPDELARVYESLFVQFDHDLNGRVDLQEFKEETKQIMLAMANGLGSLPVQMALEHDSLLMKAVQREYFPKIAA

SEQ ID NO: 207571 - protein, 52 aa, Glycine max
  Clone ID: PAT_MRT3847_29463C.1.pep
YSKIMAFSSNAWSGVQRRLRCNGTCVGTFPLLRTKASLFKPRLRSQLFTIAS

SEQ ID NO: 207572 - protein, 306 aa, Glycine max
  Clone ID: PAT_MRT3847_29464C.1.pep
RFTVEIQNGRFAGGVRGGGSDGGGAVEDAVKALLEGLGEDVNREGLRKTPLRVAKALREGTRGYRQKVKDIVQGALFPEAGLDNRVGHAGGAGGLVIVRDLDLFSYCESCLLPFPVKCHVGYVPSGERVVGLSKLSRVADVFAKRLQEPQRLADEVCSALHRGIRPAGVAIILQCTHIHFPDIESVFLDSNYQGWVKILVSSGSGVFENKNADVWDDFFGLLKFRGINMDKIHLRGSSDPCWCPSQSSLSAKVSSKIGPVNPVMVTAVASIIESLGEDPLRKELIGTPRGFPKWLMNFQNHNFDEM

SEQ ID NO: 207573 - protein, 49 aa, Glycine max
  Clone ID: PAT_MRT3847_29465C.1.pep
PHIPKHIACSLFLTELLSERIITYTFTYTSTPRHNPVEFPIKLEYKMAI

SEQ ID NO: 207574 - protein, 49 aa, Glycine max
  Clone ID: PAT_MRT3847_29466C.1.pep
NTKIYQKGDGGNSKPLSRKQQKTQKPHHNRPGVEEAKTVPISTPFGRTR

SEQ ID NO: 207575 - protein, 84 aa, Glycine max
  Clone ID: PAT_MRT3847_29467C.1.pep
RRPNTSERGSNDATSRTRNGAFRSFALFILDVTLTLTDHVIHISVSEVLSLSARHDSTWYRYSIERLYSGPLLNGLDWSRYTTD

SEQ ID NO: 207576 - protein, 185 aa, Glycine max
  Clone ID: PAT_MRT3847_29468C.1.pep
MRVVLITLFLFIGAAVAEDAGIDAITPEEGKANNIIEAYESPRFQKFVTHCSSHVTQTCSGNDPLNNQEASRMNSPFGLSFCLFDSMEKCLADHKASLKDPQDNNNLASMSSLPGSIQNQPLLIETVKFRAVLKTCSHVSARYCFTNPNVATSALADCLMPSLTHCVYPSSSILLPPPPPPPPLI

SEQ ID NO: 207577 - protein, 114 aa, Glycine max
  Clone ID: PAT_MRT3847_29469C.1.pep
TKPKDSLFNWGFSCREPWTPLRRPTRTLTVCSHEMQALDTGCPKVRLGRQRALDGILCMRYTRWDPIMTPTIESRGAALKSCPETLQGPKNLHRVCSDKIPAYRSYLKVAPKPV

SEQ ID NO: 207578 - protein, 51 aa, Glycine max
  unsure (1)..(51): unsure at all Xaa locations
  Clone ID: PAT_MRT3847_2946C.1.pep
THSLIISIIPLLFFNQINNNLFSCSPTFSSDPLRGPLLILTTXLLPLTIMA

SEQ ID NO: 207579 - protein, 187 aa, Glycine max
  Clone ID: PAT_MRT3847_29470C.1.pep
MRVVLITLFLFIGAAVAEDAGIDAITPEEGKANNIIEAYESPRFQKFVTHCSSHVTQTCSGNDPLNNQEASRMNSPFGLSFCLFDSMEKCLADHKASLKDPQDNNNLASMSSLPGSIQNQPLLIETVKFRAVLKTCSHVSAQYCFTNPNVATSALADCLMPSLNHCVYPSSSPTPPPPPPPPPPPGI

SEQ ID NO: 207580 - protein, 119 aa, Glycine max
  Clone ID: PAT_MRT3847_29471C.1.pep
YILDLSMNAPVATVFFLNAEHLTELGSAYSLSEESHISSMEPAGRNQAFHTKVSKNASWNKVHRSSNEILSAISNKERDVNKSNQMIPNRDMNSDGLIHTSIPLHNLTSMNANAKPLNL

SEQ ID NO: 207581 - protein, 140 aa, Glycine max
  Clone ID: PAT_MRT3847_29472C.1.pep
GINDSSNNGLSSSDCEESIVSSPVMKHLPPQQHQLPESMIELISPNKPLPEKGKLLQTVMKAGPLLQTLLLAGPLPQWRHPPPPLESFEIPPVTIPSPPQPQLPHQDSFTSNCGRVSRKRVFCEGTDSPTQNKFQRIVLH

SEQ ID NO: 207582 - protein, 48 aa, Glycine max
  Clone ID: PAT_MRT3847_29473C.1.pep
IFGVLVTQGATLKALEECKQTGLAPAQLPVVFERATPSITSSIHDATI

SEQ ID NO: 207583 - protein, 46 aa, Glycine max
  unsure (1)..(46): unsure at all Xaa locations
  Clone ID: PAT_MRT3847_29474C.1.pep
RRAAPKGCMRQSPRISNAIFKPIFQYKLQGNVFNTARRGVAPRXIS

SEQ ID NO: 207584 - protein, 93 aa, Glycine max
  unsure (1)..(93): unsure at all Xaa locations
  Clone ID: PAT_MRT3847_29475C.1.pep
TRSGSKSXXRAXXQSHRSRXXPRAPXGKTXSRSXXRAPRKXISRRPARTXARSPSRSXGRXXXKKSXSRSPXRAXXRSXXPXXARXPSRRTRT

SEQ ID NO: 207585 - protein, 453 aa, Glycine max
  Clone ID: PAT_MRT3847_29476C.1.pep
SGLAVLSTNMSNSRVAVNSKLTVVSSRPVSASGKGKAHALSALDSAMGSHTVHVIYYYKNEEKWFESFDLLDPLRESLSEVLTLPPVRTGRLGKRGVDGGWEVKCNDAGVRVIKASVDATLDQWLKSASGSEENLLVAWDHMPDDPTTWSPFRIQVNRFEGGGVAIGISCSHMVADLTFLASFFKSWTEVHRHLAITHPPFVAPLPNHADDDAESLPRHAKTHSPRNMATATFKFSSSIINRCLSKVHGTCPNATPFDFLAALFWNRIARVKPPKNHHQTHCLCICTDFRNLIKASLPIGYFGNALHFSMLSQKVEDMQLGGIVSAVHSHLKGLSEEEIWSTNNEGNYYCMYGTELTCVCMEHLVFEEENESLLYAAMFGNNEKPIQVSCRVGNVDYGEGLITVMPSEEGGLSRTVMVMLPEEELAELSKDEAILELEPAMLLAGSVSGGPLT

SEQ ID NO: 207586 - protein, 78 aa, Glycine max
  unsure (1)..(78): unsure at all Xaa locations
  Clone ID: PAT_MRT3847_29477C.1.pep
ARDQLHSISTGIRGNYCALMGKNTMMKRSXPTHADKAGDHAYLNLIRLLVXREGWIFTRAYLTEDSEEDAKDKGGAPA

SEQ ID NO: 207587 - protein, 145 aa, Glycine max
  Clone ID: PAT_MRT3847_29478C.1.pep
FTVVLPRWFLAIVFPFFGPINSAVGSLLVSFTVYIIPALAHMLTYRNSLSKQNVAEKPPFFMPSWTAMYVFNAFIIGWVLVVGFGLGGWASMIYLINPIVPFGLFAKCYPCPVTSPPCWSTPPSLPSSGGRRGCPCITMGPSKLV

SEQ ID NO: 207588 - protein, 102 aa, Glycine max
  unsure (1)..(102): unsure at all Xaa locations
  Clone ID: PAT_MRT3847_29479C.1.pep
MVTVGEVRNAQRSHVPDTILGLXTATLSNCVFQVDYHDYYFHITNSEHMTDLELKFMRMSLKYIIEKPYMHLTVEFLVENQIICEYKAPSTYVRQDVVMMEV

SEQ ID NO: 207589 - protein, 146 aa, Glycine max
  Clone ID: PAT_MRT3847_2947C.1.pep
SSRALTRRRNDKNPILLVLDDVWPGSEALVDKFTVQIPYYKILVTSRVAYPRFGTKILLGQLDHNQAVALFAHYAKLNDNSPYMPEEDLLHEIVRRCMGSPLVLKVTAGSLCGQPFEMWEKKKLINKILDPMDFTQTAFADHLEND

SEQ ID NO: 207590 - protein, 266 aa, Glycine max
  Clone ID: PAT_MRT3847_29480C.1.pep
RNHQWVSSKNSIDRKHFVLVHGACHGAWCWYKLKPRLESAGHKVTVLDLAASGANMKKIEDVDTFSQYTEPLLFLLDTIPSNEKVVLVGHSFGGLNIALAMEKFPEKVAVGVFLTAFAPDVEHHPSYVLEKYSERTPLAAWLDTEFAPSGNKTTMFFGPNFLSDKLYQLSPIEDFELAKTLIRPSSLFMEDLTKQKNFSKEGYGSVPRAFIVCTEDLAIPLEYQLFMIQNVGFNEVVEIKGADHMAMLCKPQELFDSLQQIATKYA

SEQ ID NO: 207591 - protein, 40 aa, Glycine max
  Clone ID: PAT_MRT3847_29481C.1.pep
MLKRAGRQETLADKIYRFHWTLLVEGIPLLLSRFELYVMP

SEQ ID NO: 207592 - protein, 76 aa, Glycine max
  Clone ID: PAT_MRT3847_29482C.1.pep
RGLFETDHLKLNIQSQQDPKENLQKAYQEKTLTKAPAKSPAHAYVVGWPPMWTYSTNMTVEHKVRTSDRQHETQQD

SEQ ID NO: 207593 - protein, 54 aa, Glycine max
  Clone ID: PAT_MRT3847_29483C.1.pep
AIIQTQVTQKRTLLASLVLLQHALEKISISLQEPADSDENYPTRPILFKCNMRC

SEQ ID NO: 207594 - protein, 784 aa, Glycine max
  unsure (1)..(784): unsure at all Xaa locations
  Clone ID: PAT_MRT3847_29484C.1.pep
MGASSSKMEDDKALQLCRERKKFVRQALDGRCSLAAAHVSYIQSLKNTGTALRKFTEPEGPIDTSLYTNATPDQPLALTERTLSFSSQSVSHHIDAAEHENFSPTPSPPSSSSKFRANHMKHSTISSKKVEEKPPVPVIRTXVTSSGTTTQNASVMSGTAAFEDSSLPAGTPQWDFFGLFHPIDHQFSFQDGKGMHQDIGNADDIQRLREEEGIPELEDDEEKASSHGREHSRDSEDEFDEEPAAETLVQRFENLNRSNSHVQANFEPATTKPLRGHSASEVELVNGEKGNSAYLSPLKTAPMPALPPPETNKPMEKESRNENKVTPKNFFSSVRDIELLFIKASESGQEVPKMLEANKVHFRPIFQGKENGSLVSSFLKVCFSCGEDPSQVPEEPAQNSVKYLTWHRTVSSRSSSSRNPLGANSIDNAEDHANNLFDNSCMISGSHASTLDRLYAWERKLYDEVKASEIVRKEYDMKCKFLRQLESKGEKTSTVDKTRAKVKDLHSRIIVSIHRINSISKRVAELRDKELQPQLEELIEGLNRMWEVMHECHKLQFQIMSAAYNNSHARITMHSELRRQITSYLENELQFLSSSFTKWIGAQKFYLEAINGWLLKCVRHEEKSSKRKRKPQSGPSHYDLPIYVTCAVWLDKLSDLPVKDVADSIKSLATDTAQFLPHQDKNQGKGAHPHMSTWKADIGGESADGLLRDDISEDWVAGLDQFRRSLIRFLSQLNNLSGCSVKMYTELRQAIQEVKNYQRLNSQSQNGHLNSQSQDGHPNSESQS

SEQ ID NO: 207595 - protein, 76 aa, Glycine max
  Clone ID: PAT_MRT3847_29485C.1.pep
ESQSEDEEAEESWPCSLSVISSSRDSSAEPVVTVLSGSTAIGPRISQIGKNPNPNASISETGRSLYLSLVLAAVCS

SEQ ID NO: 207596 - protein, 61 aa, Glycine max
  Clone ID: PAT_MRT3847_29486C.1.pep
PTRPVQTANRFYMQLPKITQGETTGIFIHHNQNLIDLTIYMIPVLPYKYEAKCTLHKRSDV

SEQ ID NO: 207597 - protein, 258 aa, Glycine max
  unsure (1)..(258): unsure at all Xaa locations
  Clone ID: PAT_MRT3847_29487C.1.pep
DNFLSLRHTLRAPSCNGCRVLPKGCNESCILRPSPQWIDTPEAQAHATVFAAKFFGRADLMSFIYNVPEPQRPASVVXSSLLFEACGRTVNPXVHGAVGLLWTGNWHVCPAAVETVLRGGTVRPMPELLGLDAPTPTADDASEGEVTCTDKWRVRDPNPNFPGTRFPGLRSDKAGSGGKRKRFEELAKLQTATTDLNLRLTPSFLQNAASYGCRQEIRWPGSPSMNSEESGTTTACLESGIGDHYAHDGDRKVLNLFI

SEQ ID NO: 207598 - protein, 160 aa, Glycine max
  Clone ID: PAT_MRT3847_29488C.1.pep
PKPCPGPNDWLQFYNQNLTPSIPDFTVTTAAATTAIVAATSPPQDMPNLSPSGSTHLSPEGRVAKPTRRRSRASRRTPTTLLNTDTTNFRAMVQQFTGSPSAPFASNPSLRTTSFAKPNGLRVPLTPCPEPNHPRHVTTPYNKSSTTTHVSAAKPTVQFV

SEQ ID NO: 207599 - protein, 96 aa, Glycine max
  Clone ID: PAT_MRT3847_29489C.1.pep
IKYYFFLFLFTDSIFYWPPKQPFPETKQIPSTMMPASPPTKKSRCKNTPNPKAHQRANRPIKEQPTPAFQRGTRPPPWDPNQNHTPNLRMHQENQA

SEQ ID NO: 207600 - protein, 67 aa, Glycine max
  unsure (1)..(67): unsure at all Xaa locations
  Clone ID: PAT_MRT3847_2948C.1.pep
MIIEXXRXXXXXXXXSSSNXXXXXEXXXATANDYIXFEDDDIIXNDNCRAREGLDFINILILELDVV

SEQ ID NO: 207601 - protein, 79 aa, Glycine max
  Clone ID: PAT_MRT3847_29490C.1.pep
EKEPFFYPFEWGSMGPPNLNSGGPIHVPNGPTCFFTAFWNNNNFKKTRGRGFDKTKEKLGPFAKPYGCGVLKELEVGPF

SEQ ID NO: 207602 - protein, 42 aa, Glycine max
  Clone ID: PAT_MRT3847_29491C.1.pep
LLTWGLWRSLRAELTHELTNVTNSIITIDHDMKHELLQKSKL

SEQ ID NO: 207603 - protein, 56 aa, Glycine max
  unsure (1)..(56): unsure at all Xaa locations
  Clone ID: PAT_MRT3847_29492C.1.pep
MHYPNTPYTYDTHHVNLXNYAGTYNTHHFYHTITNNYQDLAGPRPYYICTLQQQGQ

SEQ ID NO: 207604 - protein, 78 aa, Glycine max
  Clone ID: PAT_MRT3847_29493C.1.pep
IIDNNHATIARSRQGPETECIIILGGTAHNEWGSDAQGKKCMAGNNRYKRLKTLKEVPKRTNTSRPQHTLHSWRKTTN

SEQ ID NO: 207605 - protein, 291 aa, Glycine max
  Clone ID: PAT_MRT3847_29494C.1.pep
MKGELELPPGFRFHPTDEELVNHYLCRKCAGQPIAVPVIKEVDLYKFDPWQLPEIGFYGEKEWYFFSPRDRKYPNGSRPNRAAGSGYWKATGADKPIGKPKALGIKKALVFYAGKAPKGVKTNWIMHEYRLANVDRSASKKKNNNLRLDDWVLCRIYNKKGKIEKYNTGAAKMNVEMVHSFEHENETKPEIHKLGNEQLYMETSDSVPRLNTDSSSSEHVVSPDVTCEREVQSDPKWNDDLDLKLENAFDFQFNYLDDNNLSVDDYLFGTVQYQMGQLSPLQDMFMYLQKM

SEQ ID NO: 207606 - protein, 147 aa, Glycine max
  unsure (1)..(147): unsure at all Xaa locations
  Clone ID: PAT_MRT3847_29495C.1.pep
GEANIVLKSIKGQILGLKKVEKMFKGAPKKKVPIVNLKGAFRSIDQGGIVPTNVNGMSLRPTVGKLTASGKGPKGGGDFSPVWGFPKRITHFQNSFXAQNEPKFGALFVTNGSKKVVVVESKKKAKGFVSFKVDQKKKKRRDGICIP

SEQ ID NO: 207607 - protein, 295 aa, Glycine max
  Clone ID: PAT_MRT3847_29496C.1.pep
MKGELELPPGFRFHPTDEELVNHYLCRKCAGQPIAVPIIKEVDLYKFDPWQLPEIGYYGEKEWYFFSPRDRKYPNGSRPNRAAGSGYWKATGADKAIGKPKALGIKKALVFYAGKAPKGVKTNWIMHEYRLANVDRSASKKNNNNLRLDDWVLCRIYNKKGKIEKYNTTAPKMNLEMIHSFEHENETKPEIHKLGNEQLLYTETSDSVPRLHTDSSSSEHVVSPDVRCEREVQSDPKWNNDDYDLGLQLENAFDFQFNYLDDNNLSVDDDPFGTVQYQMGQLSPLQDMFMYLQKM

SEQ ID NO: 207608 - protein, 84 aa, Glycine max
  Clone ID: PAT_MRT3847_29497C.1.pep
GSRYLWTPPTFLLCDPNILVIGHRGFCPVRSLMGTDDHHIKPRFIKTYALAGDILPKNAPWLPLIISAIICQARPWEKATNTYS

SEQ ID NO: 207609 - protein, 59 aa, Glycine max
  unsure (1)..(59): unsure at all Xaa locations
  Clone ID: PAT_MRT3847_29498C.1.pep
XSXFXXLSGTNLLRAXMHGXPINHALXKKAKALVDPLNMKLILXXXNXXXWXLXAPHEX

SEQ ID NO: 207610 - protein, 708 aa, Glycine max
  Clone ID: PAT_MRT3847_29499C.1.pep
KAIDLSQNGLMGPIPKGIFQLKNLNKLLLLSNNLSGKIPSEIGNCSSLIRFRANDNNITGSIPSQIGNLNNLNFLDLGNNRISGVIPVEISGCRNLAFLDVHSNFLAGNLPESLSRLNSLQFLDASDNMIEGTLNPTLGELAALSKLVLAKNRISGSIPSQLGSCSKLQLLDLSSNNISGEIPSSIGNIPALEIALNLSLNQLSGEIPLEFSSLTKLGILDISHNVLSGNLQYLAGLQNLVVLNISYNKFTGRIPDTPFFAKLPLSVLAGNPELCFSGNECGGRGKSGRRARMAHVAMVVLLCTAFVLLMAALYVVVAAKRRGDRESDVEVDGKDSNADMAPPWEVTLYQKLDLSISDVAKCLSAGNVIGHGRSGVVYRVDLPATGLAIAVKKFRLSEKFSAAAFSSEIATLARIRHRNIVRLLGWGANRRTKLLFYDYLPNGNLDTLLHEGCTGLIDWETRLRIALGVAEGVAYLHHDCVPAILHRDVKAQNILLGDRYEPCLADFGFARFVEEDHASFSVNPQFAGSYGYIAPEYACMLKITEKSDVYSFGVVLLEIITGKRPVDPSFPDGQQHVIQWVREHLKSKKDPVEVLDSKLQGHPDTQIQEMLQALGIALLCTSNRAEDRPTMKDVAALLREIRHDPPTSAEPHKPKPKPKPYSTEASSYSSSSVTPAQLLLLQSSSHSSSSLAYSSSSAAGYHPPRNQS

SEQ ID NO: 207611 - protein, 90 aa, Glycine max
  Clone ID: PAT_MRT3847_2949C.1.pep
GKKTRARLKPDLLAGQGTLGRRRTFRARINHFRCGTRLEITNQGQFQLVKPGTGRTDEPPTWVRPKRFKKTPERATGKTKRPGRVIGPQE

SEQ ID NO: 207612 - protein, 175 aa, Glycine max
  unsure (1)..(175): unsure at all Xaa locations
  Clone ID: PAT_MRT3847_294C.1.pep
MEHNVFHLTDPFARVEMAXHIISLCSFXPIMESRSLPQKVLDNKFAGTLDPGSGSPVICEDPKLDAIYPEPQKTVSNVEKSVHSINGRCNQDNGMSVQESSPRRHESRGPCCFIVHCVEQIVRGNLAIESMNPIAVNLVRALGHLNDMGVNAVCRPLVPLKYMCPSEAESVNERV

SEQ ID NO: 207613 - protein, 61 aa, Glycine max
  Clone ID: PAT_MRT3847_29500C.1.pep
QSCRNKHLKLTQPLKRSSSSSSTHSNRQSKRHNLSRETKSEVVGVSVDMSANLRVVRDSAR

SEQ ID NO: 207614 - protein, 48 aa, Glycine max
  Clone ID: PAT_MRT3847_29501C.1.pep
QVSYLQKRWLRQISYNAQLDTSMARFRTSCVKHIASLLLPYFSKFMNP

SEQ ID NO: 207615 - protein, 157 aa, Glycine max
  Clone ID: PAT_MRT3847_29502C.1.pep
SGGTPPFGGSINPARPLAPPVFLKSLPPTWVYLVRPLYLRGLARFISGGRFLGFLSAGPPLCPPPLGSPLQKKRPVLLPWVSCPPPIPLCSPFFVSRVSAFCPPPWKKNFFSPPGIILVIIIPPWGRGCWDKKKKPQKKRKKKKKKNKKKNLKKKTP

SEQ ID NO: 207616 - protein, 108 aa, Glycine max
  unsure (1)..(108): unsure at all Xaa locations
  Clone ID: PAT_MRT3847_29503C.1.pep
SFGNHFLERSSGWLPVPALALLSLPRFAEPAFVSAAFFGGLPTLLFDCELFSTFLLFLLSPDPEPPPTLLCLDALSFPLSPFPLFTIFFCSLTPLPXSPPLLLLLLPP

SEQ ID NO: 207617 - protein, 116 aa, Glycine max
  Clone ID: PAT_MRT3847_29504C.1.pep
KKEPHTLRVPRSQRGGEVIEPLVSKQWFVTMEPLAEKALQAVEKGELTIIPERFQKIYNHWLSNIKDWCISRQLWWGHRIPVWYIAGKENEEDYIVAKNAKEALEKLTRIWEGCRN

SEQ ID NO: 207618 - protein, 72 aa, Glycine max
  Clone ID: PAT_MRT3847_29505C.1.pep
VRFIYKIKHRYTWSWSYPLFSLSLTHTQSASSRDRDGGSRGGRSRIGGGVGCQLDHGDGGGGEQFIEIHYRA

SEQ ID NO: 207619 - protein, 145 aa, Glycine max
  Clone ID: PAT_MRT3847_29506C.1.pep
MSPYIICLLLQVKCYIHQLLSGLEHCHSRNVLHRDIKGSNLLIDNEGILKIADFGLASFFDPNRRQPMTNRVVTLWYRPLELLLGATEYGAAIDLWSVGCILRELLAGKPILPGRTEVEQLHKIYKLCGSPSDEYWKKSKMPNAT

SEQ ID NO: 207620 - protein, 70 aa, Glycine max
  Clone ID: PAT_MRT3847_29507C.1.pep
FWFIHSKTNKVLHIRGEKGAPTSSQAPPRQRQNLCHVCSNNQPRGWTSLAQESPILSLSGALRKKWTWDP

SEQ ID NO: 207621 - protein, 40 aa, Glycine max
  Clone ID: PAT_MRT3847_29508C.1.pep
HRRRPKMQLGLESWLFIAASALVKLFSPVHLSTLSRWSSS

SEQ ID NO: 207622 - protein, 114 aa, Glycine max
  Clone ID: PAT_MRT3847_29509C.1.pep
IIPQLFPTFLLSQAKVFFSHSQRSESKLMASETEVLNIISSVFERFERNMSLFLPFIFGFSDATSGRDSDDPDHETAHTESSLRQRIILGEPLDSGNGGDRRRFEPRSSVSRTR

SEQ ID NO: 207623 - protein, 71 aa, Glycine max
  Clone ID: PAT_MRT3847_2950C.1.pep
LGSIHFKIQRRLTCFKRDHLASVNLVIAAAINILLGMTALMIMYKLLLMMEDDHGLAAYPPFYIKFLCYPS

SEQ ID NO: 207624 - protein, 44 aa, Glycine max
  Clone ID: PAT_MRT3847_29510C.1.pep
SKAKCLFKGCLTIVKTNGIVQILKAEIWFSKYQRNGLLIRPRVS

SEQ ID NO: 207625 - protein, 228 aa, Glycine max
  Clone ID: PAT_MRT3847_29511C.1.pep
MKISISNQNQKQDQDEKWVERDFLSLSETRENSSKRSMEEECERETNGGSKMQKLETLSLSLALPDVSLSLTASNALQNGDQLVRPKPSKPSTRTTTTINSCSNDYTAASVSHSYSHPFSHNQSCSLTRNSTENFEYSHSKDDQIWHCGEGTNGSVHSRFKPIGDGVALVNHSFMQGNSQYKATSSENQSVFPSELPARMRFEAKSEGSRGKNSGNLRGVGRCGWWEN

SEQ ID NO: 207626 - protein, 58 aa, Glycine max
  Clone ID: PAT_MRT3847_29512C.1.pep
QFKRSITVYRSRDSWGSKTEFNYKTMIKIIRGGSSKGSKITHTSMGLFNYSFGELNIN

SEQ ID NO: 207627 - protein, 462 aa, Glycine max
  Clone ID: PAT_MRT3847_29513C.1.pep
MLHHRFLLVIYPGQGQINPALQFAKRLTAMGARVTIPITLDMHRRMTNTTAVPGLSLAPFSDGYDDGFHAIRGTDSDYNLYASELKRRASVFVSNLILSSANEGHPFTCLLYTLLVPWAPQVARGLNLPTAMLWIQPATVLDILYHYFHGYADYINDETKENIVLPGLSFSLSPRDIPSFLLTSKPSLLSFVFPLFEEQIKQLDLEANPKVLVNTFEALEEEALRAVDKLNMIPIGPLIPTAFLGGKDPEDTSFGGDLLQVSNGYVEWLDSKEDKSVVYVSFGSYFELSKRQTEEIARALLGCSFPFLWVIRVKEEEKEEEEELCFREELEGKGKLVKWCSQVEVLSHGSVGCFVTHCGWNSTMESLVSGVPMVAFPQWSDQKTNAKLIEDVWKIGVRVENDGDGIVEKEEIRKCVEEVMGSGELRRNAEKWKGLAREAAKEGGPSERNLKAFLDAMAALQF

SEQ ID NO: 207628 - protein, 59 aa, Glycine max
  Clone ID: PAT_MRT3847_29514C.1.pep
GFDLDRCSLTRSFCGVYYRKMLPLSERVSLSFVLMRMALILTITILVSKVKTKRKIHAP

SEQ ID NO: 207629 - protein, 139 aa, Glycine max
  Clone ID: PAT_MRT3847_29515C.1.pep
RVCLCLVAVIVATMWSQNAAQSGCTNTLTSLSPCLNYIMGSSSTPSASCCSQLSSIVQSSPQCLCSVLNGGGSTFGITINQTLALSLPGACEVQTPPVSQCQAGNGPTTPSTAPVGSPSGSSAESPQGSITPSALDFPS

SEQ ID NO: 207630 - protein, 592 aa, Glycine max
  Clone ID: PAT_MRT3847_29516C.1.pep
MLGKLVAICMGGSFPVEQGDLHKRWKLVSKRLRNFHQCVVLPVGSLSSGLCRHRAILFKRLADYIGLPCRIARGCRYCVSDHRSSCLVKIKDDRQLSREYVVDLVGEPGNIHGPDSSINGAYVSSIPSPFQISHLKESQSPYVDVAACSQSLGGAILDCVQEDQQAEETDLQKNNNGSIYPAIDQTRGGAEPPLIPFGLKGNHKECAILGLLNFPPVYEGVSEDLHPATEASLHEYPRLSKDSVVVLEASNKEIEIIVKGSSGVKSNYKQSTVSLSSESKQEQEHVKNKVENQGAGNIPRYLNLEPSLAMDWLEIPWDDLRIKERVGAGSFGTVYRAEWHGSDVAVKVLTVQDFQDDQLKEFLREVAIMKRVRHPNVVLFMGAVTKRPHLSIVTEYLPRGSLFRLIHKPASGEILDPRRRLRMALDVAKGINYLHCLKPPIVHWDLKTPNLLVDRNWTVKVCDFGLSRFKANTFLSSKSVAGTPEWMAPEFLRGEPSNEKSDVYSFGVILWELVTLQQPWNGLSHAQVVGAVAFQNRRLAIPPNISPALASLMESCWADNPADRPSFGSIVESLKKLLKSPADAIKMGGAIT

SEQ ID NO: 207631 - protein, 141 aa, Glycine max
  Clone ID: PAT_MRT3847_29517C.1.pep
LVDRNWTVKVCDFGLSRFKANTFLSSKSVAGTPEWMAPEFLRGEPSNEKSDVYSFGVILWELVTLQQPWNGLSHAQVVGAVAFQNRRLAIPPNISPALASLMESCWADNPADRPSFGSIVESLKKLLKSPADAIKMGGAIT

SEQ ID NO: 207632 - protein, 40 aa, Glycine max
  Clone ID: PAT_MRT3847_29518C.1.pep
DLPHLLLILIISFLTISHSRYLSNSYHRHKPTNNPNFISI

SEQ ID NO: 207633 - protein, 66 aa, Glycine max
  Clone ID: PAT_MRT3847_29519C.1.pep
VLELKHKRRFLLTSEQIELISRFLGQSDNLGFYLTFSMEKELKRFPRTILCYSHMEYLEMELKRRL

SEQ ID NO: 207634 - protein, 39 aa, Glycine max
  unsure (1)..(39): unsure at all Xaa locations
  Clone ID: PAT_MRT3847_2951C.1.pep
XPXTLPYFLDXXSNNQVXLFYXXAGRAGRXGKGLFVXGK

SEQ ID NO: 207635 - protein, 218 aa, Glycine max
  unsure (1)..(218): unsure at all Xaa locations
  Clone ID: PAT_MRT3847_29520C.1.pep
TETTVLKSNYNQSQLKENESMQFDAMMENLRMQESEFEDGKFDAKNSNLPPLDSSFGDLSTVQVIKNEDLEELRELGSGTFGTVYHGKWRGTDVAIKRIKKSCFTGRSSEQERLTVEFWREADILSNLHHPNVVAFYGVVQHGPGGTMATVAEYMVDGSLRHVLLRKDXFGMEYLHSKNIVHFDLKCXHXLVNLKDPLRPICKGCXIXGLSXIKRNTL

SEQ ID NO: 207636 - protein, 52 aa, Glycine max
  Clone ID: PAT_MRT3847_29521C.1.pep
MFCEPGELYTARTCWEWTMRDKGRHRIEHNCPWAGQCRGVRNYRNFIMLSAT

SEQ ID NO: 207637 - protein, 71 aa, Glycine max
  Clone ID: PAT_MRT3847_29522C.1.pep
RCTRNGFTSFPQFNPPVTTLTPPVLTPRPTTRLLPESKGTPLGSSLVSGCHASNLRLHNIGQHLCLSNGSN

SEQ ID NO: 207638 - protein, 363 aa, Glycine max
  Clone ID: PAT_MRT3847_29523C.1.pep
KISKSYPLAVTKVEESGEHTILGTGELYLDSIMKDLRELYSEVEVKVADPVVSFCETVVESSSMKCFAETPNKKNKITMVAEPLERGLAEDIENGVVSTDWSKKKLGDFFQTKYDWDLLAARSIWAFGPDKQGPNILLDDTLPTEVNKDLMNAVKDSIVQGFQWGAREGPLCDEPIRNVKFKIVDAKIATESLHRGSGQIIPTARRVAYSAFLMATPRLMEPRVRIQTPIDCVSAIYTVLSRRRGHVTADVPQPGTPAYIVKAFLPVIESFGFETDLRYHTQGQAFCMSVFDHWAIVPGDPLDKSIVLRPLEPAPIQHLAREFMVKTRRRKGMSEDVSINKFFDEAMMVELAQQAADLHQQMM

SEQ ID NO: 207639 - protein, 64 aa, Glycine max
  Clone ID: PAT_MRT3847_29524C.1.pep
LLIRGGSNEWLCNPYRMRIIRDCGCHVGSSSEWGVLGFFKCSKGRPRYSKRADPDINPGLASMA

SEQ ID NO: 207640 - protein, 66 aa, Glycine max
  Clone ID: PAT_MRT3847_29525C.1.pep
FQLFLCVTKFVLNAICFNQVFEFIMPLIGLRMTSIFLKIFLLNVVLFDSQLILLCMILFFIEVMCF

SEQ ID NO: 207641 - protein, 198 aa, Glycine max
  unsure (1)..(198): unsure at all Xaa locations
  Clone ID: PAT_MRT3847_29526C.1.pep
MAFATSALVCSNLLGRKVLVTSKSSTPLPFLFKRSILKAQNSEQVKSASSRAALAALIXSSASLSVTPEALAADNLTPPPVIEAQQSQPSSPFSQNLLLTAPKPQSSSDLPEGTNWRYSDFLNAVKKGKVERVRFSKDGSALQLTAVDGRRASVIVPNDPDLIDILAMNGVDISVAEGESPNSLFNIVGNLLFPLLAF

SEQ ID NO: 207642 - protein, 694 aa, Glycine max
  Clone ID: PAT_MRT3847_29527C.1.pep
MALGTSALIGRKVLVSPPTPKTTKSSTPLQFLFKRSILNAHNSQAALAALIFSSASLSVTPQALAADNVTPPPVIEAQQSQLNPSNSSSPFSQNLLLTAPKPQASSDLPEGTNWRYSEFLNAVKKGKVERVRFSKDGSALQLTAIDGRRASVIVPNDPDLIDILAMNGVDISVAEGESPNSLFNIIGNLLFPLLAFAGLFFLFRRAQGGPGGPGGLGGPMDFGRNKSKFQEVPETGVSFADVAGADQAKLELQEVVDFLKNPDKYTALGAKIPKGCLLVGPPGTGKTLLARAVAGEAGVPFFSCAASEFVELFVGVGASRVRDLFEKAKGKAPCIVFIDEIDAVGRQRGAGLGGGNDEREQTINQLLTEMDGFSGNSGVIVLAATNRPDVLDSALLRPGRFDRQVTVDRPDVAGRVKILQVHSRGKALAKDVDFEKIARRTPGFTGADLQNLMNEAAILAARRDLKEISKDEISDALERIIAGPEKKNAVVSDEKKKLVAYHEAGHALVGALMPEYDPVAKISIIPRGQAGGLTFFAPSEERLESGLYSRSYLENQMAVALGGRVAEEVIFGQENVTTGASNDFMQVSRVARQMVERFGFSKKIGQVAIGGPGGNPFLGQQMSSQKDYSMATADVVDAEVRELVERAYSRATHIISTHIDILHKLAQLLIEKETVDGEEFMSLFIDGKAELYVA

SEQ ID NO: 207643 - protein, 56 aa, Glycine max
  Clone ID: PAT_MRT3847_29528C.1.pep
GAKVSSTVYRFSTWARSSLGCNLHPKTLTHGKCSMYKNCFLSQKNWLCLGYTILTL

SEQ ID NO: 207644 - protein, 57 aa, Glycine max
  Clone ID: PAT_MRT3847_29529C.1.pep
QIQASILTLLYTSLARFAPPILYFTNHHQIFHFSILTALVYFSPISKLFYFHLQQCT

SEQ ID NO: 207645 - protein, 109 aa, Glycine max
  Clone ID: PAT_MRT3847_2952C.1.pep
TLFWKHHWVAGIGPLEGKALVRLDDIDALATSHICDVPPAVSRDDDVPVWKHSTDGVFKVASDYKQNNRDPLFLAIWKSAMIFVRNLLFEIVSFAHKVWDSGNFFLVEK

SEQ ID NO: 207646 - protein, 349 aa, Glycine max
  Clone ID: PAT_MRT3847_29530C.1.pep
ARARVAPKSRLMIQRELLSLKKKALTLRREGKMNEAEEEMQKGAALERQLMEMDKASNVTISRTNTTDNVPHTAHMEADFSRNLPLEEGSEDDVTDQDMSDPTYLSFLRDLGWNDDNNDLSNSPSKPLKKDDDHFVPVNDASLSKHSTNILVQAPRSKAEIQRELLGLKRKALAFKREGKAEDAEEVLKMAKALEAQMAEMDAAKSKAQVEATVTKDRLFNPPVDEERYMAVSEEDMHDPTLNSMLTNLGWKDDEFESVAIKEDPVKEATATHTVDLSAHDSSSGIPATASRSKGEIQRELLTLKRKALAFMRKGEIEEAEENLKRAKTLEDQMESFGNWNKDSSLNGS

SEQ ID NO: 207647 - protein, 173 aa, Glycine max
  Clone ID: PAT_MRT3847_29531C.1.pep
MGQCYGKTNLAPENDATAATTNTETTAVVAGSGDVPPSPLPAKDTPARASPWPSPFPHGGGGVTPSPARGTPRRFFRRPFPPPSPAKHIRASLAKRLGHAKAAPKEGPIPEEEAAAAAAAAEQTLDKSFGYGKNFGAKFEIGKEVGRGHFGHTCYAKGKKGELKDQAVAIKFI

SEQ ID NO: 207648 - protein, 50 aa, Glycine max
  Clone ID: PAT_MRT3847_29532C.1.pep
ARFIFEVRGLHNIDTHTLAIDSYLPFEVISGEEFDSLESGRDINSLIRYS

SEQ ID NO: 207649 - protein, 46 aa, Glycine max
  Clone ID: PAT_MRT3847_29533C.1.pep
RGRRPRSKTQTVTHRNIFALFQWHQAGAFTDSSNYARYDKSEVILG

SEQ ID NO: 207650 - protein, 111 aa, Glycine max
  Clone ID: PAT_MRT3847_29534C.1.pep
PPKGGPSGPVFFRAEGPSIFSSGAPPVKFLGKKRPPPKFPKMPAHNFSRGGFLRVPRKTLQPGFNLKKGGGVPFFPRESQKVGPLFWGPPAPPGGEAPSPPFKFVPLNWPH

SEQ ID NO: 207651 - protein, 58 aa, Glycine max
  Clone ID: PAT_MRT3847_29535C.1.pep
PSSCPASWNIRTPQETSCIGARHSRRVGIHTEQSIIGFTTVFECPHRNLTAHSCRSSH

SEQ ID NO: 207652 - protein, 126 aa, Glycine max
  Clone ID: PAT_MRT3847_29536C.1.pep
TPKLARPPPQRGGGAPFLMRRGGVVIPNKGPQNKAPLKWGPPLFPLFGPQSCNNKKKKFFFPPLKKPGKLGPVGWAPLFPKFPPGNFPPFFLPPLWDPKIFVSSWPPPPPLRGLGWGVPHQGGPRG

SEQ ID NO: 207653 - protein, 116 aa, Glycine max
  unsure (1)..(116): unsure at all Xaa locations
  Clone ID: PAT_MRT3847_29537C.1.pep
QVPMFCGSYSLEKAVSRVARGVGKTGKHLFLTDIDNGKPPLLLQMVRDSXDIKFLSALRSFKHRVAYANVRYDQLVGWSTLSIMRIKELPKRRHLSRHEKYPHIGNVETEKSTFVV

SEQ ID NO: 207654 - protein, 108 aa, Glycine max
  Clone ID: PAT_MRT3847_29538C.1.pep
CNIRTPKEDKEEERENKALPDWNFKFLEILTRKNQIHEFPSINQANHSTNHQFRRITKQKPAKKNDRSRFFIFRNLFPFNFFKTQTKRRRKTKLNLIEAKPHNREEIR

SEQ ID NO: 207655 - protein, 183 aa, Glycine max
  Clone ID: PAT_MRT3847_29539C.1.pep
MGEEQRSIARLPLFSIQSPETERSGMATPPLETLASVPFRWEQVPGKPRPSTALVPFSNPPDLLPKCLELPPRLLIPSPATVFKVSTNNCYGSDTKLLGAMVLTKANDYCWFGSWRKKAFKLNKREVTGASHVFPSSSLDTDVPNMKRSANSRLWTSICEGLKQVVPWKSKKLKKKNGSGLRF

SEQ ID NO: 207656 - protein, 588 aa, Glycine max
  Clone ID: PAT_MRT3847_2953C.1.pep
PRFFHNSNPSSPKSPSSFSLLKSTLRLSKSRCGICMQSARSGQGTAIFTAECSHTFHFPCIVKKHPIVTCPVCNTSWKELPVLSINNNNNDKSDKRGFKVYNDDEPLMSPTSLSRFNPIPESENEDEEQEQDNINTEFKGFHVNPLPNLHSTTVIRRNLQLSLLPEAAIVAANRNYESYVVVLKLKPPHVTKTSRRAPIDLIAVLDVGGAMSGSKLRLMKSSMRQVISSLRPTDRLSIVAFSAGSKRLLPLRRMTGGGQRSARRIVDALAAIDQTREGTPVKNDAVKKAAKVLEDRREKNAVASIVVLSDLNDSRAGNNMHKPSLVSTTRLAHLEVPVHAVRLGECSHALSDDALANFVGGLLNVVAQDVRIQLEVVSRSRAVEIAGVYSLSGRPVSLGSSDWIRLGDLYAEEEREFLVELKVPAASAGSHHVLTVRSSYRNPLTREPLIPVEQAMLVPRPHAVRSSCAKIERLRNLHVTARAVAESSRLAEHNDLSGAHHLLSSARALLLQSSKPEEEFLRWLEAEQAELQRRRQRQTQRNSRVEEKVEPLTPTSAWRAAERLAKVAIMRKSMNRVSDLHGFENARF

SEQ ID NO: 207657 - protein, 84 aa, Glycine max
  Clone ID: PAT_MRT3847_29540C.1.pep
KKNLTPLHRGLLGFKIFWGRGGGGFCFGLYHLRGPKKNWVLGSGSFQPNPLNLIWSKLGYSREGGFSKNQKGMWPPVKTKYKSP

SEQ ID NO: 207658 - protein, 63 aa, Glycine max
  unsure (1)..(63): unsure at all Xaa locations
  Clone ID: PAT_MRT3847_29541C.1.pep
LAGLXSGCASLFSRGSRGPXSPPSLRASSXSACXVCGGVFGSLVFGVLFVACXVCXFPVCRPC

SEQ ID NO: 207659 - protein, 56 aa, Glycine max
  Clone ID: PAT_MRT3847_29542C.1.pep
PVTFTPWIAWYLSNVLVYRTALSALLIGIEVGLDHGYLLVRPVVIAWPVRNTEIAG

SEQ ID NO: 207660 - protein, 175 aa, Glycine max
  unsure (1)..(175): unsure at all Xaa locations
  Clone ID: PAT_MRT3847_29543C.1.pep
MDPITAHGHSLPPPFHAGRDLHLHQQQHQFHSLQEDEQSGSSGGLNLAHKREHEENNNNNSSDGKEGGGAGSGETEISRRPRGRPAGXSKSKPKPPIIITRDSANALKTHVMEVADGCDIVDSVSAFARRRQRGVRIMSGTGTVTNXVTLRQPASSGAGVTLHGRLEILAVAGAY

SEQ ID NO: 207661 - protein, 74 aa, Glycine max
  Clone ID: PAT_MRT3847_29544C.1.pep
ETVITGCRTLKPETKAIVPLFQESSNFCLLYGVRIFKGKKITLCAGHRLREIFSFPLFEYLLNTLLFDIGLRVR

SEQ ID NO: 207662 - protein, 57 aa, Glycine max
  Clone ID: PAT_MRT3847_29545C.1.pep
LITVTSLGQRGFFPFFLSRSECVCLLRAFCRKLKMILLEKGQIGRARYGFELSPDKA

SEQ ID NO: 207663 - protein, 92 aa, Glycine max
  Clone ID: PAT_MRT3847_29546C.1.pep
EFGSRRLREDAEGEENSIIKTENKDLKCGRPSQIIIQDYDDDDEWPEEDSDIGGYGGTTHPMVNEDDISFSDLEDDDYGIKPVSSSTGSKVI

SEQ ID NO: 207664 - protein, 147 aa, Glycine max
  unsure (1)..(147): unsure at all Xaa locations
  Clone ID: PAT_MRT3847_29547C.1.pep
LLINTCRYSLRLAFLFDLIPTPLNDCAEPACALSDPHKKNGSNTNPVDSSFLFIDKDRDAKHARQGSXLLAGGFKVXGLYFWVRRCRIQNSTXMLWQTVKVVAEATPSSEGEWDEXGCILHIPYSPGRWNCIRQALLSNITTSSKRP

SEQ ID NO: 207665 - protein, 78 aa, Glycine max
  Clone ID: PAT_MRT3847_29548C.1.pep
RLERKAKNFMRTDSIYRKRKGGTQIRRGAAREARNKPQETVSANDTEKLIGQPLEESSIPNHEKPTNGYSGDTEGEPN

SEQ ID NO: 207666 - protein, 98 aa, Glycine max
  unsure (1)..(98): unsure at all Xaa locations
  Clone ID: PAT_MRT3847_29549C.1.pep
VKPQPADHPGSIILXKEPALQANFARAVASLSKAQAKKVARFLPNPERHWGPKLRAGRQITSKHVSLLGPDAINGALNQEDDEEPKSKKSRTEDSVTS

SEQ ID NO: 207667 - protein, 166 aa, Glycine max
  Clone ID: PAT_MRT3847_2954C.1.pep
FGSSSSRIGSRRLREDDRRDYQHAPAEPEKPIIVYTRRSYSRKQCSDSNLVVVPEKPFVCADENSPAELVLNFAELDSVPSEMHLNKIFRRFGPLNESETEVDRGSSRARVVFKKCTDAEVAFSNAKNFNIFGSVLVNYKLNHTPSTLFKASSLATTQDQENGDAC

SEQ ID NO: 207668 - protein, 106 aa, Glycine max
  unsure (1)..(106): unsure at all Xaa locations
  Clone ID: PAT_MRT3847_29550C.1.pep
MHAYVSSEFGSRVNPSPXPLTGALSALLLTSGLVIXFHYNSTILLSLGLLTNILTIYQXXRDIIREGTYQGHHTPIVQKGLRYGIILFIVSEVFFFAGFFXAFYHS

SEQ ID NO: 207669 - protein, 43 aa, Glycine max
  Clone ID: PAT_MRT3847_29551C.1.pep
MFQMLSTSMRFNLLGHYEHTLGIENWFVPRTFSAPYGPTFLDA

SEQ ID NO: 207670 - protein, 77 aa, Glycine max
  unsure (1)..(77): unsure at all Xaa locations
  Clone ID: PAT_MRT3847_29552C.1.pep
HTAVKFAGRKVPLMQLTTKAEHKFAPTTVGVQNPHRYXPGTAALTATKQYLKSTRLLLRQLPLQRLDREIALDFKTD

SEQ ID NO: 207671 - protein, 185 aa, Glycine max
  unsure (1)..(185): unsure at all Xaa locations
  Clone ID: PAT_MRT3847_29553C.1.pep
PRVRLCGGKASEGVFVGAFLSMCSTAEVLKFLMEKNTTNALDGQVTIGTLILQDCAVXGLLFALVTDLGGASRGFQGERSMTKLLVTIIAFLSGLSILPRTCLTWVLNLMISLSSXTIELYQSASGALCLLXSWCSDKTGLSLXLRSFAAGVMIANTDLAHHTLEQIEPIGRLFADLFLGRVGML

SEQ ID NO: 207672 - protein, 110 aa, Glycine max
  Clone ID: PAT_MRT3847_29554C.1.pep
WQVCRPAFSTKKETEDGLTILTCIVRAWDYSYSCFVAPAMNTLMWYNSFTDRHFISIDELGISLIPPVTKRLACGDYVNGAMLEPSTIYSTVRLFYESKAQQGRAVVPLR

SEQ ID NO: 207673 - protein, 107 aa, Glycine max
  Clone ID: PAT_MRT3847_29555C.1.pep
EEDTNIQKASIFILNKFVFFDSLTTFCLFLCFSQYKSLNFVVNLSLLRCPTFFGFYDFSQDKSFNFFGHSPFILFSEFSHYKKFKFFCVLEPSTACVVFWVYIWIIG

SEQ ID NO: 207674 - protein, 96 aa, Glycine max
  Clone ID: PAT_MRT3847_29556C.1.pep
FISNKFVFFDSLTTFCLFLYFSQYKSLNFFVNLSLLWCPTFFGFYDFSQDKSFNFFGCSSFILFSEFSHYKKFKYFCVLEPFTACVAFWVYIWIIG

SEQ ID NO: 207675 - protein, 63 aa, Glycine max
  Clone ID: PAT_MRT3847_29557C.1.pep
SEGRYKGFPLSLVGSNLTESHLDQNFPCPQNLYLQMHYVPNPLSNVSSSHPSLGHLLRTCIFF

SEQ ID NO: 207676 - protein, 77 aa, Glycine max
  Clone ID: PAT_MRT3847_29558C.1.pep
WLKLNPKSGMPMWNPGVLPPPFMTFKGQGHPISSSKLVTDLGYPPPSPEISKKNFEAAAVFHFSGPAKPWLEIGFME

SEQ ID NO: 207677 - protein, 55 aa, Glycine max
  Clone ID: PAT_MRT3847_29559C.1.pep
YIWIEICYYYKTFFKIIVNSPTTTGAHWFTTILLVVSFISISQFITNFKFRQLQI

SEQ ID NO: 207678 - protein, 61 aa, Glycine max
  Clone ID: PAT_MRT3847_2955C.1.pep
TARFFNGCASPTSFLVMAGMVVTQHDWTVTNDKIAADLKEHEIKPVAPDKHQDEKTVGHLN

SEQ ID NO: 207679 - protein, 50 aa, Glycine max
  Clone ID: PAT_MRT3847_29560C.1.pep
NVISSLIHLSTGQPGWGHFCKFLPHPLSLNYFFINFVGLLPPPPALKKDT

SEQ ID NO: 207680 - protein, 107 aa, Glycine max
  Clone ID: PAT_MRT3847_29561C.1.pep
SCLRFQQNNPSTMGERLILDVLLAVAEHLPRQDLASLCQVGPRVSSGLQACTALAKADHRSWANTPKEYDLLKLRFWSRAPRKGHLEIRQTRAFHLSPSSENWHRRN

SEQ ID NO: 207681 - protein, 46 aa, Glycine max
  Clone ID: PAT_MRT3847_29562C.1.pep
LKAFWDFIQTLKALLHENCPSSFLLHFSCLYLLWIAKFPTVLGVGI

SEQ ID NO: 207682 - protein, 108 aa, Glycine max
  Clone ID: PAT_MRT3847_29563C.1.pep
SVFRDNGWTVGNHLNYGFLAESSLVHHRCDASNITELAKNLASQPIAWQQLVKWPGYPKKARNTASEARRLLKSFTVQPSASPLLSPASCRQVDNPTRESILACECDM

SEQ ID NO: 207683 - protein, 105 aa, Glycine max
  unsure (1)..(105): unsure at all Xaa locations
  Clone ID: PAT_MRT3847_29564C.1.pep
TRTSGSSWGHEXVXNLAGEXXXXIHXXAXSEAXPIAXXLXXXCDSTLXXFXXXHNAEPEXXDXLXEVXXLXMLXGXVDKPNFKRXCLYLTRSAAXFPXPADMLVL

SEQ ID NO: 207684 - protein, 71 aa, Glycine max
  Clone ID: PAT_MRT3847_29565C.1.pep
YLLLETILIEPTKIYHTNKVLFYLKQSEKNYYYYTIKSVSEHLKHQNLQVNVDPIYVTNVQIMIQSIRYVL

SEQ ID NO: 207685 - protein, 89 aa, Glycine max
  Clone ID: PAT_MRT3847_29566C.1.pep
LIPSRWITDPCLDITTPLNRSSWADASPELGSHDNALTNAQYQTYKTSSRTILPRSGISGSMKKHDSRMDRCARLNICRTELRCWSTIS

SEQ ID NO: 207686 - protein, 44 aa, Glycine max
  Clone ID: PAT_MRT3847_29567C.1.pep
IGCEKTTEGGSARSICSCKHQLIQESISSIHATPVLLFLLPFKF

SEQ ID NO: 207687 - protein, 93 aa, Glycine max
  Clone ID: PAT_MRT3847_29568C.1.pep
ECAGWLSPKSGWYFSRDEGDDQRIQATIWASSSAYLESSYLANSLVDPHESDLHVGNLIKEGAWQIGIMRTSEGLMTKESSLTLMWEERVPCQ

SEQ ID NO: 207688 - protein, 59 aa, Glycine max
  Clone ID: PAT_MRT3847_29569C.1.pep
TLVVQAEYTQSPSWVAQIIMVFSFCFSRVYFKGISCPHVSYDVNVLRHGLVRRSVASLC

SEQ ID NO: 207689 - protein, 68 aa, Glycine max
  Clone ID: PAT_MRT3847_2956C.1.pep
GPHGATSWEATKGVGLFKRIIPCARIKLSNRAYKVSHNVDRIGSSAIFSSHVGAVNNVVFPSQRPHGT

SEQ ID NO: 207690 - protein, 180 aa, Glycine max
  Clone ID: PAT_MRT3847_29570C.1.pep
FKLILFSFNQGPLALSPPNILHFISIASLPINPKQLPPPTNKNHTNNTTQKPKWLFLLKVLIFAMIIRAYDYRENLHPHFILVLYCCHMYLGIELVLALSAAPVRTVLGFEIEPQFNEPYLSTSLQDFWGRRWNLMVTRILRPTVYHPVYRIFIHFVGPSCAMSSAVLATFLVSGLMHEL

SEQ ID NO: 207691 - protein, 46 aa, Glycine max
  unsure (1)..(46): unsure at all Xaa locations
  Clone ID: PAT_MRT3847_29571C.1.pep
DIGGYLLEVNEYVGLGVGVECYNNVGEMLRESLEIKMNVLVRVXGF

SEQ ID NO: 207692 - protein, 75 aa, Glycine max
  unsure (1)..(75): unsure at all Xaa locations
  Clone ID: PAT_MRT3847_29572C.1.pep
XYXLFPXQXEIXQNSXXPTVKNNRTVXVKXERISRXAXSNXRNXPQNAXAKASXNXXXXIXRTXSPSXXXXXXEL

SEQ ID NO: 207693 - protein, 222 aa, Glycine max
  unsure (1)..(222): unsure at all Xaa locations
  Clone ID: PAT_MRT3847_29573C.1.pep
MEMILREKDANEWVYRGEGAANLVLAYTGSSPTFIGKVMRIRKCPRNGAEGMCMRSPSALTALERLLWKDVDELISSSDNEIACQLFAHHVMKPLLGPKYVDAGMLVEVPREFLELVEKNVIRQRPAWRVDNARVDMHRGSVLLMSDHSVFTHGNLGSSPCISVEIKXFISEGTAIKRRITRFQMHQALKLHQGEISLLSKYNPLDLFSGSKERFCTAIKVL

SEQ ID NO: 207694 - protein, 99 aa, Glycine max
  Clone ID: PAT_MRT3847_29574C.1.pep
MAEAGSSQTETTTKPPQLIYRCKKCRRIVASVENIVSHEHGKGESSFKWKKRSSQSWETEKQSVDCTSVFVEPMKWMQAVHEGHVEDEPFCMACIAGRV

SEQ ID NO: 207695 - protein, 42 aa, Glycine max
  Clone ID: PAT_MRT3847_29575C.1.pep
SACFKKVNLHGMRYYLPKTIILIVLMWKTTSKTRCITMHSKE

SEQ ID NO: 207696 - protein, 70 aa, Glycine max
  Clone ID: PAT_MRT3847_29576C.1.pep
RTDLTQKTQQKGPMIGNLLCSLPSCKSPNQGLLKKINPFTSKRGGANPYLSLVGKKGTNGPRTRPPLNKG

SEQ ID NO: 207697 - protein, 134 aa, Glycine max
  Clone ID: PAT_MRT3847_29577C.1.pep
VFFFFFFFFFFFFFFFFSKKNIGKATFFWFGDPPPTKGGPRGVPYPLGAKNLAGRLQLTEISPPKKSHHSKGAPSPPKKPSLGFFQKICRSNILKLSHRWGGMGFPRPSDLAFGIRILLRGGFFGGANPGFQQH

SEQ ID NO: 207698 - protein, 61 aa, Glycine max
  Clone ID: PAT_MRT3847_29578C.1.pep
PIHSFSSRPLPWKEVVTMVVLPTADLMAPNAPHVPGGNVRWWIQGSRVTGGATGFSGPVAT

SEQ ID NO: 207699 - protein, 109 aa, Glycine max
  unsure (1)..(109): unsure at all Xaa locations
  Clone ID: PAT_MRT3847_29579C.1.pep
RPRVRLVEEILSMVAQDMGEEWLDCVDEAASFEEVSLSATLNGVEGLDYMERTPLATSEGFPHVLSRKNGDNGKRRSASGDGEXMTLIPGTSVEEADNKLIRELEKCGP

SEQ ID NO: 207700 - protein, 241 aa, Glycine max
  Clone ID: PAT_MRT3847_2957C.1.pep
MSSPQCFENPPNLNSDIHGAGTVQELGGLNSYVTGSSDSKLALILVSDVFGYEAPKLRKLADKVAAAGFLVVVPDLLYGDYIVDLNNPQFDRESWRKAHGKDKACEDTKPLISALKSKGVKSVGAAGFCWGGVVVVKLAISTDIQAAVILHPGLIADNEFNEVRIPIAILGAEIDHLFPPERLKQIEEMLSVKAEFESFVKLYPGVSHGWTLRYNDDDEATVKSAKEAHQDMLNWFIKHVK

SEQ ID NO: 207701 - protein, 79 aa, Glycine max
  unsure (1)..(79): unsure at all Xaa locations
  Clone ID: PAT_MRT3847_29580C.1.pep
YRAGEYHVVQQPIVSQEEILSCSARDFITTMARXNRKPHATAMHVXAIRXIIDSXIGSDCNIGGAMLLDDTYHTNRVNA

SEQ ID NO: 207702 - protein, 33 aa, Glycine max
  unsure (1)..(33): unsure at all Xaa locations
  Clone ID: PAT_MRT3847_29581C.1.pep
XXXXXNMESHPFCIFSIFHIQIQVNFKGPPKNI

SEQ ID NO: 207703 - protein, 90 aa, Glycine max
  Clone ID: PAT_MRT3847_29582C.1.pep
VYPAIGGSPPIKSQKRNPPLKNKNKQNSQTLQKNPWKGINFGKNQKNPVFLNQFPLINWAQKKSKKKIPKEKIPQLGGQLNTWEVPKKPQ

SEQ ID NO: 207704 - protein, 132 aa, Glycine max
  Clone ID: PAT_MRT3847_29583C.1.pep
VYNILVEKTKSVPGAKVENNKFCLSVHFRCVDEKSWVSLAEQVSFVLNEYPKLKLTQGRKVLEIRPTIKWDKGKALEFLLESLGYANSDNVFPIYIGDDRTDEDAFKVLRRRGHGVGILVSKITKETDAFYT

SEQ ID NO: 207705 - protein, 57 aa, Glycine max
  Clone ID: PAT_MRT3847_29584C.1.pep
EDAFKVLRRRGHGVGILVSKIPKETDASYTLQDPTEVGQFLRHLVEWKRTSSQYHKL

SEQ ID NO: 207706 - protein, 98 aa, Glycine max
  Clone ID: PAT_MRT3847_29585C.1.pep
PILPLGNQKALGGPLVGFKSPPPLCRAIKGFTQVPQRNWKKFGLSGPFKLPLRFPGCKPPNVGARRAGIIFHYSFFSRLDFPHFGGIKPQKARLLAFY

SEQ ID NO: 207707 - protein, 371 aa, Glycine max
  Clone ID: PAT_MRT3847_29586C.1.pep
MKMQKFKLLLVLFFATCHSSLSITDGLLPNGDFEVGPKPSELKGSIVTTPNGIPHWTISGMVEYIKSGQKQGDMVLVVPHGTYAVRLGNEASIKQKIQVVKGMFYSLTFSASRTCAQEEKLNVSVVPSNEKSDWGVFPIQTMYGSNGCDSYACGFRADYPRVEIVIHNPGVDEDPACGPLIDSVALKLLHSPKRTRDNLLKNGNFEEGPYVFPKESWGVLIPPHIEDAYSPLPGWMVESLKAVKYIDSDHFAVPEGKRAIELVAGKESAIAQVVITIIGKVYDLTFVVGDANNSCEGSMVVEAFAGKDTIQVQYQSKGKGGFIRGKLRFKAMSTRTRIRFLSTFYTTKSDNTGSLCGPIIDDIRLLSVRYS

SEQ ID NO: 207708 - protein, 44 aa, Glycine max
  Clone ID: PAT_MRT3847_29587C.1.pep
ASTSLRNRFRLCTSHDCVRLVHNVLYVTGAYIEVVWQCYGSPRH

SEQ ID NO: 207709 - protein, 109 aa, Glycine max
  Clone ID: PAT_MRT3847_29588C.1.pep
MNSVRLCSKRKTNQSIMTKVVCALLLIFVMAFVTQVAYGGGEGSLTPQECPGACDYRCSKADRTKKACLNFCNMCCAKCLCVPSGTYGHKEECPCYNNWKTKRGTPKCP

SEQ ID NO: 207710 - protein, 82 aa, Glycine max
  unsure (1)..(82): unsure at all Xaa locations
  Clone ID: PAT_MRT3847_29589C.1.pep
SARRRQKGEGRMGDADNMIKEMREKGMMPDAVTHNILINGYCRCGDAKRAFGLLDEMVEXIQPTLVTYTSLIYVLGKRNRMK

SEQ ID NO: 207711 - protein, 281 aa, Glycine max
  Clone ID: PAT_MRT3847_2958C.1.pep
MADCGAESERKVTIRNNHGENLVGILHNAASISLVIVCHGFQSSKERIPMVYLAAALGKDGFSSFRFDFAGNGESEGSFQYGNYYREVEDLRAVVQHFREQKYVITAIVGHSKGGNVVLLYASKYKDIHIVVNISGRFNLARGMEGRLGKKFIQRIKQDGYIDVKNKRGKIMYRVTEESLMDRLSTITHLACLLIPQDCSVLTIHGSMDEIVPAEDALEFAKFISNHELCFIEGADHEYTYHQDELTSLVLEFIKIHIDKDKDTSKQARFGRVHKPIHSRL

SEQ ID NO: 207712 - protein, 63 aa, Glycine max
  unsure (1)..(63): unsure at all Xaa locations
  Clone ID: PAT_MRT3847_29590C.1.pep
LAFSQLSLNSLYIKMVGPQVAVGNYPGVPPGPRAVXKRQKRVVKKKKKKKXXKARALGYQRTY

SEQ ID NO: 207713 - protein, 140 aa, Glycine max
  Clone ID: PAT_MRT3847_29591C.1.pep
WGAGKSTQGMFLVPVLYDGLANHNLVGPFFFGGGGPQLDQAISRNGRSLYLFGQTDGGGPNPLGMANGGVGKPRVVVVEPIWQFMERARSPLGRRTRTFFLPGGVNRIGEWPQISRMGVPHPASLEVLVGEVEGQLNRHA

SEQ ID NO: 207714 - protein, 182 aa, Glycine max
  unsure (1)..(182): unsure at all Xaa locations
  Clone ID: PAT_MRT3847_29592C.1.pep
MNRRVRRKVARKNKGNVVQSSFPEDQDEVLDLEPQRQGFVDWKCLPDDTVIQLLSCLSYQDRASLSSTCKTWEXLGSFLCLXSSLDLRSHSFDAGMAPSVAPRCVHPQKLRVRRAESADAIINLRAXELAXLSGDYCXKITDATLSVIVARHELLESLQLGPDFCERISSDAIKAIAHCCPK

SEQ ID NO: 207715 - protein, 71 aa, Glycine max
  Clone ID: PAT_MRT3847_29593C.1.pep
TVFLTRKLYFSFFNILNKYYFLLFLFQDLHDYVLVYNYRIIFFLLFFVVNDLTFHISEWCFICITAKYNIF

SEQ ID NO: 207716 - protein, 144 aa, Glycine max
  unsure (1)..(144): unsure at all Xaa locations
  Clone ID: PAT_MRT3847_29594C.1.pep
KGFVGLFSGWGEGFFPFPRAFGFFPGKGFFPLGPGQGPLKGPLFKRGGLLRPEGAIFLPGGVFFFFQVXKIFPGLKWGTPPGGXRGAPFCLKKILFLSKGFWLGPPKTKPPLGKKNPVFPGGPFFFSPPLTPQGFFFPPKKGGG

SEQ ID NO: 207717 - protein, 149 aa, Glycine max
  Clone ID: PAT_MRT3847_29595C.1.pep
MGHSNSSSSSSSPSKRGHALRQWRLLDLVSGVFFFLVLLFFAMVFTPLGDSLAASGRQTLLRSGADPRQHHRLVAAIEARGHGCSHSLAGSENIMPMAEKAFFFKKKFPKIYYWKIGGGPDPTLNPIFESKWDEQHAAHELPNSRASPT

SEQ ID NO: 207718 - protein, 183 aa, Glycine max
  Clone ID: PAT_MRT3847_29596C.1.pep
MLWLPSHVLDEACDTKVRLRNRHQKLQNHQQMHQQRHHKSPGEPKSQYSKSGSRSSYQRPKLATNGGPGMRAIFLGSAHRSCGTGVFLPQRAGTNFQPSKRPACAPILLPARVVQALNLNVRALGLLISPPQVQSYDPRCREAYNNNSAEKKSDQKDASKQCRFISQNQCSSPEIFLPKEWTY

SEQ ID NO: 207719 - protein, 185 aa, Glycine max
  unsure (1)..(185): unsure at all Xaa locations
  Clone ID: PAT_MRT3847_29597C.1.pep
MEFLSLLYGAMALYFCFLIWKLFDQRRDQECYVLDYQLYKPSDERKLGTERCGKIIGRNKHLGLNEYKFLLKAIVNSGIGEETYAPRNVIEGREANPTLDDGVTEMEEVFSMAALKKLLERSGXSPSQIDVLVVNVSMFAVVSFLTSRIINHXQMREDIKAYHLTXXGGCSASLISLDIIRNIFK

SEQ ID NO: 207720 - protein, 53 aa, Glycine max
  Clone ID: PAT_MRT3847_29598C.1.pep
LCRNSWLNVKQVFFLQARCNKDKAILNARDASSTHLQAMRNSPCRPRLERKSE

SEQ ID NO: 207721 - protein, 49 aa, Glycine max
  Clone ID: PAT_MRT3847_29599C.1.pep
NIFLNKKGTPLTELHQHDTGFFLRSSPTGDKGLQTFEYTNLNTYKLWGA

SEQ ID NO: 207722 - protein, 187 aa, Glycine max
  Clone ID: PAT_MRT3847_2959C.1.pep
MLKQAIGRIFRTGVYACEGNRVLPWIYVPSSFFHHGQAHMAPRSFFGVEDFLDDDNSRPYTYQKGKKSKNPNKHISFKQRTIAYMEPFTLDVFISKRFVSASLTHRVTSKQVAVAGTNSKDIKAVLRSRSDIPACIAIGRILAERAKEADVYTGSYTPRDRDKFEGKIRAVVQSLIDNGIDIKVYLD

SEQ ID NO: 207723 - protein, 431 aa, Glycine max
  Clone ID: PAT_MRT3847_295C.1.pep
MAIIFLSSSAILLPSLAFFLTLFNLASSESFIGVNYGQVADNLPPPSATAKLLQSTAIGKVRLYGTDPAIIKALANTGIGIVIGAANGDIPGLASDPNFAKTWVNTNVVPYYPASNIILITVGNEVITSNDQNLVNQMLPAIQNVQGALDAASLGGGKIKVSTVHAMSVLRDSEPPSAGRFHPEYDTVLQGLLSFNNATGSPFTINPYPYFAYRSDPGRADNLAFCLFQPNAGRVDSNTNLKYMNMFDAQVDAVRSALDAMGFKNVEIVVAETGWPYKGDSNEAGPSLENAKAYNGNLIAHLRSMVGTPLMPGKSVDTYLFALYDEDLKPGPASERAFGLYNPDQSMIYDAGLSKQQETSSPVPTVAPTPDVSKSPVIPAPTDPGQQTQKSPVIPAPIGPGPTPNKAELLIGHEATILKSLIMFTVLILML

SEQ ID NO: 207724 - protein, 48 aa, Glycine max
  Clone ID: PAT_MRT3847_29600C.1.pep
IFKTCNLFPDDMSHRWRGKRIPGWVNRLVKLGSLCRCLLPEDVEVTPR

SEQ ID NO: 207725 - protein, 86 aa, Glycine max
  Clone ID: PAT_MRT3847_29601C.1.pep
RFTSITSVTTLILFLSLYTHNKKPKNVNNFTISCGTTGQSYDGERTWTGDTGSTFLSHQDGTVSANATTQSPSTNQVPYTDALLSR

SEQ ID NO: 207726 - protein, 150 aa, Glycine max
  unsure (1)..(150): unsure at all Xaa locations
  Clone ID: PAT_MRT3847_29602C.1.pep
PRFPAPPGETPPFPTPRLKAPGFPAPQWEAPPPQGPPPRRPPFFKGAQGGVGEMPNKRGPPRGFRFPNLARGGGGLSPPRLGFPLPGVGXXFGDPRRRKGGEKGALAPPLWKKGPFIFFPXXKKKKKKKKKKKKKKKKKTKKKKKKIKNP

SEQ ID NO: 207727 - protein, 80 aa, Glycine max
  unsure (1)..(80): unsure at all Xaa locations
  Clone ID: PAT_MRT3847_29603C.1.pep
VSFFISFGNLADDTINFXAFSHKLVHFGXIQEKVALKFSHEELITAWSTLELSATTLFADWCSYVHAMQHDSAVSTSPFD

SEQ ID NO: 207728 - protein, 167 aa, Glycine max
  unsure (1)..(167): unsure at all Xaa locations
  Clone ID: PAT_MRT3847_29604C.1.pep
MVAGGNSKSDISFAGTYASSAFAACFAEVCTLPLDTAKVRLQLQKQAVVGDVVTLPKYRGLLGTIGTIAREEGLSALWKGIVPGLHRQCLNGGLRIALYEPVKNFYVGPDHVGDVPLFKKILAGFTTGAMAIAVANPTDLVKVRLQXKGKLPPGVPSRYSGSLNAYS

SEQ ID NO: 207729 - protein, 126 aa, Glycine max
  unsure (1)..(126): unsure at all Xaa locations
  Clone ID: PAT_MRT3847_29605C.1.pep
RKRYGCGLASYDIHDDHFCITLKHRGVAKACGRNIXDYLVEMLGLEKSQIDDLDHLLYKNYGTSMAGLRAIGSYXDCDEYHRLVXHGDYCYEMLKPDPVLRNLLLSLPYRRLRFTNSHKVHAVNAL

SEQ ID NO: 207730 - protein, 61 aa, Glycine max
  Clone ID: PAT_MRT3847_29606C.1.pep
LSPTPLRKISYRCVSLIMQLLIHNPTLCTFNYQNHLYEPLYPLSGVLFLFLLNNYFYLIFF

SEQ ID NO: 207731 - protein, 28 aa, Glycine max
  Clone ID: PAT_MRT3847_29607C.1.pep
RHMSNSSKCSSLLLLAPRRIKLVLADQS

SEQ ID NO: 207732 - protein, 60 aa, Glycine max
  Clone ID: PAT_MRT3847_29608C.1.pep
MIGSPITPQGIRMYTPLPYFILYGTSSMILENICLQSIILKGSNPKVFIILEMKNGNKFV

SEQ ID NO: 207733 - protein, 210 aa, Glycine max
  Clone ID: PAT_MRT3847_29609C.1.pep
MDGELRVIVDGFLSHYDEVFRLKGVAAKTDVFHLINGTWTSPAERCFLWIGGFKPSELITMLIPQLEPLAEQQIMVICELGHSSLQTEEALSQGLDQLQQIHVDTIAGGPIADGVQQMVAAMTKLGHLEEFVAQADNLRQQTLHQLCRLLTVRQAARCFLVIGEYYGRLRALSSLWASRPRESLISDDNSCQTTTELQMVQSSQNHFSSF

SEQ ID NO: 207734 - protein, 102 aa, Glycine max
  unsure (1)..(102): unsure at all Xaa locations
  Clone ID: PAT_MRT3847_2960C.1.pep
GRPRVRAFFIFFSLFLLLVSSSTYISSLLATKARLPISPKLSKLDLWHVGMSYSRLKNVVCSLANLXRSNLKDVACRGAIXHKATLHECVFTAANPRGALLA

SEQ ID NO: 207735 - protein, 164 aa, Glycine max
  Clone ID: PAT_MRT3847_29610C.1.pep
MSAPSGNPSEVKNASNVVVPAKTAPVAVVQKDSTIVGFLKDFVIGGASGAVAKTITAPIERVKIIIQTQDANPRIISGEVPRYTGIVNCFSRVRSEQGFGAFWRGNMTNVIRYFPTQAFNFAFKDSIKKMFPKYSPKTEFGKFFLVQLASGGLAGAGSLCIVYP

SEQ ID NO: 207736 - protein, 67 aa, Glycine max
  unsure (1)..(67): unsure at all Xaa locations
  Clone ID: PAT_MRT3847_29611C.1.pep
MSGPGKGGDGLGNGGVNKHKKVLPDIHLXITKPVIRRLATRCCMKKISGLVYEATSRILTILLGNVN

SEQ ID NO: 207737 - protein, 52 aa, Glycine max
  Clone ID: PAT_MRT3847_29612C.1.pep
SSLQLCGLLMRVIIRLIIAIDRSSAVPDYVLIIWNWNSSSNGDRISFGLKIG

SEQ ID NO: 207738 - protein, 81 aa, Glycine max
  Clone ID: PAT_MRT3847_29613C.1.pep
ATNGGVMARLRLDQPYGKALCGLWAAHILYYNPGRPDKPDYDEGRPERTGTQHFVATHREGDTVELIVWGCKQHSIRGGSR

SEQ ID NO: 207739 - protein, 57 aa, Glycine max
  Clone ID: PAT_MRT3847_29614C.1.pep
KLKNYHYNIFIFLSISFVLIVYLYFHSYSIIIYYFSFISVLIYYYLYYYLYFIIADT

SEQ ID NO: 207740 - protein, 57 aa, Glycine max
  Clone ID: PAT_MRT3847_29615C.1.pep
VLCFSLETLPTLQLASGVQGLPLLWQTANILTKTYYYIGTILIGQIELKPMTLDTQL

SEQ ID NO: 207741 - protein, 88 aa, Glycine max
  unsure (1)..(88): unsure at all Xaa locations
  Clone ID: PAT_MRT3847_29616C.1.pep
MRVFSRFKFLSRAVHEEQEGEHDGGEKIKYPLTEGNLCTSLTLTVWRKSLVISCKGFTVIDPYGNLVYRVDNYIVHPNEVILMDASXN

SEQ ID NO: 207742 - protein, 107 aa, Glycine max
  unsure (1)..(107): unsure at all Xaa locations
  Clone ID: PAT_MRT3847_29617C.1.pep
DDRRVRVGCILQKGTVVSRRQKGSAARRRQKGTVARXRQKGSVVRRRQKGTAARRDRRVRLREDYRRVRLLEDSHKGTVARRLQKGSAAKRTQKGGVTIIIDIFMIQ

SEQ ID NO: 207743 - protein, 219 aa, Glycine max
  Clone ID: PAT_MRT3847_29618C.1.pep
FADKIEAIDVGVDESGLCDSPTSDATVDSSSSSSNSKGLLCGHGFSEITYIHIHECDYFSMGVFCLPAGKVFPLHDHPGMTVLSKLLYGSTCVKAYDWIALDCAGSQTIGLAGRVVDEVIKAPQEPSILFPRSGGNIHSFTALTPCAILDVLSPPYSEEFGRPSTYFSDIPIPSLNGYAILEEKPMPSNLVVQGAPYLGPSIVTVDHYNFGQIDFDNHV

SEQ ID NO: 207744 - protein, 39 aa, Glycine max
  Clone ID: PAT_MRT3847_29619C.1.pep
LFSISKMKKDKRGKKGSKYKFRESYGSTKMCIPAPGSVD

SEQ ID NO: 207745 - protein, 54 aa, Glycine max
  Clone ID: PAT_MRT3847_2961C.1.pep
RARHFLLLALLLFAAVGTAAMGVGAFYADDILIRQVVPDVCETQKEDNLLNAEH

SEQ ID NO: 207746 - protein, 248 aa, Glycine max
  Clone ID: PAT_MRT3847_29620C.1.pep
GIPGSTHASGRSKIQVLYDASHAVFSQEGLPTFQQIHYVKNLLDKIEAMDVGIDEFGLCDSPTSDATVDSSNSKGLLGGQGFSEITYIHIHECDYFSMGVFCIPAGKVFPLHDHPGMTVLSKLLYGSAYVKAYDWIALDCAGSQTIGLAGRVVDEVFKAPHEPSILFPRSGGNIHSFTALTPCAILDVLSPPYSEEFGRPSTYFSDIPIPSLNGYAILEEKPMPSDLVVQGAPYLGPSIVTVDDYVGV

SEQ ID NO: 207747 - protein, 155 aa, Glycine max
  unsure (1)..(155): unsure at all Xaa locations
  Clone ID: PAT_MRT3847_29621C.1.pep
IHPPGGFPPPSPNFVWQAWASPIVVYFSQSPHGGFFFTAPPLPRRFFPSQGTPQFXYLVKILQRVFFGRFPPGFGPLFLFSGKKIFPGGSFFXIYPGKRGAPHWVFFXKAFKAFQRFXGKGGGFEGKIHPRARGPSFKNRGGAVQISYPLFPCSI

SEQ ID NO: 207748 - protein, 528 aa, Glycine max
  unsure (1)..(528): unsure at all Xaa locations
  Clone ID: PAT_MRT3847_29622C.1.pep
MDLLLNCLNLNTIAIASILSLIFLCLFLYRKNSRGKDAPVVSGAWPILGHLSLLNGSQTPHKVLGALADKYGPLFTIKLGMKPALVLSNWEMSKELFTTNDLAVSSRPKLVAVEVMSYNQAFVGLAPYGPYWRELRKIVTFEFLSNRRIEQRNHIRVSEVRTSINELFXDIWSIGIKNRYTHTLVEIKQXWRDMTVNMDVXFVIGKRYFVAMHDGGRDRKLRFMNYILDFMSLRRVFAGMSLGLNMGHLTLANLVHALEVFNPSVEPVDINEFXGFTHTKASRLEVLVNRGLTPXSMKLFNAYISLGFIMVLFPMAQSCKLXLGGSDPTANILTWALTLLLPNPLALGKAKEEIDMQIGKDEYIRESDISKLVYLQAIVKETLRLYPPAPFSSPREFTENCILGGYHIKKGTRLIHNLWKIHRDPSVWSDPLEFKPERFLTTHKDVDLRGHNFELLPFGSGRRVCAGMSLGLNMVHFTLANLLHSFDILNPSAEPVDMTEFFGFTNTKATPLEILVKPRQSPNYYETL

SEQ ID NO: 207749 - protein, 119 aa, Glycine max
  Clone ID: PAT_MRT3847_29623C.1.pep
RPFFFFFFFFFFFFFYKKKGTGFFSCGQKKEKTPIFLGQDQNKKFGFGRRPNKTGGKHCYPSLEGPTGCQTGGGIDGGEKIQKPGLKPTPLKIPRGSKRPLPPKKKNRFAKRAFQTLLI

SEQ ID NO: 207750 - protein, 74 aa, Glycine max
  Clone ID: PAT_MRT3847_29624C.1.pep
NFYIKITQGPKKEGFWWAFYINFLKHEGRNLKWPEACNEKISWGSLPFFYKKKCFLQIWVVFKNNNTLVLEIYP

SEQ ID NO: 207751 - protein, 48 aa, Glycine max
  Clone ID: PAT_MRT3847_29625C.1.pep
SVEPARCSEALRSKVDAHESQVAEARQVRGVARFYCTLSLFLLPPPTL

SEQ ID NO: 207752 - protein, 71 aa, Glycine max
  Clone ID: PAT_MRT3847_29626C.1.pep
FNNKHYCRVIVYRSVSCQGVFFLTCCVRVGVRISKVNCSGILCTSCAEEQITSAALALIPGTTSSSGAPPI

SEQ ID NO: 207753 - protein, 85 aa, Glycine max
  unsure (1)..(85): unsure at all Xaa locations
  Clone ID: PAT_MRT3847_29627C.1.pep
DILTCPRLRRDPNIRSIIGFQSYYXDHCHERILHIPWEIEAKMTQVGTXYDLKNIITRKIAAHTIVYTGQVQYITHMTNTVPAYL

SEQ ID NO: 207754 - protein, 72 aa, Glycine max
  Clone ID: PAT_MRT3847_29628C.1.pep
FPVLNKTPARHTINTLYFNNIIYPPLIKHYFYNDILIFNYSTPLKKTLISYTPSYNSPHNILKFSKLNLLTI

SEQ ID NO: 207755 - protein, 60 aa, Glycine max
  Clone ID: PAT_MRT3847_29629C.1.pep
GGSNAPFPTKTTFDATAMVFANPKNELKRIRKQKRLLLRSPTTQMQTFQFNHDRNSLHIT

SEQ ID NO: 207756 - protein, 65 aa, Glycine max
  Clone ID: PAT_MRT3847_2962C.1.pep
KAVFRSRSDNPACIAIGRILAERAKEAIVYTGSYTPRDRDKFEGKIRAVVQSLIDNGIDIKVYLD

SEQ ID NO: 207757 - protein, 54 aa, Glycine max
  Clone ID: PAT_MRT3847_29630C.1.pep
LKGQYLQIALKKTLNFYLVSRKNTPRVWEGTNTAIIITQPMGFFFLWGKKKSHF

SEQ ID NO: 207758 - protein, 99 aa, Glycine max
  Clone ID: PAT_MRT3847_29631C.1.pep
MKTGNRFVGIAHAKQKLQRTLSQRIKMASAVADVPKGHLAVYVGENHKRFVIPISYLSHPLFRDLLDWAEEEFGFNHPMGGLTIPCTEDYFISLTSSLN

SEQ ID NO: 207759 - protein, 90 aa, Glycine max
  Clone ID: PAT_MRT3847_29632C.1.pep
LIKVGGALGDHIFFTYSLKFFDSCTHFFSEKGLFNIGGSVSQDNLTCWGPGPQKEWKSPQKGVALLRAPFWDKTLTEEPRLSFPTPRDKL

SEQ ID NO: 207760 - protein, 130 aa, Glycine max
  Clone ID: PAT_MRT3847_29633C.1.pep
HRRPSHLLRPQQLDHPSSPRGFVRPLPHNMPSVFWSSHRRWRVRYWVLTAAVLYVSYCFVRGMPLLSTNLPPYTGKHDVGTIDLEVPVNPPRRVDETINTETGELAFQVDTVLVSVFTLLEWLQSTREHL

SEQ ID NO: 207761 - protein, 197 aa, Glycine max
  unsure (1)..(197): unsure at all Xaa locations
  Clone ID: PAT_MRT3847_29634C.1.pep
ARARAESARGHLTTHIAIVSGPGFSHLVPIVEFSKRLIKLHPNFHVNCIIPSFGSPSESSKAYLKTLPSNIDTILLPPINKQQLPQGVNPAVTITLSLPSIHEALKSLSSKFPLTALVADIFAFPTLEFAXEFNALSYFYTPCSAMVLSLALHMPKLDEESSGEYKDLTEPIKLQGYVPILGVISFTQVDQRSYKFF

SEQ ID NO: 207762 - protein, 470 aa, Glycine max
  Clone ID: PAT_MRT3847_29635C.1.pep
MFLLRVHSVEEEHPLDPRTIFQSQTNNPKFSQRRGALHLFRTSSHSSPSSLLFILAVPNYLSFHDFIPFCGPHLDRLHHLLFIRNDGTEDRYSVLIEFADHFAADAFYTNFNAKKFSPAEAEVCHILFLQSVEYSKYAEAAGTPPPGCTEIPTCPVCLERLDPDTSGILTTLCDHSFDCPCVSKWTYLSCQVCRFCQQQDEKPTCFICGTLDDLWVCMICGFVGCGRYKEGHAIAFWKGTQHCYSLDFKTQQIWDYVGDSYVHRLNQDLSKIDGKLEEMNFRCMSLEGDCGMCECREDLGINGALFNSKVETIVDEYNRLLTSQLETQRQYYESLLVEAKSKMESSMSEAVEKAAASEMQDIQNELEKCTEERNAIAEVNQKLIKNQEIWRKKFKEAEEREAKSIKLMNERIIDLEEQIRDIKIFLEAQKTIDKMSDSNGIKEGTVLPVAYEQSSPGHSKRNKKSGRRRN

SEQ ID NO: 207763 - protein, 39 aa, Glycine max
  Clone ID: PAT_MRT3847_29636C.1.pep
HGREFYEKYEGGNLLLRQKKVPFHLNCCFVRLNGSPPSV

SEQ ID NO: 207764 - protein, 218 aa, Glycine max
  unsure (1)..(218): unsure at all Xaa locations
  Clone ID: PAT_MRT3847_29637C.1.pep
MFLLRVHSVEEDHPLDPQTIFQSQSQSQSQSQSNNPKFSERRGALHLFRTSSHSSLPTQTSLSSLLFILAVPNYLSFHDFIPFCGPHLDRFHHLLFIRNDGTEDRYSVLIEFADHFAADAFFTNFNAKKFSPAEAEVCHILFLQSVEYSEYAEVAGTPPPGCTEIPTCPVCLERLDPDTSGILTTLCDHSFDCPCVSKWTYLSCPGCQFCXAQDEKPP

SEQ ID NO: 207765 - protein, 140 aa, Glycine max
  unsure (1)..(140): unsure at all Xaa locations
  Clone ID: PAT_MRT3847_29638C.1.pep
YYESLLVETKSKMESSIXEAVEKAAASEMLDIQNELEKCTEERNAIAEVNQKLIKNQEIWRKKVKEAEGREATSIKLKNERINDLEEQIRDIKIFLEAQKTIDKMSDSNGIKEGTVLPVAYEQSSPGHSKRNKKSGRRRN

SEQ ID NO: 207766 - protein, 57 aa, Glycine max
  Clone ID: PAT_MRT3847_29639C.1.pep
MMMQQIRDIKIFLEAQKTIDKMSDSNGIKEGTVLPVAYEQSSPGHSKRNKKSGRRRN

SEQ ID NO: 207767 - protein, 61 aa, Glycine max
  Clone ID: PAT_MRT3847_2963C.1.pep
RNHHHFLQLNNNKTLLSPFSFKLSKVQTYYKKIPPQAQIKLSTRVKEYPNAKTHFWYKPHV

SEQ ID NO: 207768 - protein, 56 aa, Glycine max
  Clone ID: PAT_MRT3847_29640C.1.pep
VDTLHFIFFFLVNKLIVNSIIIGFEPLKIILSVYIKIISPEERNNGALIVKLFKRN

SEQ ID NO: 207769 - protein, 94 aa, Glycine max
  unsure (1)..(94): unsure at all Xaa locations
  Clone ID: PAT_MRT3847_29641C.1.pep
DLMNECIFDVDTNVLQSLDXETCVTGTDMLILILNQDPNLLRSYFVRQERFAIFGLLGKGMFTDFGEDMHCQYLXNLRNSFDSCTSSGPQRDTI

SEQ ID NO: 207770 - protein, 99 aa, Glycine max
  Clone ID: PAT_MRT3847_29642C.1.pep
CRDFILFLSRYKEGHAIQHWKDTQHCYSLDFKTQQIWDYVGDSYVHRLNQDQSKIDGKLEEMNFRCMSLEGDCGMCECREDLGINGALFNSKVETVWFS

SEQ ID NO: 207771 - protein, 78 aa, Glycine max
  unsure (1)..(78): unsure at all Xaa locations
  Clone ID: PAT_MRT3847_29643C.1.pep
VWQWXASVLXHYNRTSXFRIKIFRLYLLILRTMSPGLLRLIRDVKAPIHVPKWRSWCCRLAPIVSTADLCQSNGEISF

SEQ ID NO: 207772 - protein, 193 aa, Glycine max
  Clone ID: PAT_MRT3847_29644C.1.pep
QVSKIERTDTQFRNRLDTLKKKYKKEKAKFPDSDGGACKWVYFKSMDELMASPPQQAGLSCGVDSGEYVFMNPRVHLNHANGLDEMRDSPDNTESTGEEGSDGPQAKKRKKRRGSGEASSFRLLADSIQKFSKIYEKIENSKRQQMVELEKMRMDFHKELETQKRQILENLRCEISKLEQRNDDNDDSAENGT

SEQ ID NO: 207773 - protein, 119 aa, Glycine max
  unsure (1)..(119): unsure at all Xaa locations
  Clone ID: PAT_MRT3847_29645C.1.pep
VXXXPXXXNXXSXXNNXDXRXXXXRXLRXFXXFXPXXVXXXXXVXXPFLXXXXXXXXXXXXAXXKXXXXXXXDAXEXXXXKRXXXXXXXASXVXXYLPXXSXXVQXXXXSXXXXRSSXL

SEQ ID NO: 207774 - protein, 60 aa, Glycine max
  Clone ID: PAT_MRT3847_29646C.1.pep
DQSSFLMSFVFLNTPKGGVLVHSVPIFHTCLSISISIISIFCFALLTHNKIRISSHYILI

SEQ ID NO: 207775 - protein, 82 aa, Glycine max
  Clone ID: PAT_MRT3847_29647C.1.pep
GILKGQRRIHGFDCFTTLVFLNEGAMELKFMQLDAHVLTHSPCSFQTISYGLCFTSWCMTRTLVCRFVNRSSLFPTIRRLLG

SEQ ID NO: 207776 - protein, 619 aa, Glycine max
  Clone ID: PAT_MRT3847_29648C.1.pep
MATLTASSNLVSRNSHVHHGPTTASYESKAVAMGLRSLKQTNTHNGLRIFNPVDELLNRTPIKTNAVQAMRKGPQGKNARPKGMITCGMTFIIIGTEVAPWCKTGGLGDVLGGLPPALAGFGHRVMTIVPRYDQYKDAWDTSVVIEVKVGDRTEKVRFFHCYKRGVDRVFVDHPWFLEKVWGKTGQKLYGPTTGNDYEDNQLRFSLFCQAALEAPRVLSLNSSKYFSGPYGEDVIFVANDWHTALIPCYLKSMYQSRGIYTNARVVFCIHNIAYQGRFAFADFSLLNLPDQFKSSFDFIDGHVKPVVGRKINWLKAGLIESWFVITVSPNYAKELVSGPDKGVELDNIIRKIDDDGRLVGIVNGMDVQEWNPTTDKYIAVKYDVSTVLEAKALLKEALQAEVGLPVDRNIPLIGFIGRLEEQKGSDILAEAIPQFIKQNVQLVALGTGKKQMEKQLEELEISYPDKARGVAKFNVPLAHMIIAGADFILVPSRFEPCGLIQLQAMRYGSVPIVASTGGLVDTVKEGFTGFQMGAFNVECDAVDPADVDAISKTVKRALAVYGTPAFTEIIKNCMAQDLSWKGPAKEWEEVLLSLGVPGSEPGSDGEEIAPQAKENVATP

SEQ ID NO: 207777 - protein, 111 aa, Glycine max
  unsure (1)..(111): unsure at all Xaa locations
  Clone ID: PAT_MRT3847_29649C.1.pep
TNTKNYIYIYIYIYIYIYIYIHICVHIYTIRYTKILIDMEVKPQAXTLXITXMSGENIXMDXNXXXXNXYVXVRAESLNSCXTKMXNXKXXXXXWNEXXXLNIPLXAKSXT

SEQ ID NO: 207778 - protein, 88 aa, Glycine max
  Clone ID: PAT_MRT3847_2964C.1.pep
PPLVVLLGVPGACPYVACAAPVIIRVRVVVFLLPRVFRLLGRVDEKKSSCFLSHLRTALSGRVCRGASGECSSETRNLWWKFGVPVGG

SEQ ID NO: 207779 - protein, 163 aa, Glycine max
  unsure (1)..(163): unsure at all Xaa locations
  Clone ID: PAT_MRT3847_29650C.1.pep
WCKTGGLGDVLGGLPPALAGFGHRVMTIVPRYDQYKDAWDTGVVIEVKVGDRTEKVRFFHCYKRGVDRVFVDHPWFLEKVWGKTGQKLYGPTTGDDYEDNQLRFSLFCXGEDVIFVANDWHTALIPCYLKSMYQPRGIYMNARVGFCIHNIAYQGRFAFADFS

SEQ ID NO: 207780 - protein, 318 aa, Glycine max
  unsure (1)..(318): unsure at all Xaa locations
  Clone ID: PAT_MRT3847_29651C.1.pep
MALFSNHRHSSEALLGFLLFLVFRGVSVSGATFTFVNKCDYTVWPGILGTPELGSTGFELAKGGSRSFQAPTGWSGRFWGRTGCQFDGLGKGTCATADCGSGEVNCNGAGASPPATLAEFTLGTGSMDYYDVSLVDGYNLPMMVVARGGSGSCGATGCGEDLNXRCPSELRVEGGDACQSACGAFGKPEVCCNGAFSNPSTCKPSMYSQMFKSTCPKAYSYAYDDATSTFTCSGADYTITFCPSSPSLKSSTDSSPKGIDGGSGSVGGSSVEQSELASTSWLADMATATGASTRTRPLVASKVSFSVVVVFILSLLVA

SEQ ID NO: 207781 - protein, 225 aa, Glycine max
  Clone ID: PAT_MRT3847_29652C.1.pep
MSPGPVIDAATDPGADQQIPSVDDAILKKKAHPQEDDAPIVEDVKDDDKEETEDEDEDDDDDDKEDDAQGGAEGGKQSRSEKKSRKAMLKLGLKPVTGVSRVTIKRTKNILFFISKPDVFKSPNSETYVIFGEAKIEDLSSQLQTQAAQQFRMPDVGSVTAKQDQDAAAAAVQPEEEEEEVDETGVEPHDIDLVMTQAGVSRSKAVKALKTHNGDIVGAIMELTT

SEQ ID NO: 207782 - protein, 214 aa, Glycine max
  unsure (1)..(214): unsure at all Xaa locations
  Clone ID: PAT_MRT3847_29653C.1.pep
EAQVLNLRREVLKASRLVPLASGRFAPVADSTVRGRWXSYLTXTPIKTNAVQAMRKGPQGKNARPKGMITCGMTFIIIGTEVAPWCKTGGLGDVLGGLPPALAGFGHRVMTIVPRYDQYKDAWDTSVVIEVKVGDRTEKVRFFHCYKRGVDRVFVDHPWFLEKVWGKTGQKLYGPTTGNDYEDNQLRFSLFCQAALEASPSLSLVKFSQPLACY

SEQ ID NO: 207783 - protein, 71 aa, Glycine max
  Clone ID: PAT_MRT3847_29654C.1.pep
GGNEVAPSFWVGLGGGFSPPPTKKRGPPIPTPLFINNFVVLTPNNFWGGGVKYNPPPPFLRWNNFLPPLYY

SEQ ID NO: 207784 - protein, 60 aa, Glycine max
  Clone ID: PAT_MRT3847_29655C.1.pep
FPFSLFIKRLASRFPYPSTLSLSLSLSLSLSFSVSVSCFWFQVLMSGGLLIYASYSQKRR

SEQ ID NO: 207785 - protein, 100 aa, Glycine max
  Clone ID: PAT_MRT3847_29656C.1.pep
MATLTASSNLVSRNSHVHHGPTTASYESKAVAMGLRSLKQTNTHSGLRIFNPVDELLNRTPIKTNAMQAMRKGPQGKNAWPKGIITCGMTFIIIGTEVAP

SEQ ID NO: 207786 - protein, 55 aa, Glycine max
  Clone ID: PAT_MRT3847_29657C.1.pep
VHSLGSSSGVTNKSAPSLKKLGQTLVGLNLQNCNSIGCNTVEFLVENLWRCDILA

SEQ ID NO: 207787 - protein, 53 aa, Glycine max
  Clone ID: PAT_MRT3847_29658C.1.pep
DPKGHLWGPANQDLTCAWMVALMELLRHRLCFPQCSLVFCKRVSGYPAFGNAA

SEQ ID NO: 207788 - protein, 140 aa, Glycine max
  unsure (1)..(140): unsure at all Xaa locations
  Clone ID: PAT_MRT3847_29659C.1.pep
FWVFPLGFPLTGMCNIIFNETLIRYSYEKLLRQAKAPSMFLQSFKNYVSLCVYGDDNLISVHEYAKPYFSGSKMRSSLAGHNITITDGIVKTSANLQFTKLADREFSKRNFMQXSKVLWVAXEDKASLWPQLHYVSCNNL

SEQ ID NO: 207789 - protein, 46 aa, Glycine max
  Clone ID: PAT_MRT3847_2965C.1.pep
YIILHSFCLKKKTFYVSISTFCQKKITVLHITIISKSIHIIFYFTV

SEQ ID NO: 207790 - protein, 49 aa, Glycine max
  Clone ID: PAT_MRT3847_29660C.1.pep
FSIKQLTDIPTLSHYNIQKQFFLHLMLHLHHIIQIFFKTLTQKTITLYV

SEQ ID NO: 207791 - protein, 103 aa, Glycine max
  Clone ID: PAT_MRT3847_29661C.1.pep
RQNPRNSARDFVFFFFGCCFFTALTALGGAAHTPSKTKKPLYLYLSLFLDHTQEKPNSSSASYVRRLLRTLDPTTKQPLNQFLTDTTFSPSASLYQPMAESAN

SEQ ID NO: 207792 - protein, 88 aa, Glycine max
  Clone ID: PAT_MRT3847_29662C.1.pep
TPSLCDSASVLPSVHQLQTMADKKRKERNEGNRQRPKSKKKRPNTQQKERGPCLPSSLQKQLDCLNPTTSFDSIDSDDYNDNDVHEYK

SEQ ID NO: 207793 - protein, 64 aa, Glycine max
  Clone ID: PAT_MRT3847_29663C.1.pep
AVGHYVCVLKVHVVTYTLNGTVDAVQYDHPICLVRTQSGDTGRPMVSHRCEEKMYMLSHIQARA

SEQ ID NO: 207794 - protein, 42 aa, Glycine max
  Clone ID: PAT_MRT3847_29664C.1.pep
ARAQILSSLITLLTLYPYLLPGTDPFITTPTSSTIPYNSDFP

SEQ ID NO: 207795 - protein, 59 aa, Glycine max
  Clone ID: PAT_MRT3847_29665C.1.pep
HSLDNLLCSNEHSLIRPVLPRINAHVLPFLWNRPTSFDFRSLMVNAIQLQLNTCIGNHL

SEQ ID NO: 207796 - protein, 74 aa, Glycine max
  unsure (1)..(74): unsure at all Xaa locations
  Clone ID: PAT_MRT3847_29666C.1.pep
LNAAHSKQSGFTIXIAREGITPLTEVHQPESLIDRDHPRFSLGLSPRTASLVRLQARLSIFRPRLKEREILSSV

SEQ ID NO: 207797 - protein, 133 aa, Glycine max
  unsure (1)..(133): unsure at all Xaa locations
  Clone ID: PAT_MRT3847_29667C.1.pep
KFRVDPPLGEPNKFIPAPQLKCFSYEFSAERFEITPGHGQAAACDLCGVSQDYSDGLKLGLGLYNPGTSEVGPSQSKDEPETDEINDADWSDLTEAQLEELVLTNLDTILKSAIXKIVACGYTEDVATKAILR

SEQ ID NO: 207798 - protein, 34 aa, Glycine max
  Clone ID: PAT_MRT3847_29668C.1.pep
IEKKGILEKIKEKLPGYHSKTEEEKEKEKESGAH

SEQ ID NO: 207799 - protein, 122 aa, Glycine max
  Clone ID: PAT_MRT3847_29669C.1.pep
LCEIPGNSGEQNLESQIDNGLYQTFKQNLTLEEAKSAKVSSEDRQLQAVAEGLAASVLHSSTSSNLDLHARDVSHHEDTGNEDVQNNQTDIQHNDKTQDLKSKLPEKANFGFPVSDVGALQV

SEQ ID NO: 207800 - protein, 54 aa, Glycine max
  Clone ID: PAT_MRT3847_2966C.1.pep
YVLCLSMVYSAVWVFCVKPTIFRIKWSSLAFQLVPVFWTCERCVKLRVASIFIF

SEQ ID NO: 207801 - protein, 83 aa, Glycine max
  Clone ID: PAT_MRT3847_29670C.1.pep
PMRPRVFCDFANPIWSQCRHSFLDSTLFLFYLFLMDRKAYDHRPAPPAHAHTPEYLALQGNTTYQDDLYLRTRTGMRKRLRCT

SEQ ID NO: 207802 - protein, 69 aa, Glycine max
  Clone ID: PAT_MRT3847_29671C.1.pep
LDSIVYWTSFNQIIQPNGLLGDKTFHLVISLGLHQEALKLLGPTLGARPVLASSVTRRNRGNVPLYGCF

SEQ ID NO: 207803 - protein, 34 aa, Glycine max
  Clone ID: PAT_MRT3847_29672C.1.pep
YGLAQCWEFVNGSACERCLADAVTRIGSCSTQDA

SEQ ID NO: 207804 - protein, 100 aa, Glycine max
  unsure (1)..(100): unsure at all Xaa locations
  Clone ID: PAT_MRT3847_29673C.1.pep
RADYVREWTALDSQSTGRYTSASGGEVVRTAXRMHTRLILNKESAARSQSXXQAYAHELEIKVSRLEDANVRIKRLNEMESALTSVPTAEPRPKLQLIRT

SEQ ID NO: 207805 - protein, 68 aa, Glycine max
  unsure (1)..(68): unsure at all Xaa locations
  Clone ID: PAT_MRT3847_29674C.1.pep
WXLSXXTVXXLASSGRAXXPXGXXRILXMRVSNXXLIXHXSRRSXSFSSKXRVAXKPSTIAFLQGQEG

SEQ ID NO: 207806 - protein, 43 aa, Glycine max
  Clone ID: PAT_MRT3847_29675C.1.pep
ICLILIFKPSNRMGCYNCKRFSNRGSKARKLRRGNFVPSSSFV

SEQ ID NO: 207807 - protein, 161 aa, Glycine max
  Clone ID: PAT_MRT3847_29676C.1.pep
PLSTTTSPLPLSQMSLSRKPLSPSPSTPAKQIDAGDLAPAPRLTRQRKLRHLTHQDIGFFHSDESSFLPGLPEFRSHAGSDHRSFSALPQPLPLPEAPLTRRAKSISSSSVNRRRLSSSLEQHGFAISRSTVYQEAVARTKPTLNLDKSCLDSTLANANTI

SEQ ID NO: 207808 - protein, 91 aa, Glycine max
  Clone ID: PAT_MRT3847_29677C.1.pep
HNSAVKCRSVCFRQLGAMGKCLYSELGHLKDLSHMGYRMNWYMLKRLYASSFRPVVYLKYVTMREKFMKCSFLGLRMVLFFHFSLTKKVVF

SEQ ID NO: 207809 - protein, 124 aa, Glycine max
  Clone ID: PAT_MRT3847_29678C.1.pep
MEASEQNNSKVVLIDSLQSWEFHVNQAYNQNTPVVVHFTASWCMPSVAMTPVFEELASSYPEVLFLTVDVDEVKEVATKMDVKAMPTFLLLKDGAAVDKVVGANPEEIKKRIDGVAESTRVSLA

SEQ ID NO: 207810 - protein, 322 aa, Glycine max
  Clone ID: PAT_MRT3847_29679C.1.pep
MPEIQLGMHTIRSHGTRVARTHMHDWLILLLLVIIDAVLNLIQPFHRFVGEGMMTDLRYPLKANTIPFWAVPIIAILLPLAVFLVYYFIRKDVYDLHHAIMGLLFSVLITAVMTDAIKDAVGRPRPDFFWRCFPDGKGVFDPVTSNVLCTGDKGVIKEGHKSFPSGHTSWSFAGLVYLAWYLSGKLRAFDRRGHVAKLCLVFLPFLVAAMIAVSRVDDYWHHWQDVFAGALIGMIIASFCYLQFFPPPYDVDGWGPHAYFQMLAESRNGAQPSTVNNEIHHVQSAELQAVSLYIPPQHDADTRGNSWDSSPMLGASQNVRTH

SEQ ID NO: 207811 - protein, 64 aa, Glycine max
  unsure (1)..(64): unsure at all Xaa locations
  Clone ID: PAT_MRT3847_2967C.1.pep
MDFFYSLGGKMETYEYHTLHIFFFPFFAYGHVIPTLDMAKXFTEKGDKATIFTTPLNAPFISKV

SEQ ID NO: 207812 - protein, 70 aa, Glycine max
  unsure (1)..(70): unsure at all Xaa locations
  Clone ID: PAT_MRT3847_29680C.1.pep
MANIDIXEGILXQQQPYXGXVPKTKIXCTXXXXFSILKMTEELLXXGMNVARFNXSHXTHXYXQXTLNNL

SEQ ID NO: 207813 - protein, 125 aa, Glycine max
  Clone ID: PAT_MRT3847_29681C.1.pep
DIRPKDQTLGQTSYMSPFSSSSCRELAIVITLSRHTLCDHHACLALLPLQITSMAHSLVLREQNSLLPCLIYTVHTILTIGEAAHSSDTAGDRVGELSLPNGELYAGYFLGTFQTRRLSIVWTDA

SEQ ID NO: 207814 - protein, 182 aa, Glycine max
  Clone ID: PAT_MRT3847_29682C.1.pep
KKSHFFNSSICNNIALDTGIIETGASHHICASLHWFHSYSEINPMIIKLPNGNHVTTKYAGTVVFSSSFSITNVLYVPTFTVNLISVSQLCHHTPYTLNFTDTICSIQEQKSLKMIGLGESRDGLYYLTQTNKECASSNYNISSIFSSANNVHIPENAIWHFRLGHLSSSRVDLHPCKPVSK

SEQ ID NO: 207815 - protein, 115 aa, Glycine max
  Clone ID: PAT_MRT3847_29683C.1.pep
WKVFIRRKGCKQQMAHKDLTNGKATKSIFSGINPHTESIGTATSKRSKEADSQIPIKSIGADEGQIEEALTQWELAKLMWVSTDSEQTTIIHKIIDMETTDKKEAEDLGDKKPAS

SEQ ID NO: 207816 - protein, 59 aa, Glycine max
  Clone ID: PAT_MRT3847_29684C.1.pep
YAHSIYPHASTLKKKTGCVPFFSDTLARLFLFNLNNLIMFLDQGWIKIPQGTGRCSNHP

SEQ ID NO: 207817 - protein, 57 aa, Glycine max
  unsure (1)..(57): unsure at all Xaa locations
  Clone ID: PAT_MRT3847_29685C.1.pep
MAETFLFTSESVNEGHPDELCDQISDAVLDACLEQDPDSXVACETCTKTNLVMGFGE

SEQ ID NO: 207818 - protein, 39 aa, Glycine max
  unsure (1)..(39): unsure at all Xaa locations
  Clone ID: PAT_MRT3847_29686C.1.pep
DFLCTXQRXXKREREXTDLLSQLLNCKVXXVPXXXDSXX

SEQ ID NO: 207819 - protein, 63 aa, Glycine max
  unsure (1)..(63): unsure at all Xaa locations
  Clone ID: PAT_MRT3847_29687C.1.pep
PKVILWQVYHTNLVNLVTHGQXIINPIPDFNVCQPKLTSIVQKPDGRTILSYRDSLRDQTETF

SEQ ID NO: 207820 - protein, 30 aa, Glycine max
  Clone ID: PAT_MRT3847_29688C.1.pep
SHSPTHIKVKVLVKVHPQSSWLDLFNFGHK

SEQ ID NO: 207821 - protein, 365 aa, Glycine max
  Clone ID: PAT_MRT3847_29689C.1.pep
LRVQALESGSKKQMNNTLHPLSVLKLSKRMSTSMRESILPICLLDATASPCRSPWKIFTHHEIQVATNSFSQENLIGKGGYAEVYKGCLPNRQLVAIKRLTRGTADEIIGDFLSELGVMAHVNHTNTAKLVGYGVDGGMYLVLELSEKGSLASVLYGSKEKLPWCIRHKIALGTAKGILYLHEGCQRRIIHRDIKAANILLTKDFEPQICDFGLAKWLPENWTHHTVSKFEGTFGYLAPEYLLHGIVDEKTDVFAFGVLLLELVSGRRALDYSQQSLVLWAKPLLKKNDIMELVDPSLAGDFDSRQMNLMLLAASLCIQQSSIRRPSIRQVVQLLNGNLSCFKGMKKTRMPFFRRVFREELLDSD

SEQ ID NO: 207822 - protein, 77 aa, Glycine max
  Clone ID: PAT_MRT3847_2968C.1.pep
YCYSIGQAEYLLSTHKNAHHHYSTSFSVGLFTSYCIKPCYLLTNTEVQDQRTDQNRCFQSEGQHQALTTVVECFRML

SEQ ID NO: 207823 - protein, 43 aa, Glycine max
  Clone ID: PAT_MRT3847_29690C.1.pep
IFRKKRSKYKLGIPFPESGGGALITGPGCTGSYQLCCFQCFEL

SEQ ID NO: 207824 - protein, 63 aa, Glycine max
  Clone ID: PAT_MRT3847_29692C.1.pep
LDMEDVVAVHELHIWAITVGKVLLACHVKIRREADADVVLDKVCLGHLNASMVLIQEGPFQSR

SEQ ID NO: 207825 - protein, 106 aa, Glycine max
  Clone ID: PAT_MRT3847_29693C.1.pep
PSSGVFFFFFFFFFFSFYLPPSGKNGSGARKRGGGENPGGTQRKRGAENKKIFFKEGGDQGSPVRASKKERCLNGEGGPPRNSTINGDGGGGYSHRDRYTRQGPRA

SEQ ID NO: 207826 - protein, 70 aa, Glycine max
  unsure (1)..(70): unsure at all Xaa locations
  Clone ID: PAT_MRT3847_29694C.1.pep
GVDFFVQHYTCPNGPAGYXCKSPAKVTVDDFLYSCLDTAGNNSNIIKAALTPAFDAQFPDLNGLLIFIAR

SEQ ID NO: 207827 - protein, 54 aa, Glycine max
  Clone ID: PAT_MRT3847_29695C.1.pep
PASGSSPNHYINIKEEEKGKKVFLMNWCFSYSFFFSHFQVRIHRIMSCELLLFI

SEQ ID NO: 207828 - protein, 59 aa, Glycine max
  unsure (1)..(59): unsure at all Xaa locations
  Clone ID: PAT_MRT3847_29696C.1.pep
MKEHDNDVITNAVSGSGFRRTRSHAEPDWSVTESLILVNEVXAVEADCSVALSLYQQWN

SEQ ID NO: 207829 - protein, 50 aa, Glycine max
  Clone ID: PAT_MRT3847_29697C.1.pep
KKEWGYVANLFTPSGGERNNSEVKFFASRGKKPKRGIKCFWGCVSPHPVE

SEQ ID NO: 207830 - protein, 150 aa, Glycine max
  unsure (1)..(150): unsure at all Xaa locations
  Clone ID: PAT_MRT3847_29698C.1.pep
SQNARTANEYDYLLAYXQARRRKXSKRVDNNQLAAVEDNRKIESRVKHVDESDFEANHSDPHDNLNALLKEEEDLVTAHRRQVEETIGIVREEMNLLVEADQPGNQMRGYIYKLNTILSQKAAGIFQLQSQLAQFQRRLNEYNVVVTSGN

SEQ ID NO: 207831 - protein, 59 aa, Glycine max
  Clone ID: PAT_MRT3847_29699C.1.pep
YKIIILFMMATNNHVLAKTFDKATGPGSKYYNFHSIFTIQKVLECFWLIIFLFYMKLSW

SEQ ID NO: 207832 - protein, 60 aa, Glycine max
  Clone ID: PAT_MRT3847_2969C.1.pep
SGPEIFIFSKLESKIIRLIGLTVSSIFLFVGTPHYPPVCDRTQSLRFHEYPSLGKPGGSL

SEQ ID NO: 207833 - protein, 56 aa, Glycine max
  Clone ID: PAT_MRT3847_296C.1.pep
MADVFLAPQITLAVQRFDIDMSKFPTLSRLYETYKALPEFQASSPQRQPDALIHNP

SEQ ID NO: 207834 - protein, 72 aa, Glycine max
  Clone ID: PAT_MRT3847_29700C.1.pep
YFILTTPHNLFNFQTYFSLKKTIPIQFSLSLFHHQPLTMAIIIYFQPNQLLYPYDLHFIKTTLLLQLIYFST

SEQ ID NO: 207835 - protein, 67 aa, Glycine max
  unsure (1)..(67): unsure at all Xaa locations
  Clone ID: PAT_MRT3847_29701C.1.pep
PFITTIPIYHITXTTNTNTPTYTIHFSSTQLNQNNLIFYFQHFSLTTFIKLHISYHFNNPNIFLKKI

SEQ ID NO: 207836 - protein, 69 aa, Glycine max
  unsure (1)..(69): unsure at all Xaa locations
  Clone ID: PAT_MRT3847_29702C.1.pep
GMAVAEHSVNTFLDXSTKVHRYVILKDDDKPTEVIIQETKLAAESYDDLNASFPENDCRYAVFDYEKGT

SEQ ID NO: 207837 - protein, 203 aa, Glycine max
  Clone ID: PAT_MRT3847_29703C.1.pep
AFTTGDILLNTVQLLWVNLIMDTLGALALATEPPTDSLMDQSPKGRREPLVSNIMWRNLLIQAMYQVSVLLILNFRGVSLLALRDEPNRPAIKVKNSLIFNAFVLCQVFNEFNARKPDKFNIFKGVTRNYLFMGIVGITVVLQIVIIEYLGKFTKTAKLNWKQWLISVIIAFISWPLAVVGKLIPVPKAELSNFFRKCLRRGN

SEQ ID NO: 207838 - protein, 97 aa, Glycine max
  unsure (1)..(97): unsure at all Xaa locations
  Clone ID: PAT_MRT3847_29704C.1.pep
QVFNEFNARKPDXFNIFKGVTRNYLFMGIVGITVVLQIVIIEYLGKFTKTAKLNWKQWLISVIIAFISWPLAVVGKLIPVPEAELSNFFRKCLRRQN

SEQ ID NO: 207839 - protein, 625 aa, Glycine max
  Clone ID: PAT_MRT3847_29705C.1.pep
SIFCTWKDVNTWKPFSAEWRQDGVLPELPPENETNGYIFIHAEGGLNQQRIAICNAVAVAKILNATLILPVLKQDQIWKDQTKFEDIFDVDHFIDYLKYDVRIVRDIPEWFTDKSELFTSIRRTVKNIPKYAPAQFYIDNVLPRVKEKKIMALKPFVDRLGYDNVPPEINKLRCRVNYHALKFLPDIEQMANSLASRMRNRTGSSNPYMALHLRFEKGMVGLSFCDFVGTREEKAKMAEYRKKEWPRRYKNGSHLWQLALQKRKEGRCPLEPGEVAVILRAMGYPKETQIYVASGQVYGGQNRMAPLRNMFPNLVTKEELATKEELDGFRKHVTSLAALDFLVCLKSDVFVMTHGGNFAKLIIGARRYMGHRLKSIKPDKGLMSKSFGDPYMGWAPFVEDVVVTHQTRTGLPEETFPNYDLWENPLTPCMVNDGIWAPVNASFEVGGAVSFVIIIGGFGSLKVQSVIEDALEIVIKQMPIGAKKSSIKYVQSREKRDHSVHGEDKRCSFNSGLKYHRLETGKPERVRKRENYMMGRTKPLIQGRLSRFCVLGEESGFLGVIWYEGEKRGGGKKREVELRNGLFPYITSVNSEDRDLGERGLRAIGQFELVYGRVEVEAARVLDLA

SEQ ID NO: 207840 - protein, 110 aa, Glycine max
  Clone ID: PAT_MRT3847_29706C.1.pep
KKKIRKESPGGGVFFWVILKGGYLICWGSPPWENIVKFPRGFLKKGRDWGRAPGQKDFVFYLKVKAGSHGEGVNFEYRGVREDLSRRGKKKGHPTKKVPKVKKKKKQKMK

SEQ ID NO: 207841 - protein, 73 aa, Glycine max
  Clone ID: PAT_MRT3847_29707C.1.pep
LFLLFLQSTTNKHYIWIHQNCKIKSEVKASIEIQTFLSDSFPLVAIGGGIKDGTYSFILTWSCFFPAFNLHFG

SEQ ID NO: 207842 - protein, 627 aa, Glycine max
  unsure (1)..(627): unsure at all Xaa locations
  Clone ID: PAT_MRT3847_29708C.1.pep
MAELRHSSSLGSRASNSPMKRDAVAVGSDSSPLIPDNHLAHDDDEHDRHSSKDRDRQLCSFFTDDPRVSPHNSRISIFFTLLLLLVGLVSLFTIFNNLVSPHLSGCIFRFTTKSLMHCILLRLSNAPYLCKKDGIVLHCPHXSPSLWENPFSSTTSWKPCAERQDGXYQDANYGSVALYWAQKECRSAESVWSVGNVMSMNISCQPATVAMCSWLGNLETDSVGEMLLMGQFADFNDGPPWLLADHDDAFHVCRKFEDIFDVDHFIDYLKYDVRIVRDIPEWFTDKSELFTSIRRTVKNIPKYAPAQFYIDNVLPRVKEKKIMALKPFVDRLGYDNVPPEINKLRCRVNYHALKFLPDIEQMANSLASRMRNRTGSSNPYMALHLRFEKGMVGLSFCDFVGTREEKAKMAEYRKKEWPRRYKNGSHLWQLALQKRKEGRCPLEPGEVAVILRAMGYPKETQIYVASGQVYGGQNRMAPLRNMFPNLVTKEELATKEELDGFRKHVTSLAALDFLVCLKSDVFVMTHGGNFAKLIIGARRYMGHRLKSIKPDKGLMSKSFGDPYMGWAPFVEDVVVTHQTRTGLPEETFPNYDLWENPLTPCMVNDGIWAPVNASFEVGGAVNRNLKQ

SEQ ID NO: 207843 - protein, 121 aa, Glycine max
  unsure (1)..(121): unsure at all Xaa locations
  Clone ID: PAT_MRT3847_29709C.1.pep
VVESDHVDQVVCEEQHDDIEQTGEEPIEQVPQQDDQATLRRSTRAKMTTIPNDYVVYLQESDYNIGAENDPETFSXAMSSKESNLWYNAMRDEMHSMASNQVWDLVEFPVGAKAIGCRWVF

SEQ ID NO: 207844 - protein, 178 aa, Glycine max
  unsure (1)..(178): unsure at all Xaa locations
  Clone ID: PAT_MRT3847_2970C.1.pep
NNYARGHYTVGKEIIDPVLDRIRRIADNCTGLQGFLIFHSFGGGTGSGFTSLLMERLSVDYGKKSKLEFSIYPAPQVSTAVVEPYNSVLTTHTTLEHSDCAFMVDNEAIYDICRRNLDVERPSYTNLNRLISQVVSSITASLRFDGALNVDLTEFQTNLVPYPRIHSPLATYSXVISA

SEQ ID NO: 207845 - protein, 208 aa, Glycine max
  Clone ID: PAT_MRT3847_29710C.1.pep
LLQRSFLPLLSSFFPVEKLLSSRFFKVGCDTSDKAPMLDEAISYLKSLQYDEQMLSMGCGMVPVMFPGIQQYMPAMGMGVGMGMGMGMGMNRPVMPFPNMLPGSALPAATAAAAHLGPRFSMPPFHMPHVPAPDSSRMQAANQSDNNMVTSAGPPDPNQSRIPNFTDPYQQYLGPHQMQFQLIQNQAMNQPNVSKPSNNGGPANPENH

SEQ ID NO: 207846 - protein, 64 aa, Glycine max
  Clone ID: PAT_MRT3847_29711C.1.pep
HVITFIIEKLHVTACVCGPYVKFQEYLIKFPITLSSVVFLCACFLCQVNVPRSKGVETANYRHK

SEQ ID NO: 207847 - protein, 79 aa, Glycine max
  Clone ID: PAT_MRT3847_29712C.1.pep
AGTASLMAGAQRKLLATACPSRRAQQHSGLCCAGCGARQRKKRAGRWRSRWSGRRGCWWRWRGARREEWRAGYGLVCMV

SEQ ID NO: 207848 - protein, 52 aa, Glycine max
  unsure (1)..(52): unsure at all Xaa locations
  Clone ID: PAT_MRT3847_29713C.1.pep
FRPKRASPTLGNVFRLVVVIGCLLMKEVLTMVPDRAAVVAIDXRXMAPVRVV

SEQ ID NO: 207849 - protein, 44 aa, Glycine max
  Clone ID: PAT_MRT3847_29714C.1.pep
LLFRRMCPRWLVLDVRWNEVWGPYLFLSRYIYKSLRSDRKDVSR

SEQ ID NO: 207850 - protein, 83 aa, Glycine max
  Clone ID: PAT_MRT3847_29715C.1.pep
MRKMDGKDQDVSLGANKFPERHPIRTAAQSQDDGKDYQEPAPAPLVDSTEFTSWSFYRARIAVFVATFQCRYINVLTVMGVAG

SEQ ID NO: 207851 - protein, 68 aa, Glycine max
  Clone ID: PAT_MRT3847_29716C.1.pep
NPNWELTTGIGVSQTFERAISLLPLRALTNHLGSYLTLILLLFCRCGFSMTAHIRSLVRNGLVWHLTQ

SEQ ID NO: 207852 - protein, 85 aa, Glycine max
  Clone ID: PAT_MRT3847_29717C.1.pep
PVSFETDSWGFGCTILEMLTGNQPWYGCPVGEIYQSVVEKYEKPLIPSGLPSSVENILSGCFEYDLRNRPSMVDILAVFRRFVSF

SEQ ID NO: 207853 - protein, 269 aa, Glycine max
  unsure (1)..(269): unsure at all Xaa locations
  Clone ID: PAT_MRT3847_29718C.1.pep
DNSVLLQQLPHWAPCSITQALEFLSPAYKGHPRVMAYILRVLESYPPERVTFFMPQLVQSLRHDEGKLVEGYLLRAAQRSDIFAHILIWHLQGETVPETGKDPNSGKNGSFLELLPAVRQRIIDGFNPKALDIFKREFDFFDKVTSISGVLFPLPKEERRAGIRRELEKIEMDGEDLYLPTAPNKLVRGIRVDSGIPLQSAAKVPIMITFNVIDRDGDENDVKPQACIFKVGDDCRQDVLALQVIALLRDLFEAVGLNLYLFXYGVLPT

SEQ ID NO: 207854 - protein, 66 aa, Glycine max
  Clone ID: PAT_MRT3847_29719C.1.pep
PDGCPLADWSAGSVLFGPIPIHLQNCGIKDRKHHDLIYSRLCQFIDLWGGIMDKTGMITLSKFIVL

SEQ ID NO: 207855 - protein, 83 aa, Glycine max
  Clone ID: PAT_MRT3847_2971C.1.pep
LEPSQLIAGGIVVGVILHGGTHLACDFPRISESDKSIFRQTIGAGFGYHRPTYTQIFATTDVASMIGIVVTMGIAFALADKWS

SEQ ID NO: 207856 - protein, 170 aa, Glycine max
  Clone ID: PAT_MRT3847_29720C.1.pep
MQFRLGKRVVRVAKCVFRRIRVRTRPGYYHRLGGSTTHSKNPITTRLLTWGQKLKRGAKTLCGKNGSGYLPIGSDPLCDRAPAVPKGHLAVYVGEEDGGFRRVLIPVIYCNHPLFSDLLREAEKEFGFEHPGGITIPCRLTEFERVKTRIASGSGQRGRTRRLGWPLQHY

SEQ ID NO: 207857 - protein, 50 aa, Glycine max
  unsure (1)..(50): unsure at all Xaa locations
  Clone ID: PAT_MRT3847_29721C.1.pep
ISXFVHVKRRKVSCCRFAERHYFSMENSKRNSLCRASSFGNELESNSQAS

SEQ ID NO: 207858 - protein, 37 aa, Glycine max
  Clone ID: PAT_MRT3847_29722C.1.pep
MTSPLEAMAASIVDTMEDLGCMGLILASDLVRGQLVR

SEQ ID NO: 207859 - protein, 72 aa, Glycine max
  Clone ID: PAT_MRT3847_29723C.1.pep
QEALDTLIMGNKTTILIAHRAAMMRHVDNIVVLNGGRIVEEGSHDTLVAKNGLYVRLMQPHFGKALRQHRLV

SEQ ID NO: 207860 - protein, 57 aa, Glycine max
  unsure (1)..(57): unsure at all Xaa locations
  Clone ID: PAT_MRT3847_29724C.1.pep
XVXFFNPQAGVASAXAPVNPPPAVHLAHQFXCRTRGPWMIFLQPSPPPRXYQALKNL

SEQ ID NO: 207861 - protein, 121 aa, Glycine max
  Clone ID: PAT_MRT3847_29725C.1.pep
VHFANELLDIHFKSALDDLLKICQTKIHADQGDEKEHLKVTLLRIESSLQGLFSCLPDFVPDSRNGMVEDSNHMFLIAGATGCTVGSTALREKATEVVHAACKYVLEKKSDDSILLILIIR

SEQ ID NO: 207862 - protein, 67 aa, Glycine max
  Clone ID: PAT_MRT3847_29726C.1.pep
VHGVRSQVRAKMCREHKVILLIEGDLFYNFNPKGRDVLVGFHFSPIEKDFLCSANFEIDETRWYIIC

SEQ ID NO: 207863 - protein, 65 aa, Glycine max
  unsure (1)..(65): unsure at all Xaa locations
  Clone ID: PAT_MRT3847_29727C.1.pep
MRLRGALAWSIDGEVLKCLSVQALLEPDALYAVIPIVXDYPTCNKXTLCIWPDEMTHWYTYRWTT

SEQ ID NO: 207864 - protein, 39 aa, Glycine max
  Clone ID: PAT_MRT3847_29728C.1.pep
YVWHCYGAKLLGGEESRAMHELLHLVYVLRSANSPLCVV

SEQ ID NO: 207865 - protein, 115 aa, Glycine max
  Clone ID: PAT_MRT3847_29729C.1.pep
MPCLNLSTNVNLDGVDTSSILSEATSTVASIIGKPEAYVMIVLKGSVPISHGGSEQPAAYGELVSIGGLSPDVNKKLSAGIASILENKLSVPKSRFYLKFYDTKGSNFGWNGSTF

SEQ ID NO: 207866 - protein, 149 aa, Glycine max
  unsure (1)..(149): unsure at all Xaa locations
  Clone ID: PAT_MRT3847_2972C.1.pep
LLFGVASLKAYLGEGHATLIFLLHGVAPPIPYNDLTRDGALHPTGLMGEPVAHAFAXFVGASXATNVSSEHLNPGVTFFLAIRTNISLISGFLYWTDQLQASLVACHHRDIITGKRNPRHAPRNGVNXCRAVGLDIVNTFALDCTVHET

SEQ ID NO: 207867 - protein, 99 aa, Glycine max
  unsure (1)..(99): unsure at all Xaa locations
  Clone ID: PAT_MRT3847_29730C.1.pep
SIHEFMVKDAKGIDVNLSTYXGKGFLEDNDDAKCGSTNSNDTQVTELYSIYKDKGHEILAFTCNPSLKHEPRSSQYADEFACTRHNAVYPIYGTVRVNG

SEQ ID NO: 207868 - protein, 73 aa, Glycine max
  Clone ID: PAT_MRT3847_29731C.1.pep
KKKKIFIFFKKILPFLLPGPPFFFLPIFLGRPFKNKNDCPGLYPGLGEGLVFKIFFFPPKTLGLPPALLVWGT

SEQ ID NO: 207869 - protein, 121 aa, Glycine max
  Clone ID: PAT_MRT3847_29732C.1.pep
MPCLNLSTNVNLNGVDTSSILSEATSTVASIIGKPEAYVMIVLKGSVPISHGGSEQPAAYGELVSIGGLSPDVNKKLSAGIASILENKLSVPKSRFYLKFYDTKAHQSQEYAQCLHALHQH

SEQ ID NO: 207870 - protein, 56 aa, Glycine max
  Clone ID: PAT_MRT3847_29733C.1.pep
GKLGNLTLAQNFKIMNREHPIKHSPVNKVFNINEVPIFFLETVQEKKKIPIKGSTF

SEQ ID NO: 207871 - protein, 63 aa, Glycine max
  Clone ID: PAT_MRT3847_29734C.1.pep
LDGISKKKFFLTLKKKGRKGCITFYLTTLTKHLDYLLNGPQILLSSEGEQNPFFTFTYSDFLF

SEQ ID NO: 207872 - protein, 80 aa, Glycine max
  Clone ID: PAT_MRT3847_29735C.1.pep
RTDRESRVFGVTIGKGNPSNQFTLAPQGQGKKKIEKVFFPICPPQPFLFMPNLKFFNFGVGAKYLLGFPNKQNPLIGSLP

SEQ ID NO: 207873 - protein, 165 aa, Glycine max
  Clone ID: PAT_MRT3847_29736C.1.pep
MAQQDAQNGGSENAAAAATVSFVAVKPQLLVEAPKANDAILFFKAAFGAEEVGRTLNPKRKAEHELPLILSAELKIAGSTILVADLVDDTSSPAKTGGNGVVLCLETEDVDGAVAKAVSAGAVAEGEVAEGEVACCGGRVGKVKDPYGFVWLFCTPGKKCADVEA

SEQ ID NO: 207874 - protein, 58 aa, Glycine max
  Clone ID: PAT_MRT3847_29737C.1.pep
VECEVMLSGKQYFTFPKIRHSIAGLILQVFSLHAAADRLSPIELGINNNTWPLMSSVS

SEQ ID NO: 207875 - protein, 215 aa, Glycine max
  Clone ID: PAT_MRT3847_29738C.1.pep
MVFYFKARPEAGDFTIFMGLDKFENEELIKYGFPEDIWFHVDKMSSAHVYVRLHKGQTLDDLSEALLEDCAQLVKANSIQGNKVNNVDVVYTPWSNLKKTASMDVGQVGFHNSKMVRTVRVEKRINEIVNRLNKTKVERKPDLKGEREAVGAAERAERKQQLREKKRREELERLEKEKQTELRSYKGLMVAENMTSNKQIASGSKSLQELEEDFM

SEQ ID NO: 207876 - protein, 30 aa, Glycine max
  Clone ID: PAT_MRT3847_29739C.1.pep
HLGANLGLRYGLRCNLECHHDVCKGTRYGT

SEQ ID NO: 207877 - protein, 157 aa, Glycine max
  unsure (1)..(157): unsure at all Xaa locations
  Clone ID: PAT_MRT3847_2973C.1.pep
YFYAETAGSSIYGGPLKGGRTIRVGTLASTIGRIEPNMNTKWQLWSATTNGDFVQGKELAMVKANAPXAGDGLTXSYTSTSLMEYGXQKDKGLIGEHYGRMCYGEHNVYQAREKDLLEGKTSFDNKSRYRXEKVFYSKAQCVRGKTFTNDIKGAWAH

SEQ ID NO: 207878 - protein, 215 aa, Glycine max
  Clone ID: PAT_MRT3847_29740C.1.pep
MVFYFKARPEAGDFTIFMGLDKYENEELIKYGFPEDIWFHVDKMSSAHVYVRLHKGQTIDDMSEGLLEDCAQLVKANSIQGNKVNNVDVVYTPWSNLKKTASMDVGQVGFHNSKMVRTVRVEKRINEIVNRLNKTKVERKPDLKAEREAVNAAERAERKQQLREKKRREELGRLEKEKQTELRSYKGLMVAENMTSNKQIASGSKSLQELEEDFM

SEQ ID NO: 207879 - protein, 41 aa, Glycine max
  Clone ID: PAT_MRT3847_29741C.1.pep
TVHLTRSKLTIHKIKKNLVFPFSRKFQTPVLQNWSSITHLN

SEQ ID NO: 207880 - protein, 87 aa, Glycine max
  unsure (1)..(87): unsure at all Xaa locations
  Clone ID: PAT_MRT3847_29742C.1.pep
RRIIHVLNLSKVAHHVFITLLITDSIHSLYEPQPTNHMPLILKRKGEGFRNDTYHHIPSYDDSINKRREQKGKNYSXRNNPDSPIKA

SEQ ID NO: 207881 - protein, 312 aa, Glycine max
  Clone ID: PAT_MRT3847_29743C.1.pep
VILYEDGCINLLTSGGNNFFGLYGLKHDFHDVTKLMEEPPLEELLRGTFDFPILSKDKGKKTSSMSDSFFNSVRKACSILQHPKPIRSQNMAEMDYSSNMKMSTCQLSSVCAIESVGNGDKEQSCTLDMSSCQKDHCSEVESTTSPLDFPLHQPKDVLERIALHPFQDLESLLLDVSKPAVTTKNGNDQRSGKQVSRRPSLPTFPWSHAFGHSRTNSDAGKLSTSRSMCQGKWSRIGVIASSTDADRSSFSNLDSFSYDQSLVPSSGSSDKRNFSSLFANLPFHQLDSSSSVPCSEISQAKAEFGGQVDLNE

SEQ ID NO: 207882 - protein, 127 aa, Glycine max
  Clone ID: PAT_MRT3847_29744C.1.pep
TRRHASYAAEDTRGRHREYQVLDLSDVARSTNRYGCFSGMKRLVFGSWSRTASSSLMGAAMATKRGGRGFMGVMRPDWEKLLSCAWWILGLWLICCIIDRINQGQFITFEVCTSSLACCAGWLLCMV

SEQ ID NO: 207883 - protein, 45 aa, Glycine max
  unsure (1)..(45): unsure at all Xaa locations
  Clone ID: PAT_MRT3847_29745C.1.pep
EHDLKFDYCDQSFTKNTXAGYSIKYIPNAKLPCVGPHPMNVILVG

SEQ ID NO: 207884 - protein, 104 aa, Glycine max
  Clone ID: PAT_MRT3847_29746C.1.pep
MHLQHLAKACIRHLLHPEQKGFLMLPKHIRETCHTTVMLFLGLNLNRSRIFKPSLSNRHINPMPKPQPQPQPQPQPQPQPQPQLNNYIRIMNLNKLIIINRPNR

SEQ ID NO: 207885 - protein, 79 aa, Glycine max
  Clone ID: PAT_MRT3847_29747C.1.pep
GNLLLYSRKLPFDITIIGDEPLLLANTSAILPYPHQAPTKTLGPTAFFCYHDIYDAETSVDHLSCFNPANRYLILLYYQ

SEQ ID NO: 207886 - protein, 117 aa, Glycine max
  unsure (1)..(117): unsure at all Xaa locations
  Clone ID: PAT_MRT3847_29748C.1.pep
TLEFVRHAWINVCSGGIIGLGXAEEDRVRLLQTFSTLLTHPESVPINALVALNGTPLNDQNPVEVWEMTRIISAERIVISNSLVRLSADTFRFSMPEQVLFSLPGAYSIFTGQTCLT

SEQ ID NO: 207887 - protein, 46 aa, Glycine max
  Clone ID: PAT_MRT3847_29749C.1.pep
LILIVQYQIMFFVMRGLYIGVEGRKVALGGSLIYGREDVSDIVSFG

SEQ ID NO: 207888 - protein, 83 aa, Glycine max
  Clone ID: PAT_MRT3847_2974C.1.pep
ITVIQARVHNSGRSIIKAMRLNKKNSCGLVNFLKRQSVPSNIVTLPLLARALSEVQHQIQIIFHFTHFENSLRYSNPSKNQTN

SEQ ID NO: 207889 - protein, 62 aa, Glycine max
  Clone ID: PAT_MRT3847_29750C.1.pep
ASFLQLFVGERCIYSSVQSFLASDKPVSNKITSSLIKDDLTGLDGNGPSIFNKKKKKKTVNY

SEQ ID NO: 207890 - protein, 50 aa, Glycine max
  Clone ID: PAT_MRT3847_29751C.1.pep
IYLVFSRSIFIRLSIPPGYDRSCLLLHSEHSAIGCLLQIKICILTLAERS

SEQ ID NO: 207891 - protein, 227 aa, Glycine max
  Clone ID: PAT_MRT3847_29752C.1.pep
KVRQTEFGREVPLFEVEATAVEPVFQRLYSYIFDTDSVGSSVTEMDRPVPSAIFIVNFDKVRVDPRNKEVNLDSSMYEKIPDLTEEDMKKQEGDYIYRYRYNGGGATQVWLSSGRFVVIDLSAGPCTYGKIEAEEGSVCSRTLPRLQNVIRPSSLHTTSHQSSNDIFLGQLASLVSTTVEHVIAPDVRFETVDLTSRLLVPIIVLQNHNRYNIMEKGHNYSINIERN

SEQ ID NO: 207892 - protein, 54 aa, Glycine max
  Clone ID: PAT_MRT3847_29753C.1.pep
LNLSFFFLLFFWGGHKCIYILIEKTFFDDSKETRIHNWTVYFKACSKRIEKTFL

SEQ ID NO: 207893 - protein, 267 aa, Glycine max
  unsure (1)..(267): unsure at all Xaa locations
  Clone ID: PAT_MRT3847_29754C.1.pep
MPLCVHYSPCNSIGVMPQFCTPRTRTSHNRNWDLQRLRIVAKSNSDATQSTSTSLLSFLCPLLKLFSARDPSQPRNFTFELATSSLASLSRFAWGTKSIAESSLNKEITSDLPFSLQLFEFEACPFCRRVREALTELDLSVEVYPCPKGSVRHREVVRRTGGKEQFPFIIDQKSGIFIYESGDIVKYLFERYGEGRSPSSGLLESTIFTGWMPTILRAGRGMTRWEHSRPDPPPGKLELFSYENNPNARIVREALCELELPYILXNV

SEQ ID NO: 207894 - protein, 73 aa, Glycine max
  unsure (1)..(73): unsure at all Xaa locations
  Clone ID: PAT_MRT3847_29755C.1.pep
HGTNERCPHINRHLNPYRIYDDKMFNSFYIYGNIARIYLILKNPDHALIQIVNGFXAEIQAHILKGTIFQIQR

SEQ ID NO: 207895 - protein, 89 aa, Glycine max
  Clone ID: PAT_MRT3847_29756C.1.pep
PRNRGLCFHSRRGHTVRLRGTKLLACTTPFFYPRARGFPPNNFLPYNGFGGNPTPHKPFNGDLSFNPIAQTGNFYGLLEKPPKKKAPTQ

SEQ ID NO: 207896 - protein, 43 aa, Glycine max
  Clone ID: PAT_MRT3847_29757C.1.pep
ILPPLLYTKKPSPFLIFFPTFTNTNPLPIQFHTPYLYSIPSIP

SEQ ID NO: 207897 - protein, 167 aa, Glycine max
  Clone ID: PAT_MRT3847_29758C.1.pep
MDSVSVQIATSKFVLCPAATASSKKNAIINFSSNFKGTLTKIHAISPNGSASSCTSRVSVSSLKTDKNKGRSNLESLFCYDKAIPEEIIEKPVGLSLEEKAIGNNSRCTDCQAKGAVLCATCAGSGLYVDSIMESQGIIVKVRCLGCGGTGNIMCAECGGRGHLGPK

SEQ ID NO: 207898 - protein, 51 aa, Glycine max
  Clone ID: PAT_MRT3847_29759C.1.pep
AFEHFREDYRRVYFIPLFGSFIGFTSCIFASCLSDSKISLIKLVSLSLLTF

SEQ ID NO: 207899 - protein, 78 aa, Glycine max
  Clone ID: PAT_MRT3847_2975C.1.pep
APPKAGFKAKIFAPKKKGVSKPKGKIWAPKPKAKPLKAPPKKVPPKPSKKTPLKAVKKPKRVFKKPKRGEFPPKKAQV

SEQ ID NO: 207900 - protein, 58 aa, Glycine max
  Clone ID: PAT_MRT3847_29760C.1.pep
LSFRREVKYIALVGLCSKLKATSHNRMRISYAVHKQITLISAMTCNDTPISISDRACS

SEQ ID NO: 207901 - protein, 74 aa, Glycine max
  Clone ID: PAT_MRT3847_29761C.1.pep
TNKKTHTHTLSIFCGSSSHFSNLLPPLLLPASLNPFLLIICLSPRDSKKIQTLKIFLESQVFSESRSSFFLSFC

SEQ ID NO: 207902 - protein, 82 aa, Glycine max
  unsure (1)..(82): unsure at all Xaa locations
  Clone ID: PAT_MRT3847_29762C.1.pep
MMLPCILGEGTLGYSLYPFTTLADTPAVAVGGCYTLTGLPMSTCIFRGPDXILVLTQFNSRXLSRYIFLTYFGNGIDFEDGW

SEQ ID NO: 207903 - protein, 53 aa, Glycine max
  Clone ID: PAT_MRT3847_29763C.1.pep
CKVFHQSTFPLTQSLDSNKKSSCWRQYLELLSGWISPWTHHQPNSSSILFCTN

SEQ ID NO: 207904 - protein, 86 aa, Glycine max
  Clone ID: PAT_MRT3847_29764C.1.pep
PLSTYGALDGYLYCKPPFSQLFKEKGSYSYLSKQASLKKSEMQHQEQEAVEKATTTDDDRSESEPDTTTTTKEAEQADDDHSEQEH

SEQ ID NO: 207905 - protein, 226 aa, Glycine max
  Clone ID: PAT_MRT3847_29765C.1.pep
MAFSGTQQKCKACDKTVHLVEGLSVDGAAYHKNCFRCSHCNGLLAISNYSSTEGVLYCKVHFEQLFKETGAYPKKSQSSGKPPLELNRAPSKLSAFFSGTQEKCSKCKKTVYPLEKLTVEGEFYHKSCFRCAHGGCFLTPSTYAALDGYLYCKPHFSQLFKEKGSYSYLSKQASLKKSEMQQQEQEAVEKATTTTMMIAQSQSQRRPTTTTKEAEQADDDHSEQEH

SEQ ID NO: 207906 - protein, 123 aa, Glycine max
  Clone ID: PAT_MRT3847_29766C.1.pep
VNQFFLKKSKPKKIMLKASKKKSQPVKSVWGVIGSVHRIQKLKKSPGLNWQSFTKTREGAFPNRRFLDPPIQRKGFLFISFFLKKHSPLTLSLRGKKKFFVPIKKKKFGIYFYKIFSSFFSLS

SEQ ID NO: 207907 - protein, 93 aa, Glycine max
  unsure (1)..(93): unsure at all Xaa locations
  Clone ID: PAT_MRT3847_29767C.1.pep
RDLCWVCEPIPIVLFGTKVDVKTSQVKVKQVPFHSKKHLQPYEIXDYRTHSFEEPFLYLPRILAGDPTLHFVESPXALAPLEVIVHLIAQQPH

SEQ ID NO: 207908 - protein, 582 aa, Glycine max
  Clone ID: PAT_MRT3847_29768C.1.pep
MVLFNVSRVETTPFDGQKPGTSGLRKKVKVFVQPHYLHNFVQSTFNALTVEKVRGATLVVSGDGRYFSKEAIQIITKMSAANGVRRVWIGQNGLLSTPAVSAVIRERVGADGSRATGAFILTASHNPGGPHEDFGIKYNMENGGPAPEGITDKIYENTTTINEYLIASDLPDVDITTTGVTSFTGPEGPFDVEVFDSASDYIKLMKSIFDFESIRKLLSSPKFTFCYDALHGVGGAYAKSIFVDELGAQESSLLNCTPKEDFGGGHPDPNLTYAKELVARMGLGKSEPQDDPPEFGAASDGDADRNMILGKRFFVTPSDSVAIIAANAVEAIPYFSAGLKGVARSMPTSAALDVVAKHLNLKFFEVPTGWKFFGNLMDAGLCSVCGEESFGTGSDHIREKDGIWAVLAWLSILAYKNKDKLEDKLVTVEDIVRQHWATYGRHYYTRYDYENVDAGAAKELMAYLVKLQSSLSEVNQIIKGIRSDVSNVVHGDEFEYNDPVDGSISSHQGIRYLFEDGSRLIFRLSGTGSEGATIRLYIEQYEKDPSKIGRLSNEALAPLVEVALKLSKMEEFTGRSAPTVIT

SEQ ID NO: 207909 - protein, 96 aa, Glycine max
  Clone ID: PAT_MRT3847_29769C.1.pep
IWAVLAWVGILAYKNKDKLEDKLVTVEDIVRQHWATYGRHYYTRYDYENVDAGAAKELMAYLVKLQYSLSEVNHTYIVRSEVSPSHFFFVQFLLEH

SEQ ID NO: 207910 - protein, 78 aa, Glycine max
  Clone ID: PAT_MRT3847_2976C.1.pep
LLSYRPNYKLSSLEPQKFPCNDNFMDLAGYLPSIIYCSGFFFFLYAHTSLRNKQTPTIIFRYSEERFSESRMVIIESG

SEQ ID NO: 207911 - protein, 117 aa, Glycine max
  Clone ID: PAT_MRT3847_29770C.1.pep
MLSGTRPQEVNMVDWLKTMVGNRRSEEVVDPNIEVKPSTRALKRVLLTALRCVDPDSEKRPKMGQVVRMLESEEYPLAREDRRHRRNRGVNSEIESHKDNSDTDGSDIQGSRSESGR

SEQ ID NO: 207912 - protein, 59 aa, Glycine max
  Clone ID: PAT_MRT3847_29771C.1.pep
KYFCNETASLCSTGGGHLFSSKVSLGEKSNFTAGTKKKRKERMLLIKRQFKRSHHFKTI

SEQ ID NO: 207913 - protein, 35 aa, Glycine max
  Clone ID: PAT_MRT3847_29772C.1.pep
RFLCTQKGMAYDLIIATTKIVNGQTLVETFMEKVG

SEQ ID NO: 207914 - protein, 49 aa, Glycine max
  Clone ID: PAT_MRT3847_29773C.1.pep
ARLEIEDFRALGPCLKIQFFFLSAKFTVKYSLRFDKHLQIFVLFAPLLI

SEQ ID NO: 207915 - protein, 113 aa, Glycine max
  Clone ID: PAT_MRT3847_29774C.1.pep
DYIKLMKSIFDFESIRKLLSSPKFTFCYDALHGVGGAYAKSIFVDELGAQESSLLNCTPKEDFGGGHPDPNLTYAKELVARMGLGKSEPQEEPPEFGAASDGDADRNMVLGKR

SEQ ID NO: 207916 - protein, 50 aa, Glycine max
  Clone ID: PAT_MRT3847_29775C.1.pep
PTRPAGLPAEFKHINKQRKQFYMCFMNLLSFPFWRTHLRLYLENSMLNFF

SEQ ID NO: 207917 - protein, 190 aa, Glycine max
  Clone ID: PAT_MRT3847_29776C.1.pep
MVLFNVSRVETTPFDGQKPGTSGLRKKVKVFVQPHYLHNFVQSTFNALTVEKVRGATLVVSGDGRYFSKEAIQIITKMSAANGVRRVWIGQNGLLSTPAVSAVIREKLGADGSRATGAFILTASHNPGGPNEDFGIKYNMENGGPAPEGITDKIYENTTTINEYLIASDLPDVDITSTGVTSFTGPGGPF

SEQ ID NO: 207918 - protein, 57 aa, Glycine max
  Clone ID: PAT_MRT3847_29777C.1.pep
FSKGNEADSRMRAASKRRGIQITSISRPIKPSDFVDFDLILAMDKQNRGKVWSCVMT

SEQ ID NO: 207919 - protein, 137 aa, Glycine max
  Clone ID: PAT_MRT3847_29778C.1.pep
MANAASGMAVHDDCKLRFQELKSKRSYRFIVFKIEEQQVVVEKLGDPTESYEDFMASFPANECRYAVYDFDFTTAENCQKSKIFFVAWSPDTSKVRMKMVYASSKDRFKRELDGIQVDMQATDPSEMSLDLVKARAI

SEQ ID NO: 207920 - protein, 64 aa, Glycine max
  Clone ID: PAT_MRT3847_29779C.1.pep
TLILVQAAPRTVNKPRITGSVRCYTRSILALRSFVVKHLHETGPTCILLALDIINPRWASWLHC

SEQ ID NO: 207921 - protein, 53 aa, Glycine max
  Clone ID: PAT_MRT3847_2977C.1.pep
PQGFSPPNLLKPRPLQLFKCPHKKNMTSPSRVRYLESPKTPPPPFFFFFFFPK

SEQ ID NO: 207922 - protein, 152 aa, Glycine max
  Clone ID: PAT_MRT3847_29780C.1.pep
PGGYVSDAVYVFKGINEKNVVSWNSVIVGCAQHGCGMWALALFNQMLREGVDPDGITVTGLLSACSHSGMLQKARCFFRYFGQKRSVTLTIEHYTSMVDVLGRCGELEEAEAVVMSMPMKANSMVWLALLSACRKHSNLDLAKRAANQIFEI

SEQ ID NO: 207923 - protein, 171 aa, Glycine max
  unsure (1)..(171): unsure at all Xaa locations
  Clone ID: PAT_MRT3847_29781C.1.pep
IRNACVHSLAESSKIDVFAVPRLXRRAFVRRRFASQRRSRLVSAFSAGAAAVSAVVPPSRVQPPPPAPPDKRAANDAIRPQLTCRYDARRRANSAAAVPTPWGARADAFGRCRSFAVSGRVAAEERRNGCAAVVAGEPPQLHKARNTQHRSAASNWGARRLKWHRHSLRRR

SEQ ID NO: 207924 - protein, 102 aa, Glycine max
  Clone ID: PAT_MRT3847_29782C.1.pep
FRPRPPTRAGGGGVLLRVAVGYAKAPFSASSCCCELGDGVNGLGRGILGYARGCSAEVGGGGAHVTSWVNDLAEELLFLCWGAVFGPAKPFRGGIPVCFAEL

SEQ ID NO: 207925 - protein, 133 aa, Glycine max
  unsure (1)..(133): unsure at all Xaa locations
  Clone ID: PAT_MRT3847_29783C.1.pep
RVAQSPFCGKGSRVSFPPYPLGGMPHLWGAIYLGFRPKQCMGDLVFSPVFSFKXPLFQDRVRLCLGKQLCFMQIKAFVHGLVWGFYNRVVQXGQKPRLETGLAISLKGGLPVWVRVSKRSINSKYLVSKVFKP

SEQ ID NO: 207926 - protein, 51 aa, Glycine max
  Clone ID: PAT_MRT3847_29784C.1.pep
FCTCKLTQLLVDIVNLDVIIPPSPRLKLTITLLFSAFYMLCIRIEIYCMFL

SEQ ID NO: 207927 - protein, 148 aa, Glycine max
  Clone ID: PAT_MRT3847_29785C.1.pep
PTRAHHIAGTIPMGSGTLLGLQRLELPSNHLTEKIPTETTLSTSLSFIDVSWNHLESSLPSDILSIPSLQTFIASHNNFGGNIPDEFQDCPSVSELDLSNTHISGTIPESIASCQKLVNLNLRNNCLTGEIPKSITKMPTLSGLDLSN

SEQ ID NO: 207928 - protein, 462 aa, Glycine max
  Clone ID: PAT_MRT3847_29786C.1.pep
MVFKGRFFSSKKSDSSSPDASSNSPRSFSSNSPSRSDKKKTKSAANQTLAAASAVGSGGGGGLAPCRQTQVKDGTKKKDVVKGKESQTPPPDSRKDSPAKKLMAAEGRESPSSLSVSPILASSLGLNRIKTRSGPLPQESFFGFRGEKGTAALGGSNLSRPGVGARAGDGKKKEVANQSRVGFHEDSVGGAAATGGWGDNGSNSDSVSTSGSLPSREQSPVVLPRSRLQNGESSSEAAGKQVSSRAQSGGLKSADICTPETAYDFENPKESESPRFQAILRVTSAPRKRFPSDIKSFSHELNSKGVWPFPFSKPRRLNNLEEILVVIRAKFDKAKEDVNSDLAIFAADLVGILEKNADTHPDWQETIEDLLVLARSCAMTSSGEFWLQCESIVQELDDRRQEHPPGMLKQLHTRMLFILTRCTRLLQFHKESGLAEDEPVFNLRQSRVLHSAGKLFLVWERI

SEQ ID NO: 207929 - protein, 197 aa, Glycine max
  Clone ID: PAT_MRT3847_29787C.1.pep
MDMSQSLWALFSAWRCCCCVSEAAAETVSKAAKPVVAALAEAGTSSSKEGRESSSSLSVSPILASLLGLNRIKTRSGPLPQESFFGFRGEKGTAVLGGNNLSRPGVGARAGGGKKKYVGNQSRVGFHEDSVGGAAGTGCWGDKGSNSDSVSTSGSLPSREQSPVALPPSRMQNGESSSEAAGIIAALCMCGFCKDSD

SEQ ID NO: 207930 - protein, 49 aa, Glycine max
  Clone ID: PAT_MRT3847_29788C.1.pep
REIYYGVKFIVEVNFWLEWESNLHNDGCKLHITCSQRTLFVFSKWQCYD

SEQ ID NO: 207931 - protein, 274 aa, Glycine max
  Clone ID: PAT_MRT3847_29789C.1.pep
MGTVEMIIAFHMKALVFFLWLFVPSLGKDLLSCETTSPDASGYHCIENVSQNQCETFALFLTNSYYSSLSNLTSYLGLNKFVIAQANGFSADTEFLSQDQPLLVPIHCKCIGGFSQAELTKTTVKGESFYGIAQSLEGLTTCKAIRDNNPGVSPWNLDDKVRLVVPLRCSCPFSSQVRPQPKLLLSYPVSEGDTISNLASKFNITKEAIVYANNISSQGLRTRSSLAPFTSILIPLNGKPIIGPLVKPKEPDSCNQTTSIPVTSPHKKSPMWED

SEQ ID NO: 207932 - protein, 57 aa, Glycine max
  Clone ID: PAT_MRT3847_2978C.1.pep
ARGCIGEKRLLNFEPSGIFSGAVSYCMPSILYSIKYENSWILVKLMLNCEFYLYVKC

SEQ ID NO: 207933 - protein, 94 aa, Glycine max
  Clone ID: PAT_MRT3847_29790C.1.pep
TGLWGPPFGPPRISGPGPPPGQSGPIRGGFQPCPNRGHIRPRGKMVGPPPPFKGGNPPAPFQLRNPPPPGERRIAPRPPGGVFFLPAPGGFFFC

SEQ ID NO: 207934 - protein, 157 aa, Glycine max
  unsure (1)..(157): unsure at all Xaa locations
  Clone ID: PAT_MRT3847_29791C.1.pep
TAPTYAVRPYSLLPCCLCLRSTHTQVHLWLASTTKMSANNPTMAPTREPKAAHAATNGDAEQYLQAGQGGSPIGRGMSITLTPEQFEQLYLQPGGKGGKGDLSKRFGNPTPLGIAGFLLSLTPLSIYLMGFGQTAATXATSXIGAYYALGGVCMNLA

SEQ ID NO: 207935 - protein, 87 aa, Glycine max
  unsure (1)..(87): unsure at all Xaa locations
  Clone ID: PAT_MRT3847_29792C.1.pep
XFXAXXXXLVRLCXKXRQTMLFXATXTEEVDELXXLSLSKPLRLSADXSXXRXATLTEEVVXXRRMRXXXQEXVLLXMCSXXFXSXV

SEQ ID NO: 207936 - protein, 193 aa, Glycine max
  unsure (1)..(193): unsure at all Xaa locations
  Clone ID: PAT_MRT3847_29793C.1.pep
MFKPLEHPLLPLLIVGFVPPGKSVNGPFPPETLXXFGKLXQKKXWGXPSLXSPQGPRGTVSKPRXXISGNXNPLGPXXNXPRPGVFSPFPVFWPPGPRXSPGXKGRGPPGNXTRGXPGPXKRXPXKGGGKEKPGPXKPKKGPKIGEGGFFWGGFLGFPFREPPGKFFPGKGPFTRVLNPPGFWALKLGPGKPF

SEQ ID NO: 207937 - protein, 99 aa, Glycine max
  Clone ID: PAT_MRT3847_29794C.1.pep
KDKAHWRLESSHTKGHISYYVTGKEEEQPAVFTGDTLFIADCGKFFKGTAEQMYQSLCVTLGSLPKPTRVYCGHGEKVGCKSPVEALRELRKLKDNWKG

SEQ ID NO: 207938 - protein, 185 aa, Glycine max
  unsure (1)..(185): unsure at all Xaa locations
  Clone ID: PAT_MRT3847_29795C.1.pep
RPSQSGGQKGAPEKLGGPKKTGGKKKKGPPGGTPGNSDPGPKKGPNXPRGEILKRGQKPGQTAPGGKRLTPGIPTKKPTRNKRGEPRGRLRGGKPPIKGGAKKGPFPGEKPVAPGAKKRAPPPGGGGAPLWAPGGFFFSTRGGSPPGCLSPPGQKKKLERGRPPRGFDPHGGEINLFGGGGGTPG

SEQ ID NO: 207939 - protein, 86 aa, Glycine max
  Clone ID: PAT_MRT3847_29796C.1.pep
FLCRKNFVQGCCKALALPEYLLLTTAHASRFCYKLCVFNSSASNFYDASSSFLFLSSLVRVSCGVACIGTGRSVYYYYIFTLSLYK

SEQ ID NO: 207940 - protein, 57 aa, Glycine max
  Clone ID: PAT_MRT3847_29797C.1.pep
QFVIEQRSPIQLFPHCVGFFFTSRPHLPPLQNHPDPQIQPNHCHPQPPPHRLRVGGP

SEQ ID NO: 207941 - protein, 160 aa, Glycine max
  Clone ID: PAT_MRT3847_29798C.1.pep
LSSLSNLITLVKKMREEYAKLNRVEMSIWECCELLNEVVDESDPDLDEPQIEHLLQTAEAIRRDYPDEDWLHLTGLIHDLGKVLNLPSFGGLPQWAVVGDTFPVGCRFDESIVHHKYFKENPDYNNPAYNTKYGIYSERCGLNNVMMSWGHDDYMYLVAR

SEQ ID NO: 207942 - protein, 263 aa, Glycine max
  Clone ID: PAT_MRT3847_29799C.1.pep
SLWAYNDAGSERREGVENFYRKNHTYQSVDFVKKMREEYAKLNRVEMSIWECCELLNEVVDESDPDLDEPQIEHLLQTAEAIRRDYPDEDWLHLTGLIHDLGKVLNLPSFGGLPQWAVVGDTFPVGCRFDESIVHHKYFKENPDYNNPAYNTKYGIYSERCGLNNVMMSWGHDDYMYLVAKENSTTLPSAALFIIRYHSFYALHREGAYKHLLNDEDVENLKWLHIFNKYDLYSKSKVRIDVERVKPYYLSLIEKYFPAKLKW

SEQ ID NO: 207943 - protein, 58 aa, Glycine max
  unsure (1)..(58): unsure at all Xaa locations
  Clone ID: PAT_MRT3847_2979C.1.pep
QRAAFFFFFFFFXGLTTPPHFYSRGNLGTAQAKKSPPCQKLCHLLFTTQKLKTLLPLV

SEQ ID NO: 207944 - protein, 84 aa, Glycine max
  Clone ID: PAT_MRT3847_297C.1.pep
QDNIAQIEESGLFIPLICPFGHALYSSLIRFSNQLCASFFYRLHFRLQHSELISVSVTDQCCIISVSRFQPRSCHSTISCDSVM

SEQ ID NO: 207945 - protein, 659 aa, Glycine max
  unsure (1)..(659): unsure at all Xaa locations
  Clone ID: PAT_MRT3847_29800C.1.pep
METNNACTMHSHCIEMSMEVHQVVPPPHKSTLQKLKGRLKETFFPDDPLRQFKGQPLKRKLILGAQYVFPILQWGPKYNLKLFKSDLVSGLTIASLDIPQGMSYAXLASLPPILGLYSSFVPPLVYAVLGSSKDLAVGPVSIASLVMGSMLHQEVSPTTDPILFLQLAFTSTLFAGLFQALLGILRLGFIIDFLSKAILIGFMAGAAIIVSLQQLKSLLGITHFTNQMGLIPVMTSVFHNIHEWSWQTILMGICFLVLLLLARHVSIRKPKLFWVSAGAPLMCVIISTLLVFAIKAQNHGISAIGKLQQGINPPSWNMLLFHGSHLGLVMKTGLITGILSLTXEGIAVGRTFAALKNYKVDGNKEMMAIGFMNVVGSFTSCYVTTGAFSRSAVNNNAGAKTAVSNVVMSVTVMVTLLFLMPLFQYTPNVVLGAIIVTAVIGLIDLPAACNIWKIDKFDFVVMMTAFLGVLFISVQGGLALAVGLSTLKILLQITRPKTVMLGKIPGTDIYRNLDQYKEAVRIPGFLILSIEAPINFANITYLNERTLRWIEEEEDNIKEQLSLRFLVLEMSAVSAVDTSGISLFKELKATLEKKGVELVLVNPLAEVIEKLKKADEANDFIRADNLFLTVGEAVASLSSAMKGQSSTITEGAHTIVSHN

SEQ ID NO: 207946 - protein, 306 aa, Glycine max
  Clone ID: PAT_MRT3847_29801C.1.pep
MTILIEQSDHFGAEVEAKTEPINERELVLDGGFLIPQTNSFGHMFRAYNDAVSERREGVENFYRKNHTYQSVDFVKKMREEYAKLNRVEMSIWECCELLNEVVDESDPDLDEPQIEHLLQTAEAIRRDYPDEDWLHLTGLIHDLGKVLNLPSFGGLPQWAVVGDTFPVGCRFDESIVHHKYFKENPDYNNPAYNTKYGIYSERCGLNNVMMSWGHDDYMYLVAKENSTTLPSAALFIIRYHSFYALHKEGAYKHLMNDEDFENLKWLHIFNKYDLYSKSKIRIDVERVRPYYLSLIEKYFPAKLKW

SEQ ID NO: 207947 - protein, 106 aa, Glycine max
  unsure (1)..(106): unsure at all Xaa locations
  Clone ID: PAT_MRT3847_29802C.1.pep
RSSEXDLVAAAEREVKSIXXQQKIHRGASDSVLVESNQCKEHKETNGTPVKKANKIYKKELTLALLLLTASVRSLLSAQGVHFYYLLFQGVTFLLVGLDLIGQQMS

SEQ ID NO: 207948 - protein, 73 aa, Glycine max
  Clone ID: PAT_MRT3847_29803C.1.pep
PHASAQKSRYYESALSLTRKIKIDTTGSTEDLGQYSIHALSFCITNPITATNSRILNLFIPTYLLILHRFHSK

SEQ ID NO: 207949 - protein, 77 aa, Glycine max
  Clone ID: PAT_MRT3847_29804C.1.pep
IQNGGENGTLGFQDNFVNLICCFPPEPEVACLIMASLEVSFSTQGFLSSLLLVASLRVNLTTHNNVNLSLFLSHLAN

SEQ ID NO: 207950 - protein, 70 aa, Glycine max
  Clone ID: PAT_MRT3847_29805C.1.pep
KGRQHLSILQYSIIMLLPLQILLTFLLKPILHIHFLLNSQPSYLFTKSFLYILSIIFLLFYQKPIPLYYI

SEQ ID NO: 207951 - protein, 55 aa, Glycine max
  unsure (1)..(55): unsure at all Xaa locations
  Clone ID: PAT_MRT3847_29806C.1.pep
VXXPVXPVXGFXXXGPSXAXXXAXFVXVXXAVGGSSVALXXXGGGGGRVVXVGCV

SEQ ID NO: 207952 - protein, 216 aa, Glycine max
  unsure (1)..(216): unsure at all Xaa locations
  Clone ID: PAT_MRT3847_29807C.1.pep
MHPQEGHKVLDPPASYVPIRTPARKLLATTTPWGAPLYQIPEENRGQQVNGPKEAPGGMPLMKPEDYQHLGALVNEENEEEXTPDEQKERKIMKLLLKVKNGTPPQRKTALRQLTDKAREFGAGPLFNRILPLLMQPTLEDQERHLLVKVIDRVLYKLDELVRPFVHKILVVIEPLLIDEDYYARVEGREIISNLSKAAGLATMIAAMRPDIDNID

SEQ ID NO: 207953 - protein, 68 aa, Glycine max
  Clone ID: PAT_MRT3847_29808C.1.pep
FLIVLNNLDISTIFSINEFLMSLLSEKRIAENQLPSKAPHDETLEHYEIAAGSSTICCSMLQCLSMFQ

SEQ ID NO: 207954 - protein, 64 aa, Glycine max
  Clone ID: PAT_MRT3847_29809C.1.pep
AIKWISKKGSSNGSLSPKRVGIKVVLNPKAPKCPNSYWLENAIIWKFFTPQESLCLNVENNIKC

SEQ ID NO: 207955 - protein, 138 aa, Glycine max
  Clone ID: PAT_MRT3847_2980C.1.pep
SQRGTYAEAFAKHERNFNEKKKVLEWKNVLVEAANYAGWDCKVNRTEFEIVEEIVKDALEKLDRANVSDLDRHINKMEQLARLQHQFYEDIRTYENMLKRDATVQRVTELKMERSIRLLRLTPDMLSHLGNSSTNDFF

SEQ ID NO: 207956 - protein, 185 aa, Glycine max
  Clone ID: PAT_MRT3847_29810C.1.pep
MLCKQDLETPTIKAMLNTYHASKLSSNQCGSSLVQTIDAPLPLVWSLIRRFEYPQGYKLFVKKCNLLDGDGGIGSVREVMITSGLPAGVSVERLDKLDDDKHVLKFSIIGGDHRLVNYSSTITLHEEEEEYGGKTVAIESYAVDVPAGSSGDDTCSFANTIIACNLRSLAKITEEKVCKVNQIKL

SEQ ID NO: 207957 - protein, 134 aa, Glycine max
  Clone ID: PAT_MRT3847_29811C.1.pep
SLNTCLHTRLITTRLPHTTGNKRIRILQLIPKLARSLKALLKSHTDHACVLHLISPILISSEGQERDDTIGEYYTICKDVPSSIALVSYPLAAFTRLLVMLGHTDAATVPTSLEITNVGSRCLVFYLYTLDWVL

SEQ ID NO: 207958 - protein, 141 aa, Glycine max
  Clone ID: PAT_MRT3847_29812C.1.pep
KKSGATVETGGNRKGDKGYFIEPTIFSNVTEDMKIQQEEIFGPVCTISKFKTKADVIKIGNNTTYGLAAAVHTSNLTTAIEVANALRAGTVWVNSYNTLHWQLPFGGYKESGIGRELGEAALDNYIQTKTVSIRLGDVLFG

SEQ ID NO: 207959 - protein, 72 aa, Glycine max
  Clone ID: PAT_MRT3847_29813C.1.pep
APEHVRATTGYLIPTRQRLTPSTAGHRTQTTCPPLAALVSERPGSAQERPSCRSTRLGEKISGTSRPPTPQH

SEQ ID NO: 207960 - protein, 54 aa, Glycine max
  Clone ID: PAT_MRT3847_29814C.1.pep
HLHLLGCCLYNDQCCHKDRSKGFHCIRTTAAIRLRDEYMCFHALYVPYMLDSDS

SEQ ID NO: 207961 - protein, 77 aa, Glycine max
  Clone ID: PAT_MRT3847_29815C.1.pep
TEVKRQFPHPLTSKETETEKPPRKYLILEAHLVSKQQYPQRHLKKASRPIIFKSEIPNILKNIKTFQLSFFKCDKSQ

SEQ ID NO: 207962 - protein, 102 aa, Glycine max
  unsure (1)..(102): unsure at all Xaa locations
  Clone ID: PAT_MRT3847_29816C.1.pep
GSRCDPIEFGSCVSGCNDSPSNIAFECILQASVIQKEKDYACTGKDGTWKSEMTMIAATACNYREVALEDELMAAYVVXKGTLAAAINAVSMQTYGGGVSCP

SEQ ID NO: 207963 - protein, 67 aa, Glycine max
  Clone ID: PAT_MRT3847_29817C.1.pep
HIPSPAEDTMTTANDTEDIDLQNEHDVHGTSVTATSLTSKLPSKNLCMRIDTRSSSLEGTKLLAFKR

SEQ ID NO: 207964 - protein, 107 aa, Glycine max
  Clone ID: PAT_MRT3847_29818C.1.pep
FLVLLLEAQTFLSPGFRITCNVATGASISNCLSVRNCPSSIVNNQDTFLALSNSIFVKQSPESQKSLVTTHLWNMIKQFIPCDMNNTDNALLMIIILKIISGLRFQV

SEQ ID NO: 207965 - protein, 46 aa, Glycine max
  Clone ID: PAT_MRT3847_29819C.1.pep
GAVSYSVLTRSTKVNTIYTLSISDRLVWCILYAPIKGSSSSQKYVA

SEQ ID NO: 207966 - protein, 52 aa, Glycine max
  Clone ID: PAT_MRT3847_2981C.1.pep
HPSHIQTIERLYPSIKYPGLFRSNLRTNHTPFYGSLKMILIPTSFIYDIHIK

SEQ ID NO: 207967 - protein, 186 aa, Glycine max
  Clone ID: PAT_MRT3847_29820C.1.pep
MEEQEEEAPTLRLEILQGPGEGKTLEFKPGTAVRIGRVIKGNNLPIKDSGISSKHLTISTESNKWTLRDLDSSNGTVLDGSQIPPHTPFTLHHDSVIKIGELTSIHVIFVPREQQQQQRAVQPRRNPTRRGRTEPVPAPTEPVQTRGRGKPRGLKGKVQIQVQSVEENDASVVDAESERVDSPARG

SEQ ID NO: 207968 - protein, 56 aa, Glycine max
  Clone ID: PAT_MRT3847_29821C.1.pep
TNGSQFFICAVNSPWLHIRHVVFRHIVVGMDVVQTLESQKASTLKVPLKPYGIVNF

SEQ ID NO: 207969 - protein, 50 aa, Glycine max
  Clone ID: PAT_MRT3847_29822C.1.pep
SIYKTLFSKCNRDPHHKWTWKEVQKNHLISHRECSSNRVISDQRRMKKIS

SEQ ID NO: 207970 - protein, 101 aa, Glycine max
  unsure (1)..(101): unsure at all Xaa locations
  Clone ID: PAT_MRT3847_29823C.1.pep
SSDHYPMIQFKGRNCPRGTCHDWTECPYGHPAEKARRRDPRKYHYSGTSCPENRHENCKRGDTXPIEARVFXCWLHPSRYRTQHLRETKHCRRRPHFFAHT

SEQ ID NO: 207971 - protein, 129 aa, Glycine max
  Clone ID: PAT_MRT3847_29824C.1.pep
MSSSAKVLDPAFQGVGQRVGTEIWRIENFEPVPLPKSEYGKFYMGDSHIILPTTQGKGSTYFYDLHFWIGKHTSQDEAGTWAIKTGELDAAIGGRAVQHREIPGHESDKFLSYFKPCIIPLEGGGASGF

SEQ ID NO: 207972 - protein, 131 aa, Glycine max
  unsure (1)..(131): unsure at all Xaa locations
  Clone ID: PAT_MRT3847_29825C.1.pep
MPPTSPDYSSIMSHFRGKYHNELIANAAYIDTSGKGILAADDGTGTIGKRLASISVENVESNRRAFRELIFTTHQVXLKYLRGAILFRETLYQSTPAGKHYVXVLKEAGVLPGIKVVKGTAELAVTYGETT

SEQ ID NO: 207973 - protein, 82 aa, Glycine max
  Clone ID: PAT_MRT3847_29826C.1.pep
DLNGDDDDEFQRERDSRERGKDIVGKESELLLFLCVVVFLSLLTFEAFEICNFREKEKKKKRGVYRVWMNYDNDDGGKRAVR

SEQ ID NO: 207974 - protein, 320 aa, Glycine max
  unsure (1)..(320): unsure at all Xaa locations
  Clone ID: PAT_MRT3847_29827C.1.pep
MSSSAKVLDPAFQGVGQRVGTEIWRIENFQPVALPKSEYGKFYTGDSYIILQTTQGKGGTYFYDLHFWIGKDTRXDEAGTAAIKTVELDAAIGGRAVQHREIQGHESDKFLSYFKPCIIPLEGGVASGFKKPEEEKFETCLYVCRGKRVVRLRQVPFARSSLNHEDVFILDTQNKIYQFNGANSNIQERAKALEVIQFLKEKXHEREGDVAIVDDGKLDTESDSGEFWVLFGGFAPIGKKVISEDDIIPETIPAQLYSIVDVEIKPVEGELSKSLLENNKCYLLDCGAEVFHWVGQVTYPEDRKSEYTDLYEYSGSQSKK

SEQ ID NO: 207975 - protein, 84 aa, Glycine max
  unsure (1)..(84): unsure at all Xaa locations
  Clone ID: PAT_MRT3847_29828C.1.pep
FFFPKSQIPIWWGGFFWVGPPPWSVYALVPSPGGAKNTPFLGPGSDPMPVKPFLXEKFGYKYGFPGVVAGAHIAFVGLFFFVFA

SEQ ID NO: 207976 - protein, 49 aa, Glycine max
  unsure (1)..(49): unsure at all Xaa locations
  Clone ID: PAT_MRT3847_29829C.1.pep
XDKVNLATYGVCTFNIIFLFQFIYVHKWTLMDYLXHMQTDLYXSITYNW

SEQ ID NO: 207977 - protein, 103 aa, Glycine max
  Clone ID: PAT_MRT3847_2982C.1.pep
MDRSWMNQSRIRPEYEEGVEQFLQFASQRGQPDEDGKYYCPGINCLNGRRQILDDIREHLLCDGIKRNYTTWIWHGEMTDMQSGQQSEPFDVEMGDHLYFSIV

SEQ ID NO: 207978 - protein, 52 aa, Glycine max
  unsure (1)..(52): unsure at all Xaa locations
  Clone ID: PAT_MRT3847_29830C.1.pep
XXXFXXGPXXXCXNKPRVXAYVXETAXCXGNKMLXHXXAITASAGTSSRWKV

SEQ ID NO: 207979 - protein, 165 aa, Glycine max
  Clone ID: PAT_MRT3847_29831C.1.pep
GSYAKCNSTVMRKHNSLLMHDSNSLLEGDNFFYGEIPAVESFNIDVPFDAPSSSHGRRFHKVEADVINESFEDDLLYNSCSGYGYDVKINGDLQQPFLKRCSMLGSILHEKALFVNDEHELQTDGFWSKHNTEEDYRSGKDLYVHRCPEVTKKLKITRDSDFLVR

SEQ ID NO: 207980 - protein, 33 aa, Glycine max
  Clone ID: PAT_MRT3847_29832C.1.pep
GDTYHTKAENAVRRVLGAPVRGGRAIRVGTSAH

SEQ ID NO: 207981 - protein, 102 aa, Glycine max
  Clone ID: PAT_MRT3847_29833C.1.pep
KGAKDGEAFAFLDSIRRITNLRMIGFQRLQFFLMHNKTQKLRKLVGFLKLYFLLPSLNILITLHPNYVLNFVLTCKALALSTNCCSPLFELLWYLAKPMSRL

SEQ ID NO: 207982 - protein, 70 aa, Glycine max
  Clone ID: PAT_MRT3847_29834C.1.pep
DVTSIPPSLTDSVRTRWAQERMECSSGFSVESGWLRRASHESKPQANQYHGLRQELPSPCQISSGIASVR

SEQ ID NO: 207983 - protein, 62 aa, Glycine max
  unsure (1)..(62): unsure at all Xaa locations
  Clone ID: PAT_MRT3847_29835C.1.pep
VLMHQKIVIILSCIXPEQKLRTRIKDVLVVLFLLLVVVVVFVFCFCQTVAIGDLNQMSQCCH

SEQ ID NO: 207984 - protein, 61 aa, Glycine max
  Clone ID: PAT_MRT3847_29836C.1.pep
RLREDDRRAVLSCSYILVVLCLVKLFIFVIIILNVTCKVICNWLQVKIFFLHYQGINKLWL

SEQ ID NO: 207985 - protein, 106 aa, Glycine max
  unsure (1)..(106): unsure at all Xaa locations
  Clone ID: PAT_MRT3847_29837C.1.pep
DDELLVPLKFVLLNIGKKGKEAWPPWFKAYKHEVFSRGKPDDERKISKGSGNPKKKLRDYFFPTAIYCAKKGDFXKVSPPLQLVGPPFYEPPGKGKYVCLPPAWGN

SEQ ID NO: 207986 - protein, 169 aa, Glycine max
  unsure (1)..(169): unsure at all Xaa locations
  Clone ID: PAT_MRT3847_29838C.1.pep
KRPDWLIFESSNFNKLCEKGERLNGSKLQLSEGSEIREYILGDSGYRLLPYLVVPYEGKELSEPKAQFNKQHLATRMVAQRALARLKEMWRIIHGMMWRPDKHRLPRIXLVCCVLHNIVIDLNDEVQDELSLSLDHDSGYHRLVCGAVDEKGVALRDRLSHYLAGRLPS

SEQ ID NO: 207987 - protein, 130 aa, Glycine max
  Clone ID: PAT_MRT3847_29839C.1.pep
SGITASTHASALPQVLAQATEMLYMRLDTMNTTCVDRFINWFSHHLSNFQFRWSWEDWSDCLSQDPESPTPKLVREVLDKCMRLFYHQRILDIVHLTFSALCAANPTCIYKYGDERSHFLPGDVVAFLHN

SEQ ID NO: 207988 - protein, 69 aa, Glycine max
  unsure (1)..(69): unsure at all Xaa locations
  Clone ID: PAT_MRT3847_2983C.1.pep
ILATPLFHPGKFTTSGPLIYMLAGLDXRAMERLESVADEMNKRSFTYASALDIHKSLLKKKMYPKISLS

SEQ ID NO: 207989 - protein, 63 aa, Glycine max
  Clone ID: PAT_MRT3847_29840C.1.pep
EVYVLEPGHRSTLQCKMIDYSIPDSVLVIRNVSHVEFECEVGLVADPAKLKGDLVSFLKAVNE

SEQ ID NO: 207990 - protein, 185 aa, Glycine max
  unsure (1)..(185): unsure at all Xaa locations
  Clone ID: PAT_MRT3847_29841C.1.pep
TRQIASPVEVDSGYGEPIEMLSCPSDGSDCGGAYIIRLPCGPRDRYIPKESLWPHLPEFVDGALGHIVNMARVLGEQVNSGKPTWPYVIHGHYADAGEVAAHLSGALNVPMVLTGHSLGRNKFEQLLKQGRLSREAINATYKIMRRIEAXELGVDAAEMVVTSTRXEIEEQWXLYDGFDLKVERK

SEQ ID NO: 207991 - protein, 149 aa, Glycine max
  Clone ID: PAT_MRT3847_29842C.1.pep
NCFSVMELALSLGDTSKSFTFLDKAVTLPPNKDPPGFCLAPSFAEKRSDSERGTASGSSDPPVQLDLLPFSPVLRPQQHPPSHLRIPWLTQACGGAARVLDVNLFPAATAEDGDDGTSLSSSPNSAVSAFQMDCCTQNGNAAGIRKQKQ

SEQ ID NO: 207992 - protein, 55 aa, Glycine max
  Clone ID: PAT_MRT3847_29843C.1.pep
NKKRFHAVIPYGSGSSKYSQKKISVLIKDHPPLRNSSPVFNQDDQEIKSRKSRHS

SEQ ID NO: 207993 - protein, 106 aa, Glycine max
  unsure (1)..(106): unsure at all Xaa locations
  Clone ID: PAT_MRT3847_29844C.1.pep
VSQTGLEPDAYLFKALIQXLCKSERAALAWRLFEDMKNSGLVPDSATKELLVKSLWKEGRRREAAAVEESYEEINTVLPLALQGHVWTVSSADLTRVYNIYSNSFD

SEQ ID NO: 207994 - protein, 71 aa, Glycine max
  Clone ID: PAT_MRT3847_29845C.1.pep
IWLHTIVNDLSFFHHFHFQGTWFFIHTSIFPCAGDFVRANGLQEGDFIVIYSDVKCGKYVRPFLIFHFSFS

SEQ ID NO: 207995 - protein, 57 aa, Glycine max
  Clone ID: PAT_MRT3847_29846C.1.pep
VFDVMSPCGWDIPPPKFQSNFPVCVSLYGVNYGGLLWNVLFVSFFPHSLRIKKTTSR

SEQ ID NO: 207996 - protein, 67 aa, Glycine max
  unsure (1)..(67): unsure at all Xaa locations
  Clone ID: PAT_MRT3847_29847C.1.pep
FGVCSSRVWRFGSRCLWPALVVVFFPFGVVRRLLGCAWFSLGLXWRLRLFPFLRPRCLWSRFCVLRS

SEQ ID NO: 207997 - protein, 85 aa, Glycine max
  Clone ID: PAT_MRT3847_29848C.1.pep
SSCYGFSALYVVSCDIILCWLRHGSIPFVYDIPLCILFSFRGIDCRAPISVAGAVRGAYLESCSSSLTSMSRTHRIRYLISRLAL

SEQ ID NO: 207998 - protein, 57 aa, Glycine max
  Clone ID: PAT_MRT3847_29849C.1.pep
RSQKLKFRKHKMLLHSFKVKKSQGLRPSLKEQYYTTSCFHKLWGCSIQCFCPQLKVL

SEQ ID NO: 207999 - protein, 81 aa, Glycine max
  Clone ID: PAT_MRT3847_2984C.1.pep
NKSCSSIHCGINARAIGTRVKHIICYTSSLNKSVSVSPISSDLHDSEEVASIYLGPIFQVLFLLSPRKRLFKKIRSKEANL

SEQ ID NO: 208000 - protein, 225 aa, Glycine max
  Clone ID: PAT_MRT3847_29850C.1.pep
LSRGLALEGFCSILAGLWGSGTGAPTLTENTHTIDITKVASRKVVVVGAAFVILFSFIGKVGALLASIPQALAASVLCFMWALTAALGLSNLQYSQSASFRNITIVGVSLFLGMSIPAYFQQYQAESSLILPSYLVPYAAASSGPFRSGIKQLDFAINALMSLNMVVTLLVAFLLDNTVPGSQEERGVYLWSQAEDIVTDPSLQSEYSLPKKVVRCCCCFKCLGV

SEQ ID NO: 208001 - protein, 114 aa, Glycine max
  unsure (1)..(114): unsure at all Xaa locations
  Clone ID: PAT_MRT3847_29851C.1.pep
EELFPQVQPKESPVVLQIKPPCPGCIASFFNIILGFXGVQLVSLSGSXNLVKVQGPMDVKDLXPSVIDELDQDVVGWVPANTPDDKIDKQGAGVVVGAQIYLDGPPQITESRGR

SEQ ID NO: 208002 - protein, 94 aa, Glycine max
  Clone ID: PAT_MRT3847_29852C.1.pep
PVSGPYAAAASSGPFCSGIKQLDFAINALMSLNMVVTLLVAFLLDNTVPGSQEERGVYQWSRAEDIATDPSQQSEYSLPKKVARCCCRFKCLGV

SEQ ID NO: 208003 - protein, 80 aa, Glycine max
  Clone ID: PAT_MRT3847_29853C.1.pep
MQLLASSRTIVVIFFLQQLKRAQFQLQVDGGLGPSTIDVAASAGANCIVAGSSVFGAPEPAQVISLLRSSVEKAQQTSIQ

SEQ ID NO: 208004 - protein, 52 aa, Glycine max
  Clone ID: PAT_MRT3847_29854C.1.pep
FLLSGNPLLDYCNRLPISKWFLKSFQLKLQHFNCIQKAAIHFYVLFINYQCV

SEQ ID NO: 208005 - protein, 413 aa, Glycine max
  Clone ID: PAT_MRT3847_29855C.1.pep
ARAHIPECNLTESEEDISKNSAIYFDILGMYMVVYRQKFANMLHNSVIMQSLLIWVTSLVMGGIPAAASLALSCLSVLLMWVFALSFSFLVSFLLPLISSSPVPYVSSPMLVVGLFGAPAFLGALTGQHFGFLLLQKYLSNTLSKGRQLTPIIKAAVVKMEAERWLYKAGSFQWLILLILGNYFKIGSSYLALVWLVSPAFAYGFFEATLTPARLPKPLKLATIILGLATPILFSAGIFIRLAATLIGGMVRFDRNPGGTPEWLGNFVIAAFIASLLSLTLVYLLSYVHLSGAKRAIILATLVLFSLSLAVVLTGVVPPFSEDTARAVNVVHVVDATGKLDQGQNPISYVSLFSNTPGNLNKEVKQIDEGFVCGRDKTVDFVTFSVKYGCWTYNDTTNDWTEMDIPTMNVVSD

SEQ ID NO: 208006 - protein, 58 aa, Glycine max
  Clone ID: PAT_MRT3847_29856C.1.pep
ISIHIYAVLQCCHIVAIAALSNFYSHLFFCWTWLKNSETGFNIPFQYWSSNIRDGFCA

SEQ ID NO: 208007 - protein, 79 aa, Glycine max
  Clone ID: PAT_MRT3847_29857C.1.pep
SEYYVAVVCDEEVVLLLGDLKKEAYRRTGCRPALIDPILVSKKEHIFGKKKFSTRAKFHEKGRWHEISIECKNKGNYNV

SEQ ID NO: 208008 - protein, 216 aa, Glycine max
  Clone ID: PAT_MRT3847_29858C.1.pep
SSLDSIKPAKVIIEKDRCASDATMLSKIDRTKKKKHKENMLHVLAGASARLTQLETRTHHLENSVENLKVSVGNNHGSTDGKLRQLANILGEAEDVSSRDLKPMQLTDEAFPGGPEDVSSQDLKPMQLTDEAFPGGPQDLSLLRSFRNHVATRLWIGEDRHELKVVNHGRKVTDFRLENEHVKAIVEMSGLAPLLEACYRIVDKGLLSAFAERWHK

SEQ ID NO: 208009 - protein, 78 aa, Glycine max
  Clone ID: PAT_MRT3847_29859C.1.pep
PQHSNSLTFINSYSHQLWPSSPVFIHSEFYYTPCHVHHGIRRLLATGTQLETREASLALSIIKPFLLDQTTQTQNHGG

SEQ ID NO: 208010 - protein, 223 aa, Glycine max
  Clone ID: PAT_MRT3847_2985C.1.pep
KEVKSKLGVSINDVLAGVIFFGIRLYMQEINLKSSQTQSTALVLLNTRNIEGYKSVKEMINKTNSRSSWGNQYAFLHVSIPELSDSKYANPLEFIREAHMDMTKKKNSLATPLTGMLLDMLRKLRGPEAAASYLRSTLRNSSTTISNIIGPVEQMAVANHPIKGFYFMVAGSPESLTMTIMSYMGKIRIAFGVEKNFIDKQLFKSCLENSLEMIKEAAKKISA

SEQ ID NO: 208011 - protein, 96 aa, Glycine max
  Clone ID: PAT_MRT3847_29860C.1.pep
RPPPNFEKGPPANKNKKKKVPRSSLIRQKNYQKQKNLPKKESKKKGQPFWQKKTPTKFKGGRVKKAEFLPSKTQNFRQKGREKKPKKKLGKFSSLG

SEQ ID NO: 208012 - protein, 188 aa, Glycine max
  Clone ID: PAT_MRT3847_29861C.1.pep
GSRPKSPSSDDVDTICTSIWSQIKAKTGRSYSAFNYTGPANAENALFLFGSDPGLFSAEFDAASPSDFFSSVGLITPVLYRPWLTERLTESLPKSIKKIAVLEQIKRKTTKWGPILLDLLMSLKASSQGASPLIVGYQLGYIEYSTVTQALSGIFQNLTSKAPIQNLKIGAHDAPSKTRVPPAASVET

SEQ ID NO: 208013 - protein, 158 aa, Glycine max
  Clone ID: PAT_MRT3847_29862C.1.pep
MKEEETIVVLVEDEDVPSSTLLDLTSYQLHDLDLVELPPCLTVNRLSMLDLRIGNSPFSLRQNLITNAVVLPFFSQNGLSTLENIPDVGVFKKLLVFNVAFNEISSLHGFSRVSDTLKELYVSKNEVAKIEEIEHFHQLQLLELGSNKLWVNCRDGLK

SEQ ID NO: 208014 - protein, 138 aa, Glycine max
  Clone ID: PAT_MRT3847_29863C.1.pep
WSVVMECITRQQHFPNILHRCISTPLKVITLILLRANIRSVVLRKHKLIFSWPTMTSSQQHDAPMAKPNALFAPQWNVPGAIPDMGDLLGVDLHQEFSAEAEQAEAGRQRGRRNPDRQAQRWDRPCGTSSRHHGHHND

SEQ ID NO: 208015 - protein, 46 aa, Glycine max
  Clone ID: PAT_MRT3847_29864C.1.pep
LDYLVVFLFLGSISFLSVELLSMPPTTSDRMDVLLVYYLQMTKLWN

SEQ ID NO: 208016 - protein, 107 aa, Glycine max
  Clone ID: PAT_MRT3847_29865C.1.pep
FPFRGGKQNPPWGVFSIFLPPGCGRFFNASGPPGFPPGNPPFFPPQFIRVFSLIRPPRLFFLWLRLCMFCGIVTGFPFPPGAFFSHDFAKLCLPSFKKRWFPNRYKS

SEQ ID NO: 208017 - protein, 47 aa, Glycine max
  unsure (1)..(47): unsure at all Xaa locations
  Clone ID: PAT_MRT3847_29866C.1.pep
ITXVERMLIYLQFHVSFFTFIFVFFDLILLLLYVKQFGIHITHARFV

SEQ ID NO: 208018 - protein, 72 aa, Glycine max
  unsure (1)..(72): unsure at all Xaa locations
  Clone ID: PAT_MRT3847_29867C.1.pep
RIGRLVAMVVLLIDNVVLFCCDYPLITTDFMTYMFXYDCVHGHWKHHDVTVKDEKTLLFGDXPFTVFGHRIY

SEQ ID NO: 208019 - protein, 82 aa, Glycine max
  Clone ID: PAT_MRT3847_29868C.1.pep
GAFLGLPRLCHLVLWAQALLLGFARVFSSPRLLISRPLLHSVFPPPIRIRWHARGCRPGLPGRPPVSGLSPCPFFSLVFPWF

SEQ ID NO: 208020 - protein, 58 aa, Glycine max
  Clone ID: PAT_MRT3847_29869C.1.pep
LEPNRLETRRRQKGGWVSNCSITKEGVILFKEDKTASASPLFDYDNKIYSSMFGVVVR

SEQ ID NO: 208021 - protein, 54 aa, Glycine max
  Clone ID: PAT_MRT3847_2986C.1.pep
WVKKKTKEKCYQERIDEAISLPNMTVKAKEEEGMEETKFEHNTMLSYKLLLEPN

SEQ ID NO: 208022 - protein, 46 aa, Glycine max
  Clone ID: PAT_MRT3847_29870C.1.pep
IIYSSRRFTTLQSHIILQLATYVAFIDNPREAIYTNELQKGLKGFQ

SEQ ID NO: 208023 - protein, 61 aa, Glycine max
  unsure (1)..(61): unsure at all Xaa locations
  Clone ID: PAT_MRT3847_29871C.1.pep
TXPKTGSIMRPANTGRRTTKPETKAILTXXHESSNPYQLVGVRYPKGKKTTLCAGHRLRES

SEQ ID NO: 208024 - protein, 33 aa, Glycine max
  Clone ID: PAT_MRT3847_29872C.1.pep
FLIIFSVSTPNFLVSTVSFSCSIQLVNHKSITT

SEQ ID NO: 208025 - protein, 94 aa, Glycine max
  Clone ID: PAT_MRT3847_29873C.1.pep
APCEWAIRNIGQKPKEPNCHNCGTHIGLRSKTLRGTPNYLPIRQDTHPPSVIFCLAGVGVPGGTCRPAPCVPRFAALPWATNHPGPGCLSDLRA

SEQ ID NO: 208026 - protein, 52 aa, Glycine max
  Clone ID: PAT_MRT3847_29874C.1.pep
TMAGLAKCIIISLYFRLDFECMELEAITVVWCIYNCNCYSEHILSKKTCMHA

SEQ ID NO: 208027 - protein, 70 aa, Glycine max
  Clone ID: PAT_MRT3847_29875C.1.pep
AVIDYQWYKSFLKNILSIFQRFLKHVIDYQIIVIDYQRFKTVTDCLQLILKEFLKYVIDYTNLVIDYQIL

SEQ ID NO: 208028 - protein, 58 aa, Glycine max
  Clone ID: PAT_MRT3847_29876C.1.pep
EVTYSALIHWRRSSMEAASLPTRHGGSLCHVDRVTHVIAAVCVRPYADGAQETIDAGL

SEQ ID NO: 208029 - protein, 83 aa, Glycine max
  unsure (1)..(83): unsure at all Xaa locations
  Clone ID: PAT_MRT3847_29877C.1.pep
MLMSRNGCAELRKGCDEDCGILPCLQWXIKNPESQANATVDVVKLYGRAVLKNLINASPESRSAAIFRSLLYEACGRIVNPIY

SEQ ID NO: 208030 - protein, 36 aa, Glycine max
  Clone ID: PAT_MRT3847_29878C.1.pep
GTSIIWTSLVNSVLCRYHLVVYLSCGIILIHLFPLF

SEQ ID NO: 208031 - protein, 49 aa, Glycine max
  Clone ID: PAT_MRT3847_29879C.1.pep
SLVKRCWGHKGSCFLLKWENTHFELLNGFEGLNYFSGKVLVGVPLCWFF

SEQ ID NO: 208032 - protein, 371 aa, Glycine max
  Clone ID: PAT_MRT3847_2987C.1.pep
ALFCQDNKVRLNLPILIFLIMLFLLFVCLRHNRIATKNKHANTTAATKNGDLFCIWNYDGSIAYIVFITATEDFDMRYCIGTGAYGSVYRAQLPSGKIVAVKKLHGFEAEVAAFDESFRNEVKVLSEIKHRHIVKLHGFCLHRLLMFLIYEYMERGSLFSVLFDDVEAMELDWKKRVNIVKGTAHALSYLHHDFTPPIVHRDISASNVLLNSDWEPRVSDFGTARFLSFDSSYRTIVAGTIGYIAPELAYSMVVSERCDVYSFGVVALETLVGSHPKEILSSLQSASTENGITLCEILDQRLPQPTMSVLMEIVSVAIVAFACLNANPCSRPTMKSVSQCFLTQLTPLDIPLREISLQQLMSQELRHYLNL

SEQ ID NO: 208033 - protein, 47 aa, Glycine max
  Clone ID: PAT_MRT3847_29880C.1.pep
HKILILILPSIIVLPTAIYKLHGLINFPTIDFILNKFVCVTIILFFF

SEQ ID NO: 208034 - protein, 77 aa, Glycine max
  Clone ID: PAT_MRT3847_29881C.1.pep
LLCDLVISTCILPSFKQCTQFGLKINLHDGFQHSSTAKGVAGSLSTVTPGGQEPKGVHLLSAVSSEFIFLFAIKTAE

SEQ ID NO: 208035 - protein, 39 aa, Glycine max
  unsure (1)..(39): unsure at all Xaa locations
  Clone ID: PAT_MRT3847_29882C.1.pep
CXIRXXXCWFXXSGASLNCHKXINFXTLQFPXPXXXAND

SEQ ID NO: 208036 - protein, 66 aa, Glycine max
  unsure (1)..(66): unsure at all Xaa locations
  Clone ID: PAT_MRT3847_29883C.1.pep
SHVHPQYVYMRLLGAVPRLXGIDDEQPPQLYKCDPAGHPPRCKVISAGSKQXTVLHFLQKKIKPDL

SEQ ID NO: 208037 - protein, 95 aa, Glycine max
  Clone ID: PAT_MRT3847_29884C.1.pep
NGDGKKKGWGVIRIRQKKGLVLCQFLFYPPRGGGGFFYFWKIPGKKKISLFPKKNMNGPILYCGPFMGGNGQFSPPFFGGGPGLNGSGKEKFSFF

SEQ ID NO: 208038 - protein, 67 aa, Glycine max
  Clone ID: PAT_MRT3847_29885C.1.pep
SLTIFRLIFIISTYIYDSTLFFPNYSITSTLHIIYFSNNNDHPYLPASFTIIHLLPKQFLSTTQVIH

SEQ ID NO: 208039 - protein, 110 aa, Glycine max
  Clone ID: PAT_MRT3847_29886C.1.pep
GPEYLGLRMVSSRMCGLDQGIGLVRYYESWLGPVFATDLTSFSASRYVTCGRDTLVMALDLLLGGSLIETASALQVILFRVLTFTCMSLKALSCCECCECTHSARFLFNQ

SEQ ID NO: 208040 - protein, 91 aa, Glycine max
  unsure (1)..(91): unsure at all Xaa locations
  Clone ID: PAT_MRT3847_29887C.1.pep
PTSCAKGARSKDAYLGTKLSLKAISXTVRSTNFRIDAVVAKSGDKSVYYDSEDLGNTTGQCDLYGSHATSRYNRSXSKVCATFAAPLTNRG

SEQ ID NO: 208041 - protein, 407 aa, Glycine max
  Clone ID: PAT_MRT3847_29888C.1.pep
MAACTVYSTQSLSTNCSISTPSKTQLSFFHQKQVVFWRNSNRGNSSSRRSYVITCAAGDSQTVVIGLAADSGCGKSTFMRRLTSVFGGAAEPPKGGNPDSNTLISDTTTVICLDDYHSLDRTGRKEKGVTALDPRANDFDLMYEQVKALKDGIAVEKPIYNHVTGLLDPPELIKPPKILVIEGLHPMYDSRVRDLLDFSIYLDISNEVKFAWKIQRDMAERGHSLESIKASIEARKPDFEAYIDPQKQYADAVIEVLPTQLIPDDNEGKILRVRLIQKEGVKYFSPVYLFDDGSTISWIPCGRKLTCSYPGIKFFYGPETYYGNEVSVVEMDGQFDRLDELIYVESHLSNLSTKFYGEVTQQMLKHADFPGSNNGTGLFQTIVGLKIRDLYEQLIATKAETPVAAKA

SEQ ID NO: 208042 - protein, 87 aa, Glycine max
  Clone ID: PAT_MRT3847_29889C.1.pep
PRGGPPPQKKAQKKKGGPFQKKKPHTRPQGKKPTPPPTYAPGVQKTGEKRPPRGNPYQNTRKEGAKGDKGAAPPQKSNTPTLEKPHG

SEQ ID NO: 208043 - protein, 316 aa, Glycine max
  Clone ID: PAT_MRT3847_2988C.1.pep
MEKNLSKLATPTTCLASKSTKEVSKSAEKLVRESKSENASKVRKGAESQLSASKTASRGIQEAERMNQAFNSTKSNVKPRAAAFNFKCSERAERRKQFYMKLEEKMYAKEAEINQMQAMSQEKTEADIKKLRKSLNFKATPMPSFYCTPSPSQPHGNKFQPQAVSNNTRSKKEHNKPKCPGSGADAAFPSRSKVGNDLETDESVTAREPHGISVKECAKNKASKASLISPAPSTNNSCLADSTTSSHTSGMKEGAKVSLQKHRVTDSCKGAKQQSNERNKNGETAKHRNDIMRKGVGNVGLRSSSKSGNLAVRVAS

SEQ ID NO: 208044 - protein, 407 aa, Glycine max
  Clone ID: PAT_MRT3847_29890C.1.pep
MAACTVYSTQSLSTNCSISTPSKTQLSFFHQKQVVFWRNSKKGSCSSRRSYVITCAAGDSQTVVIGLAADSGCGKSTFMRRLTSVFGGAAEPPKGGNPDSNTLISDTTTVICLDDYHSLDRTGRKEKGVTALDPRANDFDLMYEQVKALKDGIAVEKPIYNHVTGLLDPPELIKPPKILVIEGLHPMFDSRVRDLLDFSIYLDISNEVKFAWKIQRDMAERGHSLESIKASIEARKPDFEAYIDPQKQYADAVIEVLPTQLIPDDNEGKILRVRLIQKEGVKYFSPVYLFDDGSTISWIPCGRKLTCSYPGIKFFYGPETYYGNEVSVVEMDGQFDRLDELIYVESHLSNLSTKFYGEVTQQMLKHADFPGSNNGTGLFQTIVGLKIRDLYEQLIASKAETPVAAKA

SEQ ID NO: 208045 - protein, 118 aa, Glycine max
  Clone ID: PAT_MRT3847_29891C.1.pep
NPIFVLLHRLLLLLSIFSFFFMGTEDGTSDADKTEFDERVQCLKGAVMDGGVAIVDGNCVSEEGQLLKSEAMNVGVAIADENGVAEEGRIGKSETFCNRVAVADKGDSGGVECLPTYK

SEQ ID NO: 208046 - protein, 66 aa, Glycine max
  Clone ID: PAT_MRT3847_29892C.1.pep
IFFFPGGVHHLPFEIGYPKITRLIFKLFFFTGAKMNWIKGYGPNTHFKIFQKNIGIFGFKKKNSQF

SEQ ID NO: 208047 - protein, 69 aa, Glycine max
  Clone ID: PAT_MRT3847_29893C.1.pep
MHGCNSGSALLVNAEVDSMGGVVDGGVGIGLKTSPRRAAIEKAQAVLRLEYDAREERRRELEFSEKGGN

SEQ ID NO: 208048 - protein, 93 aa, Glycine max
  unsure (1)..(93): unsure at all Xaa locations
  Clone ID: PAT_MRT3847_29894C.1.pep
ARNSARDFVTHTKRALVPFLLDEDYEKVLGFVDSDRENGENAWTVPSSRXSGPALPANVPKALPXVPVSVSSQEDKLPQXPPLPXLPDQDEXY

SEQ ID NO: 208049 - protein, 69 aa, Glycine max
  Clone ID: PAT_MRT3847_29895C.1.pep
SGMSSDLGFPPITKSRVWVRYEIIRPVSTPNPSRHLKSLEFLHNLIKRQVFLLLVNSILEFLHNLILFS

SEQ ID NO: 208050 - protein, 419 aa, Glycine max
  Clone ID: PAT_MRT3847_29896C.1.pep
MEHLPVEVIGNTLSLLGSARDVVVASVTCKKWREAWRNHLHSLSFNYCDWPLFHDFTSARLEILITQTIFQTKALQSLTIFLDDEHKFSAAPVIAWLMYTRDSLRQLLYNVRTTPCFNIIEKCSRQRLEVLALARNPITGVDPSYLKFPCLKSLSLSFISISALDLTLLLSACPKLETLAMVGVEIAMSDSQASVELSSVSLKFFDLELFSSDKFILEADLLEKLHLKDCSFEAFELIGKGTLKVLKIDDVNIIHLDIGDSTENLEIIDVCNFTVMWPKFYHMISKASKLYKLRLWGVVFDDEDEVVDIETISVCFPQLTHLSLSYDLRDGVLHYGLQGLSCLMNVVVLELGWTVISDLFSVWVAGLLEGCPNLKKLVIYGFVSEVKTHEECQILARFSEFILQLGRKYGHVKFEFEYE

SEQ ID NO: 208051 - protein, 56 aa, Glycine max
  Clone ID: PAT_MRT3847_29897C.1.pep
SNSCLHLSGFRTCLLCGKQSVTFMVKSSGALADAVCVVDTVNGLRSLLLIWYANGA

SEQ ID NO: 208052 - protein, 365 aa, Glycine max
  unsure (1)..(365): unsure at all Xaa locations
  Clone ID: PAT_MRT3847_29898C.1.pep
MSENSKTLRFGILGCANIARKVARAIALAPNATLCAIASRSREKAEKFAAENGFPATVRVYGSYDQVLEDPCVDAVYLPLPTSLHVRWAVMAASKKKHVLVEKPVALDVAELDRILDAVESNGVQFMDGSMWLHHPRTAHIQRLFSVPHSASSVGPVRFIHSTSTMPATPEFLESDIRVKPELDGLGALGDLAWYCIGASLWAKGYQLPTSVTALPDSTRNDSGVIVSITASLLWDQPNQTFATIHCSFLSHTSMDLAICGSNGSLHLRDFIIPYGETSASFDLTLGAKFVDLPSGWNVRPEEVHVANELPQEALMVQEFSRHVAXIRDCGSKPSTKWPEISRKTHLVVDAVIKSLELGCKPVCL

SEQ ID NO: 208053 - protein, 44 aa, Glycine max
  Clone ID: PAT_MRT3847_29899C.1.pep
EQCAHVLAKVLKPKSGISNQDLNGDAQIAKFQVRWCIKRSVILM

SEQ ID NO: 208054 - protein, 40 aa, Glycine max
  Clone ID: PAT_MRT3847_2989C.1.pep
SEPSQTLEFYVEIFLSPQRYCHPSQKEYPPSLSPFSIKCQ

SEQ ID NO: 208055 - protein, 38 aa, Glycine max
  unsure (1)..(38): unsure at all Xaa locations
  Clone ID: PAT_MRT3847_298C.1.pep
FHXACYGLLKNPIASDQCLRITELKRYLGKLWINRNWQ

SEQ ID NO: 208056 - protein, 59 aa, Glycine max
  unsure (1)..(59): unsure at all Xaa locations
  Clone ID: PAT_MRT3847_29900C.1.pep
MDPYQXRPSSAFNSPFWTTNSGAPVWNSNSSLTVGARGPALLEDYHLVEKLASFDTERI

SEQ ID NO: 208057 - protein, 83 aa, Glycine max
  Clone ID: PAT_MRT3847_29901C.1.pep
IWKITIFPKTIIVKYNSKLYFFIFFFNQIVALFEPYLKINKFFVIFMKQILFNYFFFKKSNHLFKKNYLIFSLYSIICSLCIV

SEQ ID NO: 208058 - protein, 67 aa, Glycine max
  Clone ID: PAT_MRT3847_29902C.1.pep
GAAKVKFFLIKLGLKNTPSKRVQNKKNPLSSGDFFMGPQSLLQNWWGIQQNLVNHLGNAVPKTLLPP

SEQ ID NO: 208059 - protein, 53 aa, Glycine max
  unsure (1)..(53): unsure at all Xaa locations
  Clone ID: PAT_MRT3847_29903C.1.pep
XFXXXXXXFCIQYRSFSYFCINFLMFEKYYSNIFIYYNNLFNYLKKYYIIIIF

SEQ ID NO: 208060 - protein, 76 aa, Glycine max
  Clone ID: PAT_MRT3847_29904C.1.pep
SARVFPFSVISGASLSVIIVVVECCDHLSFVHSRAYIIWTLLPSNLPNLTSLFSRDFPLTHTLLLVSIISCFIIHV

SEQ ID NO: 208061 - protein, 54 aa, Glycine max
  Clone ID: PAT_MRT3847_29905C.1.pep
SAELETGNAGAPSHLNRLCFREGADLIPNGWMCTLLMDDHDARAARLDGTTHYT

SEQ ID NO: 208062 - protein, 48 aa, Glycine max
  Clone ID: PAT_MRT3847_29906C.1.pep
DLRFLKNLPGLVFQDPTLFEIHLCLFFSYFTLLISSLSHLTSFCFFYF

SEQ ID NO: 208063 - protein, 70 aa, Glycine max
  Clone ID: PAT_MRT3847_29907C.1.pep
HTGPFLVPKAMVFKGLHKWVFNKKKPLVFKKIKRPRAKGKKNRAYFPKHEGLSITYFQKETSLSRSQKNE

SEQ ID NO: 208064 - protein, 71 aa, Glycine max
  Clone ID: PAT_MRT3847_29908C.1.pep
SEILLTIYRSMGQLVKTNHCRPGQMKRLESLWILRPIAMYLRNSSRSKDFIIETHWWKHKIVYSRMRIKAQ

SEQ ID NO: 208065 - protein, 85 aa, Glycine max
  Clone ID: PAT_MRT3847_29909C.1.pep
FSFSLFSLLLSEVLSGQEHLPARWPLAAPPCRSSSSPPLFFLPLEPSSLTRYESEVRYQKTRHSKPRSRLKAGRILPFSFVFGWV

SEQ ID NO: 208066 - protein, 141 aa, Glycine max
  Clone ID: PAT_MRT3847_2990C.1.pep
PRVRPRVRAYKAASRLASATPRPAHVLSRGIGWQGIGILLNGLFGTLTGSTVSVENVGLLGSTRVGSRRVIQISAGFMIFFSMLGKFGALFASIPFPIFAAVYCVLFGLVASVGLSFLQFTNMNSMRNLFIGGVALFLGFS

SEQ ID NO: 208067 - protein, 67 aa, Glycine max
  Clone ID: PAT_MRT3847_29910C.1.pep
RHLVNTLIQPPNTTYSHNPTWATSHSRAHTHVYQTSFQLFLQNSPSYMYQTHKPYTFYPTPPSVSSL

SEQ ID NO: 208068 - protein, 134 aa, Glycine max
  unsure (1)..(134): unsure at all Xaa locations
  Clone ID: PAT_MRT3847_29911C.1.pep
MAPKGLTFPGVLISLSTMSLNPSVAGERQNNGLVKNFHKESCPQAEDIITEQVKLLYKRHKNTAFSWLKNIFHDCAVHSCDASQLLDSTRKSLSEKETHINFWLRNFTYIETITETLXKEYPGVVSCADILVLS

SEQ ID NO: 208069 - protein, 72 aa, Glycine max
  Clone ID: PAT_MRT3847_29912C.1.pep
FHLPDVALRRERTTTRSCDLVSLEMKPLTKVISRAHKGHHNTQPEGANWLISAVGALTEYPSHSPRLQVKAR

SEQ ID NO: 208070 - protein, 148 aa, Glycine max
  unsure (1)..(148): unsure at all Xaa locations
  Clone ID: PAT_MRT3847_29913C.1.pep
NILSLEDLPDSMLEKLKCIHEVLTKTQNSPTGYSFEYLSGSFSRNADFMKFIQNAVLLCLTVFPRNYMLEEAVLISEELYVTKMNSXDVLLCGVYARREATYGNIDHARKVFDMALLSVEALPVELQSSAPLLYFWYAEVELASTAND

SEQ ID NO: 208071 - protein, 67 aa, Glycine max
  Clone ID: PAT_MRT3847_29914C.1.pep
CQDRNAPLNDKIIDLSKRMSIKDKIGHTTQIERSFATPDEQNKYFIGSLLSGGGSVHATKACDATWH

SEQ ID NO: 208072 - protein, 457 aa, Glycine max
  unsure (1)..(457): unsure at all Xaa locations
  Clone ID: PAT_MRT3847_29915C.1.pep
NILSLEDLPDSMLEKLKCIHEVLTKTQNSPTGYSFEXLSGSFSRNADFMKFIQNAVLLCLTVFPRNYMXEEAVLISEELYVTKMNSSGWVTPCRSLAKSLLKSDRQDLLLCGVYARREATYGNIDHARKVFDMALLSVEALPVELQSNAPLLYFWYAEVELANNSANDRESSSRAIHILSCLGSGTKYNPFKSQASSLLLLRAHQGFKEKLRTVWSSWVRGIINDQSVALICSAALFEELTTGWDAGIEVLNQAFSMVLPERRSQGYQLEFLFNYYIKMLQRHQRQSSLMKVWESILHGLQIYPFSPELLKDVVEVGHYYTTSNKLRRILDDCSYKKPSVVLWLFALSYEMFKGGSHHRIRGLFEKALGNDRLCSSVLLWRCYIMFEMEIAHDPSAARRAFFRAIHSCPWSKRLWLDGFLKLNSVLTAKELSDLQEVMRDKELNLRTDIYEILLQQS

SEQ ID NO: 208073 - protein, 44 aa, Glycine max
  Clone ID: PAT_MRT3847_29916C.1.pep
WNPIGVIRTKSIQLAYLRVHLLRRNYIRPNYTSYYYFVNVSLFF

SEQ ID NO: 208074 - protein, 225 aa, Glycine max
  Clone ID: PAT_MRT3847_29917C.1.pep
KPTLSTHSSLKCTMEEQQQQRQQSEQEEDPRRKPRGPLPIDWSRQFQSDSPPREYDVVPASAVMSSADQDDLSAIPDHKLRESIQGKKRTLDVTGKNLPDKGVKLRATIDRYQQELTRREQQKRLRQEDDKDRKPQPGQASCTDAVTEGVSNDLREENLSSQAQSQSTFASCFVNKMEDNTNCTASDAFRKEISLFKHRGNQKIHDHGDYQKRQDNRSSRRRNAL

SEQ ID NO: 208075 - protein, 84 aa, Glycine max
  Clone ID: PAT_MRT3847_29918C.1.pep
HQTGNFNTEFASSKVHGDPQQWAAWPLRSVPRYGITLVNRGKRDNHMFTGLLLNDHVIILPFKCWKHNGASFLVYVKVVSIPDS

SEQ ID NO: 208076 - protein, 149 aa, Glycine max
  Clone ID: PAT_MRT3847_29919C.1.pep
DHGVRRLNGPREPVGGPTFTFDRWGVHVPRIPGGGPCLGAPVIDRACNSSQNPRGKPPVEGPLETFHQVTPPCSALQGKVATVSGMRHPFLAPGGSVSSYVRPKPVQFTPHCFSPPPLGFNLVQFAAGAPRFIFEFSLGAGFGPAERAL

SEQ ID NO: 208077 - protein, 224 aa, Glycine max
  unsure (1)..(224): unsure at all Xaa locations
  Clone ID: PAT_MRT3847_2991C.1.pep
KTDESSGISRPAREAGVPRPRREDGAGRRGPPTYSTPLMSLHRARLESSSTGSSFPADSAKPVPLAVVSLDSRXDSGNLVHPFMRVTNXMTRHLATLRESXVTPAVYPRFIEFLHFDIQSTGQKSHRVNTRRGPSRCFVXLNSRIPLVRTSSKSAARRRPXGEAPRGKPRPGGRTRRGNTDAEVPPTRAGRPPAPATHLGRGDGGVERGPAGRGPAPAPAGLPG

SEQ ID NO: 208078 - protein, 52 aa, Glycine max
  Clone ID: PAT_MRT3847_29920C.1.pep
SHTKSLIRIKESIDWLIGNYTSSARKTSSASNYTSHHHHHNQTRGMRYGKNQ

SEQ ID NO: 208079 - protein, 139 aa, Glycine max
  unsure (1)..(139): unsure at all Xaa locations
  Clone ID: PAT_MRT3847_29921C.1.pep
KDTEADEEELIATKKEEEEAPDSAKPDSESGTKGYVAIHSSGFGDSLXKPELRLAIADSGLEHPXQAQHECIPKAVLXMDALCQAKSGMGKTAVFVLCTLQQVDPDTGQEADMVLXHTRELADDICHEGERISAYLAEL

SEQ ID NO: 208080 - protein, 71 aa, Glycine max
  unsure (1)..(71): unsure at all Xaa locations
  Clone ID: PAT_MRT3847_29922C.1.pep
LGGIFFYFFKNKWGPALQNPPFFFSLPAFFRAPNPDCPLFXNLSQPWEFYGGGAVETPKEWAPFFSSGVLL

SEQ ID NO: 208081 - protein, 56 aa, Glycine max
  unsure (1)..(56): unsure at all Xaa locations
  Clone ID: PAT_MRT3847_29923C.1.pep
QYKHYKYYPTLPHYSNTPTFSTVLLPIHNXIFQCFPFILKSLKALNSINPKINFQF

SEQ ID NO: 208082 - protein, 63 aa, Glycine max
  unsure (1)..(63): unsure at all Xaa locations
  Clone ID: PAT_MRT3847_29924C.1.pep
FAIGVNLTSIINMCAYGLNPGISGSRLXGTISPSIIHXTVWNQMIPVRTPLCCDSSTQSLRTF

SEQ ID NO: 208083 - protein, 57 aa, Glycine max
  unsure (1)..(57): unsure at all Xaa locations
  Clone ID: PAT_MRT3847_29925C.1.pep
MIIPKLYMIWCKRHVLICIKIHKKXXXXXKKKKKKKKKKKKKKKKKKKKKKKKKKKR

SEQ ID NO: 208084 - protein, 295 aa, Glycine max
  unsure (1)..(295): unsure at all Xaa locations
  Clone ID: PAT_MRT3847_29926C.1.pep
MVDVDRRMTGLNPAHIAGLRRLSARAAAAPSVPVRNGVVSFASLADKVINHLRDSGIHVQHGLSDAEFARAEAEFGFVFPPDLRAVLAAGLPVGPGFPDWRSGGARLHLRASLDLPIAAISFQIARNAVWSKSWGPRPCEPEKALRVARNALKRAPLLIPIFNHCYIPSNPSLAGNPIFFVDESRIFCCGLDLSDFFDRESLFRSSEADPILLKKQRSVSEKTAGXSVSAAFSRRSLDSGERTPRWVEFWSDAATDKRRRNSSSSSSSSLSASSSPERFFEMPRIKVHDWVEEYI

SEQ ID NO: 208085 - protein, 118 aa, Glycine max
  Clone ID: PAT_MRT3847_29927C.1.pep
RTRGCGFVICSVLCGNWYGGEQCFTSGRTGFVSGLNFVCVIINIVLLILNFLNINCWGLEKIYSIVATVLFLIASGIMVWYVVDTRSRGWPITTTILVIVEFLLYLWDVKILQGEASN

SEQ ID NO: 208086 - protein, 224 aa, Glycine max
  Clone ID: PAT_MRT3847_29928C.1.pep
MPSLPSSWFFTTLLLCFFLHVTFAGDPYVFYDWTVSYTSASPLGVKQKVIGINGQFPGPTLNVTTNWNVVVNVKNNLDEPLLLTWNGIQHRKNSWQDGVSGTNCPIPAGWNWTYEFQVKDHIGSFFYFPSLNFQRAAGGYGGIIINNRPVIPVPFGLPDGDITIFLSDWYTRSHKVLTKDVEDWIDLAIPDGVLINGLGPYLYDQNVVPNSIFYQIIIVEPGKT

SEQ ID NO: 208087 - protein, 110 aa, Glycine max
  Clone ID: PAT_MRT3847_29929C.1.pep
MDHSHKLPSFSCELRIIQAQNVESIKSTKNLFTRLYLPAGSNKRIQLNTKKVSSNTKYVPFWNESFNLNCSCPQEFLEGLKKESLVVELRQSKIWGSHVVGKGRFLGGNF

SEQ ID NO: 208088 - protein, 50 aa, Glycine max
  Clone ID: PAT_MRT3847_2992C.1.pep
KRQSYPLMPGHSLHLQNLLKVIMDPDPVKRPSAKELIENPIFCRIQKTAS

SEQ ID NO: 208089 - protein, 66 aa, Glycine max
  Clone ID: PAT_MRT3847_29930C.1.pep
SQPILEPIDWGRITLVPNFTSTNPLFFSFFTPSLLKVYSGNRTFPISNYHFFHVGKPNQPPYPLNK

SEQ ID NO: 208090 - protein, 378 aa, Glycine max
  Clone ID: PAT_MRT3847_29931C.1.pep
MGVSGNNEVLVTTKVVVDYDRASELKAFDDTQDGVMGLTDAGVTKIPLIFHNPKNSHHDESDDGSGSTQLSVPSIDLVGVAEDPATRKVVVEKIRQACETWGFFQVVNHGIPLSVLEEMKSGVNRFYEQDSEVKRELYTRDPLRPLVYNSNFDLFTSPAANWRDTFYCFMAPHPPKPEDLPSVCRDILLEYAKEVKKLGSVLFELLSEALELNPNYLNDIGCNEGLTLVCHCYPACPEPELTLGATKHTDNDFITVLLQDHIGGLQVLHENRWVDVSPVPGALVINIGDLLQLITNDKFKSVEHRVVANRVGPRVSVASFFSTSLQPSTKLYGPIKDLVSEDNPPKYRETTVQGYVSYSLGRGLDGTSPLPHFRIKDF

SEQ ID NO: 208091 - protein, 243 aa, Glycine max
  unsure (1)..(243): unsure at all Xaa locations
  Clone ID: PAT_MRT3847_29932C.1.pep
MSLRKVFRSRKFSRSFKEVLPAEGAAIVGGEDGVAGAGEESSNGNNGWSNMLPEILGEIVRRVDAAEEQWPNRQNVVACACVCKRWRDITREVVRVPSHTGKITFPACLKQPGPRDVPHQCLIKRNKKTSTFYLYLALTPSFTDKGKFLLAARRYRCGTHTEYIISLDADDLSQGSNAYVGKLSSDFLGTNFTIYDSQPPHSGAKPSSGRGSRRFASKLARPQVPAPNFEVGQVSYXVHLFES

SEQ ID NO: 208092 - protein, 45 aa, Glycine max
  Clone ID: PAT_MRT3847_29933C.1.pep
CDQLCALTSKSLRSSYSKPLGHSPDIFHTLLERCMQLFSNTRAMS

SEQ ID NO: 208093 - protein, 88 aa, Glycine max
  unsure (1)..(88): unsure at all Xaa locations
  Clone ID: PAT_MRT3847_29934C.1.pep
GSQAIDRKRMNSSLHSIVRMRGSFLPPHXLFHKSQLVNMCENYHPNLLHNLSNLTYNPFINHCFHFPHQQALVQDDTDMALPGNYYSR

SEQ ID NO: 208094 - protein, 104 aa, Glycine max
  Clone ID: PAT_MRT3847_29935C.1.pep
NCYIFFNLLPNICTGNGENTKILFTISVQIFENRKQSENLVLCCNYQLNQEKIMENVFSKQRDLLFSRYQVCRHVACYCLFLYGGFIVWTLKNFYLGRNGERSQ

SEQ ID NO: 208095 - protein, 96 aa, Glycine max
  unsure (1)..(96): unsure at all Xaa locations
  Clone ID: PAT_MRT3847_29936C.1.pep
XCXGXXXXXXXXLKFDLXXRFXIXXPXLXPXXXXXXSXXRXVXXDXXXXTXXXXXXNXXXXXXXXXXXLXXXXCCVXTSKXSLEPNSXLTYACMRL

SEQ ID NO: 208096 - protein, 91 aa, Glycine max
  Clone ID: PAT_MRT3847_29937C.1.pep
PPSSRGPFKTFSQGGSRNPLLNNPKVPICKKGKKSPFQPGFLFLPQVLFFPGPKKKNPFFFLKKNKIFLNPHGPVGQLFGGNPLSLGGKAF

SEQ ID NO: 208097 - protein, 51 aa, Glycine max
  Clone ID: PAT_MRT3847_29938C.1.pep
YRNQYSDFYILYSNRHFFLPIKNLLFLTLYLASLYNISLPLTYIIRELYIK

SEQ ID NO: 208098 - protein, 173 aa, Glycine max
  unsure (1)..(173): unsure at all Xaa locations
  Clone ID: PAT_MRT3847_29939C.1.pep
DRECQPDAALYTCLITGFGXKKKMDMVYNLLKEMRKRGCSPDGGTYNALIKLIXSQQMPDDAVRIYKKMSQSGIKPTIHTYNMIMRSYFVTKNYEIGHAIWDXMHQKGCCPDDNSYSVYIXMLEKGMKAPQLDYNKCASDISKIGNAVILEELARKMNFVGKSEVSNVLASWG

SEQ ID NO: 208099 - protein, 41 aa, Glycine max
  Clone ID: PAT_MRT3847_2993C.1.pep
SVSYIKTYDLCNPYIMQTQILRRTYDQRPLTTEATTTEEPP

SEQ ID NO: 208100 - protein, 50 aa, Glycine max
  Clone ID: PAT_MRT3847_29940C.1.pep
LAYPDDIALARSDIMRMNLRDSTCRVHVQGMLLQDLPKHHIAYSMAVYVI

SEQ ID NO: 208101 - protein, 178 aa, Glycine max
  Clone ID: PAT_MRT3847_29941C.1.pep
EMRERGCPPDGRTYNALIKLMTSQHMPDDAVRIYKKMIQSGIKPTIHTYNMIMKSYFVTKNYEMGHEIWDEMHQKPGCPDDNSYIVYIGGLIRQDRSGEACKYLEEMLEKGMKAPKLDYNKFASDISKTGNAVILEELARKMNFVGKFEVSNVLASWADMMKKSAKRREPTTSARQFT

SEQ ID NO: 208102 - protein, 326 aa, Glycine max
  Clone ID: PAT_MRT3847_29942C.1.pep
ARAESARGEDDTTFVVWRPPEFARDLLPNYFKHNNFSSFVRQLNTYGFRKIVPDRWEFANEFFKKGEKHLLCEIHRRKTAQPQQGIMNHHHHHAHSPLGVNVNVPTFFPFSSRVSISTSNDSDDQSNWCDSPPRGATSLVNGAAAANYNTSVTALSEDNERLRRSNNMLMSELAHMKKLYNDIIYFVQNHVKPVAPSNSYSSSLLLCNTPSATPISSANNVSMMQRPMNQLLGYYSTNPKQGATQITQPQTYVVNSPTNTSRSSITIFEGPASSNINSCKTKLFGVSLQSKKRVHPDCGSNPETNRARLVLEKDDLGLNLMPPSTC

SEQ ID NO: 208103 - protein, 236 aa, Glycine max
  Clone ID: PAT_MRT3847_29943C.1.pep
MELSVVARDMEEVVLLVDDLRSLSGISRCRICHEEEFESSKTLEAPCACSGTVKFAHRDCIQTWCDEKGNTTCEICLQQYEPGYTAAPKKSQITDAAMTIRDSLQISRNEQEPLNTRIVGIVEGNNYSECTYASDRTAACCRSLALAFTLILLVTHLFALLTDGMEDYPFTILTVFFLRASGIIIPMYIIIKAIGAIHDNIKRHHHQDSDDDSSISDGDDEENEPPNDEILRHSQS

SEQ ID NO: 208104 - protein, 55 aa, Glycine max
  Clone ID: PAT_MRT3847_29944C.1.pep
HVYLIRHTKFYAGWYLLSRGSVLEKNIANVITDGTIERVPWTNPTPDRLHNTDDR

SEQ ID NO: 208105 - protein, 60 aa, Glycine max
  unsure (1)..(60): unsure at all Xaa locations
  Clone ID: PAT_MRT3847_29945C.1.pep
ASFLEMQAATTPVKRGSHRPWWLASNQXLSYSDGILSGVYGFDLLRLSDPEGTGRFIEPQ

SEQ ID NO: 208106 - protein, 37 aa, Glycine max
  Clone ID: PAT_MRT3847_29946C.1.pep
SLTKQPTRLNISAIKDLYTEKCHLQSASENNPFLKST

SEQ ID NO: 208107 - protein, 133 aa, Glycine max
  Clone ID: PAT_MRT3847_29947C.1.pep
WHPLQAIYLLLNPNGTMKLYEFVVIFGCFMLILAQMPSFHSLRHINLVSLVMCLSYSACATAASIYIGKSSNGPKKDYSLISDTTNHLFKIFNAIPIITNTYSSRIVPKIQVNKQSKFIPSNIYLLILHTHTI

SEQ ID NO: 208108 - protein, 42 aa, Glycine max
  Clone ID: PAT_MRT3847_29948C.1.pep
QFSHSSQGPTLLHGLTLPLHKYTAVPLQILVWTTNKKKLRMT

SEQ ID NO: 208109 - protein, 43 aa, Glycine max
  unsure (1)..(43): unsure at all Xaa locations
  Clone ID: PAT_MRT3847_29949C.1.pep
IHQDWYLSGVKKLKYHXQFVVESYTLKKKSHIHFNKNFRLNTG

SEQ ID NO: 208110 - protein, 625 aa, Glycine max
  Clone ID: PAT_MRT3847_2994C.1.pep
MAGEVVGFEMVQGPVENGTEGGKPVLNEKENGKLEKDVAAAADAIKFGTHGEESAKKKGNDVSDVNAPKDAAEDWPAPKQIHSFYFVRWRPYDDPTIKSKIDLSDKDISKKNQARFQITEALKAKRAERVELISQVKSLRGDSRQFQSIVDEKLKEIGPLQQALGKLRTTNNAGRGGLCSSEDELNSVIYSLQYRIQHESIPLTEEKQILREIKQLEGTREKVIANAAMRAKLQESMGQKEAIQDQVKLIGGDLDGVKKEREAIRSKIKQIDDALKAIDKDIQSLQEELTAVSQKRDKAFESIQQLRKQREEGNTYFYQSRTVLNKARELAAKKDINALDEVSQTEVEKFMALWNKDKAFRNDYEKRILASLDMRQLSRDGRMRNPDEKPILEEPKPAEAEALPKMAAKQPKEEPKPSPQETLPAQKESKTTQKDSKNKGRDLKSKLESKDVAETDEYEFESPEKEAPAKEPEIDPAKLKEMKREEEIVKAKQALERKKKLAEKAAAKAAIRAQKEAEKKLKDREKKAKKKSGTAAVANPEDEPKDEVVEVTEPEKINDDVQAPAPVKEKVQKESGIRSRGRARGPDSIPKAIIKRKKSNNYLIWAAAATLLVLLLAVLGYIYLF

SEQ ID NO: 208111 - protein, 173 aa, Glycine max
  unsure (1)..(173): unsure at all Xaa locations
  Clone ID: PAT_MRT3847_29950C.1.pep
RSLVGAILSKVVPATFSTISSFSKLIWRSEQSSPKKSDQKPQPFARASPLTCLKDHPRKGEKLTLSPSGTLAAITDSLGRILLLDTQALVVVRLWKGYRDASCLFMEMLVNKDIASSSSSYSEPSKSDYCLCLAIHAPRKGIIEIWQMRTGPXVLETISCXAKGSKMLQPSYR

SEQ ID NO: 208112 - protein, 156 aa, Glycine max
  unsure (1)..(156): unsure at all Xaa locations
  Clone ID: PAT_MRT3847_29951C.1.pep
GSSSSYFFPISYTRTFQGCFLVLDLLEVWVRYGYRLFAHCFHHCYARIIAHVFASGSECIWDHSIPSVSRANGDYATTAIAPMAESLTDDGMKNVKTTTATHFLISTYDADTWESALTYTLYSEDRIASIMIDQLTXIWIDQHQRLKFNGDDADRE

SEQ ID NO: 208113 - protein, 133 aa, Glycine max
  Clone ID: PAT_MRT3847_29952C.1.pep
PIHNSIKFKNAYPSHHWKESRLIDVNGLNLVNDEVKPVLKPTLSIGQILSRKLMMPEEYEASGMIRERSSAKRKVSLGQMLGKQNGDSSFDRQAEKENGQKPFSAKRKKFGFGRFSLLLTKQQKKKKPTLNLR

SEQ ID NO: 208114 - protein, 184 aa, Glycine max
  unsure (1)..(184): unsure at all Xaa locations
  Clone ID: PAT_MRT3847_29953C.1.pep
MEEVPDTAANRSDPGFRAEIDTSAPFESVREAVTRFGGVGYWKPILNGLSNKHFAAPEPHHAEELDPEKLEEQAALLEKDLILKERETLDVLKELESTKRLVENLKSKVQKEESEANLNFQTSVCENISSEGCVPYPSSSPGLILMELKQAKFNLNRTTSDIADVRASVESLXKKLEKERLSLE

SEQ ID NO: 208115 - protein, 556 aa, Glycine max
  unsure (1)..(556): unsure at all Xaa locations
  Clone ID: PAT_MRT3847_29954C.1.pep
MEEVPDTAANRSEPGLRAEIDTSAPFESVREAVTRFGGVGYWKPILNGLSNKHFAATEPHHTEELDPEKLEEQATVLEKELILKERETLDVLKELESTKRLVENLKSKLQKEESEANLNFQTSVCENILSVKEDEKEDKENGMSNVVQDSKEGCTPYTSSSPGLILMELKQAKFNLNRTTSDIADVRASVESLNKKLEKERLSLEKTRKRLTQNSSKICSLEEELNQTKLKLLVAKDAGSDNHSDITRELQRLSFEAEHFKNMGEAAKSEVMKEMSEIEQTKAMIKTAEIRLIAAXKMKEAARAAEAAALAEIKALSSHHENSAGDCVEKHDGVTLSFEEYTALTCKVREAKEQSKKRVVDAMHLVDEANVSKMDILRKVEEATEEVKTSKKALEEALERVEAANQGKLAVEEALRKWRSEGHKRRSSILNSTKFKNAYPSHHRKDSRLLDVNGLNLVNDEAKPVLKPALSIGQILSRKLMMPEEYEASEMHRERSSVRRKVSLGQMLGKQIADPSFEKENGQKPFSAKRKKFGFGRFSLLLTKQQKKKKPTLNLR

SEQ ID NO: 208116 - protein, 146 aa, Glycine max
  Clone ID: PAT_MRT3847_29955C.1.pep
IRLEKKVKELQDNIAAVNFTPQSKMGKMLMAKCRTLQEENEEIGNQASEGKMHELAMKLSVQKYQNAELRSQFEGLQKHMDGLTNDVDRSNEMVLMLQDKLEEKDQEIQRLKDELQPKSLVVEDGKTDPASNRNDDDETIPTEAAN

SEQ ID NO: 208117 - protein, 44 aa, Glycine max
  Clone ID: PAT_MRT3847_29956C.1.pep
HRKIFVMCFMANFQDKTGPDLCRLRGEKWLSPLGLNYLMGLWGA

SEQ ID NO: 208118 - protein, 283 aa, Glycine max
  Clone ID: PAT_MRT3847_29957C.1.pep
MSGDAPTQTQTQATDTKPEETHTHTQTITTKPEESHSQSQSQPQPHTADYAPYPKLDPTDVAPPLNTESRAPISEDAATTMPKDSNPYVTPAPVPASSTKTTLDSVKDVLGKWGKKAAEATKKAEDLAGNMWQHLKTGPSFADAAVGRIAQGTKVLAEGGYEKIFRQTFETVPEEQLLKTYACYLSTSAGPVMGVLYLSTAKLAFCSDNPLSYQVGGDQTQWSYYKVVIPLHQLRAVNASTSRTNQSEKYIQIISVDNHEFWFMGFVHYDSAVKNIQGALQPH

SEQ ID NO: 208119 - protein, 106 aa, Glycine max
  Clone ID: PAT_MRT3847_29958C.1.pep
LSDIYAALLGGISKQVIHIHDIVTFIAFALCPCRSIQLIYCSVDGNMISTNIIIIIILKRLLLLLLLLLLLLLLLLLLLFTNTHMTSIIFTLVFLPYFRVLVKYQS

SEQ ID NO: 208120 - protein, 42 aa, Glycine max
  Clone ID: PAT_MRT3847_29959C.1.pep
MHMLFFFKKKKKKKKKKKKKKKKKKKKKKKKKKKKKKIKKKK

SEQ ID NO: 208121 - protein, 158 aa, Glycine max
  Clone ID: PAT_MRT3847_2995C.1.pep
KQVATPEYKAYMQQVKRNAQALASALLRRNCRLGTDGTDNHLLLWDLTALGLIDRNYEKVCEARRITLNKCAIYGSISPGGVRIGTPAMTSRGCLEEDFETIADFLRRAAQITSIVQREHGKSCKDFLKGLQNNKDISELRNRVETFSSQFAMPGFDI

SEQ ID NO: 208122 - protein, 89 aa, Glycine max
  Clone ID: PAT_MRT3847_29960C.1.pep
GEPKQQQGIFAIHGSCELQKDKTIKEKFAKVGIFILPSLNATKFLSTFKIPNPSFVRSVHLGHLIPEFLRILPHIPSNSRCFNDHGVDP

SEQ ID NO: 208123 - protein, 109 aa, Glycine max
  Clone ID: PAT_MRT3847_29961C.1.pep
MGHIINMAQGIQALKGNYNVHKPQPPKSSSNLDFASKKLKNSSNSMLVLKKDSIFMQNSCSFTISRSAATDCMLDGASRRPRSARKSSGHSRTVRIPGDKSISHRHFMF

SEQ ID NO: 208124 - protein, 126 aa, Glycine max
  unsure (1)..(126): unsure at all Xaa locations
  Clone ID: PAT_MRT3847_29962C.1.pep
KWGNKRGSNXRAGEKVPSLLFLGAPFFPRLPPMFENKMKFRDLGPVSPFAPQPVGDKKKFGGFKFGEKGGDSLKGQGGPPPLFXPRFSPRGSFQIFFCGKSKNFANVFFGPVFGGGEKKGPFFPPC

SEQ ID NO: 208125 - protein, 89 aa, Glycine max
  Clone ID: PAT_MRT3847_29963C.1.pep
FHLKPLFLSPQFPRQDLAFLACYQKCPTIVGLLFNLAAGDGVFLPKLCNKHKPNPGRAMVELVSSGAAPGPVSHVSQPIFASAPARSAL

SEQ ID NO: 208126 - protein, 63 aa, Glycine max
  unsure (1)..(63): unsure at all Xaa locations
  Clone ID: PAT_MRT3847_29964C.1.pep
WERNNIRRGLGLVKFSLVLAILLGSFIVVGGTDVAYSALLNSVSHACHXFLFMNGVELINITN

SEQ ID NO: 208127 - protein, 98 aa, Glycine max
  Clone ID: PAT_MRT3847_29965C.1.pep
HSGAFSQQLLFFIITNKVITTPQNHNNPTPNLNSKHEPPYPKPQQPQSRQSHHQTPKHPSSKYSSSTTKPEFKARTTMTRSRSSTTTTITSLCGIIEL

SEQ ID NO: 208128 - protein, 298 aa, Glycine max
  Clone ID: PAT_MRT3847_29966C.1.pep
EGFYNCLNEYQGKTTTQVLIALDKHEDRHTYVVAFRGTEAFDADAWCTDLDISWYGIPGVGRMHGGFMKALGLKQNVGWPKEIGEQDENLPPLAYYVIRDILRKGLSENDKANFIVTGHSLGGALAILFGTILCLHDETLLLERLEGIYTFGQPRVGDEAYANYTRQKFKEHYIRYCRFVYCNDLVPRLPYDDKEMMFKHFGTCLFFNRRYELEVLEELWNKNYFSLWCVIPMAYNAILEIIRSFIIARQNGAYYREGWFLFAFRTIGLIIPGVPAHGPQDYFNSTLLGKIEKHFKVK

SEQ ID NO: 208129 - protein, 102 aa, Glycine max
  Clone ID: PAT_MRT3847_29967C.1.pep
SKYSLFIITILLSLRAHYILYNPSLLTIYPSSSIYYHNVYFILYHSLFFIFFSQQLYLTFYIIINHIFIIISFNNLISLSSFIIYQSIIFLSSQQISFYKHL

SEQ ID NO: 208130 - protein, 80 aa, Glycine max
  Clone ID: PAT_MRT3847_29968C.1.pep
SVGEHFECQICCGMSQDFHIDQLKITFYRVIHLMQKNLWLIFVFIEIYALRKMLTLVLGDDFKYLKVASFFDKIQIINTF

SEQ ID NO: 208131 - protein, 82 aa, Glycine max
  unsure (1)..(82): unsure at all Xaa locations
  Clone ID: PAT_MRT3847_29969C.1.pep
KKIPPQKKKKKGPFPPLGQVKTGFREIKKRFHIPCAKNRLRFQVCPFIKKKRGKKIPNFVFEKKKKKKKKKKKKKKKKXXGR

SEQ ID NO: 208132 - protein, 40 aa, Glycine max
  Clone ID: PAT_MRT3847_2996C.1.pep
HFLTHKYINLIYLYTHTTSSLTIYIYFLKFFNSSINLLIT

SEQ ID NO: 208133 - protein, 78 aa, Glycine max
  unsure (1)..(78): unsure at all Xaa locations
  Clone ID: PAT_MRT3847_29970C.1.pep
GCGSPCIDLRQVSLSXSASAKDADLIILQGMGRALHTNLNARFKRDALKLAMVRNQRLTEKLVKGDIYDCICKFEPAS

SEQ ID NO: 208134 - protein, 83 aa, Glycine max
  unsure (1)..(83): unsure at all Xaa locations
  Clone ID: PAT_MRT3847_29971C.1.pep
VVENGCGSPCIDLXQVSSEIIAAAKDADLIILEGMGXRALHTNLNARFKRDALKLAMVKNQKLAEKLVKGNIYDCICKYEPAS

SEQ ID NO: 208135 - protein, 253 aa, Glycine max
  Clone ID: PAT_MRT3847_29972C.1.pep
MALNSILRKSGSFARALAVSGQLTKNNHLGHRTLLSTAISQHQHQDSLVPRFHFSSVASKKKPTSDENLLRLIESEIECAQETDDHNAAEEVPGNFPFKIIDSPGQQTITLERMYQDEEIKVEVHMPDLVTGEENDDDNDNDSERVTQSSIPLSISVLKKGGPYLEFNCVGYPDEIVIDGLSVKNPDLTEDQVAYEGPDFQGLDENLQKSFHRYLEIRGIKPSTINFLHEYMINKDSKEYLVWLNKLKSFVQA

SEQ ID NO: 208136 - protein, 404 aa, Glycine max
  Clone ID: PAT_MRT3847_29973C.1.pep
MMTVKQGFFSLRGSLLFFAILTLLSFTYLSLKYSTPTPQVAKLSVENLNDAPVSEKEEKEEVPDTYHSPRVFKLNYEEMEKKFKVYIYPDGDPNTFYQTPRKLTGEYASEGYFFQNIRESRFCTENPDEAHLFFIPISCHKMRGKGTSYENMTIIVQNYVESLISKYPYWNRTLGADHFFVTCHDVGVRATEGLEFLVKNSIRAVCSPSYDVGFIPHKDVALPQVLQPFALPAGGNDIENRTTLGFWAGHRNSKIRVILARVWENDTELDISNNRISRATGHLVYQKRFYRSKFCICPGGSQVNSARIADSIHYGCIPVILSNYYDLPFNDILDWNKFAVVLKESDVYQLKQILKNISDAEFVTLHNNLVKVQKHFQWNSPPIRFDAFHLVMYDLWLRHHTIKY

SEQ ID NO: 208137 - protein, 49 aa, Glycine max
  Clone ID: PAT_MRT3847_29974C.1.pep
ENLQKSFHKYLEIRGIKPSTTNFLHEYMINKDSKEYLVWLNKLKSFVQA

SEQ ID NO: 208138 - protein, 52 aa, Glycine max
  Clone ID: PAT_MRT3847_29975C.1.pep
DPTCNLSGIHHLPIAIKSDMCPHVRMHHRTGPLKIAPSHWQPLWFPRDKKRG

SEQ ID NO: 208139 - protein, 65 aa, Glycine max
  Clone ID: PAT_MRT3847_29976C.1.pep
DRRTQNRSHTTRAQLSRTLITTRVAKWTLAVRSRTEAREERASLAKKKPFSRSVNDGLQLQLGRI

SEQ ID NO: 208140 - protein, 94 aa, Glycine max
  Clone ID: PAT_MRT3847_29977C.1.pep
RILDLKKCLYALLMEDDKLFKKHLDNFNRIILDLKSIDVKIDDEDQAIILLSFLPKPFEHFADTMLYRKATLSMDEVKAALNSKENQGGNDSGS

SEQ ID NO: 208141 - protein, 155 aa, Glycine max
  Clone ID: PAT_MRT3847_29978C.1.pep
MALGRNKTVQLALLLLCLDLGIAHQHQGHSPSHSGFCASDAHNHCGDDHHHDHGHAHDHNKDKIDARSKLLPEELAEEEDMKLYGFGFPHHHHHDHDIEAAELSGLSLWLNALGCSFLVSMASLVCLIILPVIFVQGKPSKAVVDSLALFGARAM

SEQ ID NO: 208142 - protein, 49 aa, Glycine max
  unsure (1)..(49): unsure at all Xaa locations
  Clone ID: PAT_MRT3847_29979C.1.pep
LSYFDLQRLLLSPVRLGAXAFSWAAGKLESNGLXLPTSPSSSDVQKPVL

SEQ ID NO: 208143 - protein, 207 aa, Glycine max
  unsure (1)..(207): unsure at all Xaa locations
  Clone ID: PAT_MRT3847_2997C.1.pep
MAGKIEKKAPRVERRHIEAPKNLMEVVFILVDAITSLGYTERRQVSNLPRAIASAVLDKGKKTVARECGERSDCVQLKSPEVIKELYEIKKLLTRTMLFSEKXFLGFLFAAGFDKEDVLLRKRTARILRPVFTVIRDIESKSVLVFIRGTRSLNDTLTAALCAPVSFEHRRNNNIVSGHAHRGMVAAAYWILDYCTPVLKKALDQYP

SEQ ID NO: 208144 - protein, 87 aa, Glycine max
  unsure (1)..(87): unsure at all Xaa locations
  Clone ID: PAT_MRT3847_29980C.1.pep
PSPQSQSFSXGYGSIVXTTLANIVPSNRGCSHWRHDAVISTTGRGRHSVLRIFKGRRGRKEHHATYGAIQAAGPYLRLSRFQSGQVV

SEQ ID NO: 208145 - protein, 85 aa, Glycine max
  Clone ID: PAT_MRT3847_29981C.1.pep
PPPEMAISRQFPAAETPGILSRIVLECPCSNVACPIRFWGSSGYNHCLGLVSLPDGSLTGRGSASFFSQVTSGVIVINSGIWGYV

SEQ ID NO: 208146 - protein, 133 aa, Glycine max
  Clone ID: PAT_MRT3847_29982C.1.pep
PAPPEKSPAPTPYYYKSPPPPSPSPPPPYYYHSPPPPSPSPPPPYYYKSPPPPSPSPPPPYYYKTPPPPSPSPTPPYYYHSPPPPSPSPAPPYYYKSPPPPSPSSAPPYYYKYPPPPSASAPPPYYYDSTPTP

SEQ ID NO: 208147 - protein, 67 aa, Glycine max
  Clone ID: PAT_MRT3847_29983C.1.pep
LTAKAVKEPKKISVLVKHSNSMFQLQKKKMTMFHGKLSLGLSGISRSINTLSYLVSNVKFVKHCNSF

SEQ ID NO: 208148 - protein, 69 aa, Glycine max
  unsure (1)..(69): unsure at all Xaa locations
  Clone ID: PAT_MRT3847_29984C.1.pep
VLLLNKXDLVPAWATKGWLRGGAKEFPTLAFHANINNSFRKGPLLSVLRQSARPKPDKQPIPAASVGNP

SEQ ID NO: 208149 - protein, 300 aa, Glycine max
  Clone ID: PAT_MRT3847_29985C.1.pep
MAKKPVKYYVVDAFTESAFKGNPASVCFLEEERDEEWLQAVAAEFNISETCYLSRITHSLHGISNPRFRLRWFTPVAEVKLCGHATLAAAHALFSSDLVDTDVIEFVTLSGVLTAKKIPAIHITSASDSQNGEAQDGFYIELDFPVDPVTEFSFDESTSLLSEALNGASIIDVKRTQIGDDLLVELTSVKAVSELQPKLDAIVRCPGRGVIVSAIAPPGSGFDFYSRFFCPKLGINEDPVCGSAHCALASYWSNKLGKFDLNAYQASSRGGVLNIHLDEKIQRVLLRGKAVTVMEGCVLV

SEQ ID NO: 208150 - protein, 55 aa, Glycine max
  Clone ID: PAT_MRT3847_29986C.1.pep
KKTHTSHIITTIKRGVEMMCEVCVILKKNKKCRWSELKNACNRRHEHNCREDTNR

SEQ ID NO: 208151 - protein, 75 aa, Glycine max
  unsure (1)..(75): unsure at all Xaa locations
  Clone ID: PAT_MRT3847_29987C.1.pep
SLMVSGYSEGELIKKFGNCFLSLPVSHTLXVIQRLFCAFMSRFGWWNLIHPLXFPYKSARQVLCASSSYIYMLYT

SEQ ID NO: 208152 - protein, 106 aa, Glycine max
  Clone ID: PAT_MRT3847_29988C.1.pep
APFASFYSLPRRHLSNSVLPMTFCGKPNGGPEGQRKTRTSSCGDSSFGVPTRSVAFPIGCQASRIGGGNCKSGSIISHNRHEPVSKLLIEDTVPGCDERVLTISSF

SEQ ID NO: 208153 - protein, 121 aa, Glycine max
  Clone ID: PAT_MRT3847_29989C.1.pep
TVCLSSEVFVTTQGGNFPHFLMGHRRFIYDGHAKTIIPDKRKLVVLLDDVSISWRAFKDQMEDMLTESDRKGIMVPRVRKINRKTSVYTYPLPECRCLQQSLANQIDRNLVILDNYNGTKA

SEQ ID NO: 208154 - protein, 97 aa, Glycine max
  unsure (1)..(97): unsure at all Xaa locations
  Clone ID: PAT_MRT3847_2998C.1.pep
NKNSTYFVKFIPNNAKSSVGDIPPKGLIMASTFIANSTSIHDMFMRVSEHFTAMFNHNAFLHCYTGXRTDEMQFTEGPSDMNDLVTVYHQYQDATAD

SEQ ID NO: 208155 - protein, 82 aa, Glycine max
  Clone ID: PAT_MRT3847_29990C.1.pep
KPVTIKIPLEMRIMEPLTIKVFIVRFIILYRGQGECSGTMGVEPNYAETRPTNKMETGIPVSFTSLCYTICRIPDAWADEWV

SEQ ID NO: 208156 - protein, 59 aa, Glycine max
  unsure (1)..(59): unsure at all Xaa locations
  Clone ID: PAT_MRT3847_29991C.1.pep
CILLAIRLVPSRAPISRVHNHRFSHXITRHPLKXRNLQTIXNPPPNHTTLSSATXKTSR

SEQ ID NO: 208157 - protein, 74 aa, Glycine max
  Clone ID: PAT_MRT3847_29992C.1.pep
CVSLQDGINDYFPSEIDDEQEFNACAASHVDCKFGSFVTRTCHDSICVHLKVHNKLWLIEICLFKTWKYIKYWA

SEQ ID NO: 208158 - protein, 43 aa, Glycine max
  Clone ID: PAT_MRT3847_29993C.1.pep
MSFLSRDVLVCSLAGGSRVPCVLEKPEGSPSQTKLQNSACGGP

SEQ ID NO: 208159 - protein, 36 aa, Glycine max
  unsure (1)..(36): unsure at all Xaa locations
  Clone ID: PAT_MRT3847_29994C.1.pep
QLASNLVKNSAIIHAWIRLSQPXDINASESSTYRLD

SEQ ID NO: 208160 - protein, 48 aa, Glycine max
  Clone ID: PAT_MRT3847_29995C.1.pep
SERALYIEGTCLTPKNHPISLIQTLPSQLTYLNHPNSKNKFLVQNEGL

SEQ ID NO: 208161 - protein, 44 aa, Glycine max
  Clone ID: PAT_MRT3847_29996C.1.pep
LVLQIETKFFIGHQRSLTFMLTLAFRTLAISETLLSASHLYGKS

SEQ ID NO: 208162 - protein, 131 aa, Glycine max
  Clone ID: PAT_MRT3847_29997C.1.pep
MDEKNGQHEAEAMRRIAFFGVAISTIATLVTVISVPMVYSHMQTIQSQMQNEVDFCKMRSGNIWREVTRTQVLSNVQEKPRVARQAGGGGCCGCGHAPDGPPGPPGPDGQPGGDGQPGGPGNDGAPGNPAP

SEQ ID NO: 208163 - protein, 54 aa, Glycine max
  Clone ID: PAT_MRT3847_29998C.1.pep
KGGKNLPLAPNLKTMAFFLCLKKKPPFFLLKSQPLAGPLNFYMKQIFWEQRSNP

SEQ ID NO: 208164 - protein, 203 aa, Glycine max
  unsure (1)..(203): unsure at all Xaa locations
  Clone ID: PAT_MRT3847_29999C.1.pep
ISSCISVCIEWWWYEIMIMLCGLLVNHRASVASMRILIHTTSLLYILPSSISFSVSTRVGNTLGAQKPSKAEFSSIVGLSCSFMLGVFALVFTILVRHIWANMFTQDKEIITLTSFVLPVIGLXATLGTCPQTTXCGVLRGTARPKVGANINLGCFYLVGMPVAVWLGFFAGFDFQGLWLGLLAAQGSCAVTMLVVLSRTDCS

SEQ ID NO: 208165 - protein, 82 aa, Glycine max
  Clone ID: PAT_MRT3847_2999C.1.pep
SEKWRHHRVQSQLREVPSELRVQQQQWMLRLLLAEIESLVWQECARPKSEAFLEWKSMQEGVLVAVVDEMAWDTPATAMLDL

SEQ ID NO: 208166 - protein, 41 aa, Glycine max
  Clone ID: PAT_MRT3847_299C.1.pep
EIFKQLVFSFFITTLSLSLILFTINIIPIHRSILPHYHILS

SEQ ID NO: 208167 - protein, 147 aa, Glycine max
  unsure (1)..(147): unsure at all Xaa locations
  Clone ID: PAT_MRT3847_29C.1.pep
GCTPCFCCGHSSVCPHAVGYSVXSISSTIQIDEHGWRAXQRDGCEASLEWSCERQDIAVISDSYFPRYLIARAKFLGKQVLSYGQTLSFSFRVDRRDTRLCAEDLVLEGAGLRVSVPLIAQGNSYPSETTVKYVFRVHEATDYPWRP

SEQ ID NO: 208168 - protein, 208 aa, Glycine max
  Clone ID: PAT_MRT3847_2C.1.pep
MGRGKIEIKRIENSSNRQVTYSKRKNGILKKAKEITVLCDAQVSLIIFAASGKMHDYISPSTTLIDILERYHKTSGKRLWDAKHENLNGEIERLKKENDSMQIELRHLKGDDINSLNYKELMALEDALETGLVSVREKQMDVYRMLRRNDKILEEENRELNFLWQQRLAEEGAREVDNGFDQSVRDYNSHMPFAFRVQPMQPNLQERI

SEQ ID NO: 208169 - protein, 143 aa, Glycine max
  Clone ID: PAT_MRT3847_30000C.1.pep
RYYFSTAKEVMRVNGTTKSFVANHIAETTAGVVTIRAFEEEDRFFEKNLDLIDSNASPFFHSFSSNEWLIQRLEIVSAVLLSSAALCMVMLPPETFSSGFLGLSLSYGFTLNASLQFLIQSQCSLENYIISVERLNQYMHIPG

SEQ ID NO: 208170 - protein, 80 aa, Glycine max
  Clone ID: PAT_MRT3847_30001C.1.pep
HGQLYDNHVAINYDGQMSSMTINHHRSLGLYIKIQKLHSSPQAVYSKTELMLSNRDNTLVPKTGLFTPVIFCASNKLNRN

SEQ ID NO: 208171 - protein, 103 aa, Glycine max
  Clone ID: PAT_MRT3847_30002C.1.pep
ALFGKYELGRVLGCGAFAKVHYARNVQTGQSVADGGAVEEGVWGGVGRDEWEVWDWGGGLPAHGGARGGGGKEEGRRRRGRGSEGCVGGEVEAFVAWGCNHVV

SEQ ID NO: 208172 - protein, 463 aa, Glycine max
  Clone ID: PAT_MRT3847_30003C.1.pep
EWVYEGTIDSPYGDLHITQDKSLQKENVTQDYEAMYWQQRYSLKDGIPSFLANIAGTILTTGKYLNVMRECGHNVRVPPSENSKLMSFGSNHHYLECIKAAYNFASGELLNLIMEKYDLTGRLRSIKHYLLLDQGDFLVHFMDIARDELAKKPDEVSVEKLQSLLDLALRTTAAAADPFHEGLTCVVERSSLLRRLGTFNDLEVTLRNSGDNDLEEPVSITGLETFSLSYKVHWPLSIVLSSKALIKYQLLFRFLFHCKHVDRQLCGAWQVHQGVRALNTHGTAISRSSLLCRSMLKFINSLLHYLTFEVIEPNWHLMYNKLQSAKSIDEVIQHHDFFLDKCLRECLLLLPELLKKVERLKSMCLQYAAATQWLISSSIELHNPVEPIDDSKGLNKAKWKSGQVLKSTTRNVAVTDSVLKFEKEFNTELQSLGSILSSNSQAEPYLSHLAQWLLGVKNVKNGL

SEQ ID NO: 208173 - protein, 456 aa, Glycine max
  Clone ID: PAT_MRT3847_30004C.1.pep
MPEIGQAAVAAAADDTALFGKYELGRILGCGAFAKVHYARNVQTGQSVAVKIINKKKLAGTGLVGNVKREITIMSKLHHPHIVRLHEVLATKTKIFFIMDFVRGGELFGKISKGRFAEDLSRKYFHQLISAVGYCHSRGVFHRDLKPENLLLDENGDLRVSDFGLSAVRDQIRPDGLLHTLCGTPAYVAPEILGKKGYDGAKVDVWSCGVVLFVLAAGYLPFNDPNLMVMYRKIYKGEFRCPRWMSPELRRFISKLLDTNPETRITVDGMTRDPWFKKGYKELKFHEEDYHASGSGSFFGPKDERVVNLNAFDLISFSSGLDLSGMFGGEWGERLVTREPPERVLEAAEEAGAAAGMAVRWKKECGVELEGFNGRFGIGVEVYRLTAELAVVEVRKRGGDAAVRGVWEERLKPLLLGGATTSYSNSSEDEQQHQEEEQQHQEEKQEQEPESKVACE

SEQ ID NO: 208174 - protein, 44 aa, Glycine max
  Clone ID: PAT_MRT3847_30005C.1.pep
IPPCAICRERHILLSLCCKMHRRDETLAWDYYQIPIVTDVKSYI

SEQ ID NO: 208175 - protein, 65 aa, Glycine max
  unsure (1)..(65): unsure at all Xaa locations
  Clone ID: PAT_MRT3847_30006C.1.pep
TVARPTDAMRAAVARAKSDDDVLGCDPSAVGLXTDRWIRMGREAALLVPSDTMGNEESVHYGSRG

SEQ ID NO: 208176 - protein, 115 aa, Glycine max
  Clone ID: PAT_MRT3847_30007C.1.pep
WGLGPSLGPPGFPLYVSGLFVGGNCEGITIFPREQLWPCFRQGLIRPPIGKGGTPAGPGPEFISGGAGSLGGGGPLVFFFCFLVFWCCFFFVFPTPAFFFARFFFFKIFFFFSAR

SEQ ID NO: 208177 - protein, 71 aa, Glycine max
  Clone ID: PAT_MRT3847_30008C.1.pep
PLSSSLLLSSHTHKAYSYYYYSHPFVLFCSHGLNLTPRCCHCDAVSLLNGVGQQFRSQRRRGRFVYVKRRL

SEQ ID NO: 208178 - protein, 66 aa, Glycine max
  Clone ID: PAT_MRT3847_30009C.1.pep
HFLLGWLVPICLYNNEMILCETYERNGLVKFNNEEQLLEHQSYYYDDDDDENVSGVTIQMKPTILG

SEQ ID NO: 208179 - protein, 98 aa, Glycine max
  Clone ID: PAT_MRT3847_3000C.1.pep
GSECPGRPTRSISVSTVDFLKPLPLNKYLIMEIILNLNCFKLSYCSLIPNHLPSNVMSLAALSYSEPLPPTMSLHYHLLVIIHHGAQHIQHQQHCYNT

SEQ ID NO: 208180 - protein, 153 aa, Glycine max
  Clone ID: PAT_MRT3847_30010C.1.pep
MNDLFSGSFSRTNDQVSPDHHHVIEMAATASPTAEGSVNLEKFFQEVEQVKEELKELERLHENLRGSHEKSKILHSAKAVKELRLRMDSDVTLALKNAKLVKVRLEALDRSNQTSQSLPGSGPGSSSDRTRTSVVSGLRKKLKDSMDSFNSLR

SEQ ID NO: 208181 - protein, 88 aa, Glycine max
  Clone ID: PAT_MRT3847_30011C.1.pep
PLRPPTTTIIIPHKSGGFTNLIRHFTATQFSIQFNAKIKNSYNGLPVNAPNDNASETFPASLYRRLLLAHKSQPPRLQEPPTAPEILT

SEQ ID NO: 208182 - protein, 210 aa, Glycine max
  Clone ID: PAT_MRT3847_30012C.1.pep
DLVIIPSAPPRRPPPTQPFPATLPPPPTPATASCDGGNDRGTRKDRARERPALPDHRRLYRGMRLSAGADPRAPRAPPCALQFPPGPPQHCRPRRGSTPASRTSTREASGNWAAMVGFRGCFIGGRLCEGEGKGCGLVVPDEEEGNVRGEGEMEGHARGRWRGRRRVAGAGRGKEGCWCRKGGGRPPVPGGKGEKGGLVRGRRKGKSEKK

SEQ ID NO: 208183 - protein, 72 aa, Glycine max
  Clone ID: PAT_MRT3847_30013C.1.pep
KMAMTAQSASSWEQVAKVPSKNMFSNTTFFFLKFDAFLESHGLILSFSTSLSLCAPQDFAVNGNRWFKSHSS

SEQ ID NO: 208184 - protein, 131 aa, Glycine max
  Clone ID: PAT_MRT3847_30014C.1.pep
MCSREINCVAVCWKVVTLSFRCYCLCCEVILFGPDCISGNSRSPSPCLKVEDLARLQFQTTPIYIDVDDGRTKVTNERLLQGYLVVPCAKRFIVLYSFLKRHQSKKVMVVFSSCNSLKFIFFSSCYWLLLR

SEQ ID NO: 208185 - protein, 168 aa, Glycine max
  Clone ID: PAT_MRT3847_30015C.1.pep
MPFSSSRRGTSWASSILPSSNPPKSKAPRKGRKRALVKDFIFSNFFAIGLVLSLSLFLLILLRFGVPKPLYTHFRTTTRSSRARHTRKPLPAGTKPSTLAGAAVDVTTKALYDKIEFLDVDGGPWKQGWSVTYRGNEWDSESLRCSGCTLAYDPGWKLTVDEYYDRQS

SEQ ID NO: 208186 - protein, 84 aa, Glycine max
  Clone ID: PAT_MRT3847_30016C.1.pep
IAMEKHVSYAHVCDDEIYQGHQDRYIDSPNCKTDFTNNTFLLSDMMNIVPYIMRVAQLHGLCYQYVVKSIHQDDAFMYREYSLR

SEQ ID NO: 208187 - protein, 81 aa, Glycine max
  Clone ID: PAT_MRT3847_30017C.1.pep
QKVLKPGTFKKSPISLNFFYIKNRPQLGAFKKFSGLKLIKRVFFPEKYFFFLGGVFLKYPFVFRGFHFLKTNFPIWGRESL

SEQ ID NO: 208188 - protein, 57 aa, Glycine max
  unsure (1)..(57): unsure at all Xaa locations
  Clone ID: PAT_MRT3847_30018C.1.pep
AFVLENDQCCVVAENEXLRANEAKDSRTFGSVQMTDIVCRCISSLRSAVDHGRVQNT

SEQ ID NO: 208189 - protein, 85 aa, Glycine max
  Clone ID: PAT_MRT3847_30019C.1.pep
SVRKHRVLLTGMLILSDHNVSSLEGNTEMDMVISPHSAQLPLSGSQACMCKSSFDTLSCPAIIALCRVRSPVNSIYAISRSEGVV

SEQ ID NO: 208190 - protein, 58 aa, Glycine max
  Clone ID: PAT_MRT3847_3001C.1.pep
ISLVIALSVSGTNGAFIPAHGQDYQKNAPHVTQDCIMWCTTMEPSARYVFHEPPFFSF

SEQ ID NO: 208191 - protein, 60 aa, Glycine max
  Clone ID: PAT_MRT3847_30020C.1.pep
RHVSAQQSNGKWKGWEVKEGMLKVMSRILFLKGKEMNCIDEGVRLSKIHRLIPQTHRKEI

SEQ ID NO: 208192 - protein, 126 aa, Glycine max
  Clone ID: PAT_MRT3847_30021C.1.pep
KATAEFTSFSSLMGTQKSNMFDAPFKYMVPEDKEIPDRPLPSHWTPSMQAYNTSGSTPTPFLNQQAAGSHMPLYMWVNQVNNTLLQSDALHDPRMLSSKPTVAGDAVLAFSEIVHKDFFFSKPEFN

SEQ ID NO: 208193 - protein, 67 aa, Glycine max
  Clone ID: PAT_MRT3847_30022C.1.pep
RVCETETYTLSGSHELEPASHSLSFILMITMTCVTSCVASFSRGRNWHSSPLLYNSLDSQLVDRLIL

SEQ ID NO: 208194 - protein, 157 aa, Glycine max
  unsure (1)..(157): unsure at all Xaa locations
  Clone ID: PAT_MRT3847_30023C.1.pep
GFGLVPGAESHVSXGGATYCAMASLRLMGFIEDNILSSCASSSLIDAPLLLDWILQRQGTDGGFQGRPNKSSDTCYAFWIGAVLRILGGFKFVDNKALRGFLLSCQYKYGGFSKFPGEYPDLYHSYYGFTAFSLLEESGLKSLFSELGITENAALAL

SEQ ID NO: 208195 - protein, 72 aa, Glycine max
  unsure (1)..(72): unsure at all Xaa locations
  Clone ID: PAT_MRT3847_30024C.1.pep
PXXKIKKKKKRGRSKRSKLTYPFIPTYNFFIMSPKFKSIARGLQPPYLENPCLTQLNPPSTNSPFPNLPYNQ

SEQ ID NO: 208196 - protein, 51 aa, Glycine max
  Clone ID: PAT_MRT3847_30025C.1.pep
GENKFAREGVKALFDPRVTHESRSVWKSFWSQADGSLGQKRACHMSTRPNI

SEQ ID NO: 208197 - protein, 84 aa, Glycine max
  Clone ID: PAT_MRT3847_30026C.1.pep
SCENKSGKGRRSVRTRNRTICTGSHRIHTNIQILFLLSFLLPNGHTLLLLPLIVHLILLLILLLRMRPRLLTWGGVLHLLLAFA

SEQ ID NO: 208198 - protein, 88 aa, Glycine max
  Clone ID: PAT_MRT3847_30027C.1.pep
QYVLNHYSQLNGAHTCSCVKKKKKKKKKKKKKKKKKKKKKKKKKKKKKKKKKKKKKKKIKKKKKKKKKKKKNQKKKKKKKKKKRGAPF

SEQ ID NO: 208199 - protein, 312 aa, Glycine max
  Clone ID: PAT_MRT3847_30028C.1.pep
MGVGGNFWDLLKPYARKEGFDFLRNKRVAVDLSFWIVQHENAIKATHVRNPHLRLTFFRTINLFSKFGALPVFIVDGTPSPLKSRARIVRYFRSSGIELASLPVPEEGVSAERNHMFSSHVQKCVELVELLGMPVLKAKGEAESLCAQLNSEGHVDACITADSDAFLFGANCIIKCFCPNFKEPFECYNMSDIEAGLGLKRKHLIAISLLVGNDHDIKGVRGIGLDTALRFVKAFSEDDILNRLHEIGKGNTSQIPICIKVEDDMDMDGNSPNRKLSHCSLCGHPGSKKDHMKFPCEYCVTKDDEGCQRKPE

SEQ ID NO: 208200 - protein, 41 aa, Glycine max
  Clone ID: PAT_MRT3847_30029C.1.pep
NDWEWSQRPEPLIPGVSPYMPLIVNGCQCATIDKITWYCRH

SEQ ID NO: 208201 - protein, 73 aa, Glycine max
  Clone ID: PAT_MRT3847_3002C.1.pep
IRESERRKKKKKIPESRVRNIRLIRGDMPELNRQFYYYSLLLSSCLIKSQRYSLSLSLSLSFILHYPVSSSNS

SEQ ID NO: 208202 - protein, 78 aa, Glycine max
  Clone ID: PAT_MRT3847_30030C.1.pep
RVRPRVRPRVRTGVRRLQKGESGNKKKKNIVSALTAGLSGFLCSRLDTVDTLILHAYGNERRCNPQVACLNHVTYVVV

SEQ ID NO: 208203 - protein, 113 aa, Glycine max
  unsure (1)..(113): unsure at all Xaa locations
  Clone ID: PAT_MRT3847_30031C.1.pep
IISTVPKWTLAERSRTAPEEETALRPKKKPGLRSCIGGLNYPTGXIGHYLKKXKNAQRAQTSAPVYLAAFLEYLNTEELELTGNSXRDNKKNRIIARHVLLAVKNDEELGKLL

SEQ ID NO: 208204 - protein, 55 aa, Glycine max
  Clone ID: PAT_MRT3847_30032C.1.pep
MEMERMVEFPHTYMDRPPRKRARLGWDIAEAPKVNILHPKISDLIFFEVFLCLLF

SEQ ID NO: 208205 - protein, 241 aa, Glycine max
  unsure (1)..(241): unsure at all Xaa locations
  Clone ID: PAT_MRT3847_30034C.1.pep
MVKSINFLLLLSLLAFAPLCHCKKKIGGYLYPQFYDGSCPRAQEIVQSIVAKAVAKEPRMAASLLRLHFHDSLVKGCDASVLLDSIGTIISEKRSNPNRDSARGFEVIGEIXLHLEKECPHTVSCAAILALAARDSTVLTGGPSWGVPLGIRDSLGASISGSNYNIPAPNITFQTILTKFKLKGLDIVDLVALSGSHTIGNSRCTSFRQRLYNQTGNGKADFTLDQVYAAELRTRCPRSCG

SEQ ID NO: 208206 - protein, 35 aa, Glycine max
  Clone ID: PAT_MRT3847_30035C.1.pep
TRPEQFAKSMVKMGNITPLTGSRGEIRKNCRGITK

SEQ ID NO: 208207 - protein, 192 aa, Glycine max
  Clone ID: PAT_MRT3847_30036C.1.pep
LFLLKYGLISDLLLLVCLYNRYIHADLHGASSTVIKNHKPAQPVPPLTLNQAGCFTVCHSQAWDSKIVTSAWWVYPHQVSKTAPTGEYLTVGSFMIRGKKNFLPPHPLIMGFGLLFRLDESSLGSHLNERRVRGEEEAADDYEETGPLEDKSDSESEKDVTDIEPATDLERNGNLSADSHKPLPEDFPAGRL

SEQ ID NO: 208208 - protein, 71 aa, Glycine max
  Clone ID: PAT_MRT3847_30037C.1.pep
LFLLHACVCLVCFFYIVFSFFFFFFFDITCHFFPLFKRACQDVTARHYHVYKFPLKHPKYSNYLTNISTQR

SEQ ID NO: 208209 - protein, 238 aa, Glycine max
  Clone ID: PAT_MRT3847_30038C.1.pep
MVKSINFLLLLSLLAFVPLCHCKKKIGGYLYPQFYDGSCPRAQEIVQSIVAKAVAKEPRMAASLLRLHFHDCFVKGCDASVLLDSSGTIISEKRSNPNRDSARGFEVIDEIKSALEKECPHTVSCADILALAARDSTVLTGGPSWGVPLGRRDSLGASISGSNNNIPAPNNTFQTILTKFKLKGLDIVDLRALSGSHTKDEASISGSNNIPAPNNTFQTILTKFKLKGLDIDLVALSG

SEQ ID NO: 208210 - protein, 56 aa, Glycine max
  Clone ID: PAT_MRT3847_30039C.1.pep
IPRLIVKSLMLAVVNVGSDVTSYLLVVCSRANMSRALIELCRPMLSLTLARNSVWE

SEQ ID NO: 208211 - protein, 85 aa, Glycine max
  unsure (1)..(85): unsure at all Xaa locations
  Clone ID: PAT_MRT3847_3003C.1.pep
FWFVCVALVALWCALLRSFFVFVPRRLLLPFSGLPPASFPSSPXFCSFARPFSSCPPRVLRWLLVSSLVFARPRAVFLASPRVLA

SEQ ID NO: 208212 - protein, 36 aa, Glycine max
  Clone ID: PAT_MRT3847_30040C.1.pep
VFFLPKIYLNLIFFLIILRNISHIHLEPFFELDPRP

SEQ ID NO: 208213 - protein, 38 aa, Glycine max
  Clone ID: PAT_MRT3847_30041C.1.pep
KLYIRLNHIPTKQTNHISTTLHDLKYRTHIYHINLLYI

SEQ ID NO: 208214 - protein, 68 aa, Glycine max
  Clone ID: PAT_MRT3847_30042C.1.pep
DLTCIDWCVDGLILMVPSSLKLDFNVAGSTLSYTLNFIPFSFFIYVFFFLLPFKSFVTEFAEKDLDRF

SEQ ID NO: 208215 - protein, 72 aa, Glycine max
  Clone ID: PAT_MRT3847_30043C.1.pep
ILVLSARDGIVSLGGPHIPLNTGRWDGRRSIAHVVEQYLPDHNESMSAAHDKYGAMRIDTPGVVELLRAHRA

SEQ ID NO: 208216 - protein, 49 aa, Glycine max
  Clone ID: PAT_MRT3847_30044C.1.pep
RYIRFEGPITSRPSNSRRSYPTPTNSTSASLLFTLQPSPYPFCCLLAAV

SEQ ID NO: 208217 - protein, 113 aa, Glycine max
  unsure (1)..(113): unsure at all Xaa locations
  Clone ID: PAT_MRT3847_30045C.1.pep
CFSTLRSLVAQAEGSGRFSIGGLHGPLHPDTYLADDGPGSLRDACYIKXSTWICVRSXSATIQPFMYLNASSYKTIKGRGQRIKLSGKGLGLNECEHDVICNTSFDGSIGHGG

SEQ ID NO: 208218 - protein, 123 aa, Glycine max
  Clone ID: PAT_MRT3847_30046C.1.pep
MGRLFLINLEGDFYSCKHCRTHFALEDDVISRSFICRHGMAHLFDKVVNVTFGEKEERMMLSGLKTVVDIFCVACGSILGWRYEVVHEQNQKYKEGKFILEMFKVLGPADNLFLAVQEALAAG

SEQ ID NO: 208219 - protein, 120 aa, Glycine max
  Clone ID: PAT_MRT3847_30047C.1.pep
VVGVFFFFFLFFFFFSGPNRINLYLKKPPFGPLPTKKNLGKILRRVLPPIKKKKNPRVIYPFERTLKPKNFGLTGGTFCQSLLTKTNPTFIFQTKKKNPAFFPLEILLKKGHKNYSHLFS

SEQ ID NO: 208220 - protein, 127 aa, Glycine max
  Clone ID: PAT_MRT3847_30048C.1.pep
KGESQIWFFLLIRGFFFFCQLIFFPRLGEIPFWFLPKDSPSFWFFLLGFWLKVEGVFIRFRKTRIHCVFGGSPNPLILSESCWREFPFPVLFAKGPPFYFGGYGEPSFITQKVPFIMHKTPKLVISF

SEQ ID NO: 208221 - protein, 128 aa, Glycine max
  Clone ID: PAT_MRT3847_30049C.1.pep
MGRLFLINLEGDFYSCKHCRTHFALEDDVISRSFICRHGMAHLFDKVVNVTFGEKEERMMLSGLKTVVDIFCVACGSILGWRYEVVHEQNQKYKEGKFILEMFKVLGPADNLFLAVQEALAAGSDADD

SEQ ID NO: 208222 - protein, 70 aa, Glycine max
  Clone ID: PAT_MRT3847_3004C.1.pep
IPIHSPANGVNDSQAVVLEIVITFCLFYTVYTTAEDPPKASLSIIAPIAIAFRASANIIITSPYIDSSIN

SEQ ID NO: 208223 - protein, 40 aa, Glycine max
  Clone ID: PAT_MRT3847_30050C.1.pep
KNLGKGFPPTKQLLFKPLLNKKTRGLGSFIQGFCFQISLG

SEQ ID NO: 208224 - protein, 68 aa, Glycine max
  unsure (1)..(68): unsure at all Xaa locations
  Clone ID: PAT_MRT3847_30051C.1.pep
NSWSTXPASIHILERIRAPRKTAVHGGETRLRIQSLSRMLTLITLSATPKKSILRLKNWSSGRNNFLT

SEQ ID NO: 208225 - protein, 83 aa, Glycine max
  Clone ID: PAT_MRT3847_30052C.1.pep
VERERGRMRGGEARSTTGICLMGSVFRHFLTLFCTIYSGVENASMHSLLTRTIIFSRDLVLFALHCPTHLPLCARFKLLFYLS

SEQ ID NO: 208226 - protein, 222 aa, Glycine max
  Clone ID: PAT_MRT3847_30053C.1.pep
MMSYHTEITVTASTTSINSNNPYVCISPAPPSPAEAKRPNPMDRIYGAINHYGKKVEEATKQAETMVGNIRNHLRVSSRPADAAIARLIQGTKVLTSGGPDKLFQQTFGVFPGEKLLQPCACYISTNSGPLIGTLYISTKRLAFCSDYPLCHHPFSLQQHECVYYKVIVLLDQLSNVSSVTNGLNPSEKRMQVITTDGYEFNFMGFFSYDKALKAVNEALKH

SEQ ID NO: 208227 - protein, 82 aa, Glycine max
  unsure (1)..(82): unsure at all Xaa locations
  Clone ID: PAT_MRT3847_30054C.1.pep
LIDSTWEDAKRVNDVSPHECVNVXSXEFKRYGTTELHEWSDIVKISGFSDLASXDAEWYDSMAASMARNIKLTCGRGVRDDQ

SEQ ID NO: 208228 - protein, 54 aa, Glycine max
  Clone ID: PAT_MRT3847_30055C.1.pep
EFSWAWEIVSFGICLAFEKICKGLDVKVYHWRFYVNPPHLRAPPLVKWAAFKKG

SEQ ID NO: 208229 - protein, 108 aa, Glycine max
  unsure (1)..(108): unsure at all Xaa locations
  Clone ID: PAT_MRT3847_30056C.1.pep
PNCDVYTGSFLVNAPSGSKKYLWRDXCVYESEWNIGKACGKXKYSWPCVATYEGEFKSCRMDGFGSCTGSDSDTYHVFXSSNKKLGYSQNRYTNGDLNDGSREHILQD

SEQ ID NO: 208230 - protein, 176 aa, Glycine max
  unsure (1)..(176): unsure at all Xaa locations
  Clone ID: PAT_MRT3847_30057C.1.pep
VREAGGWISNGRICGDIAVSRAFGDVRFXXKKNEMLQKGVQEGRWSAKFISRVQLNNDLVVAYPDIYQVALGSDAEFVVLASDGLWDYMGSSEAVSIVRDQLRKHGNIQQACEALAEAALDRRTQDNVSIIIADLGRTDWKNAPLERQNTILELVQALATIGIVSIGIWFSSQLSL

SEQ ID NO: 208231 - protein, 116 aa, Glycine max
  Clone ID: PAT_MRT3847_30058C.1.pep
RPPLIFFFALLILSLNLQILSYTRFPIYLLHLHRSLLQIFPAKTKISSTIYFLGTYHSIHGSCTETPPERRSCSSSWLRPTYLPQSLKSAPPTFTLPSPPWTPGPSHESDVLKPFS

SEQ ID NO: 208232 - protein, 46 aa, Glycine max
  Clone ID: PAT_MRT3847_30059C.1.pep
DEKLMRERTHLLLACCSRMAICKKDVWRVDCGILFGFPFTVFANHI

SEQ ID NO: 208233 - protein, 67 aa, Glycine max
  Clone ID: PAT_MRT3847_3005C.1.pep
ISRTHQGRTLGFTSPLEDQLGNCRTWVLGIVLLHTWHLSWVTCTRDVIPVRITKHGAWVFKKDYGTQ

SEQ ID NO: 208234 - protein, 67 aa, Glycine max
  unsure (1)..(67): unsure at all Xaa locations
  Clone ID: PAT_MRT3847_30060C.1.pep
RHFNFMTFISYFMHILLDIKGTFSSTTIWHLIKAFVSRSMTKPIFRNGFCYLAERKLXEGRLSYPKA

SEQ ID NO: 208235 - protein, 36 aa, Glycine max
  Clone ID: PAT_MRT3847_30061C.1.pep
QLNTPIFPLPVTYPPKTIFFTFLYSQPGNRIWKRKC

SEQ ID NO: 208236 - protein, 112 aa, Glycine max
  unsure (1)..(112): unsure at all Xaa locations
  Clone ID: PAT_MRT3847_30062C.1.pep
MKKGHFFPPYSRSAYWGSMCYIGVGYGGGSTMAAIELMHRSMEXAVVDITKSRIVVWISDHLDIYEPGLDGVAKQCRGKNLFFSTDEETHVFVADIXFVFVNTPTLNHCFGA

SEQ ID NO: 208237 - protein, 196 aa, Glycine max
  unsure (1)..(196): unsure at all Xaa locations
  Clone ID: PAT_MRT3847_30063C.1.pep
MGSLAWKQLLLNALESNAHLKHSSFMQLATLGTNGTPSNRTVVFRGFQDNTDNIQINTHARTPKIEELKLCSSAEICWYFTDSWEQFRINGDVDIIDGLNPDPLKLQXREKSWFASSLRSRLQYLLPNPGLPCLNEQALPEISLDPSIGPVDAFCLPILEPNQVDYLNPKSNQRLTFKSSVSDAAKKSWIVERVNP

SEQ ID NO: 208238 - protein, 71 aa, Glycine max
  unsure (1)..(71): unsure at all Xaa locations
  Clone ID: PAT_MRT3847_30064C.1.pep
MSXCGGNCGXGSSCKFGNXCGCFKMXPDLSYTXSTTXTXTLVQGEWXPVXXXNXXIXEMGVXPAXXDGXXW

SEQ ID NO: 208239 - protein, 110 aa, Glycine max
  unsure (1)..(110): unsure at all Xaa locations
  Clone ID: PAT_MRT3847_30065C.1.pep
RTHLFFARCSRMAGGEKDVRRVACXIPSGFPLTVICNSIFNEMLITYSYXKLLLQAKAPCLFLQSFINFVSLCVXYGDDXLISVHEYVKLYICCPLLKSFLTVHYIHHYF

SEQ ID NO: 208240 - protein, 88 aa, Glycine max
  unsure (1)..(88): unsure at all Xaa locations
  Clone ID: PAT_MRT3847_30066C.1.pep
PKFFEPGIPIFFAFSFIMGMLRTRRMWDPXESNGLFTAQNKRNQQQLQVISGDCATKKMQPKDAVSELQKTHEAIQALDKQVSMLQME

SEQ ID NO: 208241 - protein, 97 aa, Glycine max
  Clone ID: PAT_MRT3847_30067C.1.pep
KLESRKGLLIAVLSRFLLVPAFYFTAKYGDPRWRILLVSFLGLTNGYLTVCVFTVAPQGYKGPEQNALGNLLVLFLLIGIFSGVALDWLWLIGKSGF

SEQ ID NO: 208242 - protein, 105 aa, Glycine max
  Clone ID: PAT_MRT3847_30068C.1.pep
MVCSCCFLYVLRRWRIISFIAGESVIMSDNSKGFVPLKTLKHTLPLAGAYLLYMLVTMESVRGVNVPMYTTLRRTTVVFTMLVEYMLVGQRYSPSVIFRLVSVLA

SEQ ID NO: 208243 - protein, 61 aa, Glycine max
  unsure (1)..(61): unsure at all Xaa locations
  Clone ID: PAT_MRT3847_30069C.1.pep
KITHIFTHXLRQVNKRWWIIFKVGQSIXHTRWVDALDVPLIELKQTEHSERRTPIFQNHLQ

SEQ ID NO: 208244 - protein, 62 aa, Glycine max
  Clone ID: PAT_MRT3847_3006C.1.pep
RVLRLSVFTRMVNPVPRGGEISPAIKGSYLCLGDGSSKGRAPGSIVILTMHNGLPRSLMLGL

SEQ ID NO: 208245 - protein, 65 aa, Glycine max
  Clone ID: PAT_MRT3847_30070C.1.pep
TCINFLLFHSQVNSSSDGCTMPLCFSVKIMVCLKVFYLSVFGFAYCLMVVVATIYIMKNASFFFL

SEQ ID NO: 208246 - protein, 57 aa, Glycine max
  unsure (1)..(57): unsure at all Xaa locations
  Clone ID: PAT_MRT3847_30071C.1.pep
QHXWAXLIHXXSXRSAAXQVRLXPGYLDQXXCRGLPNKLNMIKRFPSXNNXXSXXHQ

SEQ ID NO: 208247 - protein, 97 aa, Glycine max
  Clone ID: PAT_MRT3847_30072C.1.pep
PKLFSAEILRNHAISLSPSFTSLVSWSRGAWGPSPIAERSLNKDCTSGLPLSMQHLEVDACPLCRWVPEALTDLFLSEEVHPCSMGCDPHTEVVRRT

SEQ ID NO: 208248 - protein, 139 aa, Glycine max
  Clone ID: PAT_MRT3847_30073C.1.pep
KRILKAGGFIYVGRVNESLNLARAIGDMEFKQNKFLSAEKQIVTANPDINTVELCDEDEFVVLACDGIWDCMSSQQLVDFVHEQLHSETKLSAVCERVLDRCLAPSTASGEGCDNMTMIVVQFKRPAQSSVPAEESSSN

SEQ ID NO: 208249 - protein, 84 aa, Glycine max
  Clone ID: PAT_MRT3847_30074C.1.pep
KKNTFCSPPKKNGGKLFNFEPFFGHMKPFFKFKGSKFELKGGPRGSPPPASQRISFYPFFSLTGITIFPWGAKGIYWAMRGLIS

SEQ ID NO: 208250 - protein, 99 aa, Glycine max
  unsure (1)..(99): unsure at all Xaa locations
  Clone ID: PAT_MRT3847_30075C.1.pep
PCSPRRIVHKRVKKFISTHSGRKMSVKASWRRPKGIDXRVMRKFKRCTLMPNIGYGSDKKYRHYLPNGFKKFVVHNVKNLXHLMMQNMTXCAEIAHNVS

SEQ ID NO: 208251 - protein, 107 aa, Glycine max
  Clone ID: PAT_MRT3847_30076C.1.pep
MGIYLSSPKTEKFSEDGENDCLRYGLSSMQGWRATMEDAHAAYTDLDESTSFFGVHDGHGGKVVAKFCAKFLHQQVLKSETYLTGDIGTSLQKAFLRMDEMMPGQKG

SEQ ID NO: 208252 - protein, 361 aa, Glycine max
  Clone ID: PAT_MRT3847_30077C.1.pep
MGIYLSTPKTEKFSEDGENDCLRYGLSSMQGWRATMEDAHAAYTDLDESTSFFGVYDGHGGKVVAKFCAKFLHQQVLKSETYLTGDIGTSLQKAFLRMDEMMRGQKGWRELSILGDKINKFTGMIEGLIWSPRSSDGNCHVDDWAFEEGPHSDFAGPTSGSTACVAVIRNNQLVVANAGDSRCVISRKGQAYNLSRDHKPDLEIEKERILKAGGFIHAGRVNGSLNLARAIGDMEFKQNKFLSAEKQIVTANPDINTVELCDEDEFVVLACDGIWDCMSSQQLVDFVREQLHLKTKLSAVCESVLDRCLAPSTAGGEGCDNMTMIVVQFKRPAQSSAPAEEQSSSSNGQAEPETKLERSES

SEQ ID NO: 208253 - protein, 433 aa, Glycine max
  unsure (1)..(433): unsure at all Xaa locations
  Clone ID: PAT_MRT3847_30078C.1.pep
PRRSSIRILLAMACXFDLELEQMDVKTXYLYGELEKVFYMRQPEGYEAKGKEDHVCKLNKSLYGLKQSPRQWNKRFDDFMSRIKFNKSKYDNCVYFKFITPNTFVFLLLYIDDILLTNNDKSELAKVKAELKRKFEMKDLGATSKILGFEMKKDGNKKYLFISQESYLKKVLDRFGMSGAKPVTLPISQQFNLSNDXAPSSERDKEFMAKIPYANAVGSLIYVMVCTRPDIAYSMSLVSRFMSNPGKVHXQALKWILRYIKGSLGKGLVYGGADKNSYSSVAIEGFVDSDYVGCLDTRKXLTRYIFTTFGTTISCKANLQKVVALSTIEAEYIELIKTVKEALWLRGMTQELKLXDQIIIVHCVNQSALHLSKNXVYHERTKHVDIKLHFVREVISEGDVTVQKVVTKDNPXMITKVLPSNKFYYYLVLIQLK

SEQ ID NO: 208254 - protein, 124 aa, Glycine max
  Clone ID: PAT_MRT3847_30079C.1.pep
WPAVALFELFSCPLLSGCFAVPPSLPGGAGVCSARTGFCCFFWQLGYRISPVNLAVGVAVDDRVVASKAPVLVHLECHVGFDGPSCVGVRVSFDVGCRKSSRVHGGRRSAEIEGGGVCETWSPK

SEQ ID NO: 208255 - protein, 98 aa, Glycine max
  unsure (1)..(98): unsure at all Xaa locations
  Clone ID: PAT_MRT3847_3007C.1.pep
MNHIPFIMIHAHLFKYITFGXPGLGKVGIYFNTXNKLYPPHHDLTFLEKVRDSMHHLRLHANHYVIWNTAVQKSFVSITRPYYRMAVSALSVYDITPT

SEQ ID NO: 208256 - protein, 63 aa, Glycine max
  Clone ID: PAT_MRT3847_30080C.1.pep
LIKCEPQPVLPYNTCIAPACGTNNHLRGRPIFYLHSRLFLGLRGRNILLAQKDGLCYFSPTLY

SEQ ID NO: 208257 - protein, 39 aa, Glycine max
  Clone ID: PAT_MRT3847_30081C.1.pep
GCVADGYIVNWLHSRSVHITNDTGLHFTQQSCFLIVSQE

SEQ ID NO: 208258 - protein, 98 aa, Glycine max
  unsure (1)..(98): unsure at all Xaa locations
  Clone ID: PAT_MRT3847_30082C.1.pep
TLTLLHSFTFTHSNIGSYSEKGIIEEQECQLFKNKETPTPPVLVYTASIYHLFHFFHAHSFXKPKKLISNTYLLVXCCNDXITHIYKSKTVMTDNEHF

SEQ ID NO: 208259 - protein, 107 aa, Glycine max
  Clone ID: PAT_MRT3847_30083C.1.pep
EACHIKNPPSYVQRQHMRFDDIRVSIRTSGWKRLWLKSIFLTHCNPTQVRAKLLPERALNHATKIADVNYNQFLLFQQANRGCSLFHVSKIFIFFQAMNISIVWINT

SEQ ID NO: 208260 - protein, 50 aa, Glycine max
  Clone ID: PAT_MRT3847_30084C.1.pep
YILIQENSLKFEDIDTLFPQYTSYFLFRCTLTKYHSVCAINHLKTAYAHP

SEQ ID NO: 208261 - protein, 58 aa, Glycine max
  Clone ID: PAT_MRT3847_30085C.1.pep
MLSICTKFCMINLSLHSLLIKKKKKKKKKKKKKKKKKKKKKKKKKKKKKKKKKKKKKK

SEQ ID NO: 208262 - protein, 67 aa, Glycine max
  Clone ID: PAT_MRT3847_30086C.1.pep
LIERWAIFKATPNPTRDLYALISQLLDLFFHSNHQNLVSPSLTELTSILAGTSITLTTVQELEGPPY

SEQ ID NO: 208263 - protein, 109 aa, Glycine max
  Clone ID: PAT_MRT3847_30087C.1.pep
MPPFVVFSKPNPFFFFSKPNPFLVFSKPNPFVVFSKPNPFFVFSKPNPFVVFSKPNPFVVFSKPNPFVVFSKPNPFFVFSKPNPFVVFSKPNPFVVFSKPNPFVVFLKP

SEQ ID NO: 208264 - protein, 103 aa, Glycine max
  Clone ID: PAT_MRT3847_30088C.1.pep
MEMQGGKNAAESINETVTYMGASANAGMEKTKATVQEKAERMTGRDPVQKELAAQNIEAKMNHAELDKQAARHHNTVGKQIGTTVGHMGHGHHTTGAGTGTGT

SEQ ID NO: 208265 - protein, 74 aa, Glycine max
  Clone ID: PAT_MRT3847_30089C.1.pep
QFEPRCGAFTWKLSIRTTRSLFSSHRDYIMTYWRRTKATTTISGATTTALSSKNDGTRTPLAIGICKPHGLEDF

SEQ ID NO: 208266 - protein, 154 aa, Glycine max
  unsure (1)..(154): unsure at all Xaa locations
  Clone ID: PAT_MRT3847_3008C.1.pep
SKSLDREKKKARIFPPLIGGGEGDPLLKNKGPQKNRKGGGPPLKIKQGKQQGGPPPKNLGEGKRNFSQGAPRGPRNPKGLKSKKKGGPPGGKGKGPPTGPMKKQGRGPGXPPPKTPNSPRALGRQKGPFXPGKGPPPFRPREGPPQGRPPGPYP

SEQ ID NO: 208267 - protein, 48 aa, Glycine max
  Clone ID: PAT_MRT3847_30090C.1.pep
AICLLHYILQSTIFRRGGGVLHINMNILIIRCALIGWVHKALVKLYQT

SEQ ID NO: 208268 - protein, 49 aa, Glycine max
  Clone ID: PAT_MRT3847_30091C.1.pep
PCCDTYTYYKHMLSLIKLITTSKLHSIKGKSKRLKLIEYLRMKIYRYYT

SEQ ID NO: 208269 - protein, 42 aa, Glycine max
  Clone ID: PAT_MRT3847_30092C.1.pep
RPSLARSATFKPNTVAFQKALEPRQQLVNAFFAVSCRIAFWI

SEQ ID NO: 208270 - protein, 65 aa, Glycine max
  Clone ID: PAT_MRT3847_30093C.1.pep
MGEVSESTTTKRKKKGRPSLLDLQKRSLKKEQQNHHQQRQSNNSNSANSHNNKNKTNKNAVPHDD

SEQ ID NO: 208271 - protein, 78 aa, Glycine max
  unsure (1)..(78): unsure at all Xaa locations
  Clone ID: PAT_MRT3847_30094C.1.pep
WEESGQVSNASYDYRGTDSPCDVQDDGIRYYSAEXDYEGGRYRSCNEARMSLELVQHGLMAVAYEIYDDVRDYNEGIY

SEQ ID NO: 208272 - protein, 61 aa, Glycine max
  Clone ID: PAT_MRT3847_30095C.1.pep
MDPNCSCATDGSCSCAGSCKCKQCKCTSCKKSCCSCCPVGCAKCSQGCICKEASDKCSCCA

SEQ ID NO: 208273 - protein, 146 aa, Glycine max
  unsure (1)..(146): unsure at all Xaa locations
  Clone ID: PAT_MRT3847_30096C.1.pep
ADPLQNVGSAKNSESPKNPGKELSIVGDLASDAYRSPLKRSSSASSLGILSNKEDSRISEFFNPELERHSEGFRGKSSSNMIVRKEGSLVPKLRCRXVVGAYFEKIGSTCFAVYSIAVTDAQNKTXYRNFERLHRHLKDIPNYTLQ

SEQ ID NO: 208274 - protein, 49 aa, Glycine max
  Clone ID: PAT_MRT3847_30097C.1.pep
GSKLHSELNKRSIDYLMTDLLIMSYSHADGAYMYPYERITIATDSCTPS

SEQ ID NO: 208275 - protein, 56 aa, Glycine max
  Clone ID: PAT_MRT3847_30098C.1.pep
SSAIRHGHQISCIRELQLLGNHQCKCSEEQDDFALVQRVLFIQSDGNFITVEQHLF

SEQ ID NO: 208276 - protein, 69 aa, Glycine max
  unsure (1)..(69): unsure at all Xaa locations
  Clone ID: PAT_MRT3847_30099C.1.pep
XVXXXXLXXGKXCRPWAXLXLGXXPGFQTGTXHXEEFXSRFQGXVXQXXXTAPXNXLLGYFSFFTIFNF

SEQ ID NO: 208277 - protein, 72 aa, Glycine max
  Clone ID: PAT_MRT3847_3009C.1.pep
KQSQNRYAHFFKDKNKKMIIEAGEESTGEGDHRKRTTQATSSKKKKSHKHKRAVMYLVSRSRIWSFLVFLGS

SEQ ID NO: 208278 - protein, 63 aa, Glycine max
  Clone ID: PAT_MRT3847_300C.1.pep
CGRYWLGMLVLLIRETPRWCIGIDGSLLTIRCRCSNIRVMSYGWQAGGKRMHRKLWPATLWCV

SEQ ID NO: 208279 - protein, 55 aa, Glycine max
  Clone ID: PAT_MRT3847_30100C.1.pep
FVVLQKVVLQLDLHGDRIKQKAMKTASGLSGTSLLLIQEAQLIHVMQHQGINDFY

SEQ ID NO: 208280 - protein, 47 aa, Glycine max
  Clone ID: PAT_MRT3847_30101C.1.pep
RIYINVNKAYFMSQLLLNVIVTRIKIIQSYRTDHIYIMTTILQDNKQ

SEQ ID NO: 208281 - protein, 103 aa, Glycine max
  Clone ID: PAT_MRT3847_30102C.1.pep
NAPFAPYSYSSSSSSSSPPCSPPATSCAMAPPPSTSNRASQSATFRRRRSTSRSSATRPSRSARRALAMRSRTSSTSATGSTSRISSKTGSGSADSNPASCPS

SEQ ID NO: 208282 - protein, 478 aa, Glycine max
  Clone ID: PAT_MRT3847_30103C.1.pep
MGRKGNWFSSVKKALSPDSKEKKDQKSSKSKKKWFGKQKLETSVSYSEAHKAPPPPPPIPPPEAIKLTDIENEISHDHDYVVEVATAMDAEEPVPAVQIEPVRVEAAPIAHYAGKPKDEVAAIKIQTAFRGYLARRALRALRGLVRLKLLMEGPVVKRQATSTLRSMQTLSRLQSQIRSRRIRMLEENQALQRQLLQKHARELESLRMGEEWDDSLQSKEQIEAKLLSKYEATMRRERALAYAFTHQQNWKNSSRSVNPMFMDPTNPSWGWSWLERWMAARPWESRSHMDKELNDHSSVRSSSRSITGGEISKSFARFQLNLAEKHSPTACQNPGSPSFQSTPSKPASSSAKKPKKVSPSPRGSWVTDEDSKSLVSVQSDRFRRHSIAGSLVRDDESLASSPAVPSYMVPTQSAKAKSRTQSPLAPENGKAEKGSFGSAKKRLSFPASPARPRRHSGPPKVESSSLNAELAVDKGVDS

SEQ ID NO: 208283 - protein, 142 aa, Glycine max
  Clone ID: PAT_MRT3847_30104C.1.pep
PRVRPRVRPRVRTAARRRQKGDEENFKHREAIRDLREKYMSKVSLVRDTHAKQWEGFLQLDAQRRQQQAVQQMPSGYRGFKQQSFPEYDGSTANPPPYAGSNLPLESRNRFSDNMETYPNRPHDNFGEFHRRGDFAKAYNRY

SEQ ID NO: 208284 - protein, 111 aa, Glycine max
  Clone ID: PAT_MRT3847_30105C.1.pep
RGNLAVARFIDKMHEAQIAKPCLRQPSSSKPSNDFSSLSAFDNVRVTTTATLTSHKSLSFLFVFISLFQETSSHSKIVVEFLRMNPSFLFILAKIKTVTTTWLLVGGGWQI

SEQ ID NO: 208285 - protein, 89 aa, Glycine max
  unsure (1)..(89): unsure at all Xaa locations
  Clone ID: PAT_MRT3847_30106C.1.pep
SRLSHLKSNLNQSSLYGGESKRYNNIPRGHHHLTTQKKQEIREAFELFNTDGSXTIDAKDLNVAMRALGFEMTEELINQMKADLDNDGS

SEQ ID NO: 208286 - protein, 133 aa, Glycine max
  unsure (1)..(133): unsure at all Xaa locations
  Clone ID: PAT_MRT3847_30107C.1.pep
KEVLFFLAQFGSMECHAYIVPFDERCLGPSRSEMRSWRLAVEAHNILVWTIPEEALSTRIHPGNIRXDSNSYQKLTFMPEPRIHPRTHCVQFDGTVLXYIPYFKKHGXGVGKFNSTLYDEWVNKGQCTRHLPR

SEQ ID NO: 208287 - protein, 116 aa, Glycine max
  unsure (1)..(116): unsure at all Xaa locations
  Clone ID: PAT_MRT3847_30108C.1.pep
XXXPXXXXXNXXHXXXXTXXXXLXLXXTRTXXGXPXPXXTXXXXXXTXXAXQXXPLLSSNAPXXXXXXVVXXAGXXEYXXNSAXTLXSSXEXXWETXAQQGIXSSRIPSLRTXXXX

SEQ ID NO: 208288 - protein, 282 aa, Glycine max
  Clone ID: PAT_MRT3847_30109C.1.pep
MDERKRIDPRSGFNRASRIFHSLKPPLPLPPPNATFSATTYALSLRRNSLFPDSTTALIDATTGHRLSHYEVINRIETLANNFTSILKLSKGDTALILSPNLIQVPILCFALLSLGVVVSPANPISTRSDLTRFFHLSKPAIVFTVTSVVEKTQDFHVRTVLLDSPEFDSLTKTRIQIHPPSPLVSPVTQSDVAAILYSSGTTGMMKGVVMTHRNLTALAAGYDAVRVNRKYPAVFFFTMPFFHVYGFTLSFRAMVLSETVVIMERFSLRGMLSAVERFGVT

SEQ ID NO: 208289 - protein, 49 aa, Glycine max
  Clone ID: PAT_MRT3847_3010C.1.pep
ALLFSTLASFFHQFFLCLSQCWSLVVCYESGLLHRFMPSSILGIILCRK

SEQ ID NO: 208290 - protein, 57 aa, Glycine max
  Clone ID: PAT_MRT3847_30110C.1.pep
RDERSYWIHGLAQRDRAEVADLLYEIEIYTSDTAESQFDREKKSHAMHARTQRQDMT

SEQ ID NO: 208291 - protein, 145 aa, Glycine max
  Clone ID: PAT_MRT3847_30111C.1.pep
MGAFTEKQEALVSSSFEAFKTNIPQYSVVFYTSILEKAPVAKDLFSFLANGVDPTNPKLTGHAEKLFGLVRDSAGQLKASGTVVIDAALGSIHAQKAITDPQFVVVKEALLKTIKEAVGDKWSDELSSAWEVAYDELAAAIKKAF

SEQ ID NO: 208292 - protein, 55 aa, Glycine max
  unsure (1)..(55): unsure at all Xaa locations
  Clone ID: PAT_MRT3847_30112C.1.pep
IFSGDSWLTDKTVFTXCRDWDISADYYTIGTEFRKFLPDYIRWHLDTLMIYIDLS

SEQ ID NO: 208293 - protein, 144 aa, Glycine max
  Clone ID: PAT_MRT3847_30113C.1.pep
MGAFTDKQEALVSSSFEAFKTNIPQYSVVFYTSILEKAPVAKDLFSFLANGVDPTNPKLTGHAEKLFGLVRDSAGQLKASGTVVIDAALGSIHAQKAITDPQFVVVKEALLKTIKEAAGDKWSDELSRAWEVAYDELRAAIKKA

SEQ ID NO: 208294 - protein, 144 aa, Glycine max
  Clone ID: PAT_MRT3847_30114C.1.pep
MGAFTEKQEALVSSSFEAFKANIPQYSVVFYTSILEKAPAAKDLFSFLSNGVDPSNPKLTGHAEKLFGLVRDSAGQLKANGTVVADAALGSIHAQKAITDPQFVVKEALLKTIKEAVGDKWSDELSSAWEVAYDELAAAIKKAF

SEQ ID NO: 208295 - protein, 114 aa, Glycine max
  unsure (1)..(114): unsure at all Xaa locations
  Clone ID: PAT_MRT3847_30115C.1.pep
QEGLCSKTCKKKKRVSKNPSSGSFVGAPLGVSQKKEFXNPKVRVPNREAALRGFRGGARKPRVGKRVXKPGFSRSPNSQGKGIVFRGALPKGPNLGGGGGNPWAFSLVPLFCSL

SEQ ID NO: 208296 - protein, 144 aa, Glycine max
  Clone ID: PAT_MRT3847_30116C.1.pep
MGAFTEKQEALVSSSFEAFKANIPQYSVVFYTSILEKAPAAKDLFSFLSNGVDPSNPKLTGHAEKLFGLVRDSAGQLKANGTVVADAALGSIHAQKAITDPQFVVVKEALLKTIKEAVGGNWSDELSSAWEVAYDELAAAIKKA

SEQ ID NO: 208297 - protein, 144 aa, Glycine max
  Clone ID: PAT_MRT3847_30117C.1.pep
MGAFTEKQEALVSSSFEAFKANIPQYSVVFYNSILEKAPAAKDLFSFLANGVDPTNPKLTGHAEKLFALVRDSAGQLKTNGTVVADAALVSIHAQKAVTDPQFVVVKEALLKTIKEAVGGNWSDELSSAWEVAYDELAAAIKKA

SEQ ID NO: 208298 - protein, 185 aa, Glycine max
  Clone ID: PAT_MRT3847_30118C.1.pep
MRVVLITLFLFIGAAVAEDAGIDAITPEEGKANNIIEAYESPRFQKFVTHCSSHVTQTCSGNDPLNNQEASRMNSPFGLSFCLLDSMEKCLADHKASLKDPQDNNNLASMSSLPGSIQNQPLLIETVKFRTVLKTCSHVSAQYCFTNPNVATSALADCLMPSLNQCVYPSSSILLPPPPPPPPLI

SEQ ID NO: 208299 - protein, 60 aa, Glycine max
  Clone ID: PAT_MRT3847_30119C.1.pep
NRRDIYRPEDYRATQVYKNNTVLIWPILALQTNKVLNRAPEKDFVPHHPPKRLRGLSTRS

SEQ ID NO: 208300 - protein, 96 aa, Glycine max
  unsure (1)..(96): unsure at all Xaa locations
  Clone ID: PAT_MRT3847_3011C.1.pep
SFNGLVPLAPLIFIPLRFLLTFEKGPGFQKPPLWETPPFQPPIGKPPVFTPPGRTPPILTPPGEXPPLAHPSREKPPFTTPLEKPPPGKTPPEKPP

SEQ ID NO: 208301 - protein, 70 aa, Glycine max
  Clone ID: PAT_MRT3847_30120C.1.pep
LKLWQLSAKLLATTSSDSSIVSKSRGDSATLARVLFEIPRHHAPLLLAFMRLMLSLLHVVKLVVDMKLAG

SEQ ID NO: 208302 - protein, 100 aa, Glycine max
  Clone ID: PAT_MRT3847_30121C.1.pep
DDHVRLCYPVHCHSLRNSLTHESLHVSAHSILITRVKNVNCRCQRHSPYGLEFISGWQFALVGCNVLPCIAGGGKRSSIRVHSFGLGPVMCIMILEVIES

SEQ ID NO: 208303 - protein, 169 aa, Glycine max
  Clone ID: PAT_MRT3847_30122C.1.pep
TSRKHPTRKLFSEHKRYTRPTLTPGTVCILLAGLHKGKRVVLLKVLKSGLLLVNGPFKVNACPMRRIHQNFVIATSTKIDISGVKVPEKINDDYFKRQRQKRAKKEEGEIFAKKEEKYAPSEERKKDQAEVDKQLIEAIRKNPEKKTMFAYLKSMFGLKSSQYPHRIKF

SEQ ID NO: 208304 - protein, 97 aa, Glycine max
  unsure (1)..(97): unsure at all Xaa locations
  Clone ID: PAT_MRT3847_30123C.1.pep
TSYVKFIKWGGTKIIPVMYNKSPKNLNNKLDLVNKVLXTEGEAWGNPYGDTLGGVGRKLYXKNNTRDHFPWCPWTESGNLGIEMRGDQTHVLKPLVG

SEQ ID NO: 208305 - protein, 55 aa, Glycine max
  Clone ID: PAT_MRT3847_30124C.1.pep
RLMPFVLRNRLVDATEYLYVCSVRKYYIYGLRSLSRRRSRVAVLSIRCPVSGISM

SEQ ID NO: 208306 - protein, 52 aa, Glycine max
  Clone ID: PAT_MRT3847_30125C.1.pep
FFFFFFSFFFSPKKIAEIFVFQDFDVLLLIAPKLLIFSFPVFESFIGHFRVG

SEQ ID NO: 208307 - protein, 61 aa, Glycine max
  Clone ID: PAT_MRT3847_30126C.1.pep
GCSPKKVSSTLKGFVAKVYERMQSSCKGWHFGVCRFSFRSPRMKGGSHGIFKCGGKLIKAF

SEQ ID NO: 208308 - protein, 74 aa, Glycine max
  Clone ID: PAT_MRT3847_30127C.1.pep
YHNLFFPTMSNFFTAIIFTLFAISILQTLLISTNEQLFHLYHNNTKYSISTINIYQFPSQYSKIYIPTQFHNPF

SEQ ID NO: 208309 - protein, 45 aa, Glycine max
  Clone ID: PAT_MRT3847_30128C.1.pep
TLKLLLTKRDYIWLLSVRTVRHSLRSVEMLMHALNRIYWVGLKDA

SEQ ID NO: 208310 - protein, 41 aa, Glycine max
  unsure (1)..(41): unsure at all Xaa locations
  Clone ID: PAT_MRT3847_30129C.1.pep
WVAEDLXYETREPXLSLKLDHIRRISXQNLTVKRNLLRFLS

SEQ ID NO: 208311 - protein, 178 aa, Glycine max
  Clone ID: PAT_MRT3847_3012C.1.pep
KSQEDLSKSIGKIIEIVERISLPAVDYDSSDPLDKGDGDIISYKNVGMPTGYMVRVFQWKTSELSNVLRKFLHVCYDLLSGKTDYENFAKELTTALDWIMNHCFSLQDVSSMKDAIKKQFDWDETRSEGETENEISHFAEEDKLHLLRGSLSTLPQVTTLDGHDFQNGEIYYKEKEGL

SEQ ID NO: 208312 - protein, 376 aa, Glycine max
  Clone ID: PAT_MRT3847_30130C.1.pep
MKNNQQERSLAAARLLSHAQSHMFSFFVSHVLVFASGLLIGITLTTFSFKNLSLNFLPSLSTPIPISTLNNQTQVTKAMHDMTEEELLWRASMVPTIKEMPYKHTPKVAFMFLTKGPVLLGPLWERFFKGNEGFYSIYVHSHPSFNDTVPQSSVFHRRRIPSKEVRWGDFNIVGAERRLLANALLDFSNQRFVLLSESCIPLFNFSTIYNYLMNSTENFVEAYDMPGAVGRGRYSPRMRPLVNLSQWRKGSQWFQIDRALAIEIVSDQQYFPVFKKYCRNGCYGDEHYLPTFVSIMFWKRNSNRTLTWVDWSRGGPHPARFMRQDVTIDFLKRLRHGRTCQYNGKSTNICHLFARKFNPQGLDRLLRFAPRIMQFN

SEQ ID NO: 208313 - protein, 82 aa, Glycine max
  Clone ID: PAT_MRT3847_30131C.1.pep
KKKDIFKDNVSKDVFLSVFFTSNYLKRKKRNKKSNTRVSRYMPPLKSQQHIRIILPCNGPAAINHNRLYLPAIALSSCDFYV

SEQ ID NO: 208314 - protein, 47 aa, Glycine max
  Clone ID: PAT_MRT3847_30132C.1.pep
KVEGAAKRRTGLLCLTILVRVNYKEATIAQKVKIRMHHSFFELVRDY

SEQ ID NO: 208315 - protein, 328 aa, Glycine max
  Clone ID: PAT_MRT3847_30134C.1.pep
MAPPPPQSHRSPSPSQPSGKSEVSDLKSQLRQLAGSRAPGADDSKRDLFKKVISNMTIGIDVSSLFGEMVMCSATSDIVLKKMCYLYVGNYAKGNPDLALLTINFLQRDCKDEDPMIRGLALRSLCSLRVANLVEYLVGPLGSGLKDNNSYVRMVAVIGVLKLYHISTSTCIDADFPATLKHLLLNDPDTQVVANCLSALQEIWTLESSTSEEAARERETLLSKPVVYYLLNRIKEFSEWAQCLVLELVSKYIPSDNSEIFDIMNLLEDRLQHANGAVVLATIKVFLQLTLSMADVHQQVYERIKAPLLTQVSSGSPEQSYAVLSHLH

SEQ ID NO: 208316 - protein, 49 aa, Glycine max
  Clone ID: PAT_MRT3847_30136C.1.pep
TYIQRYYQHIALSSLDMISFILIFLIPFLKPFIFVMYSFCYITLNFSIS

SEQ ID NO: 208317 - protein, 40 aa, Glycine max
  Clone ID: PAT_MRT3847_30137C.1.pep
YETLSYLPDLDDAHLAEEAVYLLRNVWITILKFELQHRLL

SEQ ID NO: 208318 - protein, 61 aa, Glycine max
  Clone ID: PAT_MRT3847_30138C.1.pep
MATDLDVQDQGREYSSKDYHDPPAAPLFDPQQLTQFFFYQALITEMIETLLFLSDTTLTII

SEQ ID NO: 208319 - protein, 43 aa, Glycine max
  Clone ID: PAT_MRT3847_30139C.1.pep
LEAKPNRLVCSVETMTGFSGVSALIGYRIIIIDYFVHNQLHCS

SEQ ID NO: 208320 - protein, 77 aa, Glycine max
  Clone ID: PAT_MRT3847_3013C.1.pep
PRVRTPRRGRPTGSDDDAHNHFRSSDVSMRKTFVHLLWRGFLMLDFLWLLPRGGDLSFPINIRVFHVLLNKYYGVWW

SEQ ID NO: 208321 - protein, 176 aa, Glycine max
  unsure (1)..(176): unsure at all Xaa locations
  Clone ID: PAT_MRT3847_30140C.1.pep
EAPTTTSSGGQWCVANQGASDTALQVALDYACGFGGADCSAIQPGASCYNPNTVRDHASYAFNDYYQKNPAPTSCXFGGTASLTSNDPSSGSCKYASPKSTSTNQPPPTPTFVSPPSPPTPVMTPTPPDMLNPGGGSTVFGSEPTGSPNTATFAFNSLLMLFTCGLLASLQLANYI

SEQ ID NO: 208322 - protein, 412 aa, Glycine max
  unsure (1)..(412): unsure at all Xaa locations
  Clone ID: PAT_MRT3847_30141C.1.pep
MNRVALPKSIAQRFRGIHHSPRNQWCNNNRCETQVQSAGPVASLLKSRSVIRFRGPDTLKFLQGLLTNDVRRLGEPVGDRTENLPTPNVPATSFPPIYAALLTPQGRFLYDLFLYKPPTCDTKLDDTGTGPDSQPHEPFHLFADVDSSVLXDELLQTLNKYRLRSKVEIDDVSSDFSCWQRYGAGLLEKTSQVEEPEAASVGWGAGVDRTAMSSSQGSDQGWQWFKDPRLVCLGFRGIFPSNITPPLIEVDKETDEQNFLLWRIEKGVAEGSTEIPKGEAVPLEYNLAGLNAISFDKGCYVGQELIARTHHRGVIRKRIVPLRFLDNDGKELVNKVIPGSEVMNTASGKQAGTVTTALGCRGLGLLRLEEEALKGSSALSVQGQEDVKVVASRPDWWPSEWLQDHGQHAAFA

SEQ ID NO: 208323 - protein, 136 aa, Glycine max
  unsure (1)..(136): unsure at all Xaa locations
  Clone ID: PAT_MRT3847_30142C.1.pep
NEIIQSDIFPRWVLIGWLLTCRSNQVEESVKLALFYDWLFYDERMDGIMNIKPAVLLMVHSVPKFINVTCALLEFLSHLVDRYDVGRKGVIVKGVSSAFRLLVRKGVVRSLDVLXLNPGIREGLKRLLSDGKVGSS

SEQ ID NO: 208324 - protein, 73 aa, Glycine max
  Clone ID: PAT_MRT3847_30143C.1.pep
RYNKAKGYVSHVYHIMACMAWIHGMHKETKPTTIKKHMNEKQKWMTILEREKNSFSHGIRTQNMNAHMMIIIS

SEQ ID NO: 208325 - protein, 563 aa, Glycine max
  Clone ID: PAT_MRT3847_30145C.1.pep
MGKPFTLSLSSLCLLLLSSACFAISSSKLNECQLNNLNALEPDHRVESEGGLIQTWNSQHPELKCAGVTVSKLTLNRNGLHLPSYSPYPRMIIIAQGKGALGVAIPGCPETFEEPQEQSNRRGSRSQKQQLQDSHQKIRHFNEGDVLVIPPGVPYWTYNTGDEPVVAISLLDTSNFNNQLDQTPRVFYLAGNPDIEYPETMQQQQQQKIHGGRKQGQHQQEEEEEGGSVLSGFSKHFLAQSFNTNEDIAEKLQSPDDERKQIVTVEGGLSVISPKWQEQQDEDEDEDEDDEDEQIPSHPPRRPSHGKREQDEDEDEDEDKPRPSRPSQGKREQDQDQDEDEDEDEDQPRKSREWRSKKTQPRRPRQEEPRERGCETRNGVEENICTLKLHENIARPSRADFYNPKAGRISTLNSLTLPALRQFQLSAQYVVLYKNGIYSPHWNLNANSVIYVTRGQGKVRVVNCQGNAVFDGELRRGQLLVVPQNFVVAEQAGEQGFEYIVFKTHHNAVTSYLKDVFRAIPSEVLAHSYNLRQSQVSELKYEGNWGPLVNPESQQGSPRVKVA

SEQ ID NO: 208326 - protein, 134 aa, Glycine max
  unsure (1)..(134): unsure at all Xaa locations
  Clone ID: PAT_MRT3847_30146C.1.pep
LLRQAKAPSLFLQSYTKSVSLWVYGDDNLISVHEYVKPNFSGSKLRSFLAGHNIXTITARLDKTSATLQFRKXAHCEFLNRNFKHMSXLKWKATEDKASLWSQLHFVSXKNLEMQEAYLVNLVIVLRELSLHSP

SEQ ID NO: 208327 - protein, 76 aa, Glycine max
  Clone ID: PAT_MRT3847_30147C.1.pep
QREVVDDEYFNQFGSFLQNNSSNNSKANQSLALGFLELSRINTRRQNTSDCIFSTGVPKIVAFCLYDELATIFFSI

SEQ ID NO: 208328 - protein, 212 aa, Glycine max
  unsure (1)..(212): unsure at all Xaa locations
  Clone ID: PAT_MRT3847_30148C.1.pep
YGLYKNNHGGILGDDMGLGKTIQAIAFLAAVFAKEGHSTLNENHVEKRDPALIICPTSVIHNWESEFSKWSNFSVSIYHGANRNLIYDKLEANEVEILITSFDTYRIHGSSLLDINWNIVIIDEAHRLKNEKSKLYKACLEIKTLRRYGLTGTAMQNKIMELFNLFDWVAPGSLGTREHFREFYDEPLKHGPRSTASDRFXQIANKRKHHLG

SEQ ID NO: 208329 - protein, 49 aa, Glycine max
  Clone ID: PAT_MRT3847_30149C.1.pep
KKFGGWSIIKPLVVSHSSCSIAICRASNRPPNCEINDLCPKGGKNVQKI

SEQ ID NO: 208330 - protein, 53 aa, Glycine max
  Clone ID: PAT_MRT3847_3014C.1.pep
RPRVQTARRDHHEPPPVYKVRGDYSALMHKHGTLQPIANKPTVIMATTDKLAD

SEQ ID NO: 208331 - protein, 70 aa, Glycine max
  Clone ID: PAT_MRT3847_30150C.1.pep
FPGIGVTSSPLHLIGGIRVGKDRGVLVGVLGRGIYPAHYINGTPKEALVEGNFSFDIKSRSRLEKSFLYK

SEQ ID NO: 208332 - protein, 83 aa, Glycine max
  unsure (1)..(83): unsure at all Xaa locations
  Clone ID: PAT_MRT3847_30151C.1.pep
HVTPAVGHHSNTLYIQSFTDADDXALNAYHIIHCSLDCXDRLVNNPKTYETMLNDKLHGLLHPIANYIAYGNMTHTTGEFNVV

SEQ ID NO: 208333 - protein, 167 aa, Glycine max
  Clone ID: PAT_MRT3847_30152C.1.pep
MASTFEGGSDSEKENTVESEEEECPVKQVELTVPKTDDPTMQLLTFRMWVLGVLSCVLLSFVNQFFWYRTQPLIVTSISAQIAVVPIGHFMARTLPTRVFFKDSRFEFSLNRGPFNIKEHVLITIFANSGAGTVYATHIVSAVKLMCKRRLNFLAALVVMLTTQILG

SEQ ID NO: 208334 - protein, 114 aa, Glycine max
  Clone ID: PAT_MRT3847_30153C.1.pep
MRMALSSSSSPPLLPFDLQRHRLVSLKPYTRSRSSQSQHTVTVTVTAAKAKASSATPLVYSTRQGFDTVNIAEDVTQLIGNTPMVYLNKVTEGCVANIAAKLESMEPCRSVKDR

SEQ ID NO: 208335 - protein, 96 aa, Glycine max
  unsure (1)..(96): unsure at all Xaa locations
  Clone ID: PAT_MRT3847_30154C.1.pep
IIRSRVAGKAHVDGAKKHRTRDRAVKAAPAREGNAELQFNIDRKRLITHANAXSKSEKSPPXHEDGQLGFPLGSSNDIDPDIGPSDVSLGSTSYTF

SEQ ID NO: 208336 - protein, 87 aa, Glycine max
  Clone ID: PAT_MRT3847_30155C.1.pep
IYGILRRSRTFSSLGAERTGEYSAWPGVGWFHCGGVLIRQSHSGVPMGTVCQWPLNRVLDPEIVHIVLILFGTRGMGVDKAFRFVLA

SEQ ID NO: 208337 - protein, 67 aa, Glycine max
  Clone ID: PAT_MRT3847_30156C.1.pep
LIHLIAYLFIYNSDLFTQNQTKSFFFLRGGGAQLYFNLLDGKDKTFAMLLPINNQGGDHFWLKKPQS

SEQ ID NO: 208338 - protein, 68 aa, Glycine max
  Clone ID: PAT_MRT3847_30157C.1.pep
LYPGFESTQRLLLQVLPTVIGVLAGGHFVISPSNRHGIGYPLTSDSNTTSPELNHTTAPPQHPNHTSV

SEQ ID NO: 208339 - protein, 37 aa, Glycine max
  Clone ID: PAT_MRT3847_30159C.1.pep
ITSKLNLLITMVDQCLVVLENLLGPRNDMRTIDFIYQ

SEQ ID NO: 208340 - protein, 73 aa, Glycine max
  unsure (1)..(73): unsure at all Xaa locations
  Clone ID: PAT_MRT3847_3015C.1.pep
YFNFSVSISKEEGYVKCPCYITNLLHSWICPLAKDSEVHIIKKKNSTSXYSLVLXPWLLQSTIKNDXLLSSSM

SEQ ID NO: 208341 - protein, 84 aa, Glycine max
  Clone ID: PAT_MRT3847_30160C.1.pep
MVAISVFKSFFLLFSQNPTVPTLTHPNHGTTTFSCFPLPLAMLESCGHRLLSSLLHLIYLQRCSESPYPSKNRRPRPRKSSRFS

SEQ ID NO: 208342 - protein, 62 aa, Glycine max
  Clone ID: PAT_MRT3847_30161C.1.pep
IVGFRHYNYNENKLRIRRTFTRQKRTCTLYNQLLKLILGGPIWEESSIMVIDERKTSSHFFD

SEQ ID NO: 208343 - protein, 271 aa, Glycine max
  unsure (1)..(271): unsure at all Xaa locations
  Clone ID: PAT_MRT3847_30162C.1.pep
LNTTFFDPAGGGDPILYQHLFXFFGHPEVYILILPGFGIISHIVTYYSGKKEPFGYIGMVXAMISIGFXLGFIVWAHHIFTVGIDVDTRAYFTSATIIIAIPTGVKVFSXLATLHGSNMKXSAAVLXALGFIFLFTVGGLTGIVLANSSLDIVLHDTYYVVAHFHYVLSIGAVFAIIGGFIHXFPLFSGYTLDQTYAKIHFTIIFIGVNLTFFPQHFLGLSGMPRRYSDYPDAYTTXNILSSVGSFISLTAVILIIFMIXEAFASKRKVLI

SEQ ID NO: 208344 - protein, 94 aa, Glycine max
  Clone ID: PAT_MRT3847_30163C.1.pep
MGRSPCCDKVGLKKGPWTPEEDQKLLAYIEEHGHGSWRALPAKAGLQRCGKSCRLRWTNYLRPDIKRGKFSLQEEQTIIQLHALLGNRFGIFLC

SEQ ID NO: 208345 - protein, 83 aa, Glycine max
  unsure (1)..(83): unsure at all Xaa locations
  Clone ID: PAT_MRT3847_30164C.1.pep
AGGGKVYQTLPNGPDLVGHCTHTLVTTCGNFGPGAKVXSNGNCTAKGGSPKARVVAYKTCLNKLDXRGCYYADILETFDHAIY

SEQ ID NO: 208346 - protein, 142 aa, Glycine max
  Clone ID: PAT_MRT3847_30165C.1.pep
FVFFFYFFGVFYLFFFFFFFFFFQLKWNGKLFCRGGKDFSWGERKFLSPPPGSLMHARPLKRGLFLPKKNKLKGLFDMTQNKPGIKNPWNHTFHYRGVFPLGQIKFMQNWPYLPRPFSTKFFLHLTFSKLSPFVFYLHLNVL

SEQ ID NO: 208347 - protein, 63 aa, Glycine max
  Clone ID: PAT_MRT3847_30166C.1.pep
PLSFDNYRLWIPGPRNYKTLGNTKTKTKTGLKSKHRLPKGNKDSIPHTSPGHLRTGIGDMPAS

SEQ ID NO: 208348 - protein, 97 aa, Glycine max
  Clone ID: PAT_MRT3847_30167C.1.pep
NVPLDDGIDDKSYHFLFKPIIGKIMEVFRPGAVVLQCGGDYLFGDRLGCFNLSIRGHAECVKYMRSFNVPLLILGGGGYTIRNVARCWCYEVECCFN

SEQ ID NO: 208349 - protein, 256 aa, Glycine max
  Clone ID: PAT_MRT3847_30168C.1.pep
SVLLDTVDITDPSMVSIGDEVVISEGVLVQSHEVKNGILSFHPIRIGKCSSIGPYAVIQKGSVIGEGVEVQALRKVGQDQHVFKPAKLNNDNKKCYVQNAELLITSKTQYDIIYHFMGIYLVGFLSSLAAVIAYFLYIWFSKQPPSPQHFTFVCICGAFHWIPFTIFTYATMFSEVSSNPIIFAISFTSAYLLHGFILIILTTAFTRLLKTCKKTQFTQLSMPNDNFLPPLDVKLLSGTESLLHISTPFWVQKLAS

SEQ ID NO: 208350 - protein, 149 aa, Glycine max
  Clone ID: PAT_MRT3847_30169C.1.pep
DLDARGFECKGHRVGAGSQGFRLEDSAEKSSGPGGRLAREKIRTGAEVEEGVQVLYPGLQIGVEILAVNVLDGALVQAGRSHDCGERAGWSRNKRGESRGQEMQRRSWGAGLVWAGGRYAESESKWPGGLLSEAEGLGSSCLVTGFCER

SEQ ID NO: 208351 - protein, 445 aa, Glycine max
  Clone ID: PAT_MRT3847_3016C.1.pep
MDSSANNKEKEKVQVQPTPEEDPEKKRKKEEKAREKQLKKEKFLQKQAQQQAQQSSNASTSKKSEKKVVKRGGEGENPEDYVDPETPSGEKKRMARQMAKQYSPTAVEKSWYEWWEESQYFVADANSSKPPFVIVLPPPNVTGALHIGHALTAAIEDTMIRWRRMSGYNALWVPGMDHAGIATQVVVEKKLFREKNLTRHDLGREKFVCEVWEWKHNYGGTILQQLRRLGASLDWSRECFTMDERRSKAVTEAFVRLYKQGLIYRDLRLVNWDCVLRTAISDIEVDYLEIKERSLLKVPGYDKPVEFGVLTKFAYPLEGNGSRIVVATTRIETMLGDTAIAVHPNDDRYSHFHGKYAIHPFNGRKLPIICDAILVDPKFGTGAVKITPAHDPNDFEVGKRHNLEFINVFTDDGKINSNGGSDFLGMLRFKAREAVAEALQKKDLY

SEQ ID NO: 208352 - protein, 348 aa, Glycine max
  unsure (1)..(348): unsure at all Xaa locations
  Clone ID: PAT_MRT3847_30170C.1.pep
MSSSSANDAEALRRNRILSSKLYFDVSPSKVPLIYSASYDIEFLGIEKLHPFDSSKWGRICGFLVSFGILDKKCVVEPLEASKDDLLVVHSESYLNTLKQSSKVAMIVEVPPVALIPNCLVQQKVLFPFXKQVGRTILAAKLAKERGWAINMGGGFHHCSAQKGGGFCAYADISLCIHFAFVRLNISRVMIIDLDAHQGNGHEMDFAYDSRVYILDMYNPGIYPLDYEARNYINQKVEVKSGTVTEEYLQKLDEALEVAGHRFNPELVIYNAGTDILEGDPLGRLEISPEGIALRDEKVFRFAREKNIPIVMLTSGGYMKSSAGVIADSIVNLSKKCLIETSGAPKST

SEQ ID NO: 208353 - protein, 159 aa, Glycine max
  unsure (1)..(159): unsure at all Xaa locations
  Clone ID: PAT_MRT3847_30171C.1.pep
DQDVSDNHILSNEEAVTRSGRERSSLNDQNXMMDNLLHRSSESNLFALTGNQHSCAFHDNVNISDGTFDALKVVDAGCMEPQLGIVSCSNIAVDAYTTASIMQGKPQGCVSVPLGGSILNFEKPSDDGVNKANKSCLPETAQNEVEMFQTDSMGLPKFR

SEQ ID NO: 208354 - protein, 114 aa, Glycine max
  Clone ID: PAT_MRT3847_30172C.1.pep
MCSFSSEQSSPYDDLPLVHPPWPSKRQPQHLRFSLHKRRRAQLQEARRRKRMIILKTEIKMRNLKLYMENQSIIEENEKLRKQAVLLHKENEALLFQLQKKLSEQNNSKTNQIA

SEQ ID NO: 208355 - protein, 149 aa, Glycine max
  unsure (1)..(149): unsure at all Xaa locations
  Clone ID: PAT_MRT3847_30173C.1.pep
GSSKYVVSFLKERGEEIYYEVQATCIVTMNTVLRAHLRAYMQALEKLQLVIATSNDGIVVQTGSSGLFIGAREPLKNXSVSLALGDEINLWTDSGEPASLTYLAEAMYNQYTCDDLVMSNARLDIRAASXNLIXCDDCYGEEIIYYEIC

SEQ ID NO: 208356 - protein, 349 aa, Glycine max
  Clone ID: PAT_MRT3847_30174C.1.pep
MAFSFSKALVLACSFCLFASLAFGRDFSIVGYSSEDLKSMDKLIELFESWMSKHGKIYQSIEEKLLRFEIFKDNLKHIDERNKVVSNYWLGLNEFADLSHQEFKNKYLGLKVDYSRRRESPEEFTYKDVELPKSVDWRKKGAVAPVKNQGSCGSCWAFSTVAAVEGINQIVTGNLTSLSEQELIDCDRTYNNGCNGGLMDYAFSFIVENGGLHKEEDYPYIMEEGTCEMTKEETEVVTISGYHDVPQNNEQSLLKALANQPLSVAIEASGRDFQFYSGGVFDGHCGSDLDHGVAAVGYGTAKGVDYIIVKNSWGSKWGEKGYIRMRRNIGKPEGICGIYKMASYPTKKK

SEQ ID NO: 208357 - protein, 28 aa, Glycine max
  Clone ID: PAT_MRT3847_30175C.1.pep
KFTFFHDLGHVNKTFGCVMNAPSWGTPW

SEQ ID NO: 208358 - protein, 94 aa, Glycine max
  unsure (1)..(94): unsure at all Xaa locations
  Clone ID: PAT_MRT3847_30176C.1.pep
PIMGSFIRTEQIFREGVLGALLVVXGLPSVFWAKHKERVYKWVAHESPLPGKGAPLDENPESLLDSTDMICVSNKVSSRILNEAIPEPPPKSNV

SEQ ID NO: 208359 - protein, 64 aa, Glycine max
  Clone ID: PAT_MRT3847_30177C.1.pep
IIINYHYLQGRAWKGKKINRLTPLTHHTYILVEGLLLNTSLKTLNLNFPYYHRVYKIPSDKLIS

SEQ ID NO: 208360 - protein, 170 aa, Glycine max
  unsure (1)..(170): unsure at all Xaa locations
  Clone ID: PAT_MRT3847_30178C.1.pep
MSFSRRLRFSVSLSIPNFSSFLQNSSHSHFHSQPPSIQNVDDAVSQFNRMLCMRHTPPIIQFNKILDSFAKMKHYSTAVSLSHRLELKGIQPNLITLNILINWFCHMGQITFGFSVLTKILKRGYHPDTITFTTLIKGLCLRXQVKKALHFHDRLLAQGFQLNQVRYGTL

SEQ ID NO: 208361 - protein, 60 aa, Glycine max
  Clone ID: PAT_MRT3847_30179C.1.pep
LRITIDCYLYSMDYDFKSESVPFPTMYLPSPPPSPMYPPSPYQQNPTSSSILDVIVYIKP

SEQ ID NO: 208362 - protein, 149 aa, Glycine max
  Clone ID: PAT_MRT3847_3017C.1.pep
DGKGFLSDSQSSVSPGKLSSTAEFSWQVGSDTSHCKVFMESEDVGRTLDLSCLSSYQELYMRLANMFGIERSDMLSHVLYCDSSGALKQIGEEPFSEFMKTAKRLTILTDSNNKDSRSLFCRVWITGTRNAEHGLDAASNKTGPLSIFA

SEQ ID NO: 208363 - protein, 67 aa, Glycine max
  Clone ID: PAT_MRT3847_30180C.1.pep
HFNPSSFLSYLCLTFDICFIRHPYNDDTLFYTLFFISWLLYLYYMLMLIIDYIFTVMFVILSTRVFI

SEQ ID NO: 208364 - protein, 166 aa, Glycine max
  unsure (1)..(166): unsure at all Xaa locations
  Clone ID: PAT_MRT3847_30181C.1.pep
GMLASRDCPRSCPVLTLRLQPFRALTTCISPFAMSFQCSCISAACRSRIYIHKSTLSAVPCFTPLMSGTTPLCNLPCTSGPCCANYIPGDPEYFVYRAMGGRGRRRKLRIREERGKRRQRYIKKYKTRERVLPVRKHNIDIYGASEXDGAGLRRXPQGXAEGIEEN

SEQ ID NO: 208365 - protein, 58 aa, Glycine max
  Clone ID: PAT_MRT3847_30182C.1.pep
LFSFFFFFFSGVFFFFFFFKKKKRTVFLNLLKMIVPNLRRKVKGEGWAHPFLFIPPLN

SEQ ID NO: 208366 - protein, 92 aa, Glycine max
  unsure (1)..(92): unsure at all Xaa locations
  Clone ID: PAT_MRT3847_30183C.1.pep
MLCMTITSFYTRSTRERDDSTRLLSHEMYLHREICCVLXCHGPTHMERHESLCXRRYRMIIAGYRTXHLGFNSYKQTRMSLTIFSTKAICFQ

SEQ ID NO: 208367 - protein, 228 aa, Glycine max
  Clone ID: PAT_MRT3847_30184C.1.pep
MGGLTAEDLSTIGGIATVSLLHSFIPTHWLPFSIVGRAQKWTLSTTLIVTALGAILHVISTSLLGITAITMANTIAGEETVHKVASLLLVFLGGSYIILFLMGKGGHSHSHNQPMEKMAVAGLILVPALSPCATTLPVFLAVGNSSSMMVLAIIVLLFSTITVMTSLVALSFYGASQLKFHWVERYDKLLVGSVLCLVGVLTLLFHDHDHEVVSIGHHSHSHRKIISL

SEQ ID NO: 208368 - protein, 68 aa, Glycine max
  Clone ID: PAT_MRT3847_30185C.1.pep
GSSSNSICTGLLLYMDTKLLGPSPTINNAYSLINTGPAAYNVSICSTAETDIATGRRKLLRNLRESQH

SEQ ID NO: 208369 - protein, 54 aa, Glycine max
  Clone ID: PAT_MRT3847_30186C.1.pep
FPVTFSPIGYDLQCKPGRTVVFAYFSHYIILLWQGSSSASWSMHAFQGTSIGPL

SEQ ID NO: 208370 - protein, 124 aa, Glycine max
  Clone ID: PAT_MRT3847_30187C.1.pep
KPFVKKGALPPPPPLGKRGENLPPVKPNPSLPPMKPSPPCWGGFFPKVPPIFFPLKGVCPPLPRQSRGGRYFFPVGYPGFSCFFFGFCNKGGFLRPLGLCPLFWPINPGGGPGEAFFWKFFFFP

SEQ ID NO: 208371 - protein, 117 aa, Glycine max
  unsure (1)..(117): unsure at all Xaa locations
  Clone ID: PAT_MRT3847_30188C.1.pep
PTLSFSLPAEALDTVERADSTIXSGSTSKLTYRRCRQLNSFDSPPSFRSSMRINHVIYIHQVSINFTLAQHCYILLHCIYFNHNVKHRVLGYNLLLLLPHANQFGVIVLNSLRPSHI

SEQ ID NO: 208372 - protein, 147 aa, Glycine max
  unsure (1)..(147): unsure at all Xaa locations
  Clone ID: PAT_MRT3847_30189C.1.pep
GSSIRSTLDYADLLXTASDTSVLGPRAAMRTYRLGDTEMNLQGIKVLDDYXDKSFQAVVTEVLGGANRHTSTXVQLLSRRTPILMSIEHLMSIVVSYSFKDAEALSERSYDLVSGCTENHVSLGNLNNYVIDGYIVDMEVQACHTAD

SEQ ID NO: 208373 - protein, 101 aa, Glycine max
  Clone ID: PAT_MRT3847_3018C.1.pep
EFSWQVGSDTSHCKVFIESEDVGRTLDLSCLGSYEELYMRLANMFGIERSEMLSHVLYRDAAGALKQTGEEPFSEFMKTAKRLTILTDSNNKDSRRWEKEN

SEQ ID NO: 208374 - protein, 134 aa, Glycine max
  unsure (1)..(134): unsure at all Xaa locations
  Clone ID: PAT_MRT3847_30190C.1.pep
DWYREDNHSAIAPXHVLVRSVYAVLDMRGCSYCLQNMVTTTTDLLLHPYLYTCFRVLPDSENHPLLIFTRSLLLALSSLAQNLHHNYDYYDVSPTPEESFISIKSEENGWYPGNRAQSERKCRRGTIKTRRTRE

SEQ ID NO: 208375 - protein, 69 aa, Glycine max
  Clone ID: PAT_MRT3847_30191C.1.pep
KISSLPLVTQRLLGPIFLLFKGNSLPLVYKSKIVVGYPNICNPHGGELGAFTYFRFPSKATRSFYWAGG

SEQ ID NO: 208376 - protein, 67 aa, Glycine max
  Clone ID: PAT_MRT3847_30192C.1.pep
SCEAIGQCNGLKFRQKRVIACRGKVRKMERVYQTPNEFVAYNILLSVFIFHRMCSFSFFGLVCSFLF

SEQ ID NO: 208377 - protein, 102 aa, Glycine max
  Clone ID: PAT_MRT3847_30193C.1.pep
YSFQQDNFEVGQLYTVVTTTTIKTKNIPMCLFTVNPMSPPDVVPKESLCFVSFVSFSRLESAYRLASGFFHSAQYCRDHPRCGIGFSLQMFRQYLLNNLFFH

SEQ ID NO: 208378 - protein, 64 aa, Glycine max
  Clone ID: PAT_MRT3847_30194C.1.pep
MSTTRGGKAKPLKKPKCDERDHHEGDMAHIQKKREEENALKELRARAPQRGRFRGSALKKSGEI

SEQ ID NO: 208379 - protein, 47 aa, Glycine max
  Clone ID: PAT_MRT3847_30195C.1.pep
PTRPQTRTLICDLATFYRVLGTIIARFGFIIHQVYLSTNLTSIFTLH

SEQ ID NO: 208380 - protein, 96 aa, Glycine max
  unsure (1)..(96): unsure at all Xaa locations
  Clone ID: PAT_MRT3847_30196C.1.pep
MKKSESGGYVRADQIDLKSLDERLQRHLSSTWTLVKNMWRAWMSKVRGISSXRRHDWQIDPSKLVFWTVTARGSFGPVPRGIYDGPDVAXPLLAWG

SEQ ID NO: 208381 - protein, 122 aa, Glycine max
  Clone ID: PAT_MRT3847_30197C.1.pep
ETESGSTWVADLKEASSAAVVMFEKPLMNLSFKDLIVATSHFGKESLLAEGRCGPVYRAVLPGDLHVAIKVLEEARDVDPDDSVATFVDLSRLKHPNLLPLSGYCIAGKEKLVLYEYMANGD

SEQ ID NO: 208382 - protein, 125 aa, Glycine max
  Clone ID: PAT_MRT3847_30198C.1.pep
HICGVVNADLHEAKQYHRRHRVCEYHVKAQVVLVDEVRQRFCQQCSRFHELAEFDDTKRSCRSSLAGHNERRRKNSDQSQAEGSSRNKGTGHPQLKDITCGQADERGRIQITIHENAAYKHFQIR

SEQ ID NO: 208383 - protein, 78 aa, Glycine max
  Clone ID: PAT_MRT3847_30199C.1.pep
SSPRVPQYFFLEPQPTLPKNIFFYPRPNFTQDDSFAPRSKTKGDFCPKARAPQYRVLIKTQVLFYPPEKNRAPNQGSP

SEQ ID NO: 208384 - protein, 244 aa, Glycine max
  Clone ID: PAT_MRT3847_3019C.1.pep
GAEANGGEKQLKFLIYGRSGWIGGLLGKLCEERGIQRRRHSHPRRRRPGAEANGGEKQLKFLIYGRSGWIGGLLGKLCEERGIQYEYGTGRLENRSSLEADIAAVKPSHVFNAAGVTGRPNVDWCESHKVETIRTNVDIPNSMTILDELLPISLEMAKRNLTGIWNFTNPGVVSHNEILQMYKEYVDPNFTWKNFTLEEQAKVIVAPRSNNELDASKLKNEFPQLLSIKDSLVKYVFQPNQKKA

SEQ ID NO: 208385 - protein, 83 aa, Glycine max
  unsure (1)..(83): unsure at all Xaa locations
  Clone ID: PAT_MRT3847_301C.1.pep
MADEVVLLDFCASPFGMRVRIALAAKGIKYEYHAEDLXRNRVPLLLQMDPVHRKIPVLIHNGKPICESLIAAQTIEAVWHDRN

SEQ ID NO: 208386 - protein, 432 aa, Glycine max
  Clone ID: PAT_MRT3847_30200C.1.pep
MSLSHEKNPRPQSHVVCVPFPAQGHINPLIQLAKALHWRDGLPSWDSDGNPDGVALWAPPVSAIISDGLMTFAIQATQDLSIPEAQFWIASACGFMGYMQFNELANRGIIPFEVITRDYLVSDDESITDSELEMPIDWIPGMKNIRLKDMPSFIRTTDLKETLFDFMGSLAKNCLTSSAIIVNTIQEFELEVLDAIKAKFPNIYNIGPAPLLTRHVPEDKVLSIGSSLWVEDSKCLESLDKWQPNSVVYVNYGSWTVITEHHLKEIALGFANSMHPFLWIIRPDVMMGESAILPKEFFYEIKERGYITNWCPQERVLAHSSIGLFLTHCGWNSLTEAICEGKPMICWPFFAEQQMNCRYACTTWGIGMELNHSVKRGEIVELVKEMIEGDKAKEMKQNVLEWRKKALEATDIGGSSYNDFNRFVKEALHFEE

SEQ ID NO: 208387 - protein, 224 aa, Glycine max
  unsure (1)..(224): unsure at all Xaa locations
  Clone ID: PAT_MRT3847_30201C.1.pep
MKTESRSKEETKTYQEWFNLADSDGDGRISGNDATKFFALSNLSRSQLKQLWALADVKRQGFLGFTEFVTAMQLVSLAQAGQELKSDILKTQIDKENIKPPVLEGLDALVAQMSLTISALSEVNGTPQPQVFPTNRWXFGSKSSKKLSLNSVTSIIDGLKRLYIERLKPLXEVAYQYNDXVSPLLTNTDFDAKPMVMLXLGQYSTGKTTFIKHLFKXDYPGANV

SEQ ID NO: 208388 - protein, 224 aa, Glycine max
  unsure (1)..(224): unsure at all Xaa locations
  Clone ID: PAT_MRT3847_30202C.1.pep
MTHASDSFHRCLMRLGKKKIATKMKTESRSKEETKTYQEWFNLVDSDGDGRISGNDTTKFFALSNLSRSQLKRLWALADVKRQGFLGFTEFVTAXLVSLAQVGQELNSDILKTQIDKENIKPPVLEGLDALVAQMSLTINAPPEGLLSLKCSKLTGGLVQNLKESESGCLFSNLESVLVFMKFKFPSYMIPCCAFHFVHLVFALLVLYVHYFGDELIISLYLNI

SEQ ID NO: 208389 - protein, 73 aa, Glycine max
  Clone ID: PAT_MRT3847_30203C.1.pep
GGIELRVLIKSHAVAVNPIARCVLSPPKHDVYRVPGFWELALSTGVAIKPGFSLEIFKAPPLAIGAPSHFGQF

SEQ ID NO: 208390 - protein, 70 aa, Glycine max
  Clone ID: PAT_MRT3847_30204C.1.pep
SAFLPGCSDDSEVHESPYPEARPNPSVLVLELMNSQYWRVSVLYSCEEYCPSSTCTRYPHILPRRIGDYF

SEQ ID NO: 208391 - protein, 45 aa, Glycine max
  Clone ID: PAT_MRT3847_30205C.1.pep
LLTVVRGGIHIRRARNHIQQKKYVPFWHPINISSVKVQLLTKNTG

SEQ ID NO: 208392 - protein, 57 aa, Glycine max
  Clone ID: PAT_MRT3847_30206C.1.pep
LETTSTHTQTTALTHTSTASWIWSTSLHERRRGHTDRSRSRPSNQLRRTRNDDTATY

SEQ ID NO: 208393 - protein, 81 aa, Glycine max
  Clone ID: PAT_MRT3847_30207C.1.pep
AIGLFSLVRRNNLLANLCMQIQTASSSHVYIYYYVSKFNFIVPAGTSTHSLTTPPLYSSLYAFEYVLLHFPLFNSLHSFPS

SEQ ID NO: 208394 - protein, 84 aa, Glycine max
  unsure (1)..(84): unsure at all Xaa locations
  Clone ID: PAT_MRT3847_30208C.1.pep
XRHYDGSXWXAWXVVLWGXWXRXXVSSAXXXXRVHEWXSGXPXLHGLHAXRXQXCXMHXLQSXXXPSXXYVLXIGCLXCXPTKT

SEQ ID NO: 208395 - protein, 53 aa, Glycine max
  Clone ID: PAT_MRT3847_30209C.1.pep
TFVTNVDISIGRIQESSEMVHDISYQRKRASSMPRSRSDIYHIQCHHRKRRGK

SEQ ID NO: 208396 - protein, 138 aa, Glycine max
  Clone ID: PAT_MRT3847_3020C.1.pep
DPQEKLLCPLKLALQSSHPLEKARHSKSSKTRKKVKNKEHLLFLVSPFNWIGRISKNQLQVLETPDGILVLKDKDNEAITVPQMSVLSSAVIFKKISARIPFTKNLVSETKKIRQAFGNIKGTSIACPAIEPDFVSNK

SEQ ID NO: 208397 - protein, 96 aa, Glycine max
  Clone ID: PAT_MRT3847_30210C.1.pep
RTRGDDPRARLRGRPRETRARGRTQGRRQAIPPERNEKDTIGEQEAPEHARAKEANSRAGQRQSRNREIKPRSKSRLTRRDQRMEPRRQKSKDDVL

SEQ ID NO: 208398 - protein, 33 aa, Glycine max
  Clone ID: PAT_MRT3847_30211C.1.pep
EAISEITGGFYSGGVKVQGYVENGYDKHLYYKK

SEQ ID NO: 208399 - protein, 185 aa, Glycine max
  unsure (1)..(185): unsure at all Xaa locations
  Clone ID: PAT_MRT3847_30212C.1.pep
GTNNQKTSLSWVRRLKIAVDAAKGLDYLHNGSEPRIIHRDVKCSNILLDMDMNAKVCDLGLSKQVTQADATHVTTVVKGTAGYLDPEYYSTQQLTEKSDVYSXGVVLLELICGREPLTHSGTPDSFNLVLWAKPYLQAGAFEIVDEDIRGSYDPXSMMKAAFIAIKSVERDASHMPSIADVLAEL

SEQ ID NO: 208400 - protein, 77 aa, Glycine max
  Clone ID: PAT_MRT3847_30213C.1.pep
SPITNKSLSYISYLPISPFYCLFFFFFYRSPQQLHSISAPGCPMFAFLFLLSFKHPPPPPPPPPPPPSRRYYSHVAR

SEQ ID NO: 208401 - protein, 128 aa, Glycine max
  unsure (1)..(128): unsure at all Xaa locations
  Clone ID: PAT_MRT3847_30214C.1.pep
EVEPVIDSSRYFVLRIEENICGRLRHAFIGVGGRERTEAYDFQAALHDHMKYLNKKKTAEEMEQHYQQTSSVDYSLKEGETLVLQIKTNKSGSSVKSKFFELGLNKSPEEKNGGKESIPSIXVPPPSS

SEQ ID NO: 208402 - protein, 55 aa, Glycine max
  unsure (1)..(55): unsure at all Xaa locations
  Clone ID: PAT_MRT3847_30215C.1.pep
GSXSXSSTXXDSSNXDVMXGRVXWSASDAXSLEXSFQERXTXRXXRXPAFXGYXX

SEQ ID NO: 208403 - protein, 76 aa, Glycine max
  unsure (1)..(76): unsure at all Xaa locations
  Clone ID: PAT_MRT3847_30216C.1.pep
ARNSAREVLFKRNIXXXXXXXXXXXXXXXKXXXLXXXXXIQXXTSXXVYXXPDIRCXXVTXHAFNXECSIGCIXXM

SEQ ID NO: 208404 - protein, 126 aa, Glycine max
  Clone ID: PAT_MRT3847_30217C.1.pep
SDNFSIDKETLRKDFYSSENEPQRRWFFQHYKGTNRKQIKDKFYKFVERVKINILFFDWFHAYAIRKDIDYPWKQDIIGDPTTNVITNWKIKDGELIQSELPPATQYQLPNVKDSNNKPVMAIPFK

SEQ ID NO: 208405 - protein, 54 aa, Glycine max
  Clone ID: PAT_MRT3847_30218C.1.pep
GDSQYSFSLTTFNPSGKLGQNEPALTAGGSGQTSLGIKTANGIGIATQKKIPFI

SEQ ID NO: 208406 - protein, 102 aa, Glycine max
  Clone ID: PAT_MRT3847_30219C.1.pep
DFFFFHILVVGVLFTLYVITVYVSVISMCYNSVRCDGYINRKTNFAHTCFRWSAQSEPNCDARVHFPHHEIGKETQNRAAARDDARLPKHTCYVIAHRSCQL

SEQ ID NO: 208407 - protein, 99 aa, Glycine max
  Clone ID: PAT_MRT3847_3021C.1.pep
MSGQKRSIFSAKSGFVIPKNELSGSLVPIFRGAKKHGVTVGATNEERSKQIERKSKWGPDLTQDTAVRRGKGLTLQIRVDPITKPLESKKLEVGDTQNL

SEQ ID NO: 208408 - protein, 73 aa, Glycine max
  unsure (1)..(73): unsure at all Xaa locations
  Clone ID: PAT_MRT3847_30220C.1.pep
CRRIVASLENVVSHEHGKGESSCMRKKRCCHSXETEKESVDCASVFGEPMKCMQARHEGHVEDELLCIACVAR

SEQ ID NO: 208409 - protein, 50 aa, Glycine max
  Clone ID: PAT_MRT3847_30221C.1.pep
RGIKTAKRGRLNLLGLNRPLGTKKAHMPRIYCRKHRVGIHYRGIFSETVI

SEQ ID NO: 208410 - protein, 125 aa, Glycine max
  unsure (1)..(125): unsure at all Xaa locations
  Clone ID: PAT_MRT3847_30222C.1.pep
VLCLHVWSPFGINISEILSYLPDLDDAPLXRKLNTILLIGWIPCLHFSLLAGPLVXDEHNRSPRYYYVLYCTMWNLTMSACSDASHVIKELQXANTAYPHGFIRIIGFHNYRQLLGISFIAYDSP

SEQ ID NO: 208411 - protein, 112 aa, Glycine max
  Clone ID: PAT_MRT3847_30223C.1.pep
EERAHSPFCSILSRYPDPSPDCNSNADYDPNPHADTQNSVVWLRCYRLRHYRRRGRCMRYSLALCLFLLMDGAVLHRYPYDREIRLTRIRLDCIGIQTIPRPMLDGCFCVTV

SEQ ID NO: 208412 - protein, 54 aa, Glycine max
  Clone ID: PAT_MRT3847_30224C.1.pep
ISRINKSYINSISNSAWLIFKDLVLLLELGKVQTFTNFAVADFYQPTPKKLFFT

SEQ ID NO: 208413 - protein, 49 aa, Glycine max
  Clone ID: PAT_MRT3847_30225C.1.pep
AFLAVVEPCWRGRARLCWGLRVNPAPCCLVEWSLKSKAGSVVASSWARA

SEQ ID NO: 208414 - protein, 217 aa, Glycine max
  unsure (1)..(217): unsure at all Xaa locations
  Clone ID: PAT_MRT3847_30226C.1.pep
MPPPSKSVEGEEWGTPTNNLWVGNLPTEVTDSDLMELFAPYGSLDSLISYSSRTFAFVLFRRIEDAKAAKSNLQGALLRGFQIRIEFARPAKPCKQLWVGGFSPTVAREDLEAEFRKFGKIEDFKFFIDRGTACVEFLNLDAAARAMKVMNGKRXGGRQICVDFLRSQSTRRDFLVDHGQFQARPQHLQPSIGRNNQPSKNLWDRVFLLSCQIDEQM

SEQ ID NO: 208415 - protein, 174 aa, Glycine max
  Clone ID: PAT_MRT3847_30227C.1.pep
MKCFPFSYGEKKDEPKGLQLQSTSGRSDNSTCVEAEVRRSGSALNSQDVSDNGSSESLRRNAIPSLSQRPCNLRVFTVSELKSATKNFSRSVMIGEGGFGCVYLGLIRSAEDPSRRTEVAVKQLSKRGMQGHREWVTEVNVLGIVEHPNLVKLVGYCADDDERGIPALLIYEYM

SEQ ID NO: 208416 - protein, 126 aa, Glycine max
  unsure (1)..(126): unsure at all Xaa locations
  Clone ID: PAT_MRT3847_30228C.1.pep
MIWLFDAIKSEGMKCFPFSYGEKKDEPKGLQLQSTSGRSDNSTCVEAEVRRSGSALNSQDVSDNGSSESLRRNAIPSLSQRPCNLRVFTVSELKSATKNFSRSVMIGEGGFGXCVYLGLIRSAEDP

SEQ ID NO: 208417 - protein, 159 aa, Glycine max
  Clone ID: PAT_MRT3847_30229C.1.pep
PVMANYKGVKFFFQNPLGFVFAFWFGGGGFLPKKKFRAKSSVGGCYPIWPLGIQKALGGPFFGFKLSPPLCMGFQGFPQGAPQMGVKFLVSVPFILSLKFPGGYPPNLGARRAGFFFHYFFFFGWGFLHFGGDNTPKGRLFACFYKVAVCLLGFFYPER

SEQ ID NO: 208418 - protein, 45 aa, Glycine max
  Clone ID: PAT_MRT3847_3022C.1.pep
FSYSYFFFLFISYCCIRLSYCYLQGPLQLTSTRTSVPRHSPNVFN

SEQ ID NO: 208419 - protein, 82 aa, Glycine max
  unsure (1)..(82): unsure at all Xaa locations
  Clone ID: PAT_MRT3847_30230C.1.pep
MATIMAAHVAFLEVPPEVTSPASXTTYFLTYSLDRAWTIGGTIIEITIIGTYLEDYAEPXSPLNXNGKTSDESVHTLHYYMD

SEQ ID NO: 208420 - protein, 54 aa, Glycine max
  Clone ID: PAT_MRT3847_30231C.1.pep
QKHSSIGAKVFYWLRNETLFVQNHSFTTQKHIRRKNYWPLLREETTLPQKNPHE

SEQ ID NO: 208421 - protein, 32 aa, Glycine max
  Clone ID: PAT_MRT3847_30232C.1.pep
NSSKRLILLQPLIQMTLILEYSYSHKCIFSKP

SEQ ID NO: 208422 - protein, 98 aa, Glycine max
  Clone ID: PAT_MRT3847_30233C.1.pep
SSYFVHFFQSIPFGPFNSSSRCMLYFSLHILLKCEILCDIVQLVLCISLLLICWLALCRVSPFGPILTNNTENKPTYFNKYNFFVKKENTNIFFYNVT

SEQ ID NO: 208423 - protein, 50 aa, Glycine max
  unsure (1)..(50): unsure at all Xaa locations
  Clone ID: PAT_MRT3847_30234C.1.pep
XFMILYRGTNKRAYYFVRSEVLDKVIFSPPQFLWGRLNFPILIYILPHVH

SEQ ID NO: 208424 - protein, 59 aa, Glycine max
  Clone ID: PAT_MRT3847_30235C.1.pep
LNIGNFTLGGLIIQLRFKLSWIMLREDHILWGGIWGIHQITGGFRGIFCVRGFNLLIEL

SEQ ID NO: 208425 - protein, 371 aa, Glycine max
  Clone ID: PAT_MRT3847_30236C.1.pep
NLVICPNHHNWKNLFTKVRNLISVGRASSSSSAAANAMGDVQIHKTKLCIIGSGPSAHTAAVYAARAELKPILFEGWMANDIAPGGQLTTTTDVENFPGFPDGILGGELMERCRSQSLRFGTEIHTETVSKVDFSNRPFRVFTDSRTVEAESVIVATGAVAKRLPFPGSGDGPDGYWNRGISACAVCDGAAPIFRNKPLAVIGGGDSAMEEATFLTKYGSEVYIIHRRDTFRASKIMQSKVMGNSKIKVIWNSVVVEAFGGGDNKRVLGGLKVKNVVTREVSELKVSGLFFAIGHEPATKFLDGQLELDSDGYIVTKPGTTKTSVEGVFAAGDVQDKKYRQAITAAGTGCMAALDAEHYLQNVGLQQDKSD

SEQ ID NO: 208426 - protein, 80 aa, Glycine max
  Clone ID: PAT_MRT3847_30237C.1.pep
QEAFSFALIYGRPFRPFFDSLNKKAPLSITTFDFINPHFQFLGLLAIGGKTFPIPPPTIHLLFPLGAGDRDFCFFLQGGP

SEQ ID NO: 208427 - protein, 44 aa, Glycine max
  Clone ID: PAT_MRT3847_30238C.1.pep
SSLSTHRLHWHNSHTSWLSFTSRQYATTTSRYLNDRQHQSRSST

SEQ ID NO: 208428 - protein, 95 aa, Glycine max
  Clone ID: PAT_MRT3847_30239C.1.pep
FRRFWMRRCVMLGGDTRVQQAPPSSLVVASFSTTQNQANWFAPPFRSRISRSCLAFGQGHLICCEKVVHCITFVLAIEEGVASPPSKKKKKKKRK

SEQ ID NO: 208429 - protein, 268 aa, Glycine max
  Clone ID: PAT_MRT3847_3023C.1.pep
MGAEANGGEKQLKFLIYGRSGWIGGLLGKLCEERGIQYEYGTGRLENRSSLEADIAAVKPSHVFNAAGVTGRPNVDWCESHKVETIRTNVVGTLTLADVCHHKGLILINYATGCIFEYDSSHTLGSGIAFKEHDTPNFTGSFYSKTKAMVEDLVGNYENVCTLRVRMPISSDLSNPRNFITKITRYDKVVDIPNSMTILDELLPISLEMAKRNLTGIWNFTNPGVVSHNEILQMYKEHVDPNFTWKNFTLEEQAKVIGAPRKHTSLTP

SEQ ID NO: 208430 - protein, 32 aa, Glycine max
  Clone ID: PAT_MRT3847_30240C.1.pep
KEKVNEVMFHCLIYHALACYDVHLCKRVITRF

SEQ ID NO: 208431 - protein, 53 aa, Glycine max
  Clone ID: PAT_MRT3847_30241C.1.pep
REEEEFVFFFHPSGLSNPTTAFAGVYLYLEPASESNPLHSLKFLYTPTATFFL

SEQ ID NO: 208432 - protein, 76 aa, Glycine max
  unsure (1)..(76): unsure at all Xaa locations
  Clone ID: PAT_MRT3847_30242C.1.pep
KVNRDKAGSLPYAQMQGKGSLIAHLQNSSLMNEHKRRRPIVFTYKXPNAGEPGPLPMAGNMILRPANYLSDGIEDN

SEQ ID NO: 208433 - protein, 69 aa, Glycine max
  Clone ID: PAT_MRT3847_30243C.1.pep
AAYSSGYRFGYRGCRSYHISDDSEFLYFCVLTPYIPLRWVPRIRRFAVLPHFTAKYGIFRGGCLPLSFL

SEQ ID NO: 208434 - protein, 165 aa, Glycine max
  unsure (1)..(165): unsure at all Xaa locations
  Clone ID: PAT_MRT3847_30244C.1.pep
TQTLERTYEYLCRARQGSSSIPLVSEWYKEHCPPSYPVKVRVSYQKLLKCFVLNELHHRPPKAQKKKHLFRSLQATKFFQTTELDWVEAGLQVCRQGYNMLNLLIHRKNLNYLHLDYNFNLXPVKTLTTKERKKSRFGNAFHLCREILPMTKLVVDANVQFRFGE

SEQ ID NO: 208435 - protein, 363 aa, Glycine max
  Clone ID: PAT_MRT3847_30245C.1.pep
MSCCCEFNGCNQGAKVLAVIFDLDGTLLDTERATRGVLNEFLARYGKELDREKEEKKRLGMTQKDSAAIIVKDYELPLTPDQFIKEITPLYRERWAKAKALPGANRLIKHLQKNGVPMALASNSLQENIEAKIYHHKGWKESFSVILGSDQVKSGKPSPYLFEEAAKKMGVDAVNCLVIEDSLFVVKAAYAAKMKVVAVPSRREADCNGLANVVLHSLLEFQPELWGLPPFDDYDTLPIDPLHLSGLYVTGCLQEATENATLALPDQAVGLYFGWTKVDTDENLKILVSINIDFSCVGYKKIHVYLIDANSELKHKQMMQIHLVGYIRAWDNKELTSTELEKLDEYKSIARASLDLPSFTCCL

SEQ ID NO: 208436 - protein, 54 aa, Glycine max
  Clone ID: PAT_MRT3847_30246C.1.pep
ASNSTSKVGRYPIQPWYCVLQQCKNKLVLMLSTANHPHSHFTKYTLSNQDTYQL

SEQ ID NO: 208437 - protein, 59 aa, Glycine max
  Clone ID: PAT_MRT3847_30247C.1.pep
RVPEIVWGAQPLVYTVVVYYFAPSAKLSIKRAFSIFWLGACTTRYIPLKHRQSSENERR

SEQ ID NO: 208438 - protein, 84 aa, Glycine max
  Clone ID: PAT_MRT3847_30248C.1.pep
IVHVRKIITAKRWRPQQANPILSRELLQGVSSKNDLIVTHSLKPQSPLSFQGAFPCPLWKRWSGALHNISHRASCPNFPNTESP

SEQ ID NO: 208439 - protein, 156 aa, Glycine max
  Clone ID: PAT_MRT3847_30249C.1.pep
NHFKARFRIPQLKVDHTTECVFRNLIAFEQCHYPEKPYICNYVSLIDSLIHTQLDVELLVEKKVIVHELGSDKQVAVLVNGLSKHVVANTTCYYETINELNKHYQNIWNRTMAALWLVYFRDPWRASSTLVGIVVLIFAVFQFIRAARAVLGYDKS

SEQ ID NO: 208440 - protein, 183 aa, Glycine max
  unsure (1)..(183): unsure at all Xaa locations
  Clone ID: PAT_MRT3847_3024C.1.pep
ANGGEKQLKFLIYGRSGWIGGLLGKLCEERGIQYEYGTGRLENRSSLEADIAAVKPXHVFNAAGVXGYLNVDWCESHKVETIRTNVVGTLTLADVCHHKGLILINYATGCIFEYDSSHTLGSGIAFKEHDTPNFTGSFYSKTKAMVEDLVGNYENVCTLRVRMPISSDLSNPRNFITKITRYD

SEQ ID NO: 208441 - protein, 32 aa, Glycine max
  Clone ID: PAT_MRT3847_30250C.1.pep
MIGSFINNALEMVLGYAFPLYKCYKSIEKNMP

SEQ ID NO: 208442 - protein, 319 aa, Glycine max
  Clone ID: PAT_MRT3847_30251C.1.pep
MKFKAFVTDNGVQLLERRFLPALERTGKSCHLFLTRDHAMFLHHLLNGDGVQCLAQFRKEALFHDYRISSQNDDRIAFALDLSLLLRALRSAVAVASSASASSAPTRLEIKLVKKLPPNSTQPMPYLTLETRGYKSAVIQDIPISKPLSRAQVTELQSALDTAQDLPQTLVQVPDLNQLLNLVDRMKQVGDVVNVFISKHGDLSVQVSTTLISLGAEFRRLVVIGEKTNAPAEDQNLSAQTRSSRSISRGDGQYVQVSVKHFAKSLQCHLTRPDCTFFGIAPQGSCLTVIFQFFVPGSRQTDKSISLHCRLPVLDPGSG

SEQ ID NO: 208443 - protein, 91 aa, Glycine max
  unsure (1)..(91): unsure at all Xaa locations
  Clone ID: PAT_MRT3847_30252C.1.pep
LAYDPPTDGPTLWDIGLADRSAAXFYAPDPSPQHINKLFINHADRLKLYGSRDWYSXLYTDADLAYTIGVSDYTKDWFYAQAPMKKVDHTV

SEQ ID NO: 208444 - protein, 78 aa, Glycine max
  Clone ID: PAT_MRT3847_30253C.1.pep
VCAPRPVSVSPPSPPPAEPVEQRGKQMFNAEFLRVMQEMIRKEVRSYMSGMEQKNGFRIPTEAIGNAVVKRMGISNIE

SEQ ID NO: 208445 - protein, 181 aa, Glycine max
  unsure (1)..(181): unsure at all Xaa locations
  Clone ID: PAT_MRT3847_30254C.1.pep
MEPYPLNPPCSFAAFSSNVAGDRDAAGRIAGDDVAASGVGGXHPSATILRPDYERRCVARSERRREPIGGTAAAENSLRVVNPATFRAGADHRRTRTGSVKVFPFVSSYPTRMRIERRRVREHRRVFRRVRRPNGVVSVVLKDLRVRHHFVQVVHVKRKSLKKFHKFWINCRWRGVSGNGV

SEQ ID NO: 208446 - protein, 91 aa, Glycine max
  unsure (1)..(91): unsure at all Xaa locations
  Clone ID: PAT_MRT3847_30255C.1.pep
LAXDHXFRGTSRAMTPFXLDXXXXXMFLLXLLXMXKRXDXXXXPXSMLXALXLXLXXFSRLXKYIXILXDDDHRVFRFLEFWXARSESQLH

SEQ ID NO: 208447 - protein, 47 aa, Glycine max
  Clone ID: PAT_MRT3847_30256C.1.pep
DAQIIAHAYDGTYESGMEYRSVSAVAGPSITHDIDKAPTSQEIVKIP

SEQ ID NO: 208448 - protein, 118 aa, Glycine max
  Clone ID: PAT_MRT3847_30257C.1.pep
FFIVYCSLILFFLFFFSPCTFFIVFHPITAVAVPPAVPPETLLAEELSAVKKKLERIRADDERTKKILNEKHALLDAWMKELKYHCMRVSPMRTLREKEQGKIVNEAPSQSEVLDFLI

SEQ ID NO: 208449 - protein, 73 aa, Glycine max
  Clone ID: PAT_MRT3847_30258C.1.pep
CCPLYVEGSHLIRSFAVFSMDISSDLMISTWQSRVNSIICLCSSPDIYRQYVSPWVSLLMCSQFPPPPCSQVN

SEQ ID NO: 208450 - protein, 57 aa, Glycine max
  Clone ID: PAT_MRT3847_30259C.1.pep
FYIAIRICHQIVQCVSIYIPLFQVPLSFAAQVIFLFLCKQRKRRGALLSSSRSRLEP

SEQ ID NO: 208451 - protein, 67 aa, Glycine max
  Clone ID: PAT_MRT3847_3025C.1.pep
IYIYIYIYIYIYIYIYIYIYIYIYIYIYIYYFHSPCQTYSISMPKSLANYTAINLAYYGLSIGVFIK

SEQ ID NO: 208452 - protein, 54 aa, Glycine max
  Clone ID: PAT_MRT3847_30260C.1.pep
IVSHATFHRYQSRIAVNTGHHTTFLQTFPEKPVSETLNCGTQFRNETRMASSLP

SEQ ID NO: 208453 - protein, 130 aa, Glycine max
  unsure (1)..(130): unsure at all Xaa locations
  Clone ID: PAT_MRT3847_30261C.1.pep
MALSLSFAPICSFKSSCTQGAISGNSVXPEKAFQINEACQDSKARNFQSLKAADGNPSTKTKSIVCPDCEGNGAILCTQCKGTGVNSVDHFNGQFKAGGLCWLCRGKRDILCGSCNGAGFIGGFMSTFDD

SEQ ID NO: 208454 - protein, 356 aa, Glycine max
  Clone ID: PAT_MRT3847_30262C.1.pep
MVCSSCVRSLVVQAGTFVNRVRINEFGRSLLAVQSFSHWPIREYKTITGMMVDTGSMSSAGPLVDMMPEKDDDGRFASGGWKSEDGRLSCGYSSFRGKRVTMEDFYDIKTLKIGGQSICLFGIFDGHGGSRAAEYLKEHLFDNLLKHPNFLTDAKLAISETYQQTDANFLDSEKDTFRDDGSTASTAVLVDNHLYVANVGDSRTIISKAGKANALSEDHKPNRSDERKRIENAGGVVMWAGTWRVGGVLAMSRAFGNRMLKQFVVAEPEIQDQEIDEQIELIILASDGLWDVVQNDDAVSLARTEEEPEAAARKLTEAAFSRGSADNITCIVVQFHHEKAELANPDKAEAASAQHE

SEQ ID NO: 208455 - protein, 58 aa, Glycine max
  Clone ID: PAT_MRT3847_30263C.1.pep
CSVKGLNLVHYQLRIGLDLWVRPMPVTSSSLLLLVFWKELEKHIVKEGLEGLLATPNS

SEQ ID NO: 208456 - protein, 56 aa, Glycine max
  Clone ID: PAT_MRT3847_30264C.1.pep
MGHSNVWNSHPKIYRPGSWTWRVCGNPDGLIRKYGLMCCTQCFRSTAKAIGWIKYR

SEQ ID NO: 208457 - protein, 207 aa, Glycine max
  unsure (1)..(207): unsure at all Xaa locations
  Clone ID: PAT_MRT3847_30265C.1.pep
KNPSGFAQTIKNWFGNGTGSPSLFILAVFIYLSPNILSALLFVFPFIRQFLERSNNGVVKLMXWWSQPRLFVGRGMQEGPISLLKYTSFWVMLILSKLAFSYYLEIKPLVAPTKAIMNAHVSVYRWHEFFPHARNNIGVVIAIWSPIILVYFMDTQIWYAIFSTIVGGIYGAFRRLGEIRTLELLRSRFESIPGAFNACLIPTEQTE

SEQ ID NO: 208458 - protein, 56 aa, Glycine max
  Clone ID: PAT_MRT3847_30266C.1.pep
MHSIKLESARAYKELRPTDHLVLTEEERVLLSLAGQAMAAYDPAWRKNQCQSHKTL

SEQ ID NO: 208459 - protein, 111 aa, Glycine max
  Clone ID: PAT_MRT3847_30267C.1.pep
SDENRTRPKPKKKTTQGANTDTTPRPTTPTERQRGPEEAAETHKPTATQGNSQPNARENPPDTPKKTKRANNHQDKPTSTHSRRTRKQDHRNEGNETRRHSRAQQNTPNPR

SEQ ID NO: 208460 - protein, 84 aa, Glycine max
  unsure (1)..(84): unsure at all Xaa locations
  Clone ID: PAT_MRT3847_30268C.1.pep
VVKTGDWITLIQNSSISNLLRVAAWKKGCLMVKIVMSGNASVKKSDWASLVQVFXTNSNCSXHFCACKWSKXSVPHFWEIIFPI

SEQ ID NO: 208461 - protein, 87 aa, Glycine max
  Clone ID: PAT_MRT3847_30269C.1.pep
RLGAMFFRVSGTFLQEGALPIRLKLRTLPPFMGHGTLDLLPPLGPWPLYFWAQAGINYKTFGFCGSPPKKKKKKKQKKKKKKRKKDR

SEQ ID NO: 208462 - protein, 91 aa, Glycine max
  Clone ID: PAT_MRT3847_30270C.1.pep
DVLEASKQSAITPKTESYRYASRSSTLHPDYSLITHSTRYDTNIGLASAIPDEGKPYFSRLCLTSILDELAKAIQSPCRTSQRISDTAILP

SEQ ID NO: 208463 - protein, 91 aa, Glycine max
  Clone ID: PAT_MRT3847_30271C.1.pep
WVRKHDKPCDRQDSANPHSIHQHPQSNPPQYHQPVKYRQSQVPRQWSTAAKCWFSKSSLTESLTSPELLPLASGNELNIGSMSSLFDSSGS

SEQ ID NO: 208464 - protein, 76 aa, Glycine max
  unsure (1)..(76): unsure at all Xaa locations
  Clone ID: PAT_MRT3847_30272C.1.pep
ARRFARSRAAVCRPSYRVVNAGDSXAGTVDSGGIIRHGPHKLLEGFLIAGVGIMASGAYSYIRGEYVNDRKNLGKA

SEQ ID NO: 208465 - protein, 54 aa, Glycine max
  unsure (1)..(54): unsure at all Xaa locations
  Clone ID: PAT_MRT3847_30273C.1.pep
MTTQVPQHSVQVHTTTRLNEAGVVHPGARFEPKRYEAGVXAPSIYHSERGPTNS

SEQ ID NO: 208466 - protein, 66 aa, Glycine max
  Clone ID: PAT_MRT3847_30274C.1.pep
YNMLLVMPHSMRSNLYYVESRVRNLAKCGTWFWNSSICITLTDLLSLCLKGEKEDERRRANYEAIA

SEQ ID NO: 208467 - protein, 34 aa, Glycine max
  unsure (1)..(34): unsure at all Xaa locations
  Clone ID: PAT_MRT3847_30275C.1.pep
NYNKFLYXCLLXVIINQISFCRDQIYFFIGDTFI

SEQ ID NO: 208468 - protein, 103 aa, Glycine max
  Clone ID: PAT_MRT3847_30276C.1.pep
ELELKTLNGLTEGETPQFKTHPGRGAATFLTSGHLSSSPWGWTSPRKGGPPGAPPFWEGRWGAPRPPQPWRRQREGLPWPPLGPGGGPRNSRPRPRGVPTFSL

SEQ ID NO: 208469 - protein, 287 aa, Glycine max
  Clone ID: PAT_MRT3847_30277C.1.pep
MASSVEKEGGASEETFSVELPAPPGWKKLFIPKKAGTPKKNEIVFTAPTGEEINNRKQLEKYLKAHPGGPAVSEFDWGTGETPRRSTRISEKAKAAPPIESEPPKKRTKRSSASQKETSQEEKEEKTKEAEMQEADYTTKDDNDIEKEKDVVMENQDVKSVEDTDVNKSTHSGEAKAGENVEVPIEKDKGIEVSEVFLRKDEEKIEQPQEETKEYRGSGEPEKLETCTIADKKVEVEGVNKEENIKSTREFEAEEIEGTKVNSEEYHKLDEINKAEAELTMNGNHGS

SEQ ID NO: 208470 - protein, 138 aa, Glycine max
  Clone ID: PAT_MRT3847_30278C.1.pep
MEMKGPAMFHFGGQTELSPKPLFNRSNSLPSKSTRPSLPSRPSEPFQFNPDDIVKSPTPLFGRRNTLPSKVRRAVAAERKPSPLSRREDAPPSAPTHTTPKEPTSPALARKDPNTKTTPNPKSNSSKAPFATPQRYPG

SEQ ID NO: 208471 - protein, 205 aa, Glycine max
  Clone ID: PAT_MRT3847_30279C.1.pep
MASAVEKEGGAREETFSLELPAPPGWKKQFIPKKAGTPKKNEIVFTAATGEEIHNRKQLEKYLKAHPGGPAVSEFDWGTGETPRRSTRISEKAKAAPPSVSEPPKKRTKRSSASQKETSQEEKEQEIKEAEMQEADDTTKDDNDIGKEKDVVKENQDDKCVEDTDVNKSTNSGEEAKAVENVEVPIDEKSNAADGELPALKDKVD

SEQ ID NO: 208472 - protein, 98 aa, Glycine max
  Clone ID: PAT_MRT3847_3027C.1.pep
LICLNGKLRNSSPQNYGRRLDSPNLHSKSIEFYWQSFLERLFFWRRKGWIFVLQVLFHECFRSFITLKNLLGLSLFLVLKKRRICLHFPRLKNYPPKK

SEQ ID NO: 208473 - protein, 175 aa, Glycine max
  Clone ID: PAT_MRT3847_30280C.1.pep
MASSVEKEGGASEETFSLELPAPPGWKKKFIPKKAGTPKKNEIVFTSPTGEEINSRKQLEKYLKAHPGGPAVSEFDWGTGETPRRSTRISEKAKVAPPAESEPPKKRTKRSSASQKETFLEEKEEETKEAEMQEADDTTKDDNVIEKEKDFVKENQDDKSVENTDVNKSAHSGEA

SEQ ID NO: 208474 - protein, 292 aa, Glycine max
  Clone ID: PAT_MRT3847_30281C.1.pep
MASSVEKESGASEETFSLELPAPPGWKKQFIPKKAGTPKKNEIVFTAPTGEEINNRKQLEKYLKAHPGGPAVSEFDWGTGETPRRSTRISEKAKATPPTESEPPKKRTKRSSASQKETSQEEKEEETKEAEMQEVDDTTKDDNDIEKEKDVVMENQDGKSVEDTDVNKSTHSGEAKAGEYVEVPIEEEKSNAADGELPALKDKVDDKVFLRKDEEKIEQPQEETKEYRRTGVPEKSETCTTADKTVEVEGVNKEVRSTRQFEVGIIEGTKVNSDQINKKAEAELTVNGNLGS

SEQ ID NO: 208475 - protein, 86 aa, Glycine max
  Clone ID: PAT_MRT3847_30282C.1.pep
LPSFVHESSIIKFYLKPHELITIHASSPIESGAPRIDCLVLLVHPPPFFWEPHELIVVHASSPIESGAFRIDCQALFMPPLSSNFI

SEQ ID NO: 208476 - protein, 348 aa, Glycine max
  unsure (1)..(348): unsure at all Xaa locations
  Clone ID: PAT_MRT3847_30283C.1.pep
LIRYIKFLHKKKQRKVAEYYKKQERLLEGYNDMDTMTETGCFPGSLTEDEMKQLARSESLAVNVSNAANLVLFAAKVYTSIESRSLAVIASTMDSLLDLLSGFILWFTAYAMRNPNQYHYPIGKKRMQPVGIIVFASVMATLGLQILIESGRQLISKSKPEMDPHELKXXIGIMASVTVVKFILMVYCRRFKNEIIRAYAQDHFFDVITNSVGLVAAMLAVKYSWWIDPMGAIIIAVYTINTWAKTVIENVWSLIGRTAPPEFLAKLTYLIWNHHEEVKHIDSVRAYTFGTHYFVEVDIVLPEDMPLNQAHNIGETLQEKLEHLSEVERAFVHIDFEYTHRPEHKMMV

SEQ ID NO: 208477 - protein, 151 aa, Glycine max
  Clone ID: PAT_MRT3847_30284C.1.pep
MASAVEKEGGASEETLSLELPAPPGWKKQFIPKKAGTPKKNEIVFTAPTGEEINNRKQLEKYLKAHPGGPAVSEFDWGTGETPRRSTRISEKAKAAPPTQREPPKKRTKRSSASQKEISQEEKEEETKEAEMQEADDTIRVIIYREEKGLL

SEQ ID NO: 208478 - protein, 82 aa, Glycine max
  unsure (1)..(82): unsure at all Xaa locations
  Clone ID: PAT_MRT3847_30285C.1.pep
IXLDSNPTTQPLSLIFQYKSLLLSLSLYPHFTTHQSPLSLSQXQNLSMAQKALFNRGGFKAPQPLINLCSTTGGTAGSSPPP

SEQ ID NO: 208479 - protein, 88 aa, Glycine max
  Clone ID: PAT_MRT3847_30286C.1.pep
LSTTATTTVNTTANPAPAPPTALATCFAPRSRVHETDEELVKHYVKRKGCGKSALSDAVSDGDIHRSEPCELRDKTREQKRDQERALF

SEQ ID NO: 208480 - protein, 63 aa, Glycine max
  Clone ID: PAT_MRT3847_30287C.1.pep
EKEEKLGEKLRRGVLVGKSRGPFTPVPSWSWAHNNIAAAFFLFLLENSPGLFWNSTIFSHSSN

SEQ ID NO: 208481 - protein, 63 aa, Glycine max
  Clone ID: PAT_MRT3847_30288C.1.pep
SGLNGGFYCFFFLLLYLLFLEFVLPRFCLGLVVYVVFFVEGLFKGLAALVGLFSGSNVGIQNR

SEQ ID NO: 208482 - protein, 46 aa, Glycine max
  Clone ID: PAT_MRT3847_30289C.1.pep
FNLVGNDLNNSNWQFFLGGLGGLTNLNLVGSTLEGDISSQISHLSK

SEQ ID NO: 208483 - protein, 43 aa, Glycine max
  Clone ID: PAT_MRT3847_3028C.1.pep
PCCSPVAGGRSPSCLFAGPASCAWAVVNKSRVGGSAPLVRARA

SEQ ID NO: 208484 - protein, 246 aa, Glycine max
  Clone ID: PAT_MRT3847_30290C.1.pep
LIGSFWNFDALFQPQQHPARDSHDTFFLETPSTTKILPEDYVQRVKHVHESGGYGSRGYAYDWKREEANKNLLRTHTTAVSSRMLYQLAQKPFAPKKYFSIDRVFRNEAVDRTHLAEFHQIEGLVCDRGLTLCDLIGILHDFFSRLGMTKLKFKPAYNPYTEPSMEIFSYHEGFKKWVEIGNSGMFRPEMLQPMGLPEDVQVIAWGLSLERPTMILYGIDNIRDLFGHKVDLGLIKKNPVCRLGID

SEQ ID NO: 208485 - protein, 544 aa, Glycine max
  Clone ID: PAT_MRT3847_30291C.1.pep
NSARGGLRERYELHHGVKISDSALVSAAVLADRYITERFLPDKAIDLVDEAAAKLKMEITSKPTELDEIDRAILKLEMEKLSLKNDTDKASKERLSKLENDLSLLKQKQKELTEQWDSEKVFMTRIRSIKEEIDRVNLEMEAAERDYDLNRAAELKYGTLMSLQRQLTEAEKNLSDFRNSGQSLLREEVTDLDITEIVSKWTGIPLSNLQQTEREKLVLLEQVLHKRVVGQDTAVKSVADAIRRSRAGLSDPNRPIASFMFMGPTGVGKTELAKALAGYLFNTENALVRIDMSEYMEKHAVSRLVGAPPGYVGYEEGGQLTEVVRRRPYSVVLFDEIEKAHHDVFNILLQLLDDRRITDSQGRTVSFTNCVVIMTSNIGSHYILDTLRSTQDDKTAVYDQMKRQVVELARQTFHPEFMNRIDEYIVFQPLDSEQISKIVELQMERVKNRLKQKKIDLHYTEKAVKLLGVLGFDPNFGARPVKRVIQQLVENEIAMGVLRGDFKEEDSIIVDADVTLSGKERSPLNKLLIKKLDSPDADAMVVND

SEQ ID NO: 208486 - protein, 370 aa, Glycine max
  Clone ID: PAT_MRT3847_30292C.1.pep
MEAKPLRTVPSSHNTSGVGGGPQKKIDMGHKMVGDVGVVVVDERKRVVVVKEEKENTSSYSVELHLGVDASHSAPQEINHVITEAQRRELHHQVFIFNHLAYNLPPPYHLVQFPSNMSEYSFLGFDHGIMVDPEPHRCRRTDGKKWRCGKNVVPNQKYCERHMHRGRNRSRKPVETSQVNSPLATKPCSKSHTKPSSKTQFEISSPNLIAIPHIDTSSTPSRSLSVTNCSSANNRSKNSASYADYLMSFSSASTVSPGSTLATPVAPKMATFSSVTSIASDRGSCLNICQKDNKSKSCISNNISVKSGGKGRIVGDTNGISTGIGFSPTSVLQVSGCNPSYLNDRTNIESASGRCRRTDGKKWQCKSAVL

SEQ ID NO: 208487 - protein, 107 aa, Glycine max
  Clone ID: PAT_MRT3847_30293C.1.pep
QRPGPKPRELPPPPHSEETKGGDKNGQPRKTQTRRGTRRGGRRTRATTGRTRLGRERNHAPTTQPRGAESRTKPNSSPANQARTERDHAHDQATQEQHQRTPTERET

SEQ ID NO: 208488 - protein, 77 aa, Glycine max
  Clone ID: PAT_MRT3847_30294C.1.pep
NLLVHLKNLGSSNILQQKLWWNETVSVVSSNSSTYTSKDFSYGWGRKRKYLHGSKLKYLHFPFMETHKQVQGEMLCK

SEQ ID NO: 208489 - protein, 40 aa, Glycine max
  Clone ID: PAT_MRT3847_30295C.1.pep
LSCGPAHEVDHPYVGWILSGGCPAWHLVETTRSMGGQQVR

SEQ ID NO: 208490 - protein, 47 aa, Glycine max
  Clone ID: PAT_MRT3847_30296C.1.pep
TPLAERMSFITDHDVFYTDATVGGLMNATCGNVSELIIAKFALSRNK

SEQ ID NO: 208491 - protein, 95 aa, Glycine max
  Clone ID: PAT_MRT3847_30297C.1.pep
AFKKHIYNSMAGIAYGISVLAVGAGEAPRRPTQAQTTTPNTHHNNNTTSEEFTYLNSGKQNIKGLTNQTGYVKGSANGAINFGTLTTSSSAQMQP

SEQ ID NO: 208492 - protein, 68 aa, Glycine max
  Clone ID: PAT_MRT3847_30298C.1.pep
TDKSQRKKKAIFPFVKESIPELIELNTAITKNQSFRGQAHSESKGYPPNATDINPRNESAKSEATHPN

SEQ ID NO: 208493 - protein, 137 aa, Glycine max
  Clone ID: PAT_MRT3847_30299C.1.pep
LYMLEIEPNSARLARAARGGKHVDDSGFDEDILFDSHNSETFGDETFGGVFGSVVKRPGEISGGKGNDGARTLANSSSMDHTQSCQSNTCVDLSRSGSYDHAKQLASELPAKSYSTSDGESRCFCCPFLFCIYLLSL

SEQ ID NO: 208494 - protein, 555 aa, Glycine max
  unsure (1)..(555): unsure at all Xaa locations
  Clone ID: PAT_MRT3847_3029C.1.pep
MSDTEGQSHSSGITKKLDSHKTYHGRDPNNGNDLWKDGLICAFEYIXGQNRSAKLSSSSSKITDRMHGQHSKMHHVPSDDKKKLSDPSSVNVSRESLFGGSDDDKESQTPKAGQSKKYEGGHWVPIGWARISELVQAVQVDADWSSHQLEFEDSEDDFTVADLAAPYWEHPAGPIWWCHVFAGHPTVEAWLSNAQWLHPAVSLALRDESRLISERMKHLLYEVPVRVAGGLLFELLGQSAGDPLVEEDDIPIVLRSWQSQNFLVTVMHIKGSVSWINVLGITEVQELLSAGGYNMPRTVHEVIALLACRLSRWDDRLFRKSIFGAADEIELKFMNRRNHEDLNLFILILNQEIRKLSTQVIRVKWSLHARDEIVFELLQHLKGNGARTLLEGIKKSTREMIEEQEAVRGRLFTIQDVMQSTVRAWLQDRSLRVTHNLAVFGGVGVVLTIITGLFGINVDGIPGAEQTPYAFGVFTAILVVLGVVLIAVGMVYLGLKNPVVEEQVEVRKLELQELVKMFQHEAETHAQMRKNISPKNLPPTAGDAFRSDADYLVIQ

SEQ ID NO: 208495 - protein, 62 aa, Glycine max
  Clone ID: PAT_MRT3847_302C.1.pep
MGFRLPGIRKASNAVDAPKGYLAVYVGEKMKRFVRNILTDICRHALDMFSSCYAGVQLEGIF

SEQ ID NO: 208496 - protein, 48 aa, Glycine max
  Clone ID: PAT_MRT3847_30300C.1.pep
RVDQDVGGGICHMGVSLRVFSTRSLVFWCHAKHLIITPTKTRDVVAGP

SEQ ID NO: 208497 - protein, 196 aa, Glycine max
  Clone ID: PAT_MRT3847_30301C.1.pep
MNKAIFTRFFHSTPLLERKSRTFGESRCNNYSKRFRKLRAKQTLLHDVNAYAQFMCQSWKEDVDEDGPSPSLGPSWFRKQYSPKGSGRHRNDNQRSKHQFRRNHEFCKDDFDVETVFRSAFGGNRSFYWSFINEENPQWTKSGGFSNHGKSWNWRRWSDNGYNGTSTESDCSQSDLISDRLALGMSASGPMKLEDV

SEQ ID NO: 208498 - protein, 41 aa, Glycine max
  Clone ID: PAT_MRT3847_30302C.1.pep
FSFLFALLMLSPSFTSCFGALFSTRYTFLEKSSLYLPCLDS

SEQ ID NO: 208499 - protein, 41 aa, Glycine max
  Clone ID: PAT_MRT3847_30303C.1.pep
YLPLQFTTLFPDLLILLHFVLEYSNLISLPVLGISPSVVFS

SEQ ID NO: 208500 - protein, 119 aa, Glycine max
  unsure (1)..(119): unsure at all Xaa locations
  Clone ID: PAT_MRT3847_30304C.1.pep
KNADVWADFFGLLXFRGINMDKIHFRGSSDPCWCPSQSXSLCQVSSKIGPVNPVMVTAVASVIESLGENPLRKELIGTPTRFVKWVMNFQKSNFNIKLNGFLCDGIDSLDVNEDVYIHK

SEQ ID NO: 208501 - protein, 121 aa, Glycine max
  Clone ID: PAT_MRT3847_30305C.1.pep
RKRFTGTLTTSPTSTYSTLHLQNAPMILPLGVTSNLCAWHTGRIISNPNTTLLAAVCAIAMLCYATPSLHINSGYFCFKLFYAFAPFLANFLIVVALQILQCILSPPPPQRRRTSYSDDGK

SEQ ID NO: 208502 - protein, 58 aa, Glycine max
  unsure (1)..(58): unsure at all Xaa locations
  Clone ID: PAT_MRT3847_30306C.1.pep
RRYHLGXWXXQASIRLSLWKAGRSAGAGQELPGSXPRPVGVECKYPWLISGVYWXXTD

SEQ ID NO: 208503 - protein, 111 aa, Glycine max
  Clone ID: PAT_MRT3847_30307C.1.pep
NVTRRILGSISFFNLFPAPAAISLYGKFSGSNLIFPVIKKSSEEVAQCQVNCSSSADCTVQCFTTPQPGRLCSIYSNFIHFLMLFIKNNSFLAIFPILSQCGKWCSLFAYM

SEQ ID NO: 208504 - protein, 43 aa, Glycine max
  unsure (1)..(43): unsure at all Xaa locations
  Clone ID: PAT_MRT3847_30308C.1.pep
PPVVPFNGKMKPWLALAMAPFNPLWTKYVGXELNFVQAPPFGF

SEQ ID NO: 208505 - protein, 67 aa, Glycine max
  Clone ID: PAT_MRT3847_30309C.1.pep
IRACFVFFFFFFLNWFFVKNPREAKGERQLYLYPPYFCGRTCFSQKNFLFLKLHFLRGGGQKKDTYQ

SEQ ID NO: 208506 - protein, 76 aa, Glycine max
  Clone ID: PAT_MRT3847_3030C.1.pep
TYSLDKLNNYDCLDVVKILDDTNYDGQFKEIVSEIVKNKHKFQQSWVIHIMRKANNLAYSFVKAGLSLSSYLCFYD

SEQ ID NO: 208507 - protein, 246 aa, Glycine max
  Clone ID: PAT_MRT3847_30310C.1.pep
ARGKFQSRCNLELADLDKVEEEEDILALRMLIQQHQRHTNSLLAKEVLDDFENLLPKFIKVFPREYKRVLASMKSEETSKDALVHAAKDDQDDEAQAVEKDAFEELKKLVMASLNEEPSQAESPKRPSRVTGAIKHRGFVAYEREGVQYRDPNVRMTDWKEVMEETKPGPLLKTQSARCMDCGTPFCHQENSGCPLGNKIPEFNELVYQNRWREALERLLETNNFPEFTGRVCPAPCEGSCVLGII

SEQ ID NO: 208508 - protein, 72 aa, Glycine max
  Clone ID: PAT_MRT3847_30311C.1.pep
YFRDISMIKFHERSSSVLHRSSILNVLVFDFESFEFILCTVRGPFLPRMSSSSSRLLLIFFCFVLSEFRPIV

SEQ ID NO: 208509 - protein, 56 aa, Glycine max
  Clone ID: PAT_MRT3847_30312C.1.pep
TKNYISHITFHKERNWCALLNIAYDVHVNKRETYALQQTPPIKKLFTTFLYLQPRL

SEQ ID NO: 208510 - protein, 51 aa, Glycine max
  Clone ID: PAT_MRT3847_30313C.1.pep
TQLFSVSPVCQSPEGLVSSSRHFLAPCLHGKGLGLNQTGVAEAASVEKIIP

SEQ ID NO: 208511 - protein, 222 aa, Glycine max
  unsure (1)..(222): unsure at all Xaa locations
  Clone ID: PAT_MRT3847_30314C.1.pep
FGDILMTQYSSSLAVSEGEKVTMSCKSSQSLLWIGNQRSCLVWHQRKPGQTPKPLITWASNREPGVPDRFIGSGSGTDFTLTISSMQAEDVGFYYCQQHLDIPXTFGSGTKLEIKRADAAPTVSIFPPSTEQLATGGASVVCLMNNFYPRDISVKWKIDGTERRDGVLDSVTDQDSKDSTYSMSSTLSLTKADYESHNLYTCEVVHKTSSSPVVKSFNRNEC

SEQ ID NO: 208512 - protein, 134 aa, Glycine max
  unsure (1)..(134): unsure at all Xaa locations
  Clone ID: PAT_MRT3847_30315C.1.pep
MWPIPXFPSPFFLWSPPLAXFLXPFXGPAWXXXXXXXXQTPPXXPAPGGXPPPPPPPPPPPPPPPPHHTPPPPPPPPPPPPPPPPPPPPPPPPPPPPPPPPHPPPPPPPPPPPPPPPPPPPPPHPPPPPAPPPP

SEQ ID NO: 208513 - protein, 36 aa, Glycine max
  Clone ID: PAT_MRT3847_30316C.1.pep
FAEVCGYDGYLLVATRAFIWLLSKNIKHIMQFPKKS

SEQ ID NO: 208514 - protein, 484 aa, Glycine max
  Clone ID: PAT_MRT3847_30317C.1.pep
MSTVGEGKVSSNGHGCCKSGPGYASPLEAISGPRESLIYVTSVYTGTGIEKPDYLATVDVDPNSPTYSKVIHRLPVPYLGDELHHTGWNSCSSCHGDPSADRRFLIVPALVSGRIYVVDVKTNPRAPSLHKVVEPADIIQKTGLAYPHTSHCLASGDIMISCLGDKDGNAAGNGFLLLDSEFNVKGRWEKPGHSPLFGYDFWYQPRHNTMISTSWGAPSAFTKGFNLQHLSDGLYGRHLHVYSWPGGELRQTMDLGDSGLIPLEIRFLHDPAKDTGFVGSALTSNMIRFFKTQDESWSHEVAISVKPLKVQNWILPEMPGLITDFLISLDDRFLYFVNWLHGDIRQYNIEDVKNPKLTGQVWVGGLIQKGSPVVAITDDGETWQAEVPEIQGNKLRGGPQMIQLSLDGKRLYATNSLFSTWDKQFYPELVQKGSHIIQIDVDTEKGGLKINPNFFVDFGTEPDGPSLAHEMRYPGGDCTSDIWI

SEQ ID NO: 208515 - protein, 255 aa, Glycine max
  unsure (1)..(255): unsure at all Xaa locations
  Clone ID: PAT_MRT3847_30318C.1.pep
MLVCAASSTLTFWPFNTKSHHRFFSNSLSLPLTLTHTPSCFLQTINPNPTSHSDDALRLTVPSAAAVAAAIRKASTSPVQFKYAEAPSHTHPFMLPSTDFHRLCLHLFRRIVPEALLSVYVRPAGSYVMXLELWWVALYPGEAEAEGIVILVGHFNIPAGLRAAKATLSNSQVNVVPECKAVVLPMVKHPFVVGFLVAELPLVEQEQCQKSQSDGPENLMSVEEPYSFPPFLDLDKKSREIQNLQVKNEAVGMHN

SEQ ID NO: 208516 - protein, 39 aa, Glycine max
  Clone ID: PAT_MRT3847_30319C.1.pep
IYIKPKKVKKNLHRSVCGFSLVFSTCIFSWYQHLYYKIS

SEQ ID NO: 208517 - protein, 139 aa, Glycine max
  Clone ID: PAT_MRT3847_3031C.1.pep
VFTSDSEVLQLTMAVLPIIGLCELANCPQTTSCGILRGSARPGVGAVINFCSFYLVGAPVAIVLAFYWKLGMVGLCYGLLAAQIACVVSIFVVVYKTDWERESLKATCLVGKSSCGTFAYEDQTAVKCEGVVFLHNSEK

SEQ ID NO: 208518 - protein, 57 aa, Glycine max
  Clone ID: PAT_MRT3847_30320C.1.pep
FFYFFLFLSFFIFIDSLKIPYFAAPFGGWESIVEQPASFCLTCGSSSNLERAQIQDV

SEQ ID NO: 208519 - protein, 70 aa, Glycine max
  Clone ID: PAT_MRT3847_30321C.1.pep
MSDIGRQSLGDKAGAALKPDSEKSYVEQATDYVKGTLDSVASAVQPQQEKSTTQKVGDALTGDNKNKDIA

SEQ ID NO: 208520 - protein, 106 aa, Glycine max
  Clone ID: PAT_MRT3847_30322C.1.pep
SSSASNLIMKPKQSLKEPNSMGGSESQSPNSLNPSPNDQPILERATTPEANPPSSIKNHILFSARNEEEKAEWVSLIQFAIRDPRNWNIIQSNFNRAHKGRQGLQG

SEQ ID NO: 208521 - protein, 203 aa, Glycine max
  unsure (1)..(203): unsure at all Xaa locations
  Clone ID: PAT_MRT3847_30323C.1.pep
HASGKSLKIIKGESIWWEALKWNVAEWGDAGRPNYFERIFSPINEEADMMNQLAALQETQLNEYHNTTYQGISSSKQSIAKILAPVSSVGRGSSNSEAQKRKVVAEPKIFQEVTRKLYKTINADKRREVWTAQIRVNAEGCDDDGYSWRKYGQKEILGAKYPRIHXRVPCQREXEEDGQXGHMFRRRLKRVRMVNSSFLLIFL

SEQ ID NO: 208522 - protein, 64 aa, Glycine max
  Clone ID: PAT_MRT3847_30324C.1.pep
PTPFPATPSTVGFQLDLDFERLSKEAWLTETKSRQCLWTRKLRSLSRHQWTDYDYGTWLYSHSF

SEQ ID NO: 208523 - protein, 161 aa, Glycine max
  Clone ID: PAT_MRT3847_30325C.1.pep
MAVQAQYPSNVLFLNSRNGQEGHEYSSLQPQPGGVVLLNQPHMLYDNCNNDNGSNNNNNNINSRKRGREDQPGPLQLVHVSQLHNHQQQNNVVSTGLRLSFDDQHFQQQQRLQLHQNQSQQQQQHGSQSSAFLSLLSQGLEQLRRALAEKRQRHYRALLST

SEQ ID NO: 208524 - protein, 119 aa, Glycine max
  unsure (1)..(119): unsure at all Xaa locations
  Clone ID: PAT_MRT3847_30326C.1.pep
SRAYDDDPKDVSLIVSLRSEELLYLEDILDDDRFLXNYTNRMLSHMQKATNTLKFVLVFPFRXSDIVREASQAPSDAWGVVMLDTDRSPVRRLLMQSLEVLALXHPSTKFGKIICTDSI

SEQ ID NO: 208525 - protein, 75 aa, Glycine max
  Clone ID: PAT_MRT3847_30327C.1.pep
IKWRRGNSYNGHQKISSVLLVLRGRENKKEKKPTPEYYHPTKIQFTFKELKRCSSQCYFEDKWYLHKKMIHPTPN

SEQ ID NO: 208526 - protein, 49 aa, Glycine max
  Clone ID: PAT_MRT3847_30328C.1.pep
NHKCIMKGKHGQEMYVTIRHICWPIELRRDHVFVPFPNTDGRETIHKNI

SEQ ID NO: 208527 - protein, 78 aa, Glycine max
  Clone ID: PAT_MRT3847_30329C.1.pep
LGGSLFFFNPFFSPFFPYIVFAVCFAFGIFSLFPFWVFFFAPVCPPGPKKKKKKKKKKKKKKKKKKKKKKKKKKKKKK

SEQ ID NO: 208528 - protein, 59 aa, Glycine max
  Clone ID: PAT_MRT3847_3032C.1.pep
KPYVGFIKSRKMSDTEGKSHSSGITRKLDSHKTYHGRDPNHGNNLWKDGLICAFEYIKG

SEQ ID NO: 208529 - protein, 311 aa, Glycine max
  unsure (1)..(311): unsure at all Xaa locations
  Clone ID: PAT_MRT3847_30330C.1.pep
MMKKGLVVYKLYRALTHGLSPLIRLHLRWRRFLGLEHPHRWLERLGLPSQPRHAGPLLWFHAVSLGEGMIAVPVIKHCIRRMPHLNVLMTITTMSSFEVLSKSLPSGIILQFSPVDTPTSIHSFLDYWKPNAIVLMESELWPNLIMDASRNGIKLALLNARMSEKSFKIWSRPVLLPLISLMLSKFSLIVPLSTEQGIRFQLLQAPPYIINFSGDLKYVIEDFGVNERGRIDIDNLRLELTQKKVWMASSIHSGEEEIILGVHNALMQQQPNTMTIIVPRHPQEGREIAKKLEKXGXNVVLRSQMRSLAWN

SEQ ID NO: 208530 - protein, 38 aa, Glycine max
  Clone ID: PAT_MRT3847_30331C.1.pep
ATHLIQVEKNQGDRNLVIQKARLPTPPCMHSFHMKVLQ

SEQ ID NO: 208531 - protein, 47 aa, Glycine max
  Clone ID: PAT_MRT3847_30332C.1.pep
ADQLSNCIYDVSVKDIWGSDVSLNDYRGKVLLIENVASQCGPTQTDY

SEQ ID NO: 208532 - protein, 58 aa, Glycine max
  Clone ID: PAT_MRT3847_30333C.1.pep
KKAFYGAFPKSMIRMSGFNGGQEVRKECRVIRFRGLELIQAESCFNPVEGMHLLDRIS

SEQ ID NO: 208533 - protein, 101 aa, Glycine max
  Clone ID: PAT_MRT3847_30334C.1.pep
AHACVYIQDRVYIDIMGYEPQCPSEEQKVSGQCYLVYNLRANCNSGNYGSTAVLLTDEPSCDFVRVCLVCTPVSTSTVQCSSREWSEHIFRGHYDGWWCCC

SEQ ID NO: 208534 - protein, 57 aa, Glycine max
  Clone ID: PAT_MRT3847_30335C.1.pep
FKEDKLALSLARSYIQSFSFKCLKADWARGFCKTVTGKHLMPNSLILGGIFTPAGFN

SEQ ID NO: 208535 - protein, 257 aa, Glycine max
  Clone ID: PAT_MRT3847_30336C.1.pep
MELQDLPEGCIAKILSYTTPVDVCRLSLVSKAFRSAAESDTVWDCFLLSDFTSIIPISSTSKKDLYFTLSDHPTIIHQGRKSVQLDKRTGKKCCMLSARNLTIIWGDTVQHWEWTSLPESRFQEVAMLQAVCWFDISGSINTLTLSSNTHYATFLVFKMINASGFHYHPTVLSVGVLGGNSNTKYVCLDPNLKGNHRLQELQFPKVRSDGWLEIEMGEFFNSGQEEKQVQMKVMETTSHIWKCGFILEGIEIRPKHV

SEQ ID NO: 208536 - protein, 66 aa, Glycine max
  Clone ID: PAT_MRT3847_30337C.1.pep
QFFEMQRHDALKALDIYRRVGHQAERLSEFYEICRNLDIGRGEKFIKVEQVGWILYHACLCQRHLA

SEQ ID NO: 208537 - protein, 40 aa, Glycine max
  Clone ID: PAT_MRT3847_30338C.1.pep
LLTPPLSPARQRLSDSAETHNTAKTIKPLGAILLALHSWS

SEQ ID NO: 208538 - protein, 40 aa, Glycine max
  Clone ID: PAT_MRT3847_30339C.1.pep
LLHIFLFCKLCFVIVNLFYPSLITYSFNESFYMISLVNLV

SEQ ID NO: 208539 - protein, 171 aa, Glycine max
  unsure (1)..(171): unsure at all Xaa locations
  Clone ID: PAT_MRT3847_3033C.1.pep
MAVTTRTLSATEKKHWWLTNRKIVEKYIKDARSLIATQDQSEIASALNLVDAALAISPRFDQALELRARALLYLRRFKEVADMLQDYIPSLRMGNDDSSSSSSSSSSSDTSSQQLSREGVKLLSSSSESPVRDHSFKCFSVSDLKKKVMAGLCKTCDKEGQWRYXVLGEAC

SEQ ID NO: 208540 - protein, 66 aa, Glycine max
  Clone ID: PAT_MRT3847_30340C.1.pep
FHSSQYIRAPFEGAGGDEYGGHAMEQRRYLYSRKYDHRPERTLIQDQQRSSYRGEIKRQIEPEILL

SEQ ID NO: 208541 - protein, 359 aa, Glycine max
  Clone ID: PAT_MRT3847_30341C.1.pep
MASDLEAKAKEAFVEDHFELAVDLLSQAIHLEPNKAEFYADRAQANIKLNNFTEAVADANKAIELNPSLPKAYLRKGTACMKLEEYETAKAALEVGASLSPDNSRFATLIKECDKLIAEESYTPPIIEEKATTEDVTPKDVQQQDDLLEKPTVTVTKPKYRHEFYQKHDQVVVTIFAKKIPKESITVDFGEQILSVSINVTGEDTYVFQPRLFGKIIPSNCQYEVLSTKIEIRLAKAEPIHWTSLEFTRDSVVQQRVSALSVTGGEKPTYPSSKRCENTTEGEAQVKKEGKDEKLDGDAALNKFFREIYQDADEDTRRAMKKSFVESNGTVLSTNWKEVGTKKVEGSPPDGMELKKWEY

SEQ ID NO: 208542 - protein, 397 aa, Glycine max
  unsure (1)..(397): unsure at all Xaa locations
  Clone ID: PAT_MRT3847_30342C.1.pep
KTSGQIXNFQKSXIFFNSNTPCPHRQSISTHLGESIGIGKYLGLPSIIGKKKKKIFGFIKDKIWKRISHLSLKYLSKAGKEILIKLVGEFISTYCMSIFLLPVTLEDELQKMMNNFXMGSKTQSRKDINWLSWDKLCIKKEHGSMDFRHLHXLILLGKQGWNLQTNQDIMIYKVFKAKXFPKEEFSNAKLGNNLSHVWXSIFASWVIARGGLKWMRQDNGQSINFWEEHWLKSVENALISTTASIGLENLQVSDIIDHDTQTRRMDIIDNILSXDDIKAAKATPLLNPHARDNLIWKFTXNGKYTVRSAYQCIMDSILDSDHLKAYGDWREVWNLNIPPKIKRFLWRALRGCLPTRQRLIRKGVNCPHHCCYCPNSLENEWHVFITILEKGRFMELG

SEQ ID NO: 208543 - protein, 176 aa, Glycine max
  unsure (1)..(176): unsure at all Xaa locations
  Clone ID: PAT_MRT3847_30343C.1.pep
MITLQACNIEEDGLFVFDLHSDGSGQRHLNAAIRENESNNPLDSNGSVFGFPPNRSPYSCIQMNGKEVFCFAVRCVPQSIEFALGKAGLPASSIDWLLLHQLHKMIXIIDAVAARLELPSERVISNLANNSNTSAASIPLTLDEAVRSGKVKPGQTIATAGFGAGLTWGSAIVRWG

SEQ ID NO: 208544 - protein, 39 aa, Glycine max
  Clone ID: PAT_MRT3847_30344C.1.pep
KKKGPFSPKKKKKKKKKKKKKKKKKKKKKKKKTKKKKKK

SEQ ID NO: 208545 - protein, 155 aa, Glycine max
  unsure (1)..(155): unsure at all Xaa locations
  Clone ID: PAT_MRT3847_30345C.1.pep
MALFIVVLVVVALVLCFCTALLKWNEVRYRRKGLPQGTMGWPVFGETTEFLKQGPNFMKNKRARYGSFFKSHILCPTIVSMDPELNRYILMNEAKGLVPGYPQSMLDILCTHNIAAVHGSTHKYMRGALLXIISPTLIREPALPKIDEFMNTKKG

SEQ ID NO: 208546 - protein, 69 aa, Glycine max
  unsure (1)..(69): unsure at all Xaa locations
  Clone ID: PAT_MRT3847_30346C.1.pep
VCFVSLGRLVFLLAAVGSVAPAPAAFVGRHCVRFLSLSVSLYAFLFGCVWGVWAINCAXXFSFFFCXGG

SEQ ID NO: 208547 - protein, 162 aa, Glycine max
  Clone ID: PAT_MRT3847_30347C.1.pep
SKSQAVNAKYVVAPILFFVGLLILICIYLRVRKPTKHFESETMVDDEIKLVVSSQFDFDTIRVATNNFSDANKLGQGGFGPVYKGTLFNKQEVAIKRLSSNSCQGNIEFKNEVILMSRLQHRNLVRLLGFCYESEERLLVYEFLPNKSLDKIIFDPIERAHL

SEQ ID NO: 208548 - protein, 70 aa, Glycine max
  unsure (1)..(70): unsure at all Xaa locations
  Clone ID: PAT_MRT3847_30348C.1.pep
LIAEREKTIPTLVGIECPTDDKLTHPQLXDKPKTRSFTILPMDYNLEDXQKLHKNERFIMINTDKLSRQD

SEQ ID NO: 208549 - protein, 53 aa, Glycine max
  unsure (1)..(53): unsure at all Xaa locations
  Clone ID: PAT_MRT3847_30349C.1.pep
SEPREDRGSPTKYSLXDHLIAPQVEVPISVNTNDHQASCCSYSLYTIPQTLKY

SEQ ID NO: 208550 - protein, 564 aa, Glycine max
  Clone ID: PAT_MRT3847_3034C.1.pep
MAVTTHTLSATEKKHWWLTNRKIVEKYIKDARSLIATQDQSEIASALNLLDAALAISPRFDQALELRARALLYLRRFKEVADMLQDYIPSLRMGNDDSSSSSSDSSQQLSREGVKLLSSSSESPVRDHSFKCFSVSDLKKKVMAGLCKTCDKEGQWRYLVLGEACCHLGLMEDAMVLLQTGKRIASAAFRRESVCWSEDSFYVTNIPFSGDSTNAPPSTPPRTLLADSESVAQLLGHIKFLLRRRAAALAALDAGLYSEAIRHFSKIVDGRRSAPQSFLAECYMHRASAHRSAGRIAESIADCNRTLALDPTCIQALETRASLFETIRCLPDSLHDLEHLKLLYNSILRDRKLPGPAWKRHNVRYREIPGKLCSLTIKIQELKQRLASGETGNVDYYALIGVRRGCSRSELERAHLLLSLRHKPDKATGFIERCELADERDVESVKERVKMSSLLLYRLVQKGYTNVMGNIMDEEAAEKQRKKAALQALEAQKEKANEAAAELNKVVESNSTQMSQNRSMVSSSTVNPAVFQGVFCRDLTVVGNLLSQAGFNRSMPVKYEALSC

SEQ ID NO: 208551 - protein, 59 aa, Glycine max
  unsure (1)..(59): unsure at all Xaa locations
  Clone ID: PAT_MRT3847_30350C.1.pep
PPSPATTPHARPTPLPVQLHRFILRFPAPPPPXLLLXNVVSPFNFITYILSVFKNVFLR

SEQ ID NO: 208552 - protein, 42 aa, Glycine max
  Clone ID: PAT_MRT3847_30351C.1.pep
VTLDQVHIAVGPFRLIINCCDHYFSFISCPILSPSHCIYTKS

SEQ ID NO: 208553 - protein, 65 aa, Glycine max
  Clone ID: PAT_MRT3847_30352C.1.pep
LIIRNVPRWSVTGCLDHIVLALLMTCQYVSLVLGVKQFSWFIGNKDLFFMELYHVKECSFMEVML

SEQ ID NO: 208554 - protein, 99 aa, Glycine max
  Clone ID: PAT_MRT3847_30353C.1.pep
KIHYYLQLLNTLDSSSIHGVHLKSGRCSPIISSTPPLSFTSPSSPSASTSTSNIFSIHSILPILIPYLTTIPQLTTKLFDLLTTFYHHLLTFLTYSIIL

SEQ ID NO: 208555 - protein, 96 aa, Glycine max
  Clone ID: PAT_MRT3847_30354C.1.pep
TPTSSLFPSASPSHTSRNSRWTLGASDIMFTNPVFSRFFGAGQVIETVRGGGVFQPAIDKAVKLLQDGEWIHIFPEGKVNQHAMNPPGGLFRFKWG

SEQ ID NO: 208556 - protein, 49 aa, Glycine max
  Clone ID: PAT_MRT3847_30355C.1.pep
KLCPNKITLEANFSLTFSLVIFQCAQIILWHISVLAPEGNPKGRIIPKD

SEQ ID NO: 208557 - protein, 120 aa, Glycine max
  Clone ID: PAT_MRT3847_30356C.1.pep
ARAASLFLHLFFHFPQIFQTPTSPFSSASSQITSSNLPNKKKKTHFLSYSFGIYHSIHGFWNETFLVWCCCSSSSSCLTYLHLFLKSVSPTFALPSPPRIHGPSHESHVIKTFSYCFSYH

SEQ ID NO: 208558 - protein, 206 aa, Glycine max
  unsure (1)..(206): unsure at all Xaa locations
  Clone ID: PAT_MRT3847_30357C.1.pep
PGGTPSPAFPPPXPPPPRGKXGSPPGPGPVFPGGPPRPAGFFGGAPSPGGVFPPPPPRGEAGPPPPGPGGSPPRGRVYPGGGPPPPPNPPPVWGGWVPPLNRTGFPPSPPSNLKACVFWGGTGHFFFFPGAPGPPLAPGYPPPFRWEGPPPLFMPPRGRGSFFADPKLPPGAHLGPPFGPKALTPKKTPPPATRPKLHIKRKTKKQ

SEQ ID NO: 208559 - protein, 61 aa, Glycine max
  Clone ID: PAT_MRT3847_30358C.1.pep
PHNHHKIKGGLDTKQPRPYRIISRRPGHLNCPTHRHLNIQDLIQIRPKKETPYTFYTSKLR

SEQ ID NO: 208560 - protein, 105 aa, Glycine max
  Clone ID: PAT_MRT3847_30359C.1.pep
GLLASSCLAHSPGAAPTQPPTTTPSPPPPRSAPAPAPTPPATPPPATPPPATPPPAAATPSPATSPPATTPTPTPTAAPTPAFSPATLPVPSASSPPAPGTPGPV

SEQ ID NO: 208561 - protein, 77 aa, Glycine max
  unsure (1)..(77): unsure at all Xaa locations
  Clone ID: PAT_MRT3847_3035C.1.pep
SHLPDGTRHHAKKARFFFKVSQVFPRATSTGLKGSPFSXARSLHVWSVLLNXAPPAGLSSPPVXMPSFIFFWVNIKS

SEQ ID NO: 208562 - protein, 107 aa, Glycine max
  unsure (1)..(107): unsure at all Xaa locations
  Clone ID: PAT_MRT3847_30360C.1.pep
IALATLTLASSMVAPVVPLFSLSACGCNIILEVTVMVVVCHWALRLXVNTQPIQQRWLLLAGRGGGYTWWLYYPRPILWLTRGQQGSVPCVKPRQRTYTRTIRTNTN

SEQ ID NO: 208563 - protein, 74 aa, Glycine max
  unsure (1)..(74): unsure at all Xaa locations
  Clone ID: PAT_MRT3847_30361C.1.pep
MNLLGILLXSNYKESEXXXGXGXGLREXVXEVKLFYLAGXEAXAXLXVXXTLLLLSRHPXWQXXAREXVFQVFG

SEQ ID NO: 208564 - protein, 35 aa, Glycine max
  Clone ID: PAT_MRT3847_30362C.1.pep
STHICVKCSVIPLNVVFLERKSLRLPLAWGLNHYV

SEQ ID NO: 208565 - protein, 41 aa, Glycine max
  Clone ID: PAT_MRT3847_30363C.1.pep
HTNIFCNCETSKQRKPVLINGLQRIHSAIRSVLNNSQTLDG

SEQ ID NO: 208566 - protein, 130 aa, Glycine max
  Clone ID: PAT_MRT3847_30364C.1.pep
PDFLPLLRASSLPYQLTAPAVALLLVFRTEASYSRFVEGKKAWTIVIAGNFAIKHALLHYIIAFPIALKCHVLYGSDVRSDLQHLLEVDDLAVVMNSKHRPRCIIEFISQSIRLLKLEESRRNALESKMT

SEQ ID NO: 208567 - protein, 60 aa, Glycine max
  Clone ID: PAT_MRT3847_30365C.1.pep
VLLTVVYTRRSDAFAAHKRYDNVLMDGKPMKIDIGGTNSGVPISARVNVTEANGSRKTTL

SEQ ID NO: 208568 - protein, 204 aa, Glycine max
  Clone ID: PAT_MRT3847_30366C.1.pep
MQGSAADGEALDFEPEDDDLMDEDGAPDADADASPPQPKLKSAITPAATSSLSAPKKTKGRGFRQDTDANRNTRLSGTDFDSLTAEGGPGPQRSIEGWIILVTGVHEEAQEDDLQNAFGEYGEIKNLHLNLDRRTGFVKGYALIEYERAEEARNAIENLNGSELLTQTIYVDWAFSSGPINESVRRKNARPPRERRSRSPRRRY

SEQ ID NO: 208569 - protein, 89 aa, Glycine max
  unsure (1)..(89): unsure at all Xaa locations
  Clone ID: PAT_MRT3847_30367C.1.pep
PLTFPGFLTPMAKKMKAPDSXKKLKKAFRVFAKDQNGFIYVHEPPHVMTTLGRNAXDREVAKMIPEANVDGAAQINNKEFVKVKMPKEW

SEQ ID NO: 208570 - protein, 70 aa, Glycine max
  Clone ID: PAT_MRT3847_30368C.1.pep
TRGQRDRLSWSVMIRLGLYNVTLSSVCVHECSSLLVPGKLLAPCNLRFALFSAFVPRKYLSPLPKPSEII

SEQ ID NO: 208571 - protein, 197 aa, Glycine max
  Clone ID: PAT_MRT3847_30369C.1.pep
MQGSAADGEALDFEPEDDDLMDEDGAPDADASPPQPKLKSAITAAAAPKKTKGRGFRQDTDANRDTRLSGSDFDSLTTEGGPGPQRSIEGWIILVTGVHEEAQEDDLQNTFGEYGEIKNLHLNLDRRTGFVKGYALIEYERAEEARNAIENLNGSELLTQTIYVDWAFSSGPINESVRRKNARPPRERRSRSPRRRY

SEQ ID NO: 208572 - protein, 56 aa, Glycine max
  Clone ID: PAT_MRT3847_3036C.1.pep
ISTKQFFFDSVGGASLDLAGMSSRQNQLIPHCHRRREFWCGVKVLHTVKNFCCFLH

SEQ ID NO: 208573 - protein, 25 aa, Glycine max
  Clone ID: PAT_MRT3847_30370C.1.pep
MLIILRNNRDQVLNTDLGCVCSVRF

SEQ ID NO: 208574 - protein, 80 aa, Glycine max
  Clone ID: PAT_MRT3847_30371C.1.pep
WHYIAVVSVIVSLRNGSPYPGCSGWSCLIKCSFWCSITILLIYHVFFFPIKKKGGGRPVSSQPLESVHLRVPANLTRIIP

SEQ ID NO: 208575 - protein, 78 aa, Glycine max
  unsure (1)..(78): unsure at all Xaa locations
  Clone ID: PAT_MRT3847_30372C.1.pep
XXXRAXWXPXRXTXCXXHLSXMXXXXXXXXXYXXHGXPCXLTSPIRXXXXXIXXXXXTLXQXAPSYNXTRXEFRXXVX

SEQ ID NO: 208576 - protein, 109 aa, Glycine max
  Clone ID: PAT_MRT3847_30373C.1.pep
AGIRHEYTTKPEIITYTTKPKIVTYTTKPEIITYTTKPKIVTYTTKPEIITYTTKPKIVTYTTKPEIITYTTKPQVVSYTTKPQLLTYGVEPQELNGLPVELSEGLAKK

SEQ ID NO: 208577 - protein, 100 aa, Glycine max
  unsure (1)..(100): unsure at all Xaa locations
  Clone ID: PAT_MRT3847_30374C.1.pep
TARDRENGETIGISIDHGYCLXRGSNTXSLYLLYWPHAKEPYCPDTIDYIKFLDAAEDINDNDSFMDGTFFVNSADILSISAMLLLKGAXRGLTMFHLMK

SEQ ID NO: 208578 - protein, 578 aa, Glycine max
  unsure (1)..(578): unsure at all Xaa locations
  Clone ID: PAT_MRT3847_30375C.1.pep
TVENAVHYKGFPSDRFKASGXIHTANILRIKMVERLEKMGITVKLVKYLISIMXLRSSHVQNIQTDFMSRSFLLCLLGGFLADSFLGRYKTIGIFASIQTLGTATLAISTKLXGLRPPPCHANNDSCKQANGFQMGILYLSLYLIALGTGGLKSNVSGLGSDQFDEKXRRRKSHMAYFFNXFFFFISXGTLAAVTVLVYLQDEVSRSLAYGICSGSMIIAIIVFLSGTKRYRDKSSLGSPIVHIFEVIAATIXKRKMQLPYNVGALYEDTPEVSRINHTEQFRFFKKAAIVAEDDFETNLCGSGPNPWKLCSLTRVEEVKMMVRLLPVWATTIIFWTIYAQLITFSVEQASTMERNIGSFQIPAGSVTVFFVAAILITLAVYDRLIMPLWKKWNGKPGFTDLQRIAIGLVFSIFGMAAASVCERKRLSVAKSVSGGNQATTTLPISVFLLIPQFFLVGSGEAFIYTGQLDFFITRSPKGMKTMSTGLFLTTLSLGFFFSSFLVSVVKKVTGTRDGQGWLADSINKGRLDLFYALLTILSFVNFAAFAVCAVWFKPKKPKQPAAMQMGPVNGSTAEEKC

SEQ ID NO: 208579 - protein, 63 aa, Glycine max
  Clone ID: PAT_MRT3847_30376C.1.pep
QSKSHQRPATMVREGVGKREKAPSESRYRSPEKRVKQKSPPRTYKRSPPQWRTTFVIPSPTIM

SEQ ID NO: 208580 - protein, 178 aa, Glycine max
  Clone ID: PAT_MRT3847_30377C.1.pep
MSNVVACVEDNALAHSESIKKQEDADCSNHSEEKATKKPRKKSSSSIKLTKPSKGQVAANEKETEKMLDCESNSKIVHSSPPEDHSVEAAGPSENDKGIDAKISSPMACNDDSEVVASPPSESLCDENHSKKLGRTKKKDGPVKEGTAEDVSKVTASDSEAKPASRSVKKALGQKADV

SEQ ID NO: 208581 - protein, 150 aa, Glycine max
  unsure (1)..(150): unsure at all Xaa locations
  Clone ID: PAT_MRT3847_30378C.1.pep
EESFKEHTTLNXXQKLAXAKQLNLXXRQVEVWFQNRRARTKLKQTEVDCEYLKRCCETLTEENRRLQKELQELRALKSSQPFYMQLPATTLTMCPSCERVATNSTTTNQTSIVNNNASSQIPVELSLSKPRILPFPNGQVQAQAHQIASS

SEQ ID NO: 208582 - protein, 368 aa, Glycine max
  Clone ID: PAT_MRT3847_30379C.1.pep
NFREHHPENVEKKKKEKKDTDGKTDAKKHSAKKLDENKKGSGGPSSRQMEEKKKVRQGKANSETDVAKSSALDVDKEMVSSLRSGTKSTKNENSEETPKTNVKRKHSSGKENESNAKEYGQNLVGLRVKVWWPDDREFYKGVIDSFDSAKKKHKVLYDDGDEETLNLVKEKWKVIEADSDADEEERSDRADLDVSTDMPLKKKGKTSAGESTKQGKMDASSKSSGAAASNRSKGASTKSSQKSKDGNKSKDSKANSKSEDKVSRKSKDGTPKSGSSKSIVAAKKMSNKLKNTDTSSESKDDDSSKPKPPAKSKHETLKSGKSKQETPKTALSKVKHVKSGGKTDVNGTSKVKSGLSKRKYFENENSAV

SEQ ID NO: 208583 - protein, 131 aa, Glycine max
  unsure (1)..(131): unsure at all Xaa locations
  Clone ID: PAT_MRT3847_3037C.1.pep
MWRHFVGDLDFEVSKMTSPYIKCTVSFFIALGNLADEHLPNTRVGGTILRGDLSANSLTEGNVTASGDLQCTPRIIGMINMEATEGIPDNTGLASACAMNSPFRGRASYXFYTIRPVDWEYLYPACPTPTT

SEQ ID NO: 208584 - protein, 183 aa, Glycine max
  Clone ID: PAT_MRT3847_30380C.1.pep
WRQPSNNNTSYKRFPSEPTKKNCGADSDADEEERSDRADLDVSTDMSLKKKGKASAGESTKQGKMDASSKSGGAAASNGSKGASTKSSQKAKDGNKSKGSKANSKSEDKVSRKSKDGTPKSGSSKSIVAAKKMSNKLKNTDTSKTSESKDDDSSKPKPSAKSKHETPKSGNPSKKHQDCPFQK

SEQ ID NO: 208585 - protein, 44 aa, Glycine max
  Clone ID: PAT_MRT3847_30381C.1.pep
KRIIGFRKVLYEQGIVMVTEKGNADNHLVLGRCEEEDQGPARFR

SEQ ID NO: 208586 - protein, 234 aa, Glycine max
  Clone ID: PAT_MRT3847_30382C.1.pep
MLGVATLTLGSSTTMVAQNHAQQHATTLASANGNRRHSVSNRTHSLPMSLVSPTNQSFTFLSSFKEPTHARPFTTAVASVDSDQLDSSDPPTKNEASKYYFLVANAKFMLDEEEHFQEQLFERLRLFGERNQEQDFWLVIEPKFLDKFSNITKRLKRPAVALVSTNGPWITFMKLRLDRVLSDCFEAESLEEALAFNPTDLKFEKPEKWVAPYPKYESGWWKPFLPPVQTEVKP

SEQ ID NO: 208587 - protein, 203 aa, Glycine max
  Clone ID: PAT_MRT3847_30383C.1.pep
MGSTDKELEEQLLEAGNKLLDPPSSAEELLPLLDQVESCLSRVEQSPIDSMQNALSPSLKALIADKLLRHSDDDVKVAVASCISEITRITAPEAPYDDDQMKEVFQLIVSSFENLHDKLSQSYAKRTSILETVAKVRSCVVMLDLECDALILEMFQHFFKAISEHHPENVFSSMETIMTLVLEESEDISLDLLSPLLASIKKT

SEQ ID NO: 208588 - protein, 102 aa, Glycine max
  unsure (1)..(102): unsure at all Xaa locations
  Clone ID: PAT_MRT3847_30384C.1.pep
FQGTATLAISTKLPGLRPPPCHANSDSCKQANGFQMGILYLSLYLIALGTGGLKSSVSGFGSDQFDEKDEKEKSQMAYFFNRXFFFFISFGTLAAVTVLVYL

SEQ ID NO: 208589 - protein, 305 aa, Glycine max
  Clone ID: PAT_MRT3847_30385C.1.pep
VLADSKSIKKQEDADCSSHSEGLNLSGHEVHNDLDPEKVDTSKQKPEQATKRQRKKSSSSTKSAKPSKGQVAANEKETEKMLDFESNSKKVPSSSHEDHSAEAAGPPENDNGIDAKISSPKACNDESEVVASPPSESFSDENHSKKIGRTKKKDGDAEGVSKVSEGASDSEAKPVRRSVKRALGQKSDAKKTNVVDSVKKGSGTANDADAKKHPAKKLDENKKGRDGSSSRQMEDKKKGRWGKANSEANVVKSSAMDVDKEMVSSLRSGTKSTKNENSEETPKTNVKRKRSSGKENESNAKEYGQ

SEQ ID NO: 208590 - protein, 38 aa, Glycine max
  Clone ID: PAT_MRT3847_30386C.1.pep
SITNNPSFFHSLQVMIYETGTKKWNYVISARAARAARA

SEQ ID NO: 208591 - protein, 53 aa, Glycine max
  Clone ID: PAT_MRT3847_30387C.1.pep
KTINHFLYSTQTCKSKPNKPYKDYVPLSVRIVSINQPQLSTEQCKNVNWVSCK

SEQ ID NO: 208592 - protein, 59 aa, Glycine max
  Clone ID: PAT_MRT3847_30388C.1.pep
NYSEERALNNYIANPNISLNGSFFPSSKPSLLRLFYCFGLRRQLFINPRPLSILQKPHI

SEQ ID NO: 208593 - protein, 109 aa, Glycine max
  Clone ID: PAT_MRT3847_30389C.1.pep
KHCMQALAPGTLQAYPLHPCTPAPLQLGTSCLANGIGETCSRGVPSQHGSRHCCWRFLHGLCLTRNNGGTLQLSNVLARNNGGTLSAQQASGYCRWAGRYVADPGYDMH

SEQ ID NO: 208594 - protein, 152 aa, Glycine max
  unsure (1)..(152): unsure at all Xaa locations
  Clone ID: PAT_MRT3847_3038C.1.pep
ERVTRWWCHNLIHNTDHRIPPLTFYSISSTSTVWPKHLYYIRKCTYREWVGDREPLRDSDQGKLLIGGNSWDTTDDKLEEHLGHYRHWTSTLVXREKNNGKPEGFGLSRTARTNLLNGVLEDKHAFHSPAVEAGEDFDREDQQKTATSRGGK

SEQ ID NO: 208595 - protein, 60 aa, Glycine max
  unsure (1)..(60): unsure at all Xaa locations
  Clone ID: PAT_MRT3847_30390C.1.pep
APFSHNFHPLRQPSVYSLLRLSQDQAVKGNQVLQVSVVXRNATVARNTESTSHRACGLIH

SEQ ID NO: 208596 - protein, 92 aa, Glycine max
  Clone ID: PAT_MRT3847_30391C.1.pep
AYIACKKVRKKIFCTKKRASGATLGVLALSLLPLPEKCPNKQVLRDTKTFSSQGSLEFGTKGLPLEELVLGFNGISVGPFGPVEFDESDGPT

SEQ ID NO: 208597 - protein, 239 aa, Glycine max
  Clone ID: PAT_MRT3847_30392C.1.pep
RSGIATHHVDFLQQLLDNKLNEDGVPGLTDREIKDNILTMIIAGQDTIANAMTWMIKFVDENRQVFNTLMKEQLKTEKNGSRNSYLTLEALNEMPYASKVVKEALRKASVVQWLPRVALEDCVIEGFKIKKGWNINIDARSIHHDPTVHKDPDVFNPSRFPAESKPYSFLAFGMGGRTCLGKNMAKAMMLVFLHRFITNYKWKVIDSDSSIQKRALFTKLKSGYPVRLISKKDAKNKTM

SEQ ID NO: 208598 - protein, 38 aa, Glycine max
  Clone ID: PAT_MRT3847_30393C.1.pep
FNNKGGSKSYPAGKNSQIFQISRDWWILYSLKDTTPKL

SEQ ID NO: 208599 - protein, 201 aa, Glycine max
  unsure (1)..(201): unsure at all Xaa locations
  Clone ID: PAT_MRT3847_30394C.1.pep
YLSSTSVYGDCDGELVDEDYPTNPXSGLAKLRLASEEGWSNLAHNLGISPLLFRLGGIYGPGRSAVDTIIKQKPMSEGQKRRKNRKYTSRIHVDDICQALMATVLAPPPREVYNIVDDDPAPREEVFEYAMKLVEKKWPGLKLQSVEQKQKEWPNAKNPRGEKRVCNARMKRELGVQLLYPDYKSGLKSIIHQIQTPFQSH

SEQ ID NO: 208600 - protein, 62 aa, Glycine max
  unsure (1)..(62): unsure at all Xaa locations
  Clone ID: PAT_MRT3847_30395C.1.pep
MDMMVGKPAYFSIRXALLSVPTTTLVYRDICISGSCSICESFEVKVHVXXNLXXGCDHLXXG

SEQ ID NO: 208601 - protein, 75 aa, Glycine max
  Clone ID: PAT_MRT3847_30396C.1.pep
GSRVDFGFISVGFQKITVGFGTRGKKGIKTCCFLKKGRSFFFRRGGAATHGRPATAPVNSFRRCVVRERRELLSV

SEQ ID NO: 208602 - protein, 79 aa, Glycine max
  Clone ID: PAT_MRT3847_30397C.1.pep
KTNKKMGALFLGALLSIPCTGPLYFFYWAYKNPGGGGGIYIASPFTPLGCPKLDKSRTAPLSQGGGKLKRARPTPFTNR

SEQ ID NO: 208603 - protein, 115 aa, Glycine max
  unsure (1)..(115): unsure at all Xaa locations
  Clone ID: PAT_MRT3847_30398C.1.pep
FPDWKKGKESKVNDERLGPHKGTQGATPVGFRGESLRTRKGKPPPPERARAKKKTGGLKSATPLGGTPAGSSRAPGPSYFIFRAFLFISFLCFVCPVPSFIYFFXFFVSSPSFXX

SEQ ID NO: 208604 - protein, 103 aa, Glycine max
  Clone ID: PAT_MRT3847_30399C.1.pep
MHGFSHVDGFVEISNCLAEMIKYAANEPSAGLFFIQHHTQNAVPNVIKLKNNIIDKSHETTLQTEDLEDSVAMVRSMKECGFPIADEMIGDIKKSLVIMTASI

SEQ ID NO: 208605 - protein, 55 aa, Glycine max
  Clone ID: PAT_MRT3847_3039C.1.pep
KPKGKNIINVILKQVVIHEYILSRNFWQTKLVRPFKGKLLHLYRNKGNFIIQLCH

SEQ ID NO: 208606 - protein, 337 aa, Glycine max
  Clone ID: PAT_MRT3847_303C.1.pep
MATIKPTGKKACVIGGSGFMASLLIKQLLEKGYAVNTTVRDPDNTKKIPHLLALQSLGELNIFGADLTGEKDFDAPIAGCELVFQLATPVNFASEDPENDMIKPAITGVLNVLKACVRAKGVKRVILTSSAAAVTINQLKGTDLVMDESNWTDVEYLSTAKPPTWGYPASKALAEKAAWKFAEENHIDLITVIPTLTTGPSVTTDIPSSVGMAASLITGNDFLINALKGMQLLSGSISITHVEDICRAQIFVAEKESASGRYICCAHNTSVPELAKFLSKRYPQYKIPTEFDDCPSKAKLIISSEKLVKEGFSFKYGIEEIYDQTLEYLKSKGALNN

SEQ ID NO: 208607 - protein, 54 aa, Glycine max
  Clone ID: PAT_MRT3847_30400C.1.pep
FPFKIFKKPVHALDPTGYQLFQIPLNLGERVLVQANLKIDILDPGSLILFSKPP

SEQ ID NO: 208608 - protein, 63 aa, Glycine max
  Clone ID: PAT_MRT3847_30401C.1.pep
AVYIPLPDIFSAVYLLQGAGVLISASKLWEQLALVLQNGAGGGVYYRCSYRAHHGFGVIGYGY

SEQ ID NO: 208609 - protein, 84 aa, Glycine max
  Clone ID: PAT_MRT3847_30402C.1.pep
GSRSIKSLEEEKKWSKEQKWEMISRVWVEMLCHAASQCRGFHHAKQLSRGGELLTHVWFLMAHLGITEQFQISQGHARAKLIHS

SEQ ID NO: 208610 - protein, 76 aa, Glycine max
  Clone ID: PAT_MRT3847_30403C.1.pep
SLQLPMCMLHLKWIKCSESSLIYVSALKEFICHFHLIGTLSKSATIGIKSRFVFEYVEIVYKNEFHVHCEQYGLYQ

SEQ ID NO: 208611 - protein, 111 aa, Glycine max
  Clone ID: PAT_MRT3847_30404C.1.pep
MAPKQDPKPKFQEGERVLCFHGPLLYEAKCVKVAIKDKQVKYFIHYSGWNKNWDEWVPESRVLKYVDANLQKQRELQKANQEQYAEGKMRGAAPGKKTSGLQQKNVEVKTK

SEQ ID NO: 208612 - protein, 48 aa, Glycine max
  Clone ID: PAT_MRT3847_30405C.1.pep
SNLSTQKLCNSLNLSSLYFQTCPSYLLLQYFTLYFSLPIKCCTCMLDL

SEQ ID NO: 208613 - protein, 87 aa, Glycine max
  Clone ID: PAT_MRT3847_30406C.1.pep
IRECSLSFDIYCHSTSNINSNFIYCDELHFHVSVKHLLFNCYTLPVLHDKYEDHLDSFGSKSIANINNQYSNDDANVLIKIPIRPLK

SEQ ID NO: 208614 - protein, 82 aa, Glycine max
  Clone ID: PAT_MRT3847_30407C.1.pep
RKKTPQGDGANKQAFGVVTKTRHGCSIVISRAPGAVATIQPHGDASNIIDLCYSHLQTRYRSCRLHCDYMLIVQLNSYSILL

SEQ ID NO: 208615 - protein, 279 aa, Glycine max
  unsure (1)..(279): unsure at all Xaa locations
  Clone ID: PAT_MRT3847_30408C.1.pep
MGRAPCCSKVGLHRGPWTPREAFKYHVSSFFKIIFTNXSLPKTAGLLRCGKSCRLRWMNYLRPDIKRGNITPEEDDLIIRMHSLLGNRWSLIAGRLPGRTDNEIKNYWNTHLSKKLRNQGTDPNTHDKLTEAPEKKKGRKKNKQKSTENNKGSEKTLVYLPKPIRVKALSSCIPRTDSTLTLDSNSATTASTSQEKVQSPEAETKEVNMVWGVSDNIGDNGGIGIFFGEDHDLVNSASYMECYSDDHDTLEKLYEEYLQLLNVEEKPDELDSFAQSLLV

SEQ ID NO: 208616 - protein, 252 aa, Glycine max
  Clone ID: PAT_MRT3847_30409C.1.pep
MMAASSSSATVAVEKATSDLLMGPDWTMNIEICDSINSNHWQPKDVVKAVKKRLQHRSSRVQLLALTLLETMVKNCGDYVHFQIAERNILEEMIKIVRQKADMQVRDKILILLDSWQDAFGGPGGKHPQYYWAYEELKRSGVVFPKRSPDAAPIFTPPPTHPNLRNMQAGYGMPSNSSKTLDETMATEIESLSLSSLESMRHVLDLMSDMLQAVNPGDHAAVKDEVIIDLVDRCRTNQKKMMHMLTTTGDEE

SEQ ID NO: 208617 - protein, 99 aa, Glycine max
  Clone ID: PAT_MRT3847_3040C.1.pep
PRTGGVPFPFWDGPFLERPVGGALFGIPPGGKRGFFFKGLKLGNPRVFPVGGFLKAAPGFAFGGPCEGVIRWKVGGGKLGIGGGGIFFLIKIWGKNQAV

SEQ ID NO: 208618 - protein, 98 aa, Glycine max
  Clone ID: PAT_MRT3847_30410C.1.pep
ESVFKYDRHHHTAVARFSSLYFSKPTGDLKSVVNDTIHDPDHGARRIMVGYINNVGIRNDEELVVDVNVAYIGYYRFIRKADSLLIDTVMHCASSSDG

SEQ ID NO: 208619 - protein, 52 aa, Glycine max
  Clone ID: PAT_MRT3847_30411C.1.pep
LTYFFGLQMVTPNDVWDNSFFSMVGVVNLIWVISLGISRNFPLQTPTFLDCH

SEQ ID NO: 208620 - protein, 273 aa, Glycine max
  Clone ID: PAT_MRT3847_30412C.1.pep
LKNSESPGNSSNNLPLSMNRSPSTSVTPIPDKYCCLSREDVLRFIIGCLGALAPLPLTSIAALEAINSNYNYIESSTPAIEATQKLPQDPSAVAVIESTSDGQCKIIGEISACKLWKCDYLSAAWALANLSAGQFVMGVEDNVTPRSLPQFSLDLASGENDLANGGGSRKPRKFSSRSVGFFSNTASHSFGSRSMYRGRSAPLTCKITSSLAAVLAQMLSHRATHVWVTEDENDEVLVGVVGYADILAAVTKPPTTFIPANRSTEGFGNEIQC

SEQ ID NO: 208621 - protein, 58 aa, Glycine max
  Clone ID: PAT_MRT3847_30413C.1.pep
WLDAIHRATHVWVTEDENDEVLVGVVGYADILAAVTKPPTAFIPANRSTEGFGNEIQC

SEQ ID NO: 208622 - protein, 65 aa, Glycine max
  Clone ID: PAT_MRT3847_30414C.1.pep
RAAKMADEGAGAVSDVCEIDWQTISLNEDQPTLPSKQSDDYYIDSEAANAEDPRREGINYGLPYD

SEQ ID NO: 208623 - protein, 54 aa, Glycine max
  Clone ID: PAT_MRT3847_30415C.1.pep
KADNECSASNVSYAPSIDAPGFTQYAPEYVCCVRTVTESSLGTVSSYGHNHAQL

SEQ ID NO: 208624 - protein, 122 aa, Glycine max
  Clone ID: PAT_MRT3847_30416C.1.pep
MSEDAKKNIAGALTARPNSDDQKPSPLPSPAPAVPPKKVIIKSADMIPDMQKEAVDIAVAAFEKYNVEKDVAEQIKKEFDKRHGPTWHCIVGRNFGSYVTHETNHFVYFYLDQKAVLLFKSG

SEQ ID NO: 208625 - protein, 53 aa, Glycine max
  unsure (1)..(53): unsure at all Xaa locations
  Clone ID: PAT_MRT3847_30417C.1.pep
TRAALTASPIVILSGGVXTNVLALGTDCRFDTKVWELTKFYAGLTLTKDHMAA

SEQ ID NO: 208626 - protein, 88 aa, Glycine max
  Clone ID: PAT_MRT3847_30418C.1.pep
LGPSPFSYFWRHSRGNGHASPSGWPGSIPLCTAGSSHGSKVNGHSCGHLSVVDQFEGRIMPPVGHGLACVFSRIPLMSRLRSPSRCEG

SEQ ID NO: 208627 - protein, 41 aa, Glycine max
  Clone ID: PAT_MRT3847_30419C.1.pep
NHVWNSAGSFPSLYYTDIFIHPPFYFPLKWSPLLNKFIGLE

SEQ ID NO: 208628 - protein, 159 aa, Glycine max
  unsure (1)..(159): unsure at all Xaa locations
  Clone ID: PAT_MRT3847_3041C.1.pep
KRRDAEQWMSHRLLPDGLRERIRRYEQYRWQETRGVDEDNLIRNLPKDLRRDIKRHLCLALLMXCPMFEKMDEQLLDAMCDLLKPVLYTEESYIVREGDPVDEMLFIMRGKLLTMTTNGGRTGFFNSEYLKAGDFCGEELLTWALDPHSSPNLPTSTRT

SEQ ID NO: 208629 - protein, 106 aa, Glycine max
  Clone ID: PAT_MRT3847_30420C.1.pep
TGAPPIFWIKKRALFLVGTYQPPFFWYKEKKPDGKVCIHNSPESNFPTAEFKIGRGPPPIPLSARGVSKVALPLEEFSLHGTKVKIEAGPPGGLGPINIHSGAWIT

SEQ ID NO: 208630 - protein, 176 aa, Glycine max
  Clone ID: PAT_MRT3847_30421C.1.pep
LSLEDWLHSSAPADIYVLGFQEIVPLNAGNILGTEDNGPARKWLALIRKTLNSLPGTSGECHTTSPLPDPIVELDADFEGSMRQKTTSFLHRRSFQSLSHSMRMDNEMSLPQACLDRRLSVCDRMMFGHRTSDYDPSYRWASSDDENGPSDSPVVTHYSPMTYRCSFSMGDRDRQT

SEQ ID NO: 208631 - protein, 89 aa, Glycine max
  Clone ID: PAT_MRT3847_30422C.1.pep
HRNILISCPWLVPDPNKQINNNSIGSRCKTAPWNFTSQFPQSTTAKKFILTYKNINSQIQLHYHSFFLDIVNKFSAGNLSCSFVKPTRT

SEQ ID NO: 208632 - protein, 174 aa, Glycine max
  unsure (1)..(174): unsure at all Xaa locations
  Clone ID: PAT_MRT3847_30423C.1.pep
DLSKPISQICAQRSVSCIIEPKHDAGAVICDSDXSXQLKSAAYFAPKKMEGALQDEVPTLMSGAGHDAKAISPXTKGGTPLVRCPRGISPPPQEHVLXXDFFIFFFFKCQKTPGPPAPPGPPPPPRKKKEDFSPPTSFFFIPLCSHSCAIQFLVLVIPVIRKRLQVVYHVFCPC

SEQ ID NO: 208633 - protein, 111 aa, Glycine max
  unsure (1)..(111): unsure at all Xaa locations
  Clone ID: PAT_MRT3847_30424C.1.pep
QHLSRTNVLQQRLRQHTLSNQQSQTSNHSMHQQDKVGGGGGGSVTVDGSMSNSFRGNDQVSKNQIGRKRKQPGSSSGPANSXSGTANTTGPSPSSARSTASTHTPGDVISM

SEQ ID NO: 208634 - protein, 336 aa, Glycine max
  unsure (1)..(336): unsure at all Xaa locations
  Clone ID: PAT_MRT3847_30425C.1.pep
TISPSKRSTIEKKMDYIIYTLFTVLILISFISSIGFVFKTKYQTPKWWYLRPGNIEYQFDPGKLGLAGMSHLITALILYGYLIPISLYVSIEFVKVLQATFINQDIQMYDDESGTPAEARTSNLNEELGQVDTILSDKTGTLTCNQMDFLKCSIAGTAYGVRSSEVELAAAKQMASDLEEQELNLSNFPMRKESNVPWENITEDEETELGTAVTSKDDGARRPAIKGFGFEDDRLMNGNWLKEPNADVLLLFFRILAVCHTAIPELNEETESCTYEAESPDEGAVLVAARDXGFEFYRRTQSSVAICERFSASGQVVQREYKXLNLLDFTSKRKRM

SEQ ID NO: 208635 - protein, 73 aa, Glycine max
  Clone ID: PAT_MRT3847_30426C.1.pep
GLEFDTAIVVKRIRFGWRRGSGMMKASDEGLLLLVTVVSDYPMSTEAEAIWDVDLVVITWRGLKILIKRLGFP

SEQ ID NO: 208636 - protein, 43 aa, Glycine max
  Clone ID: PAT_MRT3847_30427C.1.pep
LNINGLMLRSMLRFLHFPLENPLHKSNHPLILVFSFIVTKYDS

SEQ ID NO: 208637 - protein, 53 aa, Glycine max
  Clone ID: PAT_MRT3847_30428C.1.pep
IRARQTLSDTRENPTPIPTLSPDIKHRQKPYFTSSEIGYKDHTMPWRSGNPQF

SEQ ID NO: 208638 - protein, 412 aa, Glycine max
  Clone ID: PAT_MRT3847_30429C.1.pep
MGASGRWFKSLLPFRKTSTDQEKGGDNKSKKKRKLWRASSEGSMKKVGGGGGGAAAASDSSLTYAVAVMVPKDFKLIKQEWAAIRIQAVFRAFLARRALRALRAVVRLQAIFRGRLVRKQAAVTLRCMQALVRVQARNSARGCEKTTEGKAVQKLLDEHRNQADPFNQIEQGWCDIPGTVDEVKAKLQMRQEGAIKRDRAMAYSLSTQSRLCASPNPKATKAMTPLKNNNLSNKSLGYSLLERWMEAKPWESPISRKSEGLVPAFQSRRNGMTTRVSVKPIITSQSTSSSSAISSEYMCDDNSPVSTSYTSGSPSLPSTHTALVEATEERDAHQPSYMSLTESTKAKLRACRSSSQNSKRLVMEDSVSHSTTTGLMNGDTRSCSDSDPSVNLWKDSCATTLRASYQKRQIRI

SEQ ID NO: 208639 - protein, 60 aa, Glycine max
  unsure (1)..(60): unsure at all Xaa locations
  Clone ID: PAT_MRT3847_3042C.1.pep
AIYPRYKIEXLAFKYQASSFWRLAQRCSPDWHXSLIGSIGSVVSGPLSAFIAYVLSAVLS

SEQ ID NO: 208640 - protein, 83 aa, Glycine max
  unsure (1)..(83): unsure at all Xaa locations
  Clone ID: PAT_MRT3847_30430C.1.pep
IHDLDVNESNYLSLGLLMRXLSRNCAXCSMKRIHVTASTHIPYNLHAVLIHPNNXDTCIVIQLILISEHRPYFISLSNNKGFH

SEQ ID NO: 208641 - protein, 146 aa, Glycine max
  Clone ID: PAT_MRT3847_30431C.1.pep
MIMILVKLVKLAFVTGIWPMHGSTKYRNASRMLGDQLALASVEMSKPHFDTSKFAKALAFSEDIGGSSILFLPCSMYNWTLPEGAGQFHGMPLDVKIYATHQLEFLEVADLIFESCRKAESTPNNLWEHLLFYLLVAPSSYWEGLF

SEQ ID NO: 208642 - protein, 94 aa, Glycine max
  Clone ID: PAT_MRT3847_30432C.1.pep
MHGSTKYRNASRMLGDQLALASVEKSKPHFDTSKFAKALAFSEDIGGSSILFLPCSMYNWTLPEGAGQFHGMPLDVKIYATHQLEFLESCRPHF

SEQ ID NO: 208643 - protein, 54 aa, Glycine max
  Clone ID: PAT_MRT3847_30433C.1.pep
RCIYVNTCFLFSSMHSIVLLVLLFLYKCIRIRILYFHIGLIWITFLINIYRKGK

SEQ ID NO: 208644 - protein, 136 aa, Glycine max
  unsure (1)..(136): unsure at all Xaa locations
  Clone ID: PAT_MRT3847_30434C.1.pep
HASGIDYDACSVANDCGSLFVAQAGNHIQIGGFHGAGSKCRLGYASLMPYVEPDAQAQSAVAHCDFFPVEAVCHEGVAYIGESXSEAYVPPATNTNSWVSPTDWQLVLPCDXMPRDLTTTDERLVRTDHEVYDPFL

SEQ ID NO: 208645 - protein, 122 aa, Glycine max
  Clone ID: PAT_MRT3847_30435C.1.pep
IINAAELAAYDQVKQTILKIPGFTDNVVTHLLAGLGAGFFAVCVGSPVDVVKSRMMGDSSYKSTLDCFVKTLKNDGPFAFYKGFIPNFGRLGSWNVIMFLPLEQAKKFVKPLESACLQPNYQ

SEQ ID NO: 208646 - protein, 63 aa, Glycine max
  Clone ID: PAT_MRT3847_30436C.1.pep
SHGVESDPRKGLRFSYFYFINIVLFAGEKLLKTNCKIYVSSMELGFFLHKSFIYVMQALSIHS

SEQ ID NO: 208647 - protein, 184 aa, Glycine max
  Clone ID: PAT_MRT3847_30437C.1.pep
MGLWESFLNWLRSLFFKQEMELSLIGLQNAGKTSLVNVIATGGYSEDMIPTVGFNMRKVTKGNVTIKLWDLGGQPRFRSMWERYCRAVSAIVYVVDAADPDNLSISKSELHDLLSKPSLSGIPLLVLGNKIDKPGVLSKEALTDQMDLKSITDREVCCFMISCKNSTNIDSVIDWLVKHSKSKS

SEQ ID NO: 208648 - protein, 80 aa, Glycine max
  Clone ID: PAT_MRT3847_30438C.1.pep
LSIFLFFINCKILCTMIPLLEHSKIETLIHSYIKYEISRGLKMNIKVYIIFSLLYSFIFFDVKSLLYQKSKTLSNDIQFS

SEQ ID NO: 208649 - protein, 87 aa, Glycine max
  unsure (1)..(87): unsure at all Xaa locations
  Clone ID: PAT_MRT3847_30439C.1.pep
MDCTRKLTHLNPGPSDIAIGQAIEPIPISRIAXGAGILPEELRLYGNTKGKVALTVLDRLHDRPNGRYVVVTGINPTPLGEGKSTTS

SEQ ID NO: 208650 - protein, 78 aa, Glycine max
  Clone ID: PAT_MRT3847_3043C.1.pep
APSKLLYHCATLWPKRLHTVVCIVVQTLVPVQPTVIILATRVRVKLTGYAPKAPLLCYYAYKFAARCANTYTGKCPTE

SEQ ID NO: 208651 - protein, 81 aa, Glycine max
  unsure (1)..(81): unsure at all Xaa locations
  Clone ID: PAT_MRT3847_30440C.1.pep
LLIXXKXKGETKMMXDDRYLVXGXXLCXXCXTERTWFXXXXRPSSXFREXLHXXTPXMPERSFQXETXRPNXTQMQXQIXM

SEQ ID NO: 208652 - protein, 120 aa, Glycine max
  Clone ID: PAT_MRT3847_30441C.1.pep
TKLFFFFSFFFTMELALSLGDTSKSFTFLDKAAVNLPTNKDPPGLFSLAPSFAATAAAADKRSDAAERRGFSSDPPVQLDLLPFSPVLRPQQQPPSQLRIPWLTEACGAARVLDVNLFRA

SEQ ID NO: 208653 - protein, 80 aa, Glycine max
  Clone ID: PAT_MRT3847_30442C.1.pep
LSRVKELRSSRFIDKHFGSHPSGLSMPLSTHSTVHQRLLTYALALTHRDLPLAVLISSLEGMLTFSRLIKSEPKILGLIL

SEQ ID NO: 208654 - protein, 44 aa, Glycine max
  unsure (1)..(44): unsure at all Xaa locations
  Clone ID: PAT_MRT3847_30443C.1.pep
TYGTHSQEMHLDLHENEIDIHLLVCYFLLQRSHSSNCFHXNLSN

SEQ ID NO: 208655 - protein, 151 aa, Glycine max
  unsure (1)..(151): unsure at all Xaa locations
  Clone ID: PAT_MRT3847_30444C.1.pep
LLVLTFTRAXFSGLAPVCHFPRTXPSVPPPKKCLTSPHTTHKDLHLYLVAVCLHGWGILLWTELPPSQHTLFLSLTLTPSHGIPAMANPPTLSLSFFQLPAPTSALPIVLVAGMAPLFPVGSPGPSSLPSVIFLGVGGIMIAWVVAVRVAA

SEQ ID NO: 208656 - protein, 128 aa, Glycine max
  Clone ID: PAT_MRT3847_30445C.1.pep
IAPLVKVSGFKTVFRQNADPRKVKNISKAEMFRFSHQVPSHWLTGVEGHNAPKGCLELDPAATPMELLQVLAEDLEQVILMTTEKSVEDELKHKENSREEGLIKMCQTTKDECSDERWEKKKGSLRAA

SEQ ID NO: 208657 - protein, 98 aa, Glycine max
  Clone ID: PAT_MRT3847_30446C.1.pep
TMTKQGHYGDPSAHTRVGGGHMHNMDGRRGEAQSDNSERRLEAFTPERENPYGKPTPEGHWRWEMDESLMFISVDSGMFTRKAVKGVMLTSPIIKGRA

SEQ ID NO: 208658 - protein, 42 aa, Glycine max
  Clone ID: PAT_MRT3847_30447C.1.pep
FLLIFNDCTKHGAPVGWSNYARFMGWSIWRAQPTCFGASCQC

SEQ ID NO: 208659 - protein, 106 aa, Glycine max
  Clone ID: PAT_MRT3847_30448C.1.pep
MAGSTINRGERWALNGMTALGTDGTRGIGHCIVSDSVACGAEVHTWFKTQTELIKSLPQWQRLESQATVPLCDMYLPPLREKLIHDAAFAFDGMLNMYMNSVGINI

SEQ ID NO: 208660 - protein, 79 aa, Glycine max
  Clone ID: PAT_MRT3847_30449C.1.pep
PQVQRGKDFSPKDWATLVLKVLNPPHLFEKGMISQKSGHLKPAKSLSGDQNFFNLGWKPPSLGGGKRGASNAFGQRGAQ

SEQ ID NO: 208661 - protein, 119 aa, Glycine max
  unsure (1)..(119): unsure at all Xaa locations
  Clone ID: PAT_MRT3847_3044C.1.pep
RXARGRVTTLNLGTSAKIFHTSSIPFXCDIREHLPRGCGPKXFXYAQALIPTALIITGVAILKSLRIANALSSNNWNELDSNKQLNRSMMFAIALVHFFXTYPTTRSFSRSTANHESGA

SEQ ID NO: 208662 - protein, 66 aa, Glycine max
  Clone ID: PAT_MRT3847_30450C.1.pep
AQNIELINRYQQVEAQKDNSGGQVESLREELESELESLAQKEQKVDNIKTRIPKITGRLSQLELES

SEQ ID NO: 208663 - protein, 83 aa, Glycine max
  Clone ID: PAT_MRT3847_30451C.1.pep
GLESKGPLPVGTPPDFVVWPPNRGFAREKDYPVFPHPFGLFASMGRGFPGKVLGPFVRGTLLFKDGKPAPPPRGVPFFPQGGG

SEQ ID NO: 208664 - protein, 51 aa, Glycine max
  Clone ID: PAT_MRT3847_30452C.1.pep
QHGSCMCGIASQQSTIARGNSLLRGNQNLHMPLGFEAHSCTTTLGRQRVVL

SEQ ID NO: 208665 - protein, 47 aa, Glycine max
  Clone ID: PAT_MRT3847_30453C.1.pep
RPKICCDQAKLFPVRSSWTICSECQVSKIRFPTWLSGFVPGTSEKKR

SEQ ID NO: 208666 - protein, 45 aa, Glycine max
  Clone ID: PAT_MRT3847_30454C.1.pep
SENSGVKSYASSALAAALATEVEMARRLSLRLILMDQLRGLGKKM

SEQ ID NO: 208667 - protein, 44 aa, Glycine max
  Clone ID: PAT_MRT3847_30455C.1.pep
PRVRPTRPRLFDTWIRDLVGYIERNADLPLARNQQSFCKASCRY

SEQ ID NO: 208668 - protein, 51 aa, Glycine max
  Clone ID: PAT_MRT3847_30456C.1.pep
VSRGPSICSVLMGDHAKKHGLIHVVVVEVTGFSFYALAVGQGLYNQSIFRL

SEQ ID NO: 208669 - protein, 714 aa, Glycine max
  unsure (1)..(714): unsure at all Xaa locations
  Clone ID: PAT_MRT3847_30457C.1.pep
SRGRPTRPGFRADVIVVDAEKDRRLSMLKQLIVALVRGLNSNPPAMIKKIAGLVSDFYKPPNVESPAKAALEESCNMFENRGVQMLGQIRHGSCCPRAILFKVLADSVGLESRLMMGFPNDGAAECVDSYKHMSVIVVLNTVELLVDLMRFPGQLLPRSTKSILMTHISAAGESDSAENXSCDSPLEPNSPLYGVSESVEKEENLQFHRRFEVSSNVSGXPCDMMLRSNTSLDRNLSFSHSEPNIATAFGRRSRRKVIAEQRTASSSPEHPSLRAHGRSKLSGDRTAFRDFADDQSTLRSSYKSDGASSSEARRIRRRSISITPEIGDDIARAVRAMNETLKQNRLLREQGGDSSLSHSPIDRTSSSDLQKNVSNFHLDNHHGEVPLIXRDPVTSQKAMSLPSSPHDYRGQASERSKASEYILNDELEFTWNKILESPMFSNRPLLPYEEWNIDFTELTVGTRVGIGFFGEVFRGIWNGTDVAIKVFLEQDLTTENMEDFCNEISILSRLRHPNVILFLGACTRPPRLSMVTEYMEMGSLFYLIHVSGQKKKLSWRRRLKMLQDICRGLMHIHRMKIIHRDVKSANCLVDKHWIVKICDFGLSRIVTESPTRDSSSAGTPEWMAPELIRNEPFTEKCDIFSFGVIIWELCTLNRPWEGVPPERVVYTVANEGARLDIPDGPLGRLISECWAEPHERPSCEEILSRLVDIEYSMC

SEQ ID NO: 208670 - protein, 119 aa, Glycine max
  Clone ID: PAT_MRT3847_30458C.1.pep
GPDPTPLNYRYSKKKKNSSPTSPLTRLTNLNHYPKAVPLFKIKSIRPFFSSKFQNHTQFKHSPKTLRILTEFLKPLTTTTLSQTSIQNQFTKQTGEKIAFTCNPPFCRLLAAVSSRIGS

SEQ ID NO: 208671 - protein, 68 aa, Glycine max
  Clone ID: PAT_MRT3847_30459C.1.pep
RLAKRFQNYSKKNLGWRNSLKTASKLEYLWFITQAKQFFKHRLRSFPQLGSYSYPLEPDFFPWLILSS

SEQ ID NO: 208672 - protein, 117 aa, Glycine max
  Clone ID: PAT_MRT3847_3045C.1.pep
ISSIVRLQLERVQKRIADRKMKIQVTDAAVQLLGSLGYDPNYGARPVKRVIQQNVENELAKGILRGEFKEEDAILIDTELTAFTNGQLPQQKLVFKKLAADSESTPQGTLEPFPQAP

SEQ ID NO: 208673 - protein, 99 aa, Glycine max
  unsure (1)..(99): unsure at all Xaa locations
  Clone ID: PAT_MRT3847_30460C.1.pep
KVKRKPRPDRTRKARSRPTRFXFIPERREQQREEEIANTPQTSQKGSSEPRQSRQRTLHSRTLQEKAKLRALATPTKTTWQDCLAQNTSQFLDKSCKDP

SEQ ID NO: 208674 - protein, 123 aa, Glycine max
  Clone ID: PAT_MRT3847_30461C.1.pep
QKNEKKHVDVTTMLPIGQIYVRGLILQSIYGMGSVSKEITEGVCFVEETAIATGGLAQPAIASGGKGGEKGVLSLAAAIWPRRMERERVSPMGTATHPAGAASPTGDIAHVGLAHTAGETACS

SEQ ID NO: 208675 - protein, 126 aa, Glycine max
  unsure (1)..(126): unsure at all Xaa locations
  Clone ID: PAT_MRT3847_30462C.1.pep
FRSLVLLLAAVLLSLQVLANYDNPPVYKPPTEEPPVYKRPSERPRVHTPPPGNPPIYQPSAEKPPLHKFRVDKPSVSTPPVGTPRVYMHPFEKPPGHMSSWEMPXTYKPPAEKPSVLKPSVEKPAV

SEQ ID NO: 208676 - protein, 133 aa, Glycine max
  unsure (1)..(133): unsure at all Xaa locations
  Clone ID: PAT_MRT3847_30463C.1.pep
VTLVDHSQSNIGKTEPANKVILKELKKRVREGKGIWDEEFLAILWAYRYTLQSTIGETPFXLSYGSDAMILVEVGQSSFRRTNFVEKENEEILRQSLALTKDILNKVQIRAXTYQRRAEKRYSSRVKRRNFEA

SEQ ID NO: 208677 - protein, 38 aa, Glycine max
  Clone ID: PAT_MRT3847_30464C.1.pep
NTGRPHVFRPRVCKDRDDHDPSLSLSIKSLKGKAQLNQ

SEQ ID NO: 208678 - protein, 101 aa, Glycine max
  Clone ID: PAT_MRT3847_30465C.1.pep
PTRPYGCEKTTEGGGQRLHSHTAHSVSLARIQRLLAFPSSRGPSSRRRSLRWPSEKKASLAPQFLSQTKRDLGQGSFPFFSRRTAPPVAAVAAFTVDIVAL

SEQ ID NO: 208679 - protein, 95 aa, Glycine max
  unsure (1)..(95): unsure at all Xaa locations
  Clone ID: PAT_MRT3847_30466C.1.pep
XFWXXIYIVXHXCIPFXLQLILXEXFXTPXMFCASXXXXXTXXFXXXSXXTIAXXXFXAXXIXLCXXLPXXXNXCLXXTXXXLXLDXIXXLCXXX

SEQ ID NO: 208680 - protein, 129 aa, Glycine max
  unsure (1)..(129): unsure at all Xaa locations
  Clone ID: PAT_MRT3847_30467C.1.pep
ENHKFQKDGKXGQRVEDPALGLGHITNQIKLVHNIKHVYVWHAITGYWGGVRPXVPGMEHYESKMVFPVSSPGVESNQPDEALTTIAINGLGLVNPEKSFHFYDELHSYLASFGIDGVKVDVQNILETL

SEQ ID NO: 208681 - protein, 118 aa, Glycine max
  unsure (1)..(118): unsure at all Xaa locations
  Clone ID: PAT_MRT3847_30468C.1.pep
ERSPISDDXKDKDNLTEEVVAEKKVRTNGVLETAEELGSATSTSSKPKITQRLKTRVLDFTVSLRSVEDRDIVKQGFGGNKCAELIKRPKIWSEHFCGHRIGYGAGGVCQKGGIHVIS

SEQ ID NO: 208682 - protein, 53 aa, Glycine max
  Clone ID: PAT_MRT3847_30469C.1.pep
KFFLLTTVASYIKEERKNNVRLLWLQDKILKLARIIIIISIVFNKKYYISFYK

SEQ ID NO: 208683 - protein, 45 aa, Glycine max
  Clone ID: PAT_MRT3847_3046C.1.pep
ELGIGSVILRQVALPNAEPPGEIATAKTWKTGTSSTSAIISYSLY

SEQ ID NO: 208684 - protein, 72 aa, Glycine max
  Clone ID: PAT_MRT3847_30470C.1.pep
SLVTPSMTLTRAKVEVNMPRKRKGNCSQHDRALERFYEQVVQAIQRHIHFDVVKCILVASPGFVREQFCDYM

SEQ ID NO: 208685 - protein, 95 aa, Glycine max
  Clone ID: PAT_MRT3847_30471C.1.pep
GYLISCILISFKITVEVILPGFFGFLICCLLLRVECNICIFNGTQEESESGSMSLILVMIKLAVKDLFIEVQAFCIEFSRIREAAALFRLLKSLE

SEQ ID NO: 208686 - protein, 117 aa, Glycine max
  unsure (1)..(117): unsure at all Xaa locations
  Clone ID: PAT_MRT3847_30472C.1.pep
PTLDEHNTQNAQGTLTKTLTGLFDDKRYSTILLDQERDCSGTYGMGTIYPGTLXTIKDPGELADSXNNHVDIDARIDYHLKAWMPLESYTNLYQLSGVVVVNRTRRPLFTFHPARED

SEQ ID NO: 208687 - protein, 88 aa, Glycine max
  unsure (1)..(88): unsure at all Xaa locations
  Clone ID: PAT_MRT3847_30473C.1.pep
EDFGAFIHKLQLXLPPPQPSPPKAPHPLTSXTFAXSXXFXIHGHVPRXXHAXWXRTXEPSSSXXXXXXXLVEGGATCVAILFSTISLG

SEQ ID NO: 208688 - protein, 64 aa, Glycine max
  Clone ID: PAT_MRT3847_30474C.1.pep
SRTRPTHTLLLDLQLPPFFFFLHFLLLNELFYILGLLFTIPYLHIPTTLFQTLLNSSTIFYTFN

SEQ ID NO: 208689 - protein, 106 aa, Glycine max
  Clone ID: PAT_MRT3847_30475C.1.pep
LPLLLILLLVVHKPPCGKLTHPRGCRRRIVRSPSRVPCVAHIVTRILFPLPPILFLDHLSAFSYIFCGVQAHRSATLSFPLQLAVVFFFGVGSHWAVVPLLPRSGP

SEQ ID NO: 208690 - protein, 90 aa, Glycine max
  unsure (1)..(90): unsure at all Xaa locations
  Clone ID: PAT_MRT3847_30476C.1.pep
QSSFLSPKEIVSFLHKLSQVDKQNFIPVALEEWDRKYLELLYGICADSNKYPLPLRQEVFQKVERLFMLXLRARDPEVRMIFFSLYHESL

SEQ ID NO: 208691 - protein, 149 aa, Glycine max
  Clone ID: PAT_MRT3847_30477C.1.pep
MKIIHLSGKSCCSWFLLGLLSIIASLASAAENHYHEFVIQTVPVKRLCRTQNILTVNGQFPGPTVEARNGDSLAIKVVNAGPYNISIHWHGLRMLRNPWADGPSYVTQCPIQPGGSYTYRFTIQNQEGTLLVHSHTVFLRPTGYGALII

SEQ ID NO: 208692 - protein, 71 aa, Glycine max
  unsure (1)..(71): unsure at all Xaa locations
  Clone ID: PAT_MRT3847_30478C.1.pep
MDKVSSDCPYPGCFFCVMKDFNPSKRRASVLKFFRELPCQDEDGXCLPIRGPLGHGFLLYQKTPEFIELGI

SEQ ID NO: 208693 - protein, 94 aa, Glycine max
  unsure (1)..(94): unsure at all Xaa locations
  Clone ID: PAT_MRT3847_30479C.1.pep
MGASARMVAGPHKPXSSVQILHDNCDSGSKPLQCLYGQICLISSDTAKLTGTGDVISACNEXAFPVCRPCYEYQRQDVNQSCPQCRTRCTMLIG

SEQ ID NO: 208694 - protein, 208 aa, Glycine max
  Clone ID: PAT_MRT3847_3047C.1.pep
MMGCLFACFRASGGDGEVKGTGGQLAHPSQPPATTTTSHQVQDGAGRRGRPPSRNALSAVFQREDEGSRTAQVASSWADESGERKEMDQELVHQAIIQRSCGALLQTTNNIQRALKYADSVHQKETHSGCLPVVSDDLHFMEAPKVEKCETPSRSHQSFTVPDATSSSKTNDELQTSATSLANNVKESMNENNMEALVQDEEQHQALD

SEQ ID NO: 208695 - protein, 38 aa, Glycine max
  Clone ID: PAT_MRT3847_30480C.1.pep
SNSYILLRSKFIFHMPAIRIFAEDFENMLKVRPVKCVI

SEQ ID NO: 208696 - protein, 191 aa, Glycine max
  unsure (1)..(191): unsure at all Xaa locations
  Clone ID: PAT_MRT3847_30481C.1.pep
FLIAQIYAEDIIFRATNDSLGEEFSKLMQVEFEMNMMGELKFFLGLQIKKIDXGIYIHQSKYVKELLKKFKXDNAKHMKTPMHPTIVLRLDKKSRKGDEKTYRGIIGSLLHHTASKLDIVFSVCLCAKFQKEPREVHLIVVKSIFRCLXELNLGLCFKRDKEYKLLSYCDADFTRDRVEXKSTSGSCHFID

SEQ ID NO: 208697 - protein, 273 aa, Glycine max
  Clone ID: PAT_MRT3847_30482C.1.pep
MSMLSMKGKRFVSVPVLAVILLMVFVYYCSMFVFLQDWLGLQSSPGTLNAFLFSLFASLSLFSFFSCVLTDPGHVPSSYAPDVEFSKDNAEQKKCDKCFAYKPPRTHHCRVCRRCILKMDHHCLWINNCVGYWNYKTFFVFVFYATMASIYSTIIFMSCVFQKYWDPIKGSSLKTFFVLYGTMVVGLTITLLTLFGWHVYLILHNMTTIEYYEGKRAKWLAMRSGQSYRHPFNIGAYKNITLVLGPNMLKWLCPTAVSHLKDGVSFPTLRDNS

SEQ ID NO: 208698 - protein, 154 aa, Glycine max
  Clone ID: PAT_MRT3847_30483C.1.pep
LLLTFISSWHQGRCHPPSPAATAAVCRRHFPAVISPAKPGLGSPWEARASRPTRVGNGAATRRHRPARPPARAVHAPRLRRSLGRLLLSPFQPSVSSFVTWNTTALFSPPFCSLRVSPCGSKWLPLDLFSPSPGLQPSQLLNSTGKITPHGLLP

SEQ ID NO: 208699 - protein, 63 aa, Glycine max
  unsure (1)..(63): unsure at all Xaa locations
  Clone ID: PAT_MRT3847_30484C.1.pep
ALLRSSFRPLRGSVASPIGARPPGSAMVSILFNVQRFVRERSIKVMFKHGHLVYREKQKVLXP

SEQ ID NO: 208700 - protein, 69 aa, Glycine max
  Clone ID: PAT_MRT3847_30485C.1.pep
WNDEWACHEHDHDHTLPLNPLHQRAAHTHHRRSWIHQLHSVKLHNTLNETDIIKISCGILMLSIIILPP

SEQ ID NO: 208701 - protein, 74 aa, Glycine max
  unsure (1)..(74): unsure at all Xaa locations
  Clone ID: PAT_MRT3847_30486C.1.pep
XPPKNXXPTRLXSNHEXIFFSXXFXXKPXXCICAITIFKXSIFYXGTMQXRIVSAAPNTPATPRAEFRLTYAXX

SEQ ID NO: 208702 - protein, 143 aa, Glycine max
  Clone ID: PAT_MRT3847_30487C.1.pep
FGSRSKTTERNSEQYCVTAETKDRTKGDRNKLISRMKELLRRVAATKTDERESFYDQKVLHFRRQGNIEAFPEDDQRISESPKISLTWDVETSSVHSLATWSENVQTKISHSHTYIPRRESSGITCRKENWITTDSEFVVLEL

SEQ ID NO: 208703 - protein, 120 aa, Glycine max
  Clone ID: PAT_MRT3847_30488C.1.pep
KIDMTKITKSYTAVSKPQSFASSQRFMNNKDLFAQAKHLLHKFKQINNQNSNDFQAETSISITDMTIVKYSNCTPSNHQIKQKKVRSIWNEEIERKPIKILGINYVPISKTQLNPKERHT

SEQ ID NO: 208704 - protein, 52 aa, Glycine max
  Clone ID: PAT_MRT3847_30489C.1.pep
AHSYTEKASTMKPIHPINSDTFIGSLQTPVTSNPLSAWYLPNLTAYRTADEP

SEQ ID NO: 208705 - protein, 55 aa, Glycine max
  Clone ID: PAT_MRT3847_3048C.1.pep
EKNHAGPFLDAQKSRNPQKKLLKRTPTGPEKLRTPLKNPEKGRPTGVGPPPMAPH

SEQ ID NO: 208706 - protein, 59 aa, Glycine max
  Clone ID: PAT_MRT3847_30490C.1.pep
RPSQKDNGVWHGSDRVSGGLDSRAHLPRIGFHYIYSYSSVSNEHRPRTKQVGLEVKMRK

SEQ ID NO: 208707 - protein, 64 aa, Glycine max
  Clone ID: PAT_MRT3847_30491C.1.pep
MNTNGKACNEQNSTPCMKMEMSLSPSFLCWYLRSASADKFCQHVTFVKKYADCWPFYIKSLMLA

SEQ ID NO: 208708 - protein, 117 aa, Glycine max
  unsure (1)..(117): unsure at all Xaa locations
  Clone ID: PAT_MRT3847_30492C.1.pep
CHFCRHSLCHSTECTENMPEAFKHMRLSKRTTLTADDVHAALNLINVGPIYGCGSGSPLRLKRADGHHKLXFYTEDKDVDLTDEIVSFLPKALLDTAVTCHWLAIESVQPIITEKAP

SEQ ID NO: 208709 - protein, 96 aa, Glycine max
  unsure (1)..(96): unsure at all Xaa locations
  Clone ID: PAT_MRT3847_30493C.1.pep
XNRVHALRKEADHCVKMAELIEYNLEDVDAAILAVRVALAKGMNWDDLARMVKEEKKAGNPVAGLIDKLHLDRNCMTLLLSNNLDEMDDDEKTLPV

SEQ ID NO: 208710 - protein, 60 aa, Glycine max
  Clone ID: PAT_MRT3847_30494C.1.pep
LLCVPCTISFSLWFPSHRVISTSILTILYKFEVQTLRLGCIPWVPKYFFSIGVQGANKGV

SEQ ID NO: 208711 - protein, 210 aa, Glycine max
  Clone ID: PAT_MRT3847_30495C.1.pep
MENQKASAYYENRAVQFGVVSTDWLAQAQSATVHSPPHNNDDDEEIPFSVISEFDRWRKHPDLAEAVAAIRALAAVIRSSKASTMMQLEIQLKNASDTLKCWDTTSISLTAACDLFMRYVTRTSALEYEDFNSAKSRLLERAEKFGEISFKARKIIAMLSQDFIFDGCTILVHGFSRVVLQILKLAAQNNKLFRVFCTEGRPDRTGLRLS

SEQ ID NO: 208712 - protein, 83 aa, Glycine max
  Clone ID: PAT_MRT3847_30496C.1.pep
GVNKVGSVINIIVISFSVHAKLVFPFYLSLFCGSGLTYSGEFSLCCFHPVANITPSRLFFFCPFFAIFLTYWNELEVRRFIWT

SEQ ID NO: 208713 - protein, 51 aa, Glycine max
  Clone ID: PAT_MRT3847_30497C.1.pep
FDFSGPFGGVLTSLQGLLKLNPSGAPLFFPSSFLLLYLQDLIKKMLNTIKI

SEQ ID NO: 208714 - protein, 119 aa, Glycine max
  Clone ID: PAT_MRT3847_30498C.1.pep
PRVRPRVRPRVRAKLQMQVDLITTKHGILQPTETIYVKLVKAFLEAGKTKDLAVFLLKAEREDSPFSNDNSALVHVINACISLGWLDQAHDLLDEMRLAGVRTGSSVYSSLLKAYCRAN

SEQ ID NO: 208715 - protein, 46 aa, Glycine max
  Clone ID: PAT_MRT3847_30499C.1.pep
RPHVPYQVYNTTLFLFSSQIRTLICFIMSLLITLIEEKKLLVQPIF

SEQ ID NO: 208716 - protein, 144 aa, Glycine max
  unsure (1)..(144): unsure at all Xaa locations
  Clone ID: PAT_MRT3847_3049C.1.pep
ARGVRSVLSSYRTLGKLLTVTYYSEWGVQIMAHADGLDQKKKWTCGGSACLSERGEXFCHRPSTTLLDTGEYTIYMKNAGEXELXHLEDELSSEVMFRVSSTGGQVSYSIDVAELTDVLXYVYSAREDKIQRDVGHQSYSDKIL

SEQ ID NO: 208717 - protein, 70 aa, Glycine max
  Clone ID: PAT_MRT3847_304C.1.pep
GSFLEAQLTSQLYSIASVRLKLVYRTHITFSLLPTIRSKKIPLSPLNFSLLCRFSQFQRLSFAGIHSLVS

SEQ ID NO: 208718 - protein, 65 aa, Glycine max
  Clone ID: PAT_MRT3847_30500C.1.pep
SYSDNHISKQFPTNLSRAGEPYQGLVTLTLVGPPCLYPLQSLCQDNKHFIFPFSCFSLLRPLFPK

SEQ ID NO: 208719 - protein, 85 aa, Glycine max
  Clone ID: PAT_MRT3847_30501C.1.pep
CTDHIDFMFTKFTLLVHYAYYSCFGNCEHQHSYVLIARRHYYPILPNQLNTLIVLRSFCMIIGISRILRQKLPYTYICARYLHSI

SEQ ID NO: 208720 - protein, 47 aa, Glycine max
  Clone ID: PAT_MRT3847_30502C.1.pep
GGIDIGKSWKFCTHNHSNLTHLSTRIQRRSEEQCMNFQRESKIVHLI

SEQ ID NO: 208721 - protein, 54 aa, Glycine max
  Clone ID: PAT_MRT3847_30503C.1.pep
MERMFPPKKPSTMNSHDRPMCVQGDSGLVLTTDPKPRLRWTVELHERFVDACTQ

SEQ ID NO: 208722 - protein, 62 aa, Glycine max
  Clone ID: PAT_MRT3847_30504C.1.pep
NFLLYLGRDLLNSCLEDIYILCNLLYPTILGSIHRGPILLSHKPSFDSYNGGQRVRDHPQEY

SEQ ID NO: 208723 - protein, 187 aa, Glycine max
  Clone ID: PAT_MRT3847_30505C.1.pep
MVNPSTIIPPSSEEYTVHNSIGSSSHQMPPSSNKGCGRPLGSKNKPKIPLVINQDSDLALKPIFIQVPKNVRVIEAVVQFARHCQVSITVQCASGSILEATLCQTLPDTSTFVVFGPFTLISLTGTYINNNLSASSSSLSSPSNLDHNCSFTISFCSNLGQSFNGIVGGKVIAADDVTVVVTILKEL

SEQ ID NO: 208724 - protein, 56 aa, Glycine max
  unsure (1)..(56): unsure at all Xaa locations
  Clone ID: PAT_MRT3847_30506C.1.pep
RGPWPXPMXXLKVXPIMXMXMVXXXFGVXNXFAYGEEEGRXLKGLLSWSRLWLRLC

SEQ ID NO: 208725 - protein, 47 aa, Glycine max
  Clone ID: PAT_MRT3847_30507C.1.pep
SIFVAIDCLFFSDMFMHGYCRSLSKRGVRFKTLVFSLMHRFRAVHTE

SEQ ID NO: 208726 - protein, 83 aa, Glycine max
  Clone ID: PAT_MRT3847_30508C.1.pep
SNNSDSYMNIFASLFLENVELEFTEEFRYHFLWLQDRPNKITNNSDSDMNIYATLFLDNVELEFPEEFRSHFLWIQDRLNKCN

SEQ ID NO: 208727 - protein, 69 aa, Glycine max
  Clone ID: PAT_MRT3847_30509C.1.pep
LLTHSSELYINFLLPKKRKSGDVALLCSLAPLSIDSFKSGFCIVIMTFVAAHCSGHHHRELERSIGVIP

SEQ ID NO: 208728 - protein, 69 aa, Glycine max
  unsure (1)..(69): unsure at all Xaa locations
  Clone ID: PAT_MRT3847_3050C.1.pep
MSXFKGXYHXEXXXYAAYXXTPGKGIXLAADESTGTTGKRXXSIRVENIESNRRALRXQXFTAXVFNIS

SEQ ID NO: 208729 - protein, 108 aa, Glycine max
  unsure (1)..(108): unsure at all Xaa locations
  Clone ID: PAT_MRT3847_30510C.1.pep
MGVNNAVKAGSVEVARRHVYIEERRPNSNIPSRRGXXGRGXSSYQLSEAQRGRFGPRSFCRGSGQDGGEWEYNKPKGNGFYRQSTRQERGYSSRYQGPRNGQNPAQSA

SEQ ID NO: 208730 - protein, 49 aa, Glycine max
  Clone ID: PAT_MRT3847_30511C.1.pep
DMSCPHKLCFYSRVPLPSTSLNPLIMEVGSIIWWNSSTTERFKLLYSPQ

SEQ ID NO: 208731 - protein, 74 aa, Glycine max
  unsure (1)..(74): unsure at all Xaa locations
  Clone ID: PAT_MRT3847_30512C.1.pep
NTAHHPFSAVQVHCSKIWNVSPSSFLPPPFLLLRFFTFFYCTWCLIVCKYLYYNYISFPKYFTTLNHIFNILQX

SEQ ID NO: 208732 - protein, 170 aa, Glycine max
  unsure (1)..(170): unsure at all Xaa locations
  Clone ID: PAT_MRT3847_30513C.1.pep
NWLANHNRLRKPVNRTCHTPLSIDHSATISTSITVTPCPNSDGSRQCDAPGDDKSLERSFSRCRNGSPGSLPVSRWSSSPSPSPAPTPDMRGYSLRRTQSPLWQCQPQQRQQRGTPEPLFSPDEGSESQSATHTTTWSTAHTHPGATNIVVPLAFPALGLITXPTGNTQT

SEQ ID NO: 208733 - protein, 74 aa, Glycine max
  Clone ID: PAT_MRT3847_30514C.1.pep
ASSSPKGPCRYDSHSIKIGPLSCTERHSTHYWTPAYESLDLMFSAKHSILAACKRHASLIVSSMICVEDRSLDA

SEQ ID NO: 208734 - protein, 174 aa, Glycine max
  Clone ID: PAT_MRT3847_30515C.1.pep
MASSGVAGTSTPEFYQNVVVMRHGDRIDNFEPMWVSTATRPWDPPLIQQGRVRAFATGRKFRNNLPFTLHRVFVSPFLRCIQTAAEVVVALSAIAAGDDPNVIVGDDVPIDPSKLKVSVEYGLCEMMSRDAIRLEVAPKDGNWGFDVSEREAMLPAGTVDKNVEPVYKELPKWE

SEQ ID NO: 208735 - protein, 44 aa, Glycine max
  Clone ID: PAT_MRT3847_30516C.1.pep
ASISSYTLISNIQSYISKLYGFECSYSAISVLVYLDFKFLLGKV

SEQ ID NO: 208736 - protein, 36 aa, Glycine max
  Clone ID: PAT_MRT3847_30517C.1.pep
LCLSLRLCFRDLGDADRSVVSFLFVFLGSPAARRRC

SEQ ID NO: 208737 - protein, 169 aa, Glycine max
  Clone ID: PAT_MRT3847_30518C.1.pep
RVGPIVSAGAWGAAKNGLTNNGNVYSTVVDQFAKLNKQYSILDTVEDYTRWWNDLSPRKRTGNPYTDGLIGVEANPGPNPMKKLKKEIKKEAKVVRKVIKKDKKLLKRRPGKLMTRYVPQTAPVSAPVAIGSVSRNNSHTIGRIDNCIADCVRVGAINVRGTCFSNIGN

SEQ ID NO: 208738 - protein, 198 aa, Glycine max
  Clone ID: PAT_MRT3847_30519C.1.pep
FDFASFGVSSDTLGFAVHFQTSKLQRMMKKNQSKQVNSLTTTRLSPLAKPFTLNRSTLQPCSSSPFSGYPFLESPKECDFDGFGEDFSLPSYSPLCHGKQGEGDSHESLFHKGKHAVDGVSPCPESAGTSTIVAEDLPSNSKGLMHSANESISVPLSNFKVSPLKLPITELPSAKNTSQNQSSKNLGESDSDVDSPCW

SEQ ID NO: 208739 - protein, 623 aa, Glycine max
  Clone ID: PAT_MRT3847_3051C.1.pep
TTAAASVSHCAKNVAGERLDDGFLCCGSCGRVLEDYFFAEEPSFVKNAAGQSKLSGNYVRTVQSEYSESRQRTLDRAYDEIKYLSFGLGVNDEHMAEQALTFYKIALERNFTRGRKSEQVHAACLYIAFRHNNKPYLLIDFSNYLRTDVYVLGAVFLQLCQVLRLGEHPIVQKPVDPSLFIHRYTKNLLKRGSKAVSDTALAIVASMKRDWMQTGRKPSGLCGAALYISALAHGIKCSKPDILKIVHVCEATLTKRLVEFEDTESSSLTVEELNTMAKEHEKNSMIMPGGGLKGCISKDLLCEHKEDSGVTHFALGLCEACYKDFDKLSGGLGGGLDPPAFQRAERERFKKTLPEESVDEACALANASNDQFKSHKEDLHAYVPESIGANVEHEATKDGKYDDSHREDESETLSDIDDEEVDLYIHDEEGKHIKKLLWETANREYLEEQAAKEAAAAANKKAFEANFENCSEDLLAARELAASSAEAVAKSRKEMRQKRAYEAKNTRPAQSAAEAFGQMSNKKRNLQGLKSKVNFELLNELFDEMENTDDLKKPKKVRFDLPLDNDDNIPSKVEDKNEDEMGLADEFDDEGDMGEMYQNTENMADKYFPEDGDFGYDDYDDYY

SEQ ID NO: 208740 - protein, 64 aa, Glycine max
  Clone ID: PAT_MRT3847_30520C.1.pep
SPGAWSLSVSWAVLPVFVALVRLALSCLPSSGLTAHLSSLLAWGISGFFSPFAPPSVVFSRLST

SEQ ID NO: 208741 - protein, 53 aa, Glycine max
  Clone ID: PAT_MRT3847_30521C.1.pep
GRGFPRKKGLSEKKLWPFRVILYNRQSPIKISPRVYNVRKEKKGAAIRIKLRR

SEQ ID NO: 208742 - protein, 42 aa, Glycine max
  Clone ID: PAT_MRT3847_30522C.1.pep
MLAGTPQIYEPFFLLSIRQNFGTGNLDHFFVFFFSCVHISRQ

SEQ ID NO: 208743 - protein, 84 aa, Glycine max
  Clone ID: PAT_MRT3847_30523C.1.pep
SHNLSGSITCALQFMITSLQGSLKFFTCRFYSIRIREECLKRHFQPRLRSHVPPLCIHVTSFISWFYGVSFSSLFFYDQDAPKK

SEQ ID NO: 208744 - protein, 78 aa, Glycine max
  unsure (1)..(78): unsure at all Xaa locations
  Clone ID: PAT_MRT3847_30524C.1.pep
XRRXXXRKXQCKPRXXHXIXSRISRLGXYXMLXQTQITLXCXAGTLHPQRRKXGTSXSAFXXWNELFCXXLLSHPNXI

SEQ ID NO: 208745 - protein, 77 aa, Glycine max
  unsure (1)..(77): unsure at all Xaa locations
  Clone ID: PAT_MRT3847_30525C.1.pep
XXXXIFXRXXXXQNSXLXIAXXGSXGXXRLGSKRGELPXSVXGLXKLXLKXXEFNFGVPSSNYSXTFKLFKXFXXGX

SEQ ID NO: 208746 - protein, 73 aa, Glycine max
  Clone ID: PAT_MRT3847_30526C.1.pep
WLCFFCSPLKVIKGPFIVSPLMGHPFIYENNTKFFGGLPIIPTISTKKKVPCLSFSKPPNFFEFFRKRFYNPQ

SEQ ID NO: 208747 - protein, 82 aa, Glycine max
  unsure (1)..(82): unsure at all Xaa locations
  Clone ID: PAT_MRT3847_30527C.1.pep
MSSKVSRDTLYEAVREVLHGNQRXRRKFLETVELQISLKNYDPQKDKRFSGTVRLKSTPRPKFSVCVLGDQQHCDEAKAVDI

SEQ ID NO: 208748 - protein, 114 aa, Glycine max
  unsure (1)..(114): unsure at all Xaa locations
  Clone ID: PAT_MRT3847_30528C.1.pep
PNLISPEHNPTPTWPFNRRVASLVANTIKLHRCAVGAGSGLGARMETAPAVKAPVLLHIHTKVVKNEKTNLDGHDEYIQKGSMDXSHVLPDAFKGIKQIGEIEWRSHGPGQGQN

SEQ ID NO: 208749 - protein, 164 aa, Glycine max
  Clone ID: PAT_MRT3847_30529C.1.pep
CLQFKPSKRPTFSAMLAIFLRHLQEIPRSPPASPDNGLDKGSVSNVMEPSPVPELEVPQENPNHLHRLVSEGDTAGVRDLLAKAASESGSNYLSMLLEAQNADGQTALHLACRRGSAELVETILECREANVDVLDKDGDPPLVFALAAGSPECVRSLIKRNANV

SEQ ID NO: 208750 - protein, 447 aa, Glycine max
  Clone ID: PAT_MRT3847_3052C.1.pep
GSSNNVLNSQYLKAAQELLDEIVNVRKALKQTGLEKQQSFRDIGLDGSKDSDGKSTSQSVQISSGPNGSAANSSCELSPAERQNLLDKKTKLLSMLDEVDKRYRQYCHQMQIVVSSFDMVAGCGAAEPYTALALRTISRHFRCLRDAISGQIQVTQRNLGEQEGIPRLRYVDQQLRQQKALQQLGVMRQAWRPQRGLPETSVSVLRAWLFEHFLHPYPKDSEKIMLARQTGLTRNQVANWFINARVRLWKPMVEEMYKEEFGDSEMSSNLLSSEKTLKAPRDDVQASDNKREESQDNLINVDDSVQHHGLKLDHASELDRGIQSSDHGENAMDPRIGKLQGDQRFNMNNSNNNSPYYGDGCIMASTPATYDLPELGNIAVDGHVSLALELRNCESQGFGVSNDDMHKRHKKTLASSPETDLLDYHFTDPGKQQNKFGNPHLLHEFVV

SEQ ID NO: 208751 - protein, 73 aa, Glycine max
  Clone ID: PAT_MRT3847_30530C.1.pep
TCPNASSSMKLRAFVTRECSQYELREDVRPTKGSRFVVTSGSEHSYGSQRISLFIKPHARTRSIALLERRLRN

SEQ ID NO: 208752 - protein, 40 aa, Glycine max
  Clone ID: PAT_MRT3847_30531C.1.pep
LKIKNGTRYLINVLCHNFGNNLHKCGFTCSWKNRFLNFLY

SEQ ID NO: 208753 - protein, 151 aa, Glycine max
  unsure (1)..(151): unsure at all Xaa locations
  Clone ID: PAT_MRT3847_30532C.1.pep
MWRYFGGDLVFEVPKMTSPYIKRTVSFFIAFGNLTEDTLKCEAYGHKTVQIAEIQEKVVLKCSQEEFLTAWSTQERTATTLSADGWPYXNAMEHDSSAPTIPGDYVIGDKLTTINTMCAYGLSPGISGSRFLGAMAQSISQQTXWNQMAAV

SEQ ID NO: 208754 - protein, 87 aa, Glycine max
  Clone ID: PAT_MRT3847_30533C.1.pep
LGKMSTRRWPRHVTVRGRKRRAKVCLANNNAVKVRPSLQKKLRELQGAVPGSEGMDMHTLFQSIEQYILQLEAKVTVLRCLSNLYGV

SEQ ID NO: 208755 - protein, 144 aa, Glycine max
  unsure (1)..(144): unsure at all Xaa locations
  Clone ID: PAT_MRT3847_30534C.1.pep
PAEGYLDQNGCVVYANDVXKEFNRKLNDTVVNXRTLYLDASFVYVDMFSAKYQLISNAKKEGFVDPSEICCGYHEGGNHFFCGNYNATVNGTEIYAGSCKSPSSHISWDGVHYTDAANSWIANRIVTGSFSNPQLPITRSCLLA

SEQ ID NO: 208756 - protein, 46 aa, Glycine max
  Clone ID: PAT_MRT3847_30535C.1.pep
CDRKDVVFDRGEDVSEFFSTFPGEQRETPRLLRYFLDFSPFSPHRI

SEQ ID NO: 208757 - protein, 84 aa, Glycine max
  Clone ID: PAT_MRT3847_30536C.1.pep
VKEASFKMVNVVGIRFTILPAMCKSVPPGYYGNIAGCPCYYYCMINKSVVELRRVHLCVSSTVGFTQACWPRGGIRNFRSCVYK

SEQ ID NO: 208758 - protein, 93 aa, Glycine max
  Clone ID: PAT_MRT3847_30537C.1.pep
STFNRWYKRWAKNSCLIISGGAPIHKEHRVFRREGFISLRSREGKDILLINALGGRFLFSFPQLWKKRVGFLVGQKNKEKKKKVSFTPIKQYQ

SEQ ID NO: 208759 - protein, 81 aa, Glycine max
  Clone ID: PAT_MRT3847_30538C.1.pep
EERIEKRVPRRVESESSNLCAFNSRLMGEMEEIGADVWCVYHVLLFSELQFCSMFYCHMFRGFLLLVFSDFFFCGFMICEL

SEQ ID NO: 208760 - protein, 171 aa, Glycine max
  Clone ID: PAT_MRT3847_30539C.1.pep
GKDPNGTQTTPFDYGSGHVNPVASLNPGLVYDFNSQDVLNFLCSNGASPAQLKNLTGVISQCQKPLTASSNFNYPSIGVSSLNGSLSVYRTVTYYGQGPTVYRASVENPSGVNVKVTPAELKFVKTGEKITFRIDFFPFKNSDGSFVFGALIWNNGIQRVRSPIGLNVLST

SEQ ID NO: 208761 - protein, 49 aa, Glycine max
  Clone ID: PAT_MRT3847_3053C.1.pep
VHAMCARVQFIKIADCAFFKRNNKQMYHVLQEPKEDKENLLFNVSYVLR

SEQ ID NO: 208762 - protein, 51 aa, Glycine max
  Clone ID: PAT_MRT3847_30540C.1.pep
QHQLRQPWTPTLPITDRYDYYHRVCYYICYMTLPSEIRDQIRIRQPLPDNL

SEQ ID NO: 208763 - protein, 194 aa, Glycine max
  Clone ID: PAT_MRT3847_30541C.1.pep
VYPTFVALPYLHQSNGRIIINASVESWLPMPRMSLYAAAKAALVNFYETLRFELKDEVGITIATHGWIGSEMTRGKFMLEEGAEMQWKEEREVHVMGGPVEEFARLIVSGACRGDAYVKFPSWYDVFLLYRVFAPRVLNWAFRFLISPQGTRRASSYVGTGKHIEAVGMVRPMAMLEGTSPTHTGQLISQHKLD

SEQ ID NO: 208764 - protein, 88 aa, Glycine max
  Clone ID: PAT_MRT3847_30542C.1.pep
DAFSHVFMSCFLLGTGLSSFIAIETSRRDTHIGFVKCVYVSPTRPCHNGEEVNSLWSNVFQHTFWEEIKGVIGWVSQIKYLAYPNEMN

SEQ ID NO: 208765 - protein, 363 aa, Glycine max
  Clone ID: PAT_MRT3847_30543C.1.pep
MDFLNFMLNLLVPPGSMLTLAFSWPALCFLNVCEWLYNSIYGEDIDNKVVIITGASSGIGEQIAYEYALRRANLTLVARREHRLRGIAENAKRLGARHVMIMAADVVKEDDCRRFVNETINVFGRVDHLVNTVSLGHTFCFEEVTDTSVFPVLLDINFWGNVYPTFVALPYLHQSNGRIIINASVESWLPMPRMSLYAAAKAALVNFYETLRFELKDEVGITIATHGWIGSEMTRGKFMLEEGAEMQWKEEREVHVMGGPVEEFARLIVSGACRGDAYVKFPSWYDVFLLYRVFAPRVLNWAFRFLISPQGTRRASSYVGTGKHIEAVGMVRPMAMLEGTSPTHNAIGPLTFSGQLISQHKLD

SEQ ID NO: 208766 - protein, 222 aa, Glycine max
  Clone ID: PAT_MRT3847_30544C.1.pep
MKVVYFFVVLLALASSIAFAYDPSPLQDFCVAINDTKTGVFVNGKFCKDPKLAKAEDFFFPGLGPGNTSNPLGSKVTAVTVNEILGLNTLGISLARIDFAPKGLNPPHTHPRGTEILVVLEGTLYVGFVASNQNDNRLFTKVLNKGDVFVFPIGLIHFQQNIGYGNALAIAGLSSQNPGVITIANAVFGSKPPISDEVLAKAFQVGKNVIDYLQKQFWYNNS

SEQ ID NO: 208767 - protein, 99 aa, Glycine max
  unsure (1)..(99): unsure at all Xaa locations
  Clone ID: PAT_MRT3847_30545C.1.pep
LMTLXLXDFCLSIXXLCSSYMEVXPTYLNFKSMNHMNYLPSQEGMPXSQFINMXXIXXVAFXTVLILKVYMFKCVXXCYRFXKHMDSAVEDSSXXLFLQ

SEQ ID NO: 208768 - protein, 149 aa, Glycine max
  unsure (1)..(149): unsure at all Xaa locations
  Clone ID: PAT_MRT3847_30546C.1.pep
VYSYYVTYVSPSRVQLSYSLRSRPLARRLGYDEADPLLAANVGSRVTSVRGGKGARWVVSMAIKIELELITTDLKEKKDSNMANRIRRFDNYHIISDDARLRAVILTIXHLIHNGAKVILSSHXTRTKGVTRKDRLAPHVPWLPELIGM

SEQ ID NO: 208769 - protein, 55 aa, Glycine max
  Clone ID: PAT_MRT3847_30547C.1.pep
TFTVLIVSFCEMLIDFVLTVSGVFLADAYFFHKAPDGVPANVYIGVSRLVVKPSF

SEQ ID NO: 208770 - protein, 57 aa, Glycine max
  Clone ID: PAT_MRT3847_30548C.1.pep
DVIPLKTGDFCIRAPPHSPFLTITTYIHQLFFCTHHFTINLSPTPSIFTNYFATLFT

SEQ ID NO: 208771 - protein, 213 aa, Glycine max
  Clone ID: PAT_MRT3847_30549C.1.pep
GDSRVVLGRLERATREIEAIQLSTEHNVNQESVRDELRSKHPFDSQIVVLRQNVWRVKGLIQVSRSIGDAYLKKAEFNRDPLPAKYRLAETFFRPILSCDPSTSSHTLHPDDQFLIFASDGLWEHLTNQEVVSIVSNNPPNGIARRLVKAALREAAKKCEMRLSDLQKIEQGMRRHIHDDITVIVVFLNPKLTENTSLCGSPLSIKGGGSANS

SEQ ID NO: 208772 - protein, 57 aa, Glycine max
  Clone ID: PAT_MRT3847_3054C.1.pep
FPLYCGTKRNNFSNNLNLPRANKYFLNNRIISLLKTKNNLRGQIKKGPNTKLRGHQI

SEQ ID NO: 208773 - protein, 56 aa, Glycine max
  Clone ID: PAT_MRT3847_30550C.1.pep
NLVKDFNIKKNVNILYHHFVKKKLFKNIFRLISCITNLKNNLYAIVYSVQKYHHYT

SEQ ID NO: 208774 - protein, 44 aa, Glycine max
  Clone ID: PAT_MRT3847_30551C.1.pep
LLVIIFNSNLIIIFLFNYFLHSQNSNLTFCLTESNIILFTPITC

SEQ ID NO: 208775 - protein, 72 aa, Glycine max
  unsure (1)..(72): unsure at all Xaa locations
  Clone ID: PAT_MRT3847_30552C.1.pep
AEVFEEEFTQEEKDEGRKGEHPRHGTQGRXPRKRAAHHRGKEKALPKDDPPKEPKQTRSERNKAEMTHTSRE

SEQ ID NO: 208776 - protein, 62 aa, Glycine max
  Clone ID: PAT_MRT3847_30553C.1.pep
RNLNGSVGGWHFPGQFESIETGLSFLNKTFNGPKLMEDAIFQVWSWVKTAEKRLCPAPQFLV

SEQ ID NO: 208777 - protein, 116 aa, Glycine max
  unsure (1)..(116): unsure at all Xaa locations
  Clone ID: PAT_MRT3847_30554C.1.pep
RGILICPKKGGKWRVPKKIKAKIPTLKLGTIRLSVTGNSAFVRGNFFFFIKNGKLVIFKGMLKVRGPAKRGKGEKTPNSPKVLGVLCYLPPLFKKQKTKKKKKKKKKKKKKKKXXX

SEQ ID NO: 208778 - protein, 59 aa, Glycine max
  Clone ID: PAT_MRT3847_30555C.1.pep
LVFYQGVTNLIFFLVLHSLDFKSQIPRSFCRKFSYPRRFLYHFPIAFEGIHLNFGIPIS

SEQ ID NO: 208779 - protein, 88 aa, Glycine max
  Clone ID: PAT_MRT3847_30556C.1.pep
DWLNLCFSKTKESECATSFKSSAESISVTLIQHLQPQVSSISLNNFSFFNLLFAIDFALSKYIIRIFNFRVVQEWVVKESGDVYGAGG

SEQ ID NO: 208780 - protein, 96 aa, Glycine max
  unsure (1)..(96): unsure at all Xaa locations
  Clone ID: PAT_MRT3847_30557C.1.pep
LGPGFPGRPTLTIEFKNLSSFLVFCFLPQSQTCETEGGNCDCSDKTSCTNGNSYGVIVETEKSYIXTVVMDVPASEHDGKCMCGTNCTCTDCTCGH

SEQ ID NO: 208781 - protein, 95 aa, Glycine max
  Clone ID: PAT_MRT3847_30558C.1.pep
CFNKYHSHLWTIRHRLQLHVAQHCRIIISIIKWGEKLITSFVMSVVSTLTQTSGVSKSTPTHIQNFSLCMYKHQTNGASMALHKSRKTSPCDGMA

SEQ ID NO: 208782 - protein, 662 aa, Glycine max
  Clone ID: PAT_MRT3847_30559C.1.pep
MEKKRKIVQYRERLDRTLASPDLANDEMLKKLVGSQLPPSSEPEVEGFRDKLVETKTAEVSHFLDMLRSASSDDSGRSYTSHTDWKLKQDDDEFRVMYREGPEGTPFHTMLVEGFVDGPVDVCLCISWETCLYKKWWPQSTIPTFKILSAECLQKTRIGEQLSLVRLKVSWPLSLREAIVHYYLFEYFQDDLIVVLTNSVPDSKNATGTLCGFNNEAIPEAREVVRVDLVGGFALQKVTSERCYFRTIANMDIKLDFVPPSLINFISRQLIGNGFRLYQKTVSSMTSHDKGEFNKALGDPLYVRIREALYNTSGSKAMNGEELQQVASVLPAEDLVESKQGGEKDASKEDMSNQYANNVMPMAVNNKVQDSSKTFNEIVEVDCEEIVQGKEKDASKEDISYQYANNVMPMAMNTKELDGRKKFAEIVEIDIEEIVLIEEDNEEVKDIQNKEVEMSVLRGKRSIYIRSEVEHALETLEKAISMVREQRLHSRVVSSSVADEESHFMKNDDKVDTYSSKLTQPSSKNEVSVEVPNGDISEGASQEALGNNPGIQNSRCTGTDPNSKEVNSNKVVPTSSEQNVSTSILLSQAVSHPLGNGAILDQTTISNKQLNTDSVQDTSLDHADKSSRQKKLNTIVTQSMNSDVPKKLSRQKKFLLFCCFLH

SEQ ID NO: 208783 - protein, 70 aa, Glycine max
  Clone ID: PAT_MRT3847_3055C.1.pep
CTLTYACLQRCRMFYKVPKLNSLVEDPQLRNRANHVISLLYRLVKHIHLPSCYNIENAQTDRPSKQLRML

SEQ ID NO: 208784 - protein, 49 aa, Glycine max
  Clone ID: PAT_MRT3847_30560C.1.pep
AALFFFFLEAMLEEPYVSQNCQPGVKGYSLSDNCKLCSYRQQSTGIQTL

SEQ ID NO: 208785 - protein, 51 aa, Glycine max
  Clone ID: PAT_MRT3847_30561C.1.pep
AAGPETGSLLAPTNVKGWRNEQQVQTNSDTPCSVLCFTLIATTFVYVLNRP

SEQ ID NO: 208786 - protein, 57 aa, Glycine max
  Clone ID: PAT_MRT3847_30562C.1.pep
NGVRGFSIQGLSGKITRKKPNGGGRQLRSLTTWAKGNPTPRGRLKLRPPPAHCFPPS

SEQ ID NO: 208787 - protein, 91 aa, Glycine max
  Clone ID: PAT_MRT3847_30563C.1.pep
EMAFIARVCLLFLLLTSVVTCKEQPLMRDLNSNHNIDEHHYQGANPKYDPRISRPPRLGNRKMQINEEDYPGPGPNPIHYPFSPHPPPLDD

SEQ ID NO: 208788 - protein, 131 aa, Glycine max
  unsure (1)..(131): unsure at all Xaa locations
  Clone ID: PAT_MRT3847_30564C.1.pep
PPPTXTTGKRQIKAKTPTGQTNTQEAESADTKQKGKPKTQDTEGNPPDQQRQTTAGKQPEDGRTHAEHNKQKEPTPHSGPRQRGGTQNTAKTLTGKTNTQEAESTDTTDKAKAKNHDKEGIPPDPQKLNIA

SEQ ID NO: 208789 - protein, 100 aa, Glycine max
  Clone ID: PAT_MRT3847_30565C.1.pep
KKPPPKFPKGEEIFRPGFFYGPQKVGRKKKPPGGKGSPMEKGFQGGKPINQNPPGGPLKTPPVKVNRGAKNSVKKGTEPVFPPGVIYVYGKNRSRPAKSN

SEQ ID NO: 208790 - protein, 87 aa, Glycine max
  Clone ID: PAT_MRT3847_30566C.1.pep
APVIDCHPLGLGNGDMSLYPLVLSQQLAQGHHGSRLDEVKCFQLCCLFLACFGPQPAQKAPSFYYYSNSHPGNPKRNDLPTALKLVI

SEQ ID NO: 208791 - protein, 129 aa, Glycine max
  unsure (1)..(129): unsure at all Xaa locations
  Clone ID: PAT_MRT3847_30567C.1.pep
XGLPISISPASSALPCHPTWCGVCYSSSSSKMLRKLMRLLLLLMFFLCFSYVLSVSAIPATRTQNLKGEEEEFSALPSLTRLDHVVGNGEVVLVDMNEGFMERRVDLETQDYEGTGANKDHDPKSPGGA

SEQ ID NO: 208792 - protein, 62 aa, Glycine max
  Clone ID: PAT_MRT3847_30568C.1.pep
MGLIIMVRKKRMAKVIKFFELNTRAKIPSGGLGTWQAEPGVVAKAVTTDILVGYTHIDCAQT

SEQ ID NO: 208793 - protein, 124 aa, Glycine max
  Clone ID: PAT_MRT3847_30569C.1.pep
VIYQIPASSGLPCHPTWCGVCYSSSSSKMQRNFMRLLMFFLCFSYVLSVSAIPATRTQNLKGEEEEDFSALPSLTRVDHALGNGEVVLIDMNEGFIERRVDLETQDYEGTGANKDHDPKSPGGP

SEQ ID NO: 208794 - protein, 60 aa, Glycine max
  Clone ID: PAT_MRT3847_3056C.1.pep
MGSCTAWLGPGARPGATIASVHAYYRGYQKPWPILEDGSATIHTPERTKAGEPLLGGGAS

SEQ ID NO: 208795 - protein, 517 aa, Glycine max
  unsure (1)..(517): unsure at all Xaa locations
  Clone ID: PAT_MRT3847_30570C.1.pep
LYSNNITGKIPDELGSLRNLVSLDLYSNNITGPISDNLANLKKLRFLRLNNNSLSGKIPVRLTTVDSLQVLDLSNNNLTGDIPINGSFSSFTPISFRNIXSLNNTLVPPPAVTPPQSSSGNGNRAIVIIAGGVAVGAALLFAAPVIVLVYWKRRKPRDFFFDVAAEEDPEVHLGQLKRFSLRELQVATDTFNNKNILGKGGFGKVYKGRLTNGDLVAVKRLKEERTQGGEMQFQTEVEMISMAVHRNLLRLRGFCMTPTERLLVYPFMSNGSVASCLRDRPESQPPLEWPKRKNIALGAARGLAYLHDHCDPKIIHRDVKAANILLDDDFEAVVGDFGLAKLMDYKDTHVTTAVRGTIGHIAPEYLSTGKSSEKTDVFGYGVMLLELITGQRAFDLARLANDDDVMLLDWVKALLKDKRLETLVDTDLEGKYEEAEVEELIQVALLCTQSSPMERPKMSEVVRMLDGEGLAEKWDKWWQKEDMIQPNFDPSNLHNGYWRPLLDSTSNIAPDELSGPR

SEQ ID NO: 208796 - protein, 50 aa, Glycine max
  Clone ID: PAT_MRT3847_30571C.1.pep
MCAVVLYRPLEPGIITPSVSWLLPHFPIRRQIFTRQMHGHSYNMNEIQIG

SEQ ID NO: 208797 - protein, 55 aa, Glycine max
  Clone ID: PAT_MRT3847_30572C.1.pep
FICLWKFMNISHFIYRRFISTVEAIFHSMTHSSNTKFKFVCVNLFLWKHNYMICL

SEQ ID NO: 208798 - protein, 55 aa, Glycine max
  unsure (1)..(55): unsure at all Xaa locations
  Clone ID: PAT_MRT3847_30573C.1.pep
TFCSSGETSNVDDDMWLSSKAYYSPIVELCGGTELASSYIAGSPLQPXQAFGAFS

SEQ ID NO: 208799 - protein, 83 aa, Glycine max
  Clone ID: PAT_MRT3847_30574C.1.pep
QKLRGLAFAPTTFTLSTDSCFFFSSIHPGMDQKPGPGGPGGGGPPNFGPEQLFGGQGQPRQFKRVSFSAANTPGRPCRWTPRG

SEQ ID NO: 208800 - protein, 55 aa, Glycine max
  Clone ID: PAT_MRT3847_30575C.1.pep
FSFLNSKLMNQAPDLFRAKYFLWQVLNRQILFICMDPNYVGKDGTLEFNWTLSFN

SEQ ID NO: 208801 - protein, 36 aa, Glycine max
  Clone ID: PAT_MRT3847_30576C.1.pep
MSHSHLSFAFGILGNIASFVCFLAPLPTFYRVCKKK

SEQ ID NO: 208802 - protein, 193 aa, Glycine max
  Clone ID: PAT_MRT3847_30577C.1.pep
MFDWNDEELANIIWGEGGESDDHIVPYPEVNEDVSNKKEWNQEAAATKLTELKRPEAKTDFHERKLGSSSNLDNSGELLTSGYGTNAWPDLSLSTSANIDQGSLGTEVSKNLSELSKFSSSREETTQHEKDAEIFQTAHEGKEQGHFVDYGWVNIGSFDDLDQIFSNDDPIFGHASLDNSNELWSSKDKCFNT

SEQ ID NO: 208803 - protein, 133 aa, Glycine max
  unsure (1)..(133): unsure at all Xaa locations
  Clone ID: PAT_MRT3847_30578C.1.pep
VKVNVACAAVGWTLSYTTTALLESGLQKDRGLMAEYFVRMHYVADNINKSQEKDMLEGNFSFDIKYSSRWEKGFSTXAQFVSGKTLKYDIIGAGXHFLKDSADMADQDTPSEIDARLRQRIHPQYNEVQAQME

SEQ ID NO: 208804 - protein, 123 aa, Glycine max
  unsure (1)..(123): unsure at all Xaa locations
  Clone ID: PAT_MRT3847_30579C.1.pep
XQXKXXNXXKXHTHXXLTTXTPXHXXXHTKXXXXNXXXQTKQXXXHXXXLXXXXTXXXXXQKXTHXYXXXXLQXENXXMTRXNHXHTSXXTHXXNXHLTPXHXTXXRXSTRSIRQQHRXXXPT

SEQ ID NO: 208805 - protein, 68 aa, Glycine max
  Clone ID: PAT_MRT3847_3057C.1.pep
MMRARFPLLLLGLVFLASDSVSFGIDYWDQENPRHCMCLQRCNSESDSYRDHACHARCNLLKVQIEEC

SEQ ID NO: 208806 - protein, 348 aa, Glycine max
  Clone ID: PAT_MRT3847_30580C.1.pep
TREVGLPEDILIHDEIYKSRLASLKREEEIIFRERERYEIEKGRLIREMKRIRDEDGSRFNNFQILNHRYALLNLLGKGGFSEVYKAFDLVEHRYVACKLHGLNAQWSEEKKQSYIRHAIREYNIHKTLVHRHIVRLWDIFEIDQNTFCTVLEYCSGKDLDAVLKATPILPEREAKVIIVQIFQGLIYMNKRAQKIIHYDLKPGNVLFDELGVAKVTDFGLSKIVEDDVGSQGMELTSQGAGTYWYLPPECFELSKAPLISSKVDVWSAGILYYQMLFGRRPFGHDQTQERILREDTIMKARKVEFPSRPTISNEAKDFIRRCLTYNQAERPDVLTIAQDPYLTFSKK

SEQ ID NO: 208807 - protein, 67 aa, Glycine max
  Clone ID: PAT_MRT3847_30581C.1.pep
LPNTPHVILRKHLLRLGLDSACFFTYLNPHSMRASLLFHTGPRTALPIVYIKHGTLACNMDYFPDIT

SEQ ID NO: 208808 - protein, 32 aa, Glycine max
  Clone ID: PAT_MRT3847_30582C.1.pep
ITKTLSHFALFCLASRVSLELRNRITNGIENT

SEQ ID NO: 208809 - protein, 43 aa, Glycine max
  Clone ID: PAT_MRT3847_30583C.1.pep
KNRVFLTAFFTPSLNRGKKGHNVGWRNTRPAPLGKSYQFFPAE

SEQ ID NO: 208810 - protein, 92 aa, Glycine max
  unsure (1)..(92): unsure at all Xaa locations
  Clone ID: PAT_MRT3847_30584C.1.pep
MNRYWKAQNLSGSLSPEFSKLHYLXXLDLSRNIITGSIPPQWGTMRLVELSLMGNKLSGPFPKVLTNITTLRNLYVEIVSLFSNELLVYSIT

SEQ ID NO: 208811 - protein, 50 aa, Glycine max
  Clone ID: PAT_MRT3847_30585C.1.pep
QQEITDSSLSNESRTSTPSEGPPGNSETLILRSSHLHDLATHITGQLYRT

SEQ ID NO: 208812 - protein, 75 aa, Glycine max
  Clone ID: PAT_MRT3847_30586C.1.pep
SRSSCEDDQTRSGRTQDDRGASSLQDDRRGKNKVIRVKYNLKTTNYCGSLTGLKSIHVRTSCSSLFTALFKPNLS

SEQ ID NO: 208813 - protein, 159 aa, Glycine max
  unsure (1)..(159): unsure at all Xaa locations
  Clone ID: PAT_MRT3847_30587C.1.pep
DKKDTNDKIEEGTANGEEEESSEFSLFRRLFRVHPVEAKSGVFNENKYNGGLFESSPGTENFLRKLLRDRDRSIEDSELLGSKRQKEKHSVSPKQQSEKSSTKPPLPISXSQFRKGAYHDSLEFVQSLCDTXYGLEDVFPIEDRTSALREALVEINLHV

SEQ ID NO: 208814 - protein, 74 aa, Glycine max
  Clone ID: PAT_MRT3847_30588C.1.pep
GITTLYLLLNGNLGFPINPLVWGFKTPLKGGTPKTYLGQKNTQKLDLTWGRTVKKQSQMGRVAHLKGPLFSFRG

SEQ ID NO: 208815 - protein, 49 aa, Glycine max
  Clone ID: PAT_MRT3847_30589C.1.pep
LRRLGSTDDYYVHYRNIRRYIKITFIIIYYYLQVLHLLSIIVCLSMTLY

SEQ ID NO: 208816 - protein, 103 aa, Glycine max
  unsure (1)..(103): unsure at all Xaa locations
  Clone ID: PAT_MRT3847_3058C.1.pep
IHGLTVTGDGPSRARTMHEPIGVTSLIVPCNFPLIITSXTAAPASTSEYSFQLMTDYQTHIVHLYVPKTSLEPRLAAGPLNVHSSSDPTAKTTLVRPIHYNML

SEQ ID NO: 208817 - protein, 82 aa, Glycine max
  Clone ID: PAT_MRT3847_30590C.1.pep
KVTDLLVKAKTSCALSLGFGEDTINTSSVLVMPMMSSRMTGFRGNGLERARILSMRNGWSKIPMDEDAGKLLETSSVVPPSP

SEQ ID NO: 208818 - protein, 51 aa, Glycine max
  Clone ID: PAT_MRT3847_30591C.1.pep
KLKGNIPKKIWQTSWFKFMDFRKIQFPNFLIKKATKFFGMGCFYSNTNNCC

SEQ ID NO: 208819 - protein, 86 aa, Glycine max
  unsure (1)..(86): unsure at all Xaa locations
  Clone ID: PAT_MRT3847_30592C.1.pep
MVRTKQTARKCTGGPAXHLSICATKVSGIARRGRPGGVKXPHRFMPRTVALMELTKCHRSAYLFITKLTLHRLEGEVVHDYETALR

SEQ ID NO: 208820 - protein, 219 aa, Glycine max
  Clone ID: PAT_MRT3847_30593C.1.pep
TWFLVDIVFYSQVLFQSEIYKRYLDKKEDVDVYQETFHAAWIQAVIAVCSTIPGYFFSMYFIDKWGRVKNPMMGFFFMALAFFSIGIPYYSYWTTKEHHKNKVFMVLYGLAFFFANFGPNTTTFIVPAELFPARFRSSCHGISGAVGKVGAIIGSVGFLWASHRKKEDGYPKGIGMKVSLIILGGVCLLGMVITYFFTRETMGRSLEENEVEIEEQDNL

SEQ ID NO: 208821 - protein, 53 aa, Glycine max
  Clone ID: PAT_MRT3847_30594C.1.pep
LITLQRTAEDCHPQRYSACNLFNHLTHLEVKISIRGPNITYNLSITQSKEKDI

SEQ ID NO: 208822 - protein, 156 aa, Glycine max
  Clone ID: PAT_MRT3847_30595C.1.pep
MSSTTTDSDCSYLEQIQQYLLHNDSTILTPPQAFPSPSHDSSSDASVHFEHPSEAHDVNAPPKWRRYRGVRRRPWGKFAAEIRDPKKNGSRVWLGTYVNEEEAALAYDKAAFNMRGQKAKLNFPHLIGSGVQPEPPCLAVSRGAYQSLLPNTPYDS

SEQ ID NO: 208823 - protein, 157 aa, Glycine max
  unsure (1)..(157): unsure at all Xaa locations
  Clone ID: PAT_MRT3847_30596C.1.pep
MVRGKTQMKRIENETSRQVTFSKRRNGLLKKAFELSVLCDAEVALIIFSTRGRLYEFSSSRCSSINKTVERYQRKIEDLGVSNKGIHENTQHLKEVDMSMAKKIEHLEDSRRKLLGDELDKCSIDELQQLENQLERSLDKIRATXNQLFRKRIEKLK

SEQ ID NO: 208824 - protein, 225 aa, Glycine max
  unsure (1)..(225): unsure at all Xaa locations
  Clone ID: PAT_MRT3847_30597C.1.pep
MVRGKTQMKRIENETSRQVTFSKRRNGLLKKAFELSVLCDAEVALIIFSTRGRLYEFSSSXSINKTVERYQRKIEDLGVSNKGIHENTQHLKEVDMSMAKKIEHLEDSRRKLLGDELDKCSIDELQQLENQLERSLDKIRATKNQLFRKRIEKLKEEEKCLLEVNKRLREQYRIERQRCLSDQDVEFATKKEGEEVETELFIGRPERRMPLKLKPTTYSAHAYIA

SEQ ID NO: 208825 - protein, 315 aa, Glycine max
  Clone ID: PAT_MRT3847_30598C.1.pep
MAATTLVSEVTLPSSSGQRKMPLMGLGTAPEATSAVTTKDAVLEAIKQGYRHFDAASAYGVEQSVGEAIAEALKQGLIASRDQLFITTKLWVTDNHAHTILPALQKSLRTLQLEYIDLFLIHWPIATKPGKVVYPIEVSEIVEFDMKGVWGSMEECQRLGLTKAIGVSNFSIKKLEKLLSFATIPPAVNQVEVNLGWQQQKLRDFCKEKGITVTAFSPLRKGASRGANFVLDNDVIKELADAHGKTAAQICLRWLYEQGLTFVVKSYDKERMKQNLGIFDWSLTEDDYKKISEIHQERLIKGPTKPLLDDLWDEE

SEQ ID NO: 208826 - protein, 310 aa, Glycine max
  unsure (1)..(310): unsure at all Xaa locations
  Clone ID: PAT_MRT3847_30599C.1.pep
MGSRRDEAPAINSTNVFAALGSLKKKKKKPEKDHQGPSKPKDKKDVFWAPAPLTSKSWADVDDEDDDDYYATTAPPESVWAAPTVTQNDAAAAEESESELEGLDDADDDADDEHENETEXKLSXEAEAFCRKRAEQTVVKKEAEGQLSEKESKKKGLEELEAVLAELGYTPKEPTVQEDDSNGAEKKEEDPNGAVEMKENATGESKNAKKKKXKEKSSKEQKESQDQPHGLDAGTGNATSETAETEKAEDASAIDVKERLKKVASMKKKKSSKEMDAAARAAANEAAARNARLAASKKKEKAHYNQQPVR

SEQ ID NO: 208827 - protein, 91 aa, Glycine max
  Clone ID: PAT_MRT3847_3059C.1.pep
ENIIIDDHQTFLPHFNKKRIKKIDKCPRLFKAQMHNSIMKLSIIESQRCKPIKKVIIHSTSIAYKCSRNLFLYCTFLCYRNCPSALPWVKI

SEQ ID NO: 208828 - protein, 154 aa, Glycine max
  Clone ID: PAT_MRT3847_305C.1.pep
VLNMGSIYGFWRRLNREQKLAKERYNHMFYNLQFRNLAKQVPIPSERPQDPTQMPKPSAPAPSRRPAAKARPKKVSEHGIVGAPLTLLTAAATPKIKDHPTTSGEGVSARTATSEQSGGGGGLFGLRWLVSIISFLCAIHYLLKNLDRLFTREQ

SEQ ID NO: 208829 - protein, 89 aa, Glycine max
  Clone ID: PAT_MRT3847_30600C.1.pep
FTICRTLQLEYIDLFLIHWPIATKPGKVVYPIEVSEIVEFDMKGVWGSMEECQRLGLTKAIGVSNFSIKKLEKLLSFATIPPAVNQVIS

SEQ ID NO: 208830 - protein, 55 aa, Glycine max
  Clone ID: PAT_MRT3847_30601C.1.pep
PVFALINWCSMSASPDSVASSATVIGSHRLIAAPKRVYYSSCHMMSLCHKKCLFG

SEQ ID NO: 208831 - protein, 313 aa, Glycine max
  unsure (1)..(313): unsure at all Xaa locations
  Clone ID: PAT_MRT3847_30602C.1.pep
MGSRRDEAPAINNTNVFAALGSLKKKKKPEKDQDQGPSKSKAQDNKKDVFWAPAPLTSKSWADVDDEDDDDYYATTAPPESVWAASPVTLNDAAAAAAAEXESELEGLDDADDDGEEEHENDLEVTEEAEPVLQKPPEQPVVTKEAERQLSKKELKKKGLEELEAVLAELGYTRKEPTGQEDDSNGAEKKEEDPKGAVEKKENATGESKNAKKKKKKEKSSKEQKESQDQLDGLDAGTGNATSETAETEKAEDASAIDVKERLKKVASMKKKKSSKEMDAAARAAANEAAARNARLAASKKKEKAHYNQQPVR

SEQ ID NO: 208832 - protein, 100 aa, Glycine max
  unsure (1)..(100): unsure at all Xaa locations
  Clone ID: PAT_MRT3847_30603C.1.pep
FLISFIYIFEELCFHVQKINQFFLQICLRWLYEQGLTFVVKSYDKERMKQNLGIFDWSLTEDDYKKISEIHQERLIKGPTKPLLDDLWDEXMSSHLNFIV

SEQ ID NO: 208833 - protein, 156 aa, Glycine max
  Clone ID: PAT_MRT3847_30604C.1.pep
MCFGRKKKGKRQSSPEYTKVMPISPTTPPYSPPKKPDDATLSPLEQKPVDKSPLTKKSKAKSPFKKKLGTKPSKKKAGAKTPFKKKKLGTKPSLKKAGAKTPLKKEPEDKSPLKKEPEDKSPLKKKLEDKWPPKKPDYSHRPRSPFLCHVLHRVAK

SEQ ID NO: 208834 - protein, 53 aa, Glycine max
  Clone ID: PAT_MRT3847_30605C.1.pep
KGSLYLTNKYLPTPLFLLFPIINYLPFPTFVPSFPIIIHFISFLYHIHILFLF

SEQ ID NO: 208835 - protein, 94 aa, Glycine max
  Clone ID: PAT_MRT3847_30606C.1.pep
WIRPHGTPASTVSEGVESTSTDRGWLSVRDTAILEREVTNTGSTSKNMRLDSEVLKMNSLQKESTHASTTDMARGMHERDKKFDEMRQVMYNHS

SEQ ID NO: 208836 - protein, 70 aa, Glycine max
  Clone ID: PAT_MRT3847_30607C.1.pep
TRPAFYEGRTCIGSGVILEFWDDQSFPVCTKALEIARMEDKSKIGNPVKIKVKPDNPQVCDSAELASKTS

SEQ ID NO: 208837 - protein, 93 aa, Glycine max
  unsure (1)..(93): unsure at all Xaa locations
  Clone ID: PAT_MRT3847_30608C.1.pep
MSIRTISVGMPEXATQTDTLKAALTXFNSSFICMFAGARAGITYNKLTEDGAAMPAGFSTASITHAFALFVSVSVGANIAGSYIKPSVTVRAF

SEQ ID NO: 208838 - protein, 196 aa, Glycine max
  Clone ID: PAT_MRT3847_30609C.1.pep
KKKTKNQMSQWIHVAVAASAVGCVSTLLLVFLWRWCHKRNHRRNFVEPASLTRVESVQGGISVSRLHQQQQPFQLDQGNKNNNKGNYNYYVFRGGGVSGKRSLFNWGDHPSMAADAVENGWSRFAFTGYKSYTPSPSKRSALLGVCAAPGGGSDFGRESEVEISWEVARGSAEFMQKVRLNPGIKKSHHHNNHNNA

SEQ ID NO: 208839 - protein, 72 aa, Glycine max
  Clone ID: PAT_MRT3847_3060C.1.pep
AHACEKVHITIAVIGHVDSGKCSTTGHLIYKLAGIDTRVIERSEKEAAEMNKMTFKYAWMIDKLKAYREKGI

SEQ ID NO: 208840 - protein, 71 aa, Glycine max
  Clone ID: PAT_MRT3847_30610C.1.pep
VVSSIDKNEIIDLLSPSPPKKSNLSSKCQQSSDQHIEVINLSDSENDMSVEHKQKAKELRLFLASIRNEIH

SEQ ID NO: 208841 - protein, 153 aa, Glycine max
  Clone ID: PAT_MRT3847_30611C.1.pep
GPPSCCISKYSSSCTTSISIMADFFIKQEPFIKPDPEASGSPAQVDEEDLYEDAGDLEFYEKNAGAFEQLYLARVPRYMWEAWSKLTERLGDDDEIQIGTLRTWNEQKPDGSLDTKLRMLLSANCPEHQVLPREYDLVVQEHNVSNHFISARR

SEQ ID NO: 208842 - protein, 58 aa, Glycine max
  unsure (1)..(58): unsure at all Xaa locations
  Clone ID: PAT_MRT3847_30612C.1.pep
FGTRPYLFVLCMERLALCIHDLTSQXIWRPILVSDDNRLVPYLMLVDDIFLFINAIGD

SEQ ID NO: 208843 - protein, 284 aa, Glycine max
  Clone ID: PAT_MRT3847_30613C.1.pep
MSFEVEEEEEAFEHTLLVVREVSVYKIPPRSTSGGYKCGEWLQSDKIWSGRIRVVSRRDRCEIRLEDPSSGELFAACFVYPGQRETAVEPVLDSSRYFVLKIEDGQGKHAFIGLGFNERNEAFDFNVALSDHEKYVRREHEKEAGHGAAAAAEESQIDIHPAVNHRLKEGETIRINVKHKSTSGTGMLSAAGLTGGHAATPKPKTVSLAPPPSGAGKIRSPLPPPPNDPVAARIASTGCATGPKGTYESVKHSTDALSDFSQLQKNLPSTTTSGSTTASGWAAF

SEQ ID NO: 208844 - protein, 75 aa, Glycine max
  Clone ID: PAT_MRT3847_30614C.1.pep
MGDITFVVPKSCREWCVKQHSVDIEAYTDSTFDLQPKLEQAVIADDYSGGVQNSIYTVTATYAVFHVIEGGATFI

SEQ ID NO: 208845 - protein, 57 aa, Glycine max
  Clone ID: PAT_MRT3847_30615C.1.pep
IYAAIILALIAIFMLQTVVMAANEQGGHLYDNMSKYGSGSVKRYQCPSQCSRRCMQT

SEQ ID NO: 208846 - protein, 55 aa, Glycine max
  Clone ID: PAT_MRT3847_30616C.1.pep
RIAPTKVPRRHGLFVKNMRVNFCNAFELCMHAFKQSLKVYIAFPDQPYRFCQEED

SEQ ID NO: 208847 - protein, 50 aa, Glycine max
  Clone ID: PAT_MRT3847_30617C.1.pep
ELIFLLFMTFRSENDRLKEKKIEKISKKKIFSKLSLIFFILIFYFSYLIL

SEQ ID NO: 208848 - protein, 72 aa, Glycine max
  Clone ID: PAT_MRT3847_30618C.1.pep
FIPCISYDVDLHYMEQPSYCNPVVAQIVNILVQFGHSKNFSTKAVFIAKSVFIQPADKIVCECYVLFSIFNH

SEQ ID NO: 208849 - protein, 55 aa, Glycine max
  Clone ID: PAT_MRT3847_30619C.1.pep
RHKLQQLKINIEIIYFSLNGFFFKLKINVKKMLTLFSVIILKLCTNIMVVVGDLP

SEQ ID NO: 208850 - protein, 211 aa, Glycine max
  Clone ID: PAT_MRT3847_3061C.1.pep
MNGKVTLSCPPDINLPLSAERSPPPQPWNPDPSDTVFDIGLGTQGLETESFVQLPKVGRKCAKRLDSIWGAWFFFRFYFKPALVEKSKAKVVRDSNGVSGFDKSDIKLDVFMVQHDMENMYMWVFKEKPENALGKMQLRSYMNGHSRQGERPFPFSADRGFVRSHRMQRKHYRGLSNPQCVHGIEVVPSPNLMSLDKDEQKKWIELTGRDL

SEQ ID NO: 208851 - protein, 127 aa, Glycine max
  unsure (1)..(127): unsure at all Xaa locations
  Clone ID: PAT_MRT3847_30620C.1.pep
SQNSNSFLVLVPYLHVVGCQLQWPTQGSKKKSKLASIIIQESANTFHAYILEVDSGYDFFIIVVSYTCYHXHRICILNDSGTVTNVSLRKLMXMSAMITLHYRFEILSLTGLFLPLPVSLGATSLNI

SEQ ID NO: 208852 - protein, 73 aa, Glycine max
  Clone ID: PAT_MRT3847_30621C.1.pep
NQGSKDYLKTKVTSMTELHGSISALFNINHGIKSIVYLIPGLKAVKHPGKTKTCKRKAIKLVGGCLQSMIKTL

SEQ ID NO: 208853 - protein, 21 aa, Glycine max
  Clone ID: PAT_MRT3847_30622C.1.pep
LNSPILPSLTMSYSGIHLGTP

SEQ ID NO: 208854 - protein, 50 aa, Glycine max
  Clone ID: PAT_MRT3847_30623C.1.pep
GYDKTTERAVPRLREAHTPGEELQVQAAAAMISIAVDRNLPRLSGVCITL

SEQ ID NO: 208855 - protein, 44 aa, Glycine max
  Clone ID: PAT_MRT3847_30624C.1.pep
RLREDDRRGLLISFSLLNYTNFRHNQLNCDVRKFNSFLLGHPMI

SEQ ID NO: 208856 - protein, 52 aa, Glycine max
  Clone ID: PAT_MRT3847_30625C.1.pep
QTFASIRTTITNQVSHWRDIPCSLKIAIFCLMDSIPMQSALSRHFPSSLESF

SEQ ID NO: 208857 - protein, 57 aa, Glycine max
  unsure (1)..(57): unsure at all Xaa locations
  Clone ID: PAT_MRT3847_30626C.1.pep
EHLLALAXXTDVAAEVARXESXNXGWXSYTLCVGXICXRIXXXRXVKXSFEXXSRXV

SEQ ID NO: 208858 - protein, 124 aa, Glycine max
  Clone ID: PAT_MRT3847_30627C.1.pep
MNKKINLIKRRNPKISTKGRKKKKKRKFKKKKKKQERTPGENKKKRTGPCGQTRFTNGEEHKSPPEKRKKWWPGEKCYPIKNPKKKRAGNKKNKARGEKGRNQQTLNAWRPLPKIQTTKPSRHT

SEQ ID NO: 208859 - protein, 94 aa, Glycine max
  Clone ID: PAT_MRT3847_30628C.1.pep
NVNGTAPHHLLNTSRKFHIVVIGFQIPLSMIRFSIQLEFYREHPVVFPLLHHRSFQKIKLVAIPQPVALLQSFIFISPNEEYKNVTSEDEFFLL

SEQ ID NO: 208860 - protein, 355 aa, Glycine max
  Clone ID: PAT_MRT3847_30629C.1.pep
MLLSQAKLHNNNNISNAINMIMKKKGNNNNNNHCSPAILYHYPCPDGAFAALAAHLYFKATSSFSPLFFPNTVFNPLSAEDLPLNEIGDLYLLDFVGPDGFVQEISTKVPRVIVLDHHKTALERLGNEASLGENVVKVIDMERSGATIAFDYFKDKIFSPDVAVKHPSILEEFERVRKLFLYIEDGDLWRWRLPNSKAFRSGLKDLDIEFDARKNPSLFDQLLSLDLDNIISTGTVSLSDKQKLIDDCLRKSYEIALGNAEFGYCLAVNADTALSELRSELGHQLATKSQKMNLRGIGAVVYNVPELENDQRLKISLRSVENEDTTPISQEFGGGGHRNASSFMLTADEFEKWKV

SEQ ID NO: 208861 - protein, 356 aa, Glycine max
  Clone ID: PAT_MRT3847_3062C.1.pep
MGDSCLTSLSMENHHPSTLLSMDSSASSHEELDLEMNRQIILTRPPDINLPLSAERSPPPQPWNSEPCDILDVGLGTQGYETESFLNLPKAGRKCAKRLDSIWGAWFFFRFYFKPALVEKSKAKVVRDSNGVSGFDKSDIKLDVFMVQHDMENMYMWVFKEKPENALGKMQLRSYMNGHSRQGERPFPFSADRGFVRSHRMQRKHYRGLSNPQCVHGIEFVPSPNLMGLDTDEQKRGMELTGRDLNFTSPPEARDLSSWRNLPNTDFGLERPPVPIKSAPNSHPKKLLNGTVLNLPNHSNGDAIDLSPVNGKKRNELFLNDEDYYLSANPPSDRIPDIEKQPTEHPWLNDFSGGMK

SEQ ID NO: 208862 - protein, 305 aa, Glycine max
  Clone ID: PAT_MRT3847_30630C.1.pep
MAATSTSLFFSNLHSLNPQPFSSSLSFFRNVHSTLSFPSSSKPSRGVVAMAGSGKFFVGGNWKCNGTKDSISKLVSDLNSATLEPDVDVVVAPPFVYIDQVKNSITDRIEISAQNSWVGKGGAFTGEISVEQLKDLGCKWVILGHSERRHVIGENDEFIGKKTAYALSEGLGVIACIGELLQEREAGQTFDICFQQLKAFADAVPSWDNIVIAYEPVWAIGTGKVATPEQAQEVHAAVRDWLKKNVSAKVASKTRIIYGGSVNASNSAELAKQEDIDGFLVGGASLKGPEFATIINSVTSKKVAA

SEQ ID NO: 208863 - protein, 303 aa, Glycine max
  Clone ID: PAT_MRT3847_30631C.1.pep
MAATSTSLFSSNLHSLNSQPFSSSLSFRNVHSTLSFPSSKPSRGVVAMAGSGKFFVGGNWKCNGTKDSIRKLVSDLNSATLESDVDVVVAPPFVYIDQVKNSITDRIEISAQNSWVGKGGAFTGEISVEQLKDLGCKWVILGHSERRHVIGENDEFIGKKAVYALSEGLGVIACIGELLQEREAGKTFDVCFQQLKAFADVVPSWDNIVIAYEPVWAIGTGKVATPEQAQEVHAAVRDWLKKNVSAEVSSKTRIIYGGSVNASNSAELAKQEDIDGFLVGGASLKGPEFATIINSVTSKKVVA

SEQ ID NO: 208864 - protein, 121 aa, Glycine max
  unsure (1)..(121): unsure at all Xaa locations
  Clone ID: PAT_MRT3847_30632C.1.pep
XXXXXSKAKREXTGGRRKKGGTKTPTNXXXPEEQKTRPGGGERKSPRNNNPDARDQEATTHRKDDEDARNPGRNRPGNRHPTAKPQGPTQETEPTKPENGKSNNDQHQRHQKGERTPEETT

SEQ ID NO: 208865 - protein, 52 aa, Glycine max
  unsure (1)..(52): unsure at all Xaa locations
  Clone ID: PAT_MRT3847_30633C.1.pep
MTASLIFSGDNRLTEKTILTCRDLDLLGCXYTIAAQFTKFLPVYIWWDLDTL

SEQ ID NO: 208866 - protein, 68 aa, Glycine max
  Clone ID: PAT_MRT3847_30634C.1.pep
INKLPIIFKAFQRYNTGCQSEFGLFPQCLPHLIILIRQQYISSYKMYNFEEFNYDGSINLCLKLVIFI

SEQ ID NO: 208867 - protein, 108 aa, Glycine max
  Clone ID: PAT_MRT3847_30635C.1.pep
TPTDPWPLYLSTPHFSMSWKEVIGMMGMYHVIGRLYPLLNPYAVNGTLPLKLELLVLKMNVAKVIGNFIGQTINVKTLFPKPSKVPIVFTRVGLDIVLQVPPWIHYAT

SEQ ID NO: 208868 - protein, 58 aa, Glycine max
  Clone ID: PAT_MRT3847_30636C.1.pep
MCGEFHEMICFPERRVWMVYWSSLKVLHHHEIALLHQRNGVQPRVRKTSPINVGDCVV

SEQ ID NO: 208869 - protein, 68 aa, Glycine max
  Clone ID: PAT_MRT3847_30637C.1.pep
SFFQKCMPYIAMIYLQFWLSGMNIIANAFLNRGMSHCVLVVYIHSLATASIAPFAMVLDMKETPNITF

SEQ ID NO: 208870 - protein, 215 aa, Glycine max
  Clone ID: PAT_MRT3847_30638C.1.pep
MESAALSRIGLAGLAVMGQNLALNIAEKGFPISVYNRTASKVDQTVDRARNEGSLPLTGQYTPRDFVLSLQRPRSVIILVKAGSPVDHTIAALSDHLDPGDCIIDGGNEWYENTERRMNLVADKGLLYLGMGVSGGEDGARHGPSLMPGGSHHAYSNVQDILHKIAAQVEDGPCVTYIGEGGSGNFVKLVHNGIEYGDMQLISEAYDVLKHVGGL

SEQ ID NO: 208871 - protein, 54 aa, Glycine max
  Clone ID: PAT_MRT3847_30639C.1.pep
NNRIISPLKPKNNLGGQSKTGHNTKLKGQSFRGTKKKGGYCLLPGKSVTPQGPG

SEQ ID NO: 208872 - protein, 25 aa, Glycine max
  Clone ID: PAT_MRT3847_3063C.1.pep
ERKILHNYILVKSRVYICSEFSDIS

SEQ ID NO: 208873 - protein, 221 aa, Glycine max
  Clone ID: PAT_MRT3847_30640C.1.pep
MSDASRQPDILNRRELSSEHINRETGLYSLDGNANHSDIKSRIQNLESELSSILHLLRSSSDKITMQMVQKSSSDDLAKLSDAWEFQENEIMNAQDRLRSIRAKLSVLEGKMALAIMDAHKVVEEKQKKINNAQKALQILKTTCVVWPNSASEVLLTGSFDGWSTKRKMERLSSGIFSLNLQLYPGRYEMKFIVDGEWKIDPLRPVVTSNGYENNLLIIYD

SEQ ID NO: 208874 - protein, 69 aa, Glycine max
  Clone ID: PAT_MRT3847_30641C.1.pep
RKFGPGGGFFRAGGYLNKRGPYPAGFRGGPPPPRGWFFFLVFGAPPRGWGFPKKGSVYFEGKGPFFGLS

SEQ ID NO: 208875 - protein, 48 aa, Glycine max
  Clone ID: PAT_MRT3847_30642C.1.pep
EKSFMFKLVNVDTKLDASVWMRCVISNGLMSLDITYDTSHYNLCGLTC

SEQ ID NO: 208876 - protein, 84 aa, Glycine max
  Clone ID: PAT_MRT3847_30643C.1.pep
TQSSICIIIIFVWKIDGEFFLSIIIIFIRNVKLHFFPSFFLHHIYVIIKGEVKLVGVIYMLYAFMHESMSESVIDLSKYMHRFS

SEQ ID NO: 208877 - protein, 54 aa, Glycine max
  unsure (1)..(54): unsure at all Xaa locations
  Clone ID: PAT_MRT3847_30644C.1.pep
GXHNFLAQLIXTLSQNTXLGQQAQEYMITCPRKPXXPXXLXLRRCHATSXSYFY

SEQ ID NO: 208878 - protein, 70 aa, Glycine max
  Clone ID: PAT_MRT3847_30645C.1.pep
NLLSYNPFRLINTARPLLFVSPIRSLPSGHVAFVKPLPVFSRRSIYAMASLNSCFVIHCLVTTCFYLLNF

SEQ ID NO: 208879 - protein, 74 aa, Glycine max
  Clone ID: PAT_MRT3847_30646C.1.pep
SKLMGAPHGRFQLSVLEQSLFIFIFLCYWHSILITHTVEERSEGHRYLIYWTMMIALMLRAKCLEIQLMRMMLL

SEQ ID NO: 208880 - protein, 83 aa, Glycine max
  Clone ID: PAT_MRT3847_30647C.1.pep
YKANITYILETTTVMAVPSIVMRSNFECRSDPDFSPPAPCLRKLTPPEFGILPMIRREVARHLPSNPPILYLLRWADKHRGAP

SEQ ID NO: 208881 - protein, 119 aa, Glycine max
  unsure (1)..(119): unsure at all Xaa locations
  Clone ID: PAT_MRT3847_30648C.1.pep
PPPLARAPRPRALPPSPPPLPPPSKXPSQSPRHLGQPFSILRGPRPRPPHASGTAYLCRSWICFQLVAILRYRNRRPRQIGRSLFGKNLVLNPAYLPILRHAHLTIFGQCSYSRSLSQI

SEQ ID NO: 208882 - protein, 58 aa, Glycine max
  Clone ID: PAT_MRT3847_30649C.1.pep
YYYFMFDNQTEIYYHFMDINHKSSMSIKVNLLKITVIRVTFNIIIIKGGKFINHIKLF

SEQ ID NO: 208883 - protein, 67 aa, Glycine max
  unsure (1)..(67): unsure at all Xaa locations
  Clone ID: PAT_MRT3847_3064C.1.pep
NSCVXGRFTQITNAMNSKNQTPXLGGFLGGQGENQFWVFKKVSRNFLPTKKKIFFFFRGGEPRKKKK

SEQ ID NO: 208884 - protein, 45 aa, Glycine max
  unsure (1)..(45): unsure at all Xaa locations
  Clone ID: PAT_MRT3847_30650C.1.pep
PXAXWXVTFAASNCGNEQXPSLDGXDRFLKPCYKXSPNXSDCCNA

SEQ ID NO: 208885 - protein, 74 aa, Glycine max
  Clone ID: PAT_MRT3847_30651C.1.pep
IKKKNTHFSLYYDNKKRWGFFQMGEAYLPRGSCPLSFVELPRRPPGRKLIFQILRGIPVFHIIWQGPVEQKMLA

SEQ ID NO: 208886 - protein, 63 aa, Glycine max
  Clone ID: PAT_MRT3847_30652C.1.pep
RGGFFFFFFFFFGPQQPIWFNRGSHRQKGHPQGPYKWVPFFGNEFQYLHYLIKKGPPNNNLNP

SEQ ID NO: 208887 - protein, 61 aa, Glycine max
  Clone ID: PAT_MRT3847_30653C.1.pep
IIIIIFVGRYFPSHEPHTVEVCPPCVGYLFLYGCLMRYRKNIELAYCDRFGRRNIEYISLG

SEQ ID NO: 208888 - protein, 81 aa, Glycine max
  Clone ID: PAT_MRT3847_30654C.1.pep
MALRCVVMSLSEICSLGRARESHARDEDFWHAVWPNTPIRRSLRDRLKPGPGSVEIDDHAMGIEETQYPRNFFYTDDFIQA

SEQ ID NO: 208889 - protein, 77 aa, Glycine max
  Clone ID: PAT_MRT3847_30655C.1.pep
DMKYQICLSGVVFKTKGNLKLEAHGGCYLKFRGGRCHLAVTSCVSIGEMIRDTAVRKRCGSHASSNYIKTPRTYLIF

SEQ ID NO: 208890 - protein, 125 aa, Glycine max
  Clone ID: PAT_MRT3847_30656C.1.pep
SPLPQRAKFVRDRSRPPFGIATVFSTPPRCGPLRPSGSFLVSLSESFAGSGPRLWGFSFFPPPFYEELWNPLCLVGNPECLSFLLPQRMWLSFFILFPLPPICGLLTPVVRRGRTLVRTRGPPRP

SEQ ID NO: 208891 - protein, 80 aa, Glycine max
  Clone ID: PAT_MRT3847_30657C.1.pep
RTTISPMAAETMSPTRSDMSFTIHLKHRIFASLVCLHEDYVLFDTLGCHIRVIFFYQSPPIWSLSCSYGITNMCFILLEP

SEQ ID NO: 208892 - protein, 256 aa, Glycine max
  Clone ID: PAT_MRT3847_30658C.1.pep
HASDHFRDSFASDLILKPEGEILSRKILFDAVLLVDYPFLYLNAKYIKNLILTRLIVTLKAVEYFRGLGDQNRAISYIKAFSASRLPLQIIKWVTSQNGLEEKTGRANGSSPRALINWLLSLENRGIRVFEDDVLKSHATSGLDISQTEHPAGNLEGKVADDDLFYVDNIGEEGHAGDNDKQNKLISDAFVAAAQTMKLSDNGARKRKGKHSEKKIKFVKYDLHQNSEPVKASTLAADDSSSGESEVEDPVSDTDA

SEQ ID NO: 208893 - protein, 230 aa, Glycine max
  Clone ID: PAT_MRT3847_30659C.1.pep
EQGRLRFHFQSFVSFNVAHRTIMALWKVRSLSPEQKVEFVEEQSDSKSLISDESGSFLGLDDVSMSEIYSCSLLIPASYLMEIFSGGELDRRVMEKLGYLNYSYTPWVSENLDISERAVYYKFEKRISSYKGEVTSTQQRSPLPDGKGWLVEELMNLHGVPLGDYFNIHLRYQIEDLPPKAKGCRVQVLFGMEWLKSSKNQKRLTKNILENLLERFKVTFSLAEKELLPN

SEQ ID NO: 208894 - protein, 94 aa, Glycine max
  Clone ID: PAT_MRT3847_3065C.1.pep
LIFFYPPPPCMIFFYPPPPCTTISPPQATAPRYRYHHSTMSPSPTKVTASPPTPFTKYIALRNGAPVGIAEDMMLRPDFDVEYFDGDVRSAVNF

SEQ ID NO: 208895 - protein, 77 aa, Glycine max
  Clone ID: PAT_MRT3847_30660C.1.pep
NECNKEYVIHTCGMYTSLAPLPVYFYRPQFLPPLLLLHVPPVHELVVRCFYFTFRYRNVTHPKESQISQNPKTQDGD

SEQ ID NO: 208896 - protein, 100 aa, Glycine max
  unsure (1)..(100): unsure at all Xaa locations
  Clone ID: PAT_MRT3847_30661C.1.pep
KKSPRAAIKRLILETGGVKSPIGRLPGVSIMPKIKKGALNLSKDVXSQKGERMCPPPDGLPKFACDLREKGPPKMPFSPSPKLFWALGGPPAWDFPAPAP

SEQ ID NO: 208897 - protein, 50 aa, Glycine max
  unsure (1)..(50): unsure at all Xaa locations
  Clone ID: PAT_MRT3847_30662C.1.pep
LVXDDLYKSRXHIHYRNFVELISFHDCSCFXCXIXKXRRICRNQHRNDLX

SEQ ID NO: 208898 - protein, 52 aa, Glycine max
  Clone ID: PAT_MRT3847_30663C.1.pep
GAGKIPRGCLITGRLMVSFNNLGKKKPMLEKGFTGYFKAETLKNKGNPPPPH

SEQ ID NO: 208899 - protein, 42 aa, Glycine max
  Clone ID: PAT_MRT3847_30664C.1.pep
VVQKSSLPFMERVFSTETLVPCGLKGRWACAHLTFPPYCFFY

SEQ ID NO: 208900 - protein, 59 aa, Glycine max
  Clone ID: PAT_MRT3847_30665C.1.pep
CVRLEVHSYSRCGYGLSAFLVAFNDDRSGYGSQQYRGHWPCRIWEFLSHWSPDVEDPMV

SEQ ID NO: 208901 - protein, 103 aa, Glycine max
  Clone ID: PAT_MRT3847_30666C.1.pep
SGQPCALGPLSSVARVMLLKHAMIEYQGGKALHHLLWSFPAMLWHGMLAPVSASIRQGECFVRYSSRCGGVPPCRSSGRLASGTKVSGRSRQMAGERTRACLV

SEQ ID NO: 208902 - protein, 58 aa, Glycine max
  Clone ID: PAT_MRT3847_30667C.1.pep
RINHLKSDYQAIWAKDMLNQLQAKPNTERSSVIKTPWSHKIYASTKSHILPRDNWKTI

SEQ ID NO: 208903 - protein, 105 aa, Glycine max
  unsure (1)..(105): unsure at all Xaa locations
  Clone ID: PAT_MRT3847_30668C.1.pep
LARKAMVNADGIIEKAWAWIRYSMEITLDIYKDWSGTDQALPNDLRKRGVAXRDQSAAHGVRALIDDYSYAFDGLEIWDAIKSWVPEYDSFYVHVDGELQRDPEL

SEQ ID NO: 208904 - protein, 180 aa, Glycine max
  Clone ID: PAT_MRT3847_30669C.1.pep
MGNTMGRSKKAKVMKVDGETLKLKTPARANDVVKDYPGHVLLDSEAVKHFGLRAKPLEPYQELKPTKIYFLVELPKIQPEEEKTALPRRVRSSGIRGMNASDRLQLLMLSKRSVSDLPLSRQSPNLGSDGPIRVKMRLPKAHLDKLMEESTDGSQVAQKIISLYMGTNAGEGASLESAFK

SEQ ID NO: 208905 - protein, 87 aa, Glycine max
  Clone ID: PAT_MRT3847_3066C.1.pep
PLELFSARRLPDGVHLYLLRLALPLLHDNCGVGGRHVLHHLGNVLHRTDLTKIKPKSHKSNKTKHRSNKIKHIFVFHSQIYQNKTHI

SEQ ID NO: 208906 - protein, 86 aa, Glycine max
  Clone ID: PAT_MRT3847_30670C.1.pep
QDSLGSKVKDTFNGNLPFLFKVLSVETPLSIQAHPNKELAEKLHLQAPQHYPDANHKPEMAIALTPFQGLCGFRPVEEIVTFLKKV

SEQ ID NO: 208907 - protein, 52 aa, Glycine max
  Clone ID: PAT_MRT3847_30671C.1.pep
AFNGGNPGVFPVGMQYTAAHMGPTSGQNKKCFNHHCPHSRLHPHSVAPQINL

SEQ ID NO: 208908 - protein, 207 aa, Glycine max
  unsure (1)..(207): unsure at all Xaa locations
  Clone ID: PAT_MRT3847_30672C.1.pep
SKKAKVMKVDGETLKLKTPARANDVVKDYPGHVLLDSEAVKHFGLRAKPLEPYQELKPTKIYFLVELPKIQPKREKRXLPRRVRSSGIRGMNASDRLQLLMLSKRSVSDLPLSRQSPNLGSDGPIRVKMRLPKAHLDKLMEESTDGSQVAQKIISLYMGTNAGEGAAGVSAPEDGGRKTVHNHKPRGKRVSFSPMENEEIHVVGASQ

SEQ ID NO: 208909 - protein, 230 aa, Glycine max
  Clone ID: PAT_MRT3847_30673C.1.pep
MSKDKDGEEPLGIGLQVMLAAAFSLFGMILLIIIFHFCVKYFIRRQQRRRQNDLLYQISTQIAPIDVSSVEPRNSGLDPLIIASLPKLLYKQTDQFKQGEEVVECSVCLGTIVEDTISRVLPNCKHIFHVDCVDKWFNSNTTCPICRTVVDPKVQPEHGHLGATRLHNQVQPTAPPAEGGDELPDGNELERVGCSGLRIGSFHRMVSNRERSGRRTQSCDGSTIVDIERP

SEQ ID NO: 208910 - protein, 109 aa, Glycine max
  Clone ID: PAT_MRT3847_30674C.1.pep
GEPGGFSLGKKGSVGVFLKKPGGPFSLAFFLAPYPPAQAPWGCKGLGIFPWDRGSELLLKSWNRGNFIGFLTRFSNTLPRKVFTSRRKSLLRNQKPPLLGLVKKIFHPL

SEQ ID NO: 208911 - protein, 96 aa, Glycine max
  Clone ID: PAT_MRT3847_30675C.1.pep
IKRMTPRQLPFIYCAHCGYALNYLCSVCYAHFLWCAGATDTCTGSTHVLMPAMKHSQKQHSMAKLLLPQANLLLFYKTYTDSHYPIACIRQQTSFR

SEQ ID NO: 208912 - protein, 60 aa, Glycine max
  Clone ID: PAT_MRT3847_30676C.1.pep
ELYIRTSASVLDVIKKLPQAKCVLVRYSSMSPMAATIVSQLKSRNTVSPCAMSVSTYIGM

SEQ ID NO: 208913 - protein, 79 aa, Glycine max
  Clone ID: PAT_MRT3847_30677C.1.pep
ADNNFTQETAMTHDYASSNTTHYRESLHACRSTLEDLLVIWIYNEEEEDGLFSLLQYEMQQILSATGNQSRLITWLFLR

SEQ ID NO: 208914 - protein, 77 aa, Glycine max
  unsure (1)..(77): unsure at all Xaa locations
  Clone ID: PAT_MRT3847_30678C.1.pep
MRLNKAARVILFGAPGVGKGTQSERLLARFPQLNSVSTGDLLRRNVKERTPXRIKVETTMKSGGLVADDLILRLINE

SEQ ID NO: 208915 - protein, 95 aa, Glycine max
  Clone ID: PAT_MRT3847_30679C.1.pep
ALLGNLALAIRPEMMESSCLTISSLTEASVYPLPEAGLCYSAVANLASHGVQSSARGPTIDGNAIIIKLSALVVAIGATAHLQLPSQDHTSILIL

SEQ ID NO: 208916 - protein, 85 aa, Glycine max
  Clone ID: PAT_MRT3847_3067C.1.pep
RDKHNTVHTDLDLQSSHKLRSLAERVCHSTPAWANYIILEHAVECHVLSALCPLLCILMDELPQLLFSHLDQHITVLLPKMAFLY

SEQ ID NO: 208917 - protein, 56 aa, Glycine max
  Clone ID: PAT_MRT3847_30680C.1.pep
KAGESIKETAANIVASANAGMVKTKVTVQVKAESMTARDPMLKELATQKNEAKMSQ

SEQ ID NO: 208918 - protein, 57 aa, Glycine max
  Clone ID: PAT_MRT3847_30681C.1.pep
PRVLSLFFRVIFFFEIVTENYFHQGISFAIIKPKFYSASYKEKLLPFKDRVRIYFRG

SEQ ID NO: 208919 - protein, 59 aa, Glycine max
  Clone ID: PAT_MRT3847_30682C.1.pep
ARAKILGSQPNGPSLYLDLPRCAGTWLEPPFSCSITVYSVAHFHTTLLGPPILEGNGAT

SEQ ID NO: 208920 - protein, 114 aa, Glycine max
  unsure (1)..(114): unsure at all Xaa locations
  Clone ID: PAT_MRT3847_30683C.1.pep
SSRLRSGFXXLXRLWLFNLXFFXLXXXHSSXFXXNXXATXRTKPMGXXTKXXEGFXGLFAXIRILXGKLNLXFFGASRCXXXKTFEHGRXXKIXMXXKXGPXRESTXNXXXRGS

SEQ ID NO: 208921 - protein, 60 aa, Glycine max
  Clone ID: PAT_MRT3847_30684C.1.pep
TNPFLIALGLLFVDPINFSSYSRQADVMRMDTLNGGIGISTRSSSYSMGTSWVRRNNTVG

SEQ ID NO: 208922 - protein, 54 aa, Glycine max
  Clone ID: PAT_MRT3847_30685C.1.pep
CLNPSNTTGPVPILILLSLHSPLPIALPYSTCMSKHSLSKTCSYLHLPPGYGCR

SEQ ID NO: 208923 - protein, 108 aa, Glycine max
  unsure (1)..(108): unsure at all Xaa locations
  Clone ID: PAT_MRT3847_30686C.1.pep
XARVRKLGIRLEXHLKKKXNKQXNKKEXQPWAMQLIXPXTAESLXPXXQKXXXVXXGXXKXFPXXXVHXXGXXXXPXXXXXXXXXXNXIFSFXXXKGXVIKAWELXXN

SEQ ID NO: 208924 - protein, 53 aa, Glycine max
  Clone ID: PAT_MRT3847_30687C.1.pep
LYFFQAVATYFTNISIPTCEVLQESCIIYITMQCYLNMAFTKLWIDDCIHIKL

SEQ ID NO: 208925 - protein, 58 aa, Glycine max
  Clone ID: PAT_MRT3847_30688C.1.pep
TVEQRTDNIKAAKVSKPDNYSKKGAKDYLLSCPTPYPKIHLAKFFERISSNSQRLNSE

SEQ ID NO: 208926 - protein, 520 aa, Glycine max
  Clone ID: PAT_MRT3847_30689C.1.pep
RFGSSDPFPIKIAENALLSFLLLLKHCKLQQDEERDNLNTFKSEKLDSVKDRILEGVLRLLFCTGVSEAIASACYKEAASVIASSRVEYTHFWDLVASGVVNSSSQARDKAVKSVEFWGLRKGSISSLYAILFTSKPIPSLQFAAYFVLSNEPVLSIAVLEDNACNSNIYAASEEDISRLDLPIEEKVHLKEEISFMVERAPYEVLDMDLLADQRVNLFLAWSLLISHLQSLPSSSSQRERLIQYIQDSATPVILDCLFQHIPVEISTVQSLKKKDAELSGGLSEASSAATRATTTGSLLFSVESLWPVELGKISSLAGAIYGLMLQVLPAYVRGWVSDLRDRNTSAVIESFTRTCCSPPLIANELSQIKKSDFRDENFSVSVSKSANEIVATYTKDETGMDLVIRLPASYPLRPVDVDCTRSLGISETKQRKWLMSMMLFVRNQNGALAEAIGIWKRNFDKEFEGVEECPICYSVIHTTNHGLPRLACKTCKHKFHSACLYKWFSTSHKSSCPLCQSPF

SEQ ID NO: 208927 - protein, 106 aa, Glycine max
  unsure (1)..(106): unsure at all Xaa locations
  Clone ID: PAT_MRT3847_3068C.1.pep
HNNQHIQHFPPNPGKPRKQSRLCNKTFDNLYQKPHPPIHIPFNHKLSPQELRSLASTLDSQVSRSQARIFRPFQKFYSLRPQAYVSNGYYSRNGVGSNPGISXTGT

SEQ ID NO: 208928 - protein, 117 aa, Glycine max
  Clone ID: PAT_MRT3847_30690C.1.pep
MMEDPTTLLNSEYSRLFGEDTDLYNRIVLGALLPHSVWGPLPRFLQTWLRNYLGGVLLYLLSGLLWCFYIYYWKRNVHVPKGDDLRFESRLKEVLIIFCVCSVSNMIVFKRGYLWGN

SEQ ID NO: 208929 - protein, 58 aa, Glycine max
  Clone ID: PAT_MRT3847_30691C.1.pep
QRLWLHRQEQKILTLCRDALFFSFWFSPSYMHKSSLIMCCSVEYTLSNISIISYNILT

SEQ ID NO: 208930 - protein, 43 aa, Glycine max
  Clone ID: PAT_MRT3847_30692C.1.pep
LFRLDQAALNHETSLSFSLSLSHMSNKEMMILILYIYFSRTRG

SEQ ID NO: 208931 - protein, 90 aa, Glycine max
  Clone ID: PAT_MRT3847_30693C.1.pep
GVVFGSSDTAVLGIFPFVGGVVVTYCGPCCGTCWRWAGDTTFPGVEWVTRTGGVTVPGGVTITGVEVVVCVCTPLAHPALTRAAVSPPIS

SEQ ID NO: 208932 - protein, 37 aa, Glycine max
  Clone ID: PAT_MRT3847_30694C.1.pep
RESLPLCYYTLRLDAIKYLEKCSLILYIYHEITKSLN

SEQ ID NO: 208933 - protein, 188 aa, Glycine max
  Clone ID: PAT_MRT3847_30695C.1.pep
YDPWDLPGNCDLQERHFFSPKEAKYRNGNRMNRTTKCGYWKATGSDKRISSSTCNNGIVGVRKTLIFYEGKSPKGSRTHWVLHEYRLVSVETGAANSSHNNYVNEIGDWVLCRLSMKKRSLESDGSATHQKHRQNNTVQTSRPRLMFDFMMVGKTNSSTSSSCSSSSNIMEVSSNASDHEETSGYAHF

SEQ ID NO: 208934 - protein, 202 aa, Glycine max
  Clone ID: PAT_MRT3847_30696C.1.pep
MASQSLSLPPTHIPYNRIIGKLDSKFLLWPSCAHIKPRRISTSIRAMGSSASSHSQSQYADSVESEAGADTIDYKSLTDEEWKKRLTNEQFYITRQKGTERAFTGEYWNTKTPGIYHCICCDTPLFESSTKFNSGTGWPSYYQTIGKNVKSKLDLSIIFMPRQEVLCAVCDAHLGHVFDDGPPPTGKRFCINSAALKLKPKQ

SEQ ID NO: 208935 - protein, 50 aa, Glycine max
  Clone ID: PAT_MRT3847_30697C.1.pep
LFHSHTTYNTLSSKPYSTYRYSTHIIPLITLTFSKHSYYSIPYLSPSIAT

SEQ ID NO: 208936 - protein, 47 aa, Glycine max
  Clone ID: PAT_MRT3847_30698C.1.pep
MASTKKIILKSSDGDAFEVDEAVALESHTIKHMIDDDCTDSRIPLAN

SEQ ID NO: 208937 - protein, 84 aa, Glycine max
  unsure (1)..(84): unsure at all Xaa locations
  Clone ID: PAT_MRT3847_30699C.1.pep
AXWCLLICDMNVSHACAMDCNPLSSLGNDNTTSAGSSSQAEPQSXXETKCPELSLLSPSKSIPAGSHYSQSKKPFVTXIPVVNN

SEQ ID NO: 208938 - protein, 143 aa, Glycine max
  Clone ID: PAT_MRT3847_3069C.1.pep
ATTNWKEYTSPDGRKYYYNKITNESKWSIPEELKLAREQVEKAIVSGSRPEALLNSHPQPSPTPSATEATPNTDNSTLPSQGEPSSPVSVAPVVTTSISNPQSEMPSGPSLSTSANAITGAKVDELEAPVNTVTPSDTCVGSD

SEQ ID NO: 208939 - protein, 318 aa, Glycine max
  Clone ID: PAT_MRT3847_306C.1.pep
DSDSSYENADLSRSKRKKAKKRGKSRSKEGDDSSEWASKELLEFVMHMRNGDKSVLSQFDVHTLLLEYIKRNKLRDPRRKSQIICDARLQNLFGKPKVGHFETLKLLESHFLLKDDSQAEDLQGSVVDTEMSHWEGDGNPNSYTKAGKDKRRKNRKKGDERGLQTNVDDYAAIDNHNINLIYLRRNLVEDLLEDTEKFHDKVVGSFVRIRISGSGQKQDLYRLVQVVGTCKAAEPYKVGKRMTEILLEILNLNKTEIVSIDIISNQEFTEDECKRLRQSIKCGLINRLTVGDIQDKALVLQEARVKDWLETKTVRLSH

SEQ ID NO: 208940 - protein, 74 aa, Glycine max
  Clone ID: PAT_MRT3847_30700C.1.pep
EFRRLVRCSFGKGRRETQKEFRRLVLGEFFLAKGEENKRYITLLFSRFGKPENFRKLLQRKKKKKKKFKEIQKL

SEQ ID NO: 208941 - protein, 86 aa, Glycine max
  Clone ID: PAT_MRT3847_30701C.1.pep
RRRPTRPATFTLWILSFSNHKAILSNLGSHTQIQPFRKTFAFHFSFWLEPRPIGFSFFCYLQNITRSNIPLYELGELSSTHRVKKT

SEQ ID NO: 208942 - protein, 104 aa, Glycine max
  Clone ID: PAT_MRT3847_30702C.1.pep
ARAKTLSSFTLFFSFIKLLTLLFRLNNRTGSIYLNNFTIFYLTITFFDIIINTHFKTFKLTLILINPITFYHLIVSANILPYYILSYILNLFTLLFEKALKINP

SEQ ID NO: 208943 - protein, 59 aa, Glycine max
  Clone ID: PAT_MRT3847_30703C.1.pep
IIMPKPPTGSKRHLFKQQTRWRAHNHPFVLGGTQGLTKLCKPHSGYLAFFLALQLVGLL

SEQ ID NO: 208944 - protein, 43 aa, Glycine max
  unsure (1)..(43): unsure at all Xaa locations
  Clone ID: PAT_MRT3847_30704C.1.pep
YQSFFIRGFYLTLQFGDRSXLNFSLSSNSCLYINPIPPIHHGN

SEQ ID NO: 208945 - protein, 101 aa, Glycine max
  Clone ID: PAT_MRT3847_30705C.1.pep
CQKTTERDSIIISNFRHSEPQQWGNQRNPRLQLASQPPPSSRIRIPSWSSTSSVSIPSVSGTSPIPTPPPGILPNLTISQPTVRTQSKHSTITKRGNNWFK

SEQ ID NO: 208946 - protein, 86 aa, Glycine max
  Clone ID: PAT_MRT3847_30706C.1.pep
LGPPRALKTSDNQPGRGGPPGNSHPAPGGHPIFLKGGKLKPGPNPGKKSFRGEKVNRPKCQKEGNPQQKRVTPGGPMGGTNPNWGG

SEQ ID NO: 208947 - protein, 91 aa, Glycine max
  Clone ID: PAT_MRT3847_30707C.1.pep
SWIPFLYRHIFLGSNPDISPGSVWRWGLFKSRMTFLQMVQFVFSKNKTGSFLIHPFTNLNWRHPPQSLNISKNVGRTLCFPLNLIHGFSSF

SEQ ID NO: 208948 - protein, 96 aa, Glycine max
  unsure (1)..(96): unsure at all Xaa locations
  Clone ID: PAT_MRT3847_30708C.1.pep
KVNEPTILQINLLLERQNGLHMSLPKHFQXFHVQLGLRNGFVHVIDDDEQLIIRLGLIVITGMLHLAXEDMFRQRHYYAVDVHELASESFSTECEH

SEQ ID NO: 208949 - protein, 90 aa, Glycine max
  unsure (1)..(90): unsure at all Xaa locations
  Clone ID: PAT_MRT3847_30709C.1.pep
RVRPALGLTLLQSLSFTTEFDVLVQGELINALLLVIKALRALTNLTLDDATDXNAWIPKHFKEWISYDQAEDAKKQLAESIANVYHCLNT

SEQ ID NO: 208950 - protein, 54 aa, Glycine max
  Clone ID: PAT_MRT3847_3070C.1.pep
SATFASHVQCSIDLEVFYPVNAPLGRLVHTITVIRTYESETRIVGWSHTQLTTQ

SEQ ID NO: 208951 - protein, 183 aa, Glycine max
  unsure (1)..(183): unsure at all Xaa locations
  Clone ID: PAT_MRT3847_30710C.1.pep
MEAKLWEARFSPTLPLLPPTPRLPSLNLHFPSSSTSTLHLARNSVSDTXPIQNEEKEQTLSSVKPTYSPTGIHRSTHASASRYHFDGTTRKFFEGWYFKVSIPERRQSFCFMYSVESPSFRKPLTPLELAQYGPRFTGVGAQILGADDKYICQYSPQSQFFWGSTHFLSTLLCSFNFLYYFLE

SEQ ID NO: 208952 - protein, 90 aa, Glycine max
  unsure (1)..(90): unsure at all Xaa locations
  Clone ID: PAT_MRT3847_30711C.1.pep
LNENPENYFAEVEQVAFNPAHLVPGIEPSADPVLQSRLFSYPDTHRHRIGVNYQQLPVNQPRVPYRMGNFQRDGSMAFYNQGARPXYLSS

SEQ ID NO: 208953 - protein, 59 aa, Glycine max
  Clone ID: PAT_MRT3847_30712C.1.pep
CTIIVHVNQIMHFNHHPLPTLEIKIKERENPSLISINEISNYIFFPHRTERTRERIILL

SEQ ID NO: 208954 - protein, 184 aa, Glycine max
  Clone ID: PAT_MRT3847_30713C.1.pep
MQLHFSPSMRSITISSKNGFIDLMKIKVAACHISYRTLFHTILILAFLLPFVFILTALVTLEGVNKCSSFDCLGRRLGPKLLGRVDDPAQRLVRDFYNILNEVKTREIPSALELPDSFDQLVSDMKSNQYDAKTFAFMLRGMMQKFEREIRESKFSELMNKHFAASSVSKGIHCLSLRLTDEYS

SEQ ID NO: 208955 - protein, 184 aa, Glycine max
  Clone ID: PAT_MRT3847_30714C.1.pep
LEVSSEAMADLKSIADCMISNGYAKECVSVYTTMRKSIVDEGIYRLNVEEFSSSKVNKMHWDVLELKIKSWLEAVKIAVRTLFAGERILCDHVFGASQSISEACFAEISRSGANLLFGFPELVAKTKKSPPEKIFRMIDMYAAIAGMWSEIESIFSLDSTTAVKSQAYGLVLGLSESVRTSLSD

SEQ ID NO: 208956 - protein, 50 aa, Glycine max
  Clone ID: PAT_MRT3847_30715C.1.pep
NLTTSYYLLQFLNNSSLLHINTYITINLYLPTNHLSNTLSFIQYTSNFIP

SEQ ID NO: 208957 - protein, 118 aa, Glycine max
  unsure (1)..(118): unsure at all Xaa locations
  Clone ID: PAT_MRT3847_30716C.1.pep
MDNAIGGHRVLIEHLQPISYTRNVSSQTHQSXISELSLCNAGNSTHGQTSGSDEEVEIEHAYRTDICKAERGGFKDTLPYDLIDTTLNAVLQNTNVDPAEEGDIVAGTVLAPESDRRI

SEQ ID NO: 208958 - protein, 100 aa, Glycine max
  Clone ID: PAT_MRT3847_30717C.1.pep
PWKPSCFRSHFFFWGRQQQRLFHPCEHRCIPSCLSKSPQLCLLSRKGNFFYNFSSLSSFSWNTLEGPFWKSGFPGLIFLAAFVGFYVVGYDLWPLCSRDR

SEQ ID NO: 208959 - protein, 81 aa, Glycine max
  unsure (1)..(81): unsure at all Xaa locations
  Clone ID: PAT_MRT3847_30718C.1.pep
FIAVEWLLEYWLLTRAFDDHRHPYLPKHFFSCLLPHFSDGFDSGXIDVLSAHADIRVSVVLMLIAANIFPFYSPSTCAAFY

SEQ ID NO: 208960 - protein, 55 aa, Glycine max
  Clone ID: PAT_MRT3847_30719C.1.pep
HLLGNEIRVYELASQILSNEGTHNANLKYRTGDEIVAQLTRNANLKGQNREDEKR

SEQ ID NO: 208961 - protein, 49 aa, Glycine max
  unsure (1)..(49): unsure at all Xaa locations
  Clone ID: PAT_MRT3847_3071C.1.pep
XVLLXYGPEFAEXHLXLLHHNQTPQSQHHICTXYRXCPLIXSDFKSXXQ

SEQ ID NO: 208962 - protein, 232 aa, Glycine max
  Clone ID: PAT_MRT3847_30720C.1.pep
MLSGDIPPNQTIYIKNLNEKVKKDELKRSLYCLFSQYGRILDVIALKTPKLRGQAWVCFSEVTAASNAVRQMQNFPFYDKPMRIHYAKTKSDCIAKEEGSFVPREKKKKQEEKAERKRRVEEAQQSGVANGTHSASNGGPTASFRQGPGAQEAAAPNNILFIENLPHETTGRMLEMLFEQYPGFKEVRLIEAKPGIAFVDFEDEVQSSMAMQALHGFKITPQNPMIITFAKK

SEQ ID NO: 208963 - protein, 180 aa, Glycine max
  unsure (1)..(180): unsure at all Xaa locations
  Clone ID: PAT_MRT3847_30721C.1.pep
MLSGDIPPNQTIYIKNINEKVKKDELKRSLYCLFSQYGRILDVIALKTPKLRGQAWVCFSEVTAASNAVRQMQNFPFYDKPMRIQYAKTKSDCIAXKKKKQEEKAERKRRAEEAQQSGVANGTHSASNGGPTASFRQGPGAQETAAPNNILFIENLPHETTGRMLEMLFEQYPGFKEVRL

SEQ ID NO: 208964 - protein, 143 aa, Glycine max
  Clone ID: PAT_MRT3847_30722C.1.pep
VKVLQLETAAGAAVRFFDKAIGINVPRSRFLRVKATSDLHLVQSDLYTLQDGLVIRNQPRANPENPSIELGPEFKKVSNFLSRFKSIPSIVELDSLKVAGDVWFGAGVILKGKASILAKPGVKLEIPDGAVIADKEINGPEDL

SEQ ID NO: 208965 - protein, 131 aa, Glycine max
  unsure (1)..(131): unsure at all Xaa locations
  Clone ID: PAT_MRT3847_30723C.1.pep
GFLAHLVRLFSVRQRGVRTWYSRASFSDALPSAAYDPIVMRDAIVLAVIERFMTDVPFXSLLCGGLYSSLAACITSRXYLSNTKAVLQWXAQSRAFLGGLVVSTICGSEELXDYLCTVRHESTLSVQDGTY

SEQ ID NO: 208966 - protein, 39 aa, Glycine max
  Clone ID: PAT_MRT3847_30724C.1.pep
RYAVRKLLQIVLNRIFRSSSVGTPHVTIYTSRHVLPNNY

SEQ ID NO: 208967 - protein, 151 aa, Glycine max
  Clone ID: PAT_MRT3847_30725C.1.pep
PNPKKVDGVKFLQLETAAGAAIRFFDKAIGINVPRSRFLPVKATSDLLLVQSDLYTLQDGLVIRNQARANPENPSIELGPEFKKVSNFLSRFKSIPSIVELDSLKVAGDVWFGAGVILKGKASILAKPGVKLEIPDGAVIADKEINGPEDL

SEQ ID NO: 208968 - protein, 131 aa, Glycine max
  unsure (1)..(131): unsure at all Xaa locations
  Clone ID: PAT_MRT3847_30726C.1.pep
VXXVXARNRLEXKKILLNLILXALFFPXXLTRHNGVQXENHNLQXPSSNQCPIPFYPXXXXQXLLXPHXXHXXLYNSXLYNKFFPNXPXXPFXTPXXRGASSPXXAXASQTRXFPXPARXXPGXNPRWGWG

SEQ ID NO: 208969 - protein, 72 aa, Glycine max
  Clone ID: PAT_MRT3847_30727C.1.pep
LFLSKYPTTPTLHFQHFRNRNPHTPQFLTQGVTSFVRVCVTIAAEETPLYNFILLPFHCVSPVGERQTCTLE

SEQ ID NO: 208970 - protein, 34 aa, Glycine max
  Clone ID: PAT_MRT3847_30728C.1.pep
VISIHSRERHYDSSPVPLIDPSVAKAKFISLERV

SEQ ID NO: 208971 - protein, 35 aa, Glycine max
  Clone ID: PAT_MRT3847_30729C.1.pep
GSSANIPLHSHKLEHPDTAISRDGYYFPLTPIHVQ

SEQ ID NO: 208972 - protein, 68 aa, Glycine max
  Clone ID: PAT_MRT3847_3072C.1.pep
MGKEKAHISIVVIVHVDSGKSTTTGHLIYKLGRIDKRVIERFEKEAAEMNMKSYMYDCVLDKLKAYRE

SEQ ID NO: 208973 - protein, 38 aa, Glycine max
  Clone ID: PAT_MRT3847_30730C.1.pep
GGKDHQLLIGISCLIMTIMLPPDVMSALLLGELLHLIM

SEQ ID NO: 208974 - protein, 443 aa, Glycine max
  Clone ID: PAT_MRT3847_30731C.1.pep
MGKGNMELETNKVYDYEDARGDVEVPDTAHQISTDSWFQVAFILTTGINSAFVLGYPGTVMVPLGWIGGVIGLILATMVSLYANALIAYLHELGGQRHIRYRDLAGFIYGKKAYNLTWVLQYINLFMINTGYIILAGSALKATYVLFRDDGLLKLPYCIAIGGFVCAMFAICIPHLSALGIWLGFSTVFSLAYIVISFVLSLKDGLQSPPRDYEIPGDGVSKIFTIIGASANLVFAFNTGMLPEIQATIRQPVVKNMMKALYFQFTVGVLPLYLVAFTGYWAYGSSTEVYLLNSVNGPVWVKASANITAFLQSVIALHIFASPMYEFLDTKYGIKGSALNAKNLSFRVVVRGGYLAFNTFVAAFLPFLGDFMSLTGAISTFPLTFILANHMYLKAKKDKLNSSQKLWHRFNIGFFAIMSLAATISAIRLISVDSKTYHVFADL

SEQ ID NO: 208975 - protein, 102 aa, Glycine max
  unsure (1)..(102): unsure at all Xaa locations
  Clone ID: PAT_MRT3847_30732C.1.pep
WFSYLFTSFQDKFGIPTAACPALRGLRAGIFALNLAATSYRSVTKVDVLLRPGIITSTPGLXGSGSLGTAKVLXCSLIGSELVGGLDAPSLMLRAAHGAACG

SEQ ID NO: 208976 - protein, 114 aa, Glycine max
  Clone ID: PAT_MRT3847_30733C.1.pep
FHLFMCVYHFGVRQRCECHRRKKMTEEQTRTAEAESVTPPPAAGGALQDPAGAEAEHVPEATRDGTEEKRGIPVPSCDDKPDESKATVLDAKTHEVAEVKPTEGSINPDAALAR

SEQ ID NO: 208977 - protein, 70 aa, Glycine max
  unsure (1)..(70): unsure at all Xaa locations
  Clone ID: PAT_MRT3847_30734C.1.pep
PLXAXXHPVXWGKXXPPDHQPXXETXRXRXANLGRXNPXPDIFDSIGIMSLLGPGKNVLLXSARTLVPQD

SEQ ID NO: 208978 - protein, 67 aa, Glycine max
  unsure (1)..(67): unsure at all Xaa locations
  Clone ID: PAT_MRT3847_30735C.1.pep
TIGAVNRSPLSLNSSEAGDSAPSAXFVGTRSPKATASLVPFVPPXSGSCRTPAADKEMEEHQRAGGV

SEQ ID NO: 208979 - protein, 58 aa, Glycine max
  unsure (1)..(58): unsure at all Xaa locations
  Clone ID: PAT_MRT3847_30736C.1.pep
KLMITWARHTSXRELKWNTSHMRGKWKEYPKGLHGVHPTEGAGPQSTRGICWLHPSLT

SEQ ID NO: 208980 - protein, 82 aa, Glycine max
  unsure (1)..(82): unsure at all Xaa locations
  Clone ID: PAT_MRT3847_30737C.1.pep
XXXXXSTYXXXXXXXNXXXPXQPQPXLVXXXPXXXXXXXNQXXXPWLXNXAXPGSXXIRXXXXXSXXAXHXXQXVXXRXSMR

SEQ ID NO: 208981 - protein, 44 aa, Glycine max
  Clone ID: PAT_MRT3847_30738C.1.pep
MNLCPQPPLIVPQTSLVQPWTTPMYHTTCDPFETQSKFNDLWVP

SEQ ID NO: 208982 - protein, 101 aa, Glycine max
  unsure (1)..(101): unsure at all Xaa locations
  Clone ID: PAT_MRT3847_30739C.1.pep
MSFILFPILFTFTFLSSPILSASDLILTKVNHHINLTSXIVHITTSLKVQNTKSNIISKILLSFPKNQTSNLTYLKTTLSNKKRKSKPSSSDYLPIEVVQP

SEQ ID NO: 208983 - protein, 104 aa, Glycine max
  Clone ID: PAT_MRT3847_3073C.1.pep
KNGLLFIKKTTIFMEKKNYTRALFLQKRKNKPQGEFLEKKKKKVYNYFRVNGAKGKKKKPKTWPCFGALKTHCLPPPPFPENLPGGGATAETRYQHPADRIDKT

SEQ ID NO: 208984 - protein, 90 aa, Glycine max
  Clone ID: PAT_MRT3847_30740C.1.pep
RRRVLSFHPRTHPLRYDVPSSYSVAFASLGINLLWLPQFFTWQFILSNGNILHSTTLLRIHRTCINKYTPFFFLLRSSSFSVHFCTTRTR

SEQ ID NO: 208985 - protein, 91 aa, Glycine max
  Clone ID: PAT_MRT3847_30741C.1.pep
VFKVDAVDGTARKVLLNEDLVGADDIAVRKDGAAAVVSPLKELWLVKRIDSWAEGTVYDNVEVNVRRFPTSVVVGDKERVYVLYGHLDEGR

SEQ ID NO: 208986 - protein, 35 aa, Glycine max
  Clone ID: PAT_MRT3847_30742C.1.pep
FILAYRETEYVQFSFSSTYGKVFKIQILKVSCNKT

SEQ ID NO: 208987 - protein, 236 aa, Glycine max
  unsure (1)..(236): unsure at all Xaa locations
  Clone ID: PAT_MRT3847_30743C.1.pep
RVRPIKEWNRXHFGDTFSKYKKIEEDLNKLEEESTDRALSQQEVEVRRQLQQQLWEAAQAHESLLRQKAQSKWIKQGDCNTRFFHLMINARRRNNCLNGVLIDGVWRDEPSIVKEEVRSFFRQRFQEADQARPKLDGIQLQSIDFQQNQMLVERFNEEEVRRAVWSCGSDKSPGPDGLNFKFIKLFWDIIKPDFLRFLDEFHVNGSXPRGLNASFIAXIPKVLDPQVXNEYRPISL

SEQ ID NO: 208988 - protein, 66 aa, Glycine max
  Clone ID: PAT_MRT3847_30744C.1.pep
ESESSNPRFHQLALDIEQSSEKDTERVYISHRVIYHIGECTAYNLRVEKNMIHRVCGQHRELFSSP

SEQ ID NO: 208989 - protein, 49 aa, Glycine max
  Clone ID: PAT_MRT3847_30745C.1.pep
CFQDFPKWVPSRLVLRRLPCPRVSLSRESSVFAYSLLINWSLNYLLCLA

SEQ ID NO: 208990 - protein, 42 aa, Glycine max
  Clone ID: PAT_MRT3847_30746C.1.pep
QTLMMPTGSPSLVSVASPHSENEHVGQNNSQFAKRCVFPTNC

SEQ ID NO: 208991 - protein, 74 aa, Glycine max
  Clone ID: PAT_MRT3847_30747C.1.pep
LSLSLPLSLSRSLPPFSLSCDLFMSEKIKSHKLCVYLDANSSAISLWYGWSVTPLLGLCMIVYYPRLIIFLNYQ

SEQ ID NO: 208992 - protein, 98 aa, Glycine max
  Clone ID: PAT_MRT3847_30748C.1.pep
MDVPNDNHVLTDLPENGCFNSHPQILCKPSVEAFEAAIRIANVDPKKTVGHSDLVPGADHALNSIHNIKEALPEIWEIEDGNQQQKIQPPTVETMVLA

SEQ ID NO: 208993 - protein, 36 aa, Glycine max
  Clone ID: PAT_MRT3847_30749C.1.pep
SFFTQQFSFVFFAFLKLGFSISIHSLIIKDVWDGTE

SEQ ID NO: 208994 - protein, 60 aa, Glycine max
  Clone ID: PAT_MRT3847_3074C.1.pep
LQLESLEGSLNSQKRVYDLIIIYMRDPKTNMYWGINIIGDVEEVKVIKDRKVKIFSRKQK

SEQ ID NO: 208995 - protein, 120 aa, Glycine max
  unsure (1)..(120): unsure at all Xaa locations
  Clone ID: PAT_MRT3847_30750C.1.pep
GNXKREGRELTPTIANXPAXPXXXXXXXXAGTXDXDXQKEPXGTGKDGKNAHXRDXXPXXQEXAEXXQXXAXXDXXRXTXEXXTKGNXXXNQXQXXAETXXXRDPKXTXXQEXPYXKGXT

SEQ ID NO: 208996 - protein, 274 aa, Glycine max
  Clone ID: PAT_MRT3847_30751C.1.pep
MDTSYRTGGVKYECLLFDMDDTLYPLSLGLNLFCRKNIQEYMLELLHIEESEVPKMCLDLYREYGTTMAGLKVLGYEFDNDEFHAYVHGRLPYEKLKPDPVLRNLLLSMPQRKIIFTNADHAHAVKVLNRLGLEDCFEGIICFETLNPPKQINCMDVPNDNHVLTDLTENGCFNSHPQILCKPSVEAFEAAIRIANVDPKKTIFFDDSVRNVESAKITGLNTVLVGHSDLVPGADHALNSIHNIKEALPEIWEIEDGNQQQKIQPPTVETMVLA

SEQ ID NO: 208997 - protein, 125 aa, Glycine max
  unsure (1)..(125): unsure at all Xaa locations
  Clone ID: PAT_MRT3847_30752C.1.pep
AAIADLGIGLENKIILHFENVFWPNVEFLGVVADTPYECSYFLNLHKATGRAVLVYMPSGQLAKDVEKMPDEAAXNFAFMQLKKIFPDASSPVAILILLLISFTFSSARKMNAFITNTLSKIHRP

SEQ ID NO: 208998 - protein, 38 aa, Glycine max
  Clone ID: PAT_MRT3847_30753C.1.pep
GGKIQEEATPEHHPHRRHQLHPSLHHHHFHHLHQQLQH

SEQ ID NO: 208999 - protein, 162 aa, Glycine max
  unsure (1)..(162): unsure at all Xaa locations
  Clone ID: PAT_MRT3847_30754C.1.pep
NGEEERRGEEXXEXGXXKDXXGRXXXGXXRGSXERARXXXXXXSGGGXXXXKGKXXXSXRXQDRGPGQXGXXTGRTSTAXRKTRPTASXSGRKRAXXPRRGAQGRPKTTQGGRRKRRQARTGRERKGNKGEGTGPASRERGRAKRETTRQGEGEEKGASPER

SEQ ID NO: 209000 - protein, 42 aa, Glycine max
  Clone ID: PAT_MRT3847_30755C.1.pep
KSPVRSNQKLDPWSLFTLPTVDHIVCKILSFSGLVPKNLTVY

SEQ ID NO: 209001 - protein, 72 aa, Glycine max
  unsure (1)..(72): unsure at all Xaa locations
  Clone ID: PAT_MRT3847_30756C.1.pep
NVLPYYXAREXTLGGVXNXILTLTDQGLLSQLVPAMQNVQNALXAVSLDGKIMVSTEHSMAVFIFXNPPSSG

SEQ ID NO: 209002 - protein, 72 aa, Glycine max
  Clone ID: PAT_MRT3847_30757C.1.pep
PPGVGVLFCWCCFRRATPMLVAVLTFWFGGRSPPFWSRLCFALAAYARGRLCRLALRLRVEKPKKLKKPTNL

SEQ ID NO: 209003 - protein, 59 aa, Glycine max
  unsure (1)..(59): unsure at all Xaa locations
  Clone ID: PAT_MRT3847_30758C.1.pep
VLPVPLPERXCITLHDKTLEIHTQMVTVICKLYKWGRPMIKKHIKKLEFKKHPQILQNL

SEQ ID NO: 209004 - protein, 65 aa, Glycine max
  Clone ID: PAT_MRT3847_30759C.1.pep
HVHPGHNSSIEHLATRRREFTESTRCLHNLPRHTHLLIITIHTHLNFPNGHVQIQRRHVDSVLHP

SEQ ID NO: 209005 - protein, 58 aa, Glycine max
  Clone ID: PAT_MRT3847_3075C.1.pep
RRFLWARFVQYPHDQCTAPFGYFPTHRCPCAIAYDVPRIRIRIRVISSRFYLSFLLGA

SEQ ID NO: 209006 - protein, 106 aa, Glycine max
  Clone ID: PAT_MRT3847_30760C.1.pep
MECNAKSLGQWDWEHLFFFNTKAAENPRLQPTDCSSEADREINVGMLHPSGGSACSGSELIHASSSRSSKSASNNSSSNGDSKASILTLEGSHDDSTGKKELCNGE

SEQ ID NO: 209007 - protein, 291 aa, Glycine max
  unsure (1)..(291): unsure at all Xaa locations
  Clone ID: PAT_MRT3847_30761C.1.pep
MECNAKSLGQWDWEHLFFFNTKAAENPRLQPTDCSSEADREINVGMLYPSGGSACSGSELIHASSSRSSKSASNNSSSNGDSRESILTLEGSHDDSTGKKELCNGEPVETSPAAVPSPVSGEPLLTLKLGRRLYFEDVCTASDSKKPSSFEVPILSGKKYKTSSQAVQHPSCQVEGCGLDLSSAKDHHRKHRVCEAHSKSPKVVITGLERRFCQQCSRFHCXLSEFDDKKRSCRQHHFATNSSRSKSQPDSILLNPSALSTSPYDGRQIVNTFAFSRTPIDLAWQDMNPQT

SEQ ID NO: 209008 - protein, 46 aa, Glycine max
  Clone ID: PAT_MRT3847_30762C.1.pep
PTGFTNPNLKRSTTTTIMAQGFKCSMFSPHVPHLMTHHQCHCNRFS

SEQ ID NO: 209009 - protein, 60 aa, Glycine max
  Clone ID: PAT_MRT3847_30763C.1.pep
GNRGQMPTNNSALMAMSADEETVAGFLMAGEGHADLAQKKNYLIVESKDTVQQTGEAFEE

SEQ ID NO: 209010 - protein, 126 aa, Glycine max
  Clone ID: PAT_MRT3847_30764C.1.pep
MQQGGGSETEVTWEDQQNINKFGRLNNRFHELEDEIKIAKETNDNLEDASNELILTDEEVIRFQIGEVFAHVPKDEVENRIEQIKEVTSQKLAKLEEEKESILAQMAELKKILYAKFNDSINLEED

SEQ ID NO: 209011 - protein, 42 aa, Glycine max
  Clone ID: PAT_MRT3847_30765C.1.pep
TIIHYSTIQINTNRINPNTISEPIQFIFLVTLKKFVNSQVRL

SEQ ID NO: 209012 - protein, 226 aa, Glycine max
  unsure (1)..(226): unsure at all Xaa locations
  Clone ID: PAT_MRT3847_30766C.1.pep
TRPAKAKAKQMQEPHKSADSIIKKLWAKILGIGPAFRTIMSMSRDDWAKKFRHWWDEFKSTLQHYWFGTKLLWADIRISSRLLLKLAGGKSLSRRERQQLTRTTADIFRTRXRTGLTCXEALKRRLNARIEYAKFLQDTVKEMAKEIQNSQSGEMKKTAEDLDEFMNKVRTGARVSNDEILGFAKLFNDELTLDNISRPRLVNMCKYMGISPYGTDAYLRYMLRKR

SEQ ID NO: 209013 - protein, 56 aa, Glycine max
  Clone ID: PAT_MRT3847_30767C.1.pep
CRGVEARSTTSHPTVIHTLEDLLRIQHWLTLYLYPFNQPKYMHKVQQLHPQMPQSI

SEQ ID NO: 209014 - protein, 74 aa, Glycine max
  unsure (1)..(74): unsure at all Xaa locations
  Clone ID: PAT_MRT3847_30768C.1.pep
HRVHSISCXIYTCHYHTLWRRRSPIRSPLSVLSNPTFSLLLTPLETNLRTSPLFTYIVVLNTLTLTRCSRRIHN

SEQ ID NO: 209015 - protein, 50 aa, Glycine max
  Clone ID: PAT_MRT3847_30769C.1.pep
FCIVTVLWSGNLNVTISRVPDESQLYSKVPPTVWMIKNCVSKIELLEDVT

SEQ ID NO: 209016 - protein, 109 aa, Glycine max
  Clone ID: PAT_MRT3847_3076C.1.pep
ARRSRVVANFSDFEDPPSPPSSYDNTYLNEEEFSKPPPELPPQLPVAIRHEASSSASGSRFVPRPTHLELNHLYIHKTDRGQFVALRSTYKFQHKYITTELYKSLRRER

SEQ ID NO: 209017 - protein, 62 aa, Glycine max
  Clone ID: PAT_MRT3847_30770C.1.pep
KKNFICITLSEVQEVEFKLYNQVVSKKLKQFRETLNLYCLEYNEKGAEKRIKVFLVKIFGKI

SEQ ID NO: 209018 - protein, 56 aa, Glycine max
  Clone ID: PAT_MRT3847_30771C.1.pep
CFSCIFKSRRCNYWAWYGTISLNCISFIQMPVCPSLSYLRDTCFLLYETPTAQFLP

SEQ ID NO: 209019 - protein, 114 aa, Glycine max
  Clone ID: PAT_MRT3847_30772C.1.pep
REEKESSGFGILIVLFQLSLKGRDLMINNEMISPKRTISISEAEKQSSKGTPSELSHESCFCDEGCLQDLFGAQPKDERLNGARGTSNGYGQCRRAGLLARACMFLKRRKRTRG

SEQ ID NO: 209020 - protein, 131 aa, Glycine max
  unsure (1)..(131): unsure at all Xaa locations
  Clone ID: PAT_MRT3847_30773C.1.pep
MGSQIKANTGRSYRAYNYTGPANAENALYLIGSDPRLSSAEFEAASPSDIFSSVGLITPVLYRTWLTERLTESLPXSIKKIAELEQIKRXTTECRPIVIDLLMSLKAKIQGASPLRVGYQLGYIACSTATQ

SEQ ID NO: 209021 - protein, 103 aa, Glycine max
  unsure (1)..(103): unsure at all Xaa locations
  Clone ID: PAT_MRT3847_30774C.1.pep
PSPLLTYPPPSLVLXXPTKPSQPPPSLVLPPPSKPSQTPPLGTAPPPPLKSNNPSSSGSGQPTVISGPNNYPYYYYYASATSSFSVHVIPFFLLVSFLHGVFF

SEQ ID NO: 209022 - protein, 49 aa, Glycine max
  Clone ID: PAT_MRT3847_30775C.1.pep
ISFHSLLDNDNSKSSSYSSSLILISSLWFTSHPIFILCSGFEIGQIDKE

SEQ ID NO: 209023 - protein, 41 aa, Glycine max
  Clone ID: PAT_MRT3847_30776C.1.pep
KKMSIPIFNYFSTFCNINLSKLVSHVKPFIFITCIIFSFPG

SEQ ID NO: 209024 - protein, 98 aa, Glycine max
  Clone ID: PAT_MRT3847_30777C.1.pep
MLEGIGLASSGSIKLGLGDFIFYSVLVGRAAMYDYMTVYACYLAIIAGLGITLMLLAFYQKALPALPVSVGMGVLFYFLTRLLLEVFVVQCSLNLLLF

SEQ ID NO: 209025 - protein, 105 aa, Glycine max
  Clone ID: PAT_MRT3847_30778C.1.pep
FAPPPSLAPSHSEEKESKSKSSCHNGLCKQNMGAVAGVVTAGAFVLALFAGALIWFYSKKFKRVKKFDSLGSEIIRMPKQFSYKELNSATKCFNANRIIGHGAFG

SEQ ID NO: 209026 - protein, 38 aa, Glycine max
  Clone ID: PAT_MRT3847_30779C.1.pep
LIRQLAGNIHMRIQDHTKTKKHTKIHKLYSNNDYPFAE

SEQ ID NO: 209027 - protein, 76 aa, Glycine max
  Clone ID: PAT_MRT3847_3077C.1.pep
ETIAVTHPCQHRRLGHNLQTSASHATQSLSQHDGVSKLAKRRLKMAKPNGLTPTPTNHRYLLDHQNVILKLDLNIT

SEQ ID NO: 209028 - protein, 99 aa, Glycine max
  Clone ID: PAT_MRT3847_30780C.1.pep
KKRISNENHTQNEATGMPERYPCRFGDKSTGMANKSSDVILENKVENLVELHANSMRCSLSKVSTQVISVTGLIHKYFSSVNGIDNYSSSSNSDVTSKA

SEQ ID NO: 209029 - protein, 105 aa, Glycine max
  Clone ID: PAT_MRT3847_30781C.1.pep
GCEKTTEGYGCEKTTEGGVREKKNRLQKSLSTQRYTMAKASMLFPCLIVLFLITYATGFVDACNYPCKFPSDCNNLRCLRPDCKKYCLNGCCLCNCRLIPPSGNV

SEQ ID NO: 209030 - protein, 244 aa, Glycine max
  Clone ID: PAT_MRT3847_30782C.1.pep
MMAADQQRIHPVHDVEAPHRPLVPENYAKSDKGIPQRTFPVMHSKPPKRRRSCCCRFMCWTLSILLILIIAIAITIGILYLVFRPKLPKYSVDQLRISQFNVSDNNTLYATFNVAITARNPNKKIGIYYEGGSHISAWYMDTKLCEGSLPKFYQGHRNTTVLDLPLTGQAPDASGLVNRIQEQLQQTNNVPLNLKVNQPVRVKFGKLKLFKVKFRVRCRLEVDNFGASNDIRISSSSCKFKLRL

SEQ ID NO: 209031 - protein, 103 aa, Glycine max
  Clone ID: PAT_MRT3847_30783C.1.pep
LNLGGGFVRLKNLTTLKLLVEGAGARLKKPLPLPPPPPPPMLPTLPPPPGSGLKVATFGGRVFHLGGTSAPKPMGAKMLAKQFPTIPIVNDWRARGGPRARHG

SEQ ID NO: 209032 - protein, 97 aa, Glycine max
  unsure (1)..(97): unsure at all Xaa locations
  Clone ID: PAT_MRT3847_30784C.1.pep
LPKFYQGHRNTTVLDLPLTGQAHDANGLVNRIQEQLQQTNNVPLNLXVNQPVRVKLGKLKLFKVKFRVRCKLEVDNILGASNDIRISRSSCKFRLRL

SEQ ID NO: 209033 - protein, 112 aa, Glycine max
  Clone ID: PAT_MRT3847_30785C.1.pep
TGVKEGLRGHIVVELSDLDNEVLVKLVGGDLVETVVAHDVIGRLMIQCARQPGLAQIWEDILGFENCEFYIKRWPQLEGMQFEDVLISFPAAIPCGIKVASYGGKIILNPDD

SEQ ID NO: 209034 - protein, 51 aa, Glycine max
  Clone ID: PAT_MRT3847_30786C.1.pep
ILNFTPFMIFTSYKSPIYILYHLFFHLHIINSSFFFHYICYINNIQNNFFQ

SEQ ID NO: 209035 - protein, 375 aa, Glycine max
  unsure (1)..(375): unsure at all Xaa locations
  Clone ID: PAT_MRT3847_30787C.1.pep
FPTRPPTRPPTRPLFDRIIAKGHYSERAAASICRQVVKVVNTCHFMGVIHRDLKPENFLLSSKDDKGLLKATDFGLSVFIEEGKVYRDIVGSAYYVAPEVLRRSYGKEADIWSAGVILYILLSGVPPFWAETEKGIFDVILQGHIDFESSPWPSISNSAKDLVRKMLIKDPKKRITAAQVLEHPWLKEGGNASDKPIDSAVLSRMKQFRAMNKLKKLALKVIAENXEEEIQGLKAMFTNIDTDNSGTITYXELRAGLQRLGSKLTETEVRQLMDAADVDGNGTIDYIEFITATMHRHRLERDEHLYKAFQYFDKDGSGYITRDELEIAMKEYGMGDEATIREIISEVDTDNDGRINYEEFCTMMRSGTQQQGKLF

SEQ ID NO: 209036 - protein, 65 aa, Glycine max
  unsure (1)..(65): unsure at all Xaa locations
  Clone ID: PAT_MRT3847_30788C.1.pep
EDVERGRGGSAGNKFRMSLGLPVAXATVNCADNTGAKNXYIISVKGSXGVEPSPSXCVGDXVMAP

SEQ ID NO: 209037 - protein, 88 aa, Glycine max
  Clone ID: PAT_MRT3847_30789C.1.pep
CQSAVHKKNQIWWTGLVVVFSNTSCCVVGGARLVFQTCKIHTHTHTHNPFEKGPGWVLNTLSQLTCGGWLWVYTHSCLKRTVAVAVTV

SEQ ID NO: 209038 - protein, 47 aa, Glycine max
  Clone ID: PAT_MRT3847_3078C.1.pep
PPFRPRFLPPVLPLFLTVAKSLQRGVCSGLTFSPVFFLFSAGFHTFD

SEQ ID NO: 209039 - protein, 89 aa, Glycine max
  Clone ID: PAT_MRT3847_30790C.1.pep
PPGYSGVITRPFTGRFLRGLNHQKYIPTLMLKRQKLQGCVAILKGKTFKGPKDRMVFPWGAPNPKRRGGPWVIQKSFIPGLGIHGSKPF

SEQ ID NO: 209040 - protein, 122 aa, Glycine max
  Clone ID: PAT_MRT3847_30791C.1.pep
GDLGYFDEDGQLYVVDRIKELIKYKGFQVAPAELEGLLVSHPEILEAVVVPYPDDEAGEVPIAYVVRSPNSSLTEEEIQKFIAKQVAPFKKLRRVTFINNVPKTASGKILRRELTAKARSKI

SEQ ID NO: 209041 - protein, 432 aa, Glycine max
  unsure (1)..(432): unsure at all Xaa locations
  Clone ID: PAT_MRT3847_30792C.1.pep
MATTSVVPANRARAANPAEEMDFETTEGVNDIGSFEEMGIKDDLLRGIYQYGFEKPSAIQQRAVTPIIQGRDVIAQAQSGTGKTSMIALTVCQVVDTSVREVQALILSPTRELASQTEKVILAIGDFINIQAHACVGGKSVGEDIRKLEYGVHVVSGTPGRVCDMIKRXIFRTRSMIKPALDXSLESFIREFNDQNCDVYRYPPPDLHVCWFYHSTPRDLQEMTNKVMEYPVMILLSRDELSSXCIKYICVSVESEEWXFVPCVIVMILSLSLKLLYSVXTKRKGDWLTEKMRNNXFTVSSXHGDMPQKERDAIMGEFRXGTTRVLTTTHVWARGLDVQPVSLLINNDLPDYRELYIDRIGRSGSFGRKGVAINCVRSDDIGTTGEIVPEDVPQIVRVDTLLLIPHRSQGVSGEGKFPKSSVGKQWWVQVAD

SEQ ID NO: 209042 - protein, 82 aa, Glycine max
  Clone ID: PAT_MRT3847_30793C.1.pep
HTILNPFLLLKGQVLFPHLLHQHSDALPVPPGRYIRPTHDCPNINVPKRPAFIHLCSNIILLLRQAIPVSQHILLLSSHEPF

SEQ ID NO: 209043 - protein, 32 aa, Glycine max
  Clone ID: PAT_MRT3847_30794C.1.pep
LCIVLVSHNLLFISPYQGLVSFSIQSLAVTKF

SEQ ID NO: 209044 - protein, 155 aa, Glycine max
  Clone ID: PAT_MRT3847_30795C.1.pep
MAYSQLQKLEANVSIKASAEQFYDVLCHKTHQIPKIFPEKALSVEILKGAWGTEGSIISWNYLYEGKVCVAKEVIEGIDKKNKKMSFKVIEGDVLGHYKSFKFIMQVTPKEKGSVVQCVVEYEKQKDHIPDPHTLLQSTVELCKKINAYLTQDNN

SEQ ID NO: 209045 - protein, 388 aa, Glycine max
  unsure (1)..(388): unsure at all Xaa locations
  Clone ID: PAT_MRT3847_30796C.1.pep
MTKIFFVLLLCLIIAASSGFVNCFDVEKKEKIGIFELNKGDLSLKVTNWGASILSLVIPDKNGKLSDVVLGYDSVKDYTNDTTYFGATVGRVANRIGGAQFTLNGIHYKLVANEGNNTLHGGARGFSDVLWKVKRYQKEGPSPSITFSYHSIDGEQGFPGDLLVTVSYILTGKNQLVILMKGKTLNKPTPVNLANHAYWXNLGGHNSGNSXLMKWCRSLVAKITPVDSKLIPTGKFASVKGTAYDFLXPQTVSRIGNQLAETKGYDINYHVLDGETKKVMLAAIVLDKKSGKVMKLFTNAPGLSVYTANYFTNFKGNGGYVYYSHAGLCLVYQAFFDSVNQPNFPSTIVTLLKPFKHSMLFKFSTKNPYTCSKLYKRSELSPIFHMPW

SEQ ID NO: 209046 - protein, 69 aa, Glycine max
  Clone ID: PAT_MRT3847_30797C.1.pep
FIMGHILLGHSPCCHKDILFDLVSDTSLRWFPYVLRQCSPTRVYQRNGARCLYLQKSTPSPGRPLTDVY

SEQ ID NO: 209047 - protein, 49 aa, Glycine max
  Clone ID: PAT_MRT3847_30798C.1.pep
FSDGSQFYSNELGALCSFEVTFKNIATILYYFTLVICILFPIYCLEPRL

SEQ ID NO: 209048 - protein, 100 aa, Glycine max
  unsure (1)..(100): unsure at all Xaa locations
  Clone ID: PAT_MRT3847_30799C.1.pep
LFXTXXYXVLFXXXTFXXXTXLXXXSXXXVFXXXCXXLXLXRVRXSSXXXXSIXXXXXLSXGIXXXPFLXHRXDXXCXFXXFVRXXXXLAXFXFTDIFXX

SEQ ID NO: 209049 - protein, 53 aa, Glycine max
  Clone ID: PAT_MRT3847_3079C.1.pep
PYLNITEDLFVQVFQKHFYNTIFRTFFLYLNLLFFIFEKCNAIYCFLMHNYIK

SEQ ID NO: 209050 - protein, 106 aa, Glycine max
  Clone ID: PAT_MRT3847_307C.1.pep
MTFILGLRVMVLDQPNQVYFKPKELVKEMGLVKPRNWVRVKIPNYLVLPPGSWPHKVSKKTPLANPGTGRFKVRPLEASGTKCGVLMALKNKPFQKGTLSGISVMA

SEQ ID NO: 209051 - protein, 115 aa, Glycine max
  unsure (1)..(115): unsure at all Xaa locations
  Clone ID: PAT_MRT3847_30800C.1.pep
QRLEARRTPPRSKKSVYIISLSRQLQXXRLGTYSLTFGGLXXFIXIVLNNFQDHLVFYITPTEALXKYSNNPTKTRFLLNFLVLXGNVLYPSSSPEVEFVLTNLISYIFLLYDGS

SEQ ID NO: 209052 - protein, 48 aa, Glycine max
  Clone ID: PAT_MRT3847_30801C.1.pep
WELLRLFSDSFISMSFDENGVSSWESITSTSAISNISTINVCVDRHVL

SEQ ID NO: 209053 - protein, 59 aa, Glycine max
  unsure (1)..(59): unsure at all Xaa locations
  Clone ID: PAT_MRT3847_30802C.1.pep
YFLPHFCSAIXMXKVKXGINGXGXXGRLVAXVALQRDDVELVAVXDPXIXTDXXXXMFX

SEQ ID NO: 209054 - protein, 53 aa, Glycine max
  Clone ID: PAT_MRT3847_30803C.1.pep
KISTTITTTFHVYSHIITTYTHHIYNLPYTHNLFIHYSQILASYINNIIITYT

SEQ ID NO: 209055 - protein, 93 aa, Glycine max
  unsure (1)..(93): unsure at all Xaa locations
  Clone ID: PAT_MRT3847_30804C.1.pep
YIRDSAFEPRRWVAPGQRSITPCXCDCGLETLXVPLDAKFHTEDPXVVVGKFCDRGXHCXMCSKTIADCVEALIXAYYVDGGLLLTNVMKWLG

SEQ ID NO: 209056 - protein, 65 aa, Glycine max
  unsure (1)..(65): unsure at all Xaa locations
  Clone ID: PAT_MRT3847_30805C.1.pep
IXVQXXXPXETAXXXSACNFSSPXYXLXXTXTGSKXPVGXXXTVXAFSNFPPNYSQXQXLXIALE

SEQ ID NO: 209057 - protein, 84 aa, Glycine max
  Clone ID: PAT_MRT3847_30806C.1.pep
CEKTTEGSDSGDRLLAVESDMRKLGGWEMNECELSRFDSCSSSLVMELDQFKNEKGNGKNLGPSTEIISWRSLNGKAVLAVGKW

SEQ ID NO: 209058 - protein, 92 aa, Glycine max
  unsure (1)..(92): unsure at all Xaa locations
  Clone ID: PAT_MRT3847_30807C.1.pep
SFVHINQPQEKDLKEGNFSFDIKSGSRREKVSSTKAQFVXGKTFKYNIIGAGSHSSEDFSEKEDQEKPIKSDARXLRQIIDPLFQRGSGLNG

SEQ ID NO: 209059 - protein, 91 aa, Glycine max
  unsure (1)..(91): unsure at all Xaa locations
  Clone ID: PAT_MRT3847_30808C.1.pep
MTMSFNGNFFSDARRFFPSKRTGFYRAIICATGWTXATPMQVVQGTIDWLIPSQECDPRTYCVXNPQKPFVLXRRIGKLSFPQGTSRRCLD

SEQ ID NO: 209060 - protein, 90 aa, Glycine max
  Clone ID: PAT_MRT3847_30809C.1.pep
IRSHRDPLPLQHIYAHFYHSVERPNDAFAADFEGRVKQQKLVQPPRCMMSSPKRLVVYVLENTHAKKVSKMLKDIVPAANSNKRNHGFMP

SEQ ID NO: 209061 - protein, 81 aa, Glycine max
  Clone ID: PAT_MRT3847_3080C.1.pep
IIKFCEGCCSTQSSKIESESEYYDCPTLFCLIQAGALNSWHLHVVGLSDWDHPITGGLHRKQGGVTDSMSATSVSSQSMEH

SEQ ID NO: 209062 - protein, 71 aa, Glycine max
  Clone ID: PAT_MRT3847_30810C.1.pep
AFLSKLLLSIHVAELCTSIKQSGCPVLVPHIVSSAGVATSVSSSVHNQELPLSAGKERGVVQRNPPPVGAA

SEQ ID NO: 209063 - protein, 41 aa, Glycine max
  Clone ID: PAT_MRT3847_30811C.1.pep
KPNGLQGNSLILAGSSAVELFEALNSMRFPLSYHLCITLPP

SEQ ID NO: 209064 - protein, 204 aa, Glycine max
  unsure (1)..(204): unsure at all Xaa locations
  Clone ID: PAT_MRT3847_30812C.1.pep
MSDDQTAVRFGILGCANISIKLCKALSKAPNAKLHAIGSRSLEKATAFAAEHGLPEAVRVYGSYEGVLEDEEVDAVYIPLPTGLHVTWAVRAAERRKHVLLEKPVAMNVAELDRILEACEAHGVQFMDGTMWVHHPRTAKMKEALSDAQRFGQLKWIHSYXSYNPGTEFLKNNIRIKPDLDGLGALGDTGWYCIRAILWAVNYE

SEQ ID NO: 209065 - protein, 47 aa, Glycine max
  Clone ID: PAT_MRT3847_30813C.1.pep
FILVYVHCRQYVCVSNSNRLGLMSDGCLCARSNIKFQYASLLILKEN

SEQ ID NO: 209066 - protein, 94 aa, Glycine max
  unsure (1)..(94): unsure at all Xaa locations
  Clone ID: PAT_MRT3847_30814C.1.pep
NFTSFRCVFLNTIRFNYLRITPNVRLYFNISIFCISAFILFILHRLXVGFGSRFSFVPLLRSSPYLVLLSISSPAPVIGYVPPPPPPKKEDVIQ

SEQ ID NO: 209067 - protein, 120 aa, Glycine max
  Clone ID: PAT_MRT3847_30815C.1.pep
MERLNFIKNGVSRLPPGFRFQPTDEELVFQYLKCKIFSCQLPASIIPEINVSKNDPWDLPGNCDEQERYFFSSKEAKYRNGNRMNRTTNSGYWKATGSDKKISSSISNIGFAGLRKTLIF

SEQ ID NO: 209068 - protein, 82 aa, Glycine max
  unsure (1)..(82): unsure at all Xaa locations
  Clone ID: PAT_MRT3847_30816C.1.pep
MKELSKSAHAAVYANPVKIPAPVQIDTASISSGISLWXPIAFVNGIPRMFKLELSVPVNAGEDDTDMPPLEEHEXDAEGSRM

SEQ ID NO: 209069 - protein, 56 aa, Glycine max
  Clone ID: PAT_MRT3847_30817C.1.pep
KPDPGSFKKKTLNLPGAPPVSNYEPSVPWRELVNFLKGPQKKTPGPKFKNAGAGKT

SEQ ID NO: 209070 - protein, 52 aa, Glycine max
  Clone ID: PAT_MRT3847_30818C.1.pep
HAHAARNSARAQRTTDGPALPTKTSPPGRAGHTREPTDSRQPDNGPRHRNPP

SEQ ID NO: 209071 - protein, 86 aa, Glycine max
  Clone ID: PAT_MRT3847_30819C.1.pep
RGTSGLSPSFYVDISKVESAEPGVPSLGYQLTEWGNRMPWAPGGTCLTTNPELLKKEGRRAGQEVFPLLPSALSPIPRLRGALLFT

SEQ ID NO: 209072 - protein, 490 aa, Glycine max
  Clone ID: PAT_MRT3847_3081C.1.pep
MREQEDWRITTALLTLLLVFVSSFPALSYGVVPPRTLLNKLSQGSYLTTQEQWFNQTLDHFSPYDHHQFRQRYFEFLDYFRIPDGPIFLVIGGEGPCNGITNDYIGVLAKKFGAAMVTLEHRYYGKSSPFNSLETENLKYLSSKQALFDLAVFRQYYQDSLNAKLNRTKTENPWFVFGGSYAGALSAWFRLKFPHLTCGSLASSAVVLAVYNFTEYDQQIGESAGAECKAVLQETTQLIEHKLATNGKELKASFNADDLEKDGDFMYLIADAAAVAFQYGNPDKVCKPMVEAKNAGEDLVDAYAKYVKEYYIGTFGVNVQTYDQEYLKKTAINEDSSTRLWWFQVCTEVAFFQVAPSNDSIRSSEIDAKYHMDLCKNIFGEGIFPDVDATNLYYGGTKIAGSKIVFANGSQDPWRHASKQTSSPDLPSYTITCSNCAHCTDFRGCPQSPLVLEGNEKNCSSPDAVHKVRQQITEHMDLWLSECQEGSSYI

SEQ ID NO: 209073 - protein, 135 aa, Glycine max
  unsure (1)..(135): unsure at all Xaa locations
  Clone ID: PAT_MRT3847_30820C.1.pep
GGQGPQGFYFQKRFGFFGANFSRAFPLGFGCCQFPXTFLGCQIFPNQKKGPFFVSPLGFDFXGKGQFQGGFNVFLEWGKGAPFFALLGTFSPSMGLTGWIFFLFFALVFFFFGGGGFFLFEKMCAFGGFFLLICL

SEQ ID NO: 209074 - protein, 130 aa, Glycine max
  Clone ID: PAT_MRT3847_30821C.1.pep
SILAFILLPLLGISPCLTSSHPLIVSLRPLSLVSPTKVSNAAVEGDHCRRRRCPGQPLKLPSGEEGYWLHMGDDSRTIENTREHDETVCKPDDDEEPGYNASGFAAASTPGEAKLGVVSPLIEGMPLSVL

SEQ ID NO: 209075 - protein, 111 aa, Glycine max
  Clone ID: PAT_MRT3847_30822C.1.pep
RNHSISAKQVNLHGLLSMVPLPLSQGVLLSLLQQLACDINNDTPRKIVWLTDVAAAINPSDPTIAMHTRSIFEQVYQILNHQRSLPTMTGVDLSSIRLLLHVVNSMLMTCK

SEQ ID NO: 209076 - protein, 49 aa, Glycine max
  Clone ID: PAT_MRT3847_30823C.1.pep
MAEQSCNCIYNSTVKDMSDNEESLNDLSGKGLLIVNVASQCGSTHTYYK

SEQ ID NO: 209077 - protein, 357 aa, Glycine max
  unsure (1)..(357): unsure at all Xaa locations
  Clone ID: PAT_MRT3847_30824C.1.pep
LEKNSQPAGPSSSFPSACNSTDSFNEPIGNSSLPSAENAFPQILAMQESLNQLLTMQKEMQKQMTMMVAVPVTKEGRRLEAALGRNMEKAVKSNSDALWARIQEENAKSEKLLRDRIQQVTGLISNFMNKDLPVILEKTVKKEMASVGQAVVRAMSPAVEKIISSSIVESFQRGVGDKAVNQLDRSVNSKLEATVARQIQAQFQTTGKQVLQEALKSSFETSVVPAFEMSCKAMFEQVDATFQKGMVEHSTAVQQRLESAPTSLAMTLRDSINSASSITQTLSREVLEGQRKLVTLAATRTNSGTLNTLPVQLNNGPLLHEKVEVPLDPTQELAXLISERKYEEAFIGALHKSDVSI

SEQ ID NO: 209078 - protein, 200 aa, Glycine max
  unsure (1)..(200): unsure at all Xaa locations
  Clone ID: PAT_MRT3847_30825C.1.pep
MAAVRRRVWQLSSIPGFGASKLEVSSSFQRAILDPFPVSGTRHFSQVVKSNGKHSFQRAILDSFPVSGTRHFSQVVKSNGKHLFLVDTLALVRRLEGEGVPSKQAEAITAAITEVLNDSLENVSQSLVSNGEMQKNEMMQESNLSKFKAEVQSSQGHHFSLLQHETEKLXDDIEKMRSELKHEIDKVTAGQRLDLNLERG

SEQ ID NO: 209079 - protein, 85 aa, Glycine max
  Clone ID: PAT_MRT3847_30826C.1.pep
RGVGDKAVNQLDKSVNSKLEATVARQIQAQFQTTGKQVLQETLKSSFETSLVPAFEMSCKAMFEQVDATFQKGMVEHLTAVQQRL

SEQ ID NO: 209080 - protein, 139 aa, Glycine max
  unsure (1)..(139): unsure at all Xaa locations
  Clone ID: PAT_MRT3847_30827C.1.pep
SFEAPENRQLGFVLGIRKWPQFGGGCGSYLQFQVSGLRNWKCRRHSKEQFSIHFLFRGPDTFPVKSNEHSFQRAILDSFSVSGTRHFSQVVKSNGKHLFLVDTLDLVRRLEGEGVPSKQAXAITAAITEVLNDSLENVS

SEQ ID NO: 209081 - protein, 715 aa, Glycine max
  unsure (1)..(715): unsure at all Xaa locations
  Clone ID: PAT_MRT3847_30828C.1.pep
RGHSISGRVTVPHLQLSPRLSRKLSDIRSPQSNLSDHVGDHPVNDYSIDRQMDTIHRNLSDPLNSDSKNDEKKMKQDDISSVLNPSVLFKQPTHLITPSEITKAGSSSETNIIDRKNEGEAKIQDVVDVGNAEVEVKVVGETRSNQSDEFGGQGSQQPSVADSKEKLFCSQASDLGIEMARECCSISEDTYLMEEPGQLDSTTGGDSLAQPLDASEDGLQDFAKDAHEKVSDSSTSVAVPPSPAPNAKGKRQKGKNSQPAGPSSSFPSACNSTDSFNEPIGNSSLPSAEEAFRLILGMSEXRSQLLALTQEXKYSVTIAXNGPVLHEKVEGPLHPAQEXPSLISDRDALWARIGEENRSDXKLYLGYVLRLIDXTFVNKDLPVILEKTXKKEMASVGQAVVRAMSPAVEKIISSSIVESFQRGVGDKAVTILDKVYQILLEPRSLPTMTAAFLSTIRLLLHVINSMLMTCXIIFFHLVFQKCANSSPCELXHDIGIEHSTQCVPRLHVTPDSVAFGLRDSINSASSITQTLSREVLEGHRKLVTLAATRTNSGTLNTLPVQLNNGPLLHEKVEVPLDPTQELARLISERKYEEAFIGALHRSDVSIVSWLCTQVNLHGLLSMVPLPLSQGVLLSLLQQLACDINNDTPRKIVWLTDVAAAINPSDLTIAMHTRSIFEQVYQILNHQRSLPTMTGADLSSIRLLLHVINSMLMTCK

SEQ ID NO: 209082 - protein, 69 aa, Glycine max
  Clone ID: PAT_MRT3847_30829C.1.pep
SDMRQGELWNLMRHCYGHTYPREWPILALSYIDSLKIQHQKLSGNTNSNLYSLGCPIRAHNMSTGSRLN

SEQ ID NO: 209083 - protein, 74 aa, Glycine max
  Clone ID: PAT_MRT3847_3082C.1.pep
NLETLDIRNTLVHELPSEINMLKKLRYLLAFHRNYEADYSLLGSTTGVLMKKGIQNLTSLQNLCYVEADHGGID

SEQ ID NO: 209084 - protein, 146 aa, Glycine max
  Clone ID: PAT_MRT3847_30830C.1.pep
EGTPPPSSLLTRAKVSTRNKCLRLDFTTWEKCLVPETENGSKIALWDDDNDDDTSDLEAPKPAIEDNCHTRLRIAAIFGLQEQNPQNSHNDFQALQMIKATFAASQLKQWPIRGERRCSRSLGGGGGVVMSHQVDEFVNKGGVVCS

SEQ ID NO: 209085 - protein, 144 aa, Glycine max
  unsure (1)..(144): unsure at all Xaa locations
  Clone ID: PAT_MRT3847_30831C.1.pep
VEWHIYLKVIVSKVIFLNLYVDXILLATNDFGLFHETKKFLFSNFEMKDMGETSYVIGIEIFXNRSQGLLGLSQKEYINKVLEKFRMEKCSALPIPIXKGKKFSLAQCPKNDLERKQMEPISYASVVVASTMEAEFVACFEATI

SEQ ID NO: 209086 - protein, 58 aa, Glycine max
  Clone ID: PAT_MRT3847_30832C.1.pep
VHETSIGKIYSLGKWNRYRTITCDETFWKDAGLLKTSCCYEARSTVVTDAFPDITMLT

SEQ ID NO: 209087 - protein, 44 aa, Glycine max
  unsure (1)..(44): unsure at all Xaa locations
  Clone ID: PAT_MRT3847_30833C.1.pep
MGRPPCWDXGVKNGPRTPEEDIIPVSYIQEHWPANRKAATANTV

SEQ ID NO: 209088 - protein, 90 aa, Glycine max
  unsure (1)..(90): unsure at all Xaa locations
  Clone ID: PAT_MRT3847_30834C.1.pep
QIGSVTHSIGAVRMFPQAGFGVMAIPSSAISXDALKVGRPVEYAAGWTVTGVPSRSERLAKSMQLLRXSRXIGLVAVYAGAQFSAAVQPV

SEQ ID NO: 209089 - protein, 55 aa, Glycine max
  Clone ID: PAT_MRT3847_30835C.1.pep
WICPVCSINFNQHFRPHETIQAYVRVHAMSYLFNSVTLPHFHGSSFYTISTGKIL

SEQ ID NO: 209090 - protein, 79 aa, Glycine max
  Clone ID: PAT_MRT3847_30836C.1.pep
HPKIFFWKGDKGGWESLTLQIVALTSFQRQLLYMGKGLPNKKKYIFVPGHVGPLLGGYFFIRKRGVWITNPLTNANFFY

SEQ ID NO: 209091 - protein, 156 aa, Glycine max
  unsure (1)..(156): unsure at all Xaa locations
  Clone ID: PAT_MRT3847_30837C.1.pep
MKKRLKAIQEWPTPKSVTEVRSFHGLASFYRRFVKDFSTLAAPLNEVIKKNVVFKWGRXQEEAFNAPKQNLTFAPILALPNFSKSFEIECDASNVGIGAVLLQEGHPIAYFSEKLSGPTLNYSTYDKELYALVRALKTWQHYLYPKEFPSVVFSQP

SEQ ID NO: 209092 - protein, 135 aa, Glycine max
  Clone ID: PAT_MRT3847_30838C.1.pep
MAKIAAAAAAALCFAALVAVAVCQGEVERQRLRDLQCWQEVQESPLDACRQVLDRQLTGGGGGGGVGPFRWGTGLRMRCCQQLQDVSRECRCAAIRSMVRGYEEAMPPLEKGWCPGGAPILNIPAYIQWPLLQPK

SEQ ID NO: 209093 - protein, 488 aa, Glycine max
  Clone ID: PAT_MRT3847_30839C.1.pep
IFRHRDLGWSFDPEKHSEYQFEYVEVLSDFDKNVGVKVAYLSKLKGFVSLFQRTVLNRISFFCILPNELYKFSHHIPSYKMTGAERQDVPRGSFELDPAGLPNSLFEVGDPGVVKMDGVNCSHHEYSKCKVEEAMSNDSIHKAKLRESIGSERVAQILRRSPRSSKKSMDNGQASTSQYIVRKDDINIGHRDDSPPEGNTAAFQTIKRKVKTPQKHEKNNYEGEALKARKSPRDLSKKNAQGDAGEWTAGKKTDNHSSNSKNVKVSNIPQSVGASCYGFKKEKSEEMFQCGQIWAIYGDRDHMPDTYAQIRMIECTPNFRLQVYMLEPCPPPNDLKRTISCGTFSVKEAKLRMLSLSAFSHQLKAELVANNRYEIYPRKCEIWALYKDQNYELTSSNQGRGECHIVEVLADSYQSIQVVVLVPHGNSGTIFKAPRIQRSKTGVIEILRKEVGRFSHQIPAFQHSDNVHLRGCWELDPSSVPGSFIPID

SEQ ID NO: 209094 - protein, 65 aa, Glycine max
  Clone ID: PAT_MRT3847_3083C.1.pep
NFLPSIHIFLLNMSFLVYSFTTKVSIFNFLINFSHFTTNFSHLSKHPPHIIVYAYDYLVGCVSGI

SEQ ID NO: 209095 - protein, 49 aa, Glycine max
  Clone ID: PAT_MRT3847_30840C.1.pep
AETNLTKLDEGQHPAQCRKGTHGKLKLQQVSKDPSYSERVKKRKPFTKN

SEQ ID NO: 209096 - protein, 77 aa, Glycine max
  Clone ID: PAT_MRT3847_30841C.1.pep
KLKTRAQVCGFPPNKSSTIEIIASFSQAWNTVFETRRHRGFGYLQDHHTVMEETQFRLMQKLVQKAMKYARLQDIQL

SEQ ID NO: 209097 - protein, 73 aa, Glycine max
  unsure (1)..(73): unsure at all Xaa locations
  Clone ID: PAT_MRT3847_30842C.1.pep
AAWKLSSFVLEFKRKNKKDISGNPQALIMLKTACERAHRTLSSTAHTTIEIGSLYXGIDFYSPVTRGRIQELN

SEQ ID NO: 209098 - protein, 106 aa, Glycine max
  Clone ID: PAT_MRT3847_30843C.1.pep
PFGFASGHRNQTAQQQGDACVPPTYAHLHQSQKYHHPPNKPLPLCRNMMSIPRVMATKRWGNRDLLRDLVTENALVDVRSMLEITVTLKTLTRRRWRMKTVTEAVS

SEQ ID NO: 209099 - protein, 52 aa, Glycine max
  Clone ID: PAT_MRT3847_30844C.1.pep
KKPPLRAYNNTPSPGGLGVHLKYKLPGFFIFKNGKHANPIKYGKHPPFGHPG

SEQ ID NO: 209100 - protein, 61 aa, Glycine max
  Clone ID: PAT_MRT3847_30845C.1.pep
FLFFFFFYIRTPRRWQILLLLATILLKESFWSTHTTNGPHDSTIQPCIYIATIVLLEQIIY

SEQ ID NO: 209101 - protein, 165 aa, Glycine max
  Clone ID: PAT_MRT3847_30846C.1.pep
CVLIHENALYCGFTLIKSLRQYSCLVLAFSTPGSQVIGRPGGVRSLPQLVQDTDDHHHDQHYPHDSGHRHRSLLGICTLYHTTNCSMMRGICNHASNNRSIHLGQRRRASSPQPRQRLQGTPTTTTQRFCLPSFDVFDLLLLLLLVNLFCLLPSPSVVSRSRTRA

SEQ ID NO: 209102 - protein, 272 aa, Glycine max
  unsure (1)..(272): unsure at all Xaa locations
  Clone ID: PAT_MRT3847_30847C.1.pep
PEYITFVSVLSACSHTGKIDDGFKYFNSMANVHNIKPGLEHYACMVDLLGRVGRLEEACRFIESMPFEPDSLVWGALLGACGKHANVEMGREVAERLFKLEPDNPGNYMLLSNIYIRHGMLEEADEVRRLMGINGVRKESGCSWIDVKNRXFVFNANDRSHSRTQEIYGMLQKLKELIKRRGYVAETQFATNSVEGSEEQSLWCHSEKLALAFGLLVLPPGSPVRIKKNLRTCGDCHTVMKFASEIFQREIIVRDINRFHRFTNGSCSCMDY

SEQ ID NO: 209103 - protein, 80 aa, Glycine max
  Clone ID: PAT_MRT3847_30848C.1.pep
EDDKRGNRTREDKRNNLCIQQYSVPLSFSQMARTKHAARKSTGGKAPQQQLETNAARKSAPETRGVKKPHKFRPGIVAPR

SEQ ID NO: 209104 - protein, 163 aa, Glycine max
  unsure (1)..(163): unsure at all Xaa locations
  Clone ID: PAT_MRT3847_30849C.1.pep
GSRAATPQQNPSGNGIKAIGVIAGGVAVGAALLFASPVIALVYWNRRKPLDDYFDVAAEEDPEVSLGQLKKFSLPELRIATNNFSNKNILGKGGFGKVYKGRSTTGDDVAVNRLNPESIRXDDKQFQIEVDMISMAVHRNLLRLTGFCMTSSERLLVYPLWLW

SEQ ID NO: 209105 - protein, 60 aa, Glycine max
  unsure (1)..(60): unsure at all Xaa locations
  Clone ID: PAT_MRT3847_3084C.1.pep
VSSCQGAFWPCDRVPKRPFGRGTSYGAHMCXRRFWDQSLRLNTLXYLTGWSVETEQTLGR

SEQ ID NO: 209106 - protein, 98 aa, Glycine max
  Clone ID: PAT_MRT3847_30850C.1.pep
ACILSNYTHAAPMSFSCNVIPSQTCDKLPASVLPHPPLYQWLWICNPIQCSAPLPIRVSMHAQVHRVSFIPHYSMAPLPRAYFSSLGSLFSLNGRPGE

SEQ ID NO: 209107 - protein, 94 aa, Glycine max
  Clone ID: PAT_MRT3847_30851C.1.pep
MDMKKKKLLQKKKKKKKKKKKKKKKKKKKRERPAKKKKNRGPPFKKPNFFSRGAKVKCLFLGAPIFIPGPPFLNPANGKTPGCPLKKPLEKKPF

SEQ ID NO: 209108 - protein, 33 aa, Glycine max
  Clone ID: PAT_MRT3847_30852C.1.pep
MLHSLISITKLRTVYILIYYNQIITYNHHSYYY

SEQ ID NO: 209109 - protein, 34 aa, Glycine max
  Clone ID: PAT_MRT3847_30853C.1.pep
QRQIIDNHMSSTRALDSSPRLLCPQIEHPNCSQR

SEQ ID NO: 209110 - protein, 73 aa, Glycine max
  Clone ID: PAT_MRT3847_30854C.1.pep
LRDGYLIELKTHKQETLHKPTCENQDKSRTQQRRGPSHSDITSCQEFECRRTQSRIPIGNKPATNLRGNKAFT

SEQ ID NO: 209111 - protein, 82 aa, Glycine max
  Clone ID: PAT_MRT3847_30855C.1.pep
PRSIEITETGEKKPVLCTIVMECHAHCPSMNTAWPDSGKPVECWNHHLVEILEGDTKISCEHYNSTYQQYFYAKPNPSRTHW

SEQ ID NO: 209112 - protein, 122 aa, Glycine max
  Clone ID: PAT_MRT3847_30856C.1.pep
MGVMRRRRHHHHFRWLQTFTTFSLLFFSSTSAITNLAPHPSGGAVKQLNQEEKQNGSPVDRVVAEEKRFGGPGSSPPSCRSKCGWCSPCFPVHVPVQPGLIIRLEYYPEAWRCKCGNKLFMP

SEQ ID NO: 209113 - protein, 125 aa, Glycine max
  Clone ID: PAT_MRT3847_30857C.1.pep
MGVTRRRRHHHHFHWLQIFTTFTFLFFSSTSAITTLTPHPSGGAVKQLNREEKQNGSTVVPVNRVVVEEKRFGGPGSSPPSCRSKCGWCSPCFPVHVPVQPGLIIRLEYYPEAWRCKCGNKLFMP

SEQ ID NO: 209114 - protein, 130 aa, Glycine max
  unsure (1)..(130): unsure at all Xaa locations
  Clone ID: PAT_MRT3847_30858C.1.pep
KGRTRFNRPKKKKKAGGKKQNPPGQKPGHTFGKKTAFPPHLGGPNWKSPFGIGKPKPPGVLKPSKKNPGGPPPKNPPKTWKSNPLQPKGXPPQNFPRAGPDYPRWWAKRGQFSPNQGPPPRKNHPLKIPQ

SEQ ID NO: 209115 - protein, 88 aa, Glycine max
  Clone ID: PAT_MRT3847_30859C.1.pep
MCHAPNELQDRKLCVLLDWDVRFKIILGIARGLLYLHEDSRLRIIHRDLKTSNILLDEEKNPKISDFGLARIFGGKETVANTERVVGT

SEQ ID NO: 209116 - protein, 56 aa, Glycine max
  Clone ID: PAT_MRT3847_3085C.1.pep
FAARRVIGVVLGGVPRLGVAPPILIEAKQEAELPEYILGTVRLSRFTLESTVPLEG

SEQ ID NO: 209117 - protein, 128 aa, Glycine max
  Clone ID: PAT_MRT3847_30860C.1.pep
MDPQAPATGTTVRSAAEPSQPQPPKPSPPLPLPPPSTSSTPPHPPPIPNPNPNPSPGPGPGPGPIQAPSPKPPTPTPTPPQPRPPQPFNRALPPPSQPQFPHFSSPSPPSSAPSAAPPPRGGMAIGVP

SEQ ID NO: 209118 - protein, 118 aa, Glycine max
  Clone ID: PAT_MRT3847_30861C.1.pep
ARALETRQIRERIQADESGEVIVLDYGGCPWKEHIFQMEKELGLEKQVKYVLNPDQSAKCRVRRVRTGQKGLQSRLCMTKDWCGNCPKDLSYISGILGRFVVHANELIGENEHQESAL

SEQ ID NO: 209119 - protein, 50 aa, Glycine max
  Clone ID: PAT_MRT3847_30862C.1.pep
SITRSISHCVIDTTQLVIDYQKQQNILYQFLNPVIDYPKMVIDYQRVFFR

SEQ ID NO: 209120 - protein, 147 aa, Glycine max
  unsure (1)..(147): unsure at all Xaa locations
  Clone ID: PAT_MRT3847_30863C.1.pep
LKENVEYLEELKDLAEXXGVSNNIKFITSCSTAERNELLSECLCVLYTPKDEHFGIVPLEAMAAYKPVIACNSGGPVESIKNGVTGFLCDPTPLEFSLAMAKLISDPQEADNMGREARRHVVESFSTKSFGQHLNRYLVDIHRGKED

SEQ ID NO: 209121 - protein, 338 aa, Glycine max
  Clone ID: PAT_MRT3847_30864C.1.pep
MSNSISDPTRIIHSQDPNTTADPQVPLRNLSQVRNRMDSLQHFLSQSINTNTPLTVDQIAMVSSQILSSIHQVIVNGAALVSYSQNSIAAGAPDPPPYPKKPKPEPSVADKAKQTLDSKLEPLEGDDSEIVELDAVEILAEHMHFCEICGKGFRRDANLRMHMRAHGEQFKTAEALAKPSEKASWLRATRFSCPFVGCNRNKLHRRFRPLKSVICVKNHFKRSHCPKMYTCERCRKKHFSVLSDLRSHLKHCGGEARWKCTCGTTFSRKDKLFGHIALFEGHAPALACDEEGKGKQMVEDDEDPMLMSESGFELDDCFLDQEFPEGFFDDFGSIDDYC

SEQ ID NO: 209122 - protein, 37 aa, Glycine max
  Clone ID: PAT_MRT3847_30865C.1.pep
PFCRFLSSVHICCLCSSVPVGGVPAAEPSPRLITAEP

SEQ ID NO: 209123 - protein, 95 aa, Glycine max
  unsure (1)..(95): unsure at all Xaa locations
  Clone ID: PAT_MRT3847_30866C.1.pep
EMHKLRKTATRRCLNCLSPYRDQNPGGGRXMCFNCGHVSKRPALDLPVPPVLWIFNSSIVNDLTVKRCTILNSKVWSXNGWMCGQDCLENGNWVG

SEQ ID NO: 209124 - protein, 353 aa, Glycine max
  unsure (1)..(353): unsure at all Xaa locations
  Clone ID: PAT_MRT3847_30867C.1.pep
MSNSNCNPTRILHSQSQDPNTTTADPHVLLQNLSLVRTRMDSLQHFLSQSINTNTPLAVDQIAMVSSQIVSSIHQLIVNGSALVSYSQNSTAASGAPDPPLYPKKPEPEPSVADKAKQILDSKFGPLEDDDDDDGGAEDFDDGSGIVELDAIEILAEHMHFCEICAKGFRRDSNLRMHMRAHGEQFKTVEALAKPSETTAQRGATRFSCPFEGCNRNSXHRRFRPLKSVICVKNTSSGPLPEDDTCERXRKKHFSVLSDLRNHSKHCGGEARXKCTCGTTFSSKDKLFGHIAMFEGHALALVCDKEGKGKQMVEDDKDPMLMSESGFELNDCFLDQEFPEGFFDDFGSIDDYC

SEQ ID NO: 209125 - protein, 55 aa, Glycine max
  Clone ID: PAT_MRT3847_30868C.1.pep
IACTYPGLNAFHVNTSGDSTNDSLSSGSHLNHLHPEHAAPDDSNLHADDPHNIHM

SEQ ID NO: 209126 - protein, 175 aa, Glycine max
  Clone ID: PAT_MRT3847_30869C.1.pep
ECSQKGSAHTSSIAGGRGVEACPAADADHMPCEDPRLNSQLSREMNYYRERHCPRPEDSPLCLIPPPHGYRVPVPWPESLHKIWHSNMPYNKIADRKGHQGWMKLEGQHFIFPGGGTMFPDGAEQYIEKLGQYIPISEGVLRTALDMGCGVASFGGYMLSKNILTMSFAPRDSHK

SEQ ID NO: 209127 - protein, 116 aa, Glycine max
  Clone ID: PAT_MRT3847_3086C.1.pep
MSINLSKSNVTNMVSIISNLLKNKTFDQYTKACLKDCFDLYSDSLSALDDAVVAFKSKDLDTAGINLSASLDNSVTCEDQFKDKKGETSPITKENNVYFQLNVISLAFIQMFRQHY

SEQ ID NO: 209128 - protein, 82 aa, Glycine max
  Clone ID: PAT_MRT3847_30870C.1.pep
RAHCWWTPSPPPASSLCTRNHPRLYIGCPYSLNTAFGGTGRLPHSTLYLSVGLNGGSHALSVRYHLHDWASSAPPPRIGLTF

SEQ ID NO: 209129 - protein, 56 aa, Glycine max
  Clone ID: PAT_MRT3847_30871C.1.pep
KLWVGTIPFIERLELERKNPRLFWVFRPLRKMLKLKISFKKKTLFFLFCLRLRFEF

SEQ ID NO: 209130 - protein, 52 aa, Glycine max
  Clone ID: PAT_MRT3847_30872C.1.pep
FIILLRKGRKKEKYQTRKMNLTNHKHCLKTMLLYCYIPLSTFYEANNMFGLL

SEQ ID NO: 209131 - protein, 43 aa, Glycine max
  Clone ID: PAT_MRT3847_30873C.1.pep
SSVLSTAFDVLHKYYLVEKPTKINTALWLLKSNINLLNDELLY

SEQ ID NO: 209132 - protein, 77 aa, Glycine max
  Clone ID: PAT_MRT3847_30874C.1.pep
KHTAYSLIHIKDSILPRAVETHPFDADDPSHRQSLLDQYCPSLFELNTHAGKHYPDMLVKLYALYLSKRCMTTVVLL

SEQ ID NO: 209133 - protein, 143 aa, Glycine max
  Clone ID: PAT_MRT3847_30875C.1.pep
MPKKGRPLSLQTVELKVRMCCTGCERVVKNAIYKLKGIDSVEVDLEMERVRVGGYVDRNKVLKAVRRAGKRAEFWPYPNPPLYFTSADHYFKDTTHEFKESYNYYRHGYNLPERHGTMHVSHRGDDNVSNMFNDDNVNACHIM

SEQ ID NO: 209134 - protein, 223 aa, Glycine max
  unsure (1)..(223): unsure at all Xaa locations
  Clone ID: PAT_MRT3847_30876C.1.pep
MANTYKPKNILITGAAGFIASHVCNRIVRNYPDYKIIVLDKLDYCSNLKNLIPSRSSPNFKFIKGDIGSADLVNYILLTESIDTIMHFAAQTHVDNSFGNSFEFTKNNIYGTHVLLEACKVSKGQVKRFIHVSTDEVYGETDEDAVVGNHEASQLVPTNPYSATKAGAEMLVMAYGRAYGLPGYTTRGNNVYGPNQFPEKXLISKFLLLAMKGRLXIHGDGSN

SEQ ID NO: 209135 - protein, 60 aa, Glycine max
  Clone ID: PAT_MRT3847_30877C.1.pep
VQKQNQRCFADSNPNHSPKGGDCNNKTRFYHIFGGAQNTVEHGGIYLFFTEYFVPRHPEK

SEQ ID NO: 209136 - protein, 174 aa, Glycine max
  Clone ID: PAT_MRT3847_30878C.1.pep
IRLEKGVPPEISSSMVSQTFEVPDMSFNSIDSTIDGSGFLNRGPWDLPPPPPPQQQQVQRIRTYTKVYKRGAVGRSIDITRYSGYEDLKQDLALRFGIEGQLEDLQRIGWKLVYVDHENDVLLVGDDPWEEFVNCVRCIKILSPQEVQQMSLDGDFGNGGLPYPAGSSSDGGNA

SEQ ID NO: 209137 - protein, 85 aa, Glycine max
  unsure (1)..(85): unsure at all Xaa locations
  Clone ID: PAT_MRT3847_30879C.1.pep
XXCXCTVXIXXXXXEXKXVYXXQXGIHLVWPXMTPRRXTLPSXLPPXXFXMXAEIXHXXSXRARXXXGQXFGSXSXPFXFTFNXC

SEQ ID NO: 209138 - protein, 188 aa, Glycine max
  Clone ID: PAT_MRT3847_3087C.1.pep
AAELQSVAADPALLLHHQTCAGNGIGDSTSLIPESSRRPSLSSLQIPALSVENALSSFNKTDGPILISSPGSSRGLPPRPNSARVIKSTMKTLLSERSFRAKNSSMDSERTVLIIPDGSPSDGPVDNKPSTSRSLSLNKILFSSSTKAAHSLPVTPTANSGPENVHGRHLGCDSDLSKMKVNQHMTSI

SEQ ID NO: 209139 - protein, 79 aa, Glycine max
  unsure (1)..(79): unsure at all Xaa locations
  Clone ID: PAT_MRT3847_30880C.1.pep
LRLAFVVIRCSLNNDCRNAPEGLVRTLKDLAXSPYSPEYDXAGFTDPFXHIRLLRLAAVLXWXDHADASDSMNDILAQV

SEQ ID NO: 209140 - protein, 64 aa, Glycine max
  unsure (1)..(64): unsure at all Xaa locations
  Clone ID: PAT_MRT3847_30881C.1.pep
XXXXXXXCXXXIXHLXXWXKPITAXXLKXXXKAFPXPXLXSSXXLAXVXISXXVRIPXXXYACX

SEQ ID NO: 209141 - protein, 136 aa, Glycine max
  unsure (1)..(136): unsure at all Xaa locations
  Clone ID: PAT_MRT3847_30882C.1.pep
CRSCRCRSCRCNCLSVAEDSGVGRREVKSGLEEAHKLRFGILGTXLLVLIEEGAKMVSTRKLRYWQSMAGSTSPSARMLHTGSLVKETGAVRPRLHAGPNSSPKRKGHTTGFSRRTEVPPSPGTPKRIQSHEVHHR

SEQ ID NO: 209142 - protein, 47 aa, Glycine max
  Clone ID: PAT_MRT3847_30883C.1.pep
IVLAVGSDQSIRARLRPIRRCSDSRSCTGAHLEHICFYDSGRDPVSS

SEQ ID NO: 209143 - protein, 686 aa, Glycine max
  unsure (1)..(686): unsure at all Xaa locations
  Clone ID: PAT_MRT3847_30884C.1.pep
MAAEICGGSLFLSVKTQLQLQQRNQQNVFFHAQRSRTRRSTTRFHSSKRCFSSSAFPNASAFRRGAVCQVASTDFESAAKAGEDRLSKVPVRNIRNFCIIAHIDHGKSTLADKLLQVTGTVHQREMKDQFLDNMDLERERGITIKLQAARMRYVFENEPYCLNLIDTPGHVDFSYEVSRSLAACEGALLVVDASQGVEAQTLANVYLALENNLEIIPVLNKIDLPGAEPDRVIKEIEESVGLDFSNAILCSAXGIIEILNAIDPRIPPPEDTSKRQLKALLFDSYNDPYSGVLLYFQVVDGALQKRRIVYRMPRLKDYCADEIGVLPHSALQDXEVYAGXVGYLSASIRTVGDARVGDTITHYGRKADNSLPRYEEASHMVFCRLFPVDADHYPDLRDAFEMLQLNDAALMFVPETSSAMGFGFRCGFLGLLHMEIVQERLEREYNLSLITTAPSVVYRVHCVNGDTVECSNPSLLPEPGKRKSIEEPFVKIEMLTPKDYIGSLMELAQERRGQFREMKFIAENRASITYELPLAEMVGDFFDQLKSRSKGYASMEYTFVGYTESNLIKLDIRINGDCVEPLATIVHNDKAYSVGRALTLKLKELIPRQMFKVPIQACIGSKVIASEAISAIRKDVLAKCYGGDISRKKKLLKKQAEGKKRMKSIGKVDVPQEAFMAVLKLEKEVI

SEQ ID NO: 209144 - protein, 360 aa, Glycine max
  unsure (1)..(360): unsure at all Xaa locations
  Clone ID: PAT_MRT3847_30885C.1.pep
MALASFSNLSTQHLFSHYNHPSLQTCTITIPHGTLIFFPSKLKHCTFITSTAHFFPTTVTAISRVGPRIGPPLAISSAGDGGRSSGRGGGGESGGGGDEEEEERDRNREEVMVALAEAGRSLESFPEDLAAAVTAGRVPGSIVRRLFQLEESAVLGWLLKFGGFRERLLADDLFLAKLLIECVVIIFTKAAAELERRKEKFTKELNFVVANVVTGIXTGFVLVWFPAPTISLKPPLAVSAGPIAKLFYGCPDNAFQVGPTRPNALINVQKAVNKTFTAEAENLPIISTSVAFGVYMVVISNLRYQVLAGIIEQRILEPLLHRNKLILTATYFTIRTANTYWGSLLWVDFARWVGVQKIKD

SEQ ID NO: 209145 - protein, 58 aa, Glycine max
  unsure (1)..(58): unsure at all Xaa locations
  Clone ID: PAT_MRT3847_30886C.1.pep
QMERQSKHDCGLFTSSIDFLSKYLASTYWDIHSTKHTHKTSTEMNFLSITDVLXTFKT

SEQ ID NO: 209146 - protein, 53 aa, Glycine max
  Clone ID: PAT_MRT3847_30887C.1.pep
RKGNDPDQSEARISDPIGQNPNLAKKSEEKSTPPNRINVHKVKKESKIGNSIV

SEQ ID NO: 209147 - protein, 61 aa, Glycine max
  Clone ID: PAT_MRT3847_30888C.1.pep
SGTRSSFTRLSRRTTGQILRGINNSASDEHRHTIFDLSDYTISMDRFNSLQHPLISLARDL

SEQ ID NO: 209148 - protein, 78 aa, Glycine max
  Clone ID: PAT_MRT3847_30889C.1.pep
RGHPNNGTKRGFRLTLKGLTQIFFFEQMGTCTGTCDTHPKTCLYHDSKEKKKTLRAQEKKPQYVGSLKVGQGLSSNVG

SEQ ID NO: 209149 - protein, 394 aa, Glycine max
  Clone ID: PAT_MRT3847_3088C.1.pep
MLPEHVEKALKHVYHASTNKTNGKELELLLAILPDNNGSLYGDLKRICETDLGLISQCCLTKHVFKITKQYLANVSLKINVKMGGRNTVLVDAVSCRIPLVSDIPTIIFGADVTHPENGEEFSPSIAAVVASQDWPEVTKYAGLICAQAHTQKLILAGNEFWQEPVLPIVNGGTIREVLAREHVYHVAGSKTKAKELELLLAILPDNNGSLYGDLKRICETDLGLISQCCLTKHVFKITKQYLANVSLKINVKMGGRNTVLLDAVSCRIPLVSDIPTIIFGASHARIQGTSRPAHYHVLWDENNFTPDGIQSLTNNLCYTYARCTRSVSVVPPAYYAHLAAFRARFYMEPDMQDNGSAGDGNGHGAKATRAAGDYSVKPLPDLKENVKRVMFYC

SEQ ID NO: 209150 - protein, 83 aa, Glycine max
  Clone ID: PAT_MRT3847_30890C.1.pep
SVQPFMLKLVICYLDVALIFFPYRLDPPSLISAYNGVSFQLSPLFLNGWSQTMYVLQNQDSMICDQFHSIGRMTQHQVYSLEA

SEQ ID NO: 209151 - protein, 116 aa, Glycine max
  unsure (1)..(116): unsure at all Xaa locations
  Clone ID: PAT_MRT3847_30891C.1.pep
MYATTKRRTTLLNSEHHYLELQSTRRQDLRHQGGARSWLQRYQVQPYQSQTARRARPCRRPRRHQIIRSNSGRVPPAVSEPQAAPVPDXHAQNAPMLPTMDLPNDYDCRDKGVDTN

SEQ ID NO: 209152 - protein, 143 aa, Glycine max
  Clone ID: PAT_MRT3847_30892C.1.pep
MLDSVLDFITQAASSSAFIFCFCNLIIVIILVDLKPSLSIHQESEIPLSKGENQKQEAKYSKSLVEKETASLPQAVEVSHDQEAETVESIEIEGNDDCSNEEEDDDDDNNINDEDELKRRVEEFIEKVNKGWKEELLSTSNLV

SEQ ID NO: 209153 - protein, 124 aa, Glycine max
  Clone ID: PAT_MRT3847_30893C.1.pep
MDQGRQVFTVDLLERYAAKGRGVITCMAAGNDVIVIGTSKGWVIRHDFGVGNSNEIDLSVGRPGDQSIHRVFVDPGGSHCIATVVGPGGAETFYTHAKWTKPRILSKLKGLVVNAVAWNKQQIT

SEQ ID NO: 209154 - protein, 155 aa, Glycine max
  unsure (1)..(155): unsure at all Xaa locations
  Clone ID: PAT_MRT3847_30894C.1.pep
MLDSVLEFITQAASSSTFIFCFCXLIIVIILVDLKPSLSIHQESEIPPSKGDENEKQKAKYSNSLVEKETASLPQAVEVSHDQEAETVESIGIEGNDYCNNEDEEKVEEEDDDDDNNDDDDDNDEDELKRRVEEFIEKVNKGWKEELLSTCIGLK

SEQ ID NO: 209155 - protein, 64 aa, Glycine max
  Clone ID: PAT_MRT3847_30895C.1.pep
ASFLQEVLTNLNMIVILKNMGVAVRISRVSKAKELNNQMRYVILLVIFSHCSLVQMILKFFTLI

SEQ ID NO: 209156 - protein, 252 aa, Glycine max
  Clone ID: PAT_MRT3847_30896C.1.pep
MDGGGVNYNPRTVEQVFRDFKGRRAGMIKALTTDVEEFFQQCDPEKDNLCLYGFPNEQWEVNLPAEEVPPELPEPALGINFARDGMQDKDWLSLVAVHSDAWLLAVAFYFGARFGFDNADRKRLFSMINDLPTIFEIVTGSAKKQTKEKSSISNHSSNKSKSGSKGRGSESGKYSKETKDEEEEVLDEEDDEEHEETLCGACGEHYASDEFWICCDICEKWFHGKCVKITPARAEHIKQYKCPSCSNKRARP

SEQ ID NO: 209157 - protein, 44 aa, Glycine max
  unsure (1)..(44): unsure at all Xaa locations
  Clone ID: PAT_MRT3847_30897C.1.pep
HLRXEWHSXKFLXSISXCSYVYTIIMXXHSLHXDXIQXTLHFHN

SEQ ID NO: 209158 - protein, 89 aa, Glycine max
  Clone ID: PAT_MRT3847_30898C.1.pep
KIVTYCYLVKDIKIPYIYVPIFDINSAWEVQSVTHFRESIKEKHASDTLKSSSIFSSLFSRDSYDCSCLSILEDNSSTILLQFFSSRIP

SEQ ID NO: 209159 - protein, 241 aa, Glycine max
  Clone ID: PAT_MRT3847_30899C.1.pep
MTNDVQILNNGYPMPAVGLGVYKIADEQMEEVVRTALDAGYRAFDTAYFYGNEKALGSALKHSNVERDELFITSKLWNDYQGYDQTIEYFNKSLDNLGLDYLDLFLIHWPCENDQWYIESYKALDLLYEEGKIKAIGVCNFKIHHLEKLMKETKITPQVNQIELHPYFNQQDVQDFCDEHDIKVTAWMPLMRNKGLLDDPVITDIAHRYDKTPAQIVLRWHLAHNRIIIPKSQTDELLHGT

SEQ ID NO: 209160 - protein, 409 aa, Glycine max
  Clone ID: PAT_MRT3847_3089C.1.pep
FQNPPEDQASPLCKYQQGSSRGLPPRPNSASAIKSTMRTLLSERSFRAKNSSQDSERTVLIVPDASPSDGPVDNKPSTSRSLSLNKFLFASSTKAGHSLPVTPTANSGVENVHGRHLGCDSDLSKVKVNQHMTRSVSVPVNIKTANLRHTDSRRLVRVISVRSLPGTSGGISADNALGSEIVNEDASEDIPEEDAVCRICLVELVEGGNTLRMECSCKGELALAHQDCAVKWFSIKGNKTCDVCKQEVQNLPVTLLKISNPQTVTRQPLNAPEPQQREVTSYRIWQDVSVLVLVSMLAYFCFLEELLVSVLGTRALAISLPFSCVLGLLSSMIASTMVSGSYMWVYACFQFAIVILFAHVFYTILNVNAILSVLLSSFTGFGIAISLNTLLMEYVRWRTRRLIQASMTQ

SEQ ID NO: 209161 - protein, 54 aa, Glycine max
  Clone ID: PAT_MRT3847_308C.1.pep
PSSLAESLFRSTRRRRGDRYSRRRTNSALTLATCSPPMVWCCLYLFTTTVTTAA

SEQ ID NO: 209162 - protein, 35 aa, Glycine max
  Clone ID: PAT_MRT3847_30900C.1.pep
RRQLAQKVSAGCSRHEIGPEMRLANLEPKALCITL

SEQ ID NO: 209163 - protein, 129 aa, Glycine max
  Clone ID: PAT_MRT3847_30901C.1.pep
SLLFYHLSLNCFSFLLWSYECTFDTTIEYCTPTVKVTFAFFVDANTCAADFFWSGISTSSDKEHHQQQCNVFICCHFSLLLYFLLLLLVVNLSSPPSLPFCRLLAAVLEPMRSVLSRCRTPNTFPDHSP

SEQ ID NO: 209164 - protein, 181 aa, Glycine max
  Clone ID: PAT_MRT3847_30902C.1.pep
MGDAVKVFELMIHKGFLPNLVTYSSLIHGWCKTKNINKALFLLGEMVNSGLNPDVVTWSTLIGGFCKAGKPEAAKELFCTMHEHDQHPNLQTCAIILDGLFKCQFHSEAISLFREMEKMNLELNVVIYNIVLDGMCSFGKLNDAQELFSCLPSKGIKIDVVAYTTMIKGLCKEGLLDDAEN

SEQ ID NO: 209165 - protein, 74 aa, Glycine max
  Clone ID: PAT_MRT3847_30903C.1.pep
TFTKHTIKTTPSSIMTEIDNVIYLFVAGEKPNEVTEDAHEKLSQILFILRPQAGYAPQLRIVLHDIENEKKKNS

SEQ ID NO: 209166 - protein, 54 aa, Glycine max
  Clone ID: PAT_MRT3847_30904C.1.pep
RILAPGVSEDKSWKQYQIAATVFIYRHRCQSQTDGTFGWVGKNLPPTPAASLWA

SEQ ID NO: 209167 - protein, 76 aa, Glycine max
  Clone ID: PAT_MRT3847_30905C.1.pep
NPPNGKRFIRPLGKNHQKLFERVMVTPLPLYGKGVKKGTPVEINQEIFDKNWGLMRDGLMKQVIWPPDAPNPKKVG

SEQ ID NO: 209168 - protein, 79 aa, Glycine max
  Clone ID: PAT_MRT3847_30906C.1.pep
DIALRIVAPGKGILAADESVGSMAKRLSQIGVENTEENRRLYRQVLFSADDRVKKCIGGVIFFHETLYQKDDNGVPFVR

SEQ ID NO: 209169 - protein, 80 aa, Glycine max
  Clone ID: PAT_MRT3847_30907C.1.pep
RAGVRYKNKPERTHVNVKRRTQRTEQKNNREHGTKRNSPGPIYMRRRRALELTNSDRRQDRRLSWTHPENQIQAKVREKT

SEQ ID NO: 209170 - protein, 52 aa, Glycine max
  unsure (1)..(52): unsure at all Xaa locations
  Clone ID: PAT_MRT3847_30908C.1.pep
RTKKSVETYGIYIFKVLKQVHCDVGSSSXSWGILSGFEHDIFEKLAEEASRL

SEQ ID NO: 209171 - protein, 235 aa, Glycine max
  Clone ID: PAT_MRT3847_30909C.1.pep
LEQRLAYINTIVYPFTSLPLVAYCTLPAICLLTGKFIIPTLSNLASALFLGLFLSIIVTSVLELRWSGVTIEALWRNEQFWVIGGVSAHLFAVFQGFLKMLAGVDTNFTVTAKAADDTEFGDLYIIKWTTLLIPPTTLIIINMVGVVAGFSDALNGGYESWGPLFGKVFFAFWVIFHLYPFLKGLMGRQNRTPTIVILWSELLASVFSLVWVKINPFISRPDSASISQTCISIDC

SEQ ID NO: 209172 - protein, 178 aa, Glycine max
  Clone ID: PAT_MRT3847_3090C.1.pep
SSHVLISFILLKSESRPRCLPCTFSGPEFAVGVTGNECAAFVEEENKILLRERDREVEGLLSTGPSDGEPSGIMRTVLSLSIEEFLALKLLSESKVFIVDLMTLAEFGLGGSPLLEPGLDINIGPSVLLKEDNAFSTDNAGICREERLGLLEDSDGEEEEQDLLPHFEVQQLRYSKVE

SEQ ID NO: 209173 - protein, 79 aa, Glycine max
  Clone ID: PAT_MRT3847_30910C.1.pep
LSKKKKKKKKKKKKKKKKKKKKKKKKKKKKKKKKKKKKKKKKKKKTKKKKKKKGGALLRNQILTPGGGKKKFFFWGPQI

SEQ ID NO: 209174 - protein, 526 aa, Glycine max
  unsure (1)..(526): unsure at all Xaa locations
  Clone ID: PAT_MRT3847_30911C.1.pep
MPAVLQMLPYSNLDCDHYVNNSKAVREAMCFLMDPVVGRDLCYVQFPQRFDGIDRSDRYANRNTVFFDVNMKGLDGIQGPMYVGTGCVFNRQALYGYSPPSMPKLPKSSSCCCCPSKKQTKDVSELYRDAKREELDAAIFNLREIDNYDEYERSMLISQMSFEKTFGLSTVFIESTLMENGGLPESADPSMLIKEAIHVISCGYEEKTAWGKEIGWIYGSVTEDILTGFKMQCRGWRSVYCMPLRPAFKGSAPINLSDRLHQVLRWALGSVEIFFSRHCPLWYGFAGGRLKWLQRLAYINTIVYPFTSLPLVAYCTLPAICLLTGKFIIPTVISSAVFSYXKIFVIXFKSLIFPCCQSETFXSAILSNDQKSVIGVASAHLIAVFQGFLKMLAGVDTNFTVTAKAADDTEFGDLYIIKWTTLLIPPTTLIIINMVGVVAGFSDALNGGYESWGPLFGKVFFAFWVIFHLYPFLKGLMGRQNRTPTIVILWSVLLASVFSLVWVKINPFISRPDSASISQTCISIDC

SEQ ID NO: 209175 - protein, 73 aa, Glycine max
  Clone ID: PAT_MRT3847_30913C.1.pep
LGFGAGLKRWVLGLHILSGKKGKGLKVCLGPPIWTHQSLNFNKNGGDKRKKKGFFFCLLAGKYKKPLFLLALQ

SEQ ID NO: 209176 - protein, 48 aa, Glycine max
  Clone ID: PAT_MRT3847_30914C.1.pep
LSHRSTYITPLLEMLYSLTLCDQVLAIGDSITVHFNFCRLNLHRFFIT

SEQ ID NO: 209177 - protein, 119 aa, Glycine max
  unsure (1)..(119): unsure at all Xaa locations
  Clone ID: PAT_MRT3847_30915C.1.pep
AYVEKKKICTLEDLWDDEKKKAQLHWTFIFXNLIVQWAQRIANFVLGSGSMHGRLISCPYAALNMRNNRMFAPSLSHLTEARLRDLRRPLEVAYDGAKAXHQDALEQSWKLAYPDSELA

SEQ ID NO: 209178 - protein, 78 aa, Glycine max
  Clone ID: PAT_MRT3847_30916C.1.pep
FTPSRDPHRCHHKPPLLKSVLLVPTKVFSIKIKNMGSSPDTSKTIQLVRYNSYLRRLNISFKILLPPSWAFLNLYPLS

SEQ ID NO: 209179 - protein, 369 aa, Glycine max
  Clone ID: PAT_MRT3847_30917C.1.pep
MIAVEIADYIVLKKIILVLFCIILFCKIVRYMFSLLKEEKEPITILVTGAAGQIGYALVPMIARGAMLGPNQPMILHMLDIEPATESLKGLKMELIDAAYPLLRGVVATTDVVEACKDVNIVVMVGGFPRKEGMERKDVMSKNVSIYKAQASALEQHAATDCKVLVVANPANTNALILKEFAPSIPEKNITCLTRLDHNRALGQISERLNVLVSDVKNVIVWGNHSSTQYPDVNHATVTTNSGEKPVRELVVDDNWLNNEFITTVQQRGAAIIKARKQSSALSAASAACDHIRDWVLGTPKGEWVSMGVYSDGSYGIPTGLIYSFPVTCERGDWNIVQGLKIDQFSREKMDKTAQELIEEKTLAKSCLN

SEQ ID NO: 209180 - protein, 58 aa, Glycine max
  Clone ID: PAT_MRT3847_30918C.1.pep
MSSSHSNIRLCGHANTKAKGLFPHSNQTSVSMIALFIKLYKHPSPFWHSGKSFVVFTL

SEQ ID NO: 209181 - protein, 62 aa, Glycine max
  Clone ID: PAT_MRT3847_30919C.1.pep
INGNVDKILQKFSPFTNYLLFPLNSLRSSNKAKVYVQNGRVMINLALSKMALNFIVRTNTNK

SEQ ID NO: 209182 - protein, 50 aa, Glycine max
  Clone ID: PAT_MRT3847_3091C.1.pep
QPKVMVRQNMLRFQHKSGLPITGHGTLGPFTSNLPEQGLDLSKVPPPEES

SEQ ID NO: 209183 - protein, 60 aa, Glycine max
  Clone ID: PAT_MRT3847_30920C.1.pep
LISKLILVVLIGVRGVLFPQLNDFTLLSVVVTHVAFWILRTNRFGYCLRFQCCIMVRLFR

SEQ ID NO: 209184 - protein, 114 aa, Glycine max
  unsure (1)..(114): unsure at all Xaa locations
  Clone ID: PAT_MRT3847_30921C.1.pep
VLSGFGWXVVFSGSVGLVFFXLGFVACXVXWGCXXSVSVRXXRSLVVWXXPGXLLVSLFALVXVLGVPFCSXCXAAVXFVCSFFGGGWSSFGLAPLAPXXLLGPLWTVFKIFXX

SEQ ID NO: 209185 - protein, 327 aa, Glycine max
  Clone ID: PAT_MRT3847_30922C.1.pep
MDPAKGLEASGEKTLQAEVKAFFDSAPPLQKSDEITQKLNQFIQRISSPSANGKVRRIVCVTSGGTTAPLEQRCVRYVDNFSSGHRGATSTEYFLKAGYGVIFLYRKRSFQPFCRSLPDDPLLECFKPTDEANIQVCEAYSEAVKRAIVDHHTAVAGGLLLKLPFNTIFEYLQMLQIIAMSMRCIGPHAMFYLAAAVSDYYVPWKEMVEHKIQSGSSHLLDVKLVQVPKMLSVLRKDWAPLAFCISFKLETDSNILLNKAGAALEKYKMHAVVANELASRKEQVVVVTSAEKVTVQRDNSQSDNDVENPLIKLLSEKHATYIEDSGR

SEQ ID NO: 209186 - protein, 389 aa, Glycine max
  unsure (1)..(389): unsure at all Xaa locations
  Clone ID: PAT_MRT3847_30923C.1.pep
MGEQHENENGRTGTKNQHQQKKKKKKSEFEFCKACNINHDQGLRHKYFPNHKKSLSTFLSRFRKKLSDVRFFLNAPIPLNPQLASRNRFWCVFCDQHIDELNSSFACANAIRHLASAEHVKNLKQFFWKYGGAADQLDAFMVSDDDVDKWEKKCTARKDEASEGSRRTVIGPSSDXNEYQVSCSGLCGVATGATSSEVCSGANNFSLQDFAVGRSSLSLPHDGRQRSSNGYSCNKKVRENGRMVSGESSHQGVQMVTQISTGSAGGKVFSEEPPPWLGTTDEVQMRSSNKLGKSKKLNSKRVGAAWVEKRKIEMEKERRGESIRNECDSNWLPNFGRVWQSGSRRESRKEFEREKQKLNVETQSEMAIKIKPYVSKRMRMDSGGDYASG

SEQ ID NO: 209187 - protein, 78 aa, Glycine max
  unsure (1)..(78): unsure at all Xaa locations
  Clone ID: PAT_MRT3847_30924C.1.pep
GVPDNRRIXSXVXLVCIQFRLXSSXSARVDGXMXAIAFAGRXLXQXNLMLXIREWNSLCIRGNQMGXXELENXRKXXH

SEQ ID NO: 209188 - protein, 74 aa, Glycine max
  unsure (1)..(74): unsure at all Xaa locations
  Clone ID: PAT_MRT3847_30925C.1.pep
IRNSWADEPILYALALPLFLSFALHSFASYPLYRGISFLILRELFXLPSLFWCLIFIELVKRLMGSLLIPGRSA

SEQ ID NO: 209189 - protein, 54 aa, Glycine max
  Clone ID: PAT_MRT3847_30926C.1.pep
DLHESVFGSCLRSCRRLSICRAFDLHCECPVSFSVYPGFLASLTVIFSSVPEYN

SEQ ID NO: 209190 - protein, 63 aa, Glycine max
  Clone ID: PAT_MRT3847_30927C.1.pep
AFDYYYSSYARITLVNTYTLGQTTTRESCSSEVRTKGSPDVLIRCIIQHSMDLGFLQINLVQW

SEQ ID NO: 209191 - protein, 49 aa, Glycine max
  Clone ID: PAT_MRT3847_30928C.1.pep
PGKGKILNRKTLQKLQKKGGALPKAPFKGFPGLLRGGRTRSPFTRGVFF

SEQ ID NO: 209192 - protein, 67 aa, Glycine max
  Clone ID: PAT_MRT3847_30929C.1.pep
NSNFDRTTILKKTYKNCFSLPMKNDCYYSFGERACVCSHSRALLLMIWISEFELLCQEVSVFKLRRK

SEQ ID NO: 209193 - protein, 42 aa, Glycine max
  Clone ID: PAT_MRT3847_3092C.1.pep
RGRPLVFFFFFFFFYLKGEEAGVKFSLLLFTRKTESWHGLHS

SEQ ID NO: 209194 - protein, 123 aa, Glycine max
  Clone ID: PAT_MRT3847_30930C.1.pep
SGFLVRWLVEEPFQMRQVLNFDYTKQSPVAFVPVMSCDGVGGAHDSEKGIAVREWMGRRVIPANQKVQVTVSLVVPESEYNTNLGIFQVLMTYLSHFNPENDMNCLHDVLLVLIVMCNVTVLA

SEQ ID NO: 209195 - protein, 40 aa, Glycine max
  Clone ID: PAT_MRT3847_30931C.1.pep
RKVKHHLWQFTCHSRNHHRHNLDQCLLTFLLNVFVTSEHE

SEQ ID NO: 209196 - protein, 77 aa, Glycine max
  Clone ID: PAT_MRT3847_30932C.1.pep
PKISRYLTVSYIPCSHLYLFRRQQQYQSIGIHAARINLRGQLVQGKILVSQESEVGNICFPCLVYYLKITFPENIVT

SEQ ID NO: 209197 - protein, 35 aa, Glycine max
  Clone ID: PAT_MRT3847_30933C.1.pep
APCDRPLRSVRLSFMGYVAPFSGSAVFLNGQFLFT

SEQ ID NO: 209198 - protein, 36 aa, Glycine max
  unsure (1)..(36): unsure at all Xaa locations
  Clone ID: PAT_MRT3847_30934C.1.pep
TEKAFLKQPKVFFSSKKTGKGKRPPKGXNRFWKSIG

SEQ ID NO: 209199 - protein, 218 aa, Glycine max
  Clone ID: PAT_MRT3847_30935C.1.pep
MLQFLDRKLSSDHAHRRHSSGSRAAQLPEFVAKGGGAGIFRLPARGAVHPARPPSPRAARAALRETQIGRFLRNIVSTESQLWAASECGVRFWNFKDLYASWCGEEEEEGVVARNGDEESAPFRESVWTSPTLCLVADEGNRLVWSGHKDGKIRCWKMDDDDDDNNNNNCDWSNRFTESLSWHAHRGPVLSLTFTSYGHSSLFTVNFTALLLLDLGFI

SEQ ID NO: 209200 - protein, 52 aa, Glycine max
  Clone ID: PAT_MRT3847_30936C.1.pep
NILHIISSYRERSVSSTYARSHCSLQDTLGRTQRELPTSYQKIAPINYICKP

SEQ ID NO: 209201 - protein, 44 aa, Glycine max
  unsure (1)..(44): unsure at all Xaa locations
  Clone ID: PAT_MRT3847_30937C.1.pep
AILYNIDYAWDNQWILWXGPFIGLALGVVYHRIVIXAIPFKTRG

SEQ ID NO: 209202 - protein, 45 aa, Glycine max
  Clone ID: PAT_MRT3847_30938C.1.pep
IFGFCYGERNRPSRATAGVPCKPKGTTEQGPRIRVLKQLNQLCGQ

SEQ ID NO: 209203 - protein, 304 aa, Glycine max
  unsure (1)..(304): unsure at all Xaa locations
  Clone ID: PAT_MRT3847_30939C.1.pep
MVTKTEETQLNRLENQVDNGGDGXWEYGXLCLVRKLKVRRSEKVLKHGLSILNDPKHRSSLGSDEWTLYEQVAVAAMDCQCLDVAKDCTKVLQKRFPESKRVGRLEAMLLEAKGSWELAEKAYTSLLEDNPLDQAIHKRRVAMAKAQGKISVAIDWLNKYLETFMADHDAWRELAEIYISLQMYKQAAFCYEELILSQPTVPLYHLAYADVLYTLGGLENLQTAKKYYSSTIDLTGGKNTRALFGICLCTSAVTQLTKGKSKEDKEGSQLQSLAAKVLEKDYKQRAPDKLPQLTTALKSLTLSS

SEQ ID NO: 209204 - protein, 168 aa, Glycine max
  Clone ID: PAT_MRT3847_3093C.1.pep
MAQKAHPFISLSLFSFQSPSSTPLSLSKTPNQKMAQKAEKNDTDFKVPETIITPCTTTTATSITEPSRFFDATTPATSSRSPKRSLPLDDESQTDQTASSEPKRVVSRCSCCRRRVGLTGFRCRCGDLFCAEHRYSDRHDCSYDYKAAGREAIARENPVVKAAKIVKV

SEQ ID NO: 209205 - protein, 68 aa, Glycine max
  unsure (1)..(68): unsure at all Xaa locations
  Clone ID: PAT_MRT3847_30940C.1.pep
REXNIIIIYVVVVVGCCWRRKKCVGALSCFLLLQQSITTTTLMMMMLSSTRIHFSVYLRPLISIQFLL

SEQ ID NO: 209206 - protein, 106 aa, Glycine max
  Clone ID: PAT_MRT3847_30941C.1.pep
EQNDSGGRIPFPLGPFKPHLKKSFVFTQKIWLRKSRFQAPLKKRGKWVKKCPLPGPSINLLDFLTLALNLACWKFPKKGGKEPPLYRGGKFTLEKTIYGDTTSALF

SEQ ID NO: 209207 - protein, 137 aa, Glycine max
  Clone ID: PAT_MRT3847_30942C.1.pep
LYGFLEPQSIHNAKDRRGQCEEYIEKWLKESQRQVYLGAYLNQAHWQLIVLCPKNNVVVWFCSLRKRPDVHIKTAINNAFKTLNTTTDDKVQQTTPQWIELKWFGDGTPHDTDTITTLRQNWAAYFLKLRAIQRKKL

SEQ ID NO: 209208 - protein, 114 aa, Glycine max
  Clone ID: PAT_MRT3847_30943C.1.pep
MSEYELSREQRIRENRERMGKLGILDLSLTLKLNNKNKRSYSSHKPQTPPSLPNSSVPVRRSSRLQNVTPVSYSEVPPKKDEFKKNGRVVIEQSAKPEVYSEEHEKLLGNTDKP

SEQ ID NO: 209209 - protein, 54 aa, Glycine max
  Clone ID: PAT_MRT3847_30944C.1.pep
SVRLNSVSCTDCIQSTLFKLNDKMTLSIGNDSNFVGDDFTTFLDSIDCRTEISL

SEQ ID NO: 209210 - protein, 246 aa, Glycine max
  Clone ID: PAT_MRT3847_30945C.1.pep
MELFQGRKIIGSVFGGTSTFTEYTVVDSACVVKIHVDGDGDLNPYIKRLTLLSCGVSTGVGAAWNTADVHFGSPVAVFGLRAVGLSVAEGARARGASKIIGVDINSDKFIKARAMGITDFIDPRDDEKPVYERIRDMTRGGVHSSSECAGDVHVLSEAFLSAHAGCGLTVILGIHPSPQLLPIHPMELFQGRRIVGSVFGSFKGKTQLPRCAKKCMDGVVKLDEFITSQPPIEGINKGLRFFTCVL

SEQ ID NO: 209211 - protein, 45 aa, Glycine max
  unsure (1)..(45): unsure at all Xaa locations
  Clone ID: PAT_MRT3847_30946C.1.pep
TRPSXPLELNLIYXLLXNLXSXALSVXTLTLDSRPXAFYFDXXPH

SEQ ID NO: 209212 - protein, 123 aa, Glycine max
  unsure (1)..(123): unsure at all Xaa locations
  Clone ID: PAT_MRT3847_30947C.1.pep
MSHLISLYHSLSDEEIIKLRKEVIKSKGVTYLNSQHECFLLNLAAAERLEELDTAADTVXRLGRKCSDPSLSSFDLVYADLKLGLIDLRKLSYGTRTPRRLSKLRSLSLHQKSSFCHALHGGT

SEQ ID NO: 209213 - protein, 87 aa, Glycine max
  Clone ID: PAT_MRT3847_30948C.1.pep
MGSKAPSWSDQWGSGGFASDHYEEEEEEKTKMKKSGSSKKMADAKAVASAGMDKAKTAAVVGAQKVKSGTSAGLKWVKNQYQKRTSK

SEQ ID NO: 209214 - protein, 85 aa, Glycine max
  Clone ID: PAT_MRT3847_30949C.1.pep
MGSKGPSWSDQWGSGGFGSDHYEEEEKMKMKKSGSSKKMADAKAVASAGMDKAKTAAVVGAQKVKSGTSAGLKWVKNQYQKRTSK

SEQ ID NO: 209215 - protein, 137 aa, Glycine max
  Clone ID: PAT_MRT3847_3094C.1.pep
MAQKAQKNDTEFKVPEPIINPCTTTTTTTTSISEPSRFFDATTPATSSRSPKRSLPLDEESQTDQTTSSEPKRAVNRCSGCRRRVGLTGFRCRCGDLFCAEHRYSDRHDCSYDYKAAGREAIARENPVVKAAKIVKV

SEQ ID NO: 209216 - protein, 87 aa, Glycine max
  Clone ID: PAT_MRT3847_30950C.1.pep
MGSKAPSWSDQWGSGGFASDHYEKEEEEKTKMKKSGSSKKMADAKAVASAGMDKAKTAAVVGAQKVKSGTSAGLKWVKNQYQKRTSK

SEQ ID NO: 209217 - protein, 501 aa, Glycine max
  unsure (1)..(501): unsure at all Xaa locations
  Clone ID: PAT_MRT3847_30951C.1.pep
MASSLLSPSFTSFLRTKDLSLSAFTSQRCFKAVPRKIIRCAIAAPQRQPSTTGSVRTAMTMTEKILARASEKAQLTPGDNVWVNVDILMTHDVCGPGSIGIFKREFGEDAKVWDREKLVIIPDHYIFTSDERANRNVDILRDFCHEQNIKYFYDIKDLSNFKVNPDYKGVCHVALAQEGHCRPGEVLLGTDSHTCTAGAFGQFATGIGNTDAGFVLGTGKLLLKVPPTLRFVMDGEMPDYLLSKDLILQIIGEITVAGATYKSMEFVGTTVESLTMEERMTLCNMVVEAGGKNGVVPADSTTFKYLEGKTSLPYEPVYSDDQARFLAEYRFDVSKLEPVVAKPHSPDNRALARECKDVKIDRVYIGSCTGGKTEDFXMAAAKVFLASGKQVKVPTFLVPATQKVWMDLYSLPVPGSGGKTCSQIFEEVGCDTPASPSCGACLGGPKDTYARMNEPKVCVSTTNRNFPGRMGHKEGQIYLASPYTAAASALTGYVTDPREFL

SEQ ID NO: 209218 - protein, 54 aa, Glycine max
  unsure (1)..(54): unsure at all Xaa locations
  Clone ID: PAT_MRT3847_30952C.1.pep
KSCFHLSYLILPSPESNSTWVXILGCHGISIRFIHSITDFSSLQIPRFILTSQP

SEQ ID NO: 209219 - protein, 280 aa, Glycine max
  Clone ID: PAT_MRT3847_30953C.1.pep
MEQANSLSEAGQNPMLVSVASEHLPSKLLLPPAVEPDLSSMRPKKRKTSTSKLIPWHKELSQGSERLQDISVAELDWAQAANRLVEKVEDDAEVVEELPMMKSKRRLVLTTQLMQQLLNPPPAAILSADVKLHHESVVYSVARLALGDACSSVSRSGNDTFIMSPGSKNLLPDKPKASEKIDQYILKVEDFVDRARKLENGLFRLDSRASVLDLRLECQDLERFSVINRFAKFHGRGQNDGAETSSSDATANAQKSCPQKYVTAVPMPRNLPDRVQCLSL

SEQ ID NO: 209220 - protein, 165 aa, Glycine max
  Clone ID: PAT_MRT3847_30954C.1.pep
MQHQQQNYPCVVPNTNSQSEKCTYVGMEQFLHNPSKFSSDVQPVLQSSGYTPPLYATAAAAYMTSANPFYTNLQASGIYSPQYIGAYPFSPTAVPPYIAAYPPHGSVPLVDGATGSSFTPQAPGISSTARNISHGAEMMHANKFFGQFGFPLQPSFSDPIYMQYH

SEQ ID NO: 209221 - protein, 133 aa, Glycine max
  Clone ID: PAT_MRT3847_30955C.1.pep
QKFPFFQNLIFYIPGGVNRLPIWFPMLYCYVAIVWVVKNKDLPLIFRFHVMMGMLLELALQIVYTSSNFMPLIHFPGGTLGMYYWTGVALAYIFTMIMCIRSALLGRFVRIPLVSESAFIHSLFSLGGFQRPF

SEQ ID NO: 209222 - protein, 181 aa, Glycine max
  unsure (1)..(181): unsure at all Xaa locations
  Clone ID: PAT_MRT3847_30956C.1.pep
TRIKAPHGTTLEVPDPEEAVDYPQRRYRIILRSTMGPIDGYLISHFEEKFEEVNGAEPPMIPLASSSGSNEQLMTEMXLLNAAEKNLNLKLSSLLMHSLIASQEFAGGMLKGQSSDVDNDADYWLLSDADVSITDMWRTDSTVDWNGIDMLHPDFGIISRPQSPSSGLAEVPSTGANSIQK

SEQ ID NO: 209223 - protein, 188 aa, Glycine max
  unsure (1)..(188): unsure at all Xaa locations
  Clone ID: PAT_MRT3847_30957C.1.pep
LFLFSFFFFFFFLFYFGGHDRFVYPRLLTVGVISPPLVPSPAHPPGAAPKGGPAPTPQKTPTPKRGEKGPPPGEKKPPPXGGREKPPPGRSGAKKKKXKQPAGPPPGVPPEHTGGGKPPPPGATGPWDFCGAPPXRRGARPPRGGGGTCDRVPRGTPPGAPAPHTGEXAPTPPGFDAEPSPPPRRGGG

SEQ ID NO: 209224 - protein, 72 aa, Glycine max
  Clone ID: PAT_MRT3847_30958C.1.pep
STKKIRPALGKGKIIVFLTKVNPFPVAFLGVLFGVNNDIFSSLSTNHILTNRLQICQSLKYLVYKCPLAFVN

SEQ ID NO: 209225 - protein, 105 aa, Glycine max
  Clone ID: PAT_MRT3847_30959C.1.pep
FKSFFFFSNKPPPPFNLPASFNKAPHKLLIHLFSLTLSHLNLQPQTHFCLTLYPQIILPISPQQYIPNNLQFPHSITQSTFLSLFSSLKPNIIDTKNHTKSTAFK

SEQ ID NO: 209226 - protein, 110 aa, Glycine max
  Clone ID: PAT_MRT3847_3095C.1.pep
GLQHPCFGIVNRSQADINRNVDMIAARRKEREYFETSPEYGHLAHKMGSKYLAKLISQHLEQGIRQKIPMIIALINKTIDELNAELDHIGRPIAVDSRAQLYTILKMGRA

SEQ ID NO: 209227 - protein, 60 aa, Glycine max
  Clone ID: PAT_MRT3847_30960C.1.pep
QCSIFHFYLFRGNEEYCSRKTRFLHNFKKTIGGEAHLFFSRPPLPKILCVPNFQGFLFVP

SEQ ID NO: 209228 - protein, 74 aa, Glycine max
  Clone ID: PAT_MRT3847_30961C.1.pep
PIIGSLRYGNTTRVTQVMYIIHSSTRNIGYAKKVIPQQTFLEDIHTQSYWLIEPQLPPPLSLQVLCTCRMWHGI

SEQ ID NO: 209229 - protein, 47 aa, Glycine max
  unsure (1)..(47): unsure at all Xaa locations
  Clone ID: PAT_MRT3847_30962C.1.pep
GWQAYVAYMNIGCYYLIGLPXGIIMGWVFKSGVTVSIIRYLIITSKH

SEQ ID NO: 209230 - protein, 73 aa, Glycine max
  Clone ID: PAT_MRT3847_30963C.1.pep
KVRGENLKRSIKKKHLYLAPASKEKITTGGAYSKKKTMTIPCGKKQIPPDTAGGSTPIQNKCDCLQDANPINK

SEQ ID NO: 209231 - protein, 221 aa, Glycine max
  Clone ID: PAT_MRT3847_30964C.1.pep
MAGAGDNGGVYHQLDGFQRLLLDAMTTQMQRLLNRNNEVLYRRIERLEHQMNPNAGRPYGGNRRVNDGSNRIEGQDRIEGVKLNVSSFKGRSDPDAYVDLEMKIQHAFSYNDYPEEQKVKLAAATFSNYALVWWKKNQREMKREEGREIDTWTEMRRVMRKRYVPTSYSRTMRQKLQRLSQGSFTIEDKEMEMTLVRANIEEDTKAVHDGFTNKISFQHHD

SEQ ID NO: 209232 - protein, 88 aa, Glycine max
  unsure (1)..(88): unsure at all Xaa locations
  Clone ID: PAT_MRT3847_30965C.1.pep
LRQIRPKHLQDVLKISYDALXEEEKCIFLAMACXALXMGMKRDDVIDVLRGCGFRGEIAXTVLXAEMLIKITDEDNTLWMHDQIRDMG

SEQ ID NO: 209233 - protein, 76 aa, Glycine max
  Clone ID: PAT_MRT3847_30966C.1.pep
LPLLKKPGKFFWFFFSVAPPPGGLNAPPHCLLRFSFRLPFCLGRSFCPGLFFFFTTFFIGMCFNAYVLGSTFFSQS

SEQ ID NO: 209234 - protein, 36 aa, Glycine max
  Clone ID: PAT_MRT3847_30967C.1.pep
GLVLCSSYRILEQYIGLIDFEALFIAHVRHIQRGVI

SEQ ID NO: 209235 - protein, 179 aa, Glycine max
  Clone ID: PAT_MRT3847_30968C.1.pep
MASKASSSASQTQTLSSISDQKEFPQHVSMTRTWLNKLGIDKPIPQSCETRGFYSHFFGSFIKLNDIKRGRISCTIAVKPQIINAFGTLHGGSLLSLIELLSIACARTVIAEDKELFLGEIRASYLSAALNHSEVLAEASVVKSGRNVTMVALEFKLKKTGNLMYIAHTTFYNIPVAKL

SEQ ID NO: 209236 - protein, 72 aa, Glycine max
  unsure (1)..(72): unsure at all Xaa locations
  Clone ID: PAT_MRT3847_30969C.1.pep
YKQSPDPLLNDRILPYIYNKHVDCHTWHNLAIRPXTTKIFNCMIEIWKGTKEKCELDKQAELIIDDHILYSS

SEQ ID NO: 209237 - protein, 54 aa, Glycine max
  unsure (1)..(54): unsure at all Xaa locations
  Clone ID: PAT_MRT3847_3096C.1.pep
CCXKILMVLVQGSRLPISKFFSSSFNIRPFGDPRKXXLPXXYSCFFFXXILHTH

SEQ ID NO: 209238 - protein, 92 aa, Glycine max
  Clone ID: PAT_MRT3847_30970C.1.pep
DPYKHQPFNAFNSPFWTTTSGAPIWNNNSSLTVVARGPILLEDYHLVENLANFDRELIPEHVVDAKGSIAKGFFDVTQDISHLTCAYFLRAP

SEQ ID NO: 209239 - protein, 176 aa, Glycine max
  Clone ID: PAT_MRT3847_30971C.1.pep
RANKDVFESMRKNPKVKYDGERFSYKSKHAVRDKNQLLFLVRKFPEGIAVVDLKDSYPNVMEDLQALKAAREIWLLSNFDSQEDIAYPNDPKVPIKVDDDLKQLFRGIELPRDMIDIERDLQKNGMKPATNTAKRRSAAQMEGISSKPKPKKKKNEITKRTKLTNAHLPELFQNLK

SEQ ID NO: 209240 - protein, 127 aa, Glycine max
  Clone ID: PAT_MRT3847_30972C.1.pep
VINFINKISNYTLSFLKIYCSDYFSIDNGRQSLITRHSVLDSAQASLGPEPSMTGMSKGCLSMADIVRMGTTSSQDTVSHNCNTSGGVSACGNSESSLPLPSQNHSEQQVFHDEWPATEQPIARNAQ

SEQ ID NO: 209241 - protein, 479 aa, Glycine max
  unsure (1)..(479): unsure at all Xaa locations
  Clone ID: PAT_MRT3847_30973C.1.pep
MARWWSLGMCVNQRGGRRRRGMKGVRLRPGCWVRLRFIGSCISSRSKVDTSVSGTSTHYAESKSTNDTSRDXNQQPPAVSSTTTSNGXSNSSSTSKLEEELKIASRLRNFSFSELKLATRNFRPESFLGEGGFGCVFKGWIEENGTAPVKPGTGLTVAVKTLNHDGLQGHKEWLAEVNFLGDLVHPNLVKLVGYCIEDDQRLLVYEFMPRGSLENHLFRRSIPLPWSIRMKIALGAAKGLAFLHEEAERPVIYRDFKTSNILLDAEYNAKLSDFGLAKDGPEGDKTHVSTRVMGTYGYAAPEYVMTGHLTSRSDVYSFGVVLLEMLTGRRSMDKHRPNGEHNLVEWARPHLGERRRRFYKLLDPRLELHFSVKGAQKAAQLAAHCLSRDPKSRPLMSEVVEALKPLPSLKDMASSSYYFQAMQADRFGASPNTRNGRMQGALLTRNGQQQRSLSIPNGTYASPYHHQFPQPSPKPNGKA

SEQ ID NO: 209242 - protein, 140 aa, Glycine max
  Clone ID: PAT_MRT3847_30974C.1.pep
IASGRPFFFFFGCTQGGTHPLDSSKLRKGMHSIHKTISRDPWCSLIIMTMMDRILDAWAWMMTDGEDLILPAADLDYQHRSSIAWTSAPQVMTEVIIETSKDNMAESISLACRNIVGLYIVSSIGRQMNVLMKTLWPCTM

SEQ ID NO: 209243 - protein, 39 aa, Glycine max
  Clone ID: PAT_MRT3847_30975C.1.pep
MFWASSINIGYISRYFIIYHSVWILAVQPQQWPFGMQRG

SEQ ID NO: 209244 - protein, 69 aa, Glycine max
  Clone ID: PAT_MRT3847_30976C.1.pep
QKQESLTRHPRLFIGKKSFKLDIRYHQYNQIKKGSVIRSLARPKVKMEKGCTLVRKIEFDRKTNSRILK

SEQ ID NO: 209245 - protein, 38 aa, Glycine max
  Clone ID: PAT_MRT3847_30977C.1.pep
LLSFNFSLYLNLNPHLTVFPNFRTFFLAMSRCIFFKLP

SEQ ID NO: 209246 - protein, 79 aa, Glycine max
  Clone ID: PAT_MRT3847_30978C.1.pep
IFPTPIALISPLLKLNKFKSQNTLTITISSPDKTPPNLPTKPIQNNPIPLIKISKSFKGPQGKISKLMAYLLPPPFTLF

SEQ ID NO: 209247 - protein, 37 aa, Glycine max
  Clone ID: PAT_MRT3847_30979C.1.pep
VREIVLSYYELILFPLCFTWLSLFVRYRMIILISNDH

SEQ ID NO: 209248 - protein, 57 aa, Glycine max
  Clone ID: PAT_MRT3847_3097C.1.pep
PGASREMCQCVLVPMIKCTLALKWGTGFTDYGQSLTGGYVNHPAAASTAEREVAREG

SEQ ID NO: 209249 - protein, 77 aa, Glycine max
  Clone ID: PAT_MRT3847_30980C.1.pep
CFPSKYTLSLPLVMSYTNSQHTLHAPSLFPVSHMASRTLTFMSLVSLRNLVPGNRVSQPSAVSLSIKDGRISHPIDG

SEQ ID NO: 209250 - protein, 130 aa, Glycine max
  unsure (1)..(130): unsure at all Xaa locations
  Clone ID: PAT_MRT3847_30981C.1.pep
ARSYVIVKRISPLLPFFVAAXLLVAWPCHGACYQRFPLQMKTAYCXRSSEVKCATFMLAVEPHIILSFKTIPEXCFEPTNDYINVQQFTSHSKTVNQQAFFYAREREVHLNXHIFIFSLYNTFLSYIPFY

SEQ ID NO: 209251 - protein, 83 aa, Glycine max
  unsure (1)..(83): unsure at all Xaa locations
  Clone ID: PAT_MRT3847_30982C.1.pep
CRFLVAVLLFLRVSPPSPVVFSLRFAVSFSSYLFFFLWSSLLVPLGACFFSASXVSXXGFFGXPRFNPSNLPPRLSSRQSFQG

SEQ ID NO: 209252 - protein, 49 aa, Glycine max
  Clone ID: PAT_MRT3847_30983C.1.pep
NTKWVIKSTNEFKDRVQHKRNQRNAYLIGINRPYAQKSNTTWNMLWTIQ

SEQ ID NO: 209253 - protein, 343 aa, Glycine max
  Clone ID: PAT_MRT3847_30984C.1.pep
RVRENSVEKIDDHLNVGGLGDKFLWECPETLPDRLTQTTLAAKRKLPSMDGPVRRARGESFQADMSSQNAFSRGVAQSAVSSGPTRRDAFRQRKPNTSRPPSMHVDDYVAREKNVEGVTNVISVPRAGSTGGRPPSIHVDEFMARQRERHNPSATVVGEAVGHPKDASPVKPTDTEKLNKSKRLKTDLYDDLQGIDIVFDGEESDPDDKLPFPQLDDDLQQPAPVIIEQSSPHSIVEETESDVVDSSQFSQMGTPLGSNIDENGQTEFSSKMSGLRPDMSLTRESSVSSDRKYVEQADDTKNVQARPSGRYDFVSSNTSFPMSLYNNPSTSMQSPADSRMVFQ

SEQ ID NO: 209254 - protein, 142 aa, Glycine max
  Clone ID: PAT_MRT3847_30985C.1.pep
LIGGVCKAGKPVAAKELFLVMHKHGQLPNLQTCAIILDGLFKCNFHSEAMSLFRELEKMNWDLNIIIYNIILDGMCSSGKLNDALELFSYLSSKGVKIDVVTYNIMIKGLCKEGLLDDAEDLLMKMEENGCPPNECTYNVFV

SEQ ID NO: 209255 - protein, 125 aa, Glycine max
  Clone ID: PAT_MRT3847_30986C.1.pep
KKMKRGSSTSSKVEPFVLPNRLTLLQIFMVVMLLYLLFMSFEIPLAFRAENGVVFLTDALPMPMPLMLEESRNSVKIRAPTGLKLEKVSTLRFNESFTEGSELHKVARHRGLPGRSSGGKWRAAK

SEQ ID NO: 209256 - protein, 53 aa, Glycine max
  Clone ID: PAT_MRT3847_30987C.1.pep
GAYLLLFLKRTTPRCESRLFLFGGKVHSFFGTYITFKNKPYFGTWVLLLSKIL

SEQ ID NO: 209257 - protein, 87 aa, Glycine max
  Clone ID: PAT_MRT3847_30988C.1.pep
AVPKGHLAVYVGEEDGQFRPVLIPVIYFNHPLFSDLLREAEKKFGFEHPGGITIPCRLTEFERVKTRIASGSGQRGRTRRLGWRLHY

SEQ ID NO: 209258 - protein, 34 aa, Glycine max
  Clone ID: PAT_MRT3847_30989C.1.pep
QSLCRPWQISVLYPSKDLDTSWHVTYCESHAVAT

SEQ ID NO: 209259 - protein, 445 aa, Glycine max
  Clone ID: PAT_MRT3847_3098C.1.pep
MVLSLSTLGFSSALSRLNFFPKPPPSLFSALTTFRRNQLPLKSSLAASKRDGDVVVLGIETSCDDTAAAVVRSDGEILSQVVSSQADLLAKYGGVAPKMAEEAHSKVIDQVVQEALDKAYLTEKDLTAVAVTIGPGLSLCLRVGVQKARKIAGGFNLPIIGIHHMEAHALVGRLIEKDLQFPFMALLISGGHNLLVLARDLGQYIQLGTTIDDAIGEAYDKTAKWLGLDLRRSGGPAIEKLAMEGNAESVKFSIPMKQHKDCNFSYAGLKTQVRLAIESKKIDAKIPISSASNGDRLSRADIAASFQRIAVLHLEERCERAIQWALKMEPSIRHLVVSGGVASNQYVRARLDMVVKKNGLQLVCPPPRLCTDNGVMIAWTGIEHFRMGRYDPPPPAEEPEDFVYDIRPRWPLGEEYAEGKSVARSLRTARIHPSLTSIIQASLQQ

SEQ ID NO: 209260 - protein, 131 aa, Glycine max
  unsure (1)..(131): unsure at all Xaa locations
  Clone ID: PAT_MRT3847_30990C.1.pep
ELPKTVNSEINEIEPLSAARCRVFIRPSRKKDEVPIIHLXGGQTXHSLSAITQLNSNKDAQVFSSLKERLHHLQKTENQKVCLGKSGIHGWGLFARRDLEEGEMVVEYRGEQLRRSITDLREAQYRSEGXD

SEQ ID NO: 209261 - protein, 187 aa, Glycine max
  Clone ID: PAT_MRT3847_30991C.1.pep
MARLSIVAIVAAVLLLALSATPATARPCRSFIISSYSFRNPNSNTFATITEIRSFTPLYITDKPPSYALFFPHATQLPQHESVRPRAPLGFASAYDFSSLRDRTKDILSVALALLFGVGCGALTAATMYLVWSVFSTRHRASSFDDFSSDDEDEIESPKKLGYVKIPAIETTTAVAPAAPAPAKGSV

SEQ ID NO: 209262 - protein, 74 aa, Glycine max
  Clone ID: PAT_MRT3847_30992C.1.pep
EKHQCSFPAVPKPVRPSVRPLITNPDAMHRSNKQNTQKTLGYLRIVQGLRLHPLACADTKIEPVPRPPLARAEF

SEQ ID NO: 209263 - protein, 68 aa, Glycine max
  unsure (1)..(68): unsure at all Xaa locations
  Clone ID: PAT_MRT3847_30993C.1.pep
VVRVSMRNTDTKQVSLXIPWYGPHRVKFLGPFYGXPPSYLTCEFPCDYCWDTAGISADPETFAKNREL

SEQ ID NO: 209264 - protein, 66 aa, Glycine max
  Clone ID: PAT_MRT3847_30994C.1.pep
NKPKLILDSFWGIVLELKVAVQISGEAFGVGRFEKTGFWGRKVFFVRVWPKGIEKVMRKKGGGDFF

SEQ ID NO: 209265 - protein, 51 aa, Glycine max
  Clone ID: PAT_MRT3847_30995C.1.pep
IASNITTIFHNESIIPSFYIIFNNINSQFIILQELVSYQKSNIPLYSFQSE

SEQ ID NO: 209266 - protein, 36 aa, Glycine max
  Clone ID: PAT_MRT3847_30996C.1.pep
TTQMGEIEAPSQHLCLTVHQNGTNSRNFPINSHQMH

SEQ ID NO: 209267 - protein, 165 aa, Glycine max
  Clone ID: PAT_MRT3847_30997C.1.pep
MATVTSAAVAIPSFTGLKASAGKVSAAVKVSAPQATRLGIKASLKDVGVAVVATAASAVLASNAMAIEVLLGGDDGSLAFVPNNFSVASGEKIVFKNNAGFPHNVVFDEDEIPSGVDAGKISMSDEDLLNAPGETYSVTLDAKGTYSFFCSPHQGAGMVGKVTVN

SEQ ID NO: 209268 - protein, 103 aa, Glycine max
  Clone ID: PAT_MRT3847_30998C.1.pep
LIANKTQDQSSYETSKAGVTMLTKSLAREWSRYGIKVNAIAPGYMRTIETEKILNDNTETNTTPMERVGEPEELAGITVYLASDASSFTQGSVFNIDGGYSAL

SEQ ID NO: 209269 - protein, 65 aa, Glycine max
  Clone ID: PAT_MRT3847_30999C.1.pep
NNNFFFKPQAKFLGAPGTLMFWKKKNDPGGNIEGQNFVYRKFHFTLTCPMAALTFISNKKLLPWE

SEQ ID NO: 209270 - protein, 165 aa, Glycine max
  Clone ID: PAT_MRT3847_3099C.1.pep
MRVTIDLGFWSLVVVAVVGLIVPVIAFVVQRQCQRAAARAEEIKRLLVLAEEESVRAESESEASVYQQNSIVSAPPKNKVCAVCYSPTTTRCARCKAVHYCSGKCQIVHWRQGHKDKCHPPSPTCQTEDLVSDLGKKVAEPDYRGIHDEKSQTKSTEYATSSEKP

SEQ ID NO: 209271 - protein, 96 aa, Glycine max
  unsure (1)..(96): unsure at all Xaa locations
  Clone ID: PAT_MRT3847_309C.1.pep
LVLPPFPFCVGFFGPGWLRLVFPVGRGPFLPVRFAGPPSGGXVLAACPSLPRLWLVLCLSPGGGAFVRFRVVGRGXRAVSVHSAPLXGLLLRGLRV

SEQ ID NO: 209272 - protein, 71 aa, Glycine max
  Clone ID: PAT_MRT3847_30C.1.pep
MAYYRDDRFATFEQFYRCYPVSFIEKPDLEKGDKIIMPPSALDRLASLHIEYPMLFQIKNPSAERVVRSLI

SEQ ID NO: 209273 - protein, 167 aa, Glycine max
  unsure (1)..(167): unsure at all Xaa locations
  Clone ID: PAT_MRT3847_31000C.1.pep
MATVTSAAVSIPSFTGLKASAGKVSAAQLXVSAPQATRFCGIKASLKDVGVAVVATAASAVLASNAMAIEVLLGTDDGSLVFSPNSFSVAPGEKIVFKNNAGFPHNVVFDEDEIPSGVDAGKISMSEEDLLNAAGETYSVTLDAKGTYSFYCSPHQGAGMVGKVTVN

SEQ ID NO: 209274 - protein, 114 aa, Glycine max
  unsure (1)..(114): unsure at all Xaa locations
  Clone ID: PAT_MRT3847_31001C.1.pep
VVATAASAVLASNAMAIEVLLGGDDGSLAFIPNNFSVASGEKIVFKNNTSFPHNVVFDEDXIPIGVHAGKISMSDEDLLNAPGETYSITLDAKGTYNFFYSPHQRASISKKSPY

SEQ ID NO: 209275 - protein, 55 aa, Glycine max
  Clone ID: PAT_MRT3847_31002C.1.pep
PIFPTYINLQLLYILLTLFLFNISLILFAYHILFQYSSKPYSIYKQYLQLLNNFL

SEQ ID NO: 209276 - protein, 38 aa, Glycine max
  Clone ID: PAT_MRT3847_31003C.1.pep
SSNTTLGFNYSTISTCDSTFICLNPSSQINLHYHSSYL

SEQ ID NO: 209277 - protein, 139 aa, Glycine max
  Clone ID: PAT_MRT3847_31004C.1.pep
MSSLSFLKFNYSFSWKPSASRKNVVKKNSFISRQTSNEGQSFLPKEEEMKWVFQKFDTNKDGHTRPIVFKNNAGFPHNVVFDEDEIPSGVDAGKISMSEEDLLNAAGETYSVTLDAKGTYSFYCSPHQGAGMVGKVTVN

SEQ ID NO: 209278 - protein, 81 aa, Glycine max
  Clone ID: PAT_MRT3847_31005C.1.pep
RRSRLGVPCVLMAISSYVVSCEIPSLCVVQQVRLLFRVISFLQRSDRAMVASNRGSVSASNKHTASRCGVVDTLIPSFRSR

SEQ ID NO: 209279 - protein, 62 aa, Glycine max
  Clone ID: PAT_MRT3847_31006C.1.pep
PSNPHNQARHHHNELECHHLPPKRRRAPNDHHSNSNSDDPKDHPNHHITSTINLSRIDLPYK

SEQ ID NO: 209280 - protein, 44 aa, Glycine max
  Clone ID: PAT_MRT3847_31007C.1.pep
VPKQLALPVPLLLYVRYKSLVTKLSEIYSQGSKIECQSAAVKFI

SEQ ID NO: 209281 - protein, 50 aa, Glycine max
  Clone ID: PAT_MRT3847_31008C.1.pep
IMLTMFNHEYFLDRINCVPNQSKLDQLEKMNVFIMLERIIAFSQVSKKSV

SEQ ID NO: 209282 - protein, 95 aa, Glycine max
  Clone ID: PAT_MRT3847_31009C.1.pep
HYKITINWKSLIQFTQVLYTKVSRIHRLTIFLWSDNSFEAFWCGCFTYYMNVYKYLFICTWHVHLCTHGELLGPSMLDEIKLRHEIIYLTQNDTL

SEQ ID NO: 209283 - protein, 64 aa, Glycine max
  Clone ID: PAT_MRT3847_3100C.1.pep
SKEKKFPKNPPREILKTFKQKTKRVPSQKIQQFPRWSKTTQYFFPPGRAKIYSFEWKGENPSGF

SEQ ID NO: 209284 - protein, 141 aa, Glycine max
  Clone ID: PAT_MRT3847_31010C.1.pep
PLLRPLVRPPSYASSSSVVGQMPNLVDPEMLACMTRAICDVFQTRSALKLIVAPPTHEQVDYAYARLDDLYDHLCRQLQQIVDLLMPHEIDELRWRSHDHEKDNAIKESTEQEKRVLKSLIQLVQMHDYYEKLLKDALKRL

SEQ ID NO: 209285 - protein, 51 aa, Glycine max
  Clone ID: PAT_MRT3847_31011C.1.pep
KLPFLTKNQDNVVLCYMANFNFRLHIKGVKSPKYKYINLGFPKPNKKKHTT

SEQ ID NO: 209286 - protein, 429 aa, Glycine max
  Clone ID: PAT_MRT3847_31012C.1.pep
MMINVKESTMVRPAEEVARRVVWNSNVDLVVPNFHTPSVYFYRSNGAPNFFDGKVMKEALTKVLVPFYPMAGRLLRDDDGRVEIDCDGQGVLFVEADTGAVIDDFGDFAPTLELRQLIPAVDYSQGIASYPLLVLQVTHFKCGGVSLGVGMQHHVADGASGLHFINTWSDVARGLDVSIPPFIDRTILRARDPPRPIFDHIEYKPPPAMKTQQATNASAAVSIFRLTRDQLNTLKAKSKEDGNTISYSSYEMLAGHVWRSVSKARALPDDQETKLYIATDGRSRLQPPTPPGYFGNVIFTTTPIAVAGDLMSKPTWYAASRIHNALLRMDNDYLRSALDYLELQPDLKALVRGAHTFKCPNLGITSWTRLPIHDADFGWGRPIFMGPGGIAYEGLSFIIPSSTNDGSLSVAIALQPDHMKLFKDFLYDI

SEQ ID NO: 209287 - protein, 206 aa, Glycine max
  Clone ID: PAT_MRT3847_31013C.1.pep
MIINVKESTVVRPAEEVARRVVWNSNVDLVVPNFHTPSVYFYRSNGTSNFFDGKVLKEALSKVLVPFYPMAGRLRRDEDGRVEIDCDGQGVLFVEADTGAVIDDFGDFAPTLELRQLIPAVDYSQGIETYPLLVLQVTHFKCGGVSLGVGMQHHVADGASGLHFINTWSDVARGLDVSIPPFIDRTILRARDPPEPCFDHIGYKPP

SEQ ID NO: 209288 - protein, 106 aa, Glycine max
  Clone ID: PAT_MRT3847_31014C.1.pep
NALLRMDNDYLRSALDYLELQLDLKALVRGAHTFKCPNLGITSWTRLPIHDADFGWGRPIFMGPGGIAYEGLSFIIPSSTNDGSLSVAIALQPDHMKVFKDFLYDI

SEQ ID NO: 209289 - protein, 52 aa, Glycine max
  Clone ID: PAT_MRT3847_31015C.1.pep
KSRLISLMDQGGKLRSTAHGPITRTYISSGLRKNMTHVLGTKSSSHDSELIL

SEQ ID NO: 209290 - protein, 364 aa, Glycine max
  unsure (1)..(364): unsure at all Xaa locations
  Clone ID: PAT_MRT3847_31016C.1.pep
LGGYNANGKSDGSSITDATLLEYVLNGLHWNKFGDEKLFDLVNNGRVLGNGLTATPNQIKKYTLVGLPQDASPLLVXFINARSGGQLGPSLHRRLNMLLNPVQIFELSASQGPEVGLEFFKSVRYFKVLVCGGDGTVAWVLDAIERHNFESPPPVAILPLGTGNDLSRVLNWGRGFSTLDGQGGLTMLLHDISNAAIXHSNCCEVKIVEESSEGKSNKVKTKSMMNYLGIGCDAKVAYKFHITREINPAKICSQFLNKLRYAKEGAWDIMDRTCADLPWQVWLEVDGRDIEIPSDSDGLIVLNIGSYMGGVDLWQNGYEHDDDVRRASMRDTLLEVVCVCGAWHLXKLQVGLSQAIRLAERRTV

SEQ ID NO: 209291 - protein, 79 aa, Glycine max
  Clone ID: PAT_MRT3847_31017C.1.pep
PLASGTSADFQVHMSKRSHHRPQTSVMVQDIQVHATESVSSTINSYKLIHENIQRHLNAIVSSSGEYQVSIVDYIADPT

SEQ ID NO: 209292 - protein, 66 aa, Glycine max
  Clone ID: PAT_MRT3847_31018C.1.pep
ELSDVQLMIIRTSAHGNTQTHNPRILNISGDDTMPSIHCIQNLIMPPVSSCHLVCLGLNAHLAGFV

SEQ ID NO: 209293 - protein, 77 aa, Glycine max
  unsure (1)..(77): unsure at all Xaa locations
  Clone ID: PAT_MRT3847_31019C.1.pep
NLWILVIPHSAAAFWNQRPKYFDMARRKQTTRKSTGGKAPTKQLAINAARKSAASTGGVNNAHRYRPXSVALREIMK

SEQ ID NO: 209294 - protein, 65 aa, Glycine max
  Clone ID: PAT_MRT3847_3101C.1.pep
GRGKTAHPFIQTKITFLGNWDGQTQGKNILKQIPKGPQGQPGQGQLGPNWHFPKGQGGGKTKKTG

SEQ ID NO: 209295 - protein, 77 aa, Glycine max
  Clone ID: PAT_MRT3847_31020C.1.pep
IKGCLMLGLKKKKKKKKKKKKKKKKKKKKKKKKKKKKKKKGSRKKKKKRKKLKKKKMKEKKIKKKKGVVRSLEKSWQ

SEQ ID NO: 209296 - protein, 52 aa, Glycine max
  Clone ID: PAT_MRT3847_31021C.1.pep
FPKLHMICEYTTARKTPHQSSSYFVFFTFYETRRLQLRFYSTFLHMLTLGQR

SEQ ID NO: 209297 - protein, 63 aa, Glycine max
  Clone ID: PAT_MRT3847_31022C.1.pep
MFKIQYPSRGAALALSWFINQPAIYNKQVFPLPIVEILPTSFVFFKGSIAISYSYLMLNNILT

SEQ ID NO: 209298 - protein, 128 aa, Glycine max
  Clone ID: PAT_MRT3847_31023C.1.pep
MCDVFSAGRNLVKLVVRNAWLSVDGLCLMPTLTYLTLEFVRLDDEDLSRINACFPNLTQLNLIGVGGLKEPKINLLHLTTCQWSVSNAPLSLIICAPCLVDFDLRCIKPRLVVLEAPSLSNFSLSLEN

SEQ ID NO: 209299 - protein, 80 aa, Glycine max
  Clone ID: PAT_MRT3847_31024C.1.pep
SNSDSSIRWTIGQLPIATLTTITPISHNICVHTQPNLCTITDAHSDYQTQHTFPRIGTMESKSRSSYRVDTNTGHLHPHR

SEQ ID NO: 209300 - protein, 39 aa, Glycine max
  Clone ID: PAT_MRT3847_31025C.1.pep
SFLDRRSDACINFEGKQYVKLALYKKTLISKNDSIAKIA

SEQ ID NO: 209301 - protein, 58 aa, Glycine max
  Clone ID: PAT_MRT3847_31026C.1.pep
SSLLDLKASISVSHNSCSVSQYYSHQHFSLTMTHVLDATTTLGAVPPTVRLHRPQYSV

SEQ ID NO: 209302 - protein, 431 aa, Glycine max
  Clone ID: PAT_MRT3847_31027C.1.pep
GDYYLDELVDRSLVQVASRRSDGGVKTCRIHDLLRDLCISESKSCKFLEVCTEVNIDTLSLSNPRRLSLQCKARPNICTKKFNQSYTRSLFFFSEIMHTRGIPKSIKNARVLYSKSKGAMNYSLHSTFKTMIHLRYLRIDTGVSHIPASIGNLRNLETLDVRYKETVSSEIWKLKQLRHLYLRGGAKLPEVARERKVNLQTLWLRAFDRQMVSMMNKDMYVNDIFPRLRKLVLHYPFHRPSHEQLPTVRLPSLHHLCNLHSLKIIDFLELPPDKNAFPSHLTKITWKQIHVGSDFSLMSTLGWLTNLQILKMGRQCSDVLFDLNVGAGEFPQLQVFQMRGMKLRSWRLDKSAMPHLQHLLIEGCEYLNDLPEEVWSLTTLRKVHVLWPSERLANRLQNVKLKNGCKLIISNAPPNGQSDQNALTHSVSVDA

SEQ ID NO: 209303 - protein, 88 aa, Glycine max
  unsure (1)..(88): unsure at all Xaa locations
  Clone ID: PAT_MRT3847_31028C.1.pep
IRHILREFTINGVKDRFRLSYHVRIKQFSIEYTTLSNLSLTKVHDIMSYHYAIYHSTITNQVISXITYMILSLCGDDQQYMHESTHLL

SEQ ID NO: 209304 - protein, 117 aa, Glycine max
  unsure (1)..(117): unsure at all Xaa locations
  Clone ID: PAT_MRT3847_31029C.1.pep
METGESNSTSSNQSCAVMKDSKWYTQFRNVSNPWMARYVYGLIFLVANLLAWAARDELSTLCALTEMKGLKGCKVGKDCLGADGVLRVSMGCFLFYMIMXLXSTAGTSKXEEXRDEW

SEQ ID NO: 209305 - protein, 105 aa, Glycine max
  unsure (1)..(105): unsure at all Xaa locations
  Clone ID: PAT_MRT3847_3102C.1.pep
TRPQEALDKAYLTEKDLTAVAVTIGPGLSLCLRGNAXKSRNFKNRLANCLMGVQKARKIAGGFNLPIIGIHHMEAHALVARLIEKDLQFPFMALLISGIIPSFGV

SEQ ID NO: 209306 - protein, 97 aa, Glycine max
  unsure (1)..(97): unsure at all Xaa locations
  Clone ID: PAT_MRT3847_31030C.1.pep
METGENNSTSSSNQSCAVMKDSKWYTQFRNVSNPWMARYVYGLIFLVANLLAWAARDELSSLSALTEMKGLKGCKVGXNCLGANGXVLRVSXGCFLF

SEQ ID NO: 209307 - protein, 67 aa, Glycine max
  Clone ID: PAT_MRT3847_31031C.1.pep
SGPPHFNPGTFAIIGPTMLVKWCGSNNNGHLLSMGIKSSSTQLTWPFCSIIQVNYCAVACCSYKLHA

SEQ ID NO: 209308 - protein, 118 aa, Glycine max
  Clone ID: PAT_MRT3847_31032C.1.pep
FEGKPLFGPMPGHPNWVLGVDLTPNGAPLATGSNKKFVRLWVFNIRAFGHPINILSAQVWGVAFSPPERINLQGGPLASVSNAKGKPRDDYSCFKNWGRVLAPLGKVIYFFGAKLIFN

SEQ ID NO: 209309 - protein, 54 aa, Glycine max
  Clone ID: PAT_MRT3847_31033C.1.pep
LPTRPGRLKPGEAVQATLSSLPDEVVDTIQVTSLPSEDSVSERRRKLEFLEMQD

SEQ ID NO: 209310 - protein, 74 aa, Glycine max
  Clone ID: PAT_MRT3847_31034C.1.pep
SLIRSLIARKPWPPSCFPWKFHGIYFIPTSCYGNTPICIATALFNKHQYNGYPKPRMIPVLDVTKSFIECPGFG

SEQ ID NO: 209311 - protein, 82 aa, Glycine max
  Clone ID: PAT_MRT3847_31035C.1.pep
MDARGEGSSTSYYNVLGVSSDSNVDEIRRAYRKLAMQWHPDKCTRSPSLLGEAKRKFQQIQEAYSGKALRFGRVAGHVNGNG

SEQ ID NO: 209312 - protein, 142 aa, Glycine max
  unsure (1)..(142): unsure at all Xaa locations
  Clone ID: PAT_MRT3847_31036C.1.pep
EKGVLVRGWAPPRGILGHAPGGGVGPPPGWNSVFEPVFXGVPMGGGPFFPGPKVNKGFLGGEKKVGLAVNPTKTGFVGSPPLGGPVLELLGSAQGGLLGSPHEILSPPLRGSPPPMVDPSPAFFFKKAPKPVPSPCWGNKRA

SEQ ID NO: 209313 - protein, 174 aa, Glycine max
  Clone ID: PAT_MRT3847_31037C.1.pep
MDARGEGSSTSYYNVLGVSSDSNVDEIRRAYRKLAMQWHPDKCTRSPSLLGEAKRKFQQIQEAYSVLSDSKKRTMYDAGLYDPQEEEDEGFSDFVEEMLSHMAQVRREGKHYGLEELQGMLMEMAKGFECPSMYCGVNSVIDESPCVKRTRFDTNMMENKGSHFQVPDLNLYCS

SEQ ID NO: 209314 - protein, 96 aa, Glycine max
  Clone ID: PAT_MRT3847_31038C.1.pep
LLKRMPLGVLLVKRVQAQFIMLVQMFSHLLLPRNLFNRTLLHLFRVAMVSYEALARGNHHLYYAVSIFPRRLQETPMIPNVLVGMRPALLPIKLRN

SEQ ID NO: 209315 - protein, 226 aa, Glycine max
  Clone ID: PAT_MRT3847_31039C.1.pep
MKPNFSFLSKLLILQYLSVLCISQEFDFFYFVQQWPGAYCDTKQSCCYPKTGKPAADFSIHGLWPNFKDGSWPSNCDPDSVFDKSQISDLISNMEKDWPSLSCPSSNGMRFWSHEWEKHGTCAESELDQREYFETTLKLKQKVNLLRILKNAGIEPDDEIYTLERVTEAIKKGTGFTPGIECNRDSARNSQLYQVYMCVDTSGSNLIECPVLPRSRCGEQIQFPKF

SEQ ID NO: 209316 - protein, 58 aa, Glycine max
  Clone ID: PAT_MRT3847_3103C.1.pep
YYFSNILSPYHFNIFNNFIYQYTFLFTSQSMNNLHPYKLCDQTFYAALNTPLEQYPHY

SEQ ID NO: 209317 - protein, 72 aa, Glycine max
  Clone ID: PAT_MRT3847_31040C.1.pep
LLKANPIKIGGHFWPPLSVKGTIQLNSRFTFILPQKGYLVLTLTTRFGINKKKKIFFTLKNPTPIPWGFFVF

SEQ ID NO: 209318 - protein, 63 aa, Glycine max
  Clone ID: PAT_MRT3847_31041C.1.pep
SAPSHLPNAPARKPPSAQSFQKRLRLLTSRLSPLERAQGCSMQHRPGGTQLGPPCRELYCHHP

SEQ ID NO: 209319 - protein, 174 aa, Glycine max
  Clone ID: PAT_MRT3847_31042C.1.pep
MFSFFYNPTQGGIYRTPPNPLKNWLISALLREKGPKIKLKTFSFLSLEKSYLPAYKLHPLKHEHVYEKRPMPTTGLFPQPKPAKPWKTPSLEDWLKQPGYKRLEKKGYFPLKTFFPGPNPTNFFYPPPPFLLFPPPPPPNKPPSWLTPRRGGTAFLQGPPFLSPPFPPPGPPLP

SEQ ID NO: 209320 - protein, 56 aa, Glycine max
  unsure (1)..(56): unsure at all Xaa locations
  Clone ID: PAT_MRT3847_31043C.1.pep
NXFSXSLVSKLIXQFHRVFEFGLVWFGFLVSFHFQIIXFDGGWEXRSXKXGMGNGG

SEQ ID NO: 209321 - protein, 52 aa, Glycine max
  Clone ID: PAT_MRT3847_31044C.1.pep
TFEQTFFPLLPLGRLNQPWADNVIYHEGGHETTEVFLSHALQCMMRQCTGFL

SEQ ID NO: 209322 - protein, 140 aa, Glycine max
  Clone ID: PAT_MRT3847_31045C.1.pep
DYLVDNARKKRNCRKLTSVGAIQRNIRKTNCPTAGTDKSNRCLIKDDDLLVSAIFRNKDFSPETIRGNSSAKSCKSRGQKKFKSQKGRCRLLPRNPSNAGKHNKDGNRFYLGARTILSWLIDNGVISLSDVIQYRNPKDN

SEQ ID NO: 209323 - protein, 113 aa, Glycine max
  Clone ID: PAT_MRT3847_31046C.1.pep
SMHLCNVTLINLYIIKLIPSSDTVHVALRLPCVVTTYKLHRIMTTFSNIQTFSSKTTLTNPRKLSNLHRTCNQLSSCQPVLKHTAVNIQNWKCPSFSMSSTSHHINQSLCSRP

SEQ ID NO: 209324 - protein, 66 aa, Glycine max
  Clone ID: PAT_MRT3847_31047C.1.pep
YVAKESIPQQRTKKESLTYEVCLVLFVLLFPYFVFSHNTLLMLLSISVFFLSQLPGLRTRNYLEPI

SEQ ID NO: 209325 - protein, 243 aa, Glycine max
  unsure (1)..(243): unsure at all Xaa locations
  Clone ID: PAT_MRT3847_31048C.1.pep
PKGGRGHLKRGGKKTPGRPQPKSTPNPGPPERKAKTPPPPKPKTRGNTRKTTPKNPPTPRRTPGRTPKTPPRPRKGPTLPQRETNKTPGQPGKKQAPREKRNPPTQPPQKQTRGQTRKTPGPPRRSPPPQNGVAPQTPPSTQKNPSAPPPKKKPPPPGNPXRTAPPGETPPPPKEHAPPRNAPNPPRPQKQNGHTPPPPQNSPPPRARKNPPANKKTQKPGRGQNTPQGPRPSHKNDNPPPPP

SEQ ID NO: 209326 - protein, 50 aa, Glycine max
  Clone ID: PAT_MRT3847_31049C.1.pep
TAARRRQKGTTPFNQIEGILASLGSELKDDLLCSGYQESCDDARSIFFLG

SEQ ID NO: 209327 - protein, 313 aa, Glycine max
  Clone ID: PAT_MRT3847_3104C.1.pep
MLAQMDMEELVSCNNNDATNIAKGKRTKRRLRPLSPCAVVAATTITTTTTAITAITTVMTSSCSSASAGGGGSSSSTTFEEEEEDMANCLILLAQGRVGRDPPHHHKDLCGDVKTEKGSTKVDHLYVYECKTCSRTFPSFQALGGHRASHKKPKMEEKKLLSPPLLLPPLPASSSSLFNFEEAKQSHMKNIISPSVSLQLGCGINKVGLNFHGNKSKIHECSICGSEFTSGQALGGHMRRHRASNNNNNIVQTTTTTTTTSNGAVDVKPRNVLELDLNLPAPEDDLRDSKFQFPANPNSMMLSAAPALVGCHY

SEQ ID NO: 209328 - protein, 130 aa, Glycine max
  Clone ID: PAT_MRT3847_31050C.1.pep
PRVRETQASRYSLKGHTKSIRSVCWDPSGEFLASVSEDSVRVWTLGSGSEGECVHELSCNGNKFHSCVFHPTYSSLLVVGCYQSLELWNMTENKTMTLSAHEGLIAALAVSTVNGLVASASHDKFVKLWK

SEQ ID NO: 209329 - protein, 90 aa, Glycine max
  Clone ID: PAT_MRT3847_31051C.1.pep
NGSQVNSGGETPLQRPRLTKLRVSVPPRWTPEEFMADVKVPSAASASESAGKDNEVSKPEPSKHAPLVDCIRTRWARAVCSWSGDPPSIV

SEQ ID NO: 209330 - protein, 312 aa, Glycine max
  unsure (1)..(312): unsure at all Xaa locations
  Clone ID: PAT_MRT3847_31052C.1.pep
RVAFPPLCLSRMGALLFLISALLSRGLDLVQSDRDDPSLPLVTAPFGHASQEIVNRLLCGEAGPVGVEGSPVCGGGMSVSGISPXFCKDGQFLKSPKWPIWVVGSESHYTVLFALDPSVQNENELEGRETQIRKAFDAQDQSGGGGFISVEGFHQVLRETNIKFPPEKLEHLCSAGFIVWSEFWQVILDLDKSLGGLKDSSGLMGKKVFDLYHFNGIAKSDLNGSQVNSGGETPLQRPRLTKLRVSVPPRWTPEEFMADVKVSSAASASESTGKDDEVSKPEPSQHAPLVDCIRTRWARAVCTWSGDPPSIV

SEQ ID NO: 209331 - protein, 151 aa, Glycine max
  unsure (1)..(151): unsure at all Xaa locations
  Clone ID: PAT_MRT3847_31053C.1.pep
RFYAQGPPAIITSQTAFAYQRQLGPAMRPCAASVPKLFVPMGQPGQHGQXPSVMRSVAHXRSNRPIPMMPTLILPRSQRHSYGPGQPMPHVLMPGVAGRILSVPYDVGGMPLLKAXISQQIPDEALSTAMTNASPEQNRTMLTEKLYELVE

SEQ ID NO: 209332 - protein, 120 aa, Glycine max
  Clone ID: PAT_MRT3847_31054C.1.pep
QSHSHHYATRIWWLATTLFSVDTHTTTLRNRAAPPAAAPIVITFRLSVYVFLDQQTTRLSVTTVFDTPTRSFPFYTHFFRFLFYSVIRSRQLPFWPNSTSESCIPPPPPPPPPKKEDVIQ

SEQ ID NO: 209333 - protein, 189 aa, Glycine max
  unsure (1)..(189): unsure at all Xaa locations
  Clone ID: PAT_MRT3847_31055C.1.pep
MATTTTRSPNRSSEDAAADPTPFLATSSDESTSGRLLLRRPSLREAARFLRQASGRSRGSKLTYACMRRHSSSIVSPKFNSLAVVLQRRDWENPGVTQLNRLAAHPPFASWRNSEEARTDRPSQQLRSLNGEWDAPCSGALSAAGXVXTRSVTATLASALAPAPFAFFPXFLATFAXXPXXALNRXXPX

SEQ ID NO: 209334 - protein, 234 aa, Glycine max
  Clone ID: PAT_MRT3847_31056C.1.pep
MRFTLLSRAPVPFLSAAFLKFKPVAPSTATFTRVSCMAASPSSAAVRDGAPSASSAIDFLSICHRLKATKRTGWVRKDVKNPESIADHMYRMSLMALIASDVPGVDRNKCIKMAIVHDIAEAIVGDITPLDGVSKAEKNQREQEALDHMCKVLGGGSTAKEIAELWMEYEANSSPEAKFVKDLDKVEMILQALEYEDEQGKDLDEFFQSTAGKFQTETGKAWASEIVSRRKNTK

SEQ ID NO: 209335 - protein, 138 aa, Glycine max
  Clone ID: PAT_MRT3847_31057C.1.pep
MRFTLLSRAPAPFLSTAFLKFKFVAPSAATFTRVSRMAASPSSAALRDGAPFASSAIDFLSICHRLKTTKRTGWVRKDVKNPESISDHMYRMSLMALVASDVPGVDRNKCIKMAIVHGIAEAIVGDITPLDGVSKAEK

SEQ ID NO: 209336 - protein, 106 aa, Glycine max
  unsure (1)..(106): unsure at all Xaa locations
  Clone ID: PAT_MRT3847_31058C.1.pep
SCXGASFGXVRXVVSAXLLFRGXXLWLAAXVXXXSXXXLFFVPAPPPGWGVFCLXSFXRCAQLPLEDPPSSXVXCLXXGGFFLAVLAVSGXRPLXPLFXGWFRAGV

SEQ ID NO: 209337 - protein, 65 aa, Glycine max
  Clone ID: PAT_MRT3847_31059C.1.pep
ALNSIIFTTCFEQTVAPLYKHDGLQRESQQPRHTKHLTAARLHSKRTLWACQRSTVSISQSHDIS

SEQ ID NO: 209338 - protein, 61 aa, Glycine max
  unsure (1)..(61): unsure at all Xaa locations
  Clone ID: PAT_MRT3847_3105C.1.pep
LEPILLKLYPFSSILTTHWEVILRSPKEHQRDXLLXPCYSRSYQFFSQGSSSNWLLWNTSL

SEQ ID NO: 209339 - protein, 104 aa, Glycine max
  Clone ID: PAT_MRT3847_31060C.1.pep
VLRMNQMMRRITADNAKTNIHHMIWLAHAHKHTVEVHEISRTLVLGQRLKTSAVLMKLMCTRKRLRPNGVANDKMFGLIWEPPASAWRVMEGGKPTIITNVGGQ

SEQ ID NO: 209340 - protein, 81 aa, Glycine max
  Clone ID: PAT_MRT3847_31061C.1.pep
QGAPLLILANKQDIPEAVSADELPQYLDLKKLDERVFMFEAVSAYDGMGIRESAEWLVEVMEKSKRTEMLRARAGAMGAGP

SEQ ID NO: 209341 - protein, 34 aa, Glycine max
  Clone ID: PAT_MRT3847_31062C.1.pep
GILKTVRYIITISHSFSAGFILEPLFILVYEVLV

SEQ ID NO: 209342 - protein, 48 aa, Glycine max
  Clone ID: PAT_MRT3847_31063C.1.pep
IQAGSVPFSISNRVIDIRRIYNYFDCYILRVTPICVIKYHSSVVISQP

SEQ ID NO: 209343 - protein, 101 aa, Glycine max
  Clone ID: PAT_MRT3847_31064C.1.pep
FILSSLLLLLLRETELSEAESLTIDPIPPSSDLSAATVYRTSLPSLAPVNLFNHSSFPSSISGSVTTELILSIAVVPMDCDFHSLASLSQFSGNSSLIYEF

SEQ ID NO: 209344 - protein, 186 aa, Glycine max
  unsure (1)..(186): unsure at all Xaa locations
  Clone ID: PAT_MRT3847_31065C.1.pep
MGLWEAFLNWLRSLXFFKQEMELSLIGLQNAGKTSLVNVVATGXGYSEDMIPTVGFNMRKVTKGNVTIKLWDLGGQPRFRSMWERYCRAVSAIVYVVDAADPDNLSISRSELHDLLSKPSLGGIPLLVLGNKIDKAGALSKQALTDQMDLKSITDREVCCFMISCKNSTNIDSVIDWLVKHSKSKS

SEQ ID NO: 209345 - protein, 204 aa, Glycine max
  Clone ID: PAT_MRT3847_31066C.1.pep
MFSLFYGLWKYLFSKMELHVLILGIDKAGKTTLLEKMKSVYSNIEGIPPDRIIPTVGLNIGRIEVANSKLVFWDLGGQPGLRSIWEKYYEEAHAVIFVVDASCPSRFEDAKSALEKVLRHEDLQGAPLLILANKQDIPEAVSADELARYLDLKKLDERVSMFEAVSAYDGMGIRESAEWLVEVMERSKRTEMLRARAGAMGPGP

SEQ ID NO: 209346 - protein, 129 aa, Glycine max
  Clone ID: PAT_MRT3847_31067C.1.pep
GSSCSNTSQSLFQLSLFSTVACTTVGWTLVAALLVTWVGALCPASLPAMSTEGTLVVTPEKCTSAGIDPFGELASFCPSDGVVNTLPAGSNSLRGPHLLLGILSGNQTRVPPVILEESALLPLEHRSTL

SEQ ID NO: 209347 - protein, 57 aa, Glycine max
  Clone ID: PAT_MRT3847_31068C.1.pep
FNVKIRYLDEGLFSNMYTTCSCSTVSTYLITDEILLHRKFIDLDTHCRLHRKLWNLE

SEQ ID NO: 209348 - protein, 139 aa, Glycine max
  unsure (1)..(139): unsure at all Xaa locations
  Clone ID: PAT_MRT3847_31069C.1.pep
VYMERIPLATSEGFSNVLPRKNGEKGKRRFVSGDGEEITLIPGTRVEXALNTLIVELEKSDSTLIGIARSKDEKHSRRKIYDKPKTRCFTILPMEMNLEVRQKSLNFVRFIMKKRDKLSCQVGINPYSMEWTGLANRLL

SEQ ID NO: 209349 - protein, 225 aa, Glycine max
  Clone ID: PAT_MRT3847_3106C.1.pep
MVRQCSFVELQILSHLLIRHQFFNAYIQPCQKSTTQQPRRKQRKHSLVLLLPFLSLWCLIDENLCHSLECNAGALTNFEVLDFLRAKGASKDPTRVIAKVAQSEYKVYDYLVDTAASVQTRESINEFLTSVKQHDLAKAEVLNILNIGPAAEVELYPIIEDCDERFGDEGVLEIVELVKKTLQLPLNMKQEEITKVDEETATLKNEKGNQISQDQSEGGEQMNTS

SEQ ID NO: 209350 - protein, 40 aa, Glycine max
  Clone ID: PAT_MRT3847_31070C.1.pep
PTRPSGCQKASERAGLRNDLMVWKAFPRGWCFRLESSSGS

SEQ ID NO: 209351 - protein, 108 aa, Glycine max
  Clone ID: PAT_MRT3847_31071C.1.pep
RGLAGYLSGKKEETKEMATETAEATANKAGEMKEATKNKTAETAEAANNKAGQIKDRAAETADAASAMTGETADVVQTHMHDSIMIAKDKEDALATKNLVPGEAAYNE

SEQ ID NO: 209352 - protein, 73 aa, Glycine max
  Clone ID: PAT_MRT3847_31072C.1.pep
KNPTDHIGDSIIFNHKQHHNIYIIKNQKAFDLFNFTQATFFTNLNTAYYMLHSSLPGLYYFTFNDGTLKTCKA

SEQ ID NO: 209353 - protein, 38 aa, Glycine max
  Clone ID: PAT_MRT3847_31073C.1.pep
MAPFMKQKEKDLKLPNDEKFSCTAQNCTSYLTFISKTA

SEQ ID NO: 209354 - protein, 58 aa, Glycine max
  Clone ID: PAT_MRT3847_31074C.1.pep
ASCIRSKKYHKDVIASFGYFAMKTFTTIQKVIKRLLRGLRTLVVSGYNIKARKKKGHL

SEQ ID NO: 209355 - protein, 59 aa, Glycine max
  Clone ID: PAT_MRT3847_31075C.1.pep
LKPHKICTILINPFGCLYLTMGQSSYFLKTLKPGFMIIVMQRTPRRSNPGWLNYKANNN

SEQ ID NO: 209356 - protein, 152 aa, Glycine max
  Clone ID: PAT_MRT3847_31076C.1.pep
AVSKSKINLFQTRIRFLGHNIYQGTIIPIERSIEFASKFPNQILDKTQLQRFLGCLNYVGEFVPYLNNIVKPLHDRLKKNPPPWSDLHTQTVKEIKVKVQSIKCLYLPIPQAFKIVETDASDIGYGGILKQRVHGQDHVIAYTSKHWNPGVL

SEQ ID NO: 209357 - protein, 34 aa, Glycine max
  Clone ID: PAT_MRT3847_31077C.1.pep
IFIPLFYLGLIKNLLLYRWVLWLNLQSFLHINVY

SEQ ID NO: 209358 - protein, 83 aa, Glycine max
  unsure (1)..(83): unsure at all Xaa locations
  Clone ID: PAT_MRT3847_31078C.1.pep
SGSGICAKRVVVDALHHMFGSLASIVAKELLNGHNVSVVPFQXNFISSFLVTQNIKYLXFLRLLMNTTPSHGPIHFHAPSDIF

SEQ ID NO: 209359 - protein, 77 aa, Glycine max
  Clone ID: PAT_MRT3847_31079C.1.pep
TLGIEHLYLLGYISWIAPELWGERLTAPSFFNYKAGSLIFQKKFWGEGKLFWALNVIFPSKEPPRESAKAREKFFLI

SEQ ID NO: 209360 - protein, 131 aa, Glycine max
  Clone ID: PAT_MRT3847_3107C.1.pep
NNSVIALSTLREYGRKELIDVLDSVRGKKGLVLDPKFSGPLGLIAEVSLLKEHGIENIYHLTPGKLNTQCKNLIYLVRPKVHLMKMIAEHIHGHIQEGQKKEYSVFFVPRRTMICERVLEEEGVYPEISFG

SEQ ID NO: 209361 - protein, 88 aa, Glycine max
  unsure (1)..(88): unsure at all Xaa locations
  Clone ID: PAT_MRT3847_31080C.1.pep
LACXALXCAXALVXATNXLXRCXXLCAXLMGRCXTVGAGRFRCPXVLSSXXXLGWXLLVSVRXRXTLXXRVVSTXXRVSXXPXSCVVV

SEQ ID NO: 209362 - protein, 90 aa, Glycine max
  Clone ID: PAT_MRT3847_31081C.1.pep
GAGNSPWEKHFLQVAFNPKKQKQVQQGPVFNFKKRVFSKPPFFKKEKKGEALSSKRPGLFGNHKIFFPLKKKPPLKLGGNPHGNLYAPQF

SEQ ID NO: 209363 - protein, 52 aa, Glycine max
  Clone ID: PAT_MRT3847_31082C.1.pep
NHLLQVAWPFLKKHIPSFQKIFPRPPGKLVVFPKLEWFKQGSSLFVLLNPPV

SEQ ID NO: 209364 - protein, 48 aa, Glycine max
  Clone ID: PAT_MRT3847_31083C.1.pep
LELPPNSVARLPSLYDVGLLGKISTEPLVSHGGTYERDIQMSEHCYIT

SEQ ID NO: 209365 - protein, 52 aa, Glycine max
  Clone ID: PAT_MRT3847_31084C.1.pep
TNTERAITITYKRVCLSFVQSPFPHRSDLSQSHIPQFNFSRNSLIVISESGR

SEQ ID NO: 209366 - protein, 40 aa, Glycine max
  Clone ID: PAT_MRT3847_31085C.1.pep
TMVAAIQEQPWSHIHPLTGRCIFLLKRATSLLIPFDSNQI

SEQ ID NO: 209367 - protein, 71 aa, Glycine max
  Clone ID: PAT_MRT3847_31086C.1.pep
RNPPTITKPNTAVTNFFLEFTSALPLAMLAIIQSSLTHAAVRNLSDLEVRTAKQPLQRRFKENPRVSERVG

SEQ ID NO: 209368 - protein, 379 aa, Glycine max
  Clone ID: PAT_MRT3847_31087C.1.pep
LHLDLKQKISLYQFLSENSEEAISNIITPGEIHSDGCNAPDAQDQIVEPVAEEDQPLNVDIFYDPTNLPLDDKLFSPVHAHFPTDFYYQANNQSELQYGTNENISEFFDSVVNWDAFSHDTSSLDLSSSFLINNTDNGSGSDSDVEMTNMPHLQALHNYPKEAVEQKSNVGLFQNNFQMALSNDSTMGQVHNMVNYCEQPRNFDAFVSADTGIRIRTRPGRNEQPNMDTMVQSQGIAPRRIRLGVVRRPLGSQDGSCACAPEDHNSKTIITAEKKASESENHAADGSSTVSDMSSTVTDDVDEPEEASPESTDLRNISEKHVATAESVAGSKVLLVNRRVHYTSKVSSNRATWSNVLAVSAAVLVSAILLVNIWAYVRS

SEQ ID NO: 209369 - protein, 249 aa, Glycine max
  unsure (1)..(249): unsure at all Xaa locations
  Clone ID: PAT_MRT3847_31088C.1.pep
MSKGPAVGIDLGTTYSCVGVFQHGKVEIIANDQGNRTTPSYVAFTDTERLIGDAAKNQVAMNPTNTVFDAKRLIGRRFDDAVVQSDMKHWPFMVVNDAGRPKVQVEYKGETKSFYPEEVSSMVLTKMKEIAEAYLGKTVTNAVVTVPAYFNDSQRQATKDAGTIAGLNVLRIINEPTAAAIAYGLDKKVGAERNVLIFDLXGGTFDVSILTIEDGIXFEVKSTAGDTHLXGEDFDNRMVNHFIAEFKRK

SEQ ID NO: 209370 - protein, 131 aa, Glycine max
  unsure (1)..(131): unsure at all Xaa locations
  Clone ID: PAT_MRT3847_31089C.1.pep
FGFIRVVTFPNTIVFIEPDMNLRFQLLSTTTNGDFVQGKDFAMVKGNVAXAAVGLTSRYTPTPLLESGLQKDRGLIVEHFVRKSYAAHYVXQPQEKDLFEGNTSFGIETGSRLENVLLYKSXFASGKTFTY

SEQ ID NO: 209371 - protein, 46 aa, Glycine max
  Clone ID: PAT_MRT3847_3108C.1.pep
IRILKNLNCLIKTKLLERWNGHLKNFDLENSMRTLGHMDLLCLLHG

SEQ ID NO: 209372 - protein, 134 aa, Glycine max
  unsure (1)..(134): unsure at all Xaa locations
  Clone ID: PAT_MRT3847_31090C.1.pep
CSGAFFFFIGILIFWLTVYLLADSRWDCSFXXRYINDFLFKMKAYKHVHRIRYKYCLTPKRIQREISEGADLIDMLPQQYTFQEIIAKLRPIPSTFSPGKKPAYLLEQFYRDRCLVPGNCLLYSGYALGRAPAA

SEQ ID NO: 209373 - protein, 42 aa, Glycine max
  Clone ID: PAT_MRT3847_31091C.1.pep
FFLLWLLLREETPEGCQTMCLQHNQSLAHLVFPQIIIINAPA

SEQ ID NO: 209374 - protein, 69 aa, Glycine max
  unsure (1)..(69): unsure at all Xaa locations
  Clone ID: PAT_MRT3847_31092C.1.pep
MGFCLPGFQRRSDVPKGCLVVXSVGQNQKKQFVIPXSYLNQPSMRHMLSEVEQEFGFDNQWMASRMPCR

SEQ ID NO: 209375 - protein, 132 aa, Glycine max
  unsure (1)..(132): unsure at all Xaa locations
  Clone ID: PAT_MRT3847_31093C.1.pep
MGLIGNRTRSETQLAQRNSKSNDTENHVQEQNTLELYDRAKKQDEEILSLREHIAIACMKELHLLNDKCKLDRQLSELTMAXADEANMKPSNAPYHDXWPQRKGLSQKKNVXLAHDLKAEDDERYICMVSML

SEQ ID NO: 209376 - protein, 207 aa, Glycine max
  Clone ID: PAT_MRT3847_31094C.1.pep
MELAKTPINVLKNICAKNNWTVDYNMISEEGRVHEPTFTFRVFIEETQLSAIAAGFSKKKAKQAAAFQALKILAEKDEEAAQELAGLEEAVPCEKEADTAVDKSNPVGKLQEICMKKKWAPPLYLTDEEDGPPHAKIFTITCKLENFDLDSQGRDKSKKGGKKIAAQEMLRLLELKGLYDAQDDSVKALKEKVESLPTIENLHPVEE

SEQ ID NO: 209377 - protein, 59 aa, Glycine max
  Clone ID: PAT_MRT3847_31095C.1.pep
KRYHFMSPLIYIFRPLYKKVLVNSVFIKFVFHACFRWGLHKISSVTFVVPTEVFDVFKK

SEQ ID NO: 209378 - protein, 57 aa, Glycine max
  unsure (1)..(57): unsure at all Xaa locations
  Clone ID: PAT_MRT3847_31096C.1.pep
LHHGXQPHQTHPCCKTLQCSDPXQPPHHTQPNELSKSXMTSKKAYWXQIXXQLGARK

SEQ ID NO: 209379 - protein, 125 aa, Glycine max
  unsure (1)..(125): unsure at all Xaa locations
  Clone ID: PAT_MRT3847_31097C.1.pep
SDRWEGWRGRYGEEAVSDHQYGEVSDDISGWPMRERDRGXERDWSGXSERRYIDYRDYGSERAAPDEEHMGHDHECYERGPCDDIESGLDLPREQDRERSLHRDRDPQKYHRDRDLHTKHMDIYG

SEQ ID NO: 209380 - protein, 133 aa, Glycine max
  unsure (1)..(133): unsure at all Xaa locations
  Clone ID: PAT_MRT3847_31098C.1.pep
SXFVRTLPLGXXYIGNXXIXCQREGQLYFNVDAPXTXKXXKDYQIVXRIXXCIVTXXSEEKXIEEXTXFSFLGLGLSSWWXFSKLLXRLIGKGQRSKGIXVXXEXXGCFHTXNRRDTRIDKHMSPEGTSQNFC

SEQ ID NO: 209381 - protein, 310 aa, Glycine max
  Clone ID: PAT_MRT3847_31099C.1.pep
YKAARGAKRDAGHSPKEFKVEVEAIGRVRHKNLVRLLGYCAEGAHRMLVYEYVDNGNLEQWLHGDVGPCSPLTWEIRMNIILGTAKGLTYLHEGLEPKVVHRDIKSSNILLSKKWNAKVSDFGLAKLLGSDSSYITTRVMGTFGYVAPEYASTGMLNERSDVYSFGILIMELITGRNPVDYSRPPEEVNLVDWLKKMVSNRNPEGVLDPKLPEKPTSRALKRALLVALRCTDPNAQKRPKMGHVIHMLEAEDSPYKEDRRAKRDAGHSPNDRVGDGLKEEVTVSVSVDDGKLENGMCANETRSNPQIEKQ

SEQ ID NO: 209382 - protein, 96 aa, Glycine max
  Clone ID: PAT_MRT3847_3109C.1.pep
GVEFKWRRHVFDRELEMTDCFLTEVACSSIQIHRKDELIWKSEPTGQYSVRSAYNMLNGVDVDDDNGWVFDELWKIRVPTKITTFAWRLLYERLQT

SEQ ID NO: 209383 - protein, 97 aa, Glycine max
  Clone ID: PAT_MRT3847_310C.1.pep
STGAQTETHPWSQELASRCHHPALSKMIWMPFIGLLVSSCIDSMLNAEHRAILERDAASIINLPIHSNIYESNAIVTEEGSLHEYQPALDLIDILQI

SEQ ID NO: 209384 - protein, 63 aa, Glycine max
  Clone ID: PAT_MRT3847_31100C.1.pep
LFSTCRITCWNMTDNRSQEAETWTNRQTKTVFDFMRLRQDESYNCDNCRGYTYHRVLSSLTTP

SEQ ID NO: 209385 - protein, 56 aa, Glycine max
  Clone ID: PAT_MRT3847_31101C.1.pep
TPFKVLRHNCPSSVNQNSNYWQGLYHTKTNVPTINLYITPKTAHPNLNAQTRVDLQ

SEQ ID NO: 209386 - protein, 73 aa, Glycine max
  Clone ID: PAT_MRT3847_31102C.1.pep
NVSYKEEFIPDDEGSYSVLLQNQSVDGSSTRNSFYISEPGKIVITVENGTYKKKKMFYRFTARTTVPMFFLLQ

SEQ ID NO: 209387 - protein, 55 aa, Glycine max
  unsure (1)..(55): unsure at all Xaa locations
  Clone ID: PAT_MRT3847_31103C.1.pep
EIDPVAVPYAVSXXLIEHVRIRHDWXXXIXALXGEXEXFXVDXKXYXMXCEDXGG

SEQ ID NO: 209388 - protein, 75 aa, Glycine max
  Clone ID: PAT_MRT3847_31104C.1.pep
MQLACITRYKYGHNITKPSCIIAQKRNTGPIPTLPKLTTVYYRAIFNNFCLYLPPKLKIKTEPPSNPKEMIKREK

SEQ ID NO: 209389 - protein, 150 aa, Glycine max
  unsure (1)..(150): unsure at all Xaa locations
  Clone ID: PAT_MRT3847_31105C.1.pep
MAQDTPRDLATGAGAPDQYALAPMIATGAXLGPDQTRMLRMLHIPPAPDPLNGSKMQXEIAPLTPLKRVVAATDXLDASTGLNLRRMDAGARILISMARQEFMTHMLSIYKPQAFDLITRDVANLQDIDAPSPAVRPAWLLTKIAPIYSR

SEQ ID NO: 209390 - protein, 121 aa, Glycine max
  Clone ID: PAT_MRT3847_31106C.1.pep
MIPKISPMNEDGKNRGIGIATENPYYGTFQGVANHYPPQHQQPPVPYANYYQRQGYHVVPVYAVAEGRPVRERRLPCCGLSLGWFLFIMGWFLGGVPWYVGTFILMFVHMDCREKPGLIAC

SEQ ID NO: 209391 - protein, 317 aa, Glycine max
  Clone ID: PAT_MRT3847_31107C.1.pep
MEKIEHKTVRTNGINMHVASIGSGPVVLFLHGFPELWYTWRHQLLSLSAVGYRAIAPDLRGYGDTDAPPDASSYSALHIVADLVGLLDALGIERVFLVGHDWGASIAWHFCLLRPDRVKALVNMSVVFRPRNPNRKPIQSLRAIMGDDYYICRFQKPGEVEEEFARAGAARIIKTFIASRDPRPPCVPKEIGFGGSPDLRIDLPSWLTEEDVNYYASKFEQKGFTGGLNYYRAMDLTWELTAAWTGVQIKVPVKFIVGDLDITYNTPGVKEYIHNGGFKRDVPFLQELVVMEGVAHFINQERPQEISAHIYDFIKKF

SEQ ID NO: 209392 - protein, 46 aa, Glycine max
  Clone ID: PAT_MRT3847_31108C.1.pep
KTIFRGLLDVVIKARIHRNSRAIRKNLTEEKSNVSHITFLLCKKLK

SEQ ID NO: 209393 - protein, 71 aa, Glycine max
  unsure (1)..(71): unsure at all Xaa locations
  Clone ID: PAT_MRT3847_31109C.1.pep
HLXFLKKFKRFNPLESSLGVLAFFFVRFSLHGXLLLLGLQGLPLQRHXIIDWXXXXXXXXXXXXXLLRFSF

SEQ ID NO: 209394 - protein, 243 aa, Glycine max
  Clone ID: PAT_MRT3847_3110C.1.pep
MMMMGLARSNMNMKQRLLRLCYYCLSLIPQLLRLLQRLLFKCNLFPWNRKGITLPQTFSLPSPIPQWPQGQGFASVIVNLGGIEVCKVTGFEFVWNSNIGKPVAFYKPVGIPDGFHILGHYCQSSDKPLRGFVLVVREVETASSETSNRDKLTALKNPLDYMLVWCSNAGSKELPIGSAYFWVPQLPEGYSALGYLVTNMPDKPNLDEMICVRADLTDKCEPYRLMLDAASVIPEFPFQVWSL

SEQ ID NO: 209395 - protein, 34 aa, Glycine max
  Clone ID: PAT_MRT3847_31110C.1.pep
GVSISYKNTYNKIQQSSTFYILFNLTYNSNSNYS

SEQ ID NO: 209396 - protein, 119 aa, Glycine max
  Clone ID: PAT_MRT3847_31111C.1.pep
LAAAVRAQRSLRRNNCREKDLPNSLENSPETPPVIQLNQIFGSFVKLNCYPTAIPISKPCYTSILINGLEREIAVEWCFNDKLLDLVFILACFRVLCFAGWRYVILSMILNTITYTYSH

SEQ ID NO: 209397 - protein, 153 aa, Glycine max
  unsure (1)..(153): unsure at all Xaa locations
  Clone ID: PAT_MRT3847_31112C.1.pep
SLFFFFFFFVPNCPFNLVSLSQQTKSLNCPVTFDVDSFVIQKCGTGXLIGVGHESSGLYYLVPSPFVSCFASPSPKLIHDRLGHPHLSKLKKMVPNLSKLQVLECQLYQLGXHVRFFFPKRIDTRCNSTLSTIHSDIWRPSRVTSFGLRYFFT

SEQ ID NO: 209398 - protein, 53 aa, Glycine max
  Clone ID: PAT_MRT3847_31113C.1.pep
GFKEKNFFFFSFLEAFKFENCQGLKVLILGGPTLLTYLPGGGGLKIQAYRSSF

SEQ ID NO: 209399 - protein, 66 aa, Glycine max
  Clone ID: PAT_MRT3847_31114C.1.pep
GGPSKKKMGFFTPITQSLLGKKNPRLKTCSLGKKSLKQGPKTGSSGSKTSLVPFPGGCQLFTLCLK

SEQ ID NO: 209400 - protein, 48 aa, Glycine max
  Clone ID: PAT_MRT3847_31115C.1.pep
HKHYKQHLRKSYRNKSAVVLINIYSGDFVTRVDVCCITNHKSLIYYLV

SEQ ID NO: 209401 - protein, 55 aa, Glycine max
  Clone ID: PAT_MRT3847_31116C.1.pep
HQYSVMHLMFIELIFLMSEMAMFGIYIMRFLIGLINIEEFTRQKKKNKYKSGGKI

SEQ ID NO: 209402 - protein, 72 aa, Glycine max
  Clone ID: PAT_MRT3847_31117C.1.pep
FNFSFFTSSSLKRRDGPRPPPSPPQPAPPAPGALRAPAAVIPGTPYHHNHRISPLVGYTMGAADREMIVVLG

SEQ ID NO: 209403 - protein, 156 aa, Glycine max
  unsure (1)..(156): unsure at all Xaa locations
  Clone ID: PAT_MRT3847_31118C.1.pep
ANLKISCSAVTAVHRANASMIAPFTGLKSMAGCPLAKTANHITSIASNGGRXHCMHVWPPLVKMKFETISYLPDHDDAQLAKEIEYLLTIGWIPYFEFELEHGIAYREHDMSPRYYQRRYWYTLTCQFLTALIATTVSYELXQARTEYSIGYIRII

SEQ ID NO: 209404 - protein, 86 aa, Glycine max
  unsure (1)..(86): unsure at all Xaa locations
  Clone ID: PAT_MRT3847_31119C.1.pep
RSTVETLPIQQLADTAADGSAASTXGGVLKPHRYRPATVALHHITKRELIIDLLFRKLPFHRLVRESAQHFQSEXHFHSNAVLALQ

SEQ ID NO: 209405 - protein, 47 aa, Glycine max
  Clone ID: PAT_MRT3847_3111C.1.pep
SLFIVLNEYWLAAPRLIIEIQFYNSEAFTVYQCISNCKQKGAKISYY

SEQ ID NO: 209406 - protein, 130 aa, Glycine max
  Clone ID: PAT_MRT3847_31120C.1.pep
MLIVWEAVVLDDDHRQVPLKRSLIHILNKDEHALDMAAPVHERLGDMDGPTDDNSSLKKRTNVLLLGDHTGDLGMSDGLNYETRISMGFLNHNVENSLSCYQEAFDVVFVNDAPMWGVIKLVSHMCLSGR

SEQ ID NO: 209407 - protein, 81 aa, Glycine max
  Clone ID: PAT_MRT3847_31121C.1.pep
ESEHDVPVRIGGYQVSRPGADIAGRATIASHRSATMVAADITRAMHVGSECPLRSSYSQRLINYYSNVSLGVCSPPWPYGW

SEQ ID NO: 209408 - protein, 310 aa, Glycine max
  Clone ID: PAT_MRT3847_31122C.1.pep
TRPAPVIPPNRLQIGQELTRGLGAGGNPEIGMNAAKESKESIQEAVYGADMVFVTNSFVQAGMGGGTGTGGAPVIAGITKSMGILTVGIVTTPFSFEGRRRAVQAQEGIAALRDNVDTLIVIPNDKLLTAVSQSTPVTEAFNLADDILRQGVRGISDIITIPGLVNVDFADVRAIMANAGSSLMGIGTATGKTRARDAALNAIQSPLLDIGIERATGIVWNITGGSDLTLFEVNAAAEVIYDLVDPTANLIFGAVIDPSLSGQVSITLIATGFKRQEESEGRPIQASQFTQGDTVGINRRSFSFTDGSLC

SEQ ID NO: 209409 - protein, 77 aa, Glycine max
  Clone ID: PAT_MRT3847_31123C.1.pep
QFTEQFTLLRRQQYFQHHVQTARLGLFGNGRHEGKRAQEKNTFGGRGIIWMEVRENLDRGIDYIGIRVWGFSEPRVE

SEQ ID NO: 209410 - protein, 97 aa, Glycine max
  Clone ID: PAT_MRT3847_31124C.1.pep
TLRYNKPIGRVIVSVALSVIGESIVPRLHFVFVFPYFSPPDLLFWCFGEFFGFKSPKCFDIYKRCRGRVSVQNFFTLNPMEFHIHVDSVQTLMHLWP

SEQ ID NO: 209411 - protein, 60 aa, Glycine max
  unsure (1)..(60): unsure at all Xaa locations
  Clone ID: PAT_MRT3847_31125C.1.pep
XNXLRQAHPGPCGGGXXWWCXXXAMMXXIXXXIEXIRXLXXXRAEFPSXRTRXCRXXPVL

SEQ ID NO: 209412 - protein, 52 aa, Glycine max
  Clone ID: PAT_MRT3847_31126C.1.pep
DFDGQDAPLVVCFRHLIIAYGSDDKLVPVREACMFRREGYVASVTFSTPYAC

SEQ ID NO: 209413 - protein, 118 aa, Glycine max
  Clone ID: PAT_MRT3847_31127C.1.pep
IANYHRHLKNEDTGPYMIRARPKRYRYTQRWLEHAKRVPKPAPITESTFWAEVEELYSWINSKRHLDDEVKQRVVQLQKDLKKWTDDEKVLTKDTFLKDPNFIRWWDILPQELRVTSF

SEQ ID NO: 209414 - protein, 80 aa, Glycine max
  Clone ID: PAT_MRT3847_31128C.1.pep
FGSQLNQAGPTSQNLSFRFVTQTNLVPLLVTHYNECPLTFVVFFFFLPPFPEHCMTSLPLPRTSLSLFNSRFCYCRMVLS

SEQ ID NO: 209415 - protein, 107 aa, Glycine max
  Clone ID: PAT_MRT3847_31129C.1.pep
TRVDKLHAKVEFLQELGFSYEEAVRACARLPAIFGYDVENNLWPKFVYLVKEMERDLEDLKRFPQYFGFSLKERIVPRHLHLKKRGVRIPLNRMLMWADQKFYAKWK

SEQ ID NO: 209416 - protein, 117 aa, Glycine max
  Clone ID: PAT_MRT3847_3112C.1.pep
LSGNVRVGKNVHKVIKPSRLLELKQVWPEEFLLNFGNKCIDMVLEQDASGEDALRGWLVAAYAAQTHSFSHELSATSVLHEAYEKMNGVFPVFLRELQNKGWHTDRFLDGTGSRFAF

SEQ ID NO: 209417 - protein, 86 aa, Glycine max
  Clone ID: PAT_MRT3847_31130C.1.pep
SSFTFLVSDGREKEKARSGKCGTPMSRAQKGGRAETARGQVSQVAAEQVNQGSSGHPWAQGISAGELSQIRTARFQEDERTRGSTA

SEQ ID NO: 209418 - protein, 85 aa, Glycine max
  Clone ID: PAT_MRT3847_31131C.1.pep
KSFPQLYVLKVWNLKQLKNWLIKQQALPSLRQLEIRSCPGLTNLPFGLWHVKSLLELTLTNMSKEINIGIYRLPDNCKVRRDNSQ

SEQ ID NO: 209419 - protein, 139 aa, Glycine max
  unsure (1)..(139): unsure at all Xaa locations
  Clone ID: PAT_MRT3847_31132C.1.pep
LLQSSLTILTFISTNTFDDQDWRTITKPIPPXGTYREKYHXNQLGLCDTNYLAXHVKNTCALYGKRMHTKERLEPVDDCIGMKTDNXNYTYLEEYQELIYAGKLNTGERAKCTGKITTIKIKMLKTCIFETDILQQIEN

SEQ ID NO: 209420 - protein, 57 aa, Glycine max
  Clone ID: PAT_MRT3847_31133C.1.pep
KAILHRKFKFPAFIFRDGETQPKKFPLWRGTNKFSGPGLILGDFSNGASTKFFGRPK

SEQ ID NO: 209421 - protein, 32 aa, Glycine max
  Clone ID: PAT_MRT3847_31134C.1.pep
LVRECELCTCMRFRDFYILDFAFHLPNLVPLP

SEQ ID NO: 209422 - protein, 152 aa, Glycine max
  Clone ID: PAT_MRT3847_31135C.1.pep
SAIAKARKYYKESSDVVGTLKQLPRYLVAERAVLQTLKTSPGNYLQALKSIPRTLRMLYVHSYQSYLWNHAASKRVQKYGTENVVLGDLVYCKENSTGKVTESVGSEYAEDCSGRYDSNNEDEISGEIHEEIDSVKVRLLVLAHCRGLLVLN

SEQ ID NO: 209423 - protein, 83 aa, Glycine max
  Clone ID: PAT_MRT3847_31136C.1.pep
LIKNETTILCNVVAFVLFHKQKGKFEKNKAKSYCNNEMFQLECEGKSAYGTGTSVKTKPIVLCLEFFLFFFGLISLLVSQVFK

SEQ ID NO: 209424 - protein, 146 aa, Glycine max
  Clone ID: PAT_MRT3847_31137C.1.pep
GNCDLSVHFEQGDGSCDDGVAAAAAVESDVREEIVKGLSGLRVGERVVSESEASSGDSSSLLDAGGGSCAPPTPVPPAKPSVTGNLYPKRSVSGRMISGIVASSRMPWPIDAALSSSAGSKRASPELHPACEGFISADEQKPCLVS

SEQ ID NO: 209425 - protein, 40 aa, Glycine max
  unsure (1)..(40): unsure at all Xaa locations
  Clone ID: PAT_MRT3847_31138C.1.pep
IKGATTTTHLYTXDQRLLDASHRDLRRSRGVLLIIWWTST

SEQ ID NO: 209426 - protein, 56 aa, Glycine max
  Clone ID: PAT_MRT3847_31139C.1.pep
SQASLGELSLSDGISPGKLSFNGAIPKRCVSTTPMRTPLLYYKSKYTVRRLSKHSL

SEQ ID NO: 209427 - protein, 109 aa, Glycine max
  Clone ID: PAT_MRT3847_3113C.1.pep
NVHKVIKPSRLLELKQVFPEEKFLLNFGNKCIDMVLEQDASGEDALRGWLVAAYAARTESSSHELSATSVLHEAYEKMNGVFPVFLRELQNKGWHTDRFLDGTGSRFSF

SEQ ID NO: 209428 - protein, 50 aa, Glycine max
  Clone ID: PAT_MRT3847_31140C.1.pep
SLLRMVHAPEREIFFTGEHTRERFTGYVHGTYLARINSSKELLEEMRKDN

SEQ ID NO: 209429 - protein, 120 aa, Glycine max
  Clone ID: PAT_MRT3847_31141C.1.pep
MAPTVMMASSATAVAPFQGLKSAASLPVARRSTRSLGNVSNGGRIRCMQVWPAYGNKKFETLSYLPPLSTDDLLKQVDYLLRNGWIPCLEFSKLGFVYRENSTSPCYYDGRYWTMWKLPM

SEQ ID NO: 209430 - protein, 123 aa, Glycine max
  unsure (1)..(123): unsure at all Xaa locations
  Clone ID: PAT_MRT3847_31142C.1.pep
ATSHFGYTKKKKKKKKKKKKKKKKKKKKKKKKKIKKKKKKKRGKKKIKNKKKGXRILKKKKIFTPRYKGKNRFKTREKKKKRGRALKRWGKKKKVGNKGYFEKRPTPFGKWRENGKGPLRGPF

SEQ ID NO: 209431 - protein, 71 aa, Glycine max
  Clone ID: PAT_MRT3847_31143C.1.pep
LHSSLYTPNPIQTQTIHSFSSVTHLTMAASITLARLVSSTLTTVYLFHTHIPAFQTLLSPTPQPTSSNATH

SEQ ID NO: 209432 - protein, 212 aa, Glycine max
  Clone ID: PAT_MRT3847_31144C.1.pep
GSSLVIPKFLYSNVWKDPSQFGDIYQEEYFMNILKDDIKIEKELPPHMKSLDVEAIGSQITDADLAKEATPADYIKVVLPLLLRNGVVHFLGYGNRLGFDPMPSEIQRLRCKCNFHALKFAPTIQQIGSLLIQRIRKYGARRSMLDTQLLGKFIRNNEYHEAKRGSAKYLALHLRFEIDMVAYSLCEFGGGEDERKELQAYRERHFPLFLER

SEQ ID NO: 209433 - protein, 294 aa, Glycine max
  Clone ID: PAT_MRT3847_31145C.1.pep
MMGGVSGGGDDDVVQIQQPNKPGDPFIITVNCPDKTGLACDICRIILDFGLCIAKGDVSTDGVWCYIVLWVIPYSVLLPMSCSYLILKERLQKICPPCLASFYVIQQPSRSSPVYLLKFCCLDRKGLLHDVTKVLSELELTIQKVKVTTTPDGRVLDLFFVTDNKELLHTRNRQDETCERLNAVLRDSCISCELQLAGPEYEYNQGISSLSPALAEELFRCELSDNEVRAQALSPDMTKLKKTNVTMDNSLSPAYTLVQIRCADHKGLLYDIMRTLKDLNMKNSYGRFYPIRWG

SEQ ID NO: 209434 - protein, 174 aa, Glycine max
  Clone ID: PAT_MRT3847_31146C.1.pep
MMLMFRSIASKSKTSNTALLLLRAIATSQSLHSNITNLHPPNANNSYHSFSRRHAFSFSKPRANSRVPTSQSFCTASSDRDSIEYDVVIVGAGPAGLSAAIRLKQMCRERNADLSVCVLEKGAEVGAHILSGNVFEPRALNELLPQWKEQEAPITTPVSSDKFWFLTKGRAISL

SEQ ID NO: 209435 - protein, 34 aa, Glycine max
  Clone ID: PAT_MRT3847_31147C.1.pep
NSNNIRTRLELCPVSAYHYSFMLKLEQTSIHSFE

SEQ ID NO: 209436 - protein, 151 aa, Glycine max
  unsure (1)..(151): unsure at all Xaa locations
  Clone ID: PAT_MRT3847_31148C.1.pep
MITWEEARRGCERLNAVLRDSCISCELQLAGPEYEYNQGISSLSPALAEELFRCELSDNEVRAQALSPDMTKLKKTNVTMDNSLSPAHTLVQIRCADQKGLLYXIMRTLKDLNMKISYGRFSPNSMGYRDLDIFIQQKDGKKILDPEKQSA

SEQ ID NO: 209437 - protein, 134 aa, Glycine max
  Clone ID: PAT_MRT3847_31149C.1.pep
MMGGVSGGDDDFVQIHQPNKPGDPFIITFNCPDKTGLACDICRIILDFGLCITKGDVSTDGVWCYFVLWVIPHSVLLPITCSYLILKERLQEICPPCLASFYIIQQPSRSSPVYLLKFCCLKSLICKMQNVKFF

SEQ ID NO: 209438 - protein, 106 aa, Glycine max
  Clone ID: PAT_MRT3847_3114C.1.pep
MFRRLGWFVGLNQTNLSTKRLLNADQTASARPNHQLPMLDAVHEVAVYIHRFHNLDLFEQGWYRIKITLRWEDGDDSHPGVPARVVQYEASEVGADNLCGVWMIDD

SEQ ID NO: 209439 - protein, 46 aa, Glycine max
  Clone ID: PAT_MRT3847_31150C.1.pep
RLNSKQPSTRSTMEVLEATIKVAQRHLRHLELDVCVGGYIWIVIYL

SEQ ID NO: 209440 - protein, 74 aa, Glycine max
  Clone ID: PAT_MRT3847_31151C.1.pep
TSLQTLETLSICQALNFIRSMQCELVRLTTSYKNAFINPLFLFANIGSSNPTSNSFSIPLYLHINDHTAKFINT

SEQ ID NO: 209441 - protein, 330 aa, Glycine max
  Clone ID: PAT_MRT3847_31152C.1.pep
MAWFSGKNTWGNFPDLAGAVNKLQESVKNIEKNFDSALGFEEKGESSNEDAGSWPIPADRKTLFNPVMSFMANKSEETTEEMSQKDEYSQQDSETEKSPEKPKSLDHTPVAEGNDTLETDNTMHMEPEENTTKEENKVVKEEDGEHTESADGTVAQNLDHGKEENHLLELPVELPESPVEKLESSDSVEHSQEKEIADPGSSGSLVSVQFMPSNLGDNVVEGVTTESGESHDISDGHENSQVETKEESKEEERVQAEQSEKRNSSVQPEASSDSENRDDTDTSILQSVTSEETNNTDQSNIEHLSSVTPPNESSKVVTDMFSPENETTAK

SEQ ID NO: 209442 - protein, 52 aa, Glycine max
  Clone ID: PAT_MRT3847_31153C.1.pep
YSSSCRHAIEYPPLIVSPYKVSSVWYIIDSYIHVQDRPLAAVRPPLPGVYVS

SEQ ID NO: 209443 - protein, 66 aa, Glycine max
  Clone ID: PAT_MRT3847_31154C.1.pep
ANLCLLKGNIRVRNSIKHVRGSYSKRKEKHCSTLQSKATVLSMWRITTPLFVSVLTVRGMLGLMRY

SEQ ID NO: 209444 - protein, 64 aa, Glycine max
  Clone ID: PAT_MRT3847_31155C.1.pep
IKKKKHIYQVLQLKFKNKIKLFTIYRLLNFRVHSLEGYVSREKKGPILNKFTYWFEYLPRQLHS

SEQ ID NO: 209445 - protein, 81 aa, Glycine max
  unsure (1)..(81): unsure at all Xaa locations
  Clone ID: PAT_MRT3847_31156C.1.pep
MWTGVKEYAKLGGGDEHAXMGGKEKFLTREEEPHQYWQTACVWECENSMXTLFPYKIIFVMLTSFVILACAFANCWIKVPC

SEQ ID NO: 209446 - protein, 117 aa, Glycine max
  Clone ID: PAT_MRT3847_31157C.1.pep
SYEKGNVGDKVPSSQLLETEKEKPFGHNSQKVLEPAVKQCSEPASEMKVPVSPKAVQVQRHPDAVERDDPHGTHVIESCPKALCPPPQDDGNSICEPIQSPAADPIGIANVSQENIV

SEQ ID NO: 209447 - protein, 55 aa, Glycine max
  Clone ID: PAT_MRT3847_31158C.1.pep
KVLANDCMYMQCYYNNVRLGLYTLWSGVSVNTVEKTAIIIKGGGFKFVVGNGGMC

SEQ ID NO: 209448 - protein, 96 aa, Glycine max
  Clone ID: PAT_MRT3847_31159C.1.pep
NTLAGRVRETETLSGRWWFKWGPLMSSSTWVSKPMEELYEETGNRITFLTRHLLPILTSKLCGVLLCFCKKIVAPYVFRFWIGLISSVVLLWVYLY

SEQ ID NO: 209449 - protein, 53 aa, Glycine max
  Clone ID: PAT_MRT3847_3115C.1.pep
NAKLQRSRNKHDYYMTVTTYKNGQNENKFKNHTEKKRLVITMAIISRRHKICR

SEQ ID NO: 209450 - protein, 89 aa, Glycine max
  Clone ID: PAT_MRT3847_31160C.1.pep
ASSSYLDRTVQGPVTRDIGYGCGKLLNNRLRAHNGGASRRTSGTKGHPRLLPRHGGVLINATVGMLVATQADANTTASTCQRTQRWPYQ

SEQ ID NO: 209451 - protein, 129 aa, Glycine max
  Clone ID: PAT_MRT3847_31161C.1.pep
MEPWLPQDDFLLKNAIDGGASLESLAKGAVRFSRRFSVTELRDRWQALLYDPDVSAAALAAMAHLEAAKYGGAAGTSEGGGGGKKRKSESIRKHYFAMQRRLRGCRHSDAKNATEGCEGNGRGLEVRVN

SEQ ID NO: 209452 - protein, 32 aa, Glycine max
  Clone ID: PAT_MRT3847_31162C.1.pep
VGKIGSTTPRDFFLVWINVMIPSSTHDFFMSG

SEQ ID NO: 209453 - protein, 100 aa, Glycine max
  unsure (1)..(100): unsure at all Xaa locations
  Clone ID: PAT_MRT3847_31163C.1.pep
IHNSNAYILYIXKKKKKKKKKKKKKKKKKKKKKKKKKKKKFSPFPPPVEKRNFGGPTFFLKFPFPLVFGEKTFVLVFSRGKNFGKFFWKKPPFPWGGERF

SEQ ID NO: 209454 - protein, 181 aa, Glycine max
  unsure (1)..(181): unsure at all Xaa locations
  Clone ID: PAT_MRT3847_31164C.1.pep
MIMRRSSSIHGFPLLRYFALSSNPTHFLLHPSHSSSTFSTYASINTSRAQFLDSLRNVKSVDVALDFYHKMVTMKPFPCVKDFNLLFGIVAKMKHYTTAISLIKHMSYIGVKPNVPTHNIVINCLCRLNHTVFGFSVLGLMFKIGVEPSIVTFTTIVNGLCVEGNXAQAIRFVDHLKDMGL

SEQ ID NO: 209455 - protein, 64 aa, Glycine max
  unsure (1)..(64): unsure at all Xaa locations
  Clone ID: PAT_MRT3847_31165C.1.pep
FAIXSLTVGVMMGARGSKXSXSCMRXGERXNXEXRRRRQCYRVAKTEGLXCXLPXRGXGXXRXT

SEQ ID NO: 209456 - protein, 63 aa, Glycine max
  Clone ID: PAT_MRT3847_31166C.1.pep
IDIHFRFTLVFFSSPILKDKLHLSLTFGSETFYHKTSLSFYDIGIGENDLLMYFKEQGGVLYD

SEQ ID NO: 209457 - protein, 57 aa, Glycine max
  Clone ID: PAT_MRT3847_31167C.1.pep
EAEGEPLQLITQKCRVLVKAAVNGVRTFTAIERIIVGSELSCPNAPPFVRFTSYENI

SEQ ID NO: 209458 - protein, 94 aa, Glycine max
  Clone ID: PAT_MRT3847_31168C.1.pep
IYYQDDHYTDQRDALNSQGFKHSSCDHAFYKGQKVHLHDIIYADQLLYNILKAINENARYMTNETIGFYWWHMMSRRTLWPHYFMSLILKLDFN

SEQ ID NO: 209459 - protein, 97 aa, Glycine max
  unsure (1)..(97): unsure at all Xaa locations
  Clone ID: PAT_MRT3847_31169C.1.pep
FNFWICLASSADAFRGIYKNRPKDGEYTLPLIHVYGFSKARDPEXDFHERIRIALLEVAVNVDMRRVRLVAPGKWMLCASFILPKSVAFADTAAVDT

SEQ ID NO: 209460 - protein, 88 aa, Glycine max
  unsure (1)..(88): unsure at all Xaa locations
  Clone ID: PAT_MRT3847_3116C.1.pep
PIHIDPESVKAPKPEEXVXYPKDXXSVXXXNXXERXTXRXRXXQRLVPGGTKMDTAXMLDXAIHYXKFXKXQVXXTRXXFLRYQYRAI

SEQ ID NO: 209461 - protein, 75 aa, Glycine max
  Clone ID: PAT_MRT3847_31170C.1.pep
YLETISVIRISCLIRLLIAIGFLFHHKKTRCYLERNGIGKESYLLWHVSDRKLCVKYVVNRLFNRITRTLNSETA

SEQ ID NO: 209462 - protein, 96 aa, Glycine max
  Clone ID: PAT_MRT3847_31171C.1.pep
FNFWICLASSADAFRGIYKNRPKDGEYTLPLIHVYGFSKARDPEFDFHERIRIALLEVAVNVDMRRVRLVAPGKWMLCASFLLPKSVAFADTAVDT

SEQ ID NO: 209463 - protein, 601 aa, Glycine max
  unsure (1)..(601): unsure at all Xaa locations
  Clone ID: PAT_MRT3847_31172C.1.pep
MISKVFLKPHLVGLLLPSKFGLVFPHTTKPSSSLPTTFFISHFSSAPLSSYGPSLHKGTTIPSQSLNDAVLCEEAFTRVFHLAALRVPSSECSALESRLRGHLLNWPRLRNIARVPGDDIDPTLAPLLPQPGNGEFDFDENEVEERRLVSLQRRIHGKADGDGDVLSPVLYRDRLARTFNTSGFVKFRHLAKISRPNRNKRRRKRKEKESSEGVKRVGENGFAAVEVIEEEEEGEESGGLRNLLGEEFARKKWRGSTRLLLLDERYADRGFEELPEATKAVLKEYAEKSTNLMLELVRCKLTLFYDYWQMNEVLETLLPEGMIIPSAFETVGHIAHLNLRDEHLPYKWLIAKVVLDKNKPRIQTVVNRXKIDTIQNEYRTMQLEVLAGNHSLXVVENGIHFQVDLATVYWSSRLGTERQRLLSGFTRNDVVCDVFSGVGPLAISAARIVKRVFANDLNPYAVEYLERNCVLNKLDRKIKVFNMDGRRFIKSMYDSDISQSITQVVMNLPSEAAEFLDAFRGIYKNRPKDGEYTLPLIHVYGFSKARDPEFDFHERIRIALLEVAVNVDMRRVRLVAPGKWMLCASFLLPKSVAFADTAVDT

SEQ ID NO: 209464 - protein, 153 aa, Glycine max
  Clone ID: PAT_MRT3847_31173C.1.pep
KRVFANDLNPYAVEYLERNCVLNKLERKIKVFNMDGRRFIKAMYDSDISQSITQVVMNLPSEAAEFLDAFRGIYKNRPKDGEYTLPLIHVYGFSKARDPEFDFHERIRIALLEVAVNVDMRRVRLVAPGKWMLCASFILPKSVAFADTAAVDT

SEQ ID NO: 209465 - protein, 96 aa, Glycine max
  Clone ID: PAT_MRT3847_31174C.1.pep
MAFNNALRSAAKLVASSESSFSNSVSRGFHSTGMKRMGGGHGHDEPYYLHAKHMYNLDKMKHQGLKMSLAVFTAFSIGVAVPVYAVIFQQKKTASA

SEQ ID NO: 209466 - protein, 57 aa, Glycine max
  Clone ID: PAT_MRT3847_31175C.1.pep
NPMCLLIQATNLWMKWKRTGSSGKLAWHLEIVLISWLSLFLNHPCDPYLFDIKGHLA

SEQ ID NO: 209467 - protein, 57 aa, Glycine max
  Clone ID: PAT_MRT3847_31176C.1.pep
SVIRYNLRHKCSNQLLYGHRAELTLTINKKFGHCPKTFIIEKVDPQRGMFFPADPPG

SEQ ID NO: 209468 - protein, 71 aa, Glycine max
  Clone ID: PAT_MRT3847_31177C.1.pep
TIFTNHRKIIIFFSMVKGLPQRGPWNRDLSPQKPTMSSSCPKWKRTKRKSTYGDDRLVSMIQSLEAEITDT

SEQ ID NO: 209469 - protein, 96 aa, Glycine max
  Clone ID: PAT_MRT3847_31178C.1.pep
MAFSNALRSAAKLVASSESSLSNSVSRGFHSTGMKRMGGGHGHDEPYYLHAKHMYNLDRMKHQGLKMSLAVFTAFSIGVAVPVYAVIFQQKKTASS

SEQ ID NO: 209470 - protein, 134 aa, Glycine max
  unsure (1)..(134): unsure at all Xaa locations
  Clone ID: PAT_MRT3847_31179C.1.pep
TVIPSPASXHTPFIPILRNGQKNLQNAPHLPRCGRALQQFFALTSSLALRKRGVCLFVGSEIPRAEGNRRLGLQRLLTVAASAGAAVHWRRCFCGGEGGALHKAYFVRAMNVFLLRQLGFLFCRIPAIYQLLSR

SEQ ID NO: 209471 - protein, 80 aa, Glycine max
  Clone ID: PAT_MRT3847_3117C.1.pep
RSTQLLIRKLPLHRLVREIDQDLNTDLRYQSHAVLALQEAADAYLAGLFEDTNLCAMHAKRVTIMPKDIQLARRILGERA

SEQ ID NO: 209472 - protein, 60 aa, Glycine max
  Clone ID: PAT_MRT3847_31180C.1.pep
TPCKIGSFDSHIPCSKPNMDSNELNVMGCHYAISGAACSELTGKVISVDFVVTSRYKLLI

SEQ ID NO: 209473 - protein, 34 aa, Glycine max
  Clone ID: PAT_MRT3847_31181C.1.pep
MGRKCSHCGNIGHNSRTCASFRATNFVGVRLFGV

SEQ ID NO: 209474 - protein, 102 aa, Glycine max
  Clone ID: PAT_MRT3847_31182C.1.pep
RAPKKKNKAQSRVLGPLSPLPKCIFLSQINLGGHLKLAFPNYPTANRKNPPLFFPPLFSLFIPFFFPPIMVKKKFSRNQGFQANFSPKRKPGPWVTRVLIPF

SEQ ID NO: 209475 - protein, 74 aa, Glycine max
  Clone ID: PAT_MRT3847_31183C.1.pep
MGYKHREREDQERNTTRWRRGCGKGIEDSQESRHTFVKHGIWYLPRAVSSIFKPDLTIVYEFVPRDIIEFSTLR

SEQ ID NO: 209476 - protein, 88 aa, Glycine max
  unsure (1)..(88): unsure at all Xaa locations
  Clone ID: PAT_MRT3847_31184C.1.pep
KITQPLASKHHLVLFQQLFNKIKVFILLIFIYLGXRGESLWFSYDLEPYIILAMAFNAHHSFDELIDLWVLWISFEQFLPFFQIILLS

SEQ ID NO: 209477 - protein, 96 aa, Glycine max
  Clone ID: PAT_MRT3847_31185C.1.pep
MRPERNPLDLNNLPDEYSRDGKQVLEDHTSSPGCRKKKSGGKDGKDECGKVYECRFCSLKFCKSQALGGHMNRHRQERETETLNQARQLVFRSDHI

SEQ ID NO: 209478 - protein, 104 aa, Glycine max
  Clone ID: PAT_MRT3847_31186C.1.pep
DVIQGCCKILVRTAIKAMDVVSLHRTLSTWALHLRGTGTGGSDQLPQVKLVGILSTCCQMCSIEVITDVHFNHTVGRYLDQQSQQCTPFCCPLASACRSGLTRG

SEQ ID NO: 209479 - protein, 56 aa, Glycine max
  Clone ID: PAT_MRT3847_31187C.1.pep
FQHRLLIDVESTDVESSIINIGFSKPMLTNKYNIGYLNKRCYMIRIMKKKNYKSIN

SEQ ID NO: 209480 - protein, 69 aa, Glycine max
  Clone ID: PAT_MRT3847_31188C.1.pep
RCRYTLTNLGKNQHLLWRESERERERIEKKDFDWLTTLVGVRSLLNSKFQKIRWVLGTCGLTMSWHSNN

SEQ ID NO: 209481 - protein, 49 aa, Glycine max
  Clone ID: PAT_MRT3847_31189C.1.pep
SACPGKRLLFEGISSRRNVMVQMPTADGMSSKQLVIRVEHSCTSWTERS

SEQ ID NO: 209482 - protein, 84 aa, Glycine max
  Clone ID: PAT_MRT3847_3118C.1.pep
AYICHSCKCVACICKGTKSHDASRQRKKAPSRPEWVHSVDGPTIPHIEEIQAMQTMMNAFEANDTIEKMTGIDTTGGKKTSFFF

SEQ ID NO: 209483 - protein, 97 aa, Glycine max
  unsure (1)..(97): unsure at all Xaa locations
  Clone ID: PAT_MRT3847_31190C.1.pep
PRVRPRVRLVSIIPTLPSPFLTGGTSGLHFAAFPLGSSTRKLMLYTFARATLGLTHSSNIETPKISFGAXDVDVTVWKGDILAVGVSVNRFARDAIL

SEQ ID NO: 209484 - protein, 70 aa, Glycine max
  Clone ID: PAT_MRT3847_31191C.1.pep
AATRAISSVALNVWDRTEAVTDQTGKNHAGAIVNARKVFARFEFGQHNVEEVYPKFKCGHIQLISVMPSM

SEQ ID NO: 209485 - protein, 114 aa, Glycine max
  unsure (1)..(114): unsure at all Xaa locations
  Clone ID: PAT_MRT3847_31192C.1.pep
TDLSLVSSWGIAGLACVFHLLFLSILADDAGVLSEDNYEKEVVHAIGAFGELYAPSRXHCIKLAPEFQKLGTNFKKAQPDPIGNVDCDELISLVKTYGVLCYASIHWFPNRSLV

SEQ ID NO: 209486 - protein, 136 aa, Glycine max
  Clone ID: PAT_MRT3847_31193C.1.pep
NSARAEGFEGDGKNDGSRCSPKSSTNSRKAIIILIIALSVSVSLVTLLGGSFYVYWVSKKRKIIKLKEQFFQQNGGLFLQQHMSRHKGSIETAKVFTIEELKDATNNFDEDKILCQGGQGTVYKGVLLDNRIVAIK

SEQ ID NO: 209487 - protein, 89 aa, Glycine max
  unsure (1)..(89): unsure at all Xaa locations
  Clone ID: PAT_MRT3847_31194C.1.pep
LLYXSPSLSKIVLFDFRXLFCCCLRSPLLINNAFSLLLRXIXALLGXVXXRPXXHSXRHSNRXIQXXLNXLXESKXXTKKSSXXXSKXL

SEQ ID NO: 209488 - protein, 57 aa, Glycine max
  Clone ID: PAT_MRT3847_31195C.1.pep
RKIQGVIEAGVCSRRGDLGMRPSNSVLIPALQTDGNIDTGDEYHTQVMIDHQALTRT

SEQ ID NO: 209489 - protein, 208 aa, Glycine max
  Clone ID: PAT_MRT3847_31196C.1.pep
DAFASILLIMNRHDQFQKPQSLSKGTTDHSQHQNKEDVVSIKDCISPDLTSFATSSGDVAAGFTGVHESEALSCYSSVSTSVGVQSKTVKGSVIAKNNPKSSGLMKPNKLKSTHRNGILSSTISETVADTGKDIKILNKAPHLRSNFPAATAPNTYHQIGKFSSLGHPTCHVSPPTNHRPNTSTNYRPTGRVSNVNDRVLVGDNKFRS

SEQ ID NO: 209490 - protein, 181 aa, Glycine max
  unsure (1)..(181): unsure at all Xaa locations
  Clone ID: PAT_MRT3847_31197C.1.pep
ARAVFQGLLSDICISPNLATQMLPCKRPHRSPEGSEHYQIYYDAIINRRRLFSTDTGSDHCRQKGKVPLLSLESVHHLHIFIFVLAVVHAIFCVTTMLLGGAKIREWNSWEDYCRNKIISSKKDYREFFKVHADGYWRRAAVISWLRSFFXQFHGSVTKSDYLALXYRFVKEHHPQNXEYN

SEQ ID NO: 209491 - protein, 243 aa, Glycine max
  Clone ID: PAT_MRT3847_31198C.1.pep
MGRGKIEIKLIENPTNRQVTYSKRRNGIFKKAHELSVLCDAKVSLIMFSKNNKMHEYISPGLTTKRIIDQYQKTLGDIDLWRSHYEKMLENLKKLIDINNKLRRQIRHRIGEGLDMDDMSFQQLRTLEEDLVSSIGKIRERKFHVIKTRTDTCRKKVKSLEQMNRDLLLELKEKCVIHPQFLLHDEGDEESAAAAAAAAVALANGASTLYAFCHQHHSHLNLFSHHSNGEEQPFKTDHDLRLA

SEQ ID NO: 209492 - protein, 47 aa, Glycine max
  Clone ID: PAT_MRT3847_31199C.1.pep
PIIHIYFYYSHISYSGCKISLQFEATQQDLLSRTLERLAALYMNSRS

SEQ ID NO: 209493 - protein, 77 aa, Glycine max
  Clone ID: PAT_MRT3847_3119C.1.pep
ISESYYQIPTTFYPFSDSNSHDFFPSSKHYLHIRLHHLNVMKILTTFHSLKKEFNYNNILKHVNKYFLFNATFFHDP

SEQ ID NO: 209494 - protein, 65 aa, Glycine max
  Clone ID: PAT_MRT3847_311C.1.pep
RARFTHGYFIGQRREKTTRHITPQLIYFNRTATSQPDSNELHSIYRVCSHRALPTRTLVPLMDGF

SEQ ID NO: 209495 - protein, 132 aa, Glycine max
  Clone ID: PAT_MRT3847_31200C.1.pep
LKRNLGVLFFIGKKKKKGRFFFCCLGNKHQGNSGAGFCRNEKLAPFHDGRQCNVNQLFFSLGLKHRVWKGFSCLTWGGSRISTIKKGALFWNPPFCFFLRGLGTCWGGSLRIAPPLKGFFFPPNLGKKVLRG

SEQ ID NO: 209496 - protein, 62 aa, Glycine max
  Clone ID: PAT_MRT3847_31201C.1.pep
KYRLVVNSFFQTVLYALINAFIYLFSQGIRYTSLSMSLLLSLSPPSLLETIFFFLFFQQISL

SEQ ID NO: 209497 - protein, 69 aa, Glycine max
  unsure (1)..(69): unsure at all Xaa locations
  Clone ID: PAT_MRT3847_31202C.1.pep
LHHIFFFSFSKACGRSALSQPHLACRYFVLVXQLGTIAVSALNKYVIPALVLPRTMLIASTSALCLLWY

SEQ ID NO: 209498 - protein, 47 aa, Glycine max
  Clone ID: PAT_MRT3847_31203C.1.pep
YQTFNEVITLLSLELISANMRRPSDDVKQTHTHMYAKRREWKEHYGA

SEQ ID NO: 209499 - protein, 36 aa, Glycine max
  Clone ID: PAT_MRT3847_31204C.1.pep
SYNAPPYIMTTHEAYVPIRYEGLEIPFVHKPPGLIF

SEQ ID NO: 209500 - protein, 508 aa, Glycine max
  unsure (1)..(508): unsure at all Xaa locations
  Clone ID: PAT_MRT3847_31205C.1.pep
MFDWNDEELANIIWGEGGESVDHIVPYPEVNEDVSNIKEWNQEAAATKLTKLKRPEAKTDFHERKLGSSSNLDNKLLXPRYGTNAWPDLSLSTSANIDQGSLGTEVSKNLSELSKFSSSREETTQHEKDAEIFQTAHEGKEQGDFVDYGWVNIGSFDDLDRIFSNDDPIFGHASLDSSNELWSSKDVSNNAAPLPLDTPSSSGALRNRTESLEIKEEYVQCSDESLDLSNEKIGGPGSQVIENSCTTTANVGNGGVRSKPTGKEQQVFRQKNLLKTRKKSLVKQEENTLQDFYDNWSPSAAPAKQFQNQLAPSVIQSSPSSILGQPKQIQGAETLYQNIINPYAASSVYGNLTNTYPAMPMLSQTHPALSGYEVSPGIVNPVNNLVDSVKPQIMTPQEKIEKLRRRQQMQAMIAIQKQRQQLGHQVPSKSSTQKCPPEIQSHLSDGTDEDLRTFPALDPPIEQDDSNTMSVAVGNDFVEDTVLYGLQHIISKLDIKIRLCIRDSLFRL

SEQ ID NO: 209501 - protein, 91 aa, Glycine max
  unsure (1)..(91): unsure at all Xaa locations
  Clone ID: PAT_MRT3847_31206C.1.pep
KXRHXXXEAAEXXKERRXXEXRXRXRKGXRRXXREREXVRXXXEXXEXXXKTTNRARERKFFLKEAGLSGVKIFCLDLMGRMETTSENTER

SEQ ID NO: 209502 - protein, 189 aa, Glycine max
  unsure (1)..(189): unsure at all Xaa locations
  Clone ID: PAT_MRT3847_31207C.1.pep
RFPPASAKATTNETLSEILDSSRAQKLDLELKTLEPFFRITARSVVTDKELGKAEGFIRFWVGGKILHLDSIKLQRETLGMEKSIFGLGLFIGAVAIRHGYDSGCKTAQLLSINDSDLYHSKQRHPNENDLSSYIXFSNLLGFKVVYEVTGSSVEDVGHMLVWGGVGTRMDASVEELMKKWCTRFKAPH

SEQ ID NO: 209503 - protein, 117 aa, Glycine max
  unsure (1)..(117): unsure at all Xaa locations
  Clone ID: PAT_MRT3847_31208C.1.pep
WKTTEGERQSKNVVREGKRESEEIWRELKTLVSSNDLHSLNLMQHTILGRLQDSNAVLSHFNDFSQHCFAEISGDIARNTRVLRSMKXKIMATYPDAFPEDSSSEVIDRRPDLEMSK

SEQ ID NO: 209504 - protein, 117 aa, Glycine max
  Clone ID: PAT_MRT3847_31209C.1.pep
REGKRESEEISREFKTLVSSNDLHSLNHMQHTILGRLQDSNAVLSHFNDFSQHCFAEISGDIARNTRVLKSVKSDLDYIFQKLRSMKSKIMATYPDAFPEDSTSEVIDRRPDLEMPK

SEQ ID NO: 209505 - protein, 81 aa, Glycine max
  Clone ID: PAT_MRT3847_3120C.1.pep
IDRRSGRELEKQPHLLSNGDAGMVTVIPSEPMVVAAFSEHPPLGSYAVMGMRQSVSVGVIKSVRSKDPAGAKVHKAGAKKQ

SEQ ID NO: 209506 - protein, 111 aa, Glycine max
  Clone ID: PAT_MRT3847_31210C.1.pep
VDDIGLQLNFSNTTISLTSPSLALAVIRVNASSFNTTTFVAQDPANLQVSLETQAPENSIGTITLPSSLMNNLPAHDMELASRVQFNFFETPALFQVKLLLTAFGLGFIWR

SEQ ID NO: 209507 - protein, 84 aa, Glycine max
  Clone ID: PAT_MRT3847_31211C.1.pep
HASGCQRALCLVLSISLHSIQLCTKVRFQNRNSQELLSPKSSKSKPSRDLHIFSFCGGRESAFVPTNAMIFLVGLLIYVVFLEL

SEQ ID NO: 209508 - protein, 41 aa, Glycine max
  Clone ID: PAT_MRT3847_31212C.1.pep
LLLDQHSISILQINRSSDNHLTIQLVYTNYTAFLHIILLQT

SEQ ID NO: 209509 - protein, 68 aa, Glycine max
  Clone ID: PAT_MRT3847_31213C.1.pep
TFQVSSTNTSDTMNNQLNSNPPRCCSHNTICWPKANNLTIPFPVQPHTVQHHFRNITPKLSLIALAYH

SEQ ID NO: 209510 - protein, 54 aa, Glycine max
  unsure (1)..(54): unsure at all Xaa locations
  Clone ID: PAT_MRT3847_31214C.1.pep
LVIXSMGIYAXIAYTSPVTISYXQYHRXSQHNNISAPYEVNHLRIHLGHQLSSS

SEQ ID NO: 209511 - protein, 53 aa, Glycine max
  Clone ID: PAT_MRT3847_31215C.1.pep
NQHYYLTNLEGKVHLLIQKRRFLFRNSNNWIYNDLIFLGREKIIKGIHASIAH

SEQ ID NO: 209512 - protein, 94 aa, Glycine max
  Clone ID: PAT_MRT3847_31216C.1.pep
NNRDHFPPPFYQNKGQAPGNRFPKMAPFNSPPNFFFFLIGKRFLPPCQEGPKGGPNMFFCPNKKGEIYPLKPKTFFFPHQAATWKTPGLLNLGP

SEQ ID NO: 209513 - protein, 125 aa, Glycine max
  Clone ID: PAT_MRT3847_31217C.1.pep
QSSPSPFFSSTSRSESELSVPPSLTLSSFSFNSTAAPSNPLSAPLNSTPFSTATSSPPEASTKTSLLSLTSPSFTASPDSSFSPPSSKTTSSSASSTMEPSSSSSSSSPDTFAMGLWGGESKTGS

SEQ ID NO: 209514 - protein, 52 aa, Glycine max
  unsure (1)..(52): unsure at all Xaa locations
  Clone ID: PAT_MRT3847_31218C.1.pep
LLAHDDHCTVXPLTPSMVVVVTTSIHFSLASVKWVCVVLLRLKRVNEEREEW

SEQ ID NO: 209515 - protein, 64 aa, Glycine max
  Clone ID: PAT_MRT3847_31219C.1.pep
GSTDSLSASSLSLASIDTRTHPCAEHPSSVATGHAMGPLQRYHKIVTTLTDATVPATTCRSKLL

SEQ ID NO: 209516 - protein, 66 aa, Glycine max
  unsure (1)..(66): unsure at all Xaa locations
  Clone ID: PAT_MRT3847_3121C.1.pep
FKNPGLLVFANKQDFSNAMNAAEKTEKLGFPFFRQGPWYFPSPCAPFGEGLFXGVGWLSNTLANKA

SEQ ID NO: 209517 - protein, 245 aa, Glycine max
  unsure (1)..(245): unsure at all Xaa locations
  Clone ID: PAT_MRT3847_31220C.1.pep
MVDTWLGPTFCNTLPLSFPTCTRILSSSFSSSSSSMATSPSQQHHHHHRRCYSNPNPPHPHPQPALLVFSGGTAFNGVVEELKNFTTRVAHVLPVSDDGGSTAEIVRVLGGPAVGDIRSRCLRLSDQSTVEALAVRNLLGHRLPLDPLQAKSEWYSIVEGDHFLWKGVSKPYRETIRAFLVYFQSQILCRAEESFCFSNXGPLFLIQSHACLFFFFVDAASFSYSRVSYILYSSCYNEKRGFPLH

SEQ ID NO: 209518 - protein, 75 aa, Glycine max
  Clone ID: PAT_MRT3847_31221C.1.pep
MQIISIHNCNNLQLTGTSRLNSARNHISINNSNHTHTFNATITAPQDSPKTDGIDVSQSSYILIQHSTIVTSKRH

SEQ ID NO: 209519 - protein, 117 aa, Glycine max
  Clone ID: PAT_MRT3847_31222C.1.pep
VHASDLVKELRTPPPGATDLHIHTKNPQFTLGQCRTCFWKQWLTYWRSTNFEIATYFNTLACALMIGTGFWRIGKNGESSVDLTVYIGAMYAADIIDGINSCHTVSPNENVERTEFY

SEQ ID NO: 209520 - protein, 56 aa, Glycine max
  Clone ID: PAT_MRT3847_31223C.1.pep
FIPISLLPPREFRKGCLYPSAPPKGVPPFLVNVESYKYCLPTRVMSAWRVAVILQA

SEQ ID NO: 209521 - protein, 49 aa, Glycine max
  Clone ID: PAT_MRT3847_31224C.1.pep
ALVEETFSCIRVDQSPEVKSSLPPILSFGEKYCVIINLQTVLSRNSSHR

SEQ ID NO: 209522 - protein, 56 aa, Glycine max
  unsure (1)..(56): unsure at all Xaa locations
  Clone ID: PAT_MRT3847_31225C.1.pep
MAASSYAMQLILANPLIRIFSGSRVNQFVVPALHMIKDCRPVXNSMAHEEQPSEPA

SEQ ID NO: 209523 - protein, 320 aa, Glycine max
  unsure (1)..(320): unsure at all Xaa locations
  Clone ID: PAT_MRT3847_31226C.1.pep
GRSTRPQXAQKAILTDLGEDAVVYMNYTPFVLRELNKPVNTLKHVGITGPVVEHMEARLKEDXAEIRQSGGRMLLHREEYNPSTNESGVVGYWENIRADDVKTPAEVYSALKDDGYDIVYQRIPLTRERHALASDIDAIQYCQDDSAGSYLFVSHTGFGGVAYAMAIICIRLDAGSKVSQPLFGPHIDAVTEEDLPSQTSNEMALSMGDYRDILNLTRVLIHGPQSKADVDIVIERCAGAGHIREDILYYNREFEKFTDDDDEERGYLMDMGIKALRRYFFLITFRSYLYCNSPANMEFAAWMDARPELAHLCNNLRIDK

SEQ ID NO: 209524 - protein, 80 aa, Glycine max
  Clone ID: PAT_MRT3847_31227C.1.pep
TMHTCYFVNRYYLRRAASCTQFLSSFVCHERLTLTQGMNVGEPKCSSETCKAVGYTAEECYSISSKGCISICLFWRVCKG

SEQ ID NO: 209525 - protein, 427 aa, Glycine max
  Clone ID: PAT_MRT3847_31228C.1.pep
KKRGNILKMDRHKYVKVGSSGFRELSKEDKVGTYGNTLVRDSFDEPDYALIDTLFSLAEAYLFAQLVDFKDCNPDKIQEGVDYARMYKDVRAAVDLCHRDGTLKQMVAIEPKRYINEDSSIVPMLEMLRDSGQATFLVTNSLWDYTNIVMNFLCGSSMADVSNNFGWLQYFDVVITGSAKPGFFHEENRATLFEVVPETGMLLNTDNGSPIPQVGNTSARLFTEAKNHACPVFQGGNVSHLHKLLSIESSSQVLYVGDHIYGDILRSKKVLGWRTMLVIPELEKEVKLLWESRDTRKELQFLRSERDCIEDEIHHLKWSLKFKNPDADSKQKLSSELDKLKLERERVRLSHQEAQKKLHQRFHEPWGQLMKTGYQNSRFAHQVERFACLYTSQVSNLGLYSPDKYYRPSEDFMQHEFGIMACETPDI

SEQ ID NO: 209526 - protein, 285 aa, Glycine max
  Clone ID: PAT_MRT3847_31229C.1.pep
MIGSFITRALVMVFGYAFPAYECYKAVEKNRPEIEQLRFWCQYWILVAVLSVCERIADAFISWVPMYSEAKLAFVIYLWYPKTKGTTYVYDSFFRPYVAKHETEIDRNLLELRTRAGDTAVLYWQKAASYGQTRIFEILQYVAAQSTPSPRPAQQQPAMRVRQAATSNSQPASATEPQAENPSSPTSSSSSQQQKEVAEEELGSSQVPKAPYTVAGLSSQKSNPIPETANQSVPEEDEPMQIEAAAPSSSSANENENPPLEDTIMEASLTVTRGRLRKNRSARIR

SEQ ID NO: 209527 - protein, 51 aa, Glycine max
  Clone ID: PAT_MRT3847_3122C.1.pep
HQICIGKRKNVFEGGGPLSLRFPRFSLLFRLLNTYHLPCEVLRLAERGSTG

SEQ ID NO: 209528 - protein, 138 aa, Glycine max
  unsure (1)..(138): unsure at all Xaa locations
  Clone ID: PAT_MRT3847_31230C.1.pep
CIEDEIHHXKWSLKFKNPDADSKQKLSSELDKLKLERERVRLSHQEAQKXLHQRVESSPVDYLQFPFFLLAXFHEPWGQLMKTGYQNSRFAHQVERFACLYTSQVSNLGLYSPDKYYRPSEDFMQHEFGIMACETPDI

SEQ ID NO: 209529 - protein, 57 aa, Glycine max
  Clone ID: PAT_MRT3847_31231C.1.pep
MINKRTDVTFKRVGGACILYLGRNSILHSICNTCKSITREVKLFPPLKEFLQPTKEY

SEQ ID NO: 209530 - protein, 276 aa, Glycine max
  Clone ID: PAT_MRT3847_31232C.1.pep
MIGSFITRALVMVFGYAFPAYECYKAVEKNRPEIEQLRFWCQYWILVAVLSVCERIADAFISWVPMYSEAKLAFVIYLWYPKTKGTTYVYDSFFRPYVAKHETEIDRNLLELRTRAGDIAVLYWQKAASYGQTRIFEILQYVAAQSTPSPRPAQQQPAVRVRQPASSNSQPAAATEPQAENPSSPTSSSSSQHQKEVAEKLGSSQVPKAPYTVAGLSSQKSNPIPAEDEPMQIEAAPPSSSSANENENPPLEDTIMEESIRVTRGRLRKNRSAGIR

SEQ ID NO: 209531 - protein, 113 aa, Glycine max
  unsure (1)..(113): unsure at all Xaa locations
  Clone ID: PAT_MRT3847_31233C.1.pep
XVDPRVRGFCGQKVIGFVAKATLNSVEGILANNKSNNNPIAVIDNHDSFTCNLCPGWFFHFISFAIVRQFLLLLLLHCHGFFVCNFCFYLMPLKTLFFFCCQNLRKKGGNSDQ

SEQ ID NO: 209532 - protein, 97 aa, Glycine max
  unsure (1)..(97): unsure at all Xaa locations
  Clone ID: PAT_MRT3847_31234C.1.pep
KREKRGPWGATPFGHKGGAKNSGPPLGGSKNPPXGGNPPPPIFWAPGAPMGLGPGTFFPPPLFLSQKKTAGPFSPLKKKAGSPPLVSPQTFFSTALF

SEQ ID NO: 209533 - protein, 78 aa, Glycine max
  Clone ID: PAT_MRT3847_31235C.1.pep
FVVKHLACCWGIFGPLPRYTFSSRASGVVFGVPPPLFLFGPFLLLQYSPGFVFGLLRSLLFRGHKPLVGVASFVSFLV

SEQ ID NO: 209534 - protein, 64 aa, Glycine max
  Clone ID: PAT_MRT3847_31236C.1.pep
ASQIDTWNVALTECISSFIYRLVGASACNDYLRITESVSTHPVCFGTQFTAHECAGNLAASART

SEQ ID NO: 209535 - protein, 91 aa, Glycine max
  unsure (1)..(91): unsure at all Xaa locations
  Clone ID: PAT_MRT3847_31237C.1.pep
LFKSNDSYGINSVTKKNNLNGYEKSKTLHKMADEKPYTTVFKKXXGANTEPPPPTAGGRPPAFLSKMGLRSLCNLSFVTTTLEGGIPTLTG

SEQ ID NO: 209536 - protein, 157 aa, Glycine max
  unsure (1)..(157): unsure at all Xaa locations
  Clone ID: PAT_MRT3847_31238C.1.pep
GSSAALVAILRDGKGRERKEAATALYALCSFPDNRRRAVNCGAVPILLQNVEIGLERCVEVIGFLAKCXEGREQMECYDGCVQILVNVLRNGSSRGIQYALFALTSLCSYNQEMVLVALEEGVLEASLGFVEDDNEKVRRNACNLIKVLRFNHNRVR

SEQ ID NO: 209537 - protein, 64 aa, Glycine max
  unsure (1)..(64): unsure at all Xaa locations
  Clone ID: PAT_MRT3847_31239C.1.pep
EFGYLRGQEGNGRKXLTTGQGWKKEGSYNKRGEDVKKEFWCNGTVGQDPELGKGIQSQGDERKN

SEQ ID NO: 209538 - protein, 73 aa, Glycine max
  unsure (1)..(73): unsure at all Xaa locations
  Clone ID: PAT_MRT3847_3123C.1.pep
LXFCXYXXXPSLSKIVLFDFRVLFCCCLRSPLLINNAFSLLLRIYSLLLVLVDSGLHSIRCGFNRLSTTVTMS

SEQ ID NO: 209539 - protein, 69 aa, Glycine max
  unsure (1)..(69): unsure at all Xaa locations
  Clone ID: PAT_MRT3847_31240C.1.pep
SRAESARVRLREDDRRGSMFLHLFFTSHFILCFKKNYSRNIKHIFNYILFYLFIQSFRNTNTKYLSAPX

SEQ ID NO: 209540 - protein, 102 aa, Glycine max
  Clone ID: PAT_MRT3847_31241C.1.pep
MFDLGSNAGGDCKTLMFVQVSPSSADLGETLCSLNFATRVRGIESGPARKQVDHTELFKYMQMADKLKHDEKETQKLQDSLHIMLLKLAAREHHCRTLQEKG

SEQ ID NO: 209541 - protein, 513 aa, Glycine max
  unsure (1)..(513): unsure at all Xaa locations
  Clone ID: PAT_MRT3847_31242C.1.pep
RVSHASGLNIPFHAGGXYMALPSQNHSHLFNSALQLSGSKHESLFSGKVGQFTAGSHLNYQMQNPWVNQSGLYSGDHPNLLSNMLQQQLHHRSGSLSPHLLTQLQQQQHRLHHPILQSGSYMSGFQSHLINPQLSSGSSMVSKYEHMLGLADVREPRPKSTHKGKQSHRVFQQGSDASSQKNESGSLHFRSKYMTSDEIESILKMQLAVTHCNDPYVDDYYHLACLSKKTGAKLKKSFCPTQIKELPSRARSNTDSHGFLQVDALGRVSFLAIRRPHALLEVDPSNSGISERNISEKALEQEPLFAARVTIEDGLCLVLDVEDIDRFLQCNQLQDGGTQLRRRRKVLLEGLATSLQLVDPLGKNGHKVGFGAKDDVVFLRLVSIAKGRKLLAKYLQLLVPGSELMRIVCMAIFRHXRLLLGGLPSDPAAAETTSDLAKVVCQCVLRMDLGALGACIASVEXSYEQPPLLLXSTARDGACGILISVLERATGLLTDPYGAWELIVRNLFCFGKP

SEQ ID NO: 209542 - protein, 47 aa, Glycine max
  Clone ID: PAT_MRT3847_31243C.1.pep
YYMVEELNGSKNKGMEICMDVRFFFNVSLNILYFFFDKICFLDYFFF

SEQ ID NO: 209543 - protein, 130 aa, Glycine max
  unsure (1)..(130): unsure at all Xaa locations
  Clone ID: PAT_MRT3847_31244C.1.pep
VHRGQNGQPGQSAPPASPGRPGPQGPPGPDGQPGNPGESGQPGQPGKLTQAPPSLGPPGPAGPPGQPGQPGENGQPGQPGNPGPQGYPGDGGSPGQPGNPGGSGEPGQPGAQGSSGQCYHCPPPRTXPGY

SEQ ID NO: 209544 - protein, 134 aa, Glycine max
  Clone ID: PAT_MRT3847_31245C.1.pep
KLFQGGSVSSICCPCFLIKRALLAPFAFDENSDFDVLGHPLFNLKYYLLGEIVPSGGGLFILGKLPPRGVFVQDPPPKRVGRFKSLLKPAIFPFFVLSKDMRGGKTVLENQNFICSTKAVYFFKKIYFFLPFLG

SEQ ID NO: 209545 - protein, 140 aa, Glycine max
  unsure (1)..(140): unsure at all Xaa locations
  Clone ID: PAT_MRT3847_31246C.1.pep
PFGQVFGPFGGLVFVKIPPGHRCGFVQFWGRNCGEKALGVFYGPLFGGQNVWVFWGGGPLNKRGLPDANPWNGGGGGYSGFGPGGFXNFGFAPAGRGPHLFGGFFGGGDFPPPPPPREIGFCLEVGAPFFPFFLGRVWFC

SEQ ID NO: 209546 - protein, 540 aa, Glycine max
  Clone ID: PAT_MRT3847_31247C.1.pep
MEEHASHVGRSLVKQLACCKRTTRDKSLRLLLKSWLPSQSQPLSDDDAKKLWKGLFYCMWHSDKPLVQSDLVDRLSSLLLSLHLSVSLQYFSTFLLTMRREWSGIDALRLDKFYLLIRRFVSKFFSLMKTNSWDLQLVHRLINVLDENTLSSLENKSHGNGVNYHIATVFLEELRPFLPLKQEVLEVLLKPFVSAMGKVQDKVLVGKIRSGVFDLLLKTGKSLLEVKKSGDGVEVDSRDEVLLIGTVALVMGFSGRLYEVGSSAQCIQGNRKVLFALHSEFLKLEREAANSGFEVVIPDVVVDHDEEEVPELVPLGPAGNGEVLKKCEKDKNVPVEGGKSKKKKKKNKKGDAAAAQDSSDKENVASENGGNLNDESAVLLNETMIANLQRQFEKVAEEAGLDDGVASACDSPQAVSASGRTLSKKRKRTKSLKGKVSQDSAELDGEESAVAKGGEKSKKKVRFSMKNNLVWKPQNPLPPQSLRLPPSATPRGSALKKGLPPGPIREMPLPTKKPKLKRARKSIKGVAPVKRLKKLKSRAA

SEQ ID NO: 209547 - protein, 44 aa, Glycine max
  Clone ID: PAT_MRT3847_31248C.1.pep
TFPRSLIRKLWMISPACHPGCSTKGLGSKGAVAPVGLSGFYVIL

SEQ ID NO: 209548 - protein, 116 aa, Glycine max
  unsure (1)..(116): unsure at all Xaa locations
  Clone ID: PAT_MRT3847_31249C.1.pep
VALDRDTRXEFMLCRIAKWVPXXXXLFIASNERTPGFFSPLSARYRLAYSSNYSHILDPLIENNYQLFMIERLIMMGGKTFIRTFKEDETDLSLTDDPKKNTKLWQIPVYNVDETC

SEQ ID NO: 209549 - protein, 248 aa, Glycine max
  Clone ID: PAT_MRT3847_3124C.1.pep
MTDVVLHIYDVTNSGSEKTNSTIVQINKIFKDGIGLGGIFHSAVQVFGDDEWSFGFCEQGTGVFSCPSGKNPMYTYRESIVLGKTNFSIFKLNQILRELSREWPGSSYDLLSKNCNHFCDEFCERLGVPKLPGWVNRFANAGDTAMEVAGNTALRFRQAKTEIVSASKVAYRFLLGVTNNVTNNVKNGPETPNNSNRGGSPRLQGSWLKNIITNGAKPSTSSEAENQNGVMPLPPTREDDQALLHSSS

SEQ ID NO: 209550 - protein, 106 aa, Glycine max
  Clone ID: PAT_MRT3847_31250C.1.pep
PRVRAAVSLISLLDKAESVVPREFRPKTPVRVGATAGLRALEGDASGRILQAVRDLLKQRSTLKSEPDAVTVLDGTQEGAFQWVTINYLLGKLGKDFSETVGVVDL

SEQ ID NO: 209551 - protein, 71 aa, Glycine max
  Clone ID: PAT_MRT3847_31251C.1.pep
QGNQLGSTLVNDLQEQEEKLKQYMEQLENAEAARDSLLSQLKHALQEQESRQELVHTQLLVARSQIKKVVG

SEQ ID NO: 209552 - protein, 50 aa, Glycine max
  unsure (1)..(50): unsure at all Xaa locations
  Clone ID: PAT_MRT3847_31252C.1.pep
MDRLKSSPQLMIVTDLDHTMADHHDSEIGPLFTINAHXEAHYRQDTVLGV

SEQ ID NO: 209553 - protein, 81 aa, Glycine max
  Clone ID: PAT_MRT3847_31253C.1.pep
DDVKSNLLSLPHNHLSALAQANIHSHIQNIKSNLTLDGTFILTVPTTLHAILIVWSTRTGKYDFSVTTANFIDDTLKCTIS

SEQ ID NO: 209554 - protein, 68 aa, Glycine max
  Clone ID: PAT_MRT3847_31254C.1.pep
QIQTQTSSSKKGINAHHAIPVANDGAPPGDSLLAVAVGSRCRRETGGSGARMNPELNASNSYLRARQG

SEQ ID NO: 209555 - protein, 45 aa, Glycine max
  Clone ID: PAT_MRT3847_31255C.1.pep
KLFIGSSAYVIDTKQVKLGMRVLHVIQQISLSILHQLINLDPRIR

SEQ ID NO: 209556 - protein, 100 aa, Glycine max
  Clone ID: PAT_MRT3847_31256C.1.pep
VFVGPCFVAECAYKIWWYASGASQIPFLGNVYVSDAVACILELWSWLYRTTVIFLVCVLFRWICHLQILPLRGLARCLHVGLRVEMVMTEHIRIRRHMRI

SEQ ID NO: 209557 - protein, 145 aa, Glycine max
  Clone ID: PAT_MRT3847_31257C.1.pep
MGSLMAGWYSTHMDPQSATLKRNRSLTKDEIDAYWKSKKKIEEEHLRAISNVSETIQASKNTEPEKKLQKSMTMPVTRARDYLNMVDIDTSLEQLIKRNGWWTKSSWAFLNEPPVTEAASNKYASQFHVASMRSSKFNPRDGISA

SEQ ID NO: 209558 - protein, 145 aa, Glycine max; identical to SEQ ID NO: 209557
  Clone ID: PAT_MRT3847_31258C.1.pep

SEQ ID NO: 209559 - protein, 441 aa, Glycine max
  Clone ID: PAT_MRT3847_31259C.1.pep
MTVASAASSRTKRLVKLTLSLLRLGFNSSKCKTAAKMAVARIKLLRNKREVVVRQMRRDIALLLQSGQDATARIRVEHVMREQNVLAANEFIELFCELVVARLPIISKQRECPADLKEGIASLIFAAPRCSEIPELVALKNIFDKKYGKDFVSAAVDLRPSCGVNRQLIEKLSVRTPPGEVKLKVLKEIAKEHQIDWDTTESETELLKPPEELIVGPRAFVSASSLPVKHSSNVSVESNQPATRLSGGGRTEAVYYEDSKSAAEAAAEAAKKAIAAAEVAAYMAMKESIEAPQPYAYNDKLYNSGVNSGTFQSNNPAKCGLNMTPKSTTEEKMYRSQSVPRSDHLNSEDTLPDQYGGNDYRRHSYHPTSAHSDIKFDESSCDEEIEAEEPPPVTMPPNRLPPPVPSSMAKQESHIRVHPKLPDYDELAARFDALKFKKSQS

SEQ ID NO: 209560 - protein, 89 aa, Glycine max
  Clone ID: PAT_MRT3847_3125C.1.pep
LEKLNPINYNDATQRRRWERPLRRSRVSAEQKESEAVAASTGALPLLQTAFSKLANPETNAVSLENIQQCFSFGREGRTFSGSNVPDSF

SEQ ID NO: 209561 - protein, 137 aa, Glycine max
  Clone ID: PAT_MRT3847_31260C.1.pep
MGSLMAGWDSTHIDPQSATLKRNRSLTKDEIDAYWKSKKKIEEEHLRAISNLSETIQASKSTEPEKKLQKSMTMPVTRARDYLNMGIDTSLEHLIKKNGWWTKSSWAFLNEPPVTEAVSNKYKSQFHVTSMGSSIKI

SEQ ID NO: 209562 - protein, 216 aa, Glycine max
  unsure (1)..(216): unsure at all Xaa locations
  Clone ID: PAT_MRT3847_31261C.1.pep
MTVASTKRLFKITLSLLRLGFNSSKCKTAAKMAVARIKLLRNKREVVVRQMRRDIALLLQSGQDATARIRVEHVMREQNVLAANEFIELFCELVVARLAIISKQKECPADLKEGIASLIFAAPRCSEIPELVALKNIFEKKYGKDFVSAAGDLRPSCGVNRQLIEKLSVRTPPGGVKLKVLKEIAKEHHMDWDTTDCEXELLKPPEGPNSKGHSAF

SEQ ID NO: 209563 - protein, 691 aa, Glycine max
  unsure (1)..(691): unsure at all Xaa locations
  Clone ID: PAT_MRT3847_31262C.1.pep
MHAVSAKVRSHILTTFPLPMLLSFHHKPLIKPILTFSLQKPWIHRKPLLPTSSDDAPNXTLRKTLVLVXAGLFLLSSLVAFGGYRASNAPHADVSSPTSNDEQXRSPTSVPSPKWXYPVSRGVSSGVSEKSSSXLFAVKDGASESFPWDNSMLSWQRTAFHFQPDKNWMNDPNGPMYYKGWYHLSFYQYNPNGAVWGDIVWGHAVSXRDMIHWLHPSXLAMVADQWYDMQGVWTGSATILPNGEIIMLYTGSTNESVQVQNLAYPADPSDPLLVDWIKYPGNPVLVPPPGIGTKDFRDPTTAWLTSEGKWRITIGSKLNKTGIALVYDTEDFKSYELKEGLLRAVDGTGMWECVDFFPVSKENENGLDTSINGAEVKHVMKVSLDDDRHDYYSIGTYDEKNVLFTPDDAKNDVGVGLRYDYGIFYASKTFYDQNKERRVLWGWIGESDSEYADVAKGWASVQSIPRTVELDRKTGSNLLQWPVAEVESLRLRSDEFKNLKAKPGSVVSIDIETATQLDIVAEFEIDKETLEKTPESNEEYTCGNSGGSKQRGALGPFGLLVLADEGLFEYTPQYFYVIKGSNGNLKTSFCADQSRSSQANDVRKQIVGSAVPVLKDEKFSLRILVDHSIVESFAQGGRTVVTSRVYPTKAIYGAARLFLFNNATEATVTASLKVWQMNSAFIRPFHPDQKS

SEQ ID NO: 209564 - protein, 73 aa, Glycine max
  Clone ID: PAT_MRT3847_31263C.1.pep
PILPFFSRGEGHFARFKTLNAPPFGAIPTTNNFLLRLGSPCDWAPFVFKGVFQGGFLGMVVFQKHPVIFFWSP

SEQ ID NO: 209565 - protein, 81 aa, Glycine max
  unsure (1)..(81): unsure at all Xaa locations
  Clone ID: PAT_MRT3847_31264C.1.pep
XGDNKLLIDAITAQMQRMLTEHTEELYGVIEQLDNQENGDDGRGRRRRWKNNAGDAREDRIEGVQLNRPPFQGKSAPEAYL

SEQ ID NO: 209566 - protein, 56 aa, Glycine max
  Clone ID: PAT_MRT3847_31265C.1.pep
PNFSPARCVSPAKGSKSPFINSSNLPQRGVGVSKVLTHFGGIERKEKFVPTLKTLD

SEQ ID NO: 209567 - protein, 91 aa, Glycine max
  unsure (1)..(91): unsure at all Xaa locations
  Clone ID: PAT_MRT3847_31266C.1.pep
ESLFSKGGIPCLEFELEHGLGYREHTRSPGXXDGRYWTMWKLPRFGSTDFFXVLKELQEAKTAYTNGFMGIIGKNNVRQVQCISFIEKKPP

SEQ ID NO: 209568 - protein, 188 aa, Glycine max
  Clone ID: PAT_MRT3847_31267C.1.pep
GSSARLKKSGSFPLASTSQMRNISSRSLKHKQNEIWAFPKGEKLHAGTQESNMLVSSSVKDTSYEKSMPLASDLGVDSAMKQKAIISSGPSQGSNHRGWNQVVLHQFKVIKQKIKHVLVEFRKSGYQTTSAEAIHRRASPEYSIIKNEEEISQSLEDGVVQQFKRSKSSNETRASDYDSNKHDARLMR

SEQ ID NO: 209569 - protein, 51 aa, Glycine max
  Clone ID: PAT_MRT3847_31268C.1.pep
FFGPNQGVEMAPAVVRKEAQAEAMRGPHPCLKTELKWVGPPSVVFSQPSDA

SEQ ID NO: 209570 - protein, 41 aa, Glycine max
  unsure (1)..(41): unsure at all Xaa locations
  Clone ID: PAT_MRT3847_31269C.1.pep
RRQDIYDQSNIFIRTSLVAHSLRLFQIQPNVRRRSXEIPAG

SEQ ID NO: 209571 - protein, 72 aa, Glycine max
  Clone ID: PAT_MRT3847_3126C.1.pep
VRNKVKITSGSLAFFISHLFLIGLMSLLVYYISELFCFGTSSFKSFILIIFVFEIYRFGSFFNFSLETLVFW

SEQ ID NO: 209572 - protein, 84 aa, Glycine max
  Clone ID: PAT_MRT3847_31270C.1.pep
QLHSPPSTTYTSELSLKDLCLAPHSTPTNYLHSTAECSSTAITQTYTFALAGSWHSAILDSVRPISSYHRSLPSASRRIGKEES

SEQ ID NO: 209573 - protein, 154 aa, Glycine max
  unsure (1)..(154): unsure at all Xaa locations
  Clone ID: PAT_MRT3847_31271C.1.pep
MESAALSRIGLAGLAVMGQNLALNIAEKGFPISVYNRTASKVDETVDRARNEGSLPLTGQYTPRDFVLSLQRPRSVIIPRXRAGAPVDQTIAAPLRPPRPRATASFDGGNEGGTKTTRAAGXALVADKGLLYLVGASPGGKNGPRHGPSLMPGG

SEQ ID NO: 209574 - protein, 287 aa, Glycine max
  Clone ID: PAT_MRT3847_31272C.1.pep
MHPAQIVLYGSTLCVMITVHFSMKLLAEHVLNWKKPKEQKAIVIIILMAPLYAVDSYVGLINFFGSEAFFTFLDSIKECYEALVIAKFLGLMYNYLNISLSKNIVPDEIKGREIHHSFPMTLFQPHTTRLDHKTLKLLKNWTWQFVVIRPVCSILMITLQYLDVYPTWVSWINTVILNISVSLALYSLVVFYHVFSKELEPHKPLAKFLCIKGIVFFCFWQGIVLDLLAALGIIRSRYSWLAVERIEEGYQNLLVCVEMVFFSIYQQYAYSAAPYKVNSAPSDKKSK

SEQ ID NO: 209575 - protein, 50 aa, Glycine max
  Clone ID: PAT_MRT3847_31273C.1.pep
EAKKPRQHLLAYSIMLCGGNDMTPLQIILSREMETNLALLCIQPLKKQGL

SEQ ID NO: 209576 - protein, 111 aa, Glycine max
  Clone ID: PAT_MRT3847_31274C.1.pep
CCLLQDRMIESFWHYILESRQFIFKSVALAYGIKYARISDIKPPLFRDSWANGPNKHMCVLVARFCASVHDQWNPASLDMLWPIQFPCDSPDKGFLRMILPLFQDRQYAPE

SEQ ID NO: 209577 - protein, 90 aa, Glycine max
  unsure (1)..(90): unsure at all Xaa locations
  Clone ID: PAT_MRT3847_31275C.1.pep
GDEELMRERTHXLLWALWCKRWQXCRXQIGWRVEWGIPSGFPVTGIXHSIFNEMLIIYSYEKLLRQAXKAPGLFYQSXKNFVSLCVCVEN

SEQ ID NO: 209578 - protein, 40 aa, Glycine max
  Clone ID: PAT_MRT3847_31276C.1.pep
IHFNCLSYNLIPEKAAAKLIITIYRMLPLWVDIFHNMIFN

SEQ ID NO: 209579 - protein, 37 aa, Glycine max
  Clone ID: PAT_MRT3847_31277C.1.pep
LGTAGEETRGHGNNNGIILSGEHDMSTVCSQDTPLRS

SEQ ID NO: 209580 - protein, 43 aa, Glycine max
  Clone ID: PAT_MRT3847_31278C.1.pep
MEISFDKKKKKKKKKKKKKKKKSKKKKKKKKKKNGRSKRFKLK

SEQ ID NO: 209581 - protein, 70 aa, Glycine max
  Clone ID: PAT_MRT3847_31279C.1.pep
LLSFLNLCIGLLSIMYCCLTELHVEEWQDNSISSLVLVVASLLSYIFLSIWWGGGGVYFYSSFYSVSFYL

SEQ ID NO: 209582 - protein, 245 aa, Glycine max
  Clone ID: PAT_MRT3847_3127C.1.pep
MTDVVLHIYDVTNSGSEKTNNTIVQINKIFKDGIGLGGIFHSAVQVFGDDEWSFGFCEQGTGVFSCPSGKNPMYTYRESIVLGKTNCSIFKLNQILRELSREWPGSSYDLLSKNCNHFCDEFCERLGVPKLPGWVNRFANAGDTAMEVAGNTALRFRQAKTEIVSASKVAYRFLLGVTNNVTNNVKNGPESPDNSNRGGSPRLQASWLKNIVTNGAKPSTSSEAENQNGVMPLPPTRDDKALLHS

SEQ ID NO: 209583 - protein, 40 aa, Glycine max
  Clone ID: PAT_MRT3847_31280C.1.pep
KKLIKVTYIVHVNDGQYVPMSSVREILISASARRNSGSWS

SEQ ID NO: 209584 - protein, 68 aa, Glycine max
  unsure (1)..(68): unsure at all Xaa locations
  Clone ID: PAT_MRT3847_31281C.1.pep
WIQRERGAXWEPISEVNGLWLCPHFLXPRRQSHILSSIQADNWFPSPSINQAMRFGLQHLPSWAXFGP

SEQ ID NO: 209585 - protein, 92 aa, Glycine max
  Clone ID: PAT_MRT3847_31282C.1.pep
GLTRCVSRVAARRVFKCKRVRAGACYDVVWSLGTSLKGGYIPSLVGRACLGPIAITLKGFRRLSNVCMFVSPSINFDVSTLKSFSLCSLKSS

SEQ ID NO: 209586 - protein, 520 aa, Glycine max
  Clone ID: PAT_MRT3847_31283C.1.pep
MAPPSSPPLVDNSDAERRLREAEERLRDAIEELQRRQRRAAAHAQQHRHVDSLPCDHGPDESCVAHAIGNLCQTFLLSYGVRVGIGILLRAFKLVRGQSYSSLLDLKQLVSEKDLIVREEACRIGLLFGGFTGSYHALRCLLRKLRKKETPANAVLAGSIAGFSIMALNDSNRRRTLALYLLARLAQCAYNSAKSKNKFHLWGSHWRHGDSLLFALACAQVMYAFVMRPESLPKSYQDFIQKTGPVAEPVYKAVRDSCRGHLVDVASLHAYLSRVGRSDYVKLEEFPSIIPCSIIQPATNSCLAHQGNATSLTFKKTFSFYFSLTFVPFVVLHLQKFTDAPFRTFWLAIKGAVRSTTFLSAFDGIFQGVICSHRKVFSRDHKLVYWIAGGIAALSVLLEKKARRGELALYVLPRAVDSLWYILVNRHLLPNIRNAEVFLFSLCMGGIMYYLEHEPETMAPFLRGLIRRFLASRISNPSPPNRTASYTYLQALDGITKPTLQEKRDTESSEKYNLESIPGL

SEQ ID NO: 209587 - protein, 121 aa, Glycine max
  Clone ID: PAT_MRT3847_31284C.1.pep
PCLPILTASRLWDMIMIYNHPLPLVRYHPGRLSLSLLFRTHFCRHVHFTLADDDKKAPEIGQPPLGPGKNPPLWRGDRKPPKKGWLEIKFFLPRTRGKLIQTTMGLKWHPQTTVPTRLIKS

SEQ ID NO: 209588 - protein, 88 aa, Glycine max
  unsure (1)..(88): unsure at all Xaa locations
  Clone ID: PAT_MRT3847_31285C.1.pep
KNSYLCLCLCLCQPCLRSILSQWLNPCXLXLPSLFYAKXKXLSLSIPTNXLNLQXPCSXSSLLPLTTKTTRXSSLLXFVAQTSGWAKE

SEQ ID NO: 209589 - protein, 184 aa, Glycine max
  Clone ID: PAT_MRT3847_31286C.1.pep
MVTKAMEVVKDLDVKRYMGRWYEIACFPSRFQPSDGTNTRATYTLRDDGTINVLNETWSGGKRGFIEGTAYKADPNSDEAKLKVKFWVPPFLPIIPVTGDYWLLYIDQDYHYAVIGQPSRNYLWILSRKNHMDEETYNQLVERAKDEGYDVSKLHKTPHSDSPPEEEGPQDTKGVWWIKSLLGK

SEQ ID NO: 209590 - protein, 143 aa, Glycine max
  Clone ID: PAT_MRT3847_31287C.1.pep
QLLSHFSQLLYTRDLFPFSAFQWTLLLVAPYLVPCSSDLFLCFPVFLFLPTTVAPITTSVGDPTISITIHQSIRWWSRCHERSSDTPAHALSLPAKQQPHVTVLQCLTVPLSAYFHLPRRPFLLHLPLQFQAIPTSFDMVSLL

SEQ ID NO: 209591 - protein, 100 aa, Glycine max
  Clone ID: PAT_MRT3847_31288C.1.pep
HGIQDSYLSQRGKHCRIYEKRIIHQLKRTRTLDGIELSTWIATTVRQIGLNPCWLLMPDLEQADLDLDSSHSQAARKTAYVYIDCSLYERMSETEIHAAA

SEQ ID NO: 209592 - protein, 62 aa, Glycine max
  Clone ID: PAT_MRT3847_31289C.1.pep
EYGEKTTDGAPKLCSITTLRPYKNTNLTITIVINTNQNEGTTIDMFQAWIQKTFSPLRQPNK

SEQ ID NO: 209593 - protein, 179 aa, Glycine max
  Clone ID: PAT_MRT3847_31290C.1.pep
MGINTRTLEITVISGENLRVTEDAYVVVRAESLNCCTTRTAKDDGTKLLSWNEKFLLDMPMHARSITFEVQCNRFKGFRPLGVARIAASDFLGGAVPENGLQVLSYGLRDWEGRRNGVIHFAVRVAATSSSTEECLNSKPAVEPVVPRKGCGDRINVGGNKSNEVAVGVPIWWNYPNII

SEQ ID NO: 209594 - protein, 82 aa, Glycine max
  Clone ID: PAT_MRT3847_31291C.1.pep
RARMFFDEAQKGVPELNEAIKWPVWAFLLLYPQILAQIEANDSNNFPKRAYVSKAKKFLSLPAAYARSMVPPSKKLFFVMKP

SEQ ID NO: 209595 - protein, 230 aa, Glycine max
  Clone ID: PAT_MRT3847_31292C.1.pep
PPTRPRNFEGDTWRETWQENLHQDEWSNIARIERSAQKQAKSGTENAGWYEKWWEKYDAKGWTEKGAHKYGRLNEQSWWEKWGEHYDGRGSVLKWTVKWAETELGTKWGDKWEERFFKGIGSRHGETWHVSPSSERWSRTWGEEHFGNGKVHKYGNSTTGESWDIVVDEETYYEAEPHYGWADVVGDSTQLLSIEPRERPPGVFPNLDFGSPPSPEAHDDSPDEDFPSSQ

SEQ ID NO: 209596 - protein, 53 aa, Glycine max
  unsure (1)..(53): unsure at all Xaa locations
  Clone ID: PAT_MRT3847_31293C.1.pep
XXTHFIXRXXRKTLKSXTPLQTKXLRLCDLGLEWSNLKLKKHHNSHYLTKAKG

SEQ ID NO: 209597 - protein, 109 aa, Glycine max
  Clone ID: PAT_MRT3847_31294C.1.pep
ESELEEESELAYGEYLLLTSLYSLSNQILILCFFWAHKIASLHNILLGAGRQTATLYQTNRSFDQHRSFFVPSVEASPSYLMHTYIYIHYMKNRPADTQKMTTKPRKHL

SEQ ID NO: 209598 - protein, 42 aa, Glycine max
  unsure (1)..(42): unsure at all Xaa locations
  Clone ID: PAT_MRT3847_31295C.1.pep
RNSRVDPRVRPRXRARYSFVQIYIKEASTEAVTFFSQMSIKF

SEQ ID NO: 209599 - protein, 84 aa, Glycine max
  Clone ID: PAT_MRT3847_31296C.1.pep
VHCHSQRFISQIPSAVPFSVRLPPPPPVLLFLCSSADLTPSPPFGPQLFLISAILCLFLLLSASSSAVILQLLLSVFCLRLQFI

SEQ ID NO: 209600 - protein, 37 aa, Glycine max
  Clone ID: PAT_MRT3847_31297C.1.pep
NMPIVYSSVRTPLSDIGHPMYLYVQLVHSLYVVKVIA

SEQ ID NO: 209601 - protein, 330 aa, Glycine max
  unsure (1)..(330): unsure at all Xaa locations
  Clone ID: PAT_MRT3847_31298C.1.pep
MAPPYPSLLILLFLLTSQVTCYGSEKEKSKTFIIQVQHEAKPSIFPTHKHWYDSSLSSISTTASVIHTYHTVFHGFSAKLSPSEAQKLQSLAHVITLIPEQLRSPHTTRSPEFLGLTTADRTGLLHETDFGSDLVIGVIDTGIWPERQSFNDRGLGPVPSKWKGKCVAGENFPASSCNRKLIGARWFSGGYEATHGKMNETTEFRSPRDSDGHGTHTASIAAGRYVSQASTLGYAKGVAAGMAPKARLAVYKVCWSDGCYDSDILAAFDAAVSDGVDVASLSVGGVVVPYHLDVIAIGALSPXSPGXYVSASAGHGGPGGLTVTNVAPWV

SEQ ID NO: 209602 - protein, 127 aa, Glycine max
  Clone ID: PAT_MRT3847_31299C.1.pep
ITPNESESECTLRDDGSVTDAFIAGAGIFNSEDMFLAVEEVMPGTKVEQIKIVEKDVYRSLSQLLNDKFCQDQGHSLNEMVQDVRNKHTDSTSPTLHQIESVNLSVPEVVLNIMNEDQTLHSEMEIL

SEQ ID NO: 209603 - protein, 43 aa, Glycine max
  Clone ID: PAT_MRT3847_3129C.1.pep
GGKKKGGFQKKKPFAPVLLNFPWQRGPQTPFETGIPLGPPMNS

SEQ ID NO: 209604 - protein, 94 aa, Glycine max
  Clone ID: PAT_MRT3847_312C.1.pep
SRVSILRTFIPSYCRRGVGYGRQLLRKWPVKRTPYAVSHKRKWRRNSISRNRKRKTFRNRCVTLYRVCQGARGNPQSLTLFFPHCRKFLPDDPT

SEQ ID NO: 209605 - protein, 62 aa, Glycine max
  Clone ID: PAT_MRT3847_31300C.1.pep
GYMLKYEKCLSEDHEELYGELKNVYVQFESVNNTAFVIICFFLKKNVSEWLIIIGCMRGSAR

SEQ ID NO: 209606 - protein, 296 aa, Glycine max
  Clone ID: PAT_MRT3847_31301C.1.pep
MNLSANETLFLSVDKIKFLTYNVCIVVPPNIVSDGLWGGQLNGRTPLKSSLPLFELQVLVIFSITQICQFLLKSFDFPQFIPQMITISGPTYGVMMINIMVIASIVKWSVKLIYDPSRKYAGYPKRNIASLKPDSELRVVACLHKTHHASAKTPTVDAMHLIELVVAMIFLGGNDDREALCLAKRVTRNPRVNLVVYHLVPKEQTPDVEYIQDKEALKHVMKPHLGNRHFFFGKIVNEHHYFIVGRRHELDSPQTVGLTTWSEFSEFGVIGDLLASSDFQSRACVLVVQQQVKETS

SEQ ID NO: 209607 - protein, 150 aa, Glycine max
  unsure (1)..(150): unsure at all Xaa locations
  Clone ID: PAT_MRT3847_31302C.1.pep
LKPTLNTKPLNITVSSLCKAKQIPKAKTAIVDGIRLGLLPDAVTYNPLIDAYCRFATLDVAYSVLAPMHDAGIPHDIVSFNMLISGAVRKSLFSKSLDLFDEMLNRGIWPDAWSHTILMHCLFXLGKPDEANHVFKEIVLRGEVHATTYN

SEQ ID NO: 209608 - protein, 84 aa, Glycine max
  unsure (1)..(84): unsure at all Xaa locations
  Clone ID: PAT_MRT3847_31303C.1.pep
MQIFWKNRTGKSITLAVASSDTXESVSAPMENSAGFPPAEERHIIAGNQHNDXRMRSDNNSQHRWRLQLVRRHRSCTQILVLSH

SEQ ID NO: 209609 - protein, 67 aa, Glycine max
  Clone ID: PAT_MRT3847_31304C.1.pep
VGVFFSGFFFWGKTKKSLLAAPQNLFSRNPSFSQTQINKTGFFCVKIKTLKRGGPIVYQLPYLIFNI

SEQ ID NO: 209610 - protein, 54 aa, Glycine max
  Clone ID: PAT_MRT3847_31305C.1.pep
KCKGFIANFLLTRVVFHFWKRGLNQGNLEREHKISFAQGHRNWPGQNSWVMAQP

SEQ ID NO: 209611 - protein, 57 aa, Glycine max
  Clone ID: PAT_MRT3847_31306C.1.pep
NKSFRIKGQNLEIVPPFFLFSQSPLSPCTIKSLFKKTKNMPGAQTLPNVIRGWHNQF

SEQ ID NO: 209612 - protein, 89 aa, Glycine max
  Clone ID: PAT_MRT3847_31307C.1.pep
RGGLPVNCPTMSFPHNFHITLPHTSPTYTAKYFISTYRLLNSMRMFFDMNCYTNPYFYPPLYTIFIMTFFFSPNFSLSNNNLCYFNLSF

SEQ ID NO: 209613 - protein, 64 aa, Glycine max
  Clone ID: PAT_MRT3847_31308C.1.pep
SNGVVGVGVVMVLVDAGAAKYAAMHRFELIEGFSYMVVLTLTAVLIAGNACSVDYEAPAGSLRT

SEQ ID NO: 209614 - protein, 87 aa, Glycine max
  unsure (1)..(87): unsure at all Xaa locations
  Clone ID: PAT_MRT3847_31309C.1.pep
KFAGGYAAGNYSYQWGXGLFAKAFFAIXEAGMDKDKAVKKNWGKFPETHLGFGGGQPPLKGFVPIRGGEPTPKALVRAQGLLPDSAL

SEQ ID NO: 209615 - protein, 83 aa, Glycine max
  Clone ID: PAT_MRT3847_3130C.1.pep
QRTKGVTNELIPLIATDVMLCNVWLDPIKPVSDKRRADRTAAGMDLWCYKHLVGALLPTPFFFWSSSLLYWNVSKIQLVGASP

SEQ ID NO: 209616 - protein, 221 aa, Glycine max
  Clone ID: PAT_MRT3847_31310C.1.pep
MKVVYFLVAILALTSTVVSAYDPSPLQDFCVAAKEKDGVFVNGKFCKDPKLVKAEDFFKHVEPANTANPLGSQVTPVFVDQLPGLNTLGISLARIDYAPKGLNPPHTHPRGTEILIVLEGTLYVGFVTSNQDGNRLFTKVLNKGDVFVFPIGLIHFQLNVGYGNAVAIAGLSSQNPGTITIANALFKANPPISPEVLTKAFQVDKSTIDYLQKQSWYDNNN

SEQ ID NO: 209617 - protein, 50 aa, Glycine max
  Clone ID: PAT_MRT3847_31311C.1.pep
FVLVNICQVLSFYNARLLSCQCSSLIITVCCLKKKKKKKKKKGRQGVTSA

SEQ ID NO: 209618 - protein, 146 aa, Glycine max
  unsure (1)..(146): unsure at all Xaa locations
  Clone ID: PAT_MRT3847_31312C.1.pep
MGDPCFFVVLSSLLLLIVSTQTSSGQLTRGFYLNTCPNVEQLVRSAVEQKFQQTFVTAPATLRLFFHDCFVRGCDASIXLASPNNKAEKDHPDDISLAGDGFDTVAKAKAAVDSDPQCRNKVSCADILALATRDVINLAGGPFYEV

SEQ ID NO: 209619 - protein, 62 aa, Glycine max
  Clone ID: PAT_MRT3847_31313C.1.pep
VYCKPGEAFNQVVEVNVKVEKPGDNNVHNNAFYAEEKLLKSEMEAMRDCDPLSARHWIVSSY

SEQ ID NO: 209620 - protein, 93 aa, Glycine max
  Clone ID: PAT_MRT3847_31314C.1.pep
RLREDDRRGSIVETSQVGRKGEMPKQTIQRWERCISASRRRGDGHTKRKKHLFGKWVRSMSSSTIQSNDNRTTWDSVPKERVECVVIGSCVVG

SEQ ID NO: 209621 - protein, 44 aa, Glycine max
  Clone ID: PAT_MRT3847_31315C.1.pep
LGKHFFFNYFPLYRYLIQTGCFRTSTIYSAIKPYLPVHGVLHPT

SEQ ID NO: 209622 - protein, 59 aa, Glycine max
  Clone ID: PAT_MRT3847_31316C.1.pep
KKNPVDKKKQWCPLVGNSSASEPLEPAVPDKANLHDIYHPHFSLPTNICGHRHYTNLGC

SEQ ID NO: 209623 - protein, 53 aa, Glycine max
  Clone ID: PAT_MRT3847_31317C.1.pep
DHASDHAFAHAFEKKDHLVRMMCCSKWELPIWSEEELRVFYPEGNHWGARNYN

SEQ ID NO: 209624 - protein, 39 aa, Glycine max
  Clone ID: PAT_MRT3847_31318C.1.pep
AENSYTAPRQLTMPDDGCKKRISRCHRQQRVDKIIDQDE

SEQ ID NO: 209625 - protein, 66 aa, Glycine max
  Clone ID: PAT_MRT3847_31319C.1.pep
DLFIIELSTCLLWIRNTRSLYFCVTKPTYEKLCLTVFSTRCAIRKPIGMIIDHRRSGTYSSKLYAI

SEQ ID NO: 209626 - protein, 41 aa, Glycine max
  Clone ID: PAT_MRT3847_3131C.1.pep
HTKKPHHANTISFVIHKQGNPRHLDLAPLQILRKDKPRNLT

SEQ ID NO: 209627 - protein, 124 aa, Glycine max
  unsure (1)..(124): unsure at all Xaa locations
  Clone ID: PAT_MRT3847_31320C.1.pep
DARPVVPTTGGVNKPRRGRTGSVAVSEIMQYHKSTELLIRKLXRYRQVQETVLHLKTDLLFQSXSAVLALDDNCHAYRDRLSEDANVCAIHPKWGTWMPIAVQVAKRIWGEPALNGGCETKYLE

SEQ ID NO: 209628 - protein, 342 aa, Glycine max
  Clone ID: PAT_MRT3847_31321C.1.pep
MARVGRMKLGSQGMEVSLQGLGCMGMSAFYGPPKPDPDMIALIHHAVQTGVTFLDTSDVYGPHTNELLLGKALKGGVRDEVELATKFGINVAEGKREIRGDPAYVRAACEGSLKRLGIDCIDLYYQHRIDTRVPIEITIGELKKLVEEGKIKYIGLSEASASTIRRAHAVHPITAVQLEWSLWSRDVEEEIVPTCRELGIGIVAYSPLGRGFLSSGPKLLENLTQDDFRQSLPRFQPENLEQNKTIFERVNELAAKKGCTPSQLALAWVHHQGKDVCPIPGTTKIENFNQNIGALSVKLTPEDMAELESFAAADAVKGGRYMDGFATWKESDTPPLSSWKAA

SEQ ID NO: 209629 - protein, 93 aa, Glycine max
  unsure (1)..(93): unsure at all Xaa locations
  Clone ID: PAT_MRT3847_31322C.1.pep
NFPDIGXMLLXPQSQGTTSQGAIXGXLDLLLFTXPESLSHVHLLFDDLGVPTRXPGXMDGFGVKHHITAGXXKAWESSVCGIPLEDPLVGIKC

SEQ ID NO: 209630 - protein, 158 aa, Glycine max
  unsure (1)..(158): unsure at all Xaa locations
  Clone ID: PAT_MRT3847_31323C.1.pep
NVPPGHGDLGKVSDNIPVVLYALEVYANFRQVEPYRVSVHPRQDFQSSKRSSKSNHNFESPFVXLGRETCTRCSLALSTKTLMXPPTVLLWSCAPQQHEDVFITSPSHPLPADNEWSFNSQPRVCGPGKLLARISVRANLSSAIVRVPFPVVDVVVSN

SEQ ID NO: 209631 - protein, 165 aa, Glycine max
  Clone ID: PAT_MRT3847_31324C.1.pep
MWASAAEGGAPEVTLETSMGSFTFELYYKHAPRTCRNFIELSRRGYYDNVKFHRIIKDFIVQGGDPTGTGRGGESIYGAKFEDEIKRELKHTGAGILSMANAGPNTNGSQFFITLAPCPSLDGKHTIFGRVCRGMEIMKRLGSIQTDNNDRPIHNVKILRTSVKD

SEQ ID NO: 209632 - protein, 102 aa, Glycine max
  Clone ID: PAT_MRT3847_31325C.1.pep
KRRKHLEASLALRFDVSRGIQPQYFKSAFVGYTVGLVLTIVVMNWFQAAQPALLYIVPSVIGFLAAHCLWNGDVKQLLEFDESKTANSPQESDDDKSSKKVE

SEQ ID NO: 209633 - protein, 99 aa, Glycine max
  Clone ID: PAT_MRT3847_31326C.1.pep
RKLKRKTDAEVAAMSQSDRSISKGTVMAQQDTHIGGAENDFERKPDSPPLPNKHPPTSSKRSGTKGEVGRSQTPNELQNMDKGRDSSRYSINVEKGKRI

SEQ ID NO: 209634 - protein, 80 aa, Glycine max
  Clone ID: PAT_MRT3847_31327C.1.pep
IECIYNFMAAAMRIDLCLLTFVTVRMIIGALSQLDIIQRWENSNGTDSLPFKKLLELETDRHFKLPKGVPFWIIDTEAEF

SEQ ID NO: 209635 - protein, 81 aa, Glycine max
  Clone ID: PAT_MRT3847_31328C.1.pep
PQYFKSAFVGYTVGLVLTIVVMNWFQAAQPALLYIVPSVIGFLAAHCLWNGDVKQLLEFDESKTANSPQESADDKSSKKVE

SEQ ID NO: 209636 - protein, 92 aa, Glycine max
  unsure (1)..(92): unsure at all Xaa locations
  Clone ID: PAT_MRT3847_31329C.1.pep
MLVYLDLLTGDELWSEYFRYTDIATGMLXDVDVKCVGNXALDADSGANPCADGGEHDGFYDPTVNVGDIVDTSXLQVQPVLAKRQIGTYMLR

SEQ ID NO: 209637 - protein, 48 aa, Glycine max
  Clone ID: PAT_MRT3847_3132C.1.pep
ARALTYGIILVQEQDIVKRVELGYKYLNEAELENANWDAIIRGTFYHF

SEQ ID NO: 209638 - protein, 39 aa, Glycine max
  Clone ID: PAT_MRT3847_31330C.1.pep
VVWNHNSSSTTHLIHRCLVGVDPHRKKRRREKKNKCLKL

SEQ ID NO: 209639 - protein, 71 aa, Glycine max
  unsure (1)..(71): unsure at all Xaa locations
  Clone ID: PAT_MRT3847_31331C.1.pep
MKSTIFFALFLFCAFTTSYLPSSIADFVLDYEGNPLENGGTYYILSYITXFGGIRAAPSVNERCPFTVVQF

SEQ ID NO: 209640 - protein, 69 aa, Glycine max
  Clone ID: PAT_MRT3847_31332C.1.pep
IPTYTTTLTPTLHPTMSLLLPATIQTPYTSILQNFNISIIYFYHSHLDDDLVMLHSTQASNKNTQLTYD

SEQ ID NO: 209641 - protein, 60 aa, Glycine max
  Clone ID: PAT_MRT3847_31333C.1.pep
STLALAKGGLFCLFVKAVQLVSAIVISWQLETKPIVILNQSMFVDGFINSPPNLPIVFLC

SEQ ID NO: 209642 - protein, 63 aa, Glycine max
  Clone ID: PAT_MRT3847_31334C.1.pep
VINSEGILPTPVPQLRILFHSLDNLPIYTIGPFKEILFQNYFGSQLNYNKAVPGIPSVVFSQP

SEQ ID NO: 209643 - protein, 121 aa, Glycine max
  Clone ID: PAT_MRT3847_31335C.1.pep
NSQNTQAGVFCWHGESSDPTNQIVPSDTSSLRDFGEVVSAEDGSFTIPGTGTQANFNNEGKPSNSFNSENLSPTPKATPYELTSHERDSALLRYREKKKTRRYLVFFVVTFSFFIKILLEI

SEQ ID NO: 209644 - protein, 83 aa, Glycine max
  Clone ID: PAT_MRT3847_31336C.1.pep
MSIVRQRNAGVAEKNQLLREAEEKELSEGERFIIPNFTVKQLLDAIPAHCYKRSALRSSTYIVQDCILVGALVYAAYQIDPFL

SEQ ID NO: 209645 - protein, 113 aa, Glycine max
  Clone ID: PAT_MRT3847_31337C.1.pep
QIQCTHDTLLRRHVVLQRVTFWWGYVYWQPPLYPLFYAPSFQWFGFPKVIRYRTRRSNSLKLNNFHKSIFSCWTIRIIFFFLCLQLFSLSSSSHQFTLNHQMLFARYSLLCLC

SEQ ID NO: 209646 - protein, 57 aa, Glycine max
  Clone ID: PAT_MRT3847_31338C.1.pep
HRMVDELGHHVLLIHGCISILLLPNNTLLPNILSAPKLLHLLYPADMLAYVPRLELH

SEQ ID NO: 209647 - protein, 73 aa, Glycine max
  unsure (1)..(73): unsure at all Xaa locations
  Clone ID: PAT_MRT3847_31339C.1.pep
PRVRRLREDDRREGIAINSLNKKRVYYIMIYVGLAMIPRIIISSVXGKRNSSDYKQSLYDVXXXXVRRKLVEK

SEQ ID NO: 209648 - protein, 48 aa, Glycine max
  unsure (1)..(48): unsure at all Xaa locations
  Clone ID: PAT_MRT3847_3133C.1.pep
KFHTGFTLYVRSRLRGGGGDCGATSAEFRDCYLNMCADKKPDXVDPNE

SEQ ID NO: 209649 - protein, 91 aa, Glycine max
  Clone ID: PAT_MRT3847_31340C.1.pep
CRTLKPETGGVVTRFQGFLNLSLLLCVRLLKGKKITLCAGHTLRESLSFPLLDYLLNTLLFDIGLRVRFKLFLFLSQLSDQFQVQAGEILD

SEQ ID NO: 209650 - protein, 78 aa, Glycine max
  Clone ID: PAT_MRT3847_31341C.1.pep
LLDIVKIGFSSLQNPRKIGSHSPLPQLSLMTSKVSSICYRFGSVDHNAGYDIFTFIRETIILVSAIHCYASPSDRYLA

SEQ ID NO: 209651 - protein, 189 aa, Glycine max
  unsure (1)..(189): unsure at all Xaa locations
  Clone ID: PAT_MRT3847_31342C.1.pep
MGLKIFMASFMMTSILFFLLFIPTRLTVQFSTLRPPVNYFSVPPKSSKAYPVTFAYLISASKGDVVKLKRLMKVLYHPGNYYLIHVDYGAPQAEHRAVAEFVASDPVFGQVGNVWVVGKPNLVTYRGPTMLATTLHAMAMLLRTCQWDWFINLSASDYPLVTQDGXDLIQAFSGLPRSTNFIQHSSQLG

SEQ ID NO: 209652 - protein, 50 aa, Glycine max
  Clone ID: PAT_MRT3847_31343C.1.pep
AIIIKIKKRIEDIAENNNELCKRKKSKYVKFELTFMSLNIVENIHNVIII

SEQ ID NO: 209653 - protein, 51 aa, Glycine max
  Clone ID: PAT_MRT3847_31344C.1.pep
LLHQRFRYLATLHPGHLCSRWHISLNAFSPSSYKGLYRNLWLEICFNFPFW

SEQ ID NO: 209654 - protein, 52 aa, Glycine max
  Clone ID: PAT_MRT3847_31345C.1.pep
LAYMFWVLGYKLNEAHTLLQSKRSCFPKLDAIKSATADILTGLSKKSVTLSW

SEQ ID NO: 209655 - protein, 76 aa, Glycine max
  unsure (1)..(76): unsure at all Xaa locations
  Clone ID: PAT_MRT3847_31346C.1.pep
VFKFPGPPTSPNPDRFFMFPIQYPQISEMYIKXLSLFXTADDVDLSQDLLHCDSLTDRNRHFITHILTFFSPFDGI

SEQ ID NO: 209656 - protein, 91 aa, Glycine max
  Clone ID: PAT_MRT3847_31347C.1.pep
ILAFESAACLILCIEWHWSICAIVETLAFRAPSLRNMAIHQLRELFYDAPKFNSRYAFPSVTRSAYRFPKSFQAASACGDQPLALTSRDPH

SEQ ID NO: 209657 - protein, 77 aa, Glycine max
  Clone ID: PAT_MRT3847_31348C.1.pep
MASNREREESLTFTIPSSSSHSSPITVSDQLDSYLADPRSASGSFQNDGLLSSGDASAADPDFGFSRPDFRQSPLVG

SEQ ID NO: 209658 - protein, 72 aa, Glycine max
  Clone ID: PAT_MRT3847_31349C.1.pep
LSPPPPAESEKESGASVEKLPLESKVKEREEQKLRMKLAKKIRLRRKRLLRKRKLRKKGRWPPSKMKKLKNV

SEQ ID NO: 209659 - protein, 133 aa, Glycine max
  unsure (1)..(133): unsure at all Xaa locations
  Clone ID: PAT_MRT3847_3134C.1.pep
XXEEEGREXKXKGGGXXKXEREEEXXEGKEXXXXXKXEXXFFFLLXXKILEGLVFRSSMEEEGDXDEEVIDGXXEVIECIDREELXKFFXXKNDGEDEEXEKXXKXMEXXXDXLXEGXVXKGVGXGEIGWLEG

SEQ ID NO: 209660 - protein, 147 aa, Glycine max
  Clone ID: PAT_MRT3847_31350C.1.pep
MALLSFNSFTLSPLHSPLLPSSSTFALPTTSASRANVILPPKPLNGVRISTPKRRTESVIVSAAAEDASSAVEGGSPPPPPAESEKESGASVEKLPLESKVKEREEQKLRMKLAKKIRLRRKRLLRKRKLRKKGRWPPSKMKKLKNV

SEQ ID NO: 209661 - protein, 67 aa, Glycine max
  Clone ID: PAT_MRT3847_31351C.1.pep
TYNWAHYRAIAQNPQVKLLPNLSRQEIIFFSKLNKLYSQTDDFQITIIPKINELGKSSEIKTFKIPS

SEQ ID NO: 209662 - protein, 337 aa, Glycine max
  unsure (1)..(337): unsure at all Xaa locations
  Clone ID: PAT_MRT3847_31352C.1.pep
MMKGLFKSKPRTPPDVVRQTRDLLLFVDRSPETRESKREEKMMSELFKNIRELKSILYGNSESEPVLRSXCRQLTQLFFKEDTLRLLIKCLPKLNLEARKDATQVVANLRKQHESMIMLSDYXRVNWXFMEFLLVVYDEPTHVILIRGGAVLVGNASEHQIVSKYVSSXLPKFLDYFFHPIQHPTFDTAANVTAILTRHKSTEAAFLSENYEWFYAEYNTKLLESSNYITRRQAVKLLGDMLLDRSNSAVMTRYVSSRDNLRILMNLLRESSKSIQIEAFHVFKLFAANQHKPADIVSIFVANKSKMLRLLEDFKIDKEDEQFEADKAQVMREIEAL

SEQ ID NO: 209663 - protein, 66 aa, Glycine max
  Clone ID: PAT_MRT3847_31353C.1.pep
DLMCSQIKWGFFCNFMPSKSEMCVFYCIIGWVFQVTQTGQSLFLKVILSSGDRFWFYPACLFRVRQ

SEQ ID NO: 209664 - protein, 104 aa, Glycine max
  Clone ID: PAT_MRT3847_31354C.1.pep
LGRWRRRAALGRAGRGVMEHCTGAVVVGLVVDSGGDACSDFDRGEGGRDGSVGCCLVSVLGESFSSAQLLSPDAEPALLAFMPSWVVRQREREGRWVIVNSPAR

SEQ ID NO: 209665 - protein, 84 aa, Glycine max
  Clone ID: PAT_MRT3847_31355C.1.pep
HSFSSKDNVNSFAMYQYIKIFPQKAIYEGLTRKPNAFRRKRIMAYSMRESTLHHRVFELFLCHHPILRTHESPFCSLYHPLSPR

SEQ ID NO: 209666 - protein, 51 aa, Glycine max
  Clone ID: PAT_MRT3847_31356C.1.pep
NFVCIFAILLYKIQHYECIYGLYGTKTIILESSIELSDHFFVLKLFVFFSS

SEQ ID NO: 209667 - protein, 366 aa, Glycine max
  Clone ID: PAT_MRT3847_31357C.1.pep
MSLHSQASVESSNWKYAPNIGSVRAAYWPAGDDLSPSSIDTKYFTHIYYAFIQQDPQLFHLSVTEFDEKWIPKFINGLRYRYPPVKTLLSIGGGGSNSTAFSLMASNKHTRQVFINSTIHVARQYGFNGLDLDWEFPDDEHDMSNLGVLFQEWHQALVVEAKISRKPRLLLTAAVYYASTIKLIGDGPRSYPAQAIRNYLDWASPMCFDYHGTWDNFTGFNAALYDPKSNISTQYGIGSWIESGVPTQKLVMGLPLYGRAWALRDPNVNGVEAEAVGKATDTDGTMDYDEILVFNKENGATVVYDDVAVAFYSYAGTTWIGYDDGPSIKKKVQFARFTGLKGYFFWAVGKDKDWTISRQASNAWRH

SEQ ID NO: 209668 - protein, 133 aa, Glycine max
  Clone ID: PAT_MRT3847_31358C.1.pep
QHAISSRQQGHLCNYSHFCQASPFQLHDCQTSPSQTSPSQFQTSPRQTSPFPFLTSPFQFHDCQTSPFQFQTSTRFKHDPLKLLCFTWINKSTNLYSEFGFWLPVINYTHIMLHYLLEMMFSFQCSNSSSPLN

SEQ ID NO: 209669 - protein, 54 aa, Glycine max
  unsure (1)..(54): unsure at all Xaa locations
  Clone ID: PAT_MRT3847_31359C.1.pep
ARNSARQISTFIQRXGVYYGQCSEICGTNHAFMPIVIEAVSTKDYGSWVSSQVN

SEQ ID NO: 209670 - protein, 54 aa, Glycine max
  unsure (1)..(54): unsure at all Xaa locations
  Clone ID: PAT_MRT3847_3135C.1.pep
XRPTQQNQSPGXSYCQIQMLLXFSCDNYDLKHNXLFTNVXRQXIYKYNFFSKHV

SEQ ID NO: 209671 - protein, 131 aa, Glycine max
  Clone ID: PAT_MRT3847_31360C.1.pep
MEDITEGVNNINISDSYKKNRIQVSNTKKPLFFYVNLAKRYMQQHDEVELSALGMAIATVVTVAEILKNNRLAVEKKIRTSTVDIKDDSRGRPVQKAKIEIVLGKTANFDELMAAAAAEDGENGDVEEQSA

SEQ ID NO: 209672 - protein, 35 aa, Glycine max
  Clone ID: PAT_MRT3847_31361C.1.pep
NKLSLYTVGLCVPTPLRVSATLSIGPEHTITLSVT

SEQ ID NO: 209673 - protein, 133 aa, Glycine max
  Clone ID: PAT_MRT3847_31362C.1.pep
MEGITEGVNNININISDSYKKNRIQVSNTKKPLFFYVNLAKRYMQQHDEVELSALGMAIATVVTVAEILKNNGLAVEKKITTSTVDIKDDSRGRPVQKAKIEIVLGKTENFDELMAAAAAEDGENRDVEEQSA

SEQ ID NO: 209674 - protein, 47 aa, Glycine max
  Clone ID: PAT_MRT3847_31363C.1.pep
VAFIITQLNKVHNYVIFVFLYHSIRDEPKETSLLNMSLKQKQWDLNL

SEQ ID NO: 209675 - protein, 44 aa, Glycine max
  Clone ID: PAT_MRT3847_31364C.1.pep
ALSVLACVSPSAGHRVSPILSFMSALPAVCASLWILKREAWPRG

SEQ ID NO: 209676 - protein, 123 aa, Glycine max
  Clone ID: PAT_MRT3847_31365C.1.pep
SRVMETALTCFFCGRLPPATASEHFRCNNASPSRHVHFSLPPSFVIGTHRLIRNATNTNETKVVSSTNVKSRRRRRRSGFVDKTCQTREVEEGILHQNGDPIGKKDLGKSVIRWIRDSMRAMA

SEQ ID NO: 209677 - protein, 179 aa, Glycine max
  Clone ID: PAT_MRT3847_31366C.1.pep
GKWIRVLQRAISKTLSRGHNSIVAPIKGVVVKEPEWMVAAAAAAAEKHNENLSVNLSSEGSLEDYDSMESQNLQWAQGKAGEDRVHVVVSEEHGWVFVGIYDGFSGPDAPDYLLSNLYTAVHKELKGLLWDDGSAPENSTIKEDMLRDVTTVQMLRLLMKMMLVLTVLSKIIMIIIVRV

SEQ ID NO: 209678 - protein, 77 aa, Glycine max
  Clone ID: PAT_MRT3847_31367C.1.pep
GGGGGGDWGGGRNPTNKKIFFKPLPGGFSPNHKCIIPHRRRTQFRWLLGVAFVSISDCKSIRNQVGLVRFLDALSHL

SEQ ID NO: 209679 - protein, 126 aa, Glycine max
  Clone ID: PAT_MRT3847_31368C.1.pep
MKYVFWMTGSYGSHPNTDFDPKALPNITGINYRDVIADNVTYSARLEGIANDPFTGICISNVTIHSGKKKPQWNCTDIEGVTSNVYPKPCELLPLKEKIECPYPDDKLPIESVQLKTCSFKSVSFF

SEQ ID NO: 209680 - protein, 39 aa, Glycine max
  Clone ID: PAT_MRT3847_31369C.1.pep
GAQKSLLIQFGELLNPGNNFLCFLTSFTYISFNPHGGFE

SEQ ID NO: 209681 - protein, 56 aa, Glycine max
  Clone ID: PAT_MRT3847_3136C.1.pep
ALDGDYDAASCITRNPILLERNILQLDAWRYTTNDIYPARGTVCQCYRSPGRSASA

SEQ ID NO: 209682 - protein, 109 aa, Glycine max
  unsure (1)..(109): unsure at all Xaa locations
  Clone ID: PAT_MRT3847_31370C.1.pep
RRYDGHTTVLCPEKHLDQVNYAGGTIKNTKTTIGMLSKKXIILVDEKKXRATLQTVGGVKKCTRIMSVVHILWRXIXGERDMLINTTRGQTRGWACSYQEPIPVERGVD

SEQ ID NO: 209683 - protein, 60 aa, Glycine max
  Clone ID: PAT_MRT3847_31371C.1.pep
DRHANVQVSFSEWHMEPMSKSPASCHAHIVEGHSVSERPSLVSVVMTHGFPFSNTHGSSW

SEQ ID NO: 209684 - protein, 77 aa, Glycine max
  unsure (1)..(77): unsure at all Xaa locations
  Clone ID: PAT_MRT3847_31372C.1.pep
ETRIWGYSTLIIVLMRFIGKTLILTSYIFNFAITFLDKSSRCFEVTLMXLGLLVLLLFSFLEIXXXFXVLXXVRGIS

SEQ ID NO: 209685 - protein, 362 aa, Glycine max
  Clone ID: PAT_MRT3847_31373C.1.pep
SCSSFGYGAMQELGPFRVNSDGKTLYRNQYAWNNVANVIFLESPAGVGFSYSNTSSDYTKTGDKSTAMDSYTFLLNWLERFPQYKTRDLFITGESYAGHYVPQLADTILTYNKLTNHTVINLKGIAVGNGWIDDNMCGKGMYEYFWTHALNSDETHEGIQRYCDFESGNLTSECSKYQIRGDIEIGTIDIYGIYAPPCDSAATKAGASPATNSDSNYDPCSDDYTNSYLNLAEVQEALHAKASVWYPCRGVGWTDSPATILPTINRLISSGINTWIYSGDTDGRVPITSSRYSINSMKLPVETTWRPWYSSNEVGGYLVGYKGLTLITVRGAGHMVPSYQPQRALTMISFFLRGELPPEFTS

SEQ ID NO: 209686 - protein, 86 aa, Glycine max
  Clone ID: PAT_MRT3847_31374C.1.pep
CSGDTNGRVPITSSRYSINSMKLPVETTWRPWYSSNEVGGYLVGYKGLTLITVRGAGHMVPSYQPQRALTMISFFLRGELPPEFTS

SEQ ID NO: 209687 - protein, 200 aa, Glycine max
  Clone ID: PAT_MRT3847_31375C.1.pep
TAARRRQKGVCKTEMSANQRSTAPPFKEEFATVLRMTHSLNDAQPVPATPASFCNPTNCNIGCDDVVQNQKNENETPPATQNSKPKRGRPFKTPPESIKNWYVIRKERKIANRFDTSYFHKETGFRCRSLKEIKNYEKYGSPPRRHKVKTQAKEESNDKTKNETEEMVVAQRKAKAEVMRTFVEKFLSKAYYNQLHMFDP

SEQ ID NO: 209688 - protein, 59 aa, Glycine max
  Clone ID: PAT_MRT3847_31376C.1.pep
QCRQTVCHYCPWLFDSDASLAHQVGATLPVSVSLCFLHSPACISGITVYPSQCGLQTII

SEQ ID NO: 209689 - protein, 53 aa, Glycine max
  Clone ID: PAT_MRT3847_31377C.1.pep
SELSHMTDKDARSYMGSNPLSLEQSSGKRTKLLNLLLRVLIQIHHLYKTTLHR

SEQ ID NO: 209690 - protein, 61 aa, Glycine max
  Clone ID: PAT_MRT3847_31378C.1.pep
FVLVNFTTNTVPQYVRIAPDWIFSQTLLIYDTRLQLTLYHFSPQEESTRGPFMQHHSDWPY

SEQ ID NO: 209691 - protein, 44 aa, Glycine max
  Clone ID: PAT_MRT3847_31379C.1.pep
PQEGPPFLSTQQNRKMIVSTVSQPSIKTCASSFVRDRSKADGIK

SEQ ID NO: 209692 - protein, 125 aa, Glycine max
  Clone ID: PAT_MRT3847_3137C.1.pep
MLQCIFLLSDSGEVMLEKQLSGHRVDRSICAWFWDQAISQPDSFKQQPVIASPTHYLFQVFREGITFLACTQVEMPPLMAIEFLCRVADVLNDYLGGLNEDLIKDNFVIVYELLDEMIDNGFPLT

SEQ ID NO: 209693 - protein, 282 aa, Glycine max
  Clone ID: PAT_MRT3847_31380C.1.pep
MGKKGGAKKLESASHTPISLREEATGKIQTKAASNTKSKLRFEHLKNLAVWATTIPSLGAFYGHQFATFGEATGIPPDPSLITCQRCETILQPGFNSTVRIEKNKSKVRHRHKKSCNITQNKVVYKCHFCLHQNLKRGTLKGHTAGFRPPRGVSLFVVTPPSISISSDSSKLEKAIVSKDVSNEIHLFPSRVVAKDITLVNGLATPSSTNTTTSLEGKKNRSELSYRHKKIKTINKYAKEVAKSSSTSSKRRRKSWTSLKEIAQSNEHKKKQIANLTIPFYL

SEQ ID NO: 209694 - protein, 77 aa, Glycine max
  Clone ID: PAT_MRT3847_31381C.1.pep
MFSSGIELNLLLLCPQTALLSPTASYVVVIASYPQEESSKSKKKKPTREERDRIPRTIKKEKREKRRKRSDFRSRRG

SEQ ID NO: 209695 - protein, 77 aa, Glycine max
  Clone ID: PAT_MRT3847_31382C.1.pep
FLAHSRHPFKRVRSYHGEWIPKKNRSHCGQLTLQSGHRELCSLRRPHSITKHATLGELTKKRHSCAPPTHRKSLVFN

SEQ ID NO: 209696 - protein, 237 aa, Glycine max
  unsure (1)..(237): unsure at all Xaa locations
  Clone ID: PAT_MRT3847_31383C.1.pep
MGKKGGAKKLESVSHTPISLREEATGKIQTKAASNTKSKLRFEHLKNLAVWATAIPSLGAFYGHQFAAFGEGHRNTTRSFFITGQRCETYSXPGLNSTVRDRRXIEKNQSKLRHRHKKSGNITQNKVVYKCHFCLHQNLKRGTPKGHIKGICPSKDKSSLESTPPSKSITSDSSKLEKGILSKDEANEINVFPLRDVANVDGLTTSSSTNTKTLSKKAIKTINKSAKQVAKSASSFN

SEQ ID NO: 209697 - protein, 149 aa, Glycine max
  Clone ID: PAT_MRT3847_31384C.1.pep
QVAMCWRNPSEALTARMDQIECGLRVIVPALSDRLKHAEDAFVGRVMGNWFRCRDHHHKGSGASSKVAVGADVKAHMEELVSVFLYANRLRRNVLVDILSATTVYQAALFLEGLAQFLIGFRDHELVNAVEHCKALPLANNKQCRPRCH

SEQ ID NO: 209698 - protein, 98 aa, Glycine max
  unsure (1)..(98): unsure at all Xaa locations
  Clone ID: PAT_MRT3847_31385C.1.pep
SKELFNVCRWTXWDPHLWALIFPIQVCGPKNGFRMWSYXWANPASRHWSFFIDHPKQSTVYDIVLGISQEFEIAGNTRRPAFYVPQVAARSLEMRQSY

SEQ ID NO: 209699 - protein, 66 aa, Glycine max
  unsure (1)..(66): unsure at all Xaa locations
  Clone ID: PAT_MRT3847_31386C.1.pep
PRRWWRVVVVFVAPAGVLRXAPAGVLPASPXSFLSXAXGPRRPSVAPAXXXARVPXAWVXRVFXGP

SEQ ID NO: 209700 - protein, 27 aa, Glycine max
  unsure (1)..(27): unsure at all Xaa locations
  Clone ID: PAT_MRT3847_31387C.1.pep
ALVQDPRTTLXGHLCWWPCLYKWLHFE

SEQ ID NO: 209701 - protein, 57 aa, Glycine max
  Clone ID: PAT_MRT3847_31388C.1.pep
LIPFYRFYYVLSNTQYTFDYESFNIYYVLLNKNIKFCYPSKSNVLSRCHESFFDILC

SEQ ID NO: 209702 - protein, 48 aa, Glycine max
  Clone ID: PAT_MRT3847_31389C.1.pep
KLKKKKPKINSLFPKIYLPKFCPSRKKEPENHLYFLSTITANCKHKIS

SEQ ID NO: 209703 - protein, 216 aa, Glycine max
  Clone ID: PAT_MRT3847_3138C.1.pep
AAYRGLAFMYDWFMEPLYSGTYPAVMVNRVGGRLPKFTKREYLMVKGSYDFIGLNYYTSTYATSSPCPRERPTAFTDACVRFTTVRNGLLIGPKAASDWLYVYPPGIQGLLEYTKEKFNNPIIYITENGIDEVNDGKMLLNDRTRIDYISHHLLYLQRAIRNGVRVKGYFAWSLLDNFEWNAGYSLRFGLVYVDYKNGLKRYRKRSALWFKIFLHQ

SEQ ID NO: 209704 - protein, 81 aa, Glycine max
  Clone ID: PAT_MRT3847_31390C.1.pep
IAKPTIVVITGTISPSSLGPISIGIATGPTTVIFSSATPSFTSAFVVPASPSAVLGPPALGGRGAVVTVVPLRTHNHALGN

SEQ ID NO: 209705 - protein, 105 aa, Glycine max
  unsure (1)..(105): unsure at all Xaa locations
  Clone ID: PAT_MRT3847_31391C.1.pep
MEAHVIMLIGISRNYVMKIKVLVFFFATILVAWQCHTFDMFHMPMNTHYGPHSTYVKCTSWRLVVEVHYIYSIETIPEECLEPAQVYMHGXQYRSHSKTVNQQAI

SEQ ID NO: 209706 - protein, 163 aa, Glycine max
  Clone ID: PAT_MRT3847_31392C.1.pep
LEGKHILSACEDSNVYLWNVSQEESNPVKAKKITSCERFFSNASIAVTWHGLKSQNIEIQHQLDALDKRSSQVIQLSPPASFSLSQEFFLESFPKGSATWPEEKLPVSSPKAKTSVMRKSEYKFLKSSCKSTSSAHAWGMVIVTAGWDGRIKSFHNYGLPILA

SEQ ID NO: 209707 - protein, 43 aa, Glycine max
  Clone ID: PAT_MRT3847_31393C.1.pep
TLISPFFFVKLTIIILNFIILNQTLFIYNYLFNLPLIIICPFS

SEQ ID NO: 209708 - protein, 80 aa, Glycine max
  Clone ID: PAT_MRT3847_31394C.1.pep
PDLLPIMFSSIRSVCFCHVFSDLATFETQLNILLFFKPLPLRLPPLFFHSTFLSLPSFSLYLGFRGLCYVSNLYDLLLLC

SEQ ID NO: 209709 - protein, 160 aa, Glycine max
  Clone ID: PAT_MRT3847_31395C.1.pep
LIRPRVRPRVRPRVRSKSGRVTEARKLLRVMAEKGYFPDEVTYTSLMNGLCRKGDALGALALLGEMEAKGCSPNACTYNTLLHGLCKARLVEKAVKFYQVIRAGGLKLDTASYGTFVRALCTDGRIAEAYEVFDYAVESKSLTDVAAYSTLESTLNWLRK

SEQ ID NO: 209710 - protein, 120 aa, Glycine max
  Clone ID: PAT_MRT3847_31396C.1.pep
KRGECLAEFQRWPDLRKHSRDRQIGYRKTYLGEDLWLMMNEEKGSYTPLTTKHHHNLIREKERNEKEVMMKTFCAQVKPPRSKCFIITPICKLPTSLIHPKTKPHDSDLPIFKKKTKIYY

SEQ ID NO: 209711 - protein, 180 aa, Glycine max
  Clone ID: PAT_MRT3847_31397C.1.pep
GSRPHPAYDQVKPALPALARLMHSNEEELLTDACRALAYLSDGTHDTIQAALEAGVCPRLDELLLHPSPSVLMPAVRTRGNIVTGDDLHTHVIINHQALPWLLNLETNTYNKSINTEACRTISNIAAGNNHLIQAEIEAELIAPLVNTLQNAEFDIKKDAACAISNATYRGCNEHITILV

SEQ ID NO: 209712 - protein, 149 aa, Glycine max
  Clone ID: PAT_MRT3847_31398C.1.pep
MQEELIKEEEKKEEAEQAKMVESVGSEGDLGIMKERASVAPFEVCFSRENVLATRLGAAVPTIELVLQNQKTVWRIFGANSMVSVSDDKVLCLGFVNGGENPRTSIVIGGYQLEDNLLQFDLATSRLGFSSLLYGSRTTCANFNFTSAA

SEQ ID NO: 209713 - protein, 55 aa, Glycine max
  Clone ID: PAT_MRT3847_31399C.1.pep
VPSSYQHESRIHGHDWDQIRSRPSLKQCLCKWIVVECSSRKEAHTEKRSLCSSRV

SEQ ID NO: 209714 - protein, 79 aa, Glycine max
  Clone ID: PAT_MRT3847_3139C.1.pep
FGATVRHIVEGETKVSKLGKLKYKNENDSVQDVKAEDLRQMFLAMTEEVRVIIVKLADRLHNMRTLSHMPPHKQTSIAM

SEQ ID NO: 209715 - protein, 41 aa, Glycine max
  Clone ID: PAT_MRT3847_313C.1.pep
TGRDRIARLSYPKFSRTPLINGYRRFFDVVRFREISAGGPQ

SEQ ID NO: 209716 - protein, 71 aa, Glycine max
  Clone ID: PAT_MRT3847_31400C.1.pep
KKPLPKIGMSGLLAHPQTPWLGSLQLRFPPFLFPVFFLGISWFPVLCFSKFFFPPCFKRASFFFVFFLSQT

SEQ ID NO: 209717 - protein, 49 aa, Glycine max
  Clone ID: PAT_MRT3847_31401C.1.pep
LSRLLSLVVPYVYECAVGGSTYLGVCWGAVVVTLGAVPAFREKSRKCAL

SEQ ID NO: 209718 - protein, 45 aa, Glycine max
  Clone ID: PAT_MRT3847_31402C.1.pep
VGKAIELLLEVIIDLLPVLFHHVEAHKIGAQAIVLWSQSWGSKDE

SEQ ID NO: 209719 - protein, 404 aa, Glycine max
  Clone ID: PAT_MRT3847_31403C.1.pep
MASSPSLHIAMVPWFTMGHITPFLYLANKLAERGHRISFFISKHTHAALQHLNHHPNLITLIPICVPHNDCGLIPHVAESITSEVPSSTASLFEKDIEVLLLELKLNIVFFDHAYWVPRPCLTRCLGIKSLVYYVISISSLAYDLSCSSPGRISKLGCCNIADHDLILNHSHEPKLLVGSGIKLEHGKGIAYIESCTNTLTQSYATGLKGSSCRVVEGAYVDYHRRHVLLEGCVITKGTTCHLDENWAKWLGNFEAGSVVYCAFGSECTLELCQFQELLLGLELSGMPFLAALKPPKDFECVESAFPLGFKERVEGRGVVCGECVPNQEFILEHPSVGCFFTRCGSGSLPEEVVNKCQLVLLPNHGEMVINARVVCYSLKVGLEVEKLKAFKMVCVPKKVCAKL

SEQ ID NO: 209720 - protein, 41 aa, Glycine max
  Clone ID: PAT_MRT3847_31404C.1.pep
MVKICCIGAGYVGGATMGVMAVKCASIEVVVLISVNPALQV

SEQ ID NO: 209721 - protein, 39 aa, Glycine max
  Clone ID: PAT_MRT3847_31405C.1.pep
FRGPPPFVPTSVALGTGPDVGPPVTAASGPPGHMLTGYL

SEQ ID NO: 209722 - protein, 203 aa, Glycine max
  unsure (1)..(203): unsure at all Xaa locations
  Clone ID: PAT_MRT3847_31406C.1.pep
HAFAYASGALLLLVSCTTFSSASLGKPENKIKTSVFLSPKIELGPGLVSNKNYFDVDFPRGHIAIKSFNAELVDEAGKSVPLQEVYLHHWVIVRYHQPKNVSQNNQTDNIVIVRNSGFCQDGFLVQYFGLGSETRGTATDILDPXGIEVGNPSEIPYGFEEKWLINVHAIDTRGGVEDRLGCIECRCDLYYVTKDADGYPLSP

SEQ ID NO: 209723 - protein, 66 aa, Glycine max
  Clone ID: PAT_MRT3847_31407C.1.pep
RIVAGVDHGCLPGDPIPIQQCAATSVNEKRQRKTGTSILCFRRRPCSDSRKLKTGDTVCDCLCIIK

SEQ ID NO: 209724 - protein, 63 aa, Glycine max
  Clone ID: PAT_MRT3847_31408C.1.pep
FNLIHTQVDAKYWQPYVTKLGVYLGMNKIKLFCNIWLPIFVIYLGIKVASWIVILVSINIFTV

SEQ ID NO: 209725 - protein, 102 aa, Glycine max
  unsure (1)..(102): unsure at all Xaa locations
  Clone ID: PAT_MRT3847_31409C.1.pep
TFDKQQXHXAGGXLGXQRHXATEXQXXKSXRETAXRXXPDKQXXXXXAEETEXAKQTKKXEXEXHXKAXQEAXEXXXXPXKRRXXXXTXEXDXEXPXEXAPQ

SEQ ID NO: 209726 - protein, 194 aa, Glycine max
  unsure (1)..(194): unsure at all Xaa locations
  Clone ID: PAT_MRT3847_3140C.1.pep
ARIPIPPLILCCVAAVKFLADPETDEVFARLRMVPLRNSELDYEDSDGNGXEGSEKPASFAKTLTQSDANNGGGFSVPRYCAETIFPRLDYSAEPPVQTVIARDVHGEVWKFRHIYRGTPRRHLLTTGWSSFVNQKKLVAGDSIVFLRAENGDLCVGIRRAKRGGVGGPKGPCGWSSYGSGGLVLEPYGAFSGL

SEQ ID NO: 209727 - protein, 78 aa, Glycine max
  Clone ID: PAT_MRT3847_31410C.1.pep
VGASVNLDVPSSFRYRLARQYSSIIYSIGKRPHACIAGHDMSISSCLRDSFDPSVLHDGALLSFLSQHRSCQPLGDHL

SEQ ID NO: 209728 - protein, 77 aa, Glycine max
  unsure (1)..(77): unsure at all Xaa locations
  Clone ID: PAT_MRT3847_31411C.1.pep
TLRIGKIQLELISAESNLFIAKPLFGSVNQFWFQVYIRKFRSXIFGKCLLNKSSRVVSLLSILNESDLELNIWFYVR

SEQ ID NO: 209729 - protein, 56 aa, Glycine max
  Clone ID: PAT_MRT3847_31412C.1.pep
KYMECIRYLHISILVITLNNKIILHQKHTNPIYHLHQLLSKFTANTICTKFIIILT

SEQ ID NO: 209730 - protein, 82 aa, Glycine max
  Clone ID: PAT_MRT3847_31413C.1.pep
NLLPFPSTRSLKTQKLKSRIFFLRTKKNKPFWIKPRRGKKTQRTQPKKLLLHRIQRPSKREKERRALEREVYQPLTGATGNV

SEQ ID NO: 209731 - protein, 70 aa, Glycine max
  Clone ID: PAT_MRT3847_31414C.1.pep
MASECKGKSSWPELVGVEGTVAVATIERENPLVDANTVLKGSIVTADFRCDRVRVWVTKHGIVYQAPRIG

SEQ ID NO: 209732 - protein, 324 aa, Glycine max
  Clone ID: PAT_MRT3847_31415C.1.pep
MSSEEQQQKKNNEEGEEEALKPLEIENGLRLVPRVKLNLTVYPSTPLTLSHPIDEWKMKRALIDFLHSSHSLTLPEDDDLHLTRLKDLKKRKRDDPVAAGTLRIWDLSSFRTENHRFRLTEKLNGIELNLEGVKFRLAATVPVSDDFQGMKKDWEEHSAFRSRREPDTVVLRGVPSRWFAEPRVSSKPSMLVTHTIFSTFGKIRNLNVAEDDDFGKDANEDSGDLVSGLYCKIVVQFERYRDFHDAMKVLCGRSLQKQGSQLKADYEVSWDKDGFFRNSRNQIQEKNNMVSTRAADHYRSEAPRRQAYNSRHSPDTVRPRRFKE

SEQ ID NO: 209733 - protein, 113 aa, Glycine max
  Clone ID: PAT_MRT3847_31416C.1.pep
SRPEAPAQFDAAEAGAGAAGALAPWADELSWLSTPCFSPPMSMSPPLLSMYMAAAAKTMKPRISFHMREVSRVRVQCRLCGGSGQTPGHRLRGPRRLGSGRPEGATGPRVQSP

SEQ ID NO: 209734 - protein, 74 aa, Glycine max
  Clone ID: PAT_MRT3847_31417C.1.pep
VVTWYSKRPLFFFFFFFFFGTINNGKACSLVKKKLIFFFIQFAREKNTFFFYFHRLYFNENGNHNMHFIYYSCP

SEQ ID NO: 209735 - protein, 34 aa, Glycine max
  Clone ID: PAT_MRT3847_31419C.1.pep
AREIVRLATPARGGGFAKGLLLGPMPQVSYNFFF

SEQ ID NO: 209736 - protein, 36 aa, Glycine max
  Clone ID: PAT_MRT3847_3141C.1.pep
LNYSSELATTSAIPAKKRKPILFNKGTTWSCIKVTV

SEQ ID NO: 209737 - protein, 26 aa, Glycine max
  Clone ID: PAT_MRT3847_31420C.1.pep
KQHCSASCWLRSCSVRLDHPKLEHGP

SEQ ID NO: 209738 - protein, 58 aa, Glycine max
  unsure (1)..(58): unsure at all Xaa locations
  Clone ID: PAT_MRT3847_31421C.1.pep
RKKNVTQEDLPTLATRRVSARQKRRAEVHTQKTLEKSKGDEGXEASPPQRHTTSKQSP

SEQ ID NO: 209739 - protein, 40 aa, Glycine max
  Clone ID: PAT_MRT3847_31422C.1.pep
CLALITKKEALFYTDKPFFLQAEKKLLAPYNTMLTGQNPT

SEQ ID NO: 209740 - protein, 256 aa, Glycine max
  Clone ID: PAT_MRT3847_31423C.1.pep
MAMIMDAVLGKLLDELLKEVVNVKDRAVKFRATLITLESTLNKVGRLAKQIDGLNNQLNKPAEEMKELKDKLAKGKKLVMECSEIQWWNCCYKANYQEELEALYESIRLYFNLDMQGLILTNELQNQVILTEIHATVMESGPRRTELKGVCSPPAPPAFTVGLDVHLREMKVKLLNNHHHAGSVLTVTGTPGSGKSTLVKKFCCDEEVKGIFKENIFFITFAQKPKLNTIVQRLFQHNACQVPEFQSDDDAVYQLE

SEQ ID NO: 209741 - protein, 49 aa, Glycine max
  unsure (1)..(49): unsure at all Xaa locations
  Clone ID: PAT_MRT3847_31424C.1.pep
SKGLKGDYLESSRDCLQKRKNRCCMKQKYNGQNMXFCFIWYWXCLAHSL

SEQ ID NO: 209742 - protein, 40 aa, Glycine max
  Clone ID: PAT_MRT3847_31425C.1.pep
TFLWRPAAVMLCSSVIVLLLVPMVCSHVPPYCKLIHSGKT

SEQ ID NO: 209743 - protein, 127 aa, Glycine max
  Clone ID: PAT_MRT3847_31426C.1.pep
RINQLAETKGYDINYVLDGEKGQKIKLAAIVQDKKSGRVLELFTNAPGLQFYTGNYVKDLKGKGGYVYQSHSGLCLESQAFPDSVNQPNFPSTIVTPEKPDKHFHQKSLEIGGVSFPPFLMCHGKSV

SEQ ID NO: 209744 - protein, 363 aa, Glycine max
  unsure (1)..(363): unsure at all Xaa locations
  Clone ID: PAT_MRT3847_31427C.1.pep
MTKIFVLLCLLFLASSGFVHGSSKKDHIRLFELKKGDFSIKVTNWGATLVSVILPDKNGKLGDIVLGYDSPKAYTNDTSYFGATVGRVANRIGGAQFTLNGIHYKLVANEGNNTLHSGPKAFSDVLWKVTRYIKDDDKPRITFSYHSYDGEGGFPGDLLVTVSYILGKNSLSIIMKAKALNKPTPVNMVTDAYWNLAXHNSGNILCEXIDIKNPAITHDELYTVCCNRPLNFSPXYRPIXPNNSRINQLAEPKGYDINYVLDGEKGQKIKLAAIVQDKKSGRVLELFTNAPGLQFYTGNYVKDLKGKGGYVYQSHSGLCLESQAFPDSVNQPNFPSTIVTPEKPYKHYMLFKFSTKNPYISSK

SEQ ID NO: 209745 - protein, 29 aa, Glycine max
  Clone ID: PAT_MRT3847_31428C.1.pep
YLGYLTLMPKCGWASPLTKFNSTPKKKFF

SEQ ID NO: 209746 - protein, 63 aa, Glycine max
  Clone ID: PAT_MRT3847_31429C.1.pep
LAKLLLTGHQGKCWDFFQKPTFPKGGSRDNVKPSSDESKQQALITIKASEGYPTSLWPINLRC

SEQ ID NO: 209747 - protein, 85 aa, Glycine max
  Clone ID: PAT_MRT3847_3142C.1.pep
TMLEITCQLGNPNAKGQVFVLLLQDWREWLTRVSECHVGCHMYFVGLGQYISSLSSEPACKRKRWSNAQGDCPLSRACRLSSRIR

SEQ ID NO: 209748 - protein, 92 aa, Glycine max
  Clone ID: PAT_MRT3847_31430C.1.pep
SVCPNLITMTTNYYVEESILQIYSVKGFLLSLLPFSRVFPSAIHSYSIPDSSNCDLLRVLSLTIKKIQNRFPIRHAGRGSLHLNTETSCSSG

SEQ ID NO: 209749 - protein, 200 aa, Glycine max
  unsure (1)..(200): unsure at all Xaa locations
  Clone ID: PAT_MRT3847_31431C.1.pep
VIIFPNLKRLVLVKCENMESLLVSLSESSNNLSYFEIRDCPNFVSFPREGLPAPNLIRFTVENCDKLNSLPEQMSTLLPKLQYLHIDNCSEIESFPEGGMPPNLRLVGIANCEKLLRGIAWPSMDMLTSLYVQGPCYGIKSFPKEGLLPPSLSSLHLFDFSSLGTFELRGAYPSXSLQEFEINSCQKLENMAGKKLPAFL

SEQ ID NO: 209750 - protein, 97 aa, Glycine max
  unsure (1)..(97): unsure at all Xaa locations
  Clone ID: PAT_MRT3847_31432C.1.pep
MLGDSALLGGGGGEGGASADVVAATATHDATTTTTTGGGGGGSNNSGDDERGRIEEGERSFGGNRWPRQETXAXLRIRSDMDVAFRDASVKSPLWEE

SEQ ID NO: 209751 - protein, 74 aa, Glycine max
  Clone ID: PAT_MRT3847_31433C.1.pep
PRVRPRFRFFYFLGKITAGRGKNSKTPTIYSPQWQLSRPSKLARSSTAVEIQPSKMTLFSYDGQPHSTLRLSAA

SEQ ID NO: 209752 - protein, 62 aa, Glycine max
  unsure (1)..(62): unsure at all Xaa locations
  Clone ID: PAT_MRT3847_31434C.1.pep
FGKASCLPGHFSXKXNIVXSPXFSVFFEDGPLLSXPSCFLXRRSLSAQRTSYWPLRSTIRIF

SEQ ID NO: 209753 - protein, 70 aa, Glycine max
  Clone ID: PAT_MRT3847_31435C.1.pep
ARGERERERERERERERERERERERERERERERERERERERERERERERERERERERERERERERERLKL

SEQ ID NO: 209754 - protein, 148 aa, Glycine max
  unsure (1)..(148): unsure at all Xaa locations
  Clone ID: PAT_MRT3847_31436C.1.pep
KRRRKRKKSRRTKRKNAVQRQRSRKKEEKRKEKKSPRERRRSALQRKRKRRRKTKKQRKKRXEEQKPAGKKEKRAAEKEEKKTESKEAEKKENEEQKPAGKKEKRAAEKEEKTSESKEAEKKENEEHKPAGKKEKRAPEKEEKKSESN

SEQ ID NO: 209755 - protein, 55 aa, Glycine max
  Clone ID: PAT_MRT3847_31437C.1.pep
RGKIRILSFFFKKKTCYVIFTPSPQSYSSPSRIYISLSEDKIQAHVIKLFDYPSL

SEQ ID NO: 209756 - protein, 57 aa, Glycine max
  Clone ID: PAT_MRT3847_31438C.1.pep
LAIRCLAYNVDVFIAHLMKSFKPEYAGLINEAPVDERIEALTVDRSHAPIHPWRART

SEQ ID NO: 209757 - protein, 67 aa, Glycine max
  Clone ID: PAT_MRT3847_31439C.1.pep
QNSQKLTKAKRYKTKRGLLVADPTFLARFLKPKSFLREYLIQLCCPDFYLSDWGKPVRYPHLLALSD

SEQ ID NO: 209758 - protein, 420 aa, Glycine max
  Clone ID: PAT_MRT3847_3143C.1.pep
LIVLSQNGGSNRGGFNIVSSSAKSSIHLDGLFNIISYDLVPKLQNMLMTCNFKVVIADESHFLKNAQAKRTTASLPVIKKAQYALLLSGTPALSRPIELFKQLEALYPDVYRNVHEYGNRYCKGGFFGVYQGASNHEELHNLIKATVMIRRLKKDVLSQLPVKRRQQVFLDLAGKDMKQINALFRELEMVKAKIKAAKSQEEAESLKFAQKNLINKIYTDSAEAKIPSVLDYVGTVIEAGCKFLIFAHHQPMIDSIHEFLLKKKVGCIRIDGSTPAASRQQLVTDFQEKDSIKAAVLSIKAGGVGLTLTAASTVIFSELSWTPGDLIQAEDRAHRIGQVSSVNIYYLLANDTVDDIIWDVVQNKLENLGQMLDGHENALEVSASLPVNSPSKQKTLDQFVRRCDNTDGLEYEPNPKRPRN

SEQ ID NO: 209759 - protein, 81 aa, Glycine max
  Clone ID: PAT_MRT3847_31440C.1.pep
MPCAHFLQVELSDPEAELRLLEVFYHKIYKVFPPNEKIESINDQYWTLRAEEIPEEEKNLGPHDRLIHVYHFTKDTAQNQM

SEQ ID NO: 209760 - protein, 96 aa, Glycine max
  Clone ID: PAT_MRT3847_31441C.1.pep
NLKPLAPTYSASAGSVGTLMGLFYVPFLLCSLSLLVKVGLCLRPFCFWTCYLYACTFFSRQVRSFYLCLIVILPPSPPPPPKEGGRHTVMTGNLPW

SEQ ID NO: 209761 - protein, 38 aa, Glycine max
  Clone ID: PAT_MRT3847_31442C.1.pep
KNLISRLLVKDFSRRLSLQRIMEHPWITKNADPKGVCN

SEQ ID NO: 209762 - protein, 62 aa, Glycine max
  Clone ID: PAT_MRT3847_31443C.1.pep
PSNKIICSISFLHGIALLSQHEIIQKKKKNGRAISIVKTHYIIHLDSGRFLFSLEECFNKNH

SEQ ID NO: 209763 - protein, 197 aa, Glycine max
  Clone ID: PAT_MRT3847_31444C.1.pep
MAATIATTMAMINSKCINTTGSSHKLHNPKLPPSKPTLSLFSLQNLPKGLTSHVSTSTAGTAIAGAIFSSLANCDAALAASQIAELAEGDNRGLALLLPLIPAIAWVLFNILQPALNQLNRMRNSKGVIVGLGLGLCASGMMSGPEASASEIAMIADAAASDNRGQLLLFVVTPAIVWVLYNILQPALNQLNRMRSE

SEQ ID NO: 209764 - protein, 57 aa, Glycine max
  Clone ID: PAT_MRT3847_31445C.1.pep
NRSNCILMRSVSTCPVLKDKAAGSMAINHMMFSLNITKEGPSVEHLQIFYQFSFFIT

SEQ ID NO: 209765 - protein, 88 aa, Glycine max
  Clone ID: PAT_MRT3847_31446C.1.pep
LTRGSNVAINPPCYGGTPPRIIFSAPQLPKLALQNFLGPHFGPRWVPFSPTPSGFVSSFLRILTGPSGDFCQYLAFKTIIIKGGGGRS

SEQ ID NO: 209766 - protein, 132 aa, Glycine max
  unsure (1)..(132): unsure at all Xaa locations
  Clone ID: PAT_MRT3847_31447C.1.pep
VCEEREIGSCGLNKKLLQKVTAGKPPEVGDEAQVHFRGTLLHGTKLDYSRERDSSLRLTLGQGQVIEGCDEGIXTMMKGENAIMTIRAQLAYGESGSPTTIPANATLQLDVELVSXTSAQDICKDGGLFNNI

SEQ ID NO: 209767 - protein, 98 aa, Glycine max
  Clone ID: PAT_MRT3847_31448C.1.pep
PDDLLHNKHSLAIMLYDRMDSTRKSSLTLVFLLAFFIIASDMGMKSEAQISPLARCSKDSDCKRYCPTCYQCNCVRRVCLCENSPPLANNIHSQAPPY

SEQ ID NO: 209768 - protein, 718 aa, Glycine max
  unsure (1)..(718): unsure at all Xaa locations
  Clone ID: PAT_MRT3847_31449C.1.pep
RVRQINNFDVAEQLMLQKLQKERLQQQSSISNHFPAHHNGSDLERFPGFALSQNKSPNIQQMMQNSGSDFERILELQIQQRQLELQQQQDMHHQQLLHQQMKLPPQQQSQVQQLLLEQFMHQQIPDPNFGQSKHDISRDNLLDQVQLRRYVHELQQNPHSLRHPDPSMEQIIQANMGINAAQGRQADLADLLLQARHGNILPSEQQLHFQQDQLQAQQLSLALRQQLGLDGERHFGRSWPMNETGQLVRNPATHPLGHSAGFNVSDIHKQQQRLGTQEEQLNYLGRNLPEQNQRGFYDNPMMFERSAPIFPXIRXNKGXXKIFYMTXHRYLHPGDQMSSLPLSXHLRSSDDLFGHHPDAFKSSLHGNNGHVENSWIDPRVQIQQHLEAVRQRRELGDTVTSADLNIPASAGAHEESSARGFMERLHQKLGVQSTQPSTVDKWHPLSSRSDKSWHVPEASSIMHPFEHPSDQQVHLNDPFLERTQSANSNALIHDHLNNMHITDQYNNLGNTERMPLRSRSGSLLEEQSLSLSSAGGDGGSFGREMGLNNSRGDEVSGDRIPPSTKGFDNAFHKRPHVTRVLSSPDVQSDQPSVPHVNQNNLINLTSGEGRRETSGNSSMSSMTEASGKKEVRFRSSSFSEGAVSETSFIDMLKKPVLPEVVVDSHAASGIGSESSDAAQAGRSGKKKGKKGKQIDPSLLGFKVSSNRIMMGEIQRPED

SEQ ID NO: 209769 - protein, 67 aa, Glycine max
  Clone ID: PAT_MRT3847_31450C.1.pep
GINQHSQVMRLYCVEKARTVDANVLFGFLSRSLLELSVACRLDQLVAPIASRLMQFCAIMALRSISM

SEQ ID NO: 209770 - protein, 63 aa, Glycine max
  Clone ID: PAT_MRT3847_31451C.1.pep
TPFICQETTACFNYSPYHISAKFLSRLNRIYTRHGVPPQVRGVQAPLCFDVAGTSSFFMRSIH

SEQ ID NO: 209771 - protein, 675 aa, Glycine max
  unsure (1)..(675): unsure at all Xaa locations
  Clone ID: PAT_MRT3847_31452C.1.pep
NDYLSQRVGKDIAEKEDLDKRGSPDRSPFTLRFPLRVLLGNISDAKYGNGKAEKGFASDPFMVGTPRSRLKLMLXFLDVTVVWXKLVNKSXFFMWKVWIXASLCGQKYIGYRRLQEKLVSDILDISEFSHGPLRLKESEFCSEEFENFVPCYNISEDVELGVSDNNEVDRQCSHELRQNCLVLPPVNYKIPLRWPTGKDVIWVANVKISAQEVLSSGSLTKRMMMLDEEQISFRSASHMFDGIEDYSHQIAEMIGLRNESYFIQAGVRTILDIGCGYGSFGAHLFDSQLLTMCIANYEPSGSQVQLTLERGLPAMIASFTSKQLPYPSLSFDMLHCARCGIDWDQKDGLLLIEADRLLKPGGYFVWTSPLTNARNKENQKRWKFMQDFTLTLCWELLSQQDETVVWKKTSKKSCYASRKSGSGPSLCGRGIDVETPYYRELQNCIGGIQSSRWVPIEKRERWPSRANLNNNNLAIYGLQPDELTEDSDSWKTALQNYWSLMSPLIFSDHPKRPGDEDPSPPYNMFRNVLDMNAHFGGFNSALLQARKSAWVMNVVPISGPNYLPLIQDRGYVGVLHDWCEAFPTYPRTYDLVHAAGLLSLETEQHRCSMLDLFIEIDRILRPEGWVIIRDTVPLIESARPLTAQLKWDARVIEIESDSDQRLLICQKPFFKRQAS

SEQ ID NO: 209772 - protein, 83 aa, Glycine max
  unsure (1)..(83): unsure at all Xaa locations
  Clone ID: PAT_MRT3847_31453C.1.pep
FKGGGEKYKKNAAQISLWWGVQRDPGVIFKWXKLGGVKENFQVFDFGVFKKGMGVFGSIDRKNRPHQPAVFWGINLLGGECPS

SEQ ID NO: 209773 - protein, 431 aa, Glycine max
  unsure (1)..(431): unsure at all Xaa locations
  Clone ID: PAT_MRT3847_31454C.1.pep
MSRPLQRGVSGGVRVPESGHDDLWDSQSKDKTEKEDLDTRGSSDHSPFTLRFPLRVLLGNNSDSKYGNGIAENGFASDPFMVGTPRSRLKLMLLSLKFSLVFIVVLALTGSFWWTLSISSSSRGQIYHGYRRLQEKLVSDLLDIGEISYAPSRLKELEFCSEEFENYVPCFNVSDNLALGFSDGNEFDRQCRHELRQNCLVLSPPNYKIPLRWPTGRDIIWIANTKITAQEVLSSGSFTKRMMMLDEEQISFRSASLMFNXMKFDFDVPCLKSYLIENVVILKFXVRTILDIGCGYGSFGAHLFDSQLLTMCIANYEPSGSQVQLTLERGLPAMIASFTSKQLPYPSLSFDMLHCARCGIDWDQKDGLLLIEADRLLKPGGYFVWTSPLTNARNKENQKRWKFMQDFTLTLCWELLSQHDETVVWKKTSQK

SEQ ID NO: 209774 - protein, 57 aa, Glycine max
  Clone ID: PAT_MRT3847_31455C.1.pep
NELKYSTNFSLKGWERKFLGIKSPRHTFPLLLHKFLLFSYYFTQKSPHSLATHLHIL

SEQ ID NO: 209775 - protein, 533 aa, Glycine max
  unsure (1)..(533): unsure at all Xaa locations
  Clone ID: PAT_MRT3847_31456C.1.pep
MRRRATDFRRPVRKRVPDXLWWALCCAVILLFVYILSKGNKIESRPALSKKTYRHDKIMEGLNITEEMLNSNSFTRQLIDQISLAKAFVVIAKESNNLQFAWELSAQIHNSQMLLSNAATRRLPLTTRETERAIHDMALLLYQAQQLHYDSATMIMRFKAKIQALEEQMNSVSEKSSKYGQIAAEEVPKSLYCLGVRLTTEWFKNFNLQKKFKDKRHVVMKLKDNSLHHFCIFSDNIIATSVVVNSTAMNCKNPNMIVFHLVTDEINYAAMKAWFAMNDFRGVTVEVQKFEDFTWLNASYVPVLKQLQDSEIQSYYFSGNSDEGRTPIKFRNPKYLSMLNHLRFYIPEVFPALKKVVFLDDDVVVQKDLSGLFSIDLNENVNGAVETCMETFHRYHKYLNYSHPLIRAHFDPDACGWAFGMNVFDLVEWRKKNVTGIYHYWQEKNIDRTLWKLGTLPPGLLTFYGLTEPLDPSWHVLGFGYTNVDPQLIERGAVLHFNGNSKPWLKIGIEKYKPLWEKYVEYSHPLLQKCNFH

SEQ ID NO: 209776 - protein, 41 aa, Glycine max
  Clone ID: PAT_MRT3847_31457C.1.pep
FYYLDLHQEAKCPIATIQPEVIVTIFNGLMNNMILISHYKH

SEQ ID NO: 209777 - protein, 103 aa, Glycine max
  unsure (1)..(103): unsure at all Xaa locations
  Clone ID: PAT_MRT3847_31458C.1.pep
MRRRATDFRRPVRRRVPDALWWALCCAVILLFVYILSKGNKIESRPALSKRTYKHDKIMEGLNITEEMLNSNSVTRQLNDQISLAKAFGENXKEXXNLQFAWE

SEQ ID NO: 209778 - protein, 398 aa, Glycine max
  unsure (1)..(398): unsure at all Xaa locations
  Clone ID: PAT_MRT3847_31459C.1.pep
MVSFGKLAFSDRRKXLEVTTSQVRQKVPDKMIGPLFPGLRDDEENFQKDLVLLWKRRSLLSQMYKVGSGQNDEYKTSSQEAVDPTQLELDDVRASFDRSRSISHPLPEEDGHTQCIKRKGFRGYVWNGIKQILGRSNTMNASPLVAKKHTSNGEIRQARLQEFLRSSDTVRLMLKASTVKLSSYRAWPNMHDSRFALYKLPLRVPKDDQEYAGLWGGTFGWPPGKPSEDKPGKALFFLLLSYEEFQGQQLLIATKILEGTHYVLHPNGSAMFTANINDPSSEPFPWDTDADSVPVNIKQAFVGEGIASGYGFRYPGSKPGSLFVLENGILAFIWKESRAVLNLQRLNLQELLKKGERVPSLPPVTNFSYLTKSYSNVFAGFPSSSNFLSSPRNANAQY

SEQ ID NO: 209779 - protein, 55 aa, Glycine max
  Clone ID: PAT_MRT3847_3145C.1.pep
MAAEGRRKRERRCHFKEKMSLKETHHHRRPLIRAWRKKEMNEGRGREEHEILCSK

SEQ ID NO: 209780 - protein, 59 aa, Glycine max
  Clone ID: PAT_MRT3847_31460C.1.pep
NLPWSFFHLPVVSPTPTTANALIFPIVAVLDCVLCRTSVVSKVVMRFPPALLEKQNRFH

SEQ ID NO: 209781 - protein, 47 aa, Glycine max
  Clone ID: PAT_MRT3847_31461C.1.pep
HRQEPFPILPAAASLVYSIIRCGEINYYLRGGFIPSRIFFIFDETLA

SEQ ID NO: 209782 - protein, 233 aa, Glycine max
  Clone ID: PAT_MRT3847_31462C.1.pep
MGCLHSKTAHLHSPEDPPTALPDSKKPDPGNGGDDVDQECQVPAFKEYGLIELRRATNEFSTDYIVSESGEKAPNVVYRGKLENNRLVAVKRFSKLSWPDAQQFMAEAAGVGKVRHKRLVNLIGCCAEGDERLLVAEYMPNDTLSKHLFHWDKQPLPWEMRVRVAYHVAQALDHCSLENRKIYHDLNAYRILCDEDGDPRLSSFGLMKNSRDGESYSTNLAYTPPEFLRTGRI

SEQ ID NO: 209783 - protein, 66 aa, Glycine max
  Clone ID: PAT_MRT3847_31463C.1.pep
FVTGQLFSFSIPSWQGDIYTTIPPLLQLPLNDVNRPCPLLMIIQQGATTSLPVWPRNLLNNIAFHI

SEQ ID NO: 209784 - protein, 247 aa, Glycine max
  Clone ID: PAT_MRT3847_31464C.1.pep
PETTHAANALAESVNGQILIPKGLLDEVVNLVEAPFPVLGKFKETFLDLPKDLLTMVMQKHQKYFAVCDANGQLLPYFVAVANGAIDETTVRKGNEAVLRARYEDAKFFYEMDTRKRFSEFRKQLKNILFHEKLGTMLDKMTRVENMVTKLSCLLDINEDVQQIIRDASSLAMSDLATAVVTEFTSLSGIMGRHYALRDGYSEQIAEALLEITLPRFSGDILPKSDAGIVLAIADRLDSLLGLFTAG

SEQ ID NO: 209785 - protein, 136 aa, Glycine max
  Clone ID: PAT_MRT3847_31465C.1.pep
MAPKTGKTKPHKAKGEKKKKEEKVLPTVIEITVETPDESQVTLKGISTDRILDVRKLLAVHIETCHFTNFSLSHEVRGTRLKDTVEIVSLKPCHLTIVQEDYTEELAVAHIRRLLDIVACNTSFAAAKPPGKTRVV

SEQ ID NO: 209786 - protein, 123 aa, Glycine max
  unsure (1)..(123): unsure at all Xaa locations
  Clone ID: PAT_MRT3847_31466C.1.pep
MHLPPMSTSNTDFGTAPPPGPTMRLPPSTSGEALFSVAAGASPGHMTLISRFFGYDDDVDCRSFYQFLAGAMAXTMALYDGAAAADNSGEDDDRPHKGFKQSXPMNLVIACSPVLTVPPGMSP

SEQ ID NO: 209787 - protein, 64 aa, Glycine max
  Clone ID: PAT_MRT3847_31467C.1.pep
WSTSRRQAMINALFLELKFDIGFMINYIHIYRENKSVIFICLIGYVNLTAVTYSAPYPKNKYVF

SEQ ID NO: 209788 - protein, 31 aa, Glycine max
  Clone ID: PAT_MRT3847_31468C.1.pep
RYSISLASTVAHEQPPSKTTNLASRVLYIQV

SEQ ID NO: 209789 - protein, 95 aa, Glycine max
  Clone ID: PAT_MRT3847_31469C.1.pep
FPSFSIGGAPIPFLCLVFFFFLFNIFFAAQHQGKGGIFIFKKKFCFVLFSKQAFLLFSSTTTSSSLINSESFCSFLIGFVHSLSLAVPLLLLLSF

SEQ ID NO: 209790 - protein, 66 aa, Glycine max
  Clone ID: PAT_MRT3847_3146C.1.pep
LFSGMNTYSKNRKYAQTKIPHGLSPYKSHALMPLRHFTEHLVGARLGINSKRTGTMWHVLLFQNAL

SEQ ID NO: 209791 - protein, 67 aa, Glycine max
  Clone ID: PAT_MRT3847_31470C.1.pep
FQGLTMLLCRRPCPFFFFLEYPISNFFNFKTQFPFIKSCRNSVNYNNIQSLIPYLSEGIQAKLKSVI

SEQ ID NO: 209792 - protein, 96 aa, Glycine max
  Clone ID: PAT_MRT3847_31471C.1.pep
ILHAPLHQFLIFFFIAAHNIHKLGPYFIKQYLHMLLQYHHSLNSAYHNPQKHSDINTSITSYQSQRPNHNYITHPDAYIAYQSPTIGPTLEAYQQN

SEQ ID NO: 209793 - protein, 70 aa, Glycine max
  Clone ID: PAT_MRT3847_31472C.1.pep
FITRAESLINRDHRSPHLKTGNKSIRHLTAREPTVPCYDHHVRFVNGKKSTRCAGTHTSGSDESFPFLAD

SEQ ID NO: 209794 - protein, 35 aa, Glycine max
  Clone ID: PAT_MRT3847_31473C.1.pep
KKSQLRETRGSVQSTETNGNEIGLVLKPNPIPTSR

SEQ ID NO: 209795 - protein, 100 aa, Glycine max
  unsure (1)..(100): unsure at all Xaa locations
  Clone ID: PAT_MRT3847_31474C.1.pep
LLNRLHGCTFITTAPMIISEIPKFAQKVMSTNDVKVDYKXPYLVWSQCIKSVPMRIRVXIARWTYDDEDAWAELYSLAFVVDIPKDDLLWLRTIVIDDDD

SEQ ID NO: 209796 - protein, 115 aa, Glycine max
  unsure (1)..(115): unsure at all Xaa locations
  Clone ID: PAT_MRT3847_31475C.1.pep
LLVRNREIGIRGNSIMGGREHSAWDLNCCVSGKTLPNNCSAEXWYSKLNTVTGQYYTEWTPINXEVIXQPIHINGGHNVRKHDVIIEXDACSKPNXDCGSLVVAKVGNHKQIVGF

SEQ ID NO: 209797 - protein, 68 aa, Glycine max
  Clone ID: PAT_MRT3847_31476C.1.pep
QVENPKVQEKAIWMLDRIFKVAGHRLIYGVSAQVVLIDLAQKSDLKLKSTVPKVLAERELLQFQSSSF

SEQ ID NO: 209798 - protein, 82 aa, Glycine max
  Clone ID: PAT_MRT3847_31477C.1.pep
MLPAVGSADEEEDPAEEDCPELVPIETTQSEEEEKSGLGAKIPVTIITGYLGAGKTTLLNYILTEQHSKRVAVILNEFGEGS

SEQ ID NO: 209799 - protein, 59 aa, Glycine max
  Clone ID: PAT_MRT3847_31478C.1.pep
LGGIINLDTLDLSSNNCSGNVPASVGFLEHLLTLNLSHNHLDGYLPADVGNLSSIRFLI

SEQ ID NO: 209800 - protein, 158 aa, Glycine max
  Clone ID: PAT_MRT3847_31479C.1.pep
MGCFFFFTKICFFSMWAPLSRFFFFVYLFFPLGVFPLFFSVSFFFFNPVPVSLGSPLGFFFLYGGPPPFLFFPLFFFFFKLSFFFFSPKKKKQKTNNIKKKKNKKKNKMIKKKIKKKKKNKKKKKKKKKKNKKKKKKKKKGRPLSRGFQATYCHATFH

SEQ ID NO: 209801 - protein, 94 aa, Glycine max
  Clone ID: PAT_MRT3847_3147C.1.pep
KAYKHRIQLIEDPKEQVPPIAELLLEKKVLPQAALFQVLGDRPFKATDLPHYDRFNQGFIKKKEKVVESPVKTPKEGGGFSPLEPQVVPPKPVI

SEQ ID NO: 209802 - protein, 86 aa, Glycine max
  Clone ID: PAT_MRT3847_31480C.1.pep
ALPNQPNNGFQAGWGTPPPATTVQFMPMQMPKNFFMPSGTMPPQMAPGMQFPSYNPAQPSTTLPSKRSDCTQKHASPLFQIDLYIG

SEQ ID NO: 209803 - protein, 101 aa, Glycine max
  Clone ID: PAT_MRT3847_31481C.1.pep
GQWWEWLLVQLLLLLWVCGGCVSHLTQSNSSCNCGNCSSCNSCNCCNGCRSYKKLTYTDSTRIDTMDIVVIPVKAEIAHVEIAEIADNDDNKCCTNCSCSS

SEQ ID NO: 209804 - protein, 75 aa, Glycine max
  Clone ID: PAT_MRT3847_31482C.1.pep
VGSFLVDEVKIYHKNYDSNMVSWHTLSAVLLESCIQGPCRVGIDHSLIVGKDLPRNVKVLAAMGLFSQRFEQTSH

SEQ ID NO: 209805 - protein, 109 aa, Glycine max
  Clone ID: PAT_MRT3847_31483C.1.pep
MGWAIALHGGAGDIPLSLPPERRQPREEALRHCLQIGVEALKAKLPPLDVVELVVRELENIPQFNAGRGSVLTCRGTVEMEASIMDGTTMNCGAVSGLTTRRHAISLAR

SEQ ID NO: 209806 - protein, 117 aa, Glycine max
  unsure (1)..(117): unsure at all Xaa locations
  Clone ID: PAT_MRT3847_31484C.1.pep
VVFGCSLPSVLWYGGLXVVQTTGGTGVCEPKVCWRFYAGTESLPKVEGSDITGIEEIVIPKKRAWDKVAVLEALACTVNRDPTGGRYVFDDDPYLIPTCGVECGSFLLAEKCGETGV

SEQ ID NO: 209807 - protein, 56 aa, Glycine max
  Clone ID: PAT_MRT3847_31485C.1.pep
VDGTLLKFLFCYSYSCSSRMSVLEICYSISLHFHPRQQILFNLLIQEPFRGVFGII

SEQ ID NO: 209808 - protein, 79 aa, Glycine max
  Clone ID: PAT_MRT3847_31486C.1.pep
RHTNDTICCYKGIKLGSFRQLILKHKTRNREGKHEQVMLLQDRFFGLELILYQIPLFSEFTFVFLSFCSLLPRPFPFFI

SEQ ID NO: 209809 - protein, 92 aa, Glycine max
  Clone ID: PAT_MRT3847_31487C.1.pep
IGTPQYAKDAALSDRCAAFLWNTERGQDSATTMSTPWRYPPHHSHSCSPSRFLNEQNRKPCWLSCPIGTLHFVLMFRTTNEAWAGESPAMWL

SEQ ID NO: 209810 - protein, 162 aa, Glycine max
  Clone ID: PAT_MRT3847_31488C.1.pep
GMQHMHAPHMGPFSPIGVGMQMRLGVGCGMGMPDANDIESSRFIQVPQMQGTHHPSQGHPIPMPHAPIFSFPGEPFINPSTLGLVETVDKASSAFGLIKDQIPQLAQNTNNGCNSTNQMSTVQCEATIGGFEHSIVVLNSGHATSVNDRGAINPSAEDNPYH

SEQ ID NO: 209811 - protein, 288 aa, Glycine max
  Clone ID: PAT_MRT3847_31489C.1.pep
ASALQVPARCGVPTPGGVLHSAVRAPPWGSTCVFLNDVKCLCELPETYEAYKKQQHRWHSGPMQLFRLCFLDILRSKVSWVKKVNLIFLFFLLRKLILPFYSFTLFCIILPLTMFLPEAELPAWVVCYIPGIMSLLSVLPAPRSFPFIVPYLLFENTMSVTKFNAMISGLLRFGSSYEWVVTKKLGRSSETDLVAFEKEAEPLMRSTSLHRSSSDSGIEELSKLELSKKTGKTKKNRLFRKELYLALILLTASVRSLLSAQGIHFYFLLFQGISFLVVGLDLIGEQVS

SEQ ID NO: 209812 - protein, 72 aa, Glycine max
  Clone ID: PAT_MRT3847_3148C.1.pep
TVKHKLYMVYDQCTHITCYIFPHSFFNPNYIFHHLILSSSLLALSIYYMYVFHHLILSSSLLALSIYYMYVF

SEQ ID NO: 209813 - protein, 42 aa, Glycine max
  Clone ID: PAT_MRT3847_31490C.1.pep
LQGLSALHHLPLPSRSNLLHVRPSIENHLSSDSPITVTIHEA

SEQ ID NO: 209814 - protein, 59 aa, Glycine max
  unsure (1)..(59): unsure at all Xaa locations
  Clone ID: PAT_MRT3847_31491C.1.pep
XXXXSLWVXVXXVLCGRGXHSFGXCXXXXFXXLAXVXXXSXXISXLXVDVCXQXFXXFS

SEQ ID NO: 209815 - protein, 43 aa, Glycine max
  Clone ID: PAT_MRT3847_31492C.1.pep
LAKNFVSYARNWGYCFVTPIFIFWTMILSLVGEELIFPCWIST

SEQ ID NO: 209816 - protein, 299 aa, Glycine max
  unsure (1)..(299): unsure at all Xaa locations
  Clone ID: PAT_MRT3847_31493C.1.pep
SNQWFKFDDERVSKEDPKRALEEQYGGEEELPRINPGFNHSPFKFTKHSNAYMLVYVRESDKDKIICNVDEKDIAEHLRMRLKKEQDEKELKRKEKAEAHLYTTIKVACDEDLREQIGNNILFDLVDYDKVRSFRVQIQMPFMVFKEEIAKEFGIPIQYQRFWLWAKRQNNTYRPNRALTPQEEAQSVGLLREVSTKANNAELKLFLELEMGQDLRPIPPPEKSKENLLLFFKLYEPSNEKLRYVGRLFVKSSGKPEDILVXLHXMAGYAPXXXXDXFEEIXFVPNCTGLPPLSGGPGG

SEQ ID NO: 209817 - protein, 85 aa, Glycine max
  Clone ID: PAT_MRT3847_31494C.1.pep
FFFFFFFFFFFFMDHLALIFFILSKITNIHAPPTPLSKGRGNLTEGHGNVVLQFRNKNKHNINATNTINHQTISKLTVTPHVIPL

SEQ ID NO: 209818 - protein, 91 aa, Glycine max
  Clone ID: PAT_MRT3847_31495C.1.pep
NLSPAPKEKEGAGGTRADKARPNPNQHQNTIHRPTTNKPVTTKPQPNTKPKHHTPHPPLASRRKSQEARTKRTSQQPQSQNGQRHAPSKNT

SEQ ID NO: 209819 - protein, 65 aa, Glycine max
  Clone ID: PAT_MRT3847_31496C.1.pep
NSNLRRGPNKKKRGFYLKLNLSLNIFLRGRKNQKKGGVFLSNSTRSINGVGPTQSLQPQKSPLLP

SEQ ID NO: 209820 - protein, 85 aa, Glycine max
  Clone ID: PAT_MRT3847_31497C.1.pep
ALIESQLVLVEPLYLVPRVHILHMFVSHVEDSPQVVCMSQCRNHNIVVHACRVGEITPLFPLPRMQGYGEEVSLPPSECARMIKS

SEQ ID NO: 209821 - protein, 60 aa, Glycine max
  Clone ID: PAT_MRT3847_31498C.1.pep
DRLDRSLTLGHMQGMMQMALVWHTGHAIHEDVPDEFPTMIVNFISRILIGPHGTEIPGLS

SEQ ID NO: 209822 - protein, 68 aa, Glycine max
  Clone ID: PAT_MRT3847_31499C.1.pep
HESQLLQQNNDLPLHDFPSLANEPAKHKNNKAHTYCLTEFTIKHDTSFDYQDPVLLTTVPRQRTVEEL

SEQ ID NO: 209823 - protein, 100 aa, Glycine max
  unsure (1)..(100): unsure at all Xaa locations
  Clone ID: PAT_MRT3847_3149C.1.pep
SISSKSLVAFNQTPCRQTKTLMEANNYDCLYEALTVVAMLSAETTLLPAQRKTEKKRKHTIFNLPDDFGLGDHIQLLXIYKCWNQTDFDIGWCKDNVLQV

SEQ ID NO: 209824 - protein, 105 aa, Glycine max
  unsure (1)..(105): unsure at all Xaa locations
  Clone ID: PAT_MRT3847_314C.1.pep
GISIGSITLCLLSGLFFIYILMVLFSESTTPFVNLRWXICCSEFHLPSCTFLTITYDINYIYRYLDVAGLKSSKLYIWNGIALFFGWLVLSNILSIILTSTLISL

SEQ ID NO: 209825 - protein, 104 aa, Glycine max
  unsure (1)..(104): unsure at all Xaa locations
  Clone ID: PAT_MRT3847_31500C.1.pep
MHCHIYCTSDSHATKSNQHIVIRTPGGMLVXQTTTRRASCCNCPVTGKRIQGIPHIEPAQYHVSMLHSGRPTVSRAYGSVLSGSAVRDXIIQAFVDEEQRIVTK

SEQ ID NO: 209826 - protein, 134 aa, Glycine max
  Clone ID: PAT_MRT3847_31501C.1.pep
HCGVSYETVTDDNESPHDPHAFTQGLLYTGNDTSFEPTGLYGESSVRKADLRTAKADIIHKMDDPYLGEGITLLNSRLLHGTRARTHGSIYDPQHLRPIGTFNHDMNDASRLATAGTVLFGSDRQFNIALNDLN

SEQ ID NO: 209827 - protein, 46 aa, Glycine max
  unsure (1)..(46): unsure at all Xaa locations
  Clone ID: PAT_MRT3847_31502C.1.pep
LSDSDLDDDEDEXDQXLPFKLIMWSQVSKLTDDQQKAYFDXYDYRV

SEQ ID NO: 209828 - protein, 90 aa, Glycine max
  Clone ID: PAT_MRT3847_31503C.1.pep
YLQLGVDVGSSTVARGVVSLVPGSLNHVVIEVAFLIQGDARLELPAFLVGSCRLFHGGAFKAVCLLPCFLGELFSSTLGGENFLFAYVDN

SEQ ID NO: 209829 - protein, 95 aa, Glycine max
  Clone ID: PAT_MRT3847_31504C.1.pep
GEKIVVVSLTCIKKTDTKVSVRAVFESVNLKIITANTTSFSDTLFKIIFIEANDDEKDQVQIKMHTASKARNDPLNPMSILGTTYMNLERSHFGV

SEQ ID NO: 209830 - protein, 390 aa, Glycine max
  Clone ID: PAT_MRT3847_31505C.1.pep
MERAEQIGGGKAVATVLAIGTANPPNFILQEDYPDFYFRVTNSDHLHRLKQKFKRICENSKIEKRHIVHTEEYLKQNSDSGTYDGLPLETRQNVPTEQVIKLGMEAASKAIKEWGEPLSEITHLIFYTTSCFGSVPGPDHYLSKQLGLRSTVNRLMLFSHGCHAGGTILRVAKDIAENNPGSRVLAVCSETMFASFRAPSESNVEVLVGQALFGDGAAAVIIGADPKHSIEHPLFELVLASQTTVPDTENAIKGSQQENRLVYYLDKDIPNIVTNNVKKCLVDELGEVGFVDEIDWNKFFYAIHPGGAVIVSGVEEKLGLEKEKLSATWHVLSQHGNMWSPTVIFILDEMRNRSKTEGKSTTGEGLEWGILLGFGPGVAMETVLLRSYPC

SEQ ID NO: 209831 - protein, 46 aa, Glycine max
  Clone ID: PAT_MRT3847_31506C.1.pep
RFIYTRESSRPVYVSLLIILCMASTATPVMRYCSLFDHLHEEMKME

SEQ ID NO: 209832 - protein, 169 aa, Glycine max
  Clone ID: PAT_MRT3847_31507C.1.pep
LFLNRKIVSNQGRSPFDFNATHQSISHPSPMKRKKWSELEEQTLLSKYSELLRSGTLAKLKTREKKFKPVAEHVNALHHLRDPASFPFKWSWRDVSIKVQNMRHQYLGVKQKIRLSLHHFNWKDGNNHWENFLKYKEVLGDVQLLESPKPITTAKLGFDVDSDDDDEGE

SEQ ID NO: 209833 - protein, 44 aa, Glycine max
  Clone ID: PAT_MRT3847_31508C.1.pep
KRGRKLCDKKENYQLEKNIMTCFVLHGTTSRSTPLIILLLYPRI

SEQ ID NO: 209834 - protein, 44 aa, Glycine max
  Clone ID: PAT_MRT3847_31509C.1.pep
VQNPMLGTVGLSDGAAQSRDLSPILSPMCGGIPSVHLFLEQLEP

SEQ ID NO: 209835 - protein, 57 aa, Glycine max
  Clone ID: PAT_MRT3847_3150C.1.pep
MGSALSTPDTAEHLVGSFVGDVSIPLSSDFWQKLLELPFDAELPSQRLHQACQLLGL

SEQ ID NO: 209836 - protein, 176 aa, Glycine max
  unsure (1)..(176): unsure at all Xaa locations
  Clone ID: PAT_MRT3847_31510C.1.pep
VAWADAWADAWADAWAQTPLIYRAVPSWFVRVESLKEKLLENNKKTYWVPDFVKDKRFHNWLENARDWAISRSRFWGTPLPIWISEDEEEVVVIDSVAKLEELSGVKVFDLHRHNIDHITIKSDSGRVLRRVDDVFDCWFESGSMPYAYIHYPFENXELLRRIPWPFIAEGWINTG

SEQ ID NO: 209837 - protein, 74 aa, Glycine max
  Clone ID: PAT_MRT3847_31511C.1.pep
VRLLGRSKYVNKKSVAGLGTDRTGVARGLSLVWCVVFTVLSLSLGLLLLPIWRSSPYFDSWLRGIHLRIRSDSY

SEQ ID NO: 209838 - protein, 56 aa, Glycine max
  Clone ID: PAT_MRT3847_31512C.1.pep
QQCFSTLRIGYLSAPIVATHIIQSLLKPSVARILSRSLFSCLCNTICLLTLDYYLF

SEQ ID NO: 209839 - protein, 80 aa, Glycine max
  unsure (1)..(80): unsure at all Xaa locations
  Clone ID: PAT_MRT3847_31513C.1.pep
TLQCHSYHMVPFRMKTCYGTPTSDVKCASWKLAVETHNIFVFETIPEECVESTQEYIHGEQYRSDSKTIXQQTYFYSINL

SEQ ID NO: 209840 - protein, 83 aa, Glycine max
  unsure (1)..(83): unsure at all Xaa locations
  Clone ID: PAT_MRT3847_31514C.1.pep
LAALISCRAHSLSNLSITSFHPSTSFTMTPAVRRLRVAVSGLGRMGARHANHFLHRTPXAELVAAFTPAENEIAWAKENLGAW

SEQ ID NO: 209841 - protein, 96 aa, Glycine max
  unsure (1)..(96): unsure at all Xaa locations
  Clone ID: PAT_MRT3847_31515C.1.pep
GLEGQLKNRVPFRXAKKKALELSEQAGTKRVLVHTAGPMDGXEIARVARIXYGRVTIQTIRAKIDYWCYTITTIYGVLGIKAWIFCPYRIRSLAAY

SEQ ID NO: 209842 - protein, 59 aa, Glycine max
  Clone ID: PAT_MRT3847_31516C.1.pep
KSRYIRVPPAGLDVLPGVFLSFPFPPWAGLPNDQLLPEKPGLVSIENLPALLQEEVLPF

SEQ ID NO: 209843 - protein, 133 aa, Glycine max
  Clone ID: PAT_MRT3847_31517C.1.pep
MSYTLCFAPICSLKSTNRPGTIAGNSVTQKAFGMNEVCQNSKVPSFQSLKVKATEDKTTQSKTIRSIVCSDCDGNGAKSCTQCKGTGVNSVDHFNGQFKAGGLCWLCRGKKDILCGSCNGAGFLGGFMSTCDD

SEQ ID NO: 209844 - protein, 120 aa, Glycine max
  Clone ID: PAT_MRT3847_31518C.1.pep
MAKSSFKMEHPLERRQAEASRIREKYPDRIPVIVERAEKSDVPEIDKKKYLVPADLTVGQFVYVVRKRIKLSPEKAIFIFVKNILPPTAAMMSAIYEENKDEDGFLYMTYSGENTFGLVF

SEQ ID NO: 209845 - protein, 49 aa, Glycine max
  unsure (1)..(49): unsure at all Xaa locations
  Clone ID: PAT_MRT3847_31519C.1.pep
GGGXCTPNSRKVPITTDTEEPLNGQLTLWLFTSYQINHTLTLRFFYHNV

SEQ ID NO: 209846 - protein, 89 aa, Glycine max
  Clone ID: PAT_MRT3847_3151C.1.pep
RSYVGVSDAINNGYDSWGPLFGKLFFALWVIVHLYPFLKGVMGKQEGVPTIILVWAILLASIFSLLWVRINPFLSKGGIVLELCGLNCD

SEQ ID NO: 209847 - protein, 395 aa, Glycine max
  Clone ID: PAT_MRT3847_31520C.1.pep
MHANPITVSNMANLPVEVVTEILSRLPVKSVIRLRSTCKWWRSIIDSRHFILFHLNKSHTSLILRHRSQLYSLDLKSLLDPNPFELSHPLMCYSNSIKVLGSSNGLLCISNVADDIALWNPFLRKHRILPSDRFHRPESSLFAARVYGFGHHSPSNDYKLLSITYFVDLQKRTFDSQVQLYTLKSDSWKNLPSMPYALCCARTMGVFVSGSLHWLVTRKLQPHEPDLIVSFDLTRETFHEVPLPVTVNGDFDMQVALLGGCLCVVEHRGTGFDVWVMRVYGSRNSWEKLFTLLENNDHHEMMGSGKLKYVRPLALDGDRVLFEHNRSKLCWYNLKTGDVSCVKITAAIGNTIEGTVCVESLVPPTLLNLRDESQSQEKNGKKRDDFLSQGFKLTL

SEQ ID NO: 209848 - protein, 80 aa, Glycine max
  Clone ID: PAT_MRT3847_31521C.1.pep
VVTEATLSSTIPPTRSLTSTLPRATTSFPPPPPVPPLSPPPTSPPPTTTHTHPPSPTTPPNPTPNAPPTAAAPTTTRSSN

SEQ ID NO: 209849 - protein, 156 aa, Glycine max
  Clone ID: PAT_MRT3847_31522C.1.pep
MMANLPVEVVTEILSRLPVKSVIRLRSTCKWWRSIIDSRHFVLFHLNKSHSSLILRHRSHLYSLDLKSPEQNPVELSHPLMCYSNSIKVLGSSNGLLCISNVADDIALWNPFLRKHRILPADRFHRPQSSLFAARVYGFGHHSPSNDYKLLSITYF

SEQ ID NO: 209850 - protein, 79 aa, Glycine max
  Clone ID: PAT_MRT3847_31523C.1.pep
SCSEIGRPGSWETVGIGIISYKTTLFIVKFWGLSITPPFTGLSLLMFFSGLNLKGNQSATVHNFQYQENDDKRSRVDAA

SEQ ID NO: 209851 - protein, 72 aa, Glycine max
  unsure (1)..(72): unsure at all Xaa locations
  Clone ID: PAT_MRT3847_31524C.1.pep
VAIETALLLAVKEGFFLGISSGGASTVAIKVGPXPALSGPPNGVIFPSCGGRYLSSPQFESVRPEAVLMAFD

SEQ ID NO: 209852 - protein, 94 aa, Glycine max
  unsure (1)..(94): unsure at all Xaa locations
  Clone ID: PAT_MRT3847_31525C.1.pep
MDIGRLLAHRDVDCAVFAHREDAXRSNADLSRAIASGLQLRLVHLHLPYSDAGLPERCENSDVVTSLDMESNMYTVVIMLHELAEDVFEALTPT

SEQ ID NO: 209853 - protein, 144 aa, Glycine max
  unsure (1)..(144): unsure at all Xaa locations
  Clone ID: PAT_MRT3847_31526C.1.pep
MGTNGCKLSGADEETPGGSMXDLKIHQSKIALSKNTEGGTMLRRDLLANLLTEGNSRASDDLQRTHHTKGMINMGATVGIPANTGIALACAMNSSFRGRASSDIYTIGSQDXESWNPACTKAMTMSFNPNPSADAWSLEYLKRT

SEQ ID NO: 209854 - protein, 49 aa, Glycine max
  Clone ID: PAT_MRT3847_31527C.1.pep
VTLGWEISKVVNDFLYKLFIICNQEYTELKLYLARTSFKHPTIYECFLK

SEQ ID NO: 209855 - protein, 69 aa, Glycine max
  unsure (1)..(69): unsure at all Xaa locations
  Clone ID: PAT_MRT3847_31528C.1.pep
LXXXXFXLGKXKXXXKHIWTXXXKIXEXEXXVTFPEXCKGLMANTXGTSSNXTPQXDYSMKXXQMGFSP

SEQ ID NO: 209856 - protein, 92 aa, Glycine max
  unsure (1)..(92): unsure at all Xaa locations
  Clone ID: PAT_MRT3847_31529C.1.pep
LYVAEDYVYLLKEFANTGDLLLATRTYDFXMSRATDNTFMGKLTSNMIRTLGRLKKIELALDLFEESRTRXYGNTVYSFSAMISALGRNNRF

SEQ ID NO: 209857 - protein, 88 aa, Glycine max
  unsure (1)..(88): unsure at all Xaa locations
  Clone ID: PAT_MRT3847_3152C.1.pep
MKHRFILLLLFCLVQSLYLPCIAPRYFQIGDPLFDKNNKVSYSNTXLAYDHXFLKYCTPKTILNNAXNFDXGLRTNRIDNSEYTFHMK

SEQ ID NO: 209858 - protein, 58 aa, Glycine max
  Clone ID: PAT_MRT3847_31530C.1.pep
RYRLSKVHLFRCESRSVYQNALLSTFPAVQVGFPVGIEAFNVVAPGEMTPRIYMGLSL

SEQ ID NO: 209859 - protein, 122 aa, Glycine max
  unsure (1)..(122): unsure at all Xaa locations
  Clone ID: PAT_MRT3847_31531C.1.pep
QPPHEKXPIYKPPYXKPPIHKPPXEPPPVYEPPLEKPPIYKPPFEKPPIYKPPFEKPPIYKPPFEKPPVYEPPPLVKPPPFEKPPFYKPPFEKPPLYEPPPLVKPXIYNPPPYGHYPPSKKN

SEQ ID NO: 209860 - protein, 42 aa, Glycine max
  Clone ID: PAT_MRT3847_31532C.1.pep
LILSLSPYPSKKQICSKLIVMCIVALQAAVCNDFAEQTSTTF

SEQ ID NO: 209861 - protein, 39 aa, Glycine max
  Clone ID: PAT_MRT3847_31533C.1.pep
LEVSGRTGPAILYSWELCLTSASFRKKKYFLSCVPHKNK

SEQ ID NO: 209862 - protein, 257 aa, Glycine max
  Clone ID: PAT_MRT3847_31534C.1.pep
MYLPRHHILTRLSPYRRHFSHSAAAVLRPPGPEPLTYLDGFPRPDPKHDETILAIPRADSGKNISAKERRAGRLPSIVFEQEDGQHGGNKRLISVRTDQIRKLVNHLGRSFFLSRLFHLQVRAHFDSEDDFVETVRVLPRAIHLKAGTDAPLNVTFIRAPSNALLKVDVPLVFRGEDVSPGLKKGASLNTIKRTVKYLCPADIIPPYIDVDLSELDVGQKLVMGDLKVHPALKLLQSRDEAVVKIMGQRVSELQKKK

SEQ ID NO: 209863 - protein, 40 aa, Glycine max
  unsure (1)..(40): unsure at all Xaa locations
  Clone ID: PAT_MRT3847_31535C.1.pep
ARNGSTQRXPFLFDLNYIPIWVAFRELRHPYIWFKLFKLQ

SEQ ID NO: 209864 - protein, 85 aa, Glycine max
  Clone ID: PAT_MRT3847_31536C.1.pep
TAASRRQTGVRDNPLKHPYPTHGFLFLVLSPPNPIFHHAVPISLTLTPSLHYRSLFRTGVSLNRYRYSAASTRRRCFLAIPRSKL

SEQ ID NO: 209865 - protein, 67 aa, Glycine max
  Clone ID: PAT_MRT3847_31537C.1.pep
PILDPSERLSDRGHRITFVNTHYNDNSLLQLTDIPSLHTQLTEYLCGCITDGIPSDSPRKGGLLHYD

SEQ ID NO: 209866 - protein, 48 aa, Glycine max
  Clone ID: PAT_MRT3847_31538C.1.pep
SIDKEFVHGFKRLYFSSCFPSMLFSYAHKFYPFLRLTYLFMYVGGAYQ

SEQ ID NO: 209867 - protein, 62 aa, Glycine max
  Clone ID: PAT_MRT3847_31539C.1.pep
MILVIRVHRPGRFESIFLSSTPAHQSYMLGLRGHILVACIRHHIPGGIHCAACCRCLAATRG

SEQ ID NO: 209868 - protein, 80 aa, Glycine max
  Clone ID: PAT_MRT3847_3153C.1.pep
NLDGLIGLSIVTVPSGASSGSFKPTQIKFPLATPCALRRVLGILPFYTSFKYKGCFTNKNKDRLLLLRNFHIKFVCTLPL

SEQ ID NO: 209869 - protein, 62 aa, Glycine max
  unsure (1)..(62): unsure at all Xaa locations
  Clone ID: PAT_MRT3847_31540C.1.pep
PPXSEXEYXCHLLNSCLXLKLXXGLXGGXIXXXXLXXXTXXXASTEAWIXLRNLDISLSLSP

SEQ ID NO: 209870 - protein, 81 aa, Glycine max
  Clone ID: PAT_MRT3847_31541C.1.pep
FLHKLILAYKNKLTSCILFLFTSPTNTYREAYSKQCLNKPYLRERERERKTWPSFQQLSLSNKKQIKKKEMREMNCSGRVG

SEQ ID NO: 209871 - protein, 49 aa, Glycine max
  Clone ID: PAT_MRT3847_31542C.1.pep
CARERASEQFQIEDLGLGRPGTRRFLMLIFVDSLTGHTISLELATSHTT

SEQ ID NO: 209872 - protein, 65 aa, Glycine max
  unsure (1)..(65): unsure at all Xaa locations
  Clone ID: PAT_MRT3847_31543C.1.pep
EISYNKILRDVKKELXMDGTDVKDPELGQGIQVXGDQRKNGLTMVVKGAMERKGHEMINGTRGRG

SEQ ID NO: 209873 - protein, 427 aa, Glycine max
  Clone ID: PAT_MRT3847_31544C.1.pep
NSEEKRVVSVTPLRDMTPERVFGKMGHLQKLLDRFLACRPTGLAKNSRMVLIALYPVVKESFQLYADICEVLAVLLDKFFDMDYADCVKAFDAYASAAKQIDELVAFYNWCKDTGVARSSEYPEVQKITSKLLETLEEFVRDRAKRPKSPERKEEAPPVEKVEEEPAPDMNEIKALPPPENYTPPPPPEPEPKPQPQVTEDLVNLRDDAVTADDQGNKFALALFAGAPANNANGSWEAFPSNGQPEVTSAWQTPAAEPGKADWELALVETASNLSKQKAALGGGLDPLLLTGMYDQGMVRQHVSTTQLSGGSASSVALPGPGKTPVLALPAPDGSVQPVNQDPFAASLSVPPPSYVQMADMEKKQHLLVQEQQVWHQYARDGMQGQSSLAKLNGAGYYAGGPMPMMPYGMPPVNGMGPPTGYYHTPY

SEQ ID NO: 209874 - protein, 479 aa, Glycine max
  unsure (1)..(479): unsure at all Xaa locations
  Clone ID: PAT_MRT3847_31545C.1.pep
MGEENVKQPLLERKYYKDCPGCKVDQAKELSEGKGVPVKNLFIMWMVVLCAALPISSLFPFLYFMVRDFNIAKTEADISSYAGYVGSAFMLGRCLTSLLWGTIADRFGRKPVFVIGIIAVVIFNTLFGLSTSFWMAVIMRFLMGSLNGLLGTAKAYATELFREEHQAIGLSTVSAAWGIGLIIGPALGGYLAQPVEKYPHIFTKDSFWDKFPYFLPNLIISAFAFVVAIGCIWIPETLHNHNCSNESTDNAEALENGSSGAGNEKTIQKNENLLRNWPLMSSILSYCVFSLHDIAYQEVFSLWSVSPQRLGGLNFTTNDVGNVLXISGLALITYQLTIYQSVEKASGPISIARISTMLSIPLLQSYPFIAXLSGLALYIVLSIASFLKNILSITIVVGLFILQNRAVDQLQRGAANGIAMPGMSLFKAIGPAAGGALLSWSEKRMDASFLTGTHMVFFALNIVEGFGFIMLFGPFLVKR

SEQ ID NO: 209875 - protein, 38 aa, Glycine max
  Clone ID: PAT_MRT3847_31546C.1.pep
ISRYFNPFDLDIIVSCLFAIVNIVGVENSVQFTHSYKS

SEQ ID NO: 209876 - protein, 130 aa, Glycine max
  Clone ID: PAT_MRT3847_31547C.1.pep
GILMVVTHQDPTENLVQSEPEKKRGIIEKVKHLTSLGKKNNAKLDELEQTSPYDSDRSPVFDSDDSYDSTTSSGSSSNSGGIHNPRSTLSNGSERFTTSDTAKTRLSHLPRNISLNGWNYKTPTNDQRTQ

SEQ ID NO: 209877 - protein, 88 aa, Glycine max
  Clone ID: PAT_MRT3847_31548C.1.pep
ERTPSMSELNEILYGQEHLKQRDLSFVFRLQGADNSTLYGCCVLVEELVQSLWIASLILIRASTRLRRIITTRMLLILQGPVLIALGV

SEQ ID NO: 209878 - protein, 207 aa, Glycine max
  unsure (1)..(207): unsure at all Xaa locations
  Clone ID: PAT_MRT3847_31549C.1.pep
MSNRSSQGRQHDNNNNKGFAKTHNQKKFVPKNQSQNPNPNPTPTLSTSLRQTQPNRGQKGNFVKYLPQDEAVAAGLGAEDGALDPLESQRVVDLLNTQLSRLLKLKPKQFWTQVATDTSLHELLDSFLQFRSRWYDFPHRGVQGIVAGVIVGELELSRRVFMVLYRISSXKDPGARPVDALSLRDHEVLLQEKKLLELPKLLDICAI

SEQ ID NO: 209879 - protein, 77 aa, Glycine max
  Clone ID: PAT_MRT3847_3154C.1.pep
PKIGICFYRIFVPKLLVRNKFYLGPQGGVRLRHNGFVGLVNYVSQSLEVNVGGKDHTLFRIIRLGKIELFKVGESPP

SEQ ID NO: 209880 - protein, 55 aa, Glycine max
  Clone ID: PAT_MRT3847_31550C.1.pep
KKKKKKKKKKKKKKKKILKRGEPKKKKKKKKKINKKKLRGGGLLTQHYPPSRPKR

SEQ ID NO: 209881 - protein, 45 aa, Glycine max
  Clone ID: PAT_MRT3847_31551C.1.pep
KHFGHGVTQVWCIGCIQFFGVIDLGQLKVMTWDNGGYIQRLTVLT

SEQ ID NO: 209882 - protein, 53 aa, Glycine max
  Clone ID: PAT_MRT3847_31552C.1.pep
SAETTLQCPGLIMTHQGINMRSTTSNDYKKYLHSMGNNTFEYRAYMGPEPENP

SEQ ID NO: 209883 - protein, 49 aa, Glycine max
  Clone ID: PAT_MRT3847_31553C.1.pep
LFEFRQKHLSIKGITLFDKKNRLPLFTYASTSIQAFRSLIFSSHKGKDL

SEQ ID NO: 209884 - protein, 119 aa, Glycine max
  unsure (1)..(119): unsure at all Xaa locations
  Clone ID: PAT_MRT3847_31554C.1.pep
KLAPQRRSQRHMGGQMQQSNAAATALYDHAGAGSLHYAAGPATDAGDAVMARWLQSAGLQHLASPLPSMPXDQRLLPNLLMQGPGALFAEEKRTLPKLMKKLAFFGESGSEPYTPTSQN

SEQ ID NO: 209885 - protein, 127 aa, Glycine max
  unsure (1)..(127): unsure at all Xaa locations
  Clone ID: PAT_MRT3847_31555C.1.pep
MQASKNNNCVDSNFNFFDAFDLDSQLTEEERTLRDQAHAYCQEKLQPRVTQAFREEKFDPSLLPELGSXMGFLGAPYXQGYGCAGTSFVGYGLLARELERVDSGYRSIVSVQTSLVIGPIVTYGSEA

SEQ ID NO: 209886 - protein, 67 aa, Glycine max
  Clone ID: PAT_MRT3847_31556C.1.pep
CCHGYNTTGPMASSYTSSNKKKAHARKLSRQKRMMITMVMTMMLEMTMTKTKSGGSGLRQHIAYYCC

SEQ ID NO: 209887 - protein, 66 aa, Glycine max
  Clone ID: PAT_MRT3847_31557C.1.pep
VTDLRGRMGYLAEPQSVCISGSSCTDVSNIVLPVRPQGICCYVLLQIVRLVPPLGDDCLVAYIFRV

SEQ ID NO: 209888 - protein, 133 aa, Glycine max
  Clone ID: PAT_MRT3847_31558C.1.pep
FKKEIIHTEYIIILWFAFAVKSMDPQLWHKVAAISGVAALGLGTYGAHVFKPQNPAYKDVWHTASLYHLVHTAALVAAPITKHPNVFGGLLTAGILVFSGTCYTVAFLEDRKYSTMAPFGGFAFIAAWGSLFF

SEQ ID NO: 209889 - protein, 47 aa, Glycine max
  Clone ID: PAT_MRT3847_31559C.1.pep
INHPTRPDKLTSNTLLLHSMDHSLSGHLRTHTTSGITLNPSFETDIH

SEQ ID NO: 209890 - protein, 47 aa, Glycine max
  Clone ID: PAT_MRT3847_3155C.1.pep
LIKFGKKIFLETRNILFLIIPFYYFLMFLPICLCTSWCIIFGTWLKT

SEQ ID NO: 209891 - protein, 50 aa, Glycine max
  Clone ID: PAT_MRT3847_31560C.1.pep
NRCFSFLAFYGTLYFLSLCHDKRILEIGFMIHHLELVESLLYGGTGNMRE

SEQ ID NO: 209892 - protein, 135 aa, Glycine max
  Clone ID: PAT_MRT3847_31561C.1.pep
NTHFPFGEHGFSERVSSPKLDPFLEYFWIFLSKLLNTTLWVFTKGFMRLYGSDSSKAMKPLCSSEFLCDNEKAESIHSESEYFGALNDTLSHVCDQIDSNGSQKEAESMEKCCSETVHDYGNSGLEEEETTKLVF

SEQ ID NO: 209893 - protein, 163 aa, Glycine max
  unsure (1)..(163): unsure at all Xaa locations
  Clone ID: PAT_MRT3847_31562C.1.pep
LELMVETVATLSWCLTMYFLIVKQTGIEKSIIFALSQSAYGACLFLGYWGYLLLSQKFRVSYLFPFREGKVIDFDRQLSKMCMLFTFQSFRKLILQEGEKIVLVCLVVRLVFLPFEESSYATFARSTSGQYPGKSKKLGNGVTESLKLVXVIGLXFMAXGQVF

SEQ ID NO: 209894 - protein, 143 aa, Glycine max
  Clone ID: PAT_MRT3847_31563C.1.pep
MYSAQARAARAARAGSHTCKAGYAGEDAPKAVFPSVVGAIDQMDIDGTADINDENSDKTKGKCKLYVGSQSLGYRRDHMEVLSPLKNGVVVDWNIVDNIWDHALRECLLVDPKERPMLLAEPCSNTQEQRERAAELMFGKILK

SEQ ID NO: 209895 - protein, 81 aa, Glycine max
  Clone ID: PAT_MRT3847_31564C.1.pep
KILHNRSIVLYLQSYFVHSSIFHSVSEARLTSTFFESMYVLEINGNEVCENPCYGSISVYSSIIASCSYSSDNLFFEETAS

SEQ ID NO: 209896 - protein, 75 aa, Glycine max
  unsure (1)..(75): unsure at all Xaa locations
  Clone ID: PAT_MRT3847_31565C.1.pep
XXRDDLXGPSPSMNXATVPWXRLFGTCTCNIGLSXNKFCLGCEEKASKSNPCVDVDHSPTPTLLWGWLLQXMKIA

SEQ ID NO: 209897 - protein, 57 aa, Glycine max
  unsure (1)..(57): unsure at all Xaa locations
  Clone ID: PAT_MRT3847_31566C.1.pep
REAEVISSXWGGSLGLLGLTSCLQIDSHCGXSCLPPLLLXXSDKSVLXFCLGLDEFI

SEQ ID NO: 209898 - protein, 48 aa, Glycine max
  Clone ID: PAT_MRT3847_31567C.1.pep
ILMLLFVDRITLIRGASISYSSTVSAYLKRCLMDNIDMTAHAVVKRSY

SEQ ID NO: 209899 - protein, 53 aa, Glycine max
  unsure (1)..(53): unsure at all Xaa locations
  Clone ID: PAT_MRT3847_31568C.1.pep
DTLTNAVQVFNGKNWKKIAEFLPGKSEVQCLHRWQKVLHPELVKGPWTXEVET

SEQ ID NO: 209900 - protein, 61 aa, Glycine max
  Clone ID: PAT_MRT3847_31569C.1.pep
LKVLPFNSYDTITSFSNAVYQRTEKTKLASKSYVQYSNFIMCCYTNKRNMEKKEVLSISIE

SEQ ID NO: 209901 - protein, 58 aa, Glycine max
  Clone ID: PAT_MRT3847_3156C.1.pep
SLKAAVLAAGIWSRSLSTCLVSIRNLVDMAAILTTLVTPLVVFCFQSLTKEPQGISVS

SEQ ID NO: 209902 - protein, 92 aa, Glycine max
  Clone ID: PAT_MRT3847_31570C.1.pep
IIRAYNLFVYKLEIGIVVCLVWLLLGCPILSQRGNRQSNCFIGMALFRPYGSGKGLKSDPSSSLKSLECKIYQLCKSRVFFHAQPRQSRFPA

SEQ ID NO: 209903 - protein, 42 aa, Glycine max
  unsure (1)..(42): unsure at all Xaa locations
  Clone ID: PAT_MRT3847_31571C.1.pep
KKIQQQKKKKREREKKKKENAKNXKKXTKSTKQKNKKNKXKT

SEQ ID NO: 209904 - protein, 161 aa, Glycine max
  Clone ID: PAT_MRT3847_31572C.1.pep
MALQTSNITEEINENWWHAVRCRFHYQHADGKRNRLGCKIFMEDKEGLVPQVQQQDTWRWEGETNGRYTVRNAYRLLDRGSPNENQDGVFNIIWKLKIPIKASIFAWRLIGDRLPTKCNLRRRNIEIYDISCPFCRNHGEDASHLFFNCDNILPLGWESMS

SEQ ID NO: 209905 - protein, 51 aa, Glycine max
  Clone ID: PAT_MRT3847_31573C.1.pep
KGKKMMKFFVLNTSISWRKNALVPSRMNANSAETNICELVVFDQTYLPYIC

SEQ ID NO: 209906 - protein, 111 aa, Glycine max
  Clone ID: PAT_MRT3847_31574C.1.pep
LKIDIVPEAFQGNINQESGKVDLEFKAKFLFSAASLYKAPPLMVKTVLTSEETNGTMRRGRGKRLDKEGKCRLVGVATFDPIDDIFMNSFLGLPTECLAELNAVISISSSS

SEQ ID NO: 209907 - protein, 51 aa, Glycine max
  Clone ID: PAT_MRT3847_31575C.1.pep
IVISTLLNPLYSSHFQEVKNGHALLFETIWFICLVRYISKFTQSGRIERLQ

SEQ ID NO: 209908 - protein, 79 aa, Glycine max
  Clone ID: PAT_MRT3847_31576C.1.pep
RRSRINGNEVLFDRRRVLFHKVVCYCGHVGRYAASGRGGGWGVRVAVISLGVWRVWGVKVTVCNRTSAGVRDRGGARLE

SEQ ID NO: 209909 - protein, 55 aa, Glycine max
  unsure (1)..(55): unsure at all Xaa locations
  Clone ID: PAT_MRT3847_31577C.1.pep
XXARTXTXXRNSARAPXPRTPXPSHXXXXXXXXXAXHXXXKXQPXPSXXXHTTNX

SEQ ID NO: 209910 - protein, 165 aa, Glycine max
  unsure (1)..(165): unsure at all Xaa locations
  Clone ID: PAT_MRT3847_31578C.1.pep
FRTHGLRQNRMEGQNIIDGVKLDVPPFKGRSDPDAYLDWEMKIEHVFSCNDYTEKXKVKLAAAEFSDYALVWWNKNQKEMIREDRWEIGTWTEMRRVMRNRYVPTSYNRTMRXKLQRLTQGSLTVEEYYKEMEMTLVRANIEEEIEDTMTRFLSGLNPDIRDVVQ

SEQ ID NO: 209911 - protein, 61 aa, Glycine max
  Clone ID: PAT_MRT3847_31579C.1.pep
MFLIKMKDCAGPPWEVKWGQKKNYREPIPASGGNPSGPCSKQQNLNRTPGAENHSHALCKS

SEQ ID NO: 209912 - protein, 78 aa, Glycine max
  Clone ID: PAT_MRT3847_3157C.1.pep
MKQSSSGRIDIACWILEAAVAVPDGSIIHNVYNTASSLQLQRNSCRRQNSEATLFCRYFSLYTKSMVGPFSANMWRRV

SEQ ID NO: 209913 - protein, 41 aa, Glycine max
  Clone ID: PAT_MRT3847_31580C.1.pep
QHILKVAPEWWMHRLQIVREVMVVPLLSCYCIRNEAFAEVL

SEQ ID NO: 209914 - protein, 73 aa, Glycine max
  unsure (1)..(73): unsure at all Xaa locations
  Clone ID: PAT_MRT3847_31581C.1.pep
DYVSDLGIDGLERIDELLYGIGVELGFFICGEPGGHAMINGSSVGERSVEGGGESVKRKKPWPLRSRRNSSXG

SEQ ID NO: 209915 - protein, 52 aa, Glycine max
  Clone ID: PAT_MRT3847_31582C.1.pep
PASTKGKPTKLHKRKHQIGSLYFDMKQNEMKLAERRAKGMLTKAETQAKYGW

SEQ ID NO: 209916 - protein, 52 aa, Glycine max
  Clone ID: PAT_MRT3847_31583C.1.pep
NEGIFDVDTNVLYSQYKILVITWYNISVCYSVNKSLIYILSYFVRLEGFCLI

SEQ ID NO: 209917 - protein, 54 aa, Glycine max
  Clone ID: PAT_MRT3847_31584C.1.pep
GVKMRSHKRISLIPRPPSLFVFLIPLQRRSLPFLAHNNIVNAPSPTRDQWWLGL

SEQ ID NO: 209918 - protein, 68 aa, Glycine max
  Clone ID: PAT_MRT3847_31585C.1.pep
MNFIWRIGAGCLRYENKIASGPFSDLYKGTFCNQDVAIKVLKHESLNDNMLREFAQEVDILCKIQHKN

SEQ ID NO: 209919 - protein, 349 aa, Glycine max
  unsure (1)..(349): unsure at all Xaa locations
  Clone ID: PAT_MRT3847_31586C.1.pep
MAQVLGVEAKARAFFVXGDSLVDNGNNNYLGTIARADSPPYGIDYPTLRPTGRFSNGLNIPDLISERIGGESVLPYLSPQLKGENLLNGANFASAGIGILNDTGSQFLNIIRMYRQLDYFEEYQQRVSILIGVARAKKLVNQALVLITVGGNDFVNNYYLVPYSARSRQYSLQDYVKFLIVEYRKLLMRLYDLGARRVIVTGTGPMGCVPAELAMRGTNGGCSAELQRAASLYNPQLTHMIQGLNKKIGKDVFIAANTALMHNDFVSNPAAYGFTTSQIACCGQGPYNGIGLCTPLSDLCPNRNLHAFWDPFHPSEKSNRLIVEQIMSGSKRYMKPMNLSTVISLDARK

SEQ ID NO: 209920 - protein, 80 aa, Glycine max
  Clone ID: PAT_MRT3847_31587C.1.pep
GFENSAGAEKHLALALKVQAVRSIFYNCLMDGFYDTFYAHTVRKFYRDCFITSTNDSVFGDAVAVMHNCTIVVRKPLDSQ

SEQ ID NO: 209921 - protein, 71 aa, Glycine max
  Clone ID: PAT_MRT3847_31588C.1.pep
QLVYDLDMTKCICCGFCQEACSADALALGPDFEFATDTHEELLYDKEMLFEYDDRWETETAENLRSDSLYH

SEQ ID NO: 209922 - protein, 80 aa, Glycine max
  Clone ID: PAT_MRT3847_31589C.1.pep
EKKNVLQNPKLENIVARGVVLEENCPGELWGVFLKKKVFLKAAFSLGGGSQNPPMKGRQILKRGGCLFYHPNLLMGDLRA

SEQ ID NO: 209923 - protein, 56 aa, Glycine max
  Clone ID: PAT_MRT3847_3158C.1.pep
QIFVKTLTGKTITLEVESSDTIDHVKAQIQGQEGIPPGPATSHFSPERTLRRPYPL

SEQ ID NO: 209924 - protein, 370 aa, Glycine max
  unsure (1)..(370): unsure at all Xaa locations
  Clone ID: PAT_MRT3847_31590C.1.pep
MVLPSGFVSMLILFGMVLVVGVNIVPGVEAKARAFFVFGDSLVDSGNNNYLATTARADSPPYGIDYPTRRPTGRFSNGLNIPDLISERMGGESVLPYLSPQLKSENLLNGANFASAGIGILNDTGSQFLNIIRMYRQLDYFEEYQQRVSILIGVARAKKLVNQALVLITVGGNDFVNNYYLVPYSARSRQYSLQDYVKFLIVEYRKLLMRLYDXGARRVIVTGTGPMGCVPAELAMRGTNGGCSAELQRTASLYNPQLTHMIQGLNKKIGKEVFIAANTALMHKDFVSNPAAYGFTTSQIACCGQGPYNGIGSCAPLFNLCPNRNSHAFWDPFHPSEKANRLIVEQIMSGFKRYMKPMNLSPVLALDARK

SEQ ID NO: 209925 - protein, 88 aa, Glycine max
  unsure (1)..(88): unsure at all Xaa locations
  Clone ID: PAT_MRT3847_31591C.1.pep
WELVTFDISTSIFALVVIKVASLFIRSHYHCLEYENGKECQDNSRKELSNCCKTHNMILKPLLIWKNIFPKHKTNYKYRGMKSLXRSG

SEQ ID NO: 209926 - protein, 75 aa, Glycine max
  Clone ID: PAT_MRT3847_31592C.1.pep
LSTTMILCFTLTLGSNTQIHLLWPPPFDFPMDPFSISPPVVINHGLRYTKMEQAGIVWPLYKAPTVASINLAFLI

SEQ ID NO: 209927 - protein, 44 aa, Glycine max
  Clone ID: PAT_MRT3847_31593C.1.pep
KRILKNPWLVSHEYKSCWYDPFTHNHHHVTHARTRLHKQKHGFY

SEQ ID NO: 209928 - protein, 93 aa, Glycine max
  unsure (1)..(93): unsure at all Xaa locations
  Clone ID: PAT_MRT3847_31594C.1.pep
GRKTKKGEAPPXINKFNYHLYNSHPNLKNVLKKINILCTTLFFFFFFFFFFFFFFFFFXFCETETSKTTYNFYSYENHGRKKMPSCVPLVHST

SEQ ID NO: 209929 - protein, 103 aa, Glycine max
  Clone ID: PAT_MRT3847_31595C.1.pep
MVYITEWDKFVEQSIELFRADPDSTRYVMKYRHCDGKLVLKVTDNRQCLKYKTDQAQEAKKMEKLNNMFFALMARGPDVDLSEVTGKEQMDAQPTKKGRGRKQ

SEQ ID NO: 209930 - protein, 47 aa, Glycine max
  Clone ID: PAT_MRT3847_31596C.1.pep
SLRIVYSLFITALTKKLIQIQVIICNFFCRMIDFWMCRSLHLYLILQ

SEQ ID NO: 209931 - protein, 157 aa, Glycine max
  Clone ID: PAT_MRT3847_31597C.1.pep
MEFVKRVLGSSKRLYPENSGGSGSYGRRLSTSKKKKKKAPQGCICVYVGAERERFVIKVKIANHPLFKALLDAAEREYGYRNNGPLWLPCDVDLFSEALKDMENSIQEEEETGSVGCAAFAAGHSFRRSPSSASNNYISCRYLLTGSVIHHYQTLVS

SEQ ID NO: 209932 - protein, 175 aa, Glycine max
  Clone ID: PAT_MRT3847_31598C.1.pep
DVLAALAREAGWVVDADGTTYRQCPPPSNGSFAARSVESQLSGGSLRNCSVKETIENQTAVLRIDECLSPASIDSVVIAERDSKNEKYTNARPINTVDCLEADQDQLTLMQDIHSGVHENDFTSTPYVSVYVKLPAGIINKFCQLIDPEGIKQELIHIKSLNVDGVVVDCWWGIV

SEQ ID NO: 209933 - protein, 121 aa, Glycine max
  unsure (1)..(121): unsure at all Xaa locations
  Clone ID: PAT_MRT3847_31599C.1.pep
ARPKTRNPXSRLGASHMPPRRTWVFSRTFFRPPXVLAMVNAIPTLPWSXXXGLGCALGGPNWWHAAMPFRNYQSGVCFMPTHVVLLFQHAHLSRFTSRPLCRVAGDRTLDSSIEIARRCSV

SEQ ID NO: 209934 - protein, 107 aa, Glycine max
  unsure (1)..(107): unsure at all Xaa locations
  Clone ID: PAT_MRT3847_3159C.1.pep
SLIPGTGLTEAVKTLNHDGLQGHKEWLAEENNLGDLVHAHLVKLIVYCIEDDQRLLAYELTPRGSLHKHLFRRSLPLAWTITMKIALGAAXGLAFLHEVADRPVLYR

SEQ ID NO: 209935 - protein, 54 aa, Glycine max
  Clone ID: PAT_MRT3847_315C.1.pep
MANSHLPRRIIKETQRLLSEPAPGISASPFEDSMRHYNAMILGPTQLSYEGGVF

SEQ ID NO: 209936 - protein, 37 aa, Glycine max
  Clone ID: PAT_MRT3847_31600C.1.pep
RHACRTFSYYSLTQLSWWTFFTGHFHCNILNSQVYGG

SEQ ID NO: 209937 - protein, 59 aa, Glycine max
  Clone ID: PAT_MRT3847_31601C.1.pep
QRVRHDFLCLYIVHCFNYLEASIPSEFKVIIFETRSGRTCAKAPILSRRKLVRFDELAP

SEQ ID NO: 209938 - protein, 46 aa, Glycine max
  unsure (1)..(46): unsure at all Xaa locations
  Clone ID: PAT_MRT3847_31602C.1.pep
FFQRRNLEXEVXRLIXHIKIDSNFXRXIFEIKKKCSITKQVDRLIQ

SEQ ID NO: 209939 - protein, 98 aa, Glycine max
  Clone ID: PAT_MRT3847_31603C.1.pep
GALFFLEPAPHGCGFTFAVKNTNTITTWFGPKRERHHLSRGLKIWLPYIQIHIIVRILHVKQPNTIFKDLFLFAKHRKRPSREKCHTGAALCLGFKTC

SEQ ID NO: 209940 - protein, 55 aa, Glycine max
  Clone ID: PAT_MRT3847_31604C.1.pep
KSLNLCSAIRHALHIALHSDSRSYVFGEDVSYRVVCRCSTGLPDLFGNMRSFNTP

SEQ ID NO: 209941 - protein, 43 aa, Glycine max
  unsure (1)..(43): unsure at all Xaa locations
  Clone ID: PAT_MRT3847_31605C.1.pep
KLMQXCESAYVDIAXHFIHFYIIVVSXNYLQYPIMFRFCHRIF

SEQ ID NO: 209942 - protein, 44 aa, Glycine max
  Clone ID: PAT_MRT3847_31606C.1.pep
PAPGAKKKPFCFIGVIVLKGAPRKEMLEWGSRVFVANNRPPNPR

SEQ ID NO: 209943 - protein, 73 aa, Glycine max
  Clone ID: PAT_MRT3847_31607C.1.pep
IFVMLAFFYCLIAWQLFKIFRIVTAPFIAIRETALFPQDGPSCFCLMETRVQVQTFRNQDMAGAGFEPAIFRL

SEQ ID NO: 209944 - protein, 140 aa, Glycine max
  Clone ID: PAT_MRT3847_31608C.1.pep
FGSSTAARRRQKGYLDLFPLQTFHQILCCFFCPPFHVCLLVFLHFTFFLSFLLIHRSSSSSSSSSSSFFFTPFIIFCVPSMAVLPSSSSNLELTISVPGFASSPVLLPLSSGKHHININNFVLSFSNHHLCHFDQPHTSS

SEQ ID NO: 209945 - protein, 48 aa, Glycine max
  Clone ID: PAT_MRT3847_31609C.1.pep
EGTRARVSELWVAPCCRWNKPFFSSLKSLRFYMAARRTRLHHLSQPAN

SEQ ID NO: 209946 - protein, 387 aa, Glycine max
  Clone ID: PAT_MRT3847_3160C.1.pep
MGFKENSMNWIGVTVGGLVGIVGAILALKDAKVAIPFTLPWSFATDNSSFEKSLFVPGLQNLQNNCFLNVVLQALASCFCFQSFLHSVIGECGSKDLDENMPLALALATLLEELSSFSSERVTLSPRKMMLAMSNYIPNFNLTSQQDAAEAFLHLLCLLREEFGGCYAPKMSSLAEIFASNNRILTPIQSDCQSEQERWQQLFLGPFDGILGSSLTCQSCSSQISINFEHFDCLPLSPVLSDTSTIRVGCTLVDCLKQFIVAEHVENYHCSQCWHNAAIKYLSIMEGNEVELKMIRRCSDPEICNCRKMYNLDKLPWSNRFSHTLKQLSIARCPRILCIQLKRVYMNVFGELVKLQVIESLTYWICLSFCPTPSQKEKKSSPDLMPN

SEQ ID NO: 209947 - protein, 182 aa, Glycine max
  unsure (1)..(182): unsure at all Xaa locations
  Clone ID: PAT_MRT3847_31610C.1.pep
MRTDIGEGEELQNPRSFKVHSKICTELAKLVDRISRIVPDIEAARPGFSSGIESLCLLNNAIDKAKLLLLHCSECSKLYLAVTGDTVLSRCLKATRSLEKSLIQIQDMVPVMLAVEVSRIIHDLECTRLVLDPNEEKAGKGCEEXLLTLTSDSADDSEVKALQFAASTLNITSPKAILIEPR

SEQ ID NO: 209948 - protein, 42 aa, Glycine max
  Clone ID: PAT_MRT3847_31611C.1.pep
KFAYIFVINTPICGLLPTILIPTCKMFKVSVGLLLVGLDVSD

SEQ ID NO: 209949 - protein, 45 aa, Glycine max
  Clone ID: PAT_MRT3847_31612C.1.pep
LGKTGGNLYDATDMAPSVKLSHRCVDALDGWSYSHICWNLIVQKA

SEQ ID NO: 209950 - protein, 57 aa, Glycine max
  Clone ID: PAT_MRT3847_31613C.1.pep
ELRFELEGNNSHTAESVPMVRLTGAAKADTHGLGGKVNPVDFGSYGLGRLVVRYPCT

SEQ ID NO: 209951 - protein, 61 aa, Glycine max
  unsure (1)..(61): unsure at all Xaa locations
  Clone ID: PAT_MRT3847_31614C.1.pep
MFPFGQKGHKIKGTMVVMQKNVLDIHSIXSVGGILDQGLCFIGRAVDALTFAATKISSQLI

SEQ ID NO: 209952 - protein, 55 aa, Glycine max
  Clone ID: PAT_MRT3847_31615C.1.pep
SRLAERMAWLILELLYKEVRNSNLGFILGENWLTKHELKVKEYASKYERVGRKRF

SEQ ID NO: 209953 - protein, 129 aa, Glycine max
  Clone ID: PAT_MRT3847_31616C.1.pep
QGLRSLVWDRSSTQNSQGTSRGQGYLAHKIQLINDRLLVYEIHGSPVISPVSGDQCDVRPQSSLVHKRPLAWQHTVRKTFAVTICKILLKVTNRAESIGKSSYLGITLEDVVPYILTHPEVVESHTGYH

SEQ ID NO: 209954 - protein, 117 aa, Glycine max
  Clone ID: PAT_MRT3847_31617C.1.pep
RPRVRPRVRPRVRYTLSSTVKAWVYSLYVIIFRAPDSPSAIDGLYCKTHALPAKKSLIVYLTDYDAVTFILMDDATTVLHVLRVGETMYQATIGWLMIWVKSATGISYSREDQMLWR

SEQ ID NO: 209955 - protein, 457 aa, Glycine max
  unsure (1)..(457): unsure at all Xaa locations
  Clone ID: PAT_MRT3847_31618C.1.pep
MGSHQQEPWLLENGKPRVLTKETRHGRSAHRMSSTSLRKKSSRTLVSKVPCATLRNFLLNLQEVILGTKLSILIPAIPAAIVAECFGFGRPWIFILSLLGLTPLAERVSFITEQVAFYTGPTVGGLLNATCGNVTELIIAIFALSSNKIAVVKYSLLGSILSNLLLVLGTSLLCGGIANVGVEQKYDRRQADVNSLMLLLGLLCYLLPMLFKYSGASAALTVDPSLHLSRASSIVMLIAYVVYIVFQLWTHRELFEEEDDGKDGEDGSEEQAVIGLWSGIAWLVGMTVFIAVLSEYVVDTIEDASDSWGLSVSFLSIILLPIVGNAAEHAGAIIFAFKNKLDISLGVALGSATQIAMFVVRYTHLXYVPLCVIVAWIMGINMDMNFNLLETGSLALAIIVTGFTLQDGTSHYMKGLVLLLCYIVIGACFFVQRTPFNNQADVTNITLKPTTNAVLSA

SEQ ID NO: 209956 - protein, 91 aa, Glycine max
  Clone ID: PAT_MRT3847_31619C.1.pep
QDISLGVALGSATQIAMFVVPLCVIVAWIMGINMDMNFNLLETGSLALAIIVTGFTLQDGTSHYMKGLVLLLCYIVIGACFFVQRTPFNSK

SEQ ID NO: 209957 - protein, 32 aa, Glycine max
  unsure (1)..(32): unsure at all Xaa locations
  Clone ID: PAT_MRT3847_3161C.1.pep
KVKIKTKRNIISDLSQLNMRNCNLNDXKLYIS

SEQ ID NO: 209958 - protein, 70 aa, Glycine max
  Clone ID: PAT_MRT3847_31620C.1.pep
MGSHQLEPWLLDNGKPRALTKETRHGRSAHRMSSTSLRKKSSRTLVSKVPCATLRNFLSNLQEVILGTKL

SEQ ID NO: 209959 - protein, 90 aa, Glycine max
  unsure (1)..(90): unsure at all Xaa locations
  Clone ID: PAT_MRT3847_31621C.1.pep
TYSSGVALGSATXIAMFAVPLCVIVAWIMGINMDMNFNLLETGSLALAIIVTGFTLQDGTSHYMKGLVLLLCYIVIGACFFVQRTPFNSK

SEQ ID NO: 209960 - protein, 71 aa, Glycine max
  Clone ID: PAT_MRT3847_31622C.1.pep
RELCCSSPEASAGGIDTGYSYVAITTTRKSHCWVKFGPVQILCGGCIMDIFDSERALIAKEDNTCAVMDLE

SEQ ID NO: 209961 - protein, 293 aa, Glycine max
  unsure (1)..(293): unsure at all Xaa locations
  Clone ID: PAT_MRT3847_31623C.1.pep
GRVGSFXLLLVLGTSLLCGGIANVGVEQKYDRRQADVNSLMLLLGLLCYLLPMLFKYSGASAALTVDPSLHLSRASSIVMLIAYVVYIVFQLWTHRELFEEEDDGKDGEDGSEEQAVIGLWSGIAWLVGMTEFIAVLSEYVVDTIEDASDSWGLSVSFLSIILLPIVGNAAEHAGAIIFAFKNKLDISLGVALGSATQIAMFVVPLCVIVAWIMGINMDMNFNLLETGSLALAIIVTGFTLQDGTSHYMKGLVLLLCYIVIGACFFVQRTPFNNQADVTNITLKPATNAVLSA

SEQ ID NO: 209962 - protein, 270 aa, Glycine max
  unsure (1)..(270): unsure at all Xaa locations
  Clone ID: PAT_MRT3847_31624C.1.pep
MLINVKQSTMVRPAEETPRRALWNSNVDLVVPNFHTPSVYFYRPNGVSNFFDAKVMKEALSKVLVPFYPMAARLRRDDDGRVEIYCDAQGVLFVEAETTAAIEDFGDFSPTLELRQLIPSVDYSAGIHSYPLLVLQVTYFKCGGVSLGVGMQHHVADGASGLHFINAWSDVARGLDISLPPFIDRTLLRARDPPLPVFDHIEYKPPPATKKTTPLQPSKPLGSDSTAVAVSTFKLTRDQLSTLKGKSXEDGNTISYSSYEMLAGHVWRSV

SEQ ID NO: 209963 - protein, 93 aa, Glycine max
  unsure (1)..(93): unsure at all Xaa locations
  Clone ID: PAT_MRT3847_31625C.1.pep
HDYTHLSSSQRPYSSTTFSXLYPSIIFSQPXPSIIFSXLYPSIIFSXPCPSIIFSXPYPSIIFSHPFPSIIFSLPLPSTIFPXLYPSIISLRP

SEQ ID NO: 209964 - protein, 85 aa, Glycine max
  Clone ID: PAT_MRT3847_31626C.1.pep
MRSFCSRCLTFCVKNSLKQKGRKLHTTHLWVFMDLEGNDGVIPSYSLFRKARYGEDTIIANFDTGNFGPLFLLLYIFTFPESHLP

SEQ ID NO: 209965 - protein, 123 aa, Glycine max
  Clone ID: PAT_MRT3847_31627C.1.pep
EFPRTMSSIAACLFGLGMAAGNVLSSLIFSIVENVTSRGGKQGWVLDNINKGRYDRYYWVLASLSAVNILYYLVCSWAYVPTVDQLFKVSDENSSNEKVLTQLGNMSQVDVSEGIGSNEKRVN

SEQ ID NO: 209966 - protein, 100 aa, Glycine max
  Clone ID: PAT_MRT3847_31628C.1.pep
VSDFNFHEFYYRYKRFYKCKSIDLYKKKCKLMREVLPLMHKYASMYHSSNKGQTAAQLELVSDSYSEGKEINVLTSLSYMQVSFLRTYFPFTLPDAGSTR

SEQ ID NO: 209967 - protein, 189 aa, Glycine max
  unsure (1)..(189): unsure at all Xaa locations
  Clone ID: PAT_MRT3847_31629C.1.pep
QVLLHDLRSRLLAGIELSRGEETWLETEAMXGETVVNEQVEQTLLDYLTPQVEIANNILLPTLGAEVNFELRHGFLQIIESNQFHEADSEDPTYLRLTGTINVQSVPTEYVRLDAFPFSLNGKAWDXLCALPEHKITTWEDCVNKFLEKYFSVVKTDQIQRDIGNLVQEQESLAEAWERFQEFLRSCPR

SEQ ID NO: 209968 - protein, 91 aa, Glycine max
  unsure (1)..(91): unsure at all Xaa locations
  Clone ID: PAT_MRT3847_3162C.1.pep
RVQNWQWLKYGVELNGDGLGVKVNKKLFGRVVKKKMARIXKEVGPEKFXKGMSKEACKIFTRQCPSPMVDDFPPLDAYNYIVVPPPRETSK

SEQ ID NO: 209969 - protein, 120 aa, Glycine max
  Clone ID: PAT_MRT3847_31630C.1.pep
SNHPLYGLLVEAHLDWLKVGDISNLERELKIDQMQATEKQNLGMFSQSELDLFMEAYCLALGKLKEAMVEPQQKSMAFINNMHSQLRELTKATLPAPNAEPAAATTSSTSECKFRRKPTI

SEQ ID NO: 209970 - protein, 74 aa, Glycine max
  unsure (1)..(74): unsure at all Xaa locations
  Clone ID: PAT_MRT3847_31631C.1.pep
LVLLSVPRVACRVLLSLVPLAPRVLVCGLGLLVPLPPSFGWFFLFCFXLXXQTVSREEFKLEIGMLVIQTFNHS

SEQ ID NO: 209971 - protein, 72 aa, Glycine max
  Clone ID: PAT_MRT3847_31632C.1.pep
VLGISKFRGRGWLAQSRFGIEPYRGLANNPPPDSKLNSFGSLQCSSWAEGDKVSQILLVAFSVLGIMAFTLC

SEQ ID NO: 209972 - protein, 38 aa, Glycine max
  Clone ID: PAT_MRT3847_31633C.1.pep
TLPSSNILDLRITIYHMAKSRMRPTRATSSWIKSTAVI

SEQ ID NO: 209973 - protein, 74 aa, Glycine max
  unsure (1)..(74): unsure at all Xaa locations
  Clone ID: PAT_MRT3847_31634C.1.pep
CLSXSSASSSCIIXWEKFKLCMIAXHVSISXLDLLYLAXKVYTRSLSVNKYQPCRYASNIKRFKGHXLIWLLLR

SEQ ID NO: 209974 - protein, 97 aa, Glycine max
  Clone ID: PAT_MRT3847_31635C.1.pep
GSKGGFHGAVALSGTPLCPGSRSPLRSPVRRQRGKDGGLYGSLCLSGGHSIERKFGSLGRSVFKVVFNGNLIKHWIVCRFFCPYCGVQIIPRVNTGF

SEQ ID NO: 209975 - protein, 178 aa, Glycine max
  unsure (1)..(178): unsure at all Xaa locations
  Clone ID: PAT_MRT3847_31636C.1.pep
MASAVLANRNEPNWQRHRGGGAGFMGKTPFSNPNSKLANSKRTQSASDDASSINRRSNDALTHSQYVTFNIASCTKKELNDFKNLLVSELEQIRKLRNQIESSEFQPGQSLNGHPKKPSSKKVSGNKRPWPSNSAKDLKRSHSEAXNLMKCCSQVLQKLMKHKHGWXFNAPVDIRIET

SEQ ID NO: 209976 - protein, 85 aa, Glycine max
  unsure (1)..(85): unsure at all Xaa locations
  Clone ID: PAT_MRT3847_31637C.1.pep
TKDETSSFCQVFAEEDATKKXQEDEEXEKRNTAQKYKEGYYLQLAFTKRLSCLASLGSEPVLALDAGTETWDAESVSYRLWVSGC

SEQ ID NO: 209977 - protein, 109 aa, Glycine max
  Clone ID: PAT_MRT3847_31638C.1.pep
MKLKQLGGLLGGLQQFPQPKAENSFEDVSDKVPADFGCGCGTLGVAAALLSAEHVLGIDIDPESLEISSNNAEELEVDIDFIQSNVMDFGWIGRSVDTVKNEASTLVLG

SEQ ID NO: 209978 - protein, 214 aa, Glycine max
  Clone ID: PAT_MRT3847_31639C.1.pep
MKLKQLEGLLGGLQQFPQPKVELEQYPTGPHIASRMLFTAENSFEDVSDKVVADFGCGCGTLGVAAALLSAEHVLGIDIDPESLEIASNNAEELEVDIDFIQSNVMDLGWRGRIVDTVIMNPPFGTRKKGADLDFLSVALKVASQAVYSLHKTSTRDHVKRTALRDFNASSAEVICELRYDVPKMYKFHKKKEVDIAVDLWRFVPAASHQSRNT

SEQ ID NO: 209979 - protein, 86 aa, Glycine max
  Clone ID: PAT_MRT3847_3163C.1.pep
LNFIMGNGYPKAYLGYKGGFLRFLKGMNKNIIMVSFCMLKTNQETKLNFLNESKYVEELFMKLSEMNPIFLKHLLLFNCETVKFDA

SEQ ID NO: 209980 - protein, 77 aa, Glycine max
  unsure (1)..(77): unsure at all Xaa locations
  Clone ID: PAT_MRT3847_31640C.1.pep
PVDAFLKPYFLEAYRPFKKRNLFFVPGGVKNVKFKGIXTHPGEDWVGAPNTXIFCEGEPLEKKDEKRLDQIWYYYLG

SEQ ID NO: 209981 - protein, 104 aa, Glycine max
  unsure (1)..(104): unsure at all Xaa locations
  Clone ID: PAT_MRT3847_31641C.1.pep
TVTTVNLARASMDAPFTRLKAMAGLPTNRTNGDLTCIAAGCGSVRCIPFWPPDGTNRQXTLIYLPDLADAHLAKEEQYVVRNGWIACTQDRLDLGSEDTEHDRS

SEQ ID NO: 209982 - protein, 439 aa, Glycine max
  unsure (1)..(439): unsure at all Xaa locations
  Clone ID: PAT_MRT3847_31642C.1.pep
MQNRVWMEAVAEGLWGLAEYHEKRGEIGKAVKCLEAICQSDASFFPIVEVKTRLRIATLLLHHSHNVNHAKSHLERSQLLLKSIPSCFELKCRPDGLLSQCYHLVGAIPPQKQVLHKGLELAASVGYEISMQXEFLPSIDRTFKKLVICHIYCNCQLSTMLNKIKDNLCFASALSVISCFIIMEQMFFATSILHVRLMQWDDDNLVEQAVNRCNQIWESIAPDKRRQCPGLLFYNELLHIFYRLRLCDYKNAAPHVDNLDAAMKIDMQQTQRIQELVKELNTLDQSLSRSDLHYRDRTALSKKQTMIQEQLQNMTGLSSIGQESLQPVYFGNVRRIIGDKLQLAPPPIDGEWLPKSAVYALVDLIVVVFGRPKGLFKECAKRIQSGMNIIQDELLKLGITDGVREVDLQHSSIWMAGVYLLLVITTYFNYGIIITYYGM

SEQ ID NO: 209983 - protein, 355 aa, Glycine max
  Clone ID: PAT_MRT3847_31643C.1.pep
MESDVEESMRKRPRKYPFSADSSSRKQFEQYSGRTFAIMGEVNFMQDDDNRLEITRTKFGSLLKRHGDLTERLARDSDKIIFERLQKEFEAARASQTEEICLDGEEWNDGLLATIRERVHMEADRKAMHGDADILACPQDKITYKIGNKVICCLEGARIGVQYETSFAGEPCEFYHCVLESKSFLEKMTVLEHTVPFFLPIREIENDLLSSNAMKLIDHVGDLLQAFVDRREQVRLIKELYGNQIRELYHSLPYHMIEFVLDDSDCKVTVSLRYADLISVLPTRISVLAWPMFNKNTMATLSRKEDGLSGSHSSPIRLTYAEDALRTMSLPEAYAEIVLNLPQALQQTYHQKAPA

SEQ ID NO: 209984 - protein, 144 aa, Glycine max
  Clone ID: PAT_MRT3847_31644C.1.pep
GGPPLEVLCLIVLARERWVSPLFWGLGMALMLQSFGPVLGMNFIFKVPFFFLVGKKALFLGMPEFFVRFSPRVGAFLSSGMRFIHLCQMGFLVLFFRLEIGGAYALLLVFINPPKTYLSLFYVGYYLPMLSLPFSDCAFLAGLL

SEQ ID NO: 209985 - protein, 207 aa, Glycine max
  unsure (1)..(207): unsure at all Xaa locations
  Clone ID: PAT_MRT3847_31645C.1.pep
QESAYNETSFAGEPCEFYHCVLESKSFLEKMTVLEHTVPFFLPIREIENDLHSSNAMKLIDHVGDLLQAFVDRREQVDCPXRLIKELYGNQIRELYHSLPYHMVEFVLDDSDCKRXTRVKLGVLQLSVLQESTCXCKVTVSLRYADLISVLPTRISVLAWPMFNKNTMSRKEDGLSGSHSSPIRLTYAEDALRTMSLPEAYAEIVLN

SEQ ID NO: 209986 - protein, 154 aa, Glycine max
  Clone ID: PAT_MRT3847_31646C.1.pep
MESDVEESLRKRPRKYPFSADSSSRKQFEQYSGRTFAFTGEVNFMQDDDNRLEITRTKFGSLLKRHGDLTERLARDSDKIIFERLQKEFEAARASQTEEICLDGEEWNDGLLATIRERVHMEADRKAMHGDADILACPQDKITYKIGNKVICCW

SEQ ID NO: 209987 - protein, 69 aa, Glycine max
  Clone ID: PAT_MRT3847_31647C.1.pep
ITHLQYNISLFAATKTTASHQQLAQEPRSLGHGSHHSTKSPDMMVIQKQQQQHRHIEKLILIWKLITGK

SEQ ID NO: 209988 - protein, 44 aa, Glycine max
  Clone ID: PAT_MRT3847_31648C.1.pep
FFLNNMCQRKYLTPIIPINRGVCVIIFFKLKCDLLDHIRGRVRL

SEQ ID NO: 209989 - protein, 56 aa, Glycine max
  Clone ID: PAT_MRT3847_31649C.1.pep
KHVKIGGKRRPNNRKKKAPLSKRGGKSVSSVFQVCKKVPLFVGLFSRSQPTCKSVF

SEQ ID NO: 209990 - protein, 77 aa, Glycine max
  unsure (1)..(77): unsure at all Xaa locations
  Clone ID: PAT_MRT3847_3164C.1.pep
LHVLMSVFQKEIPFWFHTTSPFYXETIASRIRESLCFAPNIITVELIMRVEKGTLERSSCALFGQEDEYVTYGRPLA

SEQ ID NO: 209991 - protein, 57 aa, Glycine max
  unsure (1)..(57): unsure at all Xaa locations
  Clone ID: PAT_MRT3847_31650C.1.pep
RGPKGRFLEVGRILRAQLGHGSDVDNINPTXVCFGEDVKALQVSCGFNHTGAILEYA

SEQ ID NO: 209992 - protein, 62 aa, Glycine max
  Clone ID: PAT_MRT3847_31651C.1.pep
RMVHSRMSCSRRMYLRLMHRYMSRSRTSTARESVPYIVSVIPYTSVCPCILAGHTLVFLAIH

SEQ ID NO: 209993 - protein, 59 aa, Glycine max
  Clone ID: PAT_MRT3847_31652C.1.pep
DARLDPCFLIVFFLAYDSYLHYRRDATPWSSTERTNLLMFKGVVMESSWNVIGSLMVMD

SEQ ID NO: 209994 - protein, 81 aa, Glycine max
  Clone ID: PAT_MRT3847_31653C.1.pep
TTWPISKPGCDSGCGDVPIPYPFGMNRSDCYAGKWFEIECRNSTRPYLKSIGLGVEVLSFDVNRGTVDLNNPIYRSNNCGT

SEQ ID NO: 209995 - protein, 56 aa, Glycine max
  Clone ID: PAT_MRT3847_31654C.1.pep
IWKFSQAYTATPLSLSTLSPTLLPATLALPFSLDAGSACSPCSRWFRSICLACTVV

SEQ ID NO: 209996 - protein, 56 aa, Glycine max
  Clone ID: PAT_MRT3847_31655C.1.pep
SFLLLQPNNLSFLHQIPHLSPLFPFLTLMSSIPFTMDYLLQTLPLQSILNPLIFNC

SEQ ID NO: 209997 - protein, 48 aa, Glycine max
  unsure (1)..(48): unsure at all Xaa locations
  Clone ID: PAT_MRT3847_31656C.1.pep
PARSQTXTSHLINPTTRRNPSYTASDPKKRRTKXTNNITSLXTLTTTK

SEQ ID NO: 209998 - protein, 87 aa, Glycine max
  Clone ID: PAT_MRT3847_31657C.1.pep
RPTRTITSNITHSFSFPSPSLHPILVFSYIQAKHPPNHHIHILKTTIHQIPAPTTITTPSPLDPHNIYIPSILHIQKPSSTHNPLLT

SEQ ID NO: 209999 - protein, 55 aa, Glycine max
  Clone ID: PAT_MRT3847_31658C.1.pep
CFYGLIFNLDFKTLLTNILIEQILFYYLFPAIKLRTSIIHLKKKNNFFRYSAYIE

SEQ ID NO: 210000 - protein, 429 aa, Glycine max
  Clone ID: PAT_MRT3847_31659C.1.pep
ARGRIYKGIIPSTGQLVAVKQLDRNGIQSSKEFLAEVAELSLLHHENLVNLIGYCADGDQRLLVYELFASRTLENRLFEKKADESPLNWFERMKIVAAASKGLEYLHETSKPPVIYRDLKASSILVDSDLLAKLCDVGMAKLSGGDKMNNGPPRLMGTYGHCAPEYVKAGQLTLKSDVYSFGVVLLELITGRRAIDTSKPNEEQNLVSWATPLFRDPKRYPEMADPLLNKNFPEKDLNQVVAIASMCLQEEAEARPLISDVVTALGFLSAPPPPPAHAPVPKKSDVAESERESDSEGESESGSDAISRKGSRRSSLDKSQHDYCDSSHLPPVVSSKASRKSSTRSSKGKHSSESGDGVSVSSISSKSSRKSRGDLSQKSSRKSSVEDLSQQKSSKKSSVEDLSQHKSSRKSSSTKDLSQKSAENLPWKT

SEQ ID NO: 210001 - protein, 92 aa, Glycine max
  Clone ID: PAT_MRT3847_3165C.1.pep
PTRPDKSLVKLGFFVVLLVFASVLQCEAKEDSDAEIDLVIPCYGHYECPDCPCINNRCRCDLNMEAEAEEDQKLETLLHAHMFKKNSHDNNN

SEQ ID NO: 210002 - protein, 50 aa, Glycine max
  Clone ID: PAT_MRT3847_31660C.1.pep
GEFTKLGLAEFDEIKSAQRDNNLMQVVETNQMSDGILRCNFLCAFEIISN

SEQ ID NO: 210003 - protein, 108 aa, Glycine max
  Clone ID: PAT_MRT3847_31661C.1.pep
LPRHILGRRLPGWGWVFYLPNYTPVMYKPLDPNRLRLTGTKTKPNGRDVPFPCPRASQGKHLTFWRRHPRSLYGEWMSFQLRHRTPSLSPALLGPNSDKYRPHNDRML

SEQ ID NO: 210004 - protein, 77 aa, Glycine max
  Clone ID: PAT_MRT3847_31662C.1.pep
QIVSVIITVLMSTIRFIMSISVSIIVGHIIDLLMQLHLLLQPLPLAFMHVDMLFGLFNLAQNAHHVAQSPTLSSVLC

SEQ ID NO: 210005 - protein, 155 aa, Glycine max
  unsure (1)..(155): unsure at all Xaa locations
  Clone ID: PAT_MRT3847_31663C.1.pep
MASKRILKELKDLQKDPPTSCSAGPVHEDMFHWQATIMGPPDSPYAGGXVFLVTIHFPPDYPFKPPKVAFRTKVFHPNINSNGSICLDILKEQWSPALTISKVLLSICSLLTDPNPDDPLVPEIAHEQVRVNPRNIHGLSDLVVCLRESLSTLSV

SEQ ID NO: 210006 - protein, 69 aa, Glycine max
  unsure (1)..(69): unsure at all Xaa locations
  Clone ID: PAT_MRT3847_31664C.1.pep
CHSICLDINEDRXEPMRLQFQRLLLSICSLLTDPNPDDPLVPEIAHMYKTDRNKYESTARSWTQKYAMG

SEQ ID NO: 210007 - protein, 160 aa, Glycine max
  Clone ID: PAT_MRT3847_31665C.1.pep
YKTKKKKKKVFAMASKRILKELKDLQKDPPTSCSAGPVAEDMFHWQATIMGPPDSPYAGGVFLVTIHFPPDYPFKPPKVAFRTKVFHPNINSNGSICLDILKEQWSPALTISKVLLSICSLLTDPNPDDPLVPEIAHMYKTDRNKYESTARSWTQKYAMG

SEQ ID NO: 210008 - protein, 152 aa, Glycine max
  Clone ID: PAT_MRT3847_31666C.1.pep
VFAMASKRILKELKDLQKDPPTSCSAGPVVAEDMFHWQATIMGPPDSPYAGGVFLVTIHFPPDYPFKPPKVAFRTKVFHPNINSNGSICLDILKEQWSPALTISKVLLSICSLLTDPNPDDPLVPEIAHMYKTDRNKYESTARSWTQKYAMG

SEQ ID NO: 210009 - protein, 57 aa, Glycine max
  unsure (1)..(57): unsure at all Xaa locations
  Clone ID: PAT_MRT3847_31667C.1.pep
XCLGGSXCGGGCRSVRGXAAGDWPPXPATTMXMNAKXERXPLRSIGGMNRTVVECDS

SEQ ID NO: 210010 - protein, 98 aa, Glycine max
  Clone ID: PAT_MRT3847_31668C.1.pep
ILMIILLAIFIYKSIAKCCTTNGNENIYVSGSVQHIHELVSFMFCMEHNKIQYHEIIHPEANPCILKDDVSTFGSLRPVGEYPIWKEGFTHPGLKNPS

SEQ ID NO: 210011 - protein, 44 aa, Glycine max
  Clone ID: PAT_MRT3847_31669C.1.pep
SFLCSFARNKDMSKGGHVGIHCMQKLCAEYISPDSLHNASNRAI

SEQ ID NO: 210012 - protein, 63 aa, Glycine max
  Clone ID: PAT_MRT3847_3166C.1.pep
IGIEKEHGINKNTERIFMQNKVRTHEKMGGRDLKRAENSPKRKLTQRCWKHIYPLGFEKKTDP

SEQ ID NO: 210013 - protein, 83 aa, Glycine max
  Clone ID: PAT_MRT3847_31670C.1.pep
ICSIALNHTISFPMVNIARSKSALGAVVVINSQVQANVSSSLCKLCMIHFWIHVTLTSQRYHDTLSCPLQCPSISIPRTSHQV

SEQ ID NO: 210014 - protein, 130 aa, Glycine max
  Clone ID: PAT_MRT3847_31671C.1.pep
FNDQPLLILECIIIFCLISIPINQYVISKFRFLFLALGGLLFGYDIGATSGVTISLQSPELSGISWFNLSAIQLGLVVSGSLYGALLGSLVAFARADFLGKCFDYLYYVETKVSLDCFFFLLNLLSYLKH

SEQ ID NO: 210015 - protein, 48 aa, Glycine max
  unsure (1)..(48): unsure at all Xaa locations
  Clone ID: PAT_MRT3847_31672C.1.pep
ALXKSFSPTLXSXPHYYIGXSXXXXXLLFLSSTXSGVPIXPXHSLLTN

SEQ ID NO: 210016 - protein, 100 aa, Glycine max
  Clone ID: PAT_MRT3847_31673C.1.pep
RPFFFFFFFLLFFFFFFLGLVVVFLIIFISFFFVDNQTVLKDQTLGFCETPYPREWPPRRKHAAEHQRKRRGSLWKRKRPQPPMRGGKAFPPSGGGGEYQ

SEQ ID NO: 210017 - protein, 95 aa, Glycine max
  unsure (1)..(95): unsure at all Xaa locations
  Clone ID: PAT_MRT3847_31674C.1.pep
ATXKFXXXXGXXIXEXVXTXSXXXXVXXXXVXQXXXPRXVXLXATXXXXDSXXMLXXXXXXLSXXXATPGXXPXFXLXAXXXDAEXRAYVRXAMR

SEQ ID NO: 210018 - protein, 330 aa, Glycine max
  unsure (1)..(330): unsure at all Xaa locations
  Clone ID: PAT_MRT3847_31675C.1.pep
EITRFTARATREISLFLERAFVRLEAWFHWFKNLRSAKNDGKWKKYRSELSEXEMNAETLSSGLDDYPRASHPSEDEHHLDLRCWMLLAADCMHSIQELLDMESKPGMDYGSTAKLLLDFELLNQMHFDDGYGAYFDFGNHTEKVQLKWKELQDGQNYATRQLLRDVMDMPVLRLVPHIGYVSLFPFMGRIIPSGSRILEKQLELISNRSLLWTNYGLRSLAKTSSLYMKHNTEHDPPYWRGPVWINMNYRILSALHHYSKENGPYQEKAKAIYEELRSNLIRNIVRNYQQTGFLWEQYEQTKGKGKGAHPFTGWTSLVVLIMAEAYGNI

SEQ ID NO: 210019 - protein, 38 aa, Glycine max
  Clone ID: PAT_MRT3847_31676C.1.pep
ILCNNRPILGFNQEHITQAKPQPIPINNYNYKVVTRSP

SEQ ID NO: 210020 - protein, 30 aa, Glycine max
  Clone ID: PAT_MRT3847_31677C.1.pep
TMLRTTFYHFMVSNINLTLYPNYPLHSYYE

SEQ ID NO: 210021 - protein, 172 aa, Glycine max
  Clone ID: PAT_MRT3847_31678C.1.pep
SEFTAMDRSEISLFLERAFVRLEAWFHWFNTTQSGKQMGSYYWHGRDDRTMREVNPKTLSSGLDDYPRASHPSEDERHLDLRCWMLLAADCMHSIQELLDMESKPGMDYGSTVKLLLDFELLNQMHFDDAYGAYFDFGNHTEKVQLKWKELEDGQNYATRQLLRDVMDMPVL

SEQ ID NO: 210022 - protein, 54 aa, Glycine max
  Clone ID: PAT_MRT3847_31679C.1.pep
RDVKDPAPSLTCPIVASKSSAGWYCSPSLNSQFPPRQSPPRLLLSTSISRESNT

SEQ ID NO: 210023 - protein, 68 aa, Glycine max
  Clone ID: PAT_MRT3847_3167C.1.pep
MLIDYDGTLDIIKLLPMLTCQQFMSRMQTNNDTMRSLLMILIMMYLDLQLKRWTMLISTAMIRAVMNM

SEQ ID NO: 210024 - protein, 45 aa, Glycine max
  Clone ID: PAT_MRT3847_31680C.1.pep
PVIALFIPNTSNVIIYFPTHTLNFSFNNYFNMLFNFQIDKHFYFK

SEQ ID NO: 210025 - protein, 75 aa, Glycine max
  unsure (1)..(75): unsure at all Xaa locations
  Clone ID: PAT_MRT3847_31681C.1.pep
MKMGKEKAHIKFVVIVHVDSGKCTTTGHMIYKLGCIDKRGIERFKKEAAEMNKDVFKFAXVLDKLMAKRERRITF

SEQ ID NO: 210026 - protein, 107 aa, Glycine max
  Clone ID: PAT_MRT3847_31682C.1.pep
GDSEKSIEENNVNELRTSNKAEMTSDSVQQSSENCVVHKDGVLPAISIVEDKNIKIGEFQQNALQGHFSNLSCKTFLGSNFDTDSNIECSVMYDETAFFGTFAKSAS

SEQ ID NO: 210027 - protein, 70 aa, Glycine max
  Clone ID: PAT_MRT3847_31683C.1.pep
SLLVRLRNKGSIGIGDLPPIIEIIIKSFYKMLLLLISLPLSSKFLLCSGLLELNLLLQNGIVIQKQIGQS

SEQ ID NO: 210028 - protein, 48 aa, Glycine max
  Clone ID: PAT_MRT3847_31684C.1.pep
QIICQCCIFEFRIKCFTNQINYNSIYIALALISPNTSMIYVLVLTYFL

SEQ ID NO: 210029 - protein, 74 aa, Glycine max
  Clone ID: PAT_MRT3847_31685C.1.pep
LSHKNLFSHFYNTYLLKTHTVLLARKLLLKYKIRRFAAYATQGEWGTSLLHNECGFSAKEKELPNMPCDPRHHR

SEQ ID NO: 210030 - protein, 167 aa, Glycine max
  Clone ID: PAT_MRT3847_31686C.1.pep
MNQTVVTNFEKPIGCYSPSVQELIVIDDVLSSMTGIEGRYILIKAVRGKNDDIAFLVDPSMDLALQELAKRIFPLCKSFLLISQFVESRSQFQSGLVNHAFSAALRALLLDYQAMVSQLEHQFRLGRLSLQGLGFYCQPMMRSMQALSTVIQKASVNNNSGSAGLNL

SEQ ID NO: 210031 - protein, 65 aa, Glycine max
  Clone ID: PAT_MRT3847_31687C.1.pep
LVFGTLAIIIGSLMAYNHVGGDTAHGLFFAILGTLLFIPGFYYTRFAYCAYKGYKDFSFSNIPPV

SEQ ID NO: 210032 - protein, 276 aa, Glycine max
  unsure (1)..(276): unsure at all Xaa locations
  Clone ID: PAT_MRT3847_31688C.1.pep
PRVRYLPSDKAQDARLYILSLQFWLGGSPDNLQNFLKMISGSYVPALKGTKMEYSEPVLYLDSGIWHPLAPCMYDDVKEYLNWYGTRRDANEKLKSPNAPVIGLILQRSHIVTGDDGHYVAVIMELEARGAKVIPIFAGGLDFSGPVERYLIDPITKKPFVNSVVSLTGFALVGGPARQDHPRAVEALMKLDVPYIVALPLVFQTTEEWLNSTLGLHPIQVALQVALPELDGGMEPIVXAGRDPKTGKSHALHKRVEQLCTRAIKWAELKRKTXEE

SEQ ID NO: 210033 - protein, 99 aa, Glycine max
  unsure (1)..(99): unsure at all Xaa locations
  Clone ID: PAT_MRT3847_31689C.1.pep
AIXVEXXPFSLXIPNTXTHHPWAASVSTVGXVNRTLLQPEWGLNXXFXXPXFNLLWKQXEEGYXLXGPQXKDXPLXTFKMLXVRXEXKXXRXPAXXQXQ

SEQ ID NO: 210034 - protein, 56 aa, Glycine max
  Clone ID: PAT_MRT3847_3168C.1.pep
RSFNKLEVPAHSLGEATIAILDILITLNSSRGFRSVRCHWLNMRQTCFQLTIPSYR

SEQ ID NO: 210035 - protein, 79 aa, Glycine max
  unsure (1)..(79): unsure at all Xaa locations
  Clone ID: PAT_MRT3847_31690C.1.pep
GCVFPXLLSLNGVNFGXSVSFKAKSHIFNYFCLDYLGNPSLVHAQSILAIWATQVILMRAVYGYRIACVPLGDVTDPIY

SEQ ID NO: 210036 - protein, 46 aa, Glycine max
  Clone ID: PAT_MRT3847_31691C.1.pep
EKRKHGSKTRSTVAEALEDITALFYDEERNEIYTGNRHGLVHVWSN

SEQ ID NO: 210037 - protein, 67 aa, Glycine max
  unsure (1)..(67): unsure at all Xaa locations
  Clone ID: PAT_MRT3847_31692C.1.pep
APKFIYKRKGDICTNSRRTFSELPWLKYVSXICDXQDCEXSNITSXCLCLLFLXLVVXGMXXFCLYX

SEQ ID NO: 210038 - protein, 59 aa, Glycine max
  Clone ID: PAT_MRT3847_31693C.1.pep
KHTTTPQSDFKPQKINCRSSIITHTDSYLQCHCLSIIYPKFILLAFNLHHHYCENHALT

SEQ ID NO: 210039 - protein, 41 aa, Glycine max
  unsure (1)..(41): unsure at all Xaa locations
  Clone ID: PAT_MRT3847_31694C.1.pep
XHQANDYPMVRXXSGVDAGGKKATFILFLLGALVYPWAFAL

SEQ ID NO: 210040 - protein, 253 aa, Glycine max
  unsure (1)..(253): unsure at all Xaa locations
  Clone ID: PAT_MRT3847_31695C.1.pep
MAKDKPVSVKDAVFKLQMSLLEGIQNEDQLFAAGSLMSRSDYEDIVTERSITNMCGYPLCSNALPSDRPRKGRYRISLKEHKVYDLQETYMFCSSNCLVSSKTFAGSLQAERCSGLDLEKLNNVLSLFENLNLEPVETLQKNGDLGLSDLKIQEKTERSSGEVSLEQWAGPSNAIEGYVPKPRNRDSKGLRKNVKKGSKTGHGKSISDINLINSEMGFVSTIIMQDEYSVSKVPXGQMGCTANHQIKPTATVK

SEQ ID NO: 210041 - protein, 50 aa, Glycine max
  unsure (1)..(50): unsure at all Xaa locations
  Clone ID: PAT_MRT3847_31696C.1.pep
MGKRSLEGGXXDQPERXTPALAXXIVETLKXDSLXKXXSSLEPXLRRVVV

SEQ ID NO: 210042 - protein, 59 aa, Glycine max
  Clone ID: PAT_MRT3847_31697C.1.pep
DKKIMIGINGFARIGRLVARVALLMNDVELVVVNDPFITTDYMTYTFKYHTRHWARKYL

SEQ ID NO: 210043 - protein, 139 aa, Glycine max
  unsure (1)..(139): unsure at all Xaa locations
  Clone ID: PAT_MRT3847_31698C.1.pep
MASSVMASVALKPAPFTVEKSSVRGLPSLSRNSSSFRVVASGGKKIKTDKPYGINGGMALKERVDASGKKGKGKGIYHFIDKYGTNVDSYSPIYNTKDXSPTNNIYTNNTTNLTIXTITLLNLLTTNTLLIYNTNAVAQ

SEQ ID NO: 210044 - protein, 78 aa, Glycine max
  Clone ID: PAT_MRT3847_31699C.1.pep
TRPATSKSPPWHLLKPLLLFQSLLLLVFSLHQNALPPLTFLIGILLQLDHHSSLVPHSEHYYRPLLPFSIVLSTSVGS

SEQ ID NO: 210045 - protein, 46 aa, Glycine max
  Clone ID: PAT_MRT3847_3169C.1.pep
WVSSNPILNKTLIITLSQVIICPQYSVSITLPTGILKLHSLLTHTL

SEQ ID NO: 210046 - protein, 208 aa, Glycine max
  unsure (1)..(208): unsure at all Xaa locations
  Clone ID: PAT_MRT3847_316C.1.pep
MASGTVKPSSRYRSYDSRSSTSSHFSDPSSSHEFNNLKTKTSSSSSRALVKAKPSNTAKVDPTFTTMVKKFMDRKPKSSSSAAATATRLIIPSDFLAKDLKKDAKKVAGFSALQKKLFGKGASEKKEKVKALTEVKNNTRTLAMVLKSERELLSINKEQEQQVSQLKQMLEDKNKEXEKLKDLCLKQREEIKSLKSAILFPDVMNSQL

SEQ ID NO: 210047 - protein, 107 aa, Glycine max
  unsure (1)..(107): unsure at all Xaa locations
  Clone ID: PAT_MRT3847_31700C.1.pep
MADTFCSDCQRQTEVALDHSAGDTVCSEGGLPEESDCVDETYEWRTFANESGDXDPERGGGPTNPLLTGGGLSTVIDSPEVALARRRGPATVDDSDVHLLKASLPMT

SEQ ID NO: 210048 - protein, 129 aa, Glycine max
  unsure (1)..(129): unsure at all Xaa locations
  Clone ID: PAT_MRT3847_31701C.1.pep
DERVRPGHDDVYLLRHNSPINRVAPKKTRGSQKPLSEVTSIFEMNELLLQNRTLFHSERPLRSXIVDQELLXARSEIENAPIVNDDVNLYAALFRNSSKFARSYXLMERTLKVCGYREGDEAIMHSPIL

SEQ ID NO: 210049 - protein, 123 aa, Glycine max
  Clone ID: PAT_MRT3847_31702C.1.pep
MAVTEETGGATVIDETYEFSAPRFFDFVKGESDEESRKAELWFDSALSYAPSPFMPKIKTGRSITVDTLCDFSEADKMQKMFVSVDNNVLETNIQQQSMTTKTKEDEADKVQKTSANVIWKPI

SEQ ID NO: 210050 - protein, 110 aa, Glycine max
  unsure (1)..(110): unsure at all Xaa locations
  Clone ID: PAT_MRT3847_31703C.1.pep
FPHQGPDVWEWTANPTGQYTANNAYKVLMEGAAAVTQEDCFAKLWSIKVPSKIAIFAWRLIRDRLRVKIXRHKLQRRQVQVADTSCPLCRVEEENAGHLFFHCSKIQPLW

SEQ ID NO: 210051 - protein, 59 aa, Glycine max
  Clone ID: PAT_MRT3847_31704C.1.pep
MRSTIFFALCLLCAFSTSYGVSAIADFVLDSEDNPLESGRRYYIVSDIAAFGGVRAAPA

SEQ ID NO: 210052 - protein, 59 aa, Glycine max
  Clone ID: PAT_MRT3847_31705C.1.pep
NSTLSFFYKSNVFFLCLFIHLIIFFIVFCSLIKILSYDLLYPLSFFFRRAVPTFLYCQI

SEQ ID NO: 210053 - protein, 56 aa, Glycine max
  Clone ID: PAT_MRT3847_31706C.1.pep
LSVSLSLSLSHTLSLSHTLCRTTGVARVPPRRQRERRKKTSFAHYSNALRSTVCNQ

SEQ ID NO: 210054 - protein, 84 aa, Glycine max
  unsure (1)..(84): unsure at all Xaa locations
  Clone ID: PAT_MRT3847_31707C.1.pep
XXXTGGXXXGCXWXXXGXXWXXXXNXXXAXXVXXEGNRXAXXXXXGGSXXWXXXXXSGXRGVXXXXXXXXXXVEXAXXXXXARX

SEQ ID NO: 210055 - protein, 235 aa, Glycine max
  unsure (1)..(235): unsure at all Xaa locations
  Clone ID: PAT_MRT3847_31708C.1.pep
KILWESAMSMNSMYPDGWFALSAAALKARDIGKALDAFTRAVQLDPENGEAWNNIACLHMIKKKSKEAFIAFKEALKFXRNSWQLWENYSHVAVDTGNISQALEGVQMILDMSNNKRVDCELLERITREVEKKLSTSNVPQLVTDDNKPKTDQLCIVDSGSKYQEQVSGVSIAGRSRETEQLLLLLGKVLQQIIKSGSGCGPEIWGLYAKWHRINGDLMMCSEALLNEXMTLQGS

SEQ ID NO: 210056 - protein, 155 aa, Glycine max
  unsure (1)..(155): unsure at all Xaa locations
  Clone ID: PAT_MRT3847_31709C.1.pep
LGIRLEGIVDMSWDDHLTEENLFYTVPPTAMEAYRKSIESHFLQYEKTGSSIQEEVETSMYDAAAEFGHEEVAYDEDEGENSTYYLPGVYEGSRSSKSFQKKHKNRIKSYTHKSSEIGIDLPYGRYSTGAQPSVLFGRRPASLNVGSXSTKRMRT

SEQ ID NO: 210057 - protein, 78 aa, Glycine max
  Clone ID: PAT_MRT3847_3170C.1.pep
AAYFKHIVYFNHRYLFIGSGEPKPTTPDLLLIFNYNLLAAGNTMREEFYTVQVLGVTKVFVPAANACECHVNYKPRNS

SEQ ID NO: 210058 - protein, 150 aa, Glycine max
  Clone ID: PAT_MRT3847_31710C.1.pep
MDNTEAEEQLASEMLLNQKLEELDEAYQTKISHVYDYANFTLPKDFFKCGYECFDGSKRQEEVINCVNNCADRLTKVQKALNNEINMFEQKMGKSVLVCQLKHDEAKLQQKAGAGPDLVSCLDQAIQENIKFLPDINKLKAAFGISDDSS

SEQ ID NO: 210059 - protein, 97 aa, Glycine max
  unsure (1)..(97): unsure at all Xaa locations
  Clone ID: PAT_MRT3847_31711C.1.pep
KPRVILGHLEQWLLLNESKEDVGHKGDDALXQGFEVMSXCLVETQEQREAGTTTAEGADQTTAIAAKISYSDTVVGTYEPWWAIATGKIAXPAQAQE

SEQ ID NO: 210060 - protein, 42 aa, Glycine max
  Clone ID: PAT_MRT3847_31712C.1.pep
ETPRRAHRMPVYIGGGAQAKNAMLKNLPSAVLQMRRYVLRDQ

SEQ ID NO: 210061 - protein, 528 aa, Glycine max
  Clone ID: PAT_MRT3847_31713C.1.pep
MPEPESQNGHEQDPEPQPETEPVPTEQTQPQLEPKSKSTPEPEPNPQPESEPVPTEQTQAQLEPKSGSEADPAVNDADLRETTIHSNETYANPSPTPQLRKDEGSRTFTMRESLNGLKNDSEPEREDGNSPYSPEQQQQQADQNNAAMDLINSVVGVDEEGRSRQRILTFAARRYATAIERNPEDYDALYNWALVLQESADNVSPDSTSPSKDALLEEACKKYDEATRLCPTLHDAFYNWAIAISDRAKMRGRTKEAEELWKLATRNYEKAVQLNWNSPQALNNWGLALQELSGIVPAREKQKIVRTAISKFRAAIQLQFDFHRAIYNLGTVLYGLAEDTLRTGGSVSAQEVSPNELYSQSAIYIAAAHALKPNYSVYSSALRLVRSMLPLPHLKVGYLTAPPVGASIAPHNDWKRSEFLLDHEKLQQIPRGEYKQVPPQNLSGRLVDAVSGDKKTIKVDIADIISVSACADLTLPPGAGLCIDTSYGSVYLVADSWESLDGWLDALRLVYTIYVRGKSDVLAGIITG

SEQ ID NO: 210062 - protein, 53 aa, Glycine max
  Clone ID: PAT_MRT3847_31714C.1.pep
KHSSLLNVILGNMFIMIRFCQVLFFLYRQKKILIKIKRHNKHKKKDKQIQTIT

SEQ ID NO: 210063 - protein, 92 aa, Glycine max
  Clone ID: PAT_MRT3847_31715C.1.pep
LIKGSHFHSTICRSRSLTCSGWVYFAPSPHRERRQTTTTCSTWMAIRFRPVSYTTFCQHHHCSVSQLNDHHSGTTFTQSLFCTLSLQALSCY

SEQ ID NO: 210064 - protein, 66 aa, Glycine max
  Clone ID: PAT_MRT3847_31716C.1.pep
SCKKGFRQTSWIQVIVCCDMIPVVQHRQRSVIDVASDGGEVTLGNTAVSVQAWCLGTVIERARYRG

SEQ ID NO: 210065 - protein, 101 aa, Glycine max
  unsure (1)..(101): unsure at all Xaa locations
  Clone ID: PAT_MRT3847_31717C.1.pep
RHPIKXVILLPCATWXXPEAVAXRAXGXSRPFKXXXXRFLXIKXFQXXXXXXGXHEXXLXAVXFTXXDXVFXIXXFXXSXXXTXSXKRXRAEFRAYXXXXX

SEQ ID NO: 210066 - protein, 116 aa, Glycine max
  unsure (1)..(116): unsure at all Xaa locations
  Clone ID: PAT_MRT3847_31718C.1.pep
MGVKASQTGFVVLVLLQCCSAYKLVCYYTSWSQYREGDGSCFPDALDRFLCTHIIYSFANISNDHIDTWEWNDVTLYGMLNTLKNRXNPNLKTLLSVGRWNFGSQRFSKIAFNTQS

SEQ ID NO: 210067 - protein, 79 aa, Glycine max
  Clone ID: PAT_MRT3847_31719C.1.pep
KPLIWNLIIDLYGRYNDLSNAFFTRDQMLSFVVCPNVFTYNALILAQVKRGNFHGACSLKEEMILKCLFPDVVTYNLLI

SEQ ID NO: 210068 - protein, 70 aa, Glycine max
  Clone ID: PAT_MRT3847_3171C.1.pep
HAAPTSHLYCLVLQPSNPTAHLHVFSWHVVVFRLKKRDLPPPRLLFVNISKQLAEHYTLISVKSYHIQAP

SEQ ID NO: 210069 - protein, 149 aa, Glycine max
  unsure (1)..(149): unsure at all Xaa locations
  Clone ID: PAT_MRT3847_31720C.1.pep
HPPLQFDYTXXMCHGXLWTPFRGTKLYKVKYGSKVQIVLQDTSIVTTEEHPMHVHGFHFFVVGSGFGNFNPATDPLKFNLVDPPVRNTIGTPPGGWVAIRFVADNPGIWFVHCHIDSHLNWGLGMALLVENGVGLSQSVLPPPPDLPQC

SEQ ID NO: 210070 - protein, 105 aa, Glycine max
  Clone ID: PAT_MRT3847_31721C.1.pep
KVSLKKGAMQKKRLPSLWVPPDCFFFWKKGGVYPFFSGGVFPSKGAKLKICLWHLSRLVYLSQSLKFFFARGLTPFLTNKFPPQGPRGSILFLDFKTMDPYGGLP

SEQ ID NO: 210071 - protein, 93 aa, Glycine max
  Clone ID: PAT_MRT3847_31722C.1.pep
RFHTFVSPLHSLAGGERCMNNACHPARSIRFWFSCDLFKTWLRLQVLPFGACWSRHLYTSHRALLTACFGSSCSIVLVDSSFPCVRYVVCARV

SEQ ID NO: 210072 - protein, 75 aa, Glycine max
  Clone ID: PAT_MRT3847_31723C.1.pep
PQIIFLYPPPIGSAPPFKESTCLFFFCVRGDQKVVAHYSPPVIITYVKVVFRCVFALSNFVVKMPWRLSPSFFFF

SEQ ID NO: 210073 - protein, 40 aa, Glycine max
  Clone ID: PAT_MRT3847_31724C.1.pep
MGIVQQHIQWLYQLWLLALMLLYHLCLPLVEPFCRLLAAV

SEQ ID NO: 210074 - protein, 941 aa, Glycine max
  unsure (1)..(941): unsure at all Xaa locations
  Clone ID: PAT_MRT3847_31725C.1.pep
GIIPFASLPQFSNARSANVDYNALRIPDDLRYKRFDGMPLRCTSMSVTDKTVCEKHYIQAKKRAPNSGMRANIHKAKRKSQSLWLKXSDYVYMESKGDVFYVTLSSIGLTQKKLSKNQFRYEPERDAPRRGSSARRSSNLNDDDDDDDDDDVDGDADADVALYEEENWVSCDSPPDSSRKRSRRSLEANATTEYSDGTSAGSSDEDTGGQTCHQCRRNDRDRVTWCQRCDRRGYCDSCLSTWYSDISLDEIQRICPACRGICNCKTCLRSDNSIKVRIREIPVLDKLQYLHVLLSSVLPVVKQIHCEQSFEVELEKKLRGAEIDLPRIKLNSDEQMCCNFCRIPITDYHRRCPSCSYDLCLSCCRDLREATADHNKEPQTEQAKTSDRNILSKFPHWRSNDNGSIPCPPKECGGCGYSSLNLSRIFKMNWVAKLVKNVEEMVSGCRISNADGPPETGLNDLKLCQYSHREASDDNYLYCPASDDIKTDGIDNFRKHWKTGEPIIVKQVFDGSSISSWDPMVIWRGILETIDEKAKDENRMVKAIDCLDGSEIDIELAQFMKGYFEGLILENGWPQLLKLKDWPSPSASEEFLLYQRPEFISKLPLLQYIHSKWGLLNVAAKLPHYSLQNDVGPKIYISYGISDELGRGDSVTNLHFNMRDMVYLLVHTNEVKLKDWQRTKIEMMQKAKANKEFEAKESHGDPQISSRGSSPDSSLGTKSSGLEIDSNQNKSIMDQGFEIYSSAEGNTANCKLPFNQNGDVSEKTHPGVLWDVFRRQDVPILTKYLKIHWKEFGKSDDLGNEFVEWPLYDGAIFLDKHHKRKLKEEFGVEPWSFEQNLGEAIFVPAGCPFQARNVQSNVQLGLDFLSPESVGDAVRLAEEIRCVPNEHEAKLQVLEVGKISLYAASSAIKEVQKLVLDPKYANFRLVLAIALTWRPDRLWRS

SEQ ID NO: 210075 - protein, 84 aa, Glycine max
  Clone ID: PAT_MRT3847_31726C.1.pep
QACGRCLRVTNTRTKASGNGESCRSVHKRGLAVTKFSIARAGLVPTSYITCSTQSQKEFNKESHTSASLLNDNKINKAMLFGCS

SEQ ID NO: 210076 - protein, 53 aa, Glycine max
  Clone ID: PAT_MRT3847_31727C.1.pep
CETNAQRSLVLKSYGFFLLTNTYLIRFHIISAITKNLWKLNPNLPTLLNMGWG

SEQ ID NO: 210077 - protein, 64 aa, Glycine max
  Clone ID: PAT_MRT3847_31728C.1.pep
YFFFLLNLANLSNQDMYSCFPFYFHILMDGDEFFINSSIQFFSCFNSVYITNTLVSCIFFYHLT

SEQ ID NO: 210078 - protein, 57 aa, Glycine max
  Clone ID: PAT_MRT3847_31729C.1.pep
ASYPIIPVKCSLSLAVIMVNDSLLMTSITFLSSDPKLLSVHHNKLLSSCDRMRLSDK

SEQ ID NO: 210079 - protein, 55 aa, Glycine max
  Clone ID: PAT_MRT3847_3172C.1.pep
RFFFQQLISGVSYCHSMDICPRDTELAHTLIDGNPAPRLKICDFGFSKVNNISPE

SEQ ID NO: 210080 - protein, 120 aa, Glycine max
  Clone ID: PAT_MRT3847_31730C.1.pep
KGKFFVLATLMDLERRPLKLHFIPYLAAGHVIPLCLRRPSCDSHHHSSAQSVANPALPCSSSPLNKWASLKSCLLSITLPTPPCCSGLRVPIRPFTPGATPTSLHHRRLMLKFSCLKCKK

SEQ ID NO: 210081 - protein, 618 aa, Glycine max
  Clone ID: PAT_MRT3847_31731C.1.pep
MMMMFDEMGLCNNLDMISAPLGEEDITTRQTDPEVIVEDDFTDEEIGVDELEQRMWKDKMRLKRLKEQSKSKEGIDAVKQRQSQEQARRKKMSRAQDGILKYMLKMMEVCKAQGFVYGIIPEKGKPVTGASDNLREWWKDKVRFDRNGPAAIAKYQADNTIPGRNDGCNSIGPTPHTLQELQDTTLGSLLSALMQHCDPPQRRFPLEKGVPPPWWPTGNEEWWPQIGLSKDQNSPPYKKPHDLKKAWKVGVLTAVIKHMSPDIAKIRKLVRQSKCLQDKMTAKESATWLAIINQEEALARELYPDYIPPLASAGGSGSLVINDSNEYDVEGGEDEPNFDVEDCKHENLHTSNLGMERVRVTLPVQQPSFSIKGETVTNLDFIRKRKVSNDFNMMDLKIYTCEHPQCPYSQVRLGFPDRISRDNHQLICAYRGTSDFGGPSFPVNEIKPVVHPPSFVQPKSTAQPGSMVPPVIDLTGLEVSDNGQKMITDLMTNYDTNVRGNKKTSSCNHLAAENFDLPQHAMQQQQDNFIRGQGITAEGNIFDEANMPNNHHMFAREEGQFDRFKALNAPFETNHNNNNFHSMFGSLCDLASFDFKEDMQGVGMDTLQKQPDISIWYQ

SEQ ID NO: 210082 - protein, 71 aa, Glycine max
  Clone ID: PAT_MRT3847_31732C.1.pep
KNGFKPPLGDLPPFGVDYKLGPQFLLTKKGPLRGGTGCGPIFLAGRSYFLTPFWGGLFLLPQKKNYGRVCL

SEQ ID NO: 210083 - protein, 244 aa, Glycine max
  unsure (1)..(244): unsure at all Xaa locations
  Clone ID: PAT_MRT3847_31733C.1.pep
MSHRLQLQGIFVTSFRQRHFSFFSPYTSTTTRVSFSSSSCGKNLQMEEVKVASDLLVGDPASLEKKIDAIRLGGPQKLQVIADFDATLTKFWVNGTRGQTSHGLLQQGNPEYDAKRQQLYEYYHPLEFSPTIGLEEKTKLMEEWWGKTHGLLVEGGLTYDSIRQSVANANIAFREGVSELFEFLAXYCQERDAPVLIFSAGLADIIEEVLMQILHTSFKNVRIGSNKMVFDDDRRLVTFKVNVV

SEQ ID NO: 210084 - protein, 84 aa, Glycine max
  unsure (1)..(84): unsure at all Xaa locations
  Clone ID: PAT_MRT3847_31734C.1.pep
KXXTXXYLPTNRXMAHANEMVKXVIXIGELXELRLSQRRXXRFLXIXQSKGRXLXSSVHLNWPNSLQXXRIHANARAXMRXFQF

SEQ ID NO: 210085 - protein, 419 aa, Glycine max
  Clone ID: PAT_MRT3847_31735C.1.pep
PRKSKSETPGVRCVVLCSAPLGLGWAGLGWAGHGYDCSAVVVPLGLLFFASGLIVNLIQAICYVVVRPVSKNLYRRMNRVVAELLWLELVWIIDWWAGVKVQVFTDPETFHSMGKEHALVISNHRSDIDWLVGWVLAQRSGCLGSTLAVMKKSSKFLPVIGWSMWFSEYLFLERSWAKDERTLKSGLQQLRDFPLPFWLALFVEGTRFTQAKLLAAQEYAASAGLPVPRNVLIPRTKGFVSAVNHMRSFVPAIYDVTVAIPKSSPAPTMLRLFKGQPSVVHVHIKRHLMKELPDTDEAVAQWCRDIFVAKDALLDKHMAEDTFSDQELQDTGRPIKSLLVVISWACVVVAGVVKFLQWSSLLSSWKGVAFSAFGLGVVTLLMHILIMFSQSERSTPSKVAPTKKSKNSEQLEARDNKQD

SEQ ID NO: 210086 - protein, 36 aa, Glycine max
  Clone ID: PAT_MRT3847_31736C.1.pep
MSSTSRAWTWSVAASVGVVEALKDQGICRWNSVMRS

SEQ ID NO: 210087 - protein, 159 aa, Glycine max
  unsure (1)..(159): unsure at all Xaa locations
  Clone ID: PAT_MRT3847_31737C.1.pep
QVHSTPLEDSGLHIDRWLIVEHFGRMSYIAHIVNQTHEKYSLXGSCSLDIKSRSTLEKVSSTKAHFVSGKTFKYDIIGAGSHSSXDFPEMEHHDKPIMICSLLRHRIDPQYNEVQAHMETNLLKLSLDDVETPISSMLDLKISQSKLHLPRTXGGTILR

SEQ ID NO: 210088 - protein, 74 aa, Glycine max
  unsure (1)..(74): unsure at all Xaa locations
  Clone ID: PAT_MRT3847_31738C.1.pep
FAHNLARDRGCKVVATXVSSQEPLRCDIPHWKMLSCEEDLWCLKRLGEDYSDGSLGDWTKSPPGFSIFVDPREV

SEQ ID NO: 210089 - protein, 72 aa, Glycine max
  Clone ID: PAT_MRT3847_31739C.1.pep
LIVWFTPTYPGYYYAYIFNDQELQLSLRQANHTRCTDMTYDRLYIMILVIVQVSLLIGLVKNNQRGSLGLFH

SEQ ID NO: 210090 - protein, 35 aa, Glycine max
  Clone ID: PAT_MRT3847_3173C.1.pep
LTSKDNLNRILRFCHQSKDKTLSCISINNTITAVQ

SEQ ID NO: 210091 - protein, 68 aa, Glycine max
  Clone ID: PAT_MRT3847_31740C.1.pep
FDRHSVRIGVGAPGCLALRCGPPRSVLLTPCRRGLQLGGLGFEDVLLSQGRMSCGHHLHFTSSALLLS
